United States Patent Application Publication US 2025/0084491 A1 - sequence listing, part 34

SEQ ID NO: 647518 - DNA, 75 bp, synthetic construct
  source 1..75: mol_type = other DNA
aaggcaaatgttcagacattaatacgacgtgcactgaattattgcaaaatcggctggagaatgacggttacacag

SEQ ID NO: 647519 - DNA, 75 bp, synthetic construct
  source 1..75: mol_type = other DNA
aagacaaatgttcagacattaatacaacgtgcactgaattattgcaaaatcgactggagagtgacggttacacag

SEQ ID NO: 647520 - DNA, 75 bp, synthetic construct
  source 1..75: mol_type = other DNA
cgacccggacacataaagcccggcgtgaaaatcgatctgctgatcaactcagtaaatatggcgcggtttccctgc

SEQ ID NO: 647521 - DNA, 75 bp, synthetic construct
  source 1..75: mol_type = other DNA
ccgtgtcttagaggctaaacctgcttctattccttctcaatatgataatttaatattttcatctaatcgtgtatc

SEQ ID NO: 647522 - DNA, 75 bp, synthetic construct
  source 1..75: mol_type = other DNA
atgtccgcacaagctcacgtcagagaaagctcatctggttcattcatctcctggcagttccttgtctggcaggtg

SEQ ID NO: 647523 - DNA, 75 bp, synthetic construct
  source 1..75: mol_type = other DNA
actatagatcatgcgacttcccgtgattgtaagctctcttctgaaggagtttatatacaaaaggaatataaaagt

SEQ ID NO: 647524 - DNA, 75 bp, synthetic construct
  source 1..75: mol_type = other DNA
gctaaccccggcgttgatccttacgtaccgcgcgcgggtagcgtgttaacgatcccgttgcaaaccctacttcca

SEQ ID NO: 647525 - DNA, 75 bp, synthetic construct
  source 1..75: mol_type = other DNA
ctgctgtgggggccgcggagccgctgcgtcggatgcttcgtcaactggcgtaatctttattcattaaatctgggg

SEQ ID NO: 647526 - DNA, 75 bp, synthetic construct
  source 1..75: mol_type = other DNA
actgtactgtcagcctgatgttgatgtcgttgggcggtttattcgctaataatcttgttgattgggtttccgttg

SEQ ID NO: 647527 - DNA, 75 bp, synthetic construct
  source 1..75: mol_type = other DNA
ggcgcggtatggtcggctccgttctcatgcaacgcatggttgaagagtgcgacttcgacgccattcgccctgtct

SEQ ID NO: 647528 - DNA, 75 bp, synthetic construct
  source 1..75: mol_type = other DNA
atggcccgcactaaaaaggcaaaagctgacgacaaaaagccagccgcaaaaagggtgggccgtccgcatggttat

SEQ ID NO: 647529 - DNA, 75 bp, synthetic construct
  source 1..75: mol_type = other DNA
gtcgacgctggcgtggtatcaggcaatcccggacagcccaactgctgaacgggattgtgatgcggctctggatgc

SEQ ID NO: 647530 - DNA, 75 bp, synthetic construct
  source 1..75: mol_type = other DNA
ttaatgagcgtgaccatgctgagtctgctttagctgatatgtactttgcagcaaccggggataggcctgagtgga

SEQ ID NO: 647531 - DNA, 75 bp, synthetic construct
  source 1..75: mol_type = other DNA
gccgagaacggcgctaagggtgcgctatccggtgaattttcagaaactacgtttatcagctgcccggaatgcttt

SEQ ID NO: 647532 - DNA, 75 bp, synthetic construct
  source 1..75: mol_type = other DNA
tggacatttcaggtcggggatcttgaaaacgtcaatatcactcattgggcagtaatgccgaaagcaccggaggct

SEQ ID NO: 647533 - DNA, 75 bp, synthetic construct
  source 1..75: mol_type = other DNA
tgcgtgaaaaggcagagaaagcaacgtgtggggtgtggtcgctcgaatatggagagagccgatttgattgtgatg

SEQ ID NO: 647534 - DNA, 75 bp, synthetic construct
  source 1..75: mol_type = other DNA
ctttggcgtgccgctggcgggtagcctgattccgtggatcgacaaacagcttgataacggtcagagccgcgaaga

SEQ ID NO: 647535 - DNA, 75 bp, synthetic construct
  source 1..75: mol_type = other DNA
catgcaacgcatggttgaagagcgcgacttcgacgccattcgccctgtcttcttttctacttctcagcttggtca

SEQ ID NO: 647536 - DNA, 75 bp, synthetic construct
  source 1..75: mol_type = other DNA
cccgtcctctgctattctcgatatcgaacgcaaagtcacaaccttaacccgtagcggtgagctgccggtggataa

SEQ ID NO: 647537 - DNA, 75 bp, synthetic construct
  source 1..75: mol_type = other DNA
aaaggtgggccgtccgcatggttataccgaagaaaaggcattagagatctgtgagctggttgcggacggtcagag

SEQ ID NO: 647538 - DNA, 75 bp, synthetic construct
  source 1..75: mol_type = other DNA
ggctaacgttttttacgttcgccgctgccgtggcgctggcgctaccggcaaaagccaacacctggccgctgccgc

SEQ ID NO: 647539 - DNA, 75 bp, synthetic construct
  source 1..75: mol_type = other DNA
atacggtggatgatgatttcgcgcaggcggtgttggatcttcatgccaggtggacaaagagaactacggaaagat

SEQ ID NO: 647540 - DNA, 75 bp, synthetic construct
  source 1..75: mol_type = other DNA
gtatttctcagtatgaaagtggaatacaccgcccgacattcgaaatgatgtgtgcattcgctaaagtacttaacg

SEQ ID NO: 647541 - DNA, 75 bp, synthetic construct
  source 1..75: mol_type = other DNA
gttccggctggaccggataacccaatgggccatcatgcgattcgtctggcggcctatggcggcgtttatttgctt

SEQ ID NO: 647542 - DNA, 75 bp, synthetic construct
  source 1..75: mol_type = other DNA
atgatcaaaacgcgtttttctcgctggctaacgtttttacgttcgccgctgccgtggcgctggcgctaccggcaa

SEQ ID NO: 647543 - DNA, 75 bp, synthetic construct
  source 1..75: mol_type = other DNA
ggaagtgatgcagcatgcgatggatgtacgctccgggatgccggtggacgtgcgtcgtcatcatcaagtgaacca

SEQ ID NO: 647544 - DNA, 75 bp, synthetic construct
  source 1..75: mol_type = other DNA
gcaggccaatgctgaattcatcgccgcagccaatccagctaccgtgctggcgctgctggatgagctggaagccaa

SEQ ID NO: 647545 - DNA, 75 bp, synthetic construct
  source 1..75: mol_type = other DNA
tgtgtgagatagcaaaacaggcaacacaaagcgaatgggtcgcatttatttcgccgggtactggtacgtatgcgg

SEQ ID NO: 647546 - DNA, 75 bp, synthetic construct
  source 1..75: mol_type = other DNA
cgaagagcaactcattaacgagcgtgaccatgctgagtctgctttagatgatatgtactttgcagcaaccggtaa

SEQ ID NO: 647547 - DNA, 75 bp, synthetic construct
  source 1..75: mol_type = other DNA
atgtcgacacatttcgtggcacccgtgaaggcgtgccgcgtctgctggagactttaaaccgtcataacgtgcgag

SEQ ID NO: 647548 - DNA, 75 bp, synthetic construct
  source 1..75: mol_type = other DNA
tcgaagcaaaagaagcgttccatttgcgctacaacagcgattgtcgtggggcgatgccgtttcgtccattgctcg

SEQ ID NO: 647549 - DNA, 75 bp, synthetic construct
  source 1..75: mol_type = other DNA
tttgtccgttaagtgatctgttaccgacatcccctgacgctttgccgcttgggcaaattgttcgtggaagtatcc

SEQ ID NO: 647550 - DNA, 75 bp, synthetic construct
  source 1..75: mol_type = other DNA
atgacgattgcagaacgtcttgttcaaaaaggcgctcttgaagtggcgcgggaaatagcctgccggcttcgggat

SEQ ID NO: 647551 - DNA, 75 bp, synthetic construct
  source 1..75: mol_type = other DNA
ccaggcagtgaaaaactttgtcgtagcgaatatcactggctctgattgtcggcaactaattcatgttgaaaatgg

SEQ ID NO: 647552 - DNA, 75 bp, synthetic construct
  source 1..75: mol_type = other DNA
taacattgagatgaagcgtgcctcgcttgagctacacaataaaccgcaacacctttttatgcgtaatatcaatgt

SEQ ID NO: 647553 - DNA, 75 bp, synthetic construct
  source 1..75: mol_type = other DNA
cttacgataataattacccggaagatcaggcagtgaaaaactttgtcgtggcgaatatcacgggatcggattgtc

SEQ ID NO: 647554 - DNA, 75 bp, synthetic construct
  source 1..75: mol_type = other DNA
cgcggtatccaaatctctgccgggaatgccgtctcctttgtggcactgactaacattgagatgaagcgtgcgtcg

SEQ ID NO: 647555 - DNA, 75 bp, synthetic construct
  source 1..75: mol_type = other DNA
agggcaaagctccgtcgatatcgacaggattaatcaccatattgttaatgtggaaaagattaactttagattgcc

SEQ ID NO: 647556 - DNA, 75 bp, synthetic construct
  source 1..75: mol_type = other DNA
cgataataattacccagaagatcaggcagtgaaaaactttgtcgtggcgaatatcacgggatcggattgtcggca

SEQ ID NO: 647557 - DNA, 75 bp, synthetic construct
  source 1..75: mol_type = other DNA
agtctgagtggcagaacacagctcagtaaaggcgccagcatggtactgaatggtgatgtggtcagtaccggcgat

SEQ ID NO: 647558 - DNA, 75 bp, synthetic construct
  source 1..75: mol_type = other DNA
cggtaaatgaagcggcttcttttgagcaaggacaaaatgttactgcttactttaacgccgacagcgtgattatcg

SEQ ID NO: 647559 - DNA, 75 bp, synthetic construct
  source 1..75: mol_type = other DNA
cgcgcgtctgggtctggatgaaggcaaagaagtattgatactgctgaaagcgccgtgggtaggtattactcagga

SEQ ID NO: 647560 - DNA, 75 bp, synthetic construct
  source 1..75: mol_type = other DNA
atggggtaattaaaggcaaatatctctcgataccgcaaaatttccgagtgaataatattcaactggataacaccc

SEQ ID NO: 647561 - DNA, 75 bp, synthetic construct
  source 1..75: mol_type = other DNA
aaatatctctcgataccgcaaaatttccgagtgaataatattcagctggataacacccatcttgcttataaattg

SEQ ID NO: 647562 - DNA, 75 bp, synthetic construct
  source 1..75: mol_type = other DNA
tactaacggcaaaatcaactggggcatcggcataggccttgcggggagtacttatgataataactacccggaaga

SEQ ID NO: 647563 - DNA, 75 bp, synthetic construct
  source 1..75: mol_type = other DNA
caagcctttagcgaagggcaaacggtcgtcgtgcctgccggatttgtttgcgacaacatcaacaccggcatcttc

SEQ ID NO: 647564 - DNA, 75 bp, synthetic construct
  source 1..75: mol_type = other DNA
cgggtgattgtcgagcttcaaacccatacaccgctgacccagtggcagccgctgcatattcaccacgccgccagc

SEQ ID NO: 647565 - DNA, 75 bp, synthetic construct
  source 1..75: mol_type = other DNA
agggatgcgcgaactgctgcaacagcctggctatattcaggctggttatagcttgttgaatgcgccggttgccgc

SEQ ID NO: 647566 - DNA, 75 bp, synthetic construct
  source 1..75: mol_type = other DNA
actatattcatggctcgataccaatcagtggcaattcactgcatatcactgaatttggatattgtacacatgatt

SEQ ID NO: 647567 - DNA, 75 bp, synthetic construct
  source 1..75: mol_type = other DNA
catcacggttggctgcatctgccggatcacaaagcgggcttcagcgaagagcagcaggccatctggcaaaaagca

SEQ ID NO: 647568 - DNA, 75 bp, synthetic construct
  source 1..75: mol_type = other DNA
cgcgatatctcggcccgcaacacgctggcgggggcgcgtgtggtgatgcttaacccgccgcgtcgcggtaaacgt

SEQ ID NO: 647569 - DNA, 75 bp, synthetic construct
  source 1..75: mol_type = other DNA
acgttggcgacttaccatgagcagcatcgtgacgaacctggaccggggcgcgagcgcttacgccgtatggccctg

SEQ ID NO: 647570 - DNA, 75 bp, synthetic construct
  source 1..75: mol_type = other DNA
gtaacgaaaaatgattttagtataattactgaaatacaaaaaaacagcatacagaatgaatatcaatctttgtgg

SEQ ID NO: 647571 - DNA, 75 bp, synthetic construct
  source 1..75: mol_type = other DNA
aggatagtgaaaagtctatacgttacaaaatatggggagcaataagagaattatgcaacgctgagtttgaagctt

SEQ ID NO: 647572 - DNA, 75 bp, synthetic construct
  source 1..75: mol_type = other DNA
atggaagggtaaataaagttataatacctaacatcatgagaaatatactggaatactacttcgcatttgttcata

SEQ ID NO: 647573 - DNA, 75 bp, synthetic construct
  source 1..75: mol_type = other DNA
gcttttaatgtctgcgccatcaagaatttctgaagttttttcattaccagtagattgtgaaatacagcagattac

SEQ ID NO: 647574 - DNA, 75 bp, synthetic construct
  source 1..75: mol_type = other DNA
taccgcaatacagactttgaggttttagagaaaattcaagccgaaaacgacatcattatcaagagtctcgaagaa

SEQ ID NO: 647575 - DNA, 75 bp, synthetic construct
  source 1..75: mol_type = other DNA
taaaccacactgatgatgaaataaaacaattaagaaataaaacatccaatatcgacacaacaatctcctcaataa

SEQ ID NO: 647576 - DNA, 75 bp, synthetic construct
  source 1..75: mol_type = other DNA
cattcaacaacatgttgatgtcttactggccgatggcaaaacacgccttaaagtcgcgattaccgcacaaagtgg

SEQ ID NO: 647577 - DNA, 75 bp, synthetic construct
  source 1..75: mol_type = other DNA
tctccggcattctttcaggttcgctttcttatatcttcggcaagttagacgaaggcatgagtttctccgaggcga

SEQ ID NO: 647578 - DNA, 75 bp, synthetic construct
  source 1..75: mol_type = other DNA
accggacccgcgagatgatctttctggtatggatgtggcgcgcaagctgttgattctcgcccgtgaaacaggacg

SEQ ID NO: 647579 - DNA, 75 bp, synthetic construct
  source 1..75: mol_type = other DNA
tttcgtcgaccaggaatttgcccaaataaaacatgtcctgcatggcattagtttgttggggcagtgcccggatag

SEQ ID NO: 647580 - DNA, 75 bp, synthetic construct
  source 1..75: mol_type = other DNA
tacttcggcgctaaagttcttcacccccgcaccattacccccatcgcccagttccagatcccttgcctgattaaa

SEQ ID NO: 647581 - DNA, 75 bp, synthetic construct
  source 1..75: mol_type = other DNA
accggacccgcgagatgatctttccggtatggatgtggcgcgcaaattgttgattctcgcccgtgaaaccgggcg

SEQ ID NO: 647582 - DNA, 75 bp, synthetic construct
  source 1..75: mol_type = other DNA
gtttctgcgtaccacaaagcgactgtgtgcgagctgaacgggcgatgcaggaagagttctatcttgaactgaaag

SEQ ID NO: 647583 - DNA, 75 bp, synthetic construct
  source 1..75: mol_type = other DNA
taatattaatgttatccctgccagccatttctgctgaacattcggaaatgaaaatgtcagatatgcactcatcgg

SEQ ID NO: 647584 - DNA, 75 bp, synthetic construct
  source 1..75: mol_type = other DNA
gatttccgcagaacattcagaaatgaaaatgtcagatatatcctcatcggcatcgtcacaggaatatatgtccgg

SEQ ID NO: 647585 - DNA, 75 bp, synthetic construct
  source 1..75: mol_type = other DNA
catgaaagacatgcatgacaaaatgatggccgccgttaatgagcccgaccccgacaaggcctttgcaaaaggtat

SEQ ID NO: 647586 - DNA, 75 bp, synthetic construct
  source 1..75: mol_type = other DNA
tgaagcgtcagcaaagctggctgaagaataaacatatcgacttacgtgtctgcggtgttgccaactcgaaggctc

SEQ ID NO: 647587 - DNA, 75 bp, synthetic construct
  source 1..75: mol_type = other DNA
acgccgaacaaaaaggccaacacctcgtcgatggattactaccatcagttgcgttatgcggcggaaaaatcgcga

SEQ ID NO: 647588 - DNA, 75 bp, synthetic construct
  source 1..75: mol_type = other DNA
cggtaatgaaaaaggcgaactggtggtgctgggacgtaatggttccgactactccgctgcggtgctggctgcctg

SEQ ID NO: 647589 - DNA, 75 bp, synthetic construct
  source 1..75: mol_type = other DNA
tccaccagcaggttgtggcaccatctgatgattgaccttgaaacaatgggcaaaaatcctgacgcaccaatagcc

SEQ ID NO: 647590 - DNA, 75 bp, synthetic construct
  source 1..75: mol_type = other DNA
aacattcgcgagtacgccaaatttaactatggcgtaggcatgatgccttacgacgccgatgcgaaagatgcaccg

SEQ ID NO: 647591 - DNA, 75 bp, synthetic construct
  source 1..75: mol_type = other DNA
cgatgccgatgcgaaagacgcgccgcaaaacgccattatcggcggagccagtctatgggtaatgcagggtaaaga

SEQ ID NO: 647592 - DNA, 75 bp, synthetic construct
  source 1..75: mol_type = other DNA
gatcttatgccgaagtcctcacaaagtgttctgagggcatggaacagcggaatgttaaggccaattttatcgaac

SEQ ID NO: 647593 - DNA, 75 bp, synthetic construct
  source 1..75: mol_type = other DNA
gactgattcagctctatgacttactggcgcaaatccagcaaaaagcctttgatgtgttaagtgacgatgacgccc

SEQ ID NO: 647594 - DNA, 75 bp, synthetic construct
  source 1..75: mol_type = other DNA
aagttcctcgacttcctcgcgaagccagaaaacgctgccgagtggcatcagaaaactggttatctgccaatcacc

SEQ ID NO: 647595 - DNA, 75 bp, synthetic construct
  source 1..75: mol_type = other DNA
tctataacggtgattgtgcgatgaccaccgcctcttccggttctcttgccaacattcgtgagtacgccaaattta

SEQ ID NO: 647596 - DNA, 75 bp, synthetic construct
  source 1..75: mol_type = other DNA
agccagaaacggaacagaacgaccagaaagcggaacagaacagcccaaatacgcaacaaaacgagccagaaacga

SEQ ID NO: 647597 - DNA, 75 bp, synthetic construct
  source 1..75: mol_type = other DNA
tgcggtcagagcggtggcggcaactgccctgattgtggcgcggtgatgggcgacgcaacataccaggaaacattc

SEQ ID NO: 647598 - DNA, 75 bp, synthetic construct
  source 1..75: mol_type = other DNA
aaaaatcctgatgcgccgatcatctcaataggtgcaatatttttcgatccgcaaaccggagatatgggaccggaa

SEQ ID NO: 647599 - DNA, 75 bp, synthetic construct
  source 1..75: mol_type = other DNA
aaaggcggtttttactggcgcacagcaaaaaaattatcggttgcaatatcacgcggtgttgtcgcaatggacgat

SEQ ID NO: 647600 - DNA, 75 bp, synthetic construct
  source 1..75: mol_type = other DNA
gtgaactgccggtgaactggtgggtacagccttctgttatccgcactttcagctcccggggtgacatgagcatgg

SEQ ID NO: 647601 - DNA, 75 bp, synthetic construct
  source 1..75: mol_type = other DNA
cattcacaacatcgacaccgatattaagctcaaccgcgcattgtgggtaatggcagaaacgctgctggagagcct

SEQ ID NO: 647602 - DNA, 75 bp, synthetic construct
  source 1..75: mol_type = other DNA
atggaacacaaccttggtttaacctgcgacccggttgcagggcaggttcaggtgccgtgcattgagcgtaatgcc

SEQ ID NO: 647603 - DNA, 75 bp, synthetic construct
  source 1..75: mol_type = other DNA
gtcgtcctattggtgttgttcctttccagtgggcggggcctggtgcggcacctgaagatattggcggcatcgttg

SEQ ID NO: 647604 - DNA, 75 bp, synthetic construct
  source 1..75: mol_type = other DNA
tatacaaatacgaaccgcagcgattactctaggtcttgagccttctgaattaactaccagaaatcagttagaatt

SEQ ID NO: 647605 - DNA, 75 bp, synthetic construct
  source 1..75: mol_type = other DNA
attccatgtacggacatatcgaaacgatggcgcgtgcagtcgccgaaggcgcaagcaaagtcgatggcgcagaag

SEQ ID NO: 647606 - DNA, 75 bp, synthetic construct
  source 1..75: mol_type = other DNA
ctcgacatgaatgaaaaaattgtttttattcatcgtctgaaaaatggcctgtctacgacacacccgcttcagccg

SEQ ID NO: 647607 - DNA, 75 bp, synthetic construct
  source 1..75: mol_type = other DNA
atgattagtattatattgagaagcttgattctattattcatgataatagtgtatccagattataataaaaaccta

SEQ ID NO: 647608 - DNA, 75 bp, synthetic construct
  source 1..75: mol_type = other DNA
aaagatcttaatccggatataataattgttgaagatatagggtttacagatgatgtaaagaaaaatattttcata

SEQ ID NO: 647609 - DNA, 75 bp, synthetic construct
  source 1..75: mol_type = other DNA
ccattgcggcagtaaaagcggtgaacgccgcacgtatggcgctacgccgtaccagcgagccgcgcgtctgcctcg

SEQ ID NO: 647610 - DNA, 75 bp, synthetic construct
  source 1..75: mol_type = other DNA
ggtgatactgatgttgaattgcttggtgctgaactgtttgcggaatacaaaatgactgaaggtgtaacaggggga

SEQ ID NO: 647611 - DNA, 75 bp, synthetic construct
  source 1..75: mol_type = other DNA
atatgttgcgtcatgcctgcggctatgaacttgcgaatcaggggctggatacccgccttatccaagattatctgg

SEQ ID NO: 647612 - DNA, 75 bp, synthetic construct
  source 1..75: mol_type = other DNA
cggatggctctaaactggcatatgtcaccttcgaaagcggtcgttccgcgctggtcatccagacgctggcaaatg

SEQ ID NO: 647613 - DNA, 75 bp, synthetic construct
  source 1..75: mol_type = other DNA
caaaagagtatggtggtgatgccgcattgctggtgttgattgaagtggaagagtggctaccgccggagttgccat

SEQ ID NO: 647614 - DNA, 75 bp, synthetic construct
  source 1..75: mol_type = other DNA
gacgggcaaacgctggagttaaccggtactgagtttaccctgctctatttgctggcacagcatctgggtcaggtg

SEQ ID NO: 647615 - DNA, 75 bp, synthetic construct
  source 1..75: mol_type = other DNA
tttcgaccgcgctatcgatatgcacatttccaacctgcgtcgtaaactgccggatcgtaaagatggtcacccgtg

SEQ ID NO: 647616 - DNA, 75 bp, synthetic construct
  source 1..75: mol_type = other DNA
aagcaggacacgattgtccatcgaccacaacgcaagaaaatcagcgaagtaccggtcaagcggttgattcaggag

SEQ ID NO: 647617 - DNA, 75 bp, synthetic construct
  source 1..75: mol_type = other DNA
cacggtctgacgcagctacaagccaaacaggaactgggggcgttgattgccgcctgccgccgtgaacatgtgttt

SEQ ID NO: 647618 - DNA, 75 bp, synthetic construct
  source 1..75: mol_type = other DNA
atgaaaaagaaaacaacacttagcgaggaggaccaggcgctgtttgcgggtactcgcaagattaagcaggacacg

SEQ ID NO: 647619 - DNA, 75 bp, synthetic construct
  source 1..75: mol_type = other DNA
gcgctgtacgtcaggtggcttcattcccgcgtcacaacggtgcacctgcattctcgccagacggcagcaaactgg

SEQ ID NO: 647620 - DNA, 75 bp, synthetic construct
  source 1..75: mol_type = other DNA
ccgctgatgtctccggcgtggtcaccagacggttctaaactggcttatgtgaccttcgaaagcggtcgttccgcg

SEQ ID NO: 647621 - DNA, 75 bp, synthetic construct
  source 1..75: mol_type = other DNA
tgcctacgttgttcagaccaacggcggtcagttcccgtatgaactgcgcgtatctgactatgacggttacaacca

SEQ ID NO: 647622 - DNA, 75 bp, synthetic construct
  source 1..75: mol_type = other DNA
cagcttttcgaactggcgcgccttgagcatggtggtatcaagccccacctggagcgatttgccatcggcgaactc

SEQ ID NO: 647623 - DNA, 75 bp, synthetic construct
  source 1..75: mol_type = other DNA
aggaagttcaacccgcagcatggtctgcactgggtattgacgctgtggttgtaggtcaggtcactccgaacccgg

SEQ ID NO: 647624 - DNA, 75 bp, synthetic construct
  source 1..75: mol_type = other DNA
ttggttttctcatactgtgggcgtcggttctgcacgctgaagtccgcattgtgatcgacagtggtgtagattccg

SEQ ID NO: 647625 - DNA, 75 bp, synthetic construct
  source 1..75: mol_type = other DNA
cactgagcatgcacaaaaaaaacatataccttacgaattgaaagggcattcgtggaacgatttagaatatcgtcc

SEQ ID NO: 647626 - DNA, 75 bp, synthetic construct
  source 1..75: mol_type = other DNA
taaatgattatgcattacacttgtcagagcatagccgtttattttatcatgactggaagtcacttcaacttgatg

SEQ ID NO: 647627 - DNA, 75 bp, synthetic construct
  source 1..75: mol_type = other DNA
tacctgaaaaacacggccagaccgtcagccgggcgaacgctgaaaaaaggggatgccgtcacgaccacaggcatg

SEQ ID NO: 647628 - DNA, 75 bp, synthetic construct
  source 1..75: mol_type = other DNA
gaaaagtcggttaaaagttccagtcgtgagcttaatcctctcggttttactgtaaccagttaccagacagatcgg

SEQ ID NO: 647629 - DNA, 75 bp, synthetic construct
  source 1..75: mol_type = other DNA
atgttccgtcaagggatcacgggtaggagccaccttctgagtcagaatacgctgaaagttcatgatttaaatgaa

SEQ ID NO: 647630 - DNA, 75 bp, synthetic construct
  source 1..75: mol_type = other DNA
gggaagtcggtgtgttttgtcgcctggataagactcgtcagcgtcctacccggcaatcagcatcctatttgctca

SEQ ID NO: 647631 - DNA, 75 bp, synthetic construct
  source 1..75: mol_type = other DNA
caaagagaatgtttgatatatttgaaggaattcatgactctttttataattacctgtccagttatgttcttaatg

SEQ ID NO: 647632 - DNA, 75 bp, synthetic construct
  source 1..75: mol_type = other DNA
atctctggctggcttttggtgaaaaaggagttattaccctggctttctggcttgggtcactgttcagtgaacaaa

SEQ ID NO: 647633 - DNA, 75 bp, synthetic construct
  source 1..75: mol_type = other DNA
atttttgctggcgtttgtgtggccgtgacaactatgaaggtgttgatccaaccaaaggatcagaatcaggctgga

SEQ ID NO: 647634 - DNA, 75 bp, synthetic construct
  source 1..75: mol_type = other DNA
ctggataagtttatccagttgcggcttccagaaatcaaagaagtgaaaacgcagaattttatcggctataacaaa

SEQ ID NO: 647635 - DNA, 75 bp, synthetic construct
  source 1..75: mol_type = other DNA
ttgagacagctaaatccttcgaaagacaactctatgcagaaaatgaacggtctaagaaaaatgcatggcgtgttg

SEQ ID NO: 647636 - DNA, 75 bp, synthetic construct
  source 1..75: mol_type = other DNA
ctacgtgaggctatcgcgtatgccgacagcgttcatgactatgttagccgtgatatgatgatcgagatccttgcc

SEQ ID NO: 647637 - DNA, 75 bp, synthetic construct
  source 1..75: mol_type = other DNA
tcaaatatctgcattctattgatggttctcctatatttgatgttaaaaaaggtgatacgtcttattccctgatta

SEQ ID NO: 647638 - DNA, 75 bp, synthetic construct
  source 1..75: mol_type = other DNA
gcgtgaagtgctggcacgtcgattcggtttgctggggtacgaagcggcaacactggaagatgtaggtcgtgaaat

SEQ ID NO: 647639 - DNA, 75 bp, synthetic construct
  source 1..75: mol_type = other DNA
cgatatgatgattgagatccttggcgatgaagaaggtcacatcgattggctcgaaactgaactggatctgataag

SEQ ID NO: 647640 - DNA, 75 bp, synthetic construct
  source 1..75: mol_type = other DNA
ctgatcctcgcaaatctgccgtcgaagctgctattgcacgcgccaaagctcgcaagctggaacagcaacaggcta

SEQ ID NO: 647641 - DNA, 75 bp, synthetic construct
  source 1..75: mol_type = other DNA
tattgcacgcgccaaagcgcgcaagctggaacagcaacaacaggctaatgcggaaccagaagaacaggttgatcc

SEQ ID NO: 647642 - DNA, 75 bp, synthetic construct
  source 1..75: mol_type = other DNA
atggaaccgcgcggcatgggcttaccggcagcaaaagccgatgttcaccttgaagcggatatccacgctgtagaa

SEQ ID NO: 647643 - DNA, 75 bp, synthetic construct
  source 1..75: mol_type = other DNA
ggtcccggtttccgtctgccaagcggtaaaggtgggctgattttactggtagtggtgctggtcgctggctactat

SEQ ID NO: 647644 - DNA, 75 bp, synthetic construct
  source 1..75: mol_type = other DNA
agctggtgatgtatcgcggaatgacacgcaccggttgcggcgccggacagtccattatggggccgttctattgcc

SEQ ID NO: 647645 - DNA, 75 bp, synthetic construct
  source 1..75: mol_type = other DNA
tatgccacctggtttgccaatgatgaaacacataacggggcttatctggatatgtgggcacagtacggctggttt

SEQ ID NO: 647646 - DNA, 75 bp, synthetic construct
  source 1..75: mol_type = other DNA
ctggtggtaaaaattccccgccgttatggcaatcgtggtctggcgttgctggaccttatcgaagagggcaacctg

SEQ ID NO: 647647 - DNA, 75 bp, synthetic construct
  source 1..75: mol_type = other DNA
atcagcgacatctcggcgaaatcttctgcatacagcagttccgccggattagtgcgttgcaattctgccgccatc

SEQ ID NO: 647648 - DNA, 75 bp, synthetic construct
  source 1..75: mol_type = other DNA
tgttaggtttgagcttaatttctacggcctgggccactgaaaccgtaaatatccatgagcgtgtcaataatgctc

SEQ ID NO: 647649 - DNA, 75 bp, synthetic construct
  source 1..75: mol_type = other DNA
aagtcagaccgtttcccctaccgggccgtcgaagtcattagcggcaatgaatgagcatgaaagagctgcagttgc

SEQ ID NO: 647650 - DNA, 75 bp, synthetic construct
  source 1..75: mol_type = other DNA
ctttaggttttggcctggtgtctgcgtcatgggccgctgaaaccgtgaatattcacgagcgcgtcaataatgccc

SEQ ID NO: 647651 - DNA, 75 bp, synthetic construct
  source 1..75: mol_type = other DNA
tcttctgtctcccctgttctggctgccgggttgttcagcgggtataacgcggcgtactacggtgccatcaccggc

SEQ ID NO: 647652 - DNA, 75 bp, synthetic construct
  source 1..75: mol_type = other DNA
aattcccccctttctgtccgtgacggcggccatctgacggcacaaaaagggctctacagtgacggccgggttcag

SEQ ID NO: 647653 - DNA, 75 bp, synthetic construct
  source 1..75: mol_type = other DNA
agaatccgtctccggggcaatccctgaacatcccgctggtcagtgcgccggcaggaaccgctgctgatgttttta

SEQ ID NO: 647654 - DNA, 75 bp, synthetic construct
  source 1..75: mol_type = other DNA
gcattcgctctttgctggcagatctccgtgcacagcagatcccggttgggctggcttctgtctccctgaatgcgc

SEQ ID NO: 647655 - DNA, 75 bp, synthetic construct
  source 1..75: mol_type = other DNA
ttaatattatattgactcactcattgatccaatacctaactttaccagcaacacctccgcccccagtagcactgg

SEQ ID NO: 647656 - DNA, 75 bp, synthetic construct
  source 1..75: mol_type = other DNA
gttttggattttgttttctgttattagtgcattccctttatggattgactcagaacttaatttaacgtttattga

SEQ ID NO: 647657 - DNA, 75 bp, synthetic construct
  source 1..75: mol_type = other DNA
tgctgtgctgcccggcattcgctctttgctgacagatctccgtgcacaacagatcccggtagggctgcttctgtc

SEQ ID NO: 647658 - DNA, 75 bp, synthetic construct
  source 1..75: mol_type = other DNA
atctggatggagtaatcaccgataccgcgcatctgcatttccaggcgtggcagcagattgccgctgaaattggca

SEQ ID NO: 647659 - DNA, 75 bp, synthetic construct
  source 1..75: mol_type = other DNA
ggaacgacaacttcagccagtcagagcgactgggaaacccgtcagttcacgctgggcaagctgaaactcgatgca

SEQ ID NO: 647660 - DNA, 75 bp, synthetic construct
  source 1..75: mol_type = other DNA
cagcggacgcccgacagtcgttctcggggatgctcgccaggtcaatccggataatatttcatggggataccgggg

SEQ ID NO: 647661 - DNA, 75 bp, synthetic construct
  source 1..75: mol_type = other DNA
tggtaaatacattcaccatgacaatgactacacaggcaactttgccggtctgggtacgaagcactacggaaccca

SEQ ID NO: 647662 - DNA, 75 bp, synthetic construct
  source 1..75: mol_type = other DNA
aacaccctgaacgtcagttttatgaagaacccgactccgggacagtccctgaacattccgctggtcagtgcgccg

SEQ ID NO: 647663 - DNA, 75 bp, synthetic construct
  source 1..75: mol_type = other DNA
ggtcagatgcccattttttctccccttatgtgttatccgcctgggtggcgttgcaggagaaaggcctgccttttc

SEQ ID NO: 647664 - DNA, 75 bp, synthetic construct
  source 1..75: mol_type = other DNA
tcagttggggatatcggggtgggaaactggatttaaatgggtatgattttaccttttcccgtcttcaggctgcag

SEQ ID NO: 647665 - DNA, 75 bp, synthetic construct
  source 1..75: mol_type = other DNA
gcaccgtgagtgtgacctctcagaatgctgtttttgaccgtgttggcagctttgtcaacagcagcctgaccctcg

SEQ ID NO: 647666 - DNA, 75 bp, synthetic construct
  source 1..75: mol_type = other DNA
gggtgacctgcgtgacacaaacggtgatgccggagcctgggcgcgcatcatgagtggtgccggttctgcagacgg

SEQ ID NO: 647667 - DNA, 75 bp, synthetic construct
  source 1..75: mol_type = other DNA
atattcccttgttgaccgtaataaccactcttctgttgacttccatgctccacgtctgaataaactggttacaga

SEQ ID NO: 647668 - DNA, 75 bp, synthetic construct
  source 1..75: mol_type = other DNA
ccaatggccgatttcagcagtgtgagctcaaatggcgttgctacgcttgtatcacctcagtatatcgtcagcgta

SEQ ID NO: 647669 - DNA, 75 bp, synthetic construct
  source 1..75: mol_type = other DNA
gattatgcgacattccagtggcagcgagcgtctgtccagcgttttattgcactttcggcgaagcaatctggctga

SEQ ID NO: 647670 - DNA, 75 bp, synthetic construct
  source 1..75: mol_type = other DNA
atgtcgattcaaaagatctgctgaaccgcgtgctggccaatcaaagcctggcactgaacagcggcgtgcaaattc

SEQ ID NO: 647671 - DNA, 75 bp, synthetic construct
  source 1..75: mol_type = other DNA
cccgtaccgtgccgtcttccatgacgccgcgtgaaaacgtgatttggttcgatctccatgaagatgagcaaagcc

SEQ ID NO: 647672 - DNA, 75 bp, synthetic construct
  source 1..75: mol_type = other DNA
taaagcggaggctgataaagccgctgccgcgaaggctgacagtttcatgaatgccgggtataaaaacttcatgac

SEQ ID NO: 647673 - DNA, 75 bp, synthetic construct
  source 1..75: mol_type = other DNA
ccctgaatattcctctggtcacggcaccggcgggaacttcagcagagatgtttaaggccggcacccggatgatag

SEQ ID NO: 647674 - DNA, 75 bp, synthetic construct
  source 1..75: mol_type = other DNA
atgatactcaacggccagacccgcttctatattctgaaatctgccagctatggtaacaccctgtgggggaacagc

SEQ ID NO: 647675 - DNA, 75 bp, synthetic construct
  source 1..75: mol_type = other DNA
ccgtggtacaaatcggtcttaacgcagtggcgattctcggcggtattgtcggtgatgcggcgttttctccagctt

SEQ ID NO: 647676 - DNA, 75 bp, synthetic construct
  source 1..75: mol_type = other DNA
ggacaacatgcgctttgggctggagtttgagaaatccgcctttggtaaatacaacgtggataacgcaataaacgc

SEQ ID NO: 647677 - DNA, 75 bp, synthetic construct
  source 1..75: mol_type = other DNA
tagtttgctttatggagttgcggcaattagtggcggaaatagcaaaagaacaccatcaagggcttcgctccgact

SEQ ID NO: 647678 - DNA, 75 bp, synthetic construct
  source 1..75: mol_type = other DNA
aagagattgcatgctatttgatggttcgatccggtaggcaactagttgatgcacctgaaatcgacctgaaatatc

SEQ ID NO: 647679 - DNA, 75 bp, synthetic construct
  source 1..75: mol_type = other DNA
gatgcaggaatcctcagttggacccgcattgagcatgaactttgacatgcgcaaagacgttcgaggcgtgtttat

SEQ ID NO: 647680 - DNA, 75 bp, synthetic construct
  source 1..75: mol_type = other DNA
ttcgctgcgtacggtagatgataacggctggttcggcgaagtcagtgcttcaggagagattcatgttcaggcgac

SEQ ID NO: 647681 - DNA, 75 bp, synthetic construct
  source 1..75: mol_type = other DNA
acgtcacccatacgaaagcagcaaatctgcggttaataaatacccactcgctggcggaggtatttatcaacagcg

SEQ ID NO: 647682 - DNA, 75 bp, synthetic construct
  source 1..75: mol_type = other DNA
acaactttttcgtcactcctggcggggcgctggatccgcgcctgaccggtgccaaccgctggaccggtttaaaat

SEQ ID NO: 647683 - DNA, 75 bp, synthetic construct
  source 1..75: mol_type = other DNA
attatcggtgccaacatcaccaactgtaagttcagcgacttacagggcgacgccattgaatggaacgtggcaatt

SEQ ID NO: 647684 - DNA, 75 bp, synthetic construct
  source 1..75: mol_type = other DNA
atcaaagggctggcgatgagcggctttggtccggtaacgcagatttatatcggcggcaaaaacaaacgggtcatg

SEQ ID NO: 647685 - DNA, 75 bp, synthetic construct
  source 1..75: mol_type = other DNA
tcaacggcgaagtttgcacttccgtattcgatgctaaagcgggtatcgctctgaacgacaacttcgtgaaactgg

SEQ ID NO: 647686 - DNA, 75 bp, synthetic construct
  source 1..75: mol_type = other DNA
gatgcaggaatcctcagttggaccagcattgagtatgaactttgacatgcgcaaagacgttcgaggcgtttttat

SEQ ID NO: 647687 - DNA, 75 bp, synthetic construct
  source 1..75: mol_type = other DNA
aacgacagtgatattttgatctccgaccatgtcatcgagcgcatcaactgtactaacagcaaaatcaactggggc

SEQ ID NO: 647688 - DNA, 75 bp, synthetic construct
  source 1..75: mol_type = other DNA
ataatcggtgccaacatcaccaactgtaagttcagcgacttacagggcgacgctattgaatggaacgtggcgatt

SEQ ID NO: 647689 - DNA, 75 bp, synthetic construct
  source 1..75: mol_type = other DNA
tctggctggtatgaattttctacctccaacacgctgattatcaaaccccgtgatttcagcatcagtattatctcc

SEQ ID NO: 647690 - DNA, 75 bp, synthetic construct
  source 1..75: mol_type = other DNA
accaagctctatcggcgttttcgtgatggtcgcccagatggttttattcttcacgccatctactgggccggactg

SEQ ID NO: 647691 - DNA, 75 bp, synthetic construct
  source 1..75: mol_type = other DNA
gatcgccgtcatctttcgccagataaccatttatcgggtgaagatgaaaggcggtagtgatgagcaagctcagaa

SEQ ID NO: 647692 - DNA, 75 bp, synthetic construct
  source 1..75: mol_type = other DNA
tgaaaggcggtagcgatgaagaagcacagcgagaagcaatcaccgaaaccgccgccgcacttggctttatctcgg

SEQ ID NO: 647693 - DNA, 75 bp, synthetic construct
  source 1..75: mol_type = other DNA
gggcgacggtaatgtcagcgcaatggtgaacaaggtcaaagatgactccactggttcagataaggctccagtgtg

SEQ ID NO: 647694 - DNA, 75 bp, synthetic construct
  source 1..75: mol_type = other DNA
taaaggcattgccgcagcctccctcgcagctattcttgaagcccgtggcctcaatgtgaccatcatgaaactgga

SEQ ID NO: 647695 - DNA, 75 bp, synthetic construct
  source 1..75: mol_type = other DNA
agaattccgccgctgggtgctggatattctcgatcgagaaattcaacaatccccaatcacaaaacaattcactga

SEQ ID NO: 647696 - DNA, 75 bp, synthetic construct
  source 1..75: mol_type = other DNA
gtttacaccccaggtgatggagatatatatgcaattattcctccccattattctaaataccaacgatgtcagtga

SEQ ID NO: 647697 - DNA, 75 bp, synthetic construct
  source 1..75: mol_type = other DNA
agttgggatcgttgggctatcaatgtaaaaccgcgaatgatggtgtcgatgcgcttaatgtacttagcaagaatc

SEQ ID NO: 647698 - DNA, 75 bp, synthetic construct
  source 1..75: mol_type = other DNA
ttcgctgcgtacggtagatgataacggctgggtttggcgaagtcagcgcttcaggagagattcatgttcaggcga

SEQ ID NO: 647699 - DNA, 75 bp, synthetic construct
  source 1..75: mol_type = other DNA
tgcctttctcggcgtcaatggcgtaccgcaggccgacggttcggtgatgtcgctggcgaatgccgcatggatttg

SEQ ID NO: 647700 - DNA, 75 bp, synthetic construct
  source 1..75: mol_type = other DNA
ctttggtgaaggcacctcatcccgtgacaccctgcgcgacagtacaaaacacggtgtgagtgaactgcctgtgaa

SEQ ID NO: 647701 - DNA, 75 bp, synthetic construct
  source 1..75: mol_type = other DNA
atctcaataaaatcggttttaattttactaccgatcaactctttttattaaccgcattaccctccgtttctggcg

SEQ ID NO: 647702 - DNA, 75 bp, synthetic construct
  source 1..75: mol_type = other DNA
gtgatttaattccggatgaacatgagtggatattcagaaaacagaaatctttgtatatgtgccgggaaatggcgc

SEQ ID NO: 647703 - DNA, 75 bp, synthetic construct
  source 1..75: mol_type = other DNA
aacaccactaccaacctgtctgaagcgcagtcccgtattcaggacgccgactatgcgaccgaagtgtccaacatg

SEQ ID NO: 647704 - DNA, 75 bp, synthetic construct
  source 1..75: mol_type = other DNA
attgccaaagatggcactattacagatacgaatggtgatgcgctctatctggatattaccggcaacctgactaag

SEQ ID NO: 647705 - DNA, 75 bp, synthetic construct
  source 1..75: mol_type = other DNA
ttaactggcacgctcatctgggaatggatcaaccccgtttccctgatggggcgtagcctggtaatgggcttcggc

SEQ ID NO: 647706 - DNA, 75 bp, synthetic construct
  source 1..75: mol_type = other DNA
atggcaaatcgtaaacgtgacgccgggcgcgaggcgctggagaaaaaaggctggtggcgcagtcaccgttggctg

SEQ ID NO: 647707 - DNA, 75 bp, synthetic construct
  source 1..75: mol_type = other DNA
cctgggaaattgcatcagcaatgaacacgtcagtaatgagcgtgtatgcaggagtgatgaaaaaaagattccacg

SEQ ID NO: 647708 - DNA, 75 bp, synthetic construct
  source 1..75: mol_type = other DNA
tggcgctcagttcaccagtttagcaaaagtagacactgtcaatgtcaccaacgcacatgtcagtgccgaaggtat

SEQ ID NO: 647709 - DNA, 75 bp, synthetic construct
  source 1..75: mol_type = other DNA
catttccgccttgctttgtgcggtagcggcatttttgatgatgtcgaaactcaactcggctaaggcctcttatgg

SEQ ID NO: 647710 - DNA, 75 bp, synthetic construct
  source 1..75: mol_type = other DNA
tatgtaacggcgtattgattgctggtattcgagtgtcgccaattcttgcaacgcttgggatgatgacgttgctca

SEQ ID NO: 647711 - DNA, 75 bp, synthetic construct
  source 1..75: mol_type = other DNA
cgccaacgacggtatctctctggcgcagaccactgaaggcgcactgtctgagattaacaacaacttacaacgtgt

SEQ ID NO: 647712 - DNA, 75 bp, synthetic construct
  source 1..75: mol_type = other DNA
gctggccagactaaaaccggtacttacaaggctgctactggtgatgttaactttaatgttgacgcaactggtaat

SEQ ID NO: 647713 - DNA, 75 bp, synthetic construct
  source 1..75: mol_type = other DNA
gttttgctgcagatggtgccgattcagcgaagacgttaagcatcattaatccaaacaccggtgattcgtcgcagg

SEQ ID NO: 647714 - DNA, 75 bp, synthetic construct
  source 1..75: mol_type = other DNA
ttgcgtgcgtgatgccatacaaaatggtgtcgccattggcgctcacccgagctttccggacagggaacattttgg

SEQ ID NO: 647715 - DNA, 75 bp, synthetic construct
  source 1..75: mol_type = other DNA
ccgctgggatgtccagaaaataatggatgctctgaactatcctcgatatagcgactactactgtagccgtacaat

SEQ ID NO: 647716 - DNA, 75 bp, synthetic construct
  source 1..75: mol_type = other DNA
agatggatgccaacgaaggttctctgactctcaatacccgtttcgacctcgccatcaaagccttcgaacataccg

SEQ ID NO: 647717 - DNA, 75 bp, synthetic construct
  source 1..75: mol_type = other DNA
caaacgcgtgaacggcggtctgctggttcaggatcgtgacctggggatggtcggtgcggaagaactgcgcgtcgt

SEQ ID NO: 647718 - DNA, 75 bp, synthetic construct
  source 1..75: mol_type = other DNA
gtcttattgtcgcgttgttgcagaccacaaatgatgaggcagcggagtttaccgggatgattcctgtttatcatt

SEQ ID NO: 647719 - DNA, 75 bp, synthetic construct
  source 1..75: mol_type = other DNA
ctgctgtctatgcccttcatcagaaagggaatgtaaacctcatcccaccagaaattgttgaattcaacccccaat

SEQ ID NO: 647720 - DNA, 75 bp, synthetic construct
  source 1..75: mol_type = other DNA
tgatgttattaccgcattccctacagatgcacgtttcaaagataaatactggcagtgttccagagaagaacgaac

SEQ ID NO: 647721 - DNA, 75 bp, synthetic construct
  source 1..75: mol_type = other DNA
gctgttctgctggaaagtggcgaagttcgtgaaatccaatgctatcgtctatgccaaaaacaatatgaccatcgg

SEQ ID NO: 647722 - DNA, 75 bp, synthetic construct
  source 1..75: mol_type = other DNA
ctacttcggcagcatggttccggcgtaccacggtgaaagcaaagaagccgctggtcgcttcccacgcacgctgaa

SEQ ID NO: 647723 - DNA, 75 bp, synthetic construct
  source 1..75: mol_type = other DNA
ttgcgtgcgtgaagcaataaaaaatggtgtcgcgattggcgctcacccgagttttcccgacagggaaaattttgg

SEQ ID NO: 647724 - DNA, 75 bp, synthetic construct
  source 1..75: mol_type = other DNA
gcactttccgcacgcggtgtggaactgctatctacaggaggcactgcccgactgttagcagaaaagggtctgccg

SEQ ID NO: 647725 - DNA, 75 bp, synthetic construct
  source 1..75: mol_type = other DNA
tcatttctcgtcagtttgtcgaagtgatcattgcgccatccgccagcgaagaagcgttgaaaatcaccgcagcta

SEQ ID NO: 647726 - DNA, 75 bp, synthetic construct
  source 1..75: mol_type = other DNA
tatcacggcgaaagcaaagaagctgccggtcgcttcccacgcacgctgaacatgaacttcattaagaagcaggat

SEQ ID NO: 647727 - DNA, 75 bp, synthetic construct
  source 1..75: mol_type = other DNA
gatcctgcaacaagcaggtacttctgttctggcacaggctaaccagacgactcagaacgtactgtctcttttgcg

SEQ ID NO: 647728 - DNA, 75 bp, synthetic construct
  source 1..75: mol_type = other DNA
aaggcaaaggtaaccgcgtatttgcccatatgcgcggtgaagtggcagcggctgatgatgacgacttactgagca

SEQ ID NO: 647729 - DNA, 75 bp, synthetic construct
  source 1..75: mol_type = other DNA
tatccagcggtcagatggtcgggggaacagcagaatccaccaccatcaacaaaaatgggcggcaggttatctggt

SEQ ID NO: 647730 - DNA, 75 bp, synthetic construct
  source 1..75: mol_type = other DNA
tactgcagcaacggttcttggcagcaaccgtctgggcaatttcgcggtggaaaacggtaaggctgacggcgttgt

SEQ ID NO: 647731 - DNA, 75 bp, synthetic construct
  source 1..75: mol_type = other DNA
cttattgtgataacagtagtacgctaataaaaatccccttaaaaaatagatttatgagatcccaagagtgtaagg

SEQ ID NO: 647732 - DNA, 75 bp, synthetic construct
  source 1..75: mol_type = other DNA
atgaaaccttggcatgaagatgttagaagatattttgcagaacaccttatctatgatgaatccagtgattccctg

SEQ ID NO: 647733 - DNA, 75 bp, synthetic construct
  source 1..75: mol_type = other DNA
tgctggtctgatggagagtcagtcacgataaataccgacgactacggcaacaaaacatttaatataggccgatat

SEQ ID NO: 647734 - DNA, 75 bp, synthetic construct
  source 1..75: mol_type = other DNA
atctttgatggtagcgtgaacctgccagaaggtaccctgagtcaggacagtggcaccctgacattccagggtcat

SEQ ID NO: 647735 - DNA, 75 bp, synthetic construct
  source 1..75: mol_type = other DNA
cctatgatcgatttcagtagcgtgagctcagatggcgttgcaacgcttgtgtctcctcagtatatcgccagtgtg

SEQ ID NO: 647736 - DNA, 75 bp, synthetic construct
  source 1..75: mol_type = other DNA
gactatggtgcccctggggacagtggttctcctttgtttgcttatgatgaacaacaaaaaaaatgggttattgtt

SEQ ID NO: 647737 - DNA, 75 bp, synthetic construct
  source 1..75: mol_type = other DNA
ggggattcgctgtgtgagttcaccgtaaaggaacgtaatattgagtttaaggctgttctcgcttacgaaccgaag

SEQ ID NO: 647738 - DNA, 75 bp, synthetic construct
  source 1..75: mol_type = other DNA
aaaattgcccgccgttatggcaatcgtggtctggcgttgctggatcttatcgaagagggcaacctggggctgatc

SEQ ID NO: 647739 - DNA, 75 bp, synthetic construct
  source 1..75: mol_type = other DNA
actggaaattacccgtggagcacatgcttccggtgatattcatgcctctgcggcatcaacagttaccatcgggtc

SEQ ID NO: 647740 - DNA, 75 bp, synthetic construct
  source 1..75: mol_type = other DNA
aataatgtaaccacggtagccagctatctgcagctacatgggattatccatatactgtattaccgtgatggtgcc

SEQ ID NO: 647741 - DNA, 75 bp, synthetic construct
  source 1..75: mol_type = other DNA
ttaatggttcttacaccacaaaagatggtactgtttctttcgaaacggattcagcaggtaatatcaccatcggtg

SEQ ID NO: 647742 - DNA, 75 bp, synthetic construct
  source 1..75: mol_type = other DNA
ctgggcttctcggaaatatggctgcggatggtactgctgttgaaacaaccatcaagacagaggctggtgtaacag

SEQ ID NO: 647743 - DNA, 75 bp, synthetic construct
  source 1..75: mol_type = other DNA
atctgaagaaaattgactctgatacgctggggctgaatgggtttaatgtgaacggcaaaggggaaacggctaata

SEQ ID NO: 647744 - DNA, 75 bp, synthetic construct
  source 1..75: mol_type = other DNA
accgggactaactctgattcggatctggactccattcaggacgaaatcaaatcccgtctcgatgaaattgaccgc

SEQ ID NO: 647745 - DNA, 75 bp, synthetic construct
  source 1..75: mol_type = other DNA
tggtacaaattctggtgatagtaacagtgctcagttacaatccttcctgacaccaaaagcgggcgatactgctaa

SEQ ID NO: 647746 - DNA, 75 bp, synthetic construct
  source 1..75: mol_type = other DNA
tatcaacaagaaccagtctgcgctgtcgagttctatcgagcgtctgtcttctggcttgcgtattaacagcgcgaa

SEQ ID NO: 647747 - DNA, 75 bp, synthetic construct
  source 1..75: mol_type = other DNA
ttaaatgccttagcttcaaagatgtcgcaaataaccaactataataatgatatgtccaagtgcaatacaaagaaa

SEQ ID NO: 647748 - DNA, 75 bp, synthetic construct
  source 1..75: mol_type = other DNA
ctggtctatggtgctgtctccgggaaacagttcagctggaaggaccagggaatgaacctcaccatgaaggataag

SEQ ID NO: 647749 - DNA, 75 bp, synthetic construct
  source 1..75: mol_type = other DNA
accgctatcatgtcacagaggatgcctggattgagccacaggcggaactggtctatggtgctgtatccggtaaac

SEQ ID NO: 647750 - DNA, 75 bp, synthetic construct
  source 1..75: mol_type = other DNA
tatgcgaccgaagtgtccaatatgtcgaaagcgcagatcatccagcaggccggtaactccgtgttggcaaaagct

SEQ ID NO: 647751 - DNA, 75 bp, synthetic construct
  source 1..75: mol_type = other DNA
gattaccggttatctgtcgaacatcggcctgcaatatatcattgttctcgattttactttcgcgctgctggccct

SEQ ID NO: 647752 - DNA, 75 bp, synthetic construct
  source 1..75: mol_type = other DNA
acagaggaaaattaacgatgttacgcagcattacgttgacgaaaaaggcaaggctcatactgtggcctgcgtgtt

SEQ ID NO: 647753 - DNA, 75 bp, synthetic construct
  source 1..75: mol_type = other DNA
tctacgccagaaggttgcagatgctctgaaccgattagccagcaaaatgaccaccgacaaatttatcgacggtgg

SEQ ID NO: 647754 - DNA, 75 bp, synthetic construct
  source 1..75: mol_type = other DNA
tggatgacattaccgacactgacctgcgccagaagatcgccgatgcactcaaccgactggccagcaaaatgacca

SEQ ID NO: 647755 - DNA, 75 bp, synthetic construct
  source 1..75: mol_type = other DNA
gaaccccggcgttatggagttggaagcgatcaacaaatggaacggaacgctaccgcagtatatgaccagtaatac

SEQ ID NO: 647756 - DNA, 75 bp, synthetic construct
  source 1..75: mol_type = other DNA
caaaaaatttctggtgaatgcctcccgttaaaaaaagtatcgctgtacctgaataacgaaacaccggctggataa

SEQ ID NO: 647757 - DNA, 75 bp, synthetic construct
  source 1..75: mol_type = other DNA
cactgtcttataagcctgtaagtgttaaaggctttgaggcatcagtgactctggataatgccttcaacaagcttg

SEQ ID NO: 647758 - DNA, 75 bp, synthetic construct
  source 1..75: mol_type = other DNA
caatatctcggccacggcgtgttctgggtgatggcgctggtggcgcttccggcaatgtttttgcgcccgaaagtt

SEQ ID NO: 647759 - DNA, 75 bp, synthetic construct
  source 1..75: mol_type = other DNA
ctctggcggctatttgcacaatgggtattattggctatgaccgcgtagaacctggatttgttggcatcaaagtaa

SEQ ID NO: 647760 - DNA, 75 bp, synthetic construct
  source 1..75: mol_type = other DNA
ctacaaagttgatccatccaaagttaccacggtgtttcagacttaccgcaaaggcgtggatgacattaccaacac

SEQ ID NO: 647761 - DNA, 75 bp, synthetic construct
  source 1..75: mol_type = other DNA
atgaaaaaaacgttgattagtgcagcgattatttttggttctttatgtctgaccggatgcgaccgggtagaacca

SEQ ID NO: 647762 - DNA, 75 bp, synthetic construct
  source 1..75: mol_type = other DNA
cgcctgcgtgaagttcacagccagaaactcagtaaagaagcgcaaaaactgatgaaaatgcccttccagcgcgcg

SEQ ID NO: 647763 - DNA, 75 bp, synthetic construct
  source 1..75: mol_type = other DNA
cggactggtcgttgtgcacccaatgaccgcactgggccgcgaaatgggcctgcaggagatgactgggttttcaaa

SEQ ID NO: 647764 - DNA, 75 bp, synthetic construct
  source 1..75: mol_type = other DNA
tgaccgtttttcttataacgggtgaatcacagaatgtgattaccggaatttatgacagtaagtcatcctgcattc

SEQ ID NO: 647765 - DNA, 75 bp, synthetic construct
  source 1..75: mol_type = other DNA
gcgtttgcactgatgatgactgtttttctgataacgggtgagccacagtatgtgattaccggaatttatgccagt

SEQ ID NO: 647766 - DNA, 75 bp, synthetic construct
  source 1..75: mol_type = other DNA
atggcgcgcgcaggcaaagaagggacaccggtatttcttgtgggcggtaaacctgaagtgctggcgcaaactgaa

SEQ ID NO: 647767 - DNA, 75 bp, synthetic construct
  source 1..75: mol_type = other DNA
acctgaagtgctggcgcaaactgaagctaaactgcgcaaccaatggaatgtgaatatcgttggcagtcaggatgg

SEQ ID NO: 647768 - DNA, 75 bp, synthetic construct
  source 1..75: mol_type = other DNA
accgcccaggctcgtgcgatgatcgacaaagccctggcgctggacgaaaacgaaatcaccgccctgatgctgctg

SEQ ID NO: 647769 - DNA, 75 bp, synthetic construct
  source 1..75: mol_type = other DNA
gcttccgatgcgtttatgcaggcgaattacgcgcaagccatcgaactatggcaaaaagtgatggatctcaactca

SEQ ID NO: 647770 - DNA, 75 bp, synthetic construct
  source 1..75: mol_type = other DNA
tgtatgcggcgctggcgacggtgctttattaccaggccagccagcatatgaccgcccagactcgcgcaatgatcg

SEQ ID NO: 647771 - DNA, 75 bp, synthetic construct
  source 1..75: mol_type = other DNA
caacagtgggccgcaagcgtttaatgatatgcgcctggcgctgacgcaactgatgcaaagtttccactacgggca

SEQ ID NO: 647772 - DNA, 75 bp, synthetic construct
  source 1..75: mol_type = other DNA
ttgctgccactaaagcggaccatgtgaccatcgatcagcacgccaatatggtttcattactgcaacaactgattc

SEQ ID NO: 647773 - DNA, 75 bp, synthetic construct
  source 1..75: mol_type = other DNA
ccgacgaaaaccggctggcagacattgccgccgcgtggaccgattatctccaccactgtaaacagcaggggctgc

SEQ ID NO: 647774 - DNA, 75 bp, synthetic construct
  source 1..75: mol_type = other DNA
ttcaggcgaccaccagcggcattattgatgttaacggtgagaaaatcccggcgctgcgtggtaatcgacttagcg

SEQ ID NO: 647775 - DNA, 75 bp, synthetic construct
  source 1..75: mol_type = other DNA
tcgccggttatcgacaaactgctgtttgccgcgacgaaagcggaccatgtaacgctcgatcagcacgccaatatg

SEQ ID NO: 647776 - DNA, 75 bp, synthetic construct
  source 1..75: mol_type = other DNA
tacgttttaaatcgaatgattcgctgctacgccactttaaggatacctccacgctgtatctggaaattgtggatt

SEQ ID NO: 647777 - DNA, 75 bp, synthetic construct
  source 1..75: mol_type = other DNA
acatgttgcgcgcggaagctgccggacaggcagatgcaattcgcacaaaagcccaggccgaagccgatgctattc

SEQ ID NO: 647778 - DNA, 75 bp, synthetic construct
  source 1..75: mol_type = other DNA
ggattacctggacgcactggaactggtggatacctccggtgctccagatattgaatggcctacacctccggtaac

SEQ ID NO: 647779 - DNA, 75 bp, synthetic construct
  source 1..75: mol_type = other DNA
atagttgttactgtttctgatggacagtcacttcatttatcacaacaatggccgccctcttcaggaaagtcttaa

SEQ ID NO: 647780 - DNA, 75 bp, synthetic construct
  source 1..75: mol_type = other DNA
tgaccagcgttgaaatcgcagagttggtgggtaaacgtcatgacaatgtgaaacgcactattgaaacattagcca

SEQ ID NO: 647781 - DNA, 75 bp, synthetic construct
  source 1..75: mol_type = other DNA
gctttaagtgagcatccaaaactcggtatcggcgctgttgacatatcactttataaccagtcgatattaacgtct

SEQ ID NO: 647782 - DNA, 75 bp, synthetic construct
  source 1..75: mol_type = other DNA
acgcgggttgctgcgcagacaaatatcttccagcgcggcctgcgcccatgcgccgtaatgtccggtggttgcgcc

SEQ ID NO: 647783 - DNA, 75 bp, synthetic construct
  source 1..75: mol_type = other DNA
acacagccactaatacccgcgtggatgatggcggaacgctggatgtccgcaacggtggcaccgccaccaccgtat

SEQ ID NO: 647784 - DNA, 75 bp, synthetic construct
  source 1..75: mol_type = other DNA
aagcatccatgaccagcgttgagatcgcagagctggtgggtagccgccatgacaaagtgaaacaatccattgagc

SEQ ID NO: 647785 - DNA, 75 bp, synthetic construct
  source 1..75: mol_type = other DNA
tcgcgaaggcatgagctatcgcatcaccgataccgggcgcgcctggcttggaaaagcgttgccagcacgaaaaag

SEQ ID NO: 647786 - DNA, 75 bp, synthetic construct
  source 1..75: mol_type = other DNA
aaagactgcctaagttaatggcaaaatggcagcaagaggtaaaggctgaagccagttttgttggcatcaagcgaa

SEQ ID NO: 647787 - DNA, 75 bp, synthetic construct
  source 1..75: mol_type = other DNA
atctcggcaggattatgcatagggatggtgccaacacatttcgccaaaccgtggcttaatgaggggaagtgggta

SEQ ID NO: 647788 - DNA, 75 bp, synthetic construct
  source 1..75: mol_type = other DNA
gaggaagcagaaccgcgagggactcgctggtattacccgaaaatggggggatttcaggttattggttggcagaaa

SEQ ID NO: 647789 - DNA, 75 bp, synthetic construct
  source 1..75: mol_type = other DNA
ccgctggcgcgaactggaagaacaaatccgcaaaccaatgagtcagatcgaaatggttgctgcaatggcgcttga

SEQ ID NO: 647790 - DNA, 75 bp, synthetic construct
  source 1..75: mol_type = other DNA
ggatttactttatcggcaagttcaagaagacatcatttccgatatttcaagagtaatagtttcaccaactacaca

SEQ ID NO: 647791 - DNA, 75 bp, synthetic construct
  source 1..75: mol_type = other DNA
caactcaactccaaaacaccgaagatattaatgtgttaataaaaaaaatagataaaagtcttaataatgagattg

SEQ ID NO: 647792 - DNA, 75 bp, synthetic construct
  source 1..75: mol_type = other DNA
ttgtggatggcgtgaaactgactctttatgactggacgggggcgttgattgcgctttgcggcatgttgatcattg

SEQ ID NO: 647793 - DNA, 75 bp, synthetic construct
  source 1..75: mol_type = other DNA
gttggcacagggaaatcaattgctggaaggtgcatacgatataacgctaattgaaatgcgtcttctgtatctggc

SEQ ID NO: 647794 - DNA, 75 bp, synthetic construct
  source 1..75: mol_type = other DNA
ttgttactgccctgtgtgaaatcatgggttgctttttaccctggttatggctgaaacgaaatgccagcgtctggc

SEQ ID NO: 647795 - DNA, 75 bp, synthetic construct
  source 1..75: mol_type = other DNA
attgcgatcacgctcggtaacgatccgatcatcacgctgatgggggccacgccgctgaaatacgatcagtctgag

SEQ ID NO: 647796 - DNA, 75 bp, synthetic construct
  source 1..75: mol_type = other DNA
caactcaactccaaaacaccgaagaaattaatgtgttaataaaaaaaatagataaatgtcttaatgatgagattg

SEQ ID NO: 647797 - DNA, 75 bp, synthetic construct
  source 1..75: mol_type = other DNA
atctaccgcatggaagtgaagggcaagcgtaagctcggcctgcaaccggtgccgatgcacgatatcgccctgcat

SEQ ID NO: 647798 - DNA, 75 bp, synthetic construct
  source 1..75: mol_type = other DNA
gacaggcattgcaaaaaatacccaaactctgggaggcatggcaggcgctgaaaaaacgctgtgagcctcaggact

SEQ ID NO: 647799 - DNA, 75 bp, synthetic construct
  source 1..75: mol_type = other DNA
gcagacagtgaggtggaaagccgcataggtaaggccgcaggcacaggtatccttggtgggctaatatttggtggc

SEQ ID NO: 647800 - DNA, 75 bp, synthetic construct
  source 1..75: mol_type = other DNA
gtcaatatctttatgaactgaaaagcgaatttacacaaatgaatcttgaacatatggtgaaactggatacgccat

SEQ ID NO: 647801 - DNA, 75 bp, synthetic construct
  source 1..75: mol_type = other DNA
acatgaccgtggtgcgcatcgataaagtctcttatcgcaccaaaccgattttcgaatcgctctatctcggtatgc

SEQ ID NO: 647802 - DNA, 75 bp, synthetic construct
  source 1..75: mol_type = other DNA
tgaaagccgagttcccggaagtgcaggcggtaaacgccatgtacacccacggcctgctggcgattatctccacca

SEQ ID NO: 647803 - DNA, 75 bp, synthetic construct
  source 1..75: mol_type = other DNA
tgggtgttaccggactgacggtggcaccggcatctgtcagtgtcaaagcgggagcaaccaccacactgaccttta

SEQ ID NO: 647804 - DNA, 75 bp, synthetic construct
  source 1..75: mol_type = other DNA
tgatgttttccgtggctggctgagttcactgggtaaaaccattacctcaaaagaggtgatgacccgtactgtaaa

SEQ ID NO: 647805 - DNA, 75 bp, synthetic construct
  source 1..75: mol_type = other DNA
cgacgctggcctggcgtccgggtgacagcgggcagaaaaaactggttcagttgttcgactccggtgaagtctgcg

SEQ ID NO: 647806 - DNA, 75 bp, synthetic construct
  source 1..75: mol_type = other DNA
gtctgattttcttgctgcgtcgctactggagcggcaccaagaaacgcgcccgtatccacctgaccccagcggagc

SEQ ID NO: 647807 - DNA, 75 bp, synthetic construct
  source 1..75: mol_type = other DNA
atgctaaatttatttgttggccttgatatatacacagggcttttgttattgcttgctctggcatttgtgttgttc

SEQ ID NO: 647808 - DNA, 75 bp, synthetic construct
  source 1..75: mol_type = other DNA
gactccggtgaagtctgcgcgtttcgtatcaaatatcccaacggcactgttgatgttttccgtggctggctgagt

SEQ ID NO: 647809 - DNA, 75 bp, synthetic construct
  source 1..75: mol_type = other DNA
tgatgactgctattgttggctggcattggtttgatgcggcaacttatgcagctaactggaatactgcggatacca

SEQ ID NO: 647810 - DNA, 75 bp, synthetic construct
  source 1..75: mol_type = other DNA
gtcagcgccgcaggttaacaggacgatactcatcatttgccccggttatccggggcttttttgcaggtggagaac

SEQ ID NO: 647811 - DNA, 75 bp, synthetic construct
  source 1..75: mol_type = other DNA
ccgggatagcccgtgacactctcatttacgcaggtggtgaccagtcggtacacggaagggccctgaataccacac

SEQ ID NO: 647812 - DNA, 75 bp, synthetic construct
  source 1..75: mol_type = other DNA
cgaatttacctggatgctacgcgaatatctggaccaaacagtattccgtgccgaagaactggatatgtatatcac

SEQ ID NO: 647813 - DNA, 75 bp, synthetic construct
  source 1..75: mol_type = other DNA
atggcggcttccggtgctccgtttgcaatcagtgcttcaactatcctcggtaactgggctgcgccgctggtttct

SEQ ID NO: 647814 - DNA, 75 bp, synthetic construct
  source 1..75: mol_type = other DNA
gtaagtacgggtatggttaaaaacccgaaacgtaccgttccactggcaaccatgctgggcactggtttagcaggt

SEQ ID NO: 647815 - DNA, 75 bp, synthetic construct
  source 1..75: mol_type = other DNA
tgagcaggatattaaccagcccgtccgccaggaaatcgatgcctttttctgcgcattcagggagaaagttgaaca

SEQ ID NO: 647816 - DNA, 75 bp, synthetic construct
  source 1..75: mol_type = other DNA
cgttttgaaatgcagatgaaggtaataagcagcgtcgatgataacgcaagccgcgccaaccaactgctgtcgatg

SEQ ID NO: 647817 - DNA, 75 bp, synthetic construct
  source 1..75: mol_type = other DNA
actgcaggcagatccaaccttgcgtgtgatgtcgggggttctggaaggcagtaacgtcaatgccgttgcggcaat

SEQ ID NO: 647818 - DNA, 75 bp, synthetic construct
  source 1..75: mol_type = other DNA
aaatcactattgctgccgatggcacaatctcggcgctcaatccgggcgatccggcaaatacggttgcgccagtgg

SEQ ID NO: 647819 - DNA, 75 bp, synthetic construct
  source 1..75: mol_type = other DNA
tcagaccaggatattgttactgacgctcatgtatttgaggcttttgagatccgtcagcatctgggccttacgaac

SEQ ID NO: 647820 - DNA, 75 bp, synthetic construct
  source 1..75: mol_type = other DNA
aaccgtgaaatgaaccaggtggaagctgccgtggcgctacaaaatgaagcagcccgcgaggaatacattcgtcgc

SEQ ID NO: 647821 - DNA, 75 bp, synthetic construct
  source 1..75: mol_type = other DNA
gggcagtgaagtacagcgtggtgatgacggtatttttcgtttaaatgcggaaagccaggcaacgcgtggcacggt

SEQ ID NO: 647822 - DNA, 75 bp, synthetic construct
  source 1..75: mol_type = other DNA
ttttaactaccgatgacattgttcatgaggttaatctggaaggaaagcgtattggctatgtgattaaaacagaaa

SEQ ID NO: 647823 - DNA, 75 bp, synthetic construct
  source 1..75: mol_type = other DNA
aaagaatctgcccgcagaaaaaaaagccgaatttctggcaactctgattgcaatgaaatcaaagggtgaaatctg

SEQ ID NO: 647824 - DNA, 75 bp, synthetic construct
  source 1..75: mol_type = other DNA
agataacggtggaggactggtgattggctctgaaatggtccaggaaaaggcagaaatggcgtgcaaaaatttggc

SEQ ID NO: 647825 - DNA, 75 bp, synthetic construct
  source 1..75: mol_type = other DNA
tgatattgacggcccatcaggcaacgtaaaaacacttgatgaaggtgtcacaaaaatgagtctggttcacatcgg

SEQ ID NO: 647826 - DNA, 75 bp, synthetic construct
  source 1..75: mol_type = other DNA
atgattaccaattatgaagccactgttgtaactactgatgacattgttcacgaggtcaatctggacggaaagcgt

SEQ ID NO: 647827 - DNA, 75 bp, synthetic construct
  source 1..75: mol_type = other DNA
tgtggcacagggaacccgccacagtatgaaagcgtcatcgggcaataacgacttccgcgcacggggctggggctg

SEQ ID NO: 647828 - DNA, 75 bp, synthetic construct
  source 1..75: mol_type = other DNA
aagaggtgatgacccgtactgtaaaaatcagcggtgtggggcgtccgtatctggcagaggagggcgctgaaaccg

SEQ ID NO: 647829 - DNA, 75 bp, synthetic construct
  source 1..75: mol_type = other DNA
cgcagagacagaacagagccaaaatataaagcgttagacatgactgagcataccttaaaggtggcaatcagaacg

SEQ ID NO: 647830 - DNA, 75 bp, synthetic construct
  source 1..75: mol_type = other DNA
aatgtgaataataaccattatcaacaactcatctaccccattcggttctatttatacccgcattggtctaagcca

SEQ ID NO: 647831 - DNA, 75 bp, synthetic construct
  source 1..75: mol_type = other DNA
tctggcgtccaaaccgaccttcgccaacctcgacgcgtgggtgaatgcgatgctggagcaagaataagcatgaga

SEQ ID NO: 647832 - DNA, 75 bp, synthetic construct
  source 1..75: mol_type = other DNA
tgcagccaggcacaggacggacaggcgacgttatggttatcggtcatcgcatttggcaaacaggccgacttcctg

SEQ ID NO: 647833 - DNA, 75 bp, synthetic construct
  source 1..75: mol_type = other DNA
atgacccaaaaacgcagagacagaacagagccgaaatataaggcgttagatatggctgaactggctttaaaggtg

SEQ ID NO: 647834 - DNA, 75 bp, synthetic construct
  source 1..75: mol_type = other DNA
gccacgctgacagagcgggagattgccgaagcggaagaggtaacaaccatcaacgttaaaagcgctggagaataa

SEQ ID NO: 647835 - DNA, 75 bp, synthetic construct
  source 1..75: mol_type = other DNA
ccgcgccagcgcaaaactgtggtcgccgatggcgtgggtcagggttataaggaggttcaggagatcagcccgaat

SEQ ID NO: 647836 - DNA, 75 bp, synthetic construct
  source 1..75: mol_type = other DNA
aaatgctgacaacactcacgatattgatggtatttctctgtgtcggcagttatctgttaagtccaaaatggcagg

SEQ ID NO: 647837 - DNA, 75 bp, synthetic construct
  source 1..75: mol_type = other DNA
agccaacaaacgccggaaacacagcttcaggtattacagaataaaatccgcgtcaatccacagagcagcgaacag

SEQ ID NO: 647838 - DNA, 75 bp, synthetic construct
  source 1..75: mol_type = other DNA
gtgaaagcattatcgccgcgctacacgggcagtcgattttttaacggtggcgggctgtcgccgttaaataaaatc

SEQ ID NO: 647839 - DNA, 75 bp, synthetic construct
  source 1..75: mol_type = other DNA
tgccggaagataaagtgatgcaggtgagcgcaatggcggaccagatgctgctggatgccaaaaatccgcaaagcg

SEQ ID NO: 647840 - DNA, 75 bp, synthetic construct
  source 1..75: mol_type = other DNA
agcgtggggcaaaaaccaccatcgtccggcggcagatcaaaaagaatcatgccgggcatcatggcggggcgtgga

SEQ ID NO: 647841 - DNA, 75 bp, synthetic construct
  source 1..75: mol_type = other DNA
cagagccgaaatataaagcgttagatataacagagctggccttaaaggtggcaatcagaacgatagaccgacatg

SEQ ID NO: 647842 - DNA, 75 bp, synthetic construct
  source 1..75: mol_type = other DNA
atctcatgggtgtttaaccccactcgttcgccatgttgagttaaaccttaatcatgacgtactccgcgatatcga

SEQ ID NO: 647843 - DNA, 75 bp, synthetic construct
  source 1..75: mol_type = other DNA
taaagaaactattcttgggccattacaaataagccttgataagctgcgtatcactcctccccattacgagccaca

SEQ ID NO: 647844 - DNA, 75 bp, synthetic construct
  source 1..75: mol_type = other DNA
ggcgaaggcatcctgacgacaatctatggcattctggtgtttttaccgtggtgggcagttcagttccgccgcctg

SEQ ID NO: 647845 - DNA, 75 bp, synthetic construct
  source 1..75: mol_type = other DNA
ttctttataacggataatattttctgtactagcttaagagtcgagcaagcagaagccattcggcatcatactctt

SEQ ID NO: 647846 - DNA, 75 bp, synthetic construct
  source 1..75: mol_type = other DNA
aagcacttaaaaactcaataacagatgagaagagcaaactatcattcactatatctgatattgagcaatccattg

SEQ ID NO: 647847 - DNA, 75 bp, synthetic construct
  source 1..75: mol_type = other DNA
aatataaagcgttagacatgacagagcacgccttaaaggtggcaatcagggtaatagaccgccacgcgggggaag

SEQ ID NO: 647848 - DNA, 75 bp, synthetic construct
  source 1..75: mol_type = other DNA
cattgagtttacagagcacttgctgagggtggcgataaaaatcatcgaccgcaacgcgggagaaggatacgcgaa

SEQ ID NO: 647849 - DNA, 75 bp, synthetic construct
  source 1..75: mol_type = other DNA
gaaaaccaagcggtaattgttgagacgctgaaaacagccaacatgatgaaaaaccacaatctggcaagagcgata

SEQ ID NO: 647850 - DNA, 75 bp, synthetic construct
  source 1..75: mol_type = other DNA
gttcggcttagatgtactgtactgtagtcgcctgatacatctgcaaccaaaagaagatagagagtcaaacatcta

SEQ ID NO: 647851 - DNA, 75 bp, synthetic construct
  source 1..75: mol_type = other DNA
ttccaaactggtgggcccgaagctcatggcttgtaaacaatgttcgttcaaatgagatagggggcggcattgcat

SEQ ID NO: 647852 - DNA, 75 bp, synthetic construct
  source 1..75: mol_type = other DNA
atggcttttgcctcattaattgaacgccagcgcattcgcctactgctggcgttattattcggtgcctgcggaacg

SEQ ID NO: 647853 - DNA, 75 bp, synthetic construct
  source 1..75: mol_type = other DNA
tagcaccaacaacggcattacggcggtgattggcccgcagggtgagattcaggcgatgatcccgcaattcacccg

SEQ ID NO: 647854 - DNA, 75 bp, synthetic construct
  source 1..75: mol_type = other DNA
taacaaaaaccatctggtgccgtttggcgagtttgtcccgctggagtcgattctgcgtccgttagcaccgttctt

SEQ ID NO: 647855 - DNA, 75 bp, synthetic construct
  source 1..75: mol_type = other DNA
tctactgttgtcagcgcgccggaattaagcgacgccggcgtcaccgccagcgacaaactccccagagtcttgccc

SEQ ID NO: 647856 - DNA, 75 bp, synthetic construct
  source 1..75: mol_type = other DNA
acttatccgttacttacttacttagggctttttaccgttggcgcagccgccgtaaagagatacagcaaatcacgg

SEQ ID NO: 647857 - DNA, 75 bp, synthetic construct
  source 1..75: mol_type = other DNA
tacaacggcaacatagagggattcagacggacagccgagcagttggggggcgatgctgttaaggggtatgatagc

SEQ ID NO: 647858 - DNA, 75 bp, synthetic construct
  source 1..75: mol_type = other DNA
aacgcaacggcaccgctgatgggcaaatcatcgctgattatctggccggagtcggcgataaccgatctggaaatt

SEQ ID NO: 647859 - DNA, 75 bp, synthetic construct
  source 1..75: mol_type = other DNA
tgggccttttcggtcgacaggtgggatgaaaagtggccggaagcgacaaaacgcaccgttatccgcgatgcctat

SEQ ID NO: 647860 - DNA, 75 bp, synthetic construct
  source 1..75: mol_type = other DNA
catcagcataaaggaactaccagtgccgtgcggcgggtggtggaaccgttcggcttcctgatccgcattattgag

SEQ ID NO: 647861 - DNA, 75 bp, synthetic construct
  source 1..75: mol_type = other DNA
cacgaaccggcaactggccgctgtgggtgctgacggcgctgtttggttttgccgctgtactgatgagtctgcgag

SEQ ID NO: 647862 - DNA, 75 bp, synthetic construct
  source 1..75: mol_type = other DNA
ccgaccaccggactcacaccgtacgcacgtaccggcaactggccgctgtgggtactgacggcattgtttggtttt

SEQ ID NO: 647863 - DNA, 75 bp, synthetic construct
  source 1..75: mol_type = other DNA
aacgcgacagcaccgctgatgggtaaatcgtcgttgattatctggccagagtcagcaattaccgatctggaaatg

SEQ ID NO: 647864 - DNA, 75 bp, synthetic construct
  source 1..75: mol_type = other DNA
cattatttcgatggcgacaaccagttgcggcaaggcacctatgccaccctggacagcagcctgggctggcaggcg

SEQ ID NO: 647865 - DNA, 75 bp, synthetic construct
  source 1..75: mol_type = other DNA
gtagcccagggatataaaccttccgggtacaacatcgtgcctactgcgggtcttgatgccaaaccgttcgtcgcc

SEQ ID NO: 647866 - DNA, 75 bp, synthetic construct
  source 1..75: mol_type = other DNA
cagcgtcaccctgttacgccaagttgatgacggcgacatgattaaccccgcgacgggaagcgatgacttaggcgg

SEQ ID NO: 647867 - DNA, 75 bp, synthetic construct
  source 1..75: mol_type = other DNA
ggacagcagcctgggctggcaggcgactgaacggatgaacatttccgtctatgtcgatattaccgtacctatggc

SEQ ID NO: 647868 - DNA, 75 bp, synthetic construct
  source 1..75: mol_type = other DNA
tggcaattatctgcgggtggagatcctctggcaggtcggattgaccggaagtcataaagcgaaagagctcaacga

SEQ ID NO: 647869 - DNA, 75 bp, synthetic construct
  source 1..75: mol_type = other DNA
aaaactgcaaacggctgacaaaaccattctgctttatagcgcctcggatattgagatgttgaccccggaacaact

SEQ ID NO: 647870 - DNA, 75 bp, synthetic construct
  source 1..75: mol_type = other DNA
cgatgactggagagtgtatacccgtgtagcccagggatataaaccttccgggtacaacatcatcgtgcctactgc

SEQ ID NO: 647871 - DNA, 75 bp, synthetic construct
  source 1..75: mol_type = other DNA
ggaggcgaaagtgacagccgaaaccgaccttgagctggccgtatgcagcgcgccgggattcggagagcttccagt

SEQ ID NO: 647872 - DNA, 75 bp, synthetic construct
  source 1..75: mol_type = other DNA
cctctgagtcgggaaatatccaacacatttcccctcaaaatgcaggctgggagtatgtcggttttgatgtctggc

SEQ ID NO: 647873 - DNA, 75 bp, synthetic construct
  source 1..75: mol_type = other DNA
acgcggcgtctcttcagcgcaggacttctataaccccgccgtcaccctgtatgtcgatggcgtccctcagctttc

SEQ ID NO: 647874 - DNA, 75 bp, synthetic construct
  source 1..75: mol_type = other DNA
atgtcgatggcgtccctcagctttccaccaacaccatccaggcgcttaccgatgtgcaaagcgtggagttgctgc

SEQ ID NO: 647875 - DNA, 75 bp, synthetic construct
  source 1..75: mol_type = other DNA
cgacaaactccccagagtcttgcccgggctcaatattgaaaatagcggcaacatgcttttttcgacgatctcgct

SEQ ID NO: 647876 - DNA, 75 bp, synthetic construct
  source 1..75: mol_type = other DNA
gcaatcagcgcctggtgcataacatccttcctgatagccagctcgccgacagcctgctagtcgttgaagtgtaca

SEQ ID NO: 647877 - DNA, 75 bp, synthetic construct
  source 1..75: mol_type = other DNA
tggaaccgttcggcttcctgatccgcattattgagtggtggcagaccggagaaacaccgggcacgtttcgcctgg

SEQ ID NO: 647878 - DNA, 75 bp, synthetic construct
  source 1..75: mol_type = other DNA
gataaatggattatcataccgatttcaaaagataggttggagcacttcgagcgtaaaagaattgatattagaagt

SEQ ID NO: 647879 - DNA, 75 bp, synthetic construct
  source 1..75: mol_type = other DNA
gtgcgcctggcgctgcggcgcagcataacccatccgttcgttcgcaagcaggagctgacggtgtatacgctgaat

SEQ ID NO: 647880 - DNA, 75 bp, synthetic construct
  source 1..75: mol_type = other DNA
ttaaatatcattgtgttatgcgcactgtgtggtgtcggaacacctgttgttacgctaatatctggtcgttattaa

SEQ ID NO: 647881 - DNA, 75 bp, synthetic construct
  source 1..75: mol_type = other DNA
tctgatcaaggctggcggcgttgatccagagcgcggaagttacgttgatattgtggtcaagcgcggcaaccgcgt

SEQ ID NO: 647882 - DNA, 75 bp, synthetic construct
  source 1..75: mol_type = other DNA
acaaaatcgccaaaaacggcgtgattgtcgtcggtcaccgtgaatcttcagtacctttctcttattacgacaatc

SEQ ID NO: 647883 - DNA, 75 bp, synthetic construct
  source 1..75: mol_type = other DNA
tcaggaaatcatgaaatacactctcagatagttattcctggtgttgttatttctgtccttctgcagtgttctgcg

SEQ ID NO: 647884 - DNA, 75 bp, synthetic construct
  source 1..75: mol_type = other DNA
ctgacaatccagtttaacctcgcaggtgttaacgctgaggtaatgaccgcagacactccggtagatgagcgccag

SEQ ID NO: 647885 - DNA, 75 bp, synthetic construct
  source 1..75: mol_type = other DNA
agtgacgttcgttgcatcatctacgccaggccaacaaaaagcgaaattcgctggttgcaggcgctcgggcgtggg

SEQ ID NO: 647886 - DNA, 75 bp, synthetic construct
  source 1..75: mol_type = other DNA
tttacgcgccaactaagccggatctgaaaggtgttaaaaccacatcttcgcttgagtacggccgcgattacaacg

SEQ ID NO: 647887 - DNA, 75 bp, synthetic construct
  source 1..75: mol_type = other DNA
cgcggcgacctgagcaaatacgaattttacgcgcccacaaagccggatctgaaaggggttaaaacctctccgtcc

SEQ ID NO: 647888 - DNA, 75 bp, synthetic construct
  source 1..75: mol_type = other DNA
tgaagccaaactggttggcgatattgtaaaaaactggctggagaacgggcaggatcgcccaacaatctgtttctg

SEQ ID NO: 647889 - DNA, 75 bp, synthetic construct
  source 1..75: mol_type = other DNA
taacccgacagcgcttattcagatcgccagcgccgatacactcattcgccgtgaattcccggacaacatcgacct

SEQ ID NO: 647890 - DNA, 75 bp, synthetic construct
  source 1..75: mol_type = other DNA
acagaagtcggatacgcaaaacatgagcggcttcgacaataccccaccgccagcgccgccggtggtgatgagccg

SEQ ID NO: 647891 - DNA, 75 bp, synthetic construct
  source 1..75: mol_type = other DNA
agaggtggcgaagcgccgcacttttgccattatttctcacccagacgccggtaagactaccatcaccgagaaggt

SEQ ID NO: 647892 - DNA, 75 bp, synthetic construct
  source 1..75: mol_type = other DNA
cgctgggtaacttcggcgttgatcatatgctggatggcctggtggagtgggcacctgcgccgatgccgcgtcaga

SEQ ID NO: 647893 - DNA, 75 bp, synthetic construct
  source 1..75: mol_type = other DNA
gcgagtcgtgtccggtaaatatgaaaaaggcatgaaactgcgccaggtgcgtaccgcgaaagacgtggtgatttc

SEQ ID NO: 647894 - DNA, 75 bp, synthetic construct
  source 1..75: mol_type = other DNA
gatgctggaaaaaggcagttcattcacgctgaacgccggtgatacggccacggataccacggtaaatggcggact

SEQ ID NO: 647895 - DNA, 75 bp, synthetic construct
  source 1..75: mol_type = other DNA
gtggttttatttttgccctgaacatattctctcagacattgttaatgactggcacgatgcagatacactggaaaa

SEQ ID NO: 647896 - DNA, 75 bp, synthetic construct
  source 1..75: mol_type = other DNA
cgtgctatgacccgtgcagttaagcgtcgaggtaagatctggatccgtctgttcccggacaaaccgatcactgaa

SEQ ID NO: 647897 - DNA, 75 bp, synthetic construct
  source 1..75: mol_type = other DNA
cctggatcatcgttttcatagcattattgccgaagcgacgcaaaatcgggtactcatcaaacaagccgctgaatt

SEQ ID NO: 647898 - DNA, 75 bp, synthetic construct
  source 1..75: mol_type = other DNA
atggaacaggttattacaaagcgccgctattacgatattggtctacagattgaagagctgctgtattcaggcgta

SEQ ID NO: 647899 - DNA, 75 bp, synthetic construct
  source 1..75: mol_type = other DNA
ggcaccagcgcggatagcggtgcgacggtaggattcaaccctgactatattctgaatccgggcgatagcattcag

SEQ ID NO: 647900 - DNA, 75 bp, synthetic construct
  source 1..75: mol_type = other DNA
caacgacctgattgtcggtgcggttggtgtgctgcagttcgatgtggtggtgtcgcgtctgaagagtgaatacaa

SEQ ID NO: 647901 - DNA, 75 bp, synthetic construct
  source 1..75: mol_type = other DNA
aacatcgcgaccgcgtggcgtttatgcgcgtggtatccggtaaatatgaaaaaggcatgaagctgcgccaggtgc

SEQ ID NO: 647902 - DNA, 75 bp, synthetic construct
  source 1..75: mol_type = other DNA
gggcgcctgcgccgatgccgcgtcagaccgatacccgtaccgtagaagcgagcgaagacaaatttaccggcttcg

SEQ ID NO: 647903 - DNA, 75 bp, synthetic construct
  source 1..75: mol_type = other DNA
ggggcattcgccattgaaaatggtttgattgcagcgacatcaccggtcacccgcgtgcgtatccgcaacgtcaat

SEQ ID NO: 647904 - DNA, 75 bp, synthetic construct
  source 1..75: mol_type = other DNA
tgcaaacgccaaatggtgttgtcgagtacgagggtagcgccagaattgacggcgtaccgggtactgccgcaccgg

SEQ ID NO: 647905 - DNA, 75 bp, synthetic construct
  source 1..75: mol_type = other DNA
gctgaagcaggctgaatcattctgttctgccgctggtttggattacatagatgtgcttgttgaccaggctggaac

SEQ ID NO: 647906 - DNA, 75 bp, synthetic construct
  source 1..75: mol_type = other DNA
ttgacgatgtcccggtgacctgtatcgatatggcgatgccagtcgtcagtggccagatgcactgtggcacgtctc

SEQ ID NO: 647907 - DNA, 75 bp, synthetic construct
  source 1..75: mol_type = other DNA
gcgctggcgattactggtgctattgccatttcaagtagttgtgctctggaaggtaccgtcacccgacaaattgca

SEQ ID NO: 647908 - DNA, 75 bp, synthetic construct
  source 1..75: mol_type = other DNA
cgcattgaatctatccgtctacaagcgggtaaagcaatgggcttaggtgatgtcagtaatatggttatccctaaa

SEQ ID NO: 647909 - DNA, 75 bp, synthetic construct
  source 1..75: mol_type = other DNA
gttagttgaattcccgttggcattcgcaataaaggcaccttcagaagatatgcgttttcgcgcagcagtggctgc

SEQ ID NO: 647910 - DNA, 75 bp, synthetic construct
  source 1..75: mol_type = other DNA
agcaggcaaaaggggaagatcaacagggttacagggcggaatttattcgcctggttgaactggcgggtggtgtga

SEQ ID NO: 647911 - DNA, 75 bp, synthetic construct
  source 1..75: mol_type = other DNA
cgatgacaattcggtgaaacaagtcacgcaagatccactcgcgacatttagccttgacgtcgacaccggcagtta

SEQ ID NO: 647912 - DNA, 75 bp, synthetic construct
  source 1..75: mol_type = other DNA
ttaacgttggcattgacgatccaaaatcgattgaatcaatggtgaaaaaacagcgggagtctggtgttactctat

SEQ ID NO: 647913 - DNA, 75 bp, synthetic construct
  source 1..75: mol_type = other DNA
gaggtagagcaaagcgccgccgccgctaaagctgctgcagacgcgaaagccttagcccagcaagaagtgcaacaa

SEQ ID NO: 647914 - DNA, 75 bp, synthetic construct
  source 1..75: mol_type = other DNA
gtgtggatcactattgcaccgttcgtgacaatcctggcgaaagatcgcaaaagtgaagagttaccagcttctaat

SEQ ID NO: 647915 - DNA, 75 bp, synthetic construct
  source 1..75: mol_type = other DNA
tatgccggaaaatattaagaacatgatcagccagaaaacgaccagcggagaacaggaacgactcaacgggatccg

SEQ ID NO: 647916 - DNA, 75 bp, synthetic construct
  source 1..75: mol_type = other DNA
cggcgatattaaagattttgcagatctgaaagacaaagccgtggtggtgacttccggcacaacctccgaagtttt

SEQ ID NO: 647917 - DNA, 75 bp, synthetic construct
  source 1..75: mol_type = other DNA
ttctctgatactattttcgtggtcggtacgcgcctgctgaccaaaaagggcggcgatatcaaagattttgccgac

SEQ ID NO: 647918 - DNA, 75 bp, synthetic construct
  source 1..75: mol_type = other DNA
cgtttatgtcgacggtgtggcggcgtcaatggcgtcggtcattgcgatggtgggaaacccggtcattatgccgga

SEQ ID NO: 647919 - DNA, 75 bp, synthetic construct
  source 1..75: mol_type = other DNA
tttagtcgataagcccgctgaagtgaaacttcagggtggttggatacgtatgaaagtacctccacattatgatac

SEQ ID NO: 647920 - DNA, 75 bp, synthetic construct
  source 1..75: mol_type = other DNA
tgaatggcaggaccgaatcggtgttcccctaacattctggggcatcaaaaagatgaaaaccttttggggcacctg

SEQ ID NO: 647921 - DNA, 75 bp, synthetic construct
  source 1..75: mol_type = other DNA
ttctctgacactattttcgtggtcggtacgcgcctgttgaccaaaaagggcggcgatatcaaagattttgccgac

SEQ ID NO: 647922 - DNA, 75 bp, synthetic construct
  source 1..75: mol_type = other DNA
tggcctcgtttattgccatgtgtggcgatcacatcgttatgcctgaaaacgcgatgatgatgatacatgcccccc

SEQ ID NO: 647923 - DNA, 75 bp, synthetic construct
  source 1..75: mol_type = other DNA
acggtaatgacgagccttaccttgagcagcaggagggctttattgttgacggtgtggcctggaaggtccgcattg

SEQ ID NO: 647924 - DNA, 75 bp, synthetic construct
  source 1..75: mol_type = other DNA
cgacaaacaaaaccacacctgcaaatctttactacgcatatacggataacggcaacataacgggtgatgcaatgc

SEQ ID NO: 647925 - DNA, 75 bp, synthetic construct
  source 1..75: mol_type = other DNA
cgcaggtcgttaatgcagctttcacacacagcagcagcgatttttctcatattctggctggcggtgctgaaaaat

SEQ ID NO: 647926 - DNA, 75 bp, synthetic construct
  source 1..75: mol_type = other DNA
cttcaatggcttcggtcgttgcaatggctggcgatcgcgttgttatgccggagaacgccatgatgatgatccata

SEQ ID NO: 647927 - DNA, 75 bp, synthetic construct
  source 1..75: mol_type = other DNA
ttgaaggcatcgccatctataacctgctacggaatcatccggcagacattacggtttatatcgatggcgtggcgg

SEQ ID NO: 647928 - DNA, 75 bp, synthetic construct
  source 1..75: mol_type = other DNA
tgccgcgcaacaagctgcaataaaagaggccgagcaaagatccgtcgccgctaaagccactgcagacgcgaaagc

SEQ ID NO: 647929 - DNA, 75 bp, synthetic construct
  source 1..75: mol_type = other DNA
cggcgtggtgacacgctgaccattaatggtgagacattctgggtggatcgtgtttctccggatgacgggggcagt

SEQ ID NO: 647930 - DNA, 75 bp, synthetic construct
  source 1..75: mol_type = other DNA
ctgataatgcactatatgaagcgaaagaaaccggacgtaataagatagttgtaaaagaggcagaaattcttatca

SEQ ID NO: 647931 - DNA, 75 bp, synthetic construct
  source 1..75: mol_type = other DNA
ggcaaatgtagagcgtttgacaggcgataatcctgaatacgccataccgcaaaaagtgacgattagcattggcgc

SEQ ID NO: 647932 - DNA, 75 bp, synthetic construct
  source 1..75: mol_type = other DNA
gttccggctcagcaggagcgcttcatacgattacctgaagtgatgcacctttgcgggctatcccgttcaaccatc

SEQ ID NO: 647933 - DNA, 75 bp, synthetic construct
  source 1..75: mol_type = other DNA
tctccggatgacgggggcagttgttatctctggctcaaccgtgggcaaccaccggcagttaaccggcgacgataa

SEQ ID NO: 647934 - DNA, 75 bp, synthetic construct
  source 1..75: mol_type = other DNA
tcaaataataagtttgacatttcaattataatacctgttcataacagagaaaacttaattattgaatgtattaag

SEQ ID NO: 647935 - DNA, 75 bp, synthetic construct
  source 1..75: mol_type = other DNA
caaactggcgcaggccgataagcataccaatgccggaatgctgcgcgagcggtttaattattactgcgagaaagt

SEQ ID NO: 647936 - DNA, 75 bp, synthetic construct
  source 1..75: mol_type = other DNA
ccgacgaaaaccgtcttgcagacattgctgccgcatggaccgattatctccaccactgcaaacagcaggggctgc

SEQ ID NO: 647937 - DNA, 75 bp, synthetic construct
  source 1..75: mol_type = other DNA
ctctggcagattggtttaaccggcaagcataaggcgaaagatctcaatgcgcagcaactggatgcgctgtcacac

SEQ ID NO: 647938 - DNA, 75 bp, synthetic construct
  source 1..75: mol_type = other DNA
gggccagtctaatcggtattgtttgtgggcggaatttcatattgacaacagtacagttcttatatctattaataa

SEQ ID NO: 647939 - DNA, 75 bp, synthetic construct
  source 1..75: mol_type = other DNA
ctgtgatatctggaatggagtatcggtaattgctttctgtgccgtgctgtataatatctctctgttatttatgag

SEQ ID NO: 647940 - DNA, 75 bp, synthetic construct
  source 1..75: mol_type = other DNA
tcgccggttatcgataagctattgtttgctgccactaaagcagaccatgtgaccatcgatcagcacgccaatatg

SEQ ID NO: 647941 - DNA, 75 bp, synthetic construct
  source 1..75: mol_type = other DNA
acggtgaggtgttctgggtggatcgtgtttctccggatgacgggggcagttgttatctctggctcaaccgggggc

SEQ ID NO: 647942 - DNA, 75 bp, synthetic construct
  source 1..75: mol_type = other DNA
agtgcgcagttcacctccggtgcacagcgtggcggcgaagttcagggggtttttgacgatccggagtcgctgggt

SEQ ID NO: 647943 - DNA, 75 bp, synthetic construct
  source 1..75: mol_type = other DNA
cgcagttcacctccggtgcacagcgtggcggcgaagttcagggggtttttgacgatccggagtcgctgggttttg

SEQ ID NO: 647944 - DNA, 75 bp, synthetic construct
  source 1..75: mol_type = other DNA
atacagtcagcgcggcggaagtgggagccagagttgcacaatcgctcggcgtcccgcgcgagcaaattatcaccc

SEQ ID NO: 647945 - DNA, 75 bp, synthetic construct
  source 1..75: mol_type = other DNA
ggcacactaagtgacaggacctatactaaaataatattaagtgattttgaatatagaaaaattagcgaaataaaa

SEQ ID NO: 647946 - DNA, 75 bp, synthetic construct
  source 1..75: mol_type = other DNA
agaaagacgtaaggatccaaaaagaggtgaaacctcgaaggtgtttcaccgcaaagtcatgggacggaaaggcgt

SEQ ID NO: 647947 - DNA, 75 bp, synthetic construct
  source 1..75: mol_type = other DNA
acgttcatatttggtaggtgagttgcatgctgactggttagacgaaaaagaagatcttatccaaactgatagaag

SEQ ID NO: 647948 - DNA, 75 bp, synthetic construct
  source 1..75: mol_type = other DNA
tggatttgccaaaagataccgaagaagaagctgcggcagtgaaacaggcgattggtgacgcccctttcctgctgg

SEQ ID NO: 647949 - DNA, 75 bp, synthetic construct
  source 1..75: mol_type = other DNA
ttgttattaagtttgcaaccggtagcagatcgtctgctgcgccccatcgaaagcacctatccgacatggaacaat

SEQ ID NO: 647950 - DNA, 75 bp, synthetic construct
  source 1..75: mol_type = other DNA
cgaatcagttggccatcgactcgccgcttaatccgtgggaacgggcaatcccttctccggtctggttgatgcata

SEQ ID NO: 647951 - DNA, 75 bp, synthetic construct
  source 1..75: mol_type = other DNA
ttggcggtatgctactgccgcttccattgatgctgataattatcggcgtgggtctggcgctactctggtttagcc

SEQ ID NO: 647952 - DNA, 75 bp, synthetic construct
  source 1..75: mol_type = other DNA
ggtattcgcttatggcgcgaaaatccgggatcaaaactgatcttcacgggaggcgtagcaaaaaccaatacggtg

SEQ ID NO: 647953 - DNA, 75 bp, synthetic construct
  source 1..75: mol_type = other DNA
ttaatgaaggtattcgtttatggcgcgaaaatccgggatcaaagctgatcttcacaggaggcgtggcaaaaacca

SEQ ID NO: 647954 - DNA, 75 bp, synthetic construct
  source 1..75: mol_type = other DNA
gacttggctcttatagacgacgaattcctgataaaaaatcaaaaaactttagaaataacgatgcagttccatcag

SEQ ID NO: 647955 - DNA, 75 bp, synthetic construct
  source 1..75: mol_type = other DNA
agatggcgattgacgccgatcttaacgccgggttgatcaaccaggcgcaggcgcaaacccggcgtaaagatgttg

SEQ ID NO: 647956 - DNA, 75 bp, synthetic construct
  source 1..75: mol_type = other DNA
gcctatcagtttaagcctcggctacaagctggtggcgctggtcgataaagcgcagggcaacccgctcacccagcg

SEQ ID NO: 647957 - DNA, 75 bp, synthetic construct
  source 1..75: mol_type = other DNA
ttgtttgcgccggggctgcatgtgctgtcgtataacgaagtgccggacgagctggagttgaagattatgggggcg

SEQ ID NO: 647958 - DNA, 75 bp, synthetic construct
  source 1..75: mol_type = other DNA
aataaaggataaatggcaggttgttttcacaacccgtaacaactacttggcagatctgaactatgctttcataga

SEQ ID NO: 647959 - DNA, 75 bp, synthetic construct
  source 1..75: mol_type = other DNA
cgtcaccaaaggggccgagcgtatttccgaggtttctgcccgctttaccctggacgcgatgcccggcaaacagat

SEQ ID NO: 647960 - DNA, 75 bp, synthetic construct
  source 1..75: mol_type = other DNA
caagattgtgcgtagctatattcctgatttatttaattatgacgacatcacgcagttgcataaccgcctgtcgtc

SEQ ID NO: 647961 - DNA, 75 bp, synthetic construct
  source 1..75: mol_type = other DNA
aaaggtgtgcagccgattacaaattttgacaccaaccgctacctcggaaaatggtatgaaatagctcggcttgag

SEQ ID NO: 647962 - DNA, 75 bp, synthetic construct
  source 1..75: mol_type = other DNA
ggattattgctgatgtgggccgtctgcgcaggcgttattcacggcgtggggtttcgtccgcagaaggttctttgg

SEQ ID NO: 647963 - DNA, 75 bp, synthetic construct
  source 1..75: mol_type = other DNA
atatggtatcggcgcgggtattattgccggacacaaactgttgcgtggtgggttctcgaatgccggagaagtggg

SEQ ID NO: 647964 - DNA, 75 bp, synthetic construct
  source 1..75: mol_type = other DNA
atcatcctgatgatcatcaactttatcgtcgtcaccaaaggggccgagcgtatttccgaggtttctgcccgcttt

SEQ ID NO: 647965 - DNA, 75 bp, synthetic construct
  source 1..75: mol_type = other DNA
gcgcggcgctcaattacagccagttgctgaaagtgtaccgcgcgctgctgaccgaaggcgtttccctgcgcgata

SEQ ID NO: 647966 - DNA, 75 bp, synthetic construct
  source 1..75: mol_type = other DNA
gaaacaggtgaccgtgttgatatcctttacgacagtgaatcatcattgtggatgataaaaaaaatcccagagggt

SEQ ID NO: 647967 - DNA, 75 bp, synthetic construct
  source 1..75: mol_type = other DNA
gaccaaagaaataataaacaagcttaatgaggaggaggatgaagatttccgactattaaacagtaatataccagc

SEQ ID NO: 647968 - DNA, 75 bp, synthetic construct
  source 1..75: mol_type = other DNA
cttggtaaagcgctgggcggggcttctggtggttataccgcggcgcgcaaagaggtggttgaatggctgcgctag

SEQ ID NO: 647969 - DNA, 75 bp, synthetic construct
  source 1..75: mol_type = other DNA
tatgttataagtcatggggagactcatttctctgctattaccaggtttatggtcgataaacaagaaatctctatt

SEQ ID NO: 647970 - DNA, 75 bp, synthetic construct
  source 1..75: mol_type = other DNA
cgctgttattgattgaagccttacgcgatccgtttgcccgccggaagatcgatgcgttggaaatgtcatggatcc

SEQ ID NO: 647971 - DNA, 75 bp, synthetic construct
  source 1..75: mol_type = other DNA
tcgattatgctcaacccggtactgttcgcactactggagaaatatctggcgaagaccgaaacgctggaagagcag

SEQ ID NO: 647972 - DNA, 75 bp, synthetic construct
  source 1..75: mol_type = other DNA
cttccattaaagtgctggagatggtcgaagcgggcagcgaactgcgtgaccgcctgtgggctaacgcgcgtcagt

SEQ ID NO: 647973 - DNA, 75 bp, synthetic construct
  source 1..75: mol_type = other DNA
atgcgtggagaattttatcagcagttaactaacgatctggaaaccgcacgggcggaagggttgtttaaagaagag

SEQ ID NO: 647974 - DNA, 75 bp, synthetic construct
  source 1..75: mol_type = other DNA
gcttctacgtgataatctagttcaaaaaaaaattgttatcgttagcggagacggtggggttgggaaaacagctgt

SEQ ID NO: 647975 - DNA, 75 bp, synthetic construct
  source 1..75: mol_type = other DNA
aattatccaatggaaagggagactataaaaacaatattacttttgacactgtttaatgaccactctattggaatg

SEQ ID NO: 647976 - DNA, 75 bp, synthetic construct
  source 1..75: mol_type = other DNA
agggatggctttggcggtacagattacagaaactctttgcacgaagaagatagaattaaagcttgcgatgatgtg

SEQ ID NO: 647977 - DNA, 75 bp, synthetic construct
  source 1..75: mol_type = other DNA
gattagcgccaaagtcttccgttcgttcttcgataacccgcaaatggcgttagcgaaagataacgaacaagacat

SEQ ID NO: 647978 - DNA, 75 bp, synthetic construct
  source 1..75: mol_type = other DNA
tgcacctgttgcatggctagttggagggcgtttgttcacaactgagatagctgcggggatgtacgctagtgaggt

SEQ ID NO: 647979 - DNA, 75 bp, synthetic construct
  source 1..75: mol_type = other DNA
ttagcaaccgcttttcagcgagccagtgagggccaattttttgtaacaccgacatgcgatacaaaaattttagat

SEQ ID NO: 647980 - DNA, 75 bp, synthetic construct
  source 1..75: mol_type = other DNA
atgggctatggtgtcccctttaatacgaggttgcatcaaaaccgccccatgaagcgggcgggcgaggcggggaaa

SEQ ID NO: 647981 - DNA, 75 bp, synthetic construct
  source 1..75: mol_type = other DNA
caggcacaggtgatacagggcaggcggtggaggccgcctgtcagcccgcgcgaaaacccctggcaggctggcgcc

SEQ ID NO: 647982 - DNA, 75 bp, synthetic construct
  source 1..75: mol_type = other DNA
gtggtcactacatccttcagggcagcaggcacaggtgatacagggcaggcggtggaggccgcctgtcagcccgcg

SEQ ID NO: 647983 - DNA, 75 bp, synthetic construct
  source 1..75: mol_type = other DNA
atgcgtcatttcgaggtgtgccgtttaaggttgaagaagaaagtgcgggaaccggtcgccgtgtggaaacacatg

SEQ ID NO: 647984 - DNA, 75 bp, synthetic construct
  source 1..75: mol_type = other DNA
tgccgaagcggcgctgcgtatttcgcgtggcaccaaaactaccttcagctactggggaatggtggcggcccacct

SEQ ID NO: 647985 - DNA, 75 bp, synthetic construct
  source 1..75: mol_type = other DNA
tgttgttgaatattgtcggcctcgcgctgtttctttcctggtatattcccgttaatcatggattctggttgccaa

SEQ ID NO: 647986 - DNA, 75 bp, synthetic construct
  source 1..75: mol_type = other DNA
tttatggcttttccgggcgtccccctggcggggcgggctgtcgtgaacggagccagcgaagctgtctccgccctg

SEQ ID NO: 647987 - DNA, 75 bp, synthetic construct
  source 1..75: mol_type = other DNA
ttcgacacgccgtggtgtcagccggaaagcgacgttattgcagaattaagccgccgtttcagctgcacgccggag

SEQ ID NO: 647988 - DNA, 75 bp, synthetic construct
  source 1..75: mol_type = other DNA
cccgtgcagaaaccctgttacccggggcaaccaccgatgtctgggtgatggtcggacagacggaggcgcgggatg

SEQ ID NO: 647989 - DNA, 75 bp, synthetic construct
  source 1..75: mol_type = other DNA
tgtacatggtcacgcactggatacccacgctgaatggggggtaccagtatgtgcacaacggcggtacggcgtctg

SEQ ID NO: 647990 - DNA, 75 bp, synthetic construct
  source 1..75: mol_type = other DNA
agacgctgatgtcatcctgttctgcactggatgactgcatcagtgacagcttcagcggtttcagtatcgatggcg

SEQ ID NO: 647991 - DNA, 75 bp, synthetic construct
  source 1..75: mol_type = other DNA
atggcctgtcggaaattacatcaccttccctgttattattctctttttcctcctgttctgattctgattactgct

SEQ ID NO: 647992 - DNA, 75 bp, synthetic construct
  source 1..75: mol_type = other DNA
gctggcgcatttctggtgctggtcaatgctttcgtggtcaacgactttaccgtcacctatgttgccagcaactcc

SEQ ID NO: 647993 - DNA, 75 bp, synthetic construct
  source 1..75: mol_type = other DNA
acgcaaactggcatgcacgctcaccataacctgagtcttggcgtggcgaactctatcgcggcggtggaagagggc

SEQ ID NO: 647994 - DNA, 75 bp, synthetic construct
  source 1..75: mol_type = other DNA
aagcactggacgatgcccgcgtggattcgattgaagtggcccacggcgacggtttgcagggttccagctttaact

SEQ ID NO: 647995 - DNA, 75 bp, synthetic construct
  source 1..75: mol_type = other DNA
gcgtcactgtgaaacggcggcggcgcgttatggcttaagtgcggtggatattctcgttgagctgggcaaacgccg

SEQ ID NO: 647996 - DNA, 75 bp, synthetic construct
  source 1..75: mol_type = other DNA
ttgatcatgtcgacctgggctccgcgaaagggacgccgagtgatatctatgtcggcaccaaagacattgccgagc

SEQ ID NO: 647997 - DNA, 75 bp, synthetic construct
  source 1..75: mol_type = other DNA
acggcttaggcaccagcctgatgatggaaatgagcattaaaagcattttgaaggatttgtccatcagcgctgatg

SEQ ID NO: 647998 - DNA, 75 bp, synthetic construct
  source 1..75: mol_type = other DNA
cgcggcgaatacatcctctgcatggacgatgacgactactacccggcagataaaatctcttacaccatcgccatg

SEQ ID NO: 647999 - DNA, 75 bp, synthetic construct
  source 1..75: mol_type = other DNA
caatgcgctgtggtcgcgggaatctctgttgttagcgaacaacgttttgctggtcgccgcgatgctggtggtgtt

SEQ ID NO: 648000 - DNA, 75 bp, synthetic construct
  source 1..75: mol_type = other DNA
cggcgatagcgtcgatattcatgaatatcgcttcaccttccgtgatgtcaaagaggtgactggtccgaactggcg

SEQ ID NO: 648001 - DNA, 75 bp, synthetic construct
  source 1..75: mol_type = other DNA
atgacggtgctcggcctggcaatggcctgctggattgcggtgctggcaattgcggaagctgcgctgcgtatttca

SEQ ID NO: 648002 - DNA, 75 bp, synthetic construct
  source 1..75: mol_type = other DNA
tgtgtcggcccagcatattcagtatgcgcgtgagcttggcatggataccgtcggttttctgatgatgagccatat

SEQ ID NO: 648003 - DNA, 75 bp, synthetic construct
  source 1..75: mol_type = other DNA
gggctgctgtgcctgtttgatcctcgctatcgtaagcgcgtgagcccgccaaaaactgcgccggaggctgtatga

SEQ ID NO: 648004 - DNA, 75 bp, synthetic construct
  source 1..75: mol_type = other DNA
tcggctttttgctgttcattctctttacctctaacccgttctcacgcacgctgccgaacttcccgattgaagggc

SEQ ID NO: 648005 - DNA, 75 bp, synthetic construct
  source 1..75: mol_type = other DNA
agcgtcaaagtgataagtgccgtaaatgggaccatgcctttgtttgctcgcgtttcggtgacgtcccggagtcct

SEQ ID NO: 648006 - DNA, 75 bp, synthetic construct
  source 1..75: mol_type = other DNA
accctgccagaaggtcagcgcgccggggatgtggattttaaattcatatcagacacgaatgattttaaaaccggg

SEQ ID NO: 648007 - DNA, 75 bp, synthetic construct
  source 1..75: mol_type = other DNA
cagtgatgaagcagggaataacgtggttaacctgctggctaaactgaccagccatgatattgaaactgcggcaaa

SEQ ID NO: 648008 - DNA, 75 bp, synthetic construct
  source 1..75: mol_type = other DNA
tattcgccgtctggtgatcatgggtggttctgccggacgcggcaactgtacgccaaacgccgagtttaatatcgc

SEQ ID NO: 648009 - DNA, 75 bp, synthetic construct
  source 1..75: mol_type = other DNA
caggttgatccacgcaaagccgccgtcgaagccgctatcgcccgcgccaaagcacgcaagctggaacagcaacag

SEQ ID NO: 648010 - DNA, 75 bp, synthetic construct
  source 1..75: mol_type = other DNA
ccttttgcgatggcggcacagcgccagggcgtgcaggtactggctaacccgctgcgcgtggaggaaaaccgctat

SEQ ID NO: 648011 - DNA, 75 bp, synthetic construct
  source 1..75: mol_type = other DNA
tacgggctaaatatcctcagtggctgattgatgctgcccgtgaaaaatatcagccgtggtggcagtttggcgaag

SEQ ID NO: 648012 - DNA, 75 bp, synthetic construct
  source 1..75: mol_type = other DNA
ctataaccgtctggcccgcgccggttttgaatctgcgcaggagcaggagcgcgccatgcaggccacccgggaaaa

SEQ ID NO: 648013 - DNA, 75 bp, synthetic construct
  source 1..75: mol_type = other DNA
caggaaagcgttaacagcacgaaaaaggcggcaaaagagatacagcgtgccgcccgtgcccgggaaacgctcggt

SEQ ID NO: 648014 - DNA, 75 bp, synthetic construct
  source 1..75: mol_type = other DNA
ggcgaggttgtcggtgatgtaattgaaaacacggtcaaaaaaggcaaaggatttaaattccccggcattgccggt

SEQ ID NO: 648015 - DNA, 75 bp, synthetic construct
  source 1..75: mol_type = other DNA
gccgatgccataagctgggcgggtgaaaagtttccgggactgaccacggcagtggtgggtgccacgaccgccatt

SEQ ID NO: 648016 - DNA, 75 bp, synthetic construct
  source 1..75: mol_type = other DNA
tccgcgcccgatacacccaggaagaaatcgacgccgcccgcaaaaaataccagccatggtggcagtttggggaag

SEQ ID NO: 648017 - DNA, 75 bp, synthetic construct
  source 1..75: mol_type = other DNA
gttaccctggtggccatcggcccgttaaccaatattgcgctgttactttcacaatgcccggaatgtaagccgtat

SEQ ID NO: 648018 - DNA, 75 bp, synthetic construct
  source 1..75: mol_type = other DNA
cagaccaccgaagcattttacaactcattgcgccacgccgaagcgctgacctttggcctgaactgtgcgctgggg

SEQ ID NO: 648019 - DNA, 75 bp, synthetic construct
  source 1..75: mol_type = other DNA
gcggaaatcaactttgcggcggcgaaactggcgcgagcttgtgctgatgagtggaccgcgcgcacgccggagaaa

SEQ ID NO: 648020 - DNA, 75 bp, synthetic construct
  source 1..75: mol_type = other DNA
caacaggctaatgcggaaccagaagaacaggtcgatccgcgcaaagccgccgtcgaagccgctattgcccgtgcc

SEQ ID NO: 648021 - DNA, 75 bp, synthetic construct
  source 1..75: mol_type = other DNA
ggtgctggacggcggtatgggcaccatgatccagaattatcgtctgaacgaagccgattttcgcggtgagcgttt

SEQ ID NO: 648022 - DNA, 75 bp, synthetic construct
  source 1..75: mol_type = other DNA
tttcgtaatatcacttttgacgggctggtggcggcttatcgagagtccaccaaagcgctggtggaaggtggcgcg

SEQ ID NO: 648023 - DNA, 75 bp, synthetic construct
  source 1..75: mol_type = other DNA
gtggaccgcgcgcacgccggagaaaccgcgctacgttgccggtgttctcggcccgaccaaccgcacggcgtctat

SEQ ID NO: 648024 - DNA, 75 bp, synthetic construct
  source 1..75: mol_type = other DNA
aaggtgaatttactgcgggtacgacagtcgtcgatattgacggtcggctggataaaccggcaaatgttcaggttg

SEQ ID NO: 648025 - DNA, 75 bp, synthetic construct
  source 1..75: mol_type = other DNA
tgagcacaatcgaaaaccactggagaaaccggcgtttctggcgattcgtgatgcgctaatgtgcgcgcctgaacc

SEQ ID NO: 648026 - DNA, 75 bp, synthetic construct
  source 1..75: mol_type = other DNA
ctcgctactttgccggagttgaatcgcaccggaaaaatgctccacgccctgtttagccactaccgtagcggcagt

SEQ ID NO: 648027 - DNA, 75 bp, synthetic construct
  source 1..75: mol_type = other DNA
gctgtcgaagcggctattgcccgtgccaaagcacgcaagctggaacagcaacaggctaatgcggagccagaagaa

SEQ ID NO: 648028 - DNA, 75 bp, synthetic construct
  source 1..75: mol_type = other DNA
ttgacgaatatcgcgctattgctttcacagtgcccggaatgcaaaccacatattcgtcgtctggtgatcatgggc

SEQ ID NO: 648029 - DNA, 75 bp, synthetic construct
  source 1..75: mol_type = other DNA
agtaaacctgcaaacgtgcaggtggcgctggatctggatgtgaaaggcttccagcagtgggtggcggaagtactg

SEQ ID NO: 648030 - DNA, 75 bp, synthetic construct
  source 1..75: mol_type = other DNA
taaccagttacgtctgaatggtgtcgagttgcttgataaagaaaccacgcgtaaggacgttccatccctgcgttt

SEQ ID NO: 648031 - DNA, 75 bp, synthetic construct
  source 1..75: mol_type = other DNA
tatcctcattgggcttgttgttatgtctatgttgtgtttattacaaacaggtaggcgattattcaatataatcaa

SEQ ID NO: 648032 - DNA, 75 bp, synthetic construct
  source 1..75: mol_type = other DNA
cggccctattgcttagtttattgattggatgtgggattggttttctctactggttcaagttgccccatatgccag

SEQ ID NO: 648033 - DNA, 75 bp, synthetic construct
  source 1..75: mol_type = other DNA
atgagcaaaaagaagttgattttaacaggtgctttattgtctttgtttgcattagttgggtgtaagcctacagac

SEQ ID NO: 648034 - DNA, 75 bp, synthetic construct
  source 1..75: mol_type = other DNA
cgatccgtggtatccgctgggaacggcgaatatgctgcaagtgctgcatatggggctgcatgtttgccagctgat

SEQ ID NO: 648035 - DNA, 75 bp, synthetic construct
  source 1..75: mol_type = other DNA
ccagaacgttgaatttgcaggattacggcattgccgccggaaacagcgccaacctgattatcctgccggctgaaa

SEQ ID NO: 648036 - DNA, 75 bp, synthetic construct
  source 1..75: mol_type = other DNA
gacatgaataaaaacacagaaacattaaaatattgtccaacttattttcaatcgtatacaaaaaaagaattcgag

SEQ ID NO: 648037 - DNA, 75 bp, synthetic construct
  source 1..75: mol_type = other DNA
ggcgagcgtgaaatcgcccgtaccatgctggaactgctggaaacgccaccggcgggggagggggtgacggggtaa

SEQ ID NO: 648038 - DNA, 75 bp, synthetic construct
  source 1..75: mol_type = other DNA
gccattatgatgctggtaggtcgccgtctggtgccgtggatcatggcgcgtagcgcggcaaccggctcacgcgag

SEQ ID NO: 648039 - DNA, 75 bp, synthetic construct
  source 1..75: mol_type = other DNA
ccaccattgttggcggccttgtgctcgcttttatcctcggcatgattgctaataaactgcgtatttctcctctgg

SEQ ID NO: 648040 - DNA, 75 bp, synthetic construct
  source 1..75: mol_type = other DNA
acgatgagcaaattattgtgcgcctgaattcccttgacgctcagtacgagaaaattgtgttcatcgttcagatct

SEQ ID NO: 648041 - DNA, 75 bp, synthetic construct
  source 1..75: mol_type = other DNA
tgggatatctgttagcgggcgtgctggcaggaccttttactccagggtttgttgccgacaccaaactggcaccag

SEQ ID NO: 648042 - DNA, 75 bp, synthetic construct
  source 1..75: mol_type = other DNA
tctgctcgcacccaaaacccggatattgagattatcgcccgtgcccattatgacgatgaggtggcgtatatctcc

SEQ ID NO: 648043 - DNA, 75 bp, synthetic construct
  source 1..75: mol_type = other DNA
ctttaccatgcatagtgggcgaaccccatatctgtatgtaagcgaggtgcagagcgccatccgcgctgctggagt

SEQ ID NO: 648044 - DNA, 75 bp, synthetic construct
  source 1..75: mol_type = other DNA
tgcgaagaaaccattcgcctcggcggttcgatggtgcaccaccacggtatcggtaaacatcgcgttcactggagc

SEQ ID NO: 648045 - DNA, 75 bp, synthetic construct
  source 1..75: mol_type = other DNA
aacaacctgaactggggaccggataaagtggctgccgaacgtgtgcagatcctcaaaaccggcaacatgggcttt

SEQ ID NO: 648046 - DNA, 75 bp, synthetic construct
  source 1..75: mol_type = other DNA
tggtggaagggtatcgtccgtcgatcgctcgtttgtatgacgctgaagatggcacccaacacttcacccattttg

SEQ ID NO: 648047 - DNA, 75 bp, synthetic construct
  source 1..75: mol_type = other DNA
atgatcaaggcgacggacagaaaactggtggtaggactggagattggtaccgcgaaggttgccgctttagtaggg

SEQ ID NO: 648048 - DNA, 75 bp, synthetic construct
  source 1..75: mol_type = other DNA
acggtaattgcagtaatgaaagctatcagagccgctggaattaaagagaagaatttcgatgaagcaaacaatatt

SEQ ID NO: 648049 - DNA, 75 bp, synthetic construct
  source 1..75: mol_type = other DNA
agatggtacgcagcacttcacgcattttgccgacggaaaatgtgtgctgatctttatggctgaaggcaatccgcg

SEQ ID NO: 648050 - DNA, 75 bp, synthetic construct
  source 1..75: mol_type = other DNA
aaagggtttactgttgattattccaatggcttcggtgatgcaatggatgcttatgaggaaaacatccgcgctgct

SEQ ID NO: 648051 - DNA, 75 bp, synthetic construct
  source 1..75: mol_type = other DNA
ggtacagccacgaatgtcaccctgaaacagggtggagcactggtcaccagtgcgtattaccgtgaaggagatcgg

SEQ ID NO: 648052 - DNA, 75 bp, synthetic construct
  source 1..75: mol_type = other DNA
gctaacccgatgcgcctggcgagtctggcgttaatcgtattggggattattggtctgaaactcagcactcattaa

SEQ ID NO: 648053 - DNA, 75 bp, synthetic construct
  source 1..75: mol_type = other DNA
accgttttcgtaaatttccagatattcatggtatttatactttgccgattccagcagcggtcgtaaaactgggtt

SEQ ID NO: 648054 - DNA, 75 bp, synthetic construct
  source 1..75: mol_type = other DNA
accgttttcgtaaatttccggatattcatggtatttatactttgccgattccggcagcggtcgtaaaactcggtt

SEQ ID NO: 648055 - DNA, 75 bp, synthetic construct
  source 1..75: mol_type = other DNA
aggcatcgcgctctgctattgaactggatatcgactggcccgaatcgaatgacgacctttggaaagatggtgaag

SEQ ID NO: 648056 - DNA, 75 bp, synthetic construct
  source 1..75: mol_type = other DNA
gcctgaccgctattccagatgcgcatcactattatcacggtgaaaaagtggcattcggtacgctgacgcagctgg

SEQ ID NO: 648057 - DNA, 75 bp, synthetic construct
  source 1..75: mol_type = other DNA
aaaccatccacaacatgcctggcggcgcgacgccagatcaggtttacgccgcactgctggtagctgaccagtatg

SEQ ID NO: 648058 - DNA, 75 bp, synthetic construct
  source 1..75: mol_type = other DNA
tatgccattccgattatgttatatgcgcttgcagctggttttcttgctgcggcttctctgtcgccgttgtgcgaa

SEQ ID NO: 648059 - DNA, 75 bp, synthetic construct
  source 1..75: mol_type = other DNA
tcgctacttcccgtgacgttaactccggagccggataataaaatcccggctccggcacaggaaccagagcagata

SEQ ID NO: 648060 - DNA, 75 bp, synthetic construct
  source 1..75: mol_type = other DNA
acaccgaccgacagtctgtgctgcgagctggttctgccggccggaactctcaggctgaaaggtgaactgacaccg

SEQ ID NO: 648061 - DNA, 75 bp, synthetic construct
  source 1..75: mol_type = other DNA
ccggccggaactctcaggctgaaaggtgaactgacaccggcgttattacagacacttatccgcgaaatgaaaggg

SEQ ID NO: 648062 - DNA, 75 bp, synthetic construct
  source 1..75: mol_type = other DNA
tgttactgcggcgcatggaagcgattaacgagtcgctccatccgccgatggataatcgggtacgcgaggcttgtc

SEQ ID NO: 648063 - DNA, 75 bp, synthetic construct
  source 1..75: mol_type = other DNA
atggcagtgcacaacatgtgcgtgccggtttccgtctgggcagccacaacgatatgacctttggtgaaggcacct

SEQ ID NO: 648064 - DNA, 75 bp, synthetic construct
  source 1..75: mol_type = other DNA
aatggtatggtcactttcaggtgctgaccgactgctcaaccgaagtgaaaaaaggcgaagttgtggtggtttgcg

SEQ ID NO: 648065 - DNA, 75 bp, synthetic construct
  source 1..75: mol_type = other DNA
tcactggaggaagcaccgccccccaaacagcagatagtctgcagcaggagctttggggaacgtgtcacaacttat

SEQ ID NO: 648066 - DNA, 75 bp, synthetic construct
  source 1..75: mol_type = other DNA
gtggtgccaagcctgctcgttggcctgctggtgagcgtgttccaggcagtgacgcagattaatgagcagacactg

SEQ ID NO: 648067 - DNA, 75 bp, synthetic construct
  source 1..75: mol_type = other DNA
atgcaccggggccagcccgagcgagttccgtgccggttgtgaagaaaaagtgaatgatgtagccgtcaagttgtc

SEQ ID NO: 648068 - DNA, 75 bp, synthetic construct
  source 1..75: mol_type = other DNA
ctcttttacccggagcctgtgtcgcacaaatagctcgtgagaacggaatcaacgataacctgctctttaactggc

SEQ ID NO: 648069 - DNA, 75 bp, synthetic construct
  source 1..75: mol_type = other DNA
acgcaagcagttaccgttgaaaatcgtcttactcgataaccaacggttaggaatggttcgacaatggcagcaact

SEQ ID NO: 648070 - DNA, 75 bp, synthetic construct
  source 1..75: mol_type = other DNA
taccacgcatcatggccgaagcgtttgatgtcgccagctcaggtcgtcccggtccggttctggtcgatatcccta

SEQ ID NO: 648071 - DNA, 75 bp, synthetic construct
  source 1..75: mol_type = other DNA
catccctggccaacacatcacccgtaaagaccaggttgaagaggcactcgacaccatgctgaacagtgatgggcc

SEQ ID NO: 648072 - DNA, 75 bp, synthetic construct
  source 1..75: mol_type = other DNA
tgccgcgcatcatggctgaagcattcgaagttgccagctcaggtcgtcctggtccggttctggtcgatatcccaa

SEQ ID NO: 648073 - DNA, 75 bp, synthetic construct
  source 1..75: mol_type = other DNA
ttgtatgtcggcggcggtgtcggtatggcgcaggctgttcctgctctgcgtgagtttctcacgaccacaaaaatg

SEQ ID NO: 648074 - DNA, 75 bp, synthetic construct
  source 1..75: mol_type = other DNA
tgggcgcagtagaagcagattatccgtactatctgggcatgctgggaatgcatggcaccaaagcggcgaacttcg

SEQ ID NO: 648075 - DNA, 75 bp, synthetic construct
  source 1..75: mol_type = other DNA
cgttgccatcaccggtcaggtgtccgcaccgtttatcggcaccgacgcatttcaggaagtggatgtcctgggatt

SEQ ID NO: 648076 - DNA, 75 bp, synthetic construct
  source 1..75: mol_type = other DNA
gccatcaataccggaaaggtggcctgctgccttccggaaaaaatatgccggcactgcttcccgtgacgttaacgc

SEQ ID NO: 648077 - DNA, 75 bp, synthetic construct
  source 1..75: mol_type = other DNA
aaacacagtgtgcgtgaactgccggtgaactggtgggtacagccttctgttatccgcaccttcagctcccggggg

SEQ ID NO: 648078 - DNA, 75 bp, synthetic construct
  source 1..75: mol_type = other DNA
gtcgttagcctgtaccaagcacagctttctggtgcagtcgctggaagagttgccgcgcatcatggctgaagcatt

SEQ ID NO: 648079 - DNA, 75 bp, synthetic construct
  source 1..75: mol_type = other DNA
atgcgttgcgggcacaggatgtgaacaccgttttcggttatccgggtggcgcaattatgccggtttacgatgcat

SEQ ID NO: 648080 - DNA, 75 bp, synthetic construct
  source 1..75: mol_type = other DNA
gcaatggcggctatcggttatgcccgtgctaccggcaaaactggcgtttgcatcgccacgtctggtccaggtgca

SEQ ID NO: 648081 - DNA, 75 bp, synthetic construct
  source 1..75: mol_type = other DNA
gaccgactgctcaaccgaagtgaaaaaaggcgaagttgtggtggtttgcggcccgtctggttccggcaaatcaac

SEQ ID NO: 648082 - DNA, 75 bp, synthetic construct
  source 1..75: mol_type = other DNA
ccgggcataccgatgcgatggcctataaaaacaatgtatacaacaactggaacctttcgggcgaccgcgcgcttt

SEQ ID NO: 648083 - DNA, 75 bp, synthetic construct
  source 1..75: mol_type = other DNA
tttggggctcggtagcgtttgtcataggttcggcgctgacgggaaaactggtcagcgtgttcgactatcgggtca

SEQ ID NO: 648084 - DNA, 75 bp, synthetic construct
  source 1..75: mol_type = other DNA
acggcgttgccgtggttgatagtggtgcaaattctgcattgcggcaccttcacggtctgccacctggccgccatg

SEQ ID NO: 648085 - DNA, 75 bp, synthetic construct
  source 1..75: mol_type = other DNA
gttctttaaaacgctgctggtggagctcgcgccggtgttcgactcgctcgacaataaaattattattaccgggca

SEQ ID NO: 648086 - DNA, 75 bp, synthetic construct
  source 1..75: mol_type = other DNA
tcggcgtcaatcgccatctgtttgccgggcatcgcgtctaaggtaaagcgggcagaaacctcggaaatacgctcg

SEQ ID NO: 648087 - DNA, 75 bp, synthetic construct
  source 1..75: mol_type = other DNA
atgagaaagacgggtaaccgccgcgatcgtggggcaaaaaccaccatcgtccggcggcagatcaaaaagaatcat

SEQ ID NO: 648088 - DNA, 75 bp, synthetic construct
  source 1..75: mol_type = other DNA
atctgcacacgttaccccgtctgtggaaaagacgcaacgtggtatcctgattaaagcaggcaggaaactcgtttc

SEQ ID NO: 648089 - DNA, 75 bp, synthetic construct
  source 1..75: mol_type = other DNA
atccagataaatcttggcagtacgggtgcagttacttttgatggcagtgcgaatgtcacgctgggcgtgaccggc

SEQ ID NO: 648090 - DNA, 75 bp, synthetic construct
  source 1..75: mol_type = other DNA
tgtataaaaacaaaaccaaccttaccgtgtttgaacaaagccgtaaattattcaacttgatacctgattcggatg

SEQ ID NO: 648091 - DNA, 75 bp, synthetic construct
  source 1..75: mol_type = other DNA
ttctggagcgtctggcttaaggggattggcttaacgccagaaaccatcggcctgttattgggggcaggtctggtt

SEQ ID NO: 648092 - DNA, 75 bp, synthetic construct
  source 1..75: mol_type = other DNA
ggcgtgttctgggtgatggcgctggtggcgcttccggcaatgtttttgcgcccgaaagttgttccctcatgctga

SEQ ID NO: 648093 - DNA, 75 bp, synthetic construct
  source 1..75: mol_type = other DNA
caatatctcggacatggcgtgttttgggtgatggcgctggtggcgcttccggcaatttttttgcgcccgaaagtg

SEQ ID NO: 648094 - DNA, 75 bp, synthetic construct
  source 1..75: mol_type = other DNA
cactgttaatcctccaaaacaatcaagacagccacgaattagcggcaacagagcaatcacagcagcgcatagcgt

SEQ ID NO: 648095 - DNA, 75 bp, synthetic construct
  source 1..75: mol_type = other DNA
atgattgtcggtatggcaactgatgtgattaatgccattgtcaaaccgttctatgaacgtcagatgagtaagtca

SEQ ID NO: 648096 - DNA, 75 bp, synthetic construct
  source 1..75: mol_type = other DNA
cacagtgaaaatgcttcaaatggtttagatgtactagcttcaagtgcaattaaagcgggtacggctatttatagt

SEQ ID NO: 648097 - DNA, 75 bp, synthetic construct
  source 1..75: mol_type = other DNA
ggtacatccagattaatgggtttaagcactgatgaaattaacgggattctgaaagctttcgagcagatggcatct

SEQ ID NO: 648098 - DNA, 75 bp, synthetic construct
  source 1..75: mol_type = other DNA
taaagaaagcccggaaccggtcagacaactggagcgatggatggtacccaacaagctgatacaccggagccatgc

SEQ ID NO: 648099 - DNA, 75 bp, synthetic construct
  source 1..75: mol_type = other DNA
caaagtttcagatgtcggaacgtcgtcgcaggcaaaatgaactgagcgctgaaaaatacacccgccagcgccgaa

SEQ ID NO: 648100 - DNA, 75 bp, synthetic construct
  source 1..75: mol_type = other DNA
taacaagaccaccagcaaaaataatcacagtgaaaatgcttcgaatggtctggatgtattagctacaagtgcaat

SEQ ID NO: 648101 - DNA, 75 bp, synthetic construct
  source 1..75: mol_type = other DNA
tcattgttgaacttagtttcaatgaaaacgttgttaagggcttgcaaagagttgaaaaggcagctttgcagtcag

SEQ ID NO: 648102 - DNA, 75 bp, synthetic construct
  source 1..75: mol_type = other DNA
ctctttcagagattgtaactaaagccacattacgcaaatttggtattagaggtgtaaataaatacgagacataca

SEQ ID NO: 648103 - DNA, 75 bp, synthetic construct
  source 1..75: mol_type = other DNA
aaggcgagaaaaattagaattaaaacgtgcagagttggataaaattaagataaaagctcgtcaaaaaatctacaa

SEQ ID NO: 648104 - DNA, 75 bp, synthetic construct
  source 1..75: mol_type = other DNA
attagctaccgagtgcagggattctttgacagagtgacccttgcttacagagaattaaatgacactcaaaaagct

SEQ ID NO: 648105 - DNA, 75 bp, synthetic construct
  source 1..75: mol_type = other DNA
ggcggattatggagattggtctgaaaaaagaagcatcacaacgagcggcacaattcgttttaggtgatgaaggtg

SEQ ID NO: 648106 - DNA, 75 bp, synthetic construct
  source 1..75: mol_type = other DNA
aacggtgacagagcagctaatagtcttgatagtttgagttcagcagcagttaaaacagcaggtgcatttatcagc

SEQ ID NO: 648107 - DNA, 75 bp, synthetic construct
  source 1..75: mol_type = other DNA
cagatatgggagctatcaaactggatagaagatattgaatctgatgttcgctatatgggagatggccttatcgaa

SEQ ID NO: 648108 - DNA, 75 bp, synthetic construct
  source 1..75: mol_type = other DNA
tagaagatattgaatctgatgttcgctatgtgggagatggccttgttgaactagctcaacgcttaggcgctacta

SEQ ID NO: 648109 - DNA, 75 bp, synthetic construct
  source 1..75: mol_type = other DNA
tagaagatattgaatctgatgttcgctatgtgggagatggccttatcgaactcgcacaacgcttaggcgctgcta

SEQ ID NO: 648110 - DNA, 75 bp, synthetic construct
  source 1..75: mol_type = other DNA
ctatgaactcagagattgtgcagatactggaagatgccttgaatgcagaaaatactcttggggaaatagcagaca

SEQ ID NO: 648111 - DNA, 75 bp, synthetic construct
  source 1..75: mol_type = other DNA
agcgtgtagagatgctctgtaagcgtgagaacgcatacctgacagccgatcagatatgggagctatcaaactgga

SEQ ID NO: 648112 - DNA, 75 bp, synthetic construct
  source 1..75: mol_type = other DNA
tagaagatattgaatctgatgttcgctatatgggagatggccttatcgaactcgctcaacgcttagccgttatca

SEQ ID NO: 648113 - DNA, 75 bp, synthetic construct
  source 1..75: mol_type = other DNA
ttattagagctgctcaagaaacagttagttcgtgttctaatttagattcagagtttttacaggaagatattgatt

SEQ ID NO: 648114 - DNA, 75 bp, synthetic construct
  source 1..75: mol_type = other DNA
aagccagtgcccacaacggtacggtaaaagtcgtcgaagcgttaatggcacgtaatgagcgtctcgattactgcc

SEQ ID NO: 648115 - DNA, 75 bp, synthetic construct
  source 1..75: mol_type = other DNA
ttttgggcgtggcgtgggcagggcgaaacgttagcctttgccggacataccgacgtggtaccgcctggcgacgca

SEQ ID NO: 648116 - DNA, 75 bp, synthetic construct
  source 1..75: mol_type = other DNA
actatatcgacctgacccttgatcagtttccaggctatcataaccggattgtggcagagcccgttgagtccggcg

SEQ ID NO: 648117 - DNA, 75 bp, synthetic construct
  source 1..75: mol_type = other DNA
ttcaaagtcagcgtcaaagcgtctgatgtcttcctcgctgttgagtcttatcgtctgctggcaaaacagatcgat

SEQ ID NO: 648118 - DNA, 75 bp, synthetic construct
  source 1..75: mol_type = other DNA
cgacatgatcgaccagctggaagcacgcattcgtgcgaaagccagccaactggacgaagcgcgtcgaattgacgt

SEQ ID NO: 648119 - DNA, 75 bp, synthetic construct
  source 1..75: mol_type = other DNA
tgcaggccggactggaagcccgtgtccgggaaaatatcaccctgggcgttcaggccggttatgcccacagcgtca

SEQ ID NO: 648120 - DNA, 75 bp, synthetic construct
  source 1..75: mol_type = other DNA
tgctgtttccccggagggcattatgcactctgatgagagcgggtctgatcaaaatcacacagacgatggtgagca

SEQ ID NO: 648121 - DNA, 75 bp, synthetic construct
  source 1..75: mol_type = other DNA
agtgcctgcatgtgatgggatattgcccggagacaggccgtcccgttgagctgacgttccggggtatgcgtgttc

SEQ ID NO: 648122 - DNA, 75 bp, synthetic construct
  source 1..75: mol_type = other DNA
gtcattatttgtcccgcggccgtttgttgtggctgacgccgttaatttctgccatcggcgtggtggcgctggtgg

SEQ ID NO: 648123 - DNA, 75 bp, synthetic construct
  source 1..75: mol_type = other DNA
ggtgtgcgcagcgtggtgatttatccccgtgcagaaaccctgttacccggagcgaccaccgatgtctgggtgatg

SEQ ID NO: 648124 - DNA, 75 bp, synthetic construct
  source 1..75: mol_type = other DNA
gtggcattgctggttgatgtacagaggacgctgatgaaaggcgatactcctccgggatacgtcttttctccgatc

SEQ ID NO: 648125 - DNA, 75 bp, synthetic construct
  source 1..75: mol_type = other DNA
atggacaataacaccatttctctacaggagttgctcgactgcatttccaagcttcgggatgatgtaaatgccctc

SEQ ID NO: 648126 - DNA, 75 bp, synthetic construct
  source 1..75: mol_type = other DNA
gggaacaacaaaattctttcaagtggctggcagcattactggaagagaaatatgcgggtaaaatcaccatttcgg

SEQ ID NO: 648127 - DNA, 75 bp, synthetic construct
  source 1..75: mol_type = other DNA
gaatcacgcaaccccaaatggtccagggaacaacaaaattctttcaagtggctggcagcattactggaagagaaa

SEQ ID NO: 648128 - DNA, 75 bp, synthetic construct
  source 1..75: mol_type = other DNA
tgtacatggtcacgcactggataccacgctgaatgggggggtaccagtatgtgcacaacggcggtacggcgtctg

SEQ ID NO: 648129 - DNA, 75 bp, synthetic construct
  source 1..75: mol_type = other DNA
gagtttaaatggttgctgctggcaacagcggtatttttgtgggttggtggctggctgtgctggcggttatggcgc

SEQ ID NO: 648130 - DNA, 75 bp, synthetic construct
  source 1..75: mol_type = other DNA
gccgctggcagtttgatgacgataaatgtaataccctgcaccatttaggcgcaggcacgtttgtcaccagcggca

SEQ ID NO: 648131 - DNA, 75 bp, synthetic construct
  source 1..75: mol_type = other DNA
ctgacgtaccggggcatgcgtgttctggtgccgtcaccactggcgacagccatgatacagcacggaacggctgag

SEQ ID NO: 648132 - DNA, 75 bp, synthetic construct
  source 1..75: mol_type = other DNA
ccaatattcaggcgggaacgggcagtaacaacgttattccgggtgaactgtttgtgcagtttaacttccgcttca

SEQ ID NO: 648133 - DNA, 75 bp, synthetic construct
  source 1..75: mol_type = other DNA
ctggacgtgatggtggaactggcgaacgaaggaatgaccatgatggtggtgacccacgaaatgggctttgcccgt

SEQ ID NO: 648134 - DNA, 75 bp, synthetic construct
  source 1..75: mol_type = other DNA
ataaagcgcccgctcgtgaaaaagcattgaaattgctggagcgcgtgggactttccgcacatgccaataaatttc

SEQ ID NO: 648135 - DNA, 75 bp, synthetic construct
  source 1..75: mol_type = other DNA
gtgctaactcaacagtagtcagtacgggcgtggttgactcgattgtcctcgggcctggtggcagcgccgcactgg

SEQ ID NO: 648136 - DNA, 75 bp, synthetic construct
  source 1..75: mol_type = other DNA
atgaacaatatgaacgtaattattgccgatgaccatccgatagtactgttcggtattcgcaaatcacttgagcaa

SEQ ID NO: 648137 - DNA, 75 bp, synthetic construct
  source 1..75: mol_type = other DNA
tgagcatgggtacagccgcagccggcagtaacatgacgttctcaccgtcccggaatggcacgtcactggacctgc

SEQ ID NO: 648138 - DNA, 75 bp, synthetic construct
  source 1..75: mol_type = other DNA
gaaccggtgcagcaaggtgaaatcaccgtcgatggcatcgtggttaacgataagaaaaccgatctggcaaagctg

SEQ ID NO: 648139 - DNA, 75 bp, synthetic construct
  source 1..75: mol_type = other DNA
tccctaatgccaaatcttttaggattttctctaggtggttttgcaatgtggattgcaataggtgatgataatttt

SEQ ID NO: 648140 - DNA, 75 bp, synthetic construct
  source 1..75: mol_type = other DNA
agcatattttgttttccataagcataaatctgccactctatccatatgcagcttagtgttcttagtgttaattgt

SEQ ID NO: 648141 - DNA, 75 bp, synthetic construct
  source 1..75: mol_type = other DNA
caaaacaagagagaaatttaacaggtgttcaaacagatgttggagtgatgttcgaacatgatgccaacacaaagg

SEQ ID NO: 648142 - DNA, 75 bp, synthetic construct
  source 1..75: mol_type = other DNA
cgcttcgccgtcgccattgaaggtgaaaacaatatccgtgccggagtccgctatcgtctcaatgaacagtatcag

SEQ ID NO: 648143 - DNA, 75 bp, synthetic construct
  source 1..75: mol_type = other DNA
ataccgctggtttttgcgccattttccgcaggacggcagctatgccgatgttcaccatgcgctgatcgacgaagg

SEQ ID NO: 648144 - DNA, 75 bp, synthetic construct
  source 1..75: mol_type = other DNA
tcccacgcggcggtagttatgccgatattcatcatgcactgattgaggaaggatatacggactgggcggagagtc

SEQ ID NO: 648145 - DNA, 75 bp, synthetic construct
  source 1..75: mol_type = other DNA
gctgggtgtcgagaacgatatcgccctgctgaattatctctcttctgtgacgttaagtccggcagataaagacta

SEQ ID NO: 648146 - DNA, 75 bp, synthetic construct
  source 1..75: mol_type = other DNA
gtttggcgaagtggtatcagcagcggcagacgtacgggtatttgtcgaaggccgctggcagtttgatgatgataa

SEQ ID NO: 648147 - DNA, 75 bp, synthetic construct
  source 1..75: mol_type = other DNA
tcggcgcacaaaagtggttaagtattacaactgcaatttggggccttctctcggcaatgatgggatttgtcaccg

SEQ ID NO: 648148 - DNA, 75 bp, synthetic construct
  source 1..75: mol_type = other DNA
cgttcagaaaatcaacaatcacctcctggcccacccgcggtatcgccagattaccaaatcccggccccgcccacg

SEQ ID NO: 648149 - DNA, 75 bp, synthetic construct
  source 1..75: mol_type = other DNA
ctttcctcaatgagttagtggctatcgagtgggatcagggcaatgaatttttcccggcaaccagtatgcaaatag

SEQ ID NO: 648150 - DNA, 75 bp, synthetic construct
  source 1..75: mol_type = other DNA
gccgctggcagtttgatgatgataagctcaatacgttgcatcatttaggcgctggcacgtttgttaccagtggta

SEQ ID NO: 648151 - DNA, 75 bp, synthetic construct
  source 1..75: mol_type = other DNA
tatctgatggcaaacaagttgtcgttgatgggtgcgaatgtgaatgcggctgccatgttatctccagtgcgccgg

SEQ ID NO: 648152 - DNA, 75 bp, synthetic construct
  source 1..75: mol_type = other DNA
gtatttgcagtaccagcgtacggcccacagaatgatgtcacgctgaaaatgccggcctttgaatgggttcatgtg

SEQ ID NO: 648153 - DNA, 75 bp, synthetic construct
  source 1..75: mol_type = other DNA
aaagaaacataacaaacatccggcatggataaatgaaatgaataaaaatactccagctgtgagagttgttgatta

SEQ ID NO: 648154 - DNA, 75 bp, synthetic construct
  source 1..75: mol_type = other DNA
caatacaggcactcttcaatctattggggctgtgttttctgtgtgtgcttaccacaccaataacaacaatattgt

SEQ ID NO: 648155 - DNA, 75 bp, synthetic construct
  source 1..75: mol_type = other DNA
ggtgaccgagatcgctaaaaagctgaaccgcagtattaaaaccatcagtagccagaagaaatctgcgatgatgaa

SEQ ID NO: 648156 - DNA, 75 bp, synthetic construct
  source 1..75: mol_type = other DNA
tggccaccgttttacttcctgccggggattctggcgggtgcggcgatcgatattcctgccgggatgcagagcggt

SEQ ID NO: 648157 - DNA, 75 bp, synthetic construct
  source 1..75: mol_type = other DNA
cctgctgggcgactggatctccttctggctgggctggcgttttaaaaagccgttgcatcgctggtcatttctgaa

SEQ ID NO: 648158 - DNA, 75 bp, synthetic construct
  source 1..75: mol_type = other DNA
caataggaataaatttaaaatcagagcaatattttacaagttagtcttggctatgtattatatagagggttattc

SEQ ID NO: 648159 - DNA, 75 bp, synthetic construct
  source 1..75: mol_type = other DNA
aagccgctggttgatgccctggagaataaccagggatgaagaaaattatgcttcccgatttattagtctgatgtg

SEQ ID NO: 648160 - DNA, 75 bp, synthetic construct
  source 1..75: mol_type = other DNA
tttgtgtcgacgcattattgaatcatggtattaagcctaaagatggcccggtacttgtaaccggtgccagcggag

SEQ ID NO: 648161 - DNA, 75 bp, synthetic construct
  source 1..75: mol_type = other DNA
cacgacgtggtgacaatgaacagccgggttaaattccgcaatcttagcgatggcgaagtgcgtgtgcgcacgctg

SEQ ID NO: 648162 - DNA, 75 bp, synthetic construct
  source 1..75: mol_type = other DNA
caattgatatcgctggcagtcagaaaaaattggccgatctgtgtggcgtagcgcagccgacagtttggcgctggc

SEQ ID NO: 648163 - DNA, 75 bp, synthetic construct
  source 1..75: mol_type = other DNA
agctaaagcactttctgtacttggtgctcgcatccacgcagcagaaatggcaaaacgccagcaggcggaggcgtc

SEQ ID NO: 648164 - DNA, 75 bp, synthetic construct
  source 1..75: mol_type = other DNA
tatttcttttgagctttactggtgcagcaatggcgcaaagtgtcaccgtcgatgtgccaggcggatacaaagtgg

SEQ ID NO: 648165 - DNA, 75 bp, synthetic construct
  source 1..75: mol_type = other DNA
ctttgcaacgcccttcaatggattctctggtcgatatgaagtttattacatcagattgcttactaagtgataaat

SEQ ID NO: 648166 - DNA, 75 bp, synthetic construct
  source 1..75: mol_type = other DNA
atcatatattccttacagagctgcgcggtgatgaagcatggaactatctcggtatgctgaatactggtcacaatg

SEQ ID NO: 648167 - DNA, 75 bp, synthetic construct
  source 1..75: mol_type = other DNA
cgtcagcggcctggccgccgccgcccgccacggcattctcatcaaaggtggcgtctatctggaagaaggccgcaa

SEQ ID NO: 648168 - DNA, 75 bp, synthetic construct
  source 1..75: mol_type = other DNA
gatcatctctgttgaagaagtacgtgcactgcgcaaagagatcgaaatatacaaacaggaactgcgcgacgaagg

SEQ ID NO: 648169 - DNA, 75 bp, synthetic construct
  source 1..75: mol_type = other DNA
taaagcgtttgacgaatcaattgaaattggcgtgatggtggaaacaccggctgccgcaacaattgcgcgtcattt

SEQ ID NO: 648170 - DNA, 75 bp, synthetic construct
  source 1..75: mol_type = other DNA
tccggttggagccgcactgctggggctgcgcgttggcgacaccattcactgggaacttccgggcggcgttaccac

SEQ ID NO: 648171 - DNA, 75 bp, synthetic construct
  source 1..75: mol_type = other DNA
agcatggcgcaaaagtgctggtggatggcgctcaggcggtgatgcatcatccggtggatgttcaggcgctggatt

SEQ ID NO: 648172 - DNA, 75 bp, synthetic construct
  source 1..75: mol_type = other DNA
ggtggatggcgctcaggcggtgatgcatcatccggtggatgttcaggcgctggattgcgatttttacgtgttctc

SEQ ID NO: 648173 - DNA, 75 bp, synthetic construct
  source 1..75: mol_type = other DNA
gtgattgacgccgaggctgagttttatcgtcacggctacgcggcggtgcatcgcggtattcataccttaagcgcc

SEQ ID NO: 648174 - DNA, 75 bp, synthetic construct
  source 1..75: mol_type = other DNA
aggggttgtacagctacgaagcgctccagtcccggctggcggaaaacagctttgctcagcgtgccggggtgattg

SEQ ID NO: 648175 - DNA, 75 bp, synthetic construct
  source 1..75: mol_type = other DNA
agcctttttgtccgtcaggcaggctatgccggacttttagttagcctcgacgagatggtgaacctcttcaagttg

SEQ ID NO: 648176 - DNA, 75 bp, synthetic construct
  source 1..75: mol_type = other DNA
ctggggcttaataacatagccgagtatgaacagaatctgatgcactacgcgctatcacagctggaatctgtaccg

SEQ ID NO: 648177 - DNA, 75 bp, synthetic construct
  source 1..75: mol_type = other DNA
acggactggatcacaactggctgccgctgccggtacatccgtggcagtggcagcaaaaaatcgctaccgacttca

SEQ ID NO: 648178 - DNA, 75 bp, synthetic construct
  source 1..75: mol_type = other DNA
tgaccaacatctgcgtgcaaatttgtctggtactcatctggctgaccggttccgattacaacacgttgctgacca

SEQ ID NO: 648179 - DNA, 75 bp, synthetic construct
  source 1..75: mol_type = other DNA
tcgtgaattagagagattgagtcaaagtgatgatatggaaataaaaattgctgcgattaaagcacttggtcgaat

SEQ ID NO: 648180 - DNA, 75 bp, synthetic construct
  source 1..75: mol_type = other DNA
ggccaaagcgccgtggcggtttgaagcaggtacgcccaataccggcggcattattggacttggcgcggcgctgga

SEQ ID NO: 648181 - DNA, 75 bp, synthetic construct
  source 1..75: mol_type = other DNA
ataactctcgccatgaaagagggggttccacagcgtgttctgctgaaagacttccagggcgatatgcgactggtg

SEQ ID NO: 648182 - DNA, 75 bp, synthetic construct
  source 1..75: mol_type = other DNA
tgctgaaggcccgtcgcggactgagtgccagtgacctgattaatcttgatgccgatcgtctgcaatgcctgctga

SEQ ID NO: 648183 - DNA, 75 bp, synthetic construct
  source 1..75: mol_type = other DNA
tttctgattttgaaatttgtggtagagcttacgtgaaagaaaaggctttgacaggcgaacaacttgaacttcttg

SEQ ID NO: 648184 - DNA, 75 bp, synthetic construct
  source 1..75: mol_type = other DNA
cctgtatctgctcgttcatcatgcgagagcagccggaagccgtccggaaacgcctggcacaggcggtgctgcgcg

SEQ ID NO: 648185 - DNA, 75 bp, synthetic construct
  source 1..75: mol_type = other DNA
ctggcaaccctaaaacaaaagagcaataccagctaacgaaacaatttaacatcaaatggctttattcagaggatg

SEQ ID NO: 648186 - DNA, 75 bp, synthetic construct
  source 1..75: mol_type = other DNA
aaacatataattcaggattacaacgagcaagtgtaaatgatgagcacttttcgcttctgattgaaatatcaccaa

SEQ ID NO: 648187 - DNA, 75 bp, synthetic construct
  source 1..75: mol_type = other DNA
gccacgttcagctggttgacgcattctgtgagcgactcgatgccgtcctgccctgggatcgcgccgcggtggatg

SEQ ID NO: 648188 - DNA, 75 bp, synthetic construct
  source 1..75: mol_type = other DNA
tgccatcctgccctgggatcgcgccgcagtagacgccaccacgaagattaaagtggcactgcggctggccgggac

SEQ ID NO: 648189 - DNA, 75 bp, synthetic construct
  source 1..75: mol_type = other DNA
agcctttttgtccgccaggcaggctatgccggtcttttggtcagcctcgacgaaatggtgaacctcttgaagctg

SEQ ID NO: 648190 - DNA, 75 bp, synthetic construct
  source 1..75: mol_type = other DNA
catgccacccgtgcggcggtcgaggaaggcatcgtcccgggcggcggcgtcgccctgatccgtgccaaggccgcg

SEQ ID NO: 648191 - DNA, 75 bp, synthetic construct
  source 1..75: mol_type = other DNA
gcagaccagacgggggcagggaaggtggggtgatctggcataccacggggtcaggtaaatcttacaccatggtgt

SEQ ID NO: 648192 - DNA, 75 bp, synthetic construct
  source 1..75: mol_type = other DNA
aaagcggtggcagaaaactccctgaacccccaggacattgagaaagtcgttaagacaagtctgctaccactgctg

SEQ ID NO: 648193 - DNA, 75 bp, synthetic construct
  source 1..75: mol_type = other DNA
gaaataatgtatccaatagttatttttgtttgtgtctgaaaaaactgaattatacccatggtattgtatctgccc

SEQ ID NO: 648194 - DNA, 75 bp, synthetic construct
  source 1..75: mol_type = other DNA
ctgcgcccgtctcgatgccatcctgccttgggatcgcgctgcggcggatgcaaccacggaggttaaggtggcgct

SEQ ID NO: 648195 - DNA, 75 bp, synthetic construct
  source 1..75: mol_type = other DNA
tgcccgtcctcgagggcgtggccaaggccggcaagccgctgctgatcgtggcggaggaagtcgaaggcgaagcgc

SEQ ID NO: 648196 - DNA, 75 bp, synthetic construct
  source 1..75: mol_type = other DNA
ccgaacgacaccgccattgccggacacgccatcgcggcgggcgccatcctggtgacgaataatacaagagagttt

SEQ ID NO: 648197 - DNA, 75 bp, synthetic construct
  source 1..75: mol_type = other DNA
ttctgaggactatgccagtctcggcactttcttcctgctgtttgtgcaattggttcccgccttttgcctgattac

SEQ ID NO: 648198 - DNA, 75 bp, synthetic construct
  source 1..75: mol_type = other DNA
cattggtgtaggcagcagctttctcccatggtgtttattttgtgtcctgcaactgcgcgcctttcagtgcgttga

SEQ ID NO: 648199 - DNA, 75 bp, synthetic construct
  source 1..75: mol_type = other DNA
agatgccgtcgactattctcgccggggtgatcttgctgtggagcgaaggttcttatccggtcgctgcggttatct

SEQ ID NO: 648200 - DNA, 75 bp, synthetic construct
  source 1..75: mol_type = other DNA
gatcaacattttcacagccaggaagtgaaaaatgaatcagaacaagcgaagtatgcagacagacaaatggaacga

SEQ ID NO: 648201 - DNA, 75 bp, synthetic construct
  source 1..75: mol_type = other DNA
ctcctgccccggtctgtgatcgcctggtgacgctggcggagatcagcaaccgtgatcacattctggaaccctctg

SEQ ID NO: 648202 - DNA, 75 bp, synthetic construct
  source 1..75: mol_type = other DNA
cgaacatctgctcattcatcatgcgcgagcagcctgaagcagtgcttaagcatctggagcaggcggtgctgcgcg

SEQ ID NO: 648203 - DNA, 75 bp, synthetic construct
  source 1..75: mol_type = other DNA
aagtggcactgcggctggccgggacgccgatcggcccgaacgacacggcgattgccgggcacgccatcgccgccg

SEQ ID NO: 648204 - DNA, 75 bp, synthetic construct
  source 1..75: mol_type = other DNA
tcatcatgcgcgagcagccggaaactgtgctgaagcgcctggagcaggcgacactgcgtagtcaccgcattgtgg

SEQ ID NO: 648205 - DNA, 75 bp, synthetic construct
  source 1..75: mol_type = other DNA
ccctgggaccgcgccgcggtggacgccacgacggacatccgggtggcgctgcgcctcgccgggacgccgatcggc

SEQ ID NO: 648206 - DNA, 75 bp, synthetic construct
  source 1..75: mol_type = other DNA
taaccaggggctgcgctcctgttcttgttgcacagcaatccttcctgccgatgaaccggtgtgcccacgctgtag

SEQ ID NO: 648207 - DNA, 75 bp, synthetic construct
  source 1..75: mol_type = other DNA
gcaagcgcgacagtgaaagaatgcatttgatttacgaagttgttgagtttgtaggccgctggtcgatgattgacg

SEQ ID NO: 648208 - DNA, 75 bp, synthetic construct
  source 1..75: mol_type = other DNA
agtatttatccggcaatgggtgcattaatgtttgctttagtcgtcataatgacaatgttttctgctatgacgttt

SEQ ID NO: 648209 - DNA, 75 bp, synthetic construct
  source 1..75: mol_type = other DNA
gctggcgaatgaactcgatgcactaaaccaaacacgtaaagagatcgaacagggaatgcaagttgaagcgctcac

SEQ ID NO: 648210 - DNA, 75 bp, synthetic construct
  source 1..75: mol_type = other DNA
tgccgccggacgactggatgatatgtccgttggcgtggcactgttactttgcgacaacatcggcgaagcgcgcgt

SEQ ID NO: 648211 - DNA, 75 bp, synthetic construct
  source 1..75: mol_type = other DNA
tggcgtagcgttttatctgatgctggcgttacgcacctttttgcgcgatcgggggtggttcgatgagcgtggtat

SEQ ID NO: 648212 - DNA, 75 bp, synthetic construct
  source 1..75: mol_type = other DNA
tatctttggtttcagaagtcaatacctacatcaatacccatcagtggcctggcaaagctgctattggtcgtctga

SEQ ID NO: 648213 - DNA, 75 bp, synthetic construct
  source 1..75: mol_type = other DNA
caaaaactcgccgccagcgatttaggttttgcgctggggccacgtctcaatgctgccgggcgactggatgatatg

SEQ ID NO: 648214 - DNA, 75 bp, synthetic construct
  source 1..75: mol_type = other DNA
cctgtgcgagaaactggagcgcagtcgcgacacgctacccggcgggctggcaatgtatcaccccgaatggcatca

SEQ ID NO: 648215 - DNA, 75 bp, synthetic construct
  source 1..75: mol_type = other DNA
ttctgacctggcaggggatgagtcgcatccgtgccggaaagtgccgtccggggattaaagcgctgctggaagtgg

SEQ ID NO: 648216 - DNA, 75 bp, synthetic construct
  source 1..75: mol_type = other DNA
tggcagcaactgagcggcgtcgaaaaggccgttgagatcctttacaacgcttttcgcgaaggaacgcggattatt

SEQ ID NO: 648217 - DNA, 75 bp, synthetic construct
  source 1..75: mol_type = other DNA
gggggtggcgttttatctgatgctggcgctgcgcacctttttgcgcgatcggggctggtttgatgaacgctgcat

SEQ ID NO: 648218 - DNA, 75 bp, synthetic construct
  source 1..75: mol_type = other DNA
cttctttattgcaaggcgaagttgtgtcagacggcccgttaagtgcagcggagatgacaatggaagtcgcgcaac

SEQ ID NO: 648219 - DNA, 75 bp, synthetic construct
  source 1..75: mol_type = other DNA
cgctcgattcaggggctacacatgcgcgatgcgctggagcggttagacacgctctaccctggcatgatgctcaag

SEQ ID NO: 648220 - DNA, 75 bp, synthetic construct
  source 1..75: mol_type = other DNA
gggatgagccgcatacgcgccggaaaatgccgtccaggaattaaagcgctgctggaagtggcaaaccgtgatgca

SEQ ID NO: 648221 - DNA, 75 bp, synthetic construct
  source 1..75: mol_type = other DNA
caatgtcgcgattcgtaacggcaatgaagcagtattaattggtcagttagagtgtaaatcgatggtcaggatgtg

SEQ ID NO: 648222 - DNA, 75 bp, synthetic construct
  source 1..75: mol_type = other DNA
tggcagcccgcgagcatggctggaatattccttcccgtgccacggcttttcgccggatccagcaactggacgagg

SEQ ID NO: 648223 - DNA, 75 bp, synthetic construct
  source 1..75: mol_type = other DNA
agacgaaatgctgaaccagggcatttcaacacaaacagcttttgcaagcgttgcgggtcattatcaggtcagtgc

SEQ ID NO: 648224 - DNA, 75 bp, synthetic construct
  source 1..75: mol_type = other DNA
agtgtgcgaaccttccggggttgccgaaaacgcccgcaggcgtgatttatgttgctaagaagcaagggtggcaac

SEQ ID NO: 648225 - DNA, 75 bp, synthetic construct
  source 1..75: mol_type = other DNA
gcacaagcctggcagcgactggtcgccgatttaccggaatcattctatacccaggcggcacaagagatatctctg

SEQ ID NO: 648226 - DNA, 75 bp, synthetic construct
  source 1..75: mol_type = other DNA
ccaggcggcaaaagagatatctctgtcagaggcaccgaactttgccgaggccatcattaataaccagatccaggg

SEQ ID NO: 648227 - DNA, 75 bp, synthetic construct
  source 1..75: mol_type = other DNA
atgagagccgcggctagaccccgcggcgctgtcaccgcggcgatcgaaatgctgcgagtcggatcagacgtcgtg

SEQ ID NO: 648228 - DNA, 75 bp, synthetic construct
  source 1..75: mol_type = other DNA
cccgccgtcaattcccagcaactcttgaccggcagcttcaacggcaaaacccagtcgctgctagtgatgcttaac

SEQ ID NO: 648229 - DNA, 75 bp, synthetic construct
  source 1..75: mol_type = other DNA
tatgagctgcaagtggttgctgctcaggatcgtattgccaaaccagaacattatttcagcgcaacaaagctctga

SEQ ID NO: 648230 - DNA, 75 bp, synthetic construct
  source 1..75: mol_type = other DNA
aacggatgtttatgattgttatcaacgaggccccatgtctaacaatctcctgtgttaatgagcaggggctggaaa

SEQ ID NO: 648231 - DNA, 75 bp, synthetic construct
  source 1..75: mol_type = other DNA
gcatcccgtcgcaatgttcacaaaagtgaatttgacgaggatgcctggcagtttctgattgcagattatctgcga

SEQ ID NO: 648232 - DNA, 75 bp, synthetic construct
  source 1..75: mol_type = other DNA
cgcgagctgcgtaacgccagcggcaagctggtcacggaaatcatctatctgaatcgccagggcaaacgcgtgcca

SEQ ID NO: 648233 - DNA, 75 bp, synthetic construct
  source 1..75: mol_type = other DNA
tgaccggcagcttcaacggcaaaacccagtcgctgctagtgatgcttaacgccgacgaccagaaaatcacccttg

SEQ ID NO: 648234 - DNA, 75 bp, synthetic construct
  source 1..75: mol_type = other DNA
attacccgcggcggaagcgatcattaaccctaacttgcgcgactgtaatttcccgtcgaaatcactggcaggcgt

SEQ ID NO: 648235 - DNA, 75 bp, synthetic construct
  source 1..75: mol_type = other DNA
tttctttgtccagttagcccgacagatgaagcataacccggacggcattactgagtctggcctgactaaagggat

SEQ ID NO: 648236 - DNA, 75 bp, synthetic construct
  source 1..75: mol_type = other DNA
aagctattcagcaaacgtctggttatgttgttcgtgctgttccggatgatgcgaagttcccgattattatgttcg

SEQ ID NO: 648237 - DNA, 75 bp, synthetic construct
  source 1..75: mol_type = other DNA
tgcaatagccacagctgatgcagctacagtttctaggactgaaaatagaaaagtgaaaatgattgagatcactaa

SEQ ID NO: 648238 - DNA, 75 bp, synthetic construct
  source 1..75: mol_type = other DNA
tacctgcgtgcggtgaaagtgctgaacaatgcgccgtacatgtacaccgctgttcttggcctgggctgctatgac

SEQ ID NO: 648239 - DNA, 75 bp, synthetic construct
  source 1..75: mol_type = other DNA
aaagtaacaaacaaaaaatcgttggcgttcactggtggtaccaacggtgatcagtcgaaaatctcaaccgctgcg

SEQ ID NO: 648240 - DNA, 75 bp, synthetic construct
  source 1..75: mol_type = other DNA
cgttcactggcggtaccaacggcgatcagtcgaaaatctcaaccgctgcgtacctgcgtgcggtgaaagtgctga

SEQ ID NO: 648241 - DNA, 75 bp, synthetic construct
  source 1..75: mol_type = other DNA
aggagatggaagggctcccggaaaatttaacaactttgccagtctgggttgaaggtcaggataatttcaattgga

SEQ ID NO: 648242 - DNA, 75 bp, synthetic construct
  source 1..75: mol_type = other DNA
gtaaagcgcaacgatgcctgcggatgctttcagagctacatcgtcttggctaccaacaactgcggggtatgtctt

SEQ ID NO: 648243 - DNA, 75 bp, synthetic construct
  source 1..75: mol_type = other DNA
ttgacaaaggcttttttaattcccgttttcaaatacaaatttcatttgataacggtgcacccgatctcaatatca

SEQ ID NO: 648244 - DNA, 75 bp, synthetic construct
  source 1..75: mol_type = other DNA
aatttctttaaattataaagattgtaaagatatggtccatgcttgtaaaaacgcaggtgtgacttttatggctgg

SEQ ID NO: 648245 - DNA, 75 bp, synthetic construct
  source 1..75: mol_type = other DNA
gcaaaaattacatgtgtatacgatcctgaaaatggagaaaatattgcccgtgaattgcagtgtatcaatatgtca

SEQ ID NO: 648246 - DNA, 75 bp, synthetic construct
  source 1..75: mol_type = other DNA
ttggatattttggcgcagaattagctcgttttatgaatatgaatgaaaatgccaaaataacatgtgtttatgatc

SEQ ID NO: 648247 - DNA, 75 bp, synthetic construct
  source 1..75: mol_type = other DNA
gcggaattcgataaatgggaagtggtctgggcctgctgcccgacaggtgtagcccgtcgtatccagggcgtaccg

SEQ ID NO: 648248 - DNA, 75 bp, synthetic construct
  source 1..75: mol_type = other DNA
aaaaaactaaataaacatccctatctcttttttaaagatgcaatcaaaaatattggggtaaaaacaaagaaaata

SEQ ID NO: 648249 - DNA, 75 bp, synthetic construct
  source 1..75: mol_type = other DNA
acagattaaatctttaccacgcttgtcaattaaataaaataaaaacaattaattttgatagggggggattgcctc

SEQ ID NO: 648250 - DNA, 75 bp, synthetic construct
  source 1..75: mol_type = other DNA
acgcagtgttaaaggtatgttgccctggcagcaactgagcggtgtcgaaaaggccgttgagatcctttacaacgc

SEQ ID NO: 648251 - DNA, 75 bp, synthetic construct
  source 1..75: mol_type = other DNA
ggagtaaaagtttttatctgcaagaattgtttccagaatatgaggatgcgggaacgcttcctgatgatgttattg

SEQ ID NO: 648252 - DNA, 75 bp, synthetic construct
  source 1..75: mol_type = other DNA
aagcaacttataactttaaataacatgccatcatggggtgatattcctccacctacacgagaagaattaattgtc

SEQ ID NO: 648253 - DNA, 75 bp, synthetic construct
  source 1..75: mol_type = other DNA
cgcatgaaccacgactggattttgtgcggctggaacagattcgtcagcgagtggagattccgctggtgttgcatg

SEQ ID NO: 648254 - DNA, 75 bp, synthetic construct
  source 1..75: mol_type = other DNA
tgccttccctggctgcgattcgaactggtggaacacattcgcctgccgaaaggttccacttttgcatcaatatgc

SEQ ID NO: 648255 - DNA, 75 bp, synthetic construct
  source 1..75: mol_type = other DNA
gttcagaactcgcccgcattcgccgcacaaggctggtttctttcacgcccggcaccgatagaaacgctgaatacg

SEQ ID NO: 648256 - DNA, 75 bp, synthetic construct
  source 1..75: mol_type = other DNA
caggttcaggacgatatttaccagctttggttgcaaagccagcgccgattactgccgatgctcattcatcgtgat

SEQ ID NO: 648257 - DNA, 75 bp, synthetic construct
  source 1..75: mol_type = other DNA
gtttgtccgtcaggccggatacgccgggctacaggtcaatctggatgaaatggtcaatctgtacaaactgagcaa

SEQ ID NO: 648258 - DNA, 75 bp, synthetic construct
  source 1..75: mol_type = other DNA
gtattccgccacatttgcgtgatgttggtgtacgcaaggaagacattccggcactggcgcaggcggcactggatg

SEQ ID NO: 648259 - DNA, 75 bp, synthetic construct
  source 1..75: mol_type = other DNA
gcggtgtgttgacgttgattggcggcgcaggactgctgtggcgcaggctgacaaatcagcgcgtgcgtgccactt

SEQ ID NO: 648260 - DNA, 75 bp, synthetic construct
  source 1..75: mol_type = other DNA
gtttttaaaagacatggttatataaatgaagatggtagcccatatttgctaagaacacatcaactgaggcatctt

SEQ ID NO: 648261 - DNA, 75 bp, synthetic construct
  source 1..75: mol_type = other DNA
atgaacgacagattacgctttgaagtgaacgataaccaagggcgtttcgtatttccggatacctggttttgccca

SEQ ID NO: 648262 - DNA, 75 bp, synthetic construct
  source 1..75: mol_type = other DNA
taatcgtctcatcccggaaagtttcagtggtgaaatcatctggatgcatcccgaaaaccgaccttatctgcgcgc

SEQ ID NO: 648263 - DNA, 75 bp, synthetic construct
  source 1..75: mol_type = other DNA
aatgccccgcgtaaggcgctgaatgctgcccttaaagggctggcagttggcaatcgtcttatccctgaaggtttc

SEQ ID NO: 648264 - DNA, 75 bp, synthetic construct
  source 1..75: mol_type = other DNA
gtataagaatcgtatatcgattctttacccttgggaaagaagaaaaaatgcgacctgctatcttgggtatttaaa

SEQ ID NO: 648265 - DNA, 75 bp, synthetic construct
  source 1..75: mol_type = other DNA
ctcagacgccttgcccgacaggagcctgactttattgatgtacacgcttacctggcatgcgcatttctggagcag

SEQ ID NO: 648266 - DNA, 75 bp, synthetic construct
  source 1..75: mol_type = other DNA
tctgtcactcacggctctggtctttattctggggtttgctgttacctggctggcggtgactaacagaacactcat

SEQ ID NO: 648267 - DNA, 75 bp, synthetic construct
  source 1..75: mol_type = other DNA
ttccagtagtggatcttaatgagtttgactcacttagtagtggtgcagtacttgtatcaaaacatggctactgca

SEQ ID NO: 648268 - DNA, 75 bp, synthetic construct
  source 1..75: mol_type = other DNA
atagcctctgaaaagtattctaaagcacatgcatttgctattgggaaagaacttgagaaattgagttcattttta

SEQ ID NO: 648269 - DNA, 75 bp, synthetic construct
  source 1..75: mol_type = other DNA
atttaacaacttcatgggaaagcaataaatggaaaggtttatataggtttactaagtttaactcaaaaaacaacc

SEQ ID NO: 648270 - DNA, 75 bp, synthetic construct
  source 1..75: mol_type = other DNA
gctgtttgtaaactggctctataaccattcctctgtgctgcatgaacgagcagaaatcattaaatgcgccgaaat

SEQ ID NO: 648271 - DNA, 75 bp, synthetic construct
  source 1..75: mol_type = other DNA
ctaatcgtggattcattaaggtagcagagcgtaaggtgaagcgtcggcgtgtgtataagtcgatcatcacctgca

SEQ ID NO: 648272 - DNA, 75 bp, synthetic construct
  source 1..75: mol_type = other DNA
agaggaaaacacttcaagatgaaaagtcaaaattaaatcaacgagttacagctatgcctaaaactcaacaagaaa

SEQ ID NO: 648273 - DNA, 75 bp, synthetic construct
  source 1..75: mol_type = other DNA
ccatcaaagggattaaacgctataaacagagccagctactggcggtggggaatccaaccgatctggcgattgaag

SEQ ID NO: 648274 - DNA, 75 bp, synthetic construct
  source 1..75: mol_type = other DNA
aattgtggtatcaatcaatggtgcggattctgcgctggcacagctgtcggatttacaggccattgctccagttat

SEQ ID NO: 648275 - DNA, 75 bp, synthetic construct
  source 1..75: mol_type = other DNA
gccattggtttaagagtgtcatgtgggcgctcggactggtcatgtttgcggggcaatgcgtcgcacagggctggc

SEQ ID NO: 648276 - DNA, 75 bp, synthetic construct
  source 1..75: mol_type = other DNA
tccgcccggtggtcaggaagctggtcgcagagatgcgccggaaccctatcgacgttctcttccgaccaaaagacg

SEQ ID NO: 648277 - DNA, 75 bp, synthetic construct
  source 1..75: mol_type = other DNA
aaccttgatggcacatcgatatacctgacaatggcggcggtgtttatcgcccaggccactaacagtcagatggat

SEQ ID NO: 648278 - DNA, 75 bp, synthetic construct
  source 1..75: mol_type = other DNA
cctggtgccggaatgaacgtcgatccggcaacgcttgatgcgaaagcggtagcggtttacgccgatcaggcgaaa

SEQ ID NO: 648279 - DNA, 75 bp, synthetic construct
  source 1..75: mol_type = other DNA
caggcggtccggatactgctgaagactattatgcaacatatcacccattatggagagaacatccggaagtattgc

SEQ ID NO: 648280 - DNA, 75 bp, synthetic construct
  source 1..75: mol_type = other DNA
cgtgtgaagtggtactgctctctggcgaataagcacgataaggctatcgctgcactgaccaatgtaaaaatttaa

SEQ ID NO: 648281 - DNA, 75 bp, synthetic construct
  source 1..75: mol_type = other DNA
aacctcgatgggacatcgatatacctgacgatggcggcagtgtttatcgctcaggcgactaacagtcagatggat

SEQ ID NO: 648282 - DNA, 75 bp, synthetic construct
  source 1..75: mol_type = other DNA
ctggcattgcgggcatggaaagcatgaaggcggtcggtcgtaccggtgccgttgctctgctttattttgaggtag

SEQ ID NO: 648283 - DNA, 75 bp, synthetic construct
  source 1..75: mol_type = other DNA
tgaaaaagatgacaaaggcattgaacgatatggtctaagatttttttcagcaaagggttatgctggggatatcaa

SEQ ID NO: 648284 - DNA, 75 bp, synthetic construct
  source 1..75: mol_type = other DNA
gaggtggatagcggtatggtcgcagtgcgtatttcgcccgatatggagatggccgttgtcggctcgcccgggcac

SEQ ID NO: 648285 - DNA, 75 bp, synthetic construct
  source 1..75: mol_type = other DNA
agtgccaggtaaagagatgccggacctcagtgcttttcaactggaaggttgtcaggtgctggagtatgcgcgaca

SEQ ID NO: 648286 - DNA, 75 bp, synthetic construct
  source 1..75: mol_type = other DNA
tcaagttgttgacggcgatgcgctacaattagccggacgtggtagctggtttgtagcaaccaccgaagaactggc

SEQ ID NO: 648287 - DNA, 75 bp, synthetic construct
  source 1..75: mol_type = other DNA
ccgtttactgcgcaaagccggatgagcgggatcaacatcgacaaccgcatgatccgtaaaggttctgtcgatgcc

SEQ ID NO: 648288 - DNA, 75 bp, synthetic construct
  source 1..75: mol_type = other DNA
ttaaaactgtatttggtgggaagaacggaaaagagatagaggggatgttatctattctcgatgctaccaaaagag

SEQ ID NO: 648289 - DNA, 75 bp, synthetic construct
  source 1..75: mol_type = other DNA
gagcacggaagatattggcaccgccattgatgagtattttgctggtcaggctgttcagcaacaaacagttaatca

SEQ ID NO: 648290 - DNA, 75 bp, synthetic construct
  source 1..75: mol_type = other DNA
aggaaacagtgtctgaagcagttatgggaaaacagcagtatgccatccgacgtgtatcagcagttctgtctggcg

SEQ ID NO: 648291 - DNA, 75 bp, synthetic construct
  source 1..75: mol_type = other DNA
aacgctggcgatggaagagatcaactgtcaccacaactatgtgcaaaaagaacagcactttggcgaagagatcta

SEQ ID NO: 648292 - DNA, 75 bp, synthetic construct
  source 1..75: mol_type = other DNA
gtaccgcgttaacggcggcagacctgccggaaaacctggcggagctgcgtcaggcgattgaagctgccgtgccgc

SEQ ID NO: 648293 - DNA, 75 bp, synthetic construct
  source 1..75: mol_type = other DNA
agtgaaatggttgccatttatgattttgctcaaaaaattcttaatattttactacttccaattacaataataagc

SEQ ID NO: 648294 - DNA, 75 bp, synthetic construct
  source 1..75: mol_type = other DNA
gaataattgataatcgcgagtgtgactatattaaacttataaataacactacctatatatctcagaaattatact

SEQ ID NO: 648295 - DNA, 75 bp, synthetic construct
  source 1..75: mol_type = other DNA
tcacggcacctttgccctcagaaacctcagcaaccactgtacagcctgaagataatgcaccatccggcagtcagc

SEQ ID NO: 648296 - DNA, 75 bp, synthetic construct
  source 1..75: mol_type = other DNA
agctgtacctgtttatgcaggtggtgcaagaaggcagttttaccgcagcggctaaacggctgggtcttgcgcagt

SEQ ID NO: 648297 - DNA, 75 bp, synthetic construct
  source 1..75: mol_type = other DNA
gcctgcttgactcggcgatggccggaaagctggtcgctgaacgggggcgaacagatgcagtgccgggatcagatt

SEQ ID NO: 648298 - DNA, 75 bp, synthetic construct
  source 1..75: mol_type = other DNA
ttgaggggccattgtctccgcgtcagatcggacagctcagcgagcgcgatctctcccgcctgatggcggcggtaa

SEQ ID NO: 648299 - DNA, 75 bp, synthetic construct
  source 1..75: mol_type = other DNA
ggtgagtcccgtgaataccgcgtcaccttccgcgaactgacggcgaaagacagcattgatgcggaaaccgatgct

SEQ ID NO: 648300 - DNA, 75 bp, synthetic construct
  source 1..75: mol_type = other DNA
gcatggatgagtttagcatcgctcgatggtccgggcgtaagcttatttctcaaaatgtttcttatgatcaccgat

SEQ ID NO: 648301 - DNA, 75 bp, synthetic construct
  source 1..75: mol_type = other DNA
taaaaaaactgtccaaccatgcaaggtctgcctcaagaacaatggaagcccaaggcactgagtcatccaaatatg

SEQ ID NO: 648302 - DNA, 75 bp, synthetic construct
  source 1..75: mol_type = other DNA
atgagactgacatctaaagggcgctatgccgtgaccgcaatgcttgacgttgcgctcaactctgaagcgggcccg

SEQ ID NO: 648303 - DNA, 75 bp, synthetic construct
  source 1..75: mol_type = other DNA
atgcaggtgcagtttttaaacttgaagatatcctggcatcaataccctgggattctcatggattgatcgctgcga

SEQ ID NO: 648304 - DNA, 75 bp, synthetic construct
  source 1..75: mol_type = other DNA
attctgggttttgctgtggcctggctggcggtgaccaacagaacactcatccacgagcagcgtacggtcgtcacc

SEQ ID NO: 648305 - DNA, 75 bp, synthetic construct
  source 1..75: mol_type = other DNA
ctatgttcctgttgaactggtcgcggatgatttagaacacggtaagcttatcagggtgttgcagcgttacagcct

SEQ ID NO: 648306 - DNA, 75 bp, synthetic construct
  source 1..75: mol_type = other DNA
ttgattatcgtctttttgattcctctggcgttaaaaggcgtgagttataaaccgcttaccgcttctgccatgttg

SEQ ID NO: 648307 - DNA, 75 bp, synthetic construct
  source 1..75: mol_type = other DNA
tgcgtgagccgaaatatggcgctgcggcggacaaagttcctgccgaccaacttcgtaaaggcgatatcgtactgg

SEQ ID NO: 648308 - DNA, 75 bp, synthetic construct
  source 1..75: mol_type = other DNA
ttgtgacggagatgcggtactactgcttgtggatcaaaaaggtggagcctgccacacaggtcggcggagttgttt

SEQ ID NO: 648309 - DNA, 75 bp, synthetic construct
  source 1..75: mol_type = other DNA
aacggttgcaatacccggtttgtggcggacgcactggcaaaattcctgaaaattcatgctcgtgaagtcagcttc

SEQ ID NO: 648310 - DNA, 75 bp, synthetic construct
  source 1..75: mol_type = other DNA
atgaatttttatcgtggcatggtggttaccgtgcctttttgtggcgaccgccgaaacataaccggacggtgaggg

SEQ ID NO: 648311 - DNA, 75 bp, synthetic construct
  source 1..75: mol_type = other DNA
atgaaaacagaaaataagccatcgataaaaactgtaagatttggcgatggttatgaacaacgaagcccaaacgga

SEQ ID NO: 648312 - DNA, 75 bp, synthetic construct
  source 1..75: mol_type = other DNA
gcataggtatataaccgtggtatctgatcgcgacgggcgggcactggcattaaccgatgatcgtggcacagagag

SEQ ID NO: 648313 - DNA, 75 bp, synthetic construct
  source 1..75: mol_type = other DNA
ttattctaacatcaggagaacgatattgcatcattatggataacgaaaataaagccccgcttttttatcctaatt

SEQ ID NO: 648314 - DNA, 75 bp, synthetic construct
  source 1..75: mol_type = other DNA
gtgcggtttggtgacggttatgaacagcgtcgccccacaggactgaatcctcaactgaagacgtttcaggcggtg

SEQ ID NO: 648315 - DNA, 75 bp, synthetic construct
  source 1..75: mol_type = other DNA
cacatccggcgggaaatacgaaagcgtcacgaacaaggctaccggcgcagaaaaagatcaggtcctgaaggatat

SEQ ID NO: 648316 - DNA, 75 bp, synthetic construct
  source 1..75: mol_type = other DNA
ttctgcagaagatggccgctgatattaaccggttcaatatgtccagctgtcaggcggcaaaggcgatggtcgaca

SEQ ID NO: 648317 - DNA, 75 bp, synthetic construct
  source 1..75: mol_type = other DNA
gttctcttttattaactccgaccagattatggcgtttgtgaaacagacgatggccaacgcagcgggctacttctt

SEQ ID NO: 648318 - DNA, 75 bp, synthetic construct
  source 1..75: mol_type = other DNA
tttcgtgtcacggatgaatattcccgtgccgcgctggacagttttttatcccgtcatgccggggttcgtgctttt

SEQ ID NO: 648319 - DNA, 75 bp, synthetic construct
  source 1..75: mol_type = other DNA
caataacatgtacctagatactgcgaacaatgtaagagtgggagtgacgggcactggctggcaatgtctagcaac

SEQ ID NO: 648320 - DNA, 75 bp, synthetic construct
  source 1..75: mol_type = other DNA
agtcaccacgaaagtctgggacggcaaacaggatatttatcacctgctgcattgcctggtgatcccgcgtatccc

SEQ ID NO: 648321 - DNA, 75 bp, synthetic construct
  source 1..75: mol_type = other DNA
ctgaatgtgatgtgccgatgatgaaaaacgcagcgaaaaccattaaaaaacggttatacggaatactgaatgcaa

SEQ ID NO: 648322 - DNA, 75 bp, synthetic construct
  source 1..75: mol_type = other DNA
ttgatgagggtctgaaaggacaacttgcctgcgatagcaaaatctctgccattaaatataaaaagtatcttgatg

SEQ ID NO: 648323 - DNA, 75 bp, synthetic construct
  source 1..75: mol_type = other DNA
ttgaggaacagctcagcggtacctttgcgtccggcggcgaattggccgggaaaaaagataaagccaatgcaatgg

SEQ ID NO: 648324 - DNA, 75 bp, synthetic construct
  source 1..75: mol_type = other DNA
atgaaattctgggcggcatggcgggaagaagatattacggatgcgcagatgtatgctctgcgcaaccatccgtta

SEQ ID NO: 648325 - DNA, 75 bp, synthetic construct
  source 1..75: mol_type = other DNA
atcattaaaacccgcgtcacgaagatgattgaacatgaactgtgcgacgatccctatgctcaggaggcattctca

SEQ ID NO: 648326 - DNA, 75 bp, synthetic construct
  source 1..75: mol_type = other DNA
tgattgagcaggagctgcgtgatgacccgtatgctcaggaggcattttcaaaactcctgcgtatggctatcgaag

SEQ ID NO: 648327 - DNA, 75 bp, synthetic construct
  source 1..75: mol_type = other DNA
taagcttaaattgctgattgtcgtcgataaactgctcaccgggtttgatgaaccgaagaataccgtgctgtatat

SEQ ID NO: 648328 - DNA, 75 bp, synthetic construct
  source 1..75: mol_type = other DNA
tctcttcgtcggtggaagcactcagggctcagcttaaggaaaatgaagcttatgtccgccttttaatcgggatgg

SEQ ID NO: 648329 - DNA, 75 bp, synthetic construct
  source 1..75: mol_type = other DNA
atgcgtaaatattatcccctctttaagaaaagcaccgtcctcaggggctgtattttattcacatttataatggca

SEQ ID NO: 648330 - DNA, 75 bp, synthetic construct
  source 1..75: mol_type = other DNA
tgttccgtgggctggccccggaagccggtatacgttgctgttcgaattgttcgttctctcatggctgaaaatcag

SEQ ID NO: 648331 - DNA, 75 bp, synthetic construct
  source 1..75: mol_type = other DNA
acgaagggatatctcagagtatccgcaaccagttcaacgatgaaatcccgcagctgtttgcctatagccagctat

SEQ ID NO: 648332 - DNA, 75 bp, synthetic construct
  source 1..75: mol_type = other DNA
ttacggagtttgtcgatggcaagaaggtcaaccccaccattgcgctgattgactgggaacacccggaaaataacc

SEQ ID NO: 648333 - DNA, 75 bp, synthetic construct
  source 1..75: mol_type = other DNA
gtatgcgctgcgcaaccataagttatcgactgaacaaattcatgcgttgtttgatcatcgtccttcagccgatct

SEQ ID NO: 648334 - DNA, 75 bp, synthetic construct
  source 1..75: mol_type = other DNA
taatcgtttcaatatgtccagctgccaggcggcgaaagcgatggtcgacagcgtggcgtcgctgtggggggaaag

SEQ ID NO: 648335 - DNA, 75 bp, synthetic construct
  source 1..75: mol_type = other DNA
cagctgacgcgcaattgttgaattatgtcgcctggccgcaggcaacgcttcacggtggacgaggcggaaaagtta

SEQ ID NO: 648336 - DNA, 75 bp, synthetic construct
  source 1..75: mol_type = other DNA
ggctgtatcagtttcgccgttgttcatcccgggagacactagaaaaagtgatttcccacacgcgttataagctta

SEQ ID NO: 648337 - DNA, 75 bp, synthetic construct
  source 1..75: mol_type = other DNA
taaatgcagggggagagagcgtaacgtacacgctgcggaatattccggctgaacttgaccgggtgatctccgatc

SEQ ID NO: 648338 - DNA, 75 bp, synthetic construct
  source 1..75: mol_type = other DNA
gtagcaccgccagcattgcaactgccattacccgatcatttccaaccgactggcaggccgcttcctttaggcctg

SEQ ID NO: 648339 - DNA, 75 bp, synthetic construct
  source 1..75: mol_type = other DNA
ccgccgccacgatcgattccgctatcgatgttaccgggcgatgttgaagccatgtttcagcaggcattcacggaa

SEQ ID NO: 648340 - DNA, 75 bp, synthetic construct
  source 1..75: mol_type = other DNA
tgttcccgcacgaaccatgccgttgatggcgtcgttacatcaggcggcagaaaaactggctcaggcgcaggcgga

SEQ ID NO: 648341 - DNA, 75 bp, synthetic construct
  source 1..75: mol_type = other DNA
gaagcgagaaagacgttcaactctacgcacaagttgtagattaccagtccggtaatgtggtcacactcaacgaca

SEQ ID NO: 648342 - DNA, 75 bp, synthetic construct
  source 1..75: mol_type = other DNA
ttgccgttaacgttggcgttcgtgagcagatagagtccggcgttggtgcatggcgtctggtcacgcagtacgaag

SEQ ID NO: 648343 - DNA, 75 bp, synthetic construct
  source 1..75: mol_type = other DNA
gatatgcgccataacacggcaaaaattgccgttaacgttggcgttcgtgagcagatagagtccggcgttggtgca

SEQ ID NO: 648344 - DNA, 75 bp, synthetic construct
  source 1..75: mol_type = other DNA
cttcgacggcatgatgtttggtgatacagaagatgcacacaccctgctggttgccgcgcgtaaggccggaattgc

SEQ ID NO: 648345 - DNA, 75 bp, synthetic construct
  source 1..75: mol_type = other DNA
ctgcccgtggtgctggattgctaaaaaaagatttgaacagggtctgaatcgctttgaatttcgcgaccaggtggt

SEQ ID NO: 648346 - DNA, 75 bp, synthetic construct
  source 1..75: mol_type = other DNA
gccgaaggggaaattgaagtcagttcaaaaacacttcaggtgctgacagccaaagcccgtgcagcgggttcatgg

SEQ ID NO: 648347 - DNA, 75 bp, synthetic construct
  source 1..75: mol_type = other DNA
caaccgcgcgtccgacggcaaaaacatgggtagcggcacttgattctctacgccaacagttaaagaaatgtaccg

SEQ ID NO: 648348 - DNA, 75 bp, synthetic construct
  source 1..75: mol_type = other DNA
ttggataagatcaacaaactgccattgaatccgatgattgaacaggcaaccagtacgctttctgaaagtcagcgc

SEQ ID NO: 648349 - DNA, 75 bp, synthetic construct
  source 1..75: mol_type = other DNA
aaggtcattgtcagtggtgagtggctgttgaaccaccagggacaactgatcaaacgtccgttccgtctggaagga

SEQ ID NO: 648350 - DNA, 75 bp, synthetic construct
  source 1..75: mol_type = other DNA
atgggtagagcaggtcactgttcctgactatctggcggggaatggtgtggtttatcaaaccagtgatgtgaagta

SEQ ID NO: 648351 - DNA, 75 bp, synthetic construct
  source 1..75: mol_type = other DNA
cattttcagataaagtaacgccttttttatatgatctcaaaaatgagtttacgcaaatgaatgtgtttgcgatgg

SEQ ID NO: 648352 - DNA, 75 bp, synthetic construct
  source 1..75: mol_type = other DNA
gttgcgagaactgcaaccggtgctgaaaacgctcaatgagaagagtaacgcgctggtatttgaagcgaaggacaa

SEQ ID NO: 648353 - DNA, 75 bp, synthetic construct
  source 1..75: mol_type = other DNA
agatggttaaagtgctggccggtgtctggagtcaggaagccgcttctattgcacaagagataaagcgtctacctt

SEQ ID NO: 648354 - DNA, 75 bp, synthetic construct
  source 1..75: mol_type = other DNA
cctttggtattgaaacggcggcggatgttacccgacgcggcgttaagcaagtgaaagggtttggcgaccatctga

SEQ ID NO: 648355 - DNA, 75 bp, synthetic construct
  source 1..75: mol_type = other DNA
aagttatcggttttatgatgccaaaagtttctggtaaagaaccgattcatatgatctatagcccggcacatcgtc

SEQ ID NO: 648356 - DNA, 75 bp, synthetic construct
  source 1..75: mol_type = other DNA
gcgctcgataatcaaggcgttatctattttattgatcccggtgaagaggtcattaccaccggcggaaattttgtg

SEQ ID NO: 648357 - DNA, 75 bp, synthetic construct
  source 1..75: mol_type = other DNA
atgaaaaacctgcaaacgacgctggatagcatgaacaagatcctcgccagccagtcgatgcagcagttgccgacg

SEQ ID NO: 648358 - DNA, 75 bp, synthetic construct
  source 1..75: mol_type = other DNA
ccgttagcggcggcctggcgcaaatccagcaacgactgatggaagcgttggataagatcaacaaactgccattga

SEQ ID NO: 648359 - DNA, 75 bp, synthetic construct
  source 1..75: mol_type = other DNA
caaccgggcgtccgacggctaaagcgtgggtagcagcactggattctctacgccaacagttaaagaaatgtaccg

SEQ ID NO: 648360 - DNA, 75 bp, synthetic construct
  source 1..75: mol_type = other DNA
ggcgatgtcacggttgatgttcactggtcgagcctgaactataaagatgcgctggcgattaccggtaagggaaaa

SEQ ID NO: 648361 - DNA, 75 bp, synthetic construct
  source 1..75: mol_type = other DNA
atgttgccgtttctgaaagcgcctgccgatgcgccattaatgactgacaaacatgaaattgatgcccgctatcgc

SEQ ID NO: 648362 - DNA, 75 bp, synthetic construct
  source 1..75: mol_type = other DNA
ttccgtccgtcagccaccacgcgcctgacgcaggctttccggccggtttcactggtggctgaaagtctttcaggt

SEQ ID NO: 648363 - DNA, 75 bp, synthetic construct
  source 1..75: mol_type = other DNA
tgacggggagcgttacgggagacaacactggtgcaggtgacatgacggttaggggcgcctctgtctggcatctcg

SEQ ID NO: 648364 - DNA, 75 bp, synthetic construct
  source 1..75: mol_type = other DNA
tgtccattaaaaatgatgaaggtaaagtcggcaaggttgaactttatgatctttctggaacactaatttttgaaa

SEQ ID NO: 648365 - DNA, 75 bp, synthetic construct
  source 1..75: mol_type = other DNA
agaacatcattcaagataaagaaagccaactacaattagaaagagataaactttacttcctcaaccaactgagac

SEQ ID NO: 648366 - DNA, 75 bp, synthetic construct
  source 1..75: mol_type = other DNA
ataaatgacagatataactttactaacgatatctcaggtaccacagggaaatacggtgccggggtgagtgctcag

SEQ ID NO: 648367 - DNA, 75 bp, synthetic construct
  source 1..75: mol_type = other DNA
ttgtcggcttgtttgcttatcttggggcatcgctcgccggttggccgctggcgaaagtgctcgatacctggcact

SEQ ID NO: 648368 - DNA, 75 bp, synthetic construct
  source 1..75: mol_type = other DNA
gggggtcgccggtttgtgcgcgtctgttaactgcctggtattcacgtaccgagcgtggcggttggtgggcgctgt

SEQ ID NO: 648369 - DNA, 75 bp, synthetic construct
  source 1..75: mol_type = other DNA
aataatggggttctgcattttctcgacaatagttcagcaaactatagcggcacactggatggtaccggtagtctg

SEQ ID NO: 648370 - DNA, 75 bp, synthetic construct
  source 1..75: mol_type = other DNA
ggctcagtatatctacagtggcggtagtgccgtcagcaccacggtaaacggcggatatcagacggtatacaatgg

SEQ ID NO: 648371 - DNA, 75 bp, synthetic construct
  source 1..75: mol_type = other DNA
tatggcgatagttgtggggatttttctctgctggcgattgcgcgatcgcccgcaggcattaggtttaccggcggt

SEQ ID NO: 648372 - DNA, 75 bp, synthetic construct
  source 1..75: mol_type = other DNA
gctgttactgccctttttgaacgcccagacaccgcgagaagcgtgatgcatctcaccttttcacttcatatccgg

SEQ ID NO: 648373 - DNA, 75 bp, synthetic construct
  source 1..75: mol_type = other DNA
ttagtatgttaaataaagttaaagatagttttcccgctggattgactgctaatgatgttaagactcaagtaatta

SEQ ID NO: 648374 - DNA, 75 bp, synthetic construct
  source 1..75: mol_type = other DNA
ggcgcttgagaaagtggcgttggggtttgtacagcaacgtaaaccgtcacaactttctggtggtcagcgccagcg

SEQ ID NO: 648375 - DNA, 75 bp, synthetic construct
  source 1..75: mol_type = other DNA
gcgataaaagatggtgagttcttctctatgctggggccgtccggctccggcaaaaccacttgcctgcgcctgatt

SEQ ID NO: 648376 - DNA, 75 bp, synthetic construct
  source 1..75: mol_type = other DNA
gaccttccacggtggcgcttctcaacaccttgatggtgtggcgtttatcttccgtctgcacctggtgctggggat

SEQ ID NO: 648377 - DNA, 75 bp, synthetic construct
  source 1..75: mol_type = other DNA
ggtatgaaatgcgccgccagcttgagtacaagcagctctggcgtggcggtcaggtgcttgctgttccgccagcgt

SEQ ID NO: 648378 - DNA, 75 bp, synthetic construct
  source 1..75: mol_type = other DNA
ggcatgacgggaagcttcgcactacgaccggaacatatccgcctcaacacccctggagaaatgcaggctaatggc

SEQ ID NO: 648379 - DNA, 75 bp, synthetic construct
  source 1..75: mol_type = other DNA
aacgaaccgcgtgtgttgttgctggatgaaccgctcggcgcgctggatctcaaattgcgagagcaaatgcagctt

SEQ ID NO: 648380 - DNA, 75 bp, synthetic construct
  source 1..75: mol_type = other DNA
gaagagatactgacgctggcgaactggtgcctgttgaactctgatgaatcccctaatgattttggtaaaaatcat

SEQ ID NO: 648381 - DNA, 75 bp, synthetic construct
  source 1..75: mol_type = other DNA
ttgaggatttgaaggtcagcaacatgtcaaagtcagcagcgggtacggtcagccagccggggcgcaatgtccggg

SEQ ID NO: 648382 - DNA, 75 bp, synthetic construct
  source 1..75: mol_type = other DNA
tgagttgccaaagaaactgtgccttaatgagataaaaacacaaataatcgaaataaagaaaagaagtcattcccc

SEQ ID NO: 648383 - DNA, 75 bp, synthetic construct
  source 1..75: mol_type = other DNA
atgcaattcctgaatatgttcttctttgatatctatccgtacatagccggggcggtcttcctgattggtagctgg

SEQ ID NO: 648384 - DNA, 75 bp, synthetic construct
  source 1..75: mol_type = other DNA
cagcgacagttaagccgcaaggtcaaattcagcaacaactggcagaagcagaaacgcaaaatacagcgactgcat

SEQ ID NO: 648385 - DNA, 75 bp, synthetic construct
  source 1..75: mol_type = other DNA
aagcagaaacgcaaaatacagcgactgcattcctgtatcgcaaatatccgcagggactaccttcacaaagtcaca

SEQ ID NO: 648386 - DNA, 75 bp, synthetic construct
  source 1..75: mol_type = other DNA
acgaactgcgcacctggatgagtgacggtacggcagtgaaaggcgattatcatcagaatggctttggtggcagcc

SEQ ID NO: 648387 - DNA, 75 bp, synthetic construct
  source 1..75: mol_type = other DNA
tggtagtgctgtaggcaccaccattaatgggggactgcagactgttttcggtggtggaagtgtctccggaactct

SEQ ID NO: 648388 - DNA, 75 bp, synthetic construct
  source 1..75: mol_type = other DNA
actcacgtacttctgggggagtatgggggcactatataggatcagataaacacatcagcagcaaaggagcgggtt

SEQ ID NO: 648389 - DNA, 75 bp, synthetic construct
  source 1..75: mol_type = other DNA
aagtcaaccgtttcaggaacgaactgcgcacctggatgagtgacggaacggcagtgaaaggcgattatcatcaga

SEQ ID NO: 648390 - DNA, 75 bp, synthetic construct
  source 1..75: mol_type = other DNA
caacagcggcggtagtgccacgagtaccgtcattaatagtggtgggggccaactagtatccagtggcggtagtgc

SEQ ID NO: 648391 - DNA, 75 bp, synthetic construct
  source 1..75: mol_type = other DNA
cagtgggcaccagtatgtctatagtggaggcagtgccacagacattatcattgaccgttttggaaaccagatcgt

SEQ ID NO: 648392 - DNA, 75 bp, synthetic construct
  source 1..75: mol_type = other DNA
ctgcagactgttttcggtggcggaagtgtctccgggactctcattaataacggggagcagcgagtctccagtggt

SEQ ID NO: 648393 - DNA, 75 bp, synthetic construct
  source 1..75: mol_type = other DNA
cagcactggtggtggtctgtacgcgacctggtttgataatgacggctactacgtggacggtgtgctgaaatacaa

SEQ ID NO: 648394 - DNA, 75 bp, synthetic construct
  source 1..75: mol_type = other DNA
tggcggcagtgcttccaatatgcttctggagaatggtggctcattaactgtactcaatgggcatcaggccacagg

SEQ ID NO: 648395 - DNA, 75 bp, synthetic construct
  source 1..75: mol_type = other DNA
ttaacaggaatggacgccaatatatctccagtggtggcagtgccactaaaacaaccgttaacagtggcgggcgtc

SEQ ID NO: 648396 - DNA, 75 bp, synthetic construct
  source 1..75: mol_type = other DNA
acatgacggttaaaggcgcctctgtctggcatctcgatggtgactccactgtcggtgcattaacgctggataacg

SEQ ID NO: 648397 - DNA, 75 bp, synthetic construct
  source 1..75: mol_type = other DNA
gtggcggtatgctggatgtccggagcggcggtgtacttcgtggtaccaccaccctgacagataaagggacgctcg

SEQ ID NO: 648398 - DNA, 75 bp, synthetic construct
  source 1..75: mol_type = other DNA
cggtgccggggtgagtgctcagctgacagcgaatgccggggtgtgggcagaagcgagttaccagaatggcgagaa

SEQ ID NO: 648399 - DNA, 75 bp, synthetic construct
  source 1..75: mol_type = other DNA
ctggagaacgatggctacctgacggtttacagtggtcatcaggccagcgatacaaccgttggcagcagcgggacg

SEQ ID NO: 648400 - DNA, 75 bp, synthetic construct
  source 1..75: mol_type = other DNA
gccggaaaacgccgctgcatacactctgggccaggcggcaaataatgccccacctgcgaggatcaaccagacctg

SEQ ID NO: 648401 - DNA, 75 bp, synthetic construct
  source 1..75: mol_type = other DNA
cctgctggttgcgcgttttggcctgaacaccgccaaagaggtgagtttgtcaatgcagcgtctggaacaggcagg

SEQ ID NO: 648402 - DNA, 75 bp, synthetic construct
  source 1..75: mol_type = other DNA
ctgagcgatatgatccctaactcatcgcccgagtctgcaccggagatccaactgctgcaatcgcgcatgattctc

SEQ ID NO: 648403 - DNA, 75 bp, synthetic construct
  source 1..75: mol_type = other DNA
ctggagaatggaggttatctcgctgtactcaacggtcatcaggccaccagtaccaccattaacagcggtggtctc

SEQ ID NO: 648404 - DNA, 75 bp, synthetic construct
  source 1..75: mol_type = other DNA
ttctacttaagagtggaggtgccatgacgatgaatgctcttacagctaaagctaatttgacaacacagccaggta

SEQ ID NO: 648405 - DNA, 75 bp, synthetic construct
  source 1..75: mol_type = other DNA
ctctcgtcaccaataccagttcagtcgtgaacggcaccaatgataaaggcagttttagtatcataggcggcagag

SEQ ID NO: 648406 - DNA, 75 bp, synthetic construct
  source 1..75: mol_type = other DNA
gtatatcaacagcggcggcagtgccacagataccatcattaacagtggttaccagtatgtttccagtggcgccag

SEQ ID NO: 648407 - DNA, 75 bp, synthetic construct
  source 1..75: mol_type = other DNA
accctgacggggaccggcaccctgacgcaggaaggcggtggcacccgcttcagcggcctgttgtctcaggacggt

SEQ ID NO: 648408 - DNA, 75 bp, synthetic construct
  source 1..75: mol_type = other DNA
ggctgtctccagcggcggcaatgcgttgaacgcctctgttaatgacggtgggcgtcagtatctctacgccggaaa

SEQ ID NO: 648409 - DNA, 75 bp, synthetic construct
  source 1..75: mol_type = other DNA
cgtgctggcgcgtgcgatgttgcgtcgtggtgtagaagcaccggaacaactggaagagcacggcatcagcgttta

SEQ ID NO: 648410 - DNA, 75 bp, synthetic construct
  source 1..75: mol_type = other DNA
tctggtgattgtcgatacgccgccgatgctggcggtgagtgatgccgcgtcgtggggcgttctgttggcaccagc

SEQ ID NO: 648411 - DNA, 75 bp, synthetic construct
  source 1..75: mol_type = other DNA
gactgttgtctcaggatggcgggattacccttcagagtggcgctgcaatgacgatggatacccttcaggcgaacg

SEQ ID NO: 648412 - DNA, 75 bp, synthetic construct
  source 1..75: mol_type = other DNA
ccgacagttacaaatcactctgcgcggcagtgatgtgattggtcgttttgggggcgatgaatttgcggtgattat

SEQ ID NO: 648413 - DNA, 75 bp, synthetic construct
  source 1..75: mol_type = other DNA
gagtttgataattgtcggcggcataaccgcgatgcgacgttattaatcatcgatatcgaccatttcaaaagcatc

SEQ ID NO: 648414 - DNA, 75 bp, synthetic construct
  source 1..75: mol_type = other DNA
gctgggtcagctaccagacggcaacaaaacttgcagaacataaacgcagattgcaggtaatgagcactcgtgatg

SEQ ID NO: 648415 - DNA, 75 bp, synthetic construct
  source 1..75: mol_type = other DNA
agtacaggccgtctcattatttatccagaactttacccaaccgggagatgctattgtcagcctgacaccagccta

SEQ ID NO: 648416 - DNA, 75 bp, synthetic construct
  source 1..75: mol_type = other DNA
tacctggggccatgatgtgggcgatgaagcgattgtggcgcttacccgacagttacaaattaccctgcgcggtag

SEQ ID NO: 648417 - DNA, 75 bp, synthetic construct
  source 1..75: mol_type = other DNA
ctggaatggtggctctcccttcccattattgtcatttatcctctgctgtttggctgggtcagctaccagacggca

SEQ ID NO: 648418 - DNA, 75 bp, synthetic construct
  source 1..75: mol_type = other DNA
cagcgttccgggctgcgctttgcccgtcgcgtcaggttgccccgtatggttggactggctgggatgttcttaccg

SEQ ID NO: 648419 - DNA, 75 bp, synthetic construct
  source 1..75: mol_type = other DNA
cgtcagcaaattcaggcgttgaaagtgacgggcaggcaaaaaatcaaacttgatcccgatatcgtccgcgttgcg

SEQ ID NO: 648420 - DNA, 75 bp, synthetic construct
  source 1..75: mol_type = other DNA
agccattcactccaggtcgcgacgtggcgagctatctctccgggcagaacctgcttagcggtgcggatcgcagct

SEQ ID NO: 648421 - DNA, 75 bp, synthetic construct
  source 1..75: mol_type = other DNA
cgtaaacgtgctgccttccatcgctatgttgatgattatgtgtctgaatttgatgggggcaggcggcccccgtct

SEQ ID NO: 648422 - DNA, 75 bp, synthetic construct
  source 1..75: mol_type = other DNA
gtttgtcgcgggtctggtgttgatggtggtttcctgccttgtcaccctcgagcttacgggcattaccgtgtcgtt

SEQ ID NO: 648423 - DNA, 75 bp, synthetic construct
  source 1..75: mol_type = other DNA
aactgacgggtatcacggtgtcactaaatagtgcgccgctggaatggtggctctcactgcccattatcgtcattt

SEQ ID NO: 648424 - DNA, 75 bp, synthetic construct
  source 1..75: mol_type = other DNA
ttttccgtgtgaacatagccacgccgagaagcaatcttacacaagcatttgaacggatttatcagagcatcccct

SEQ ID NO: 648425 - DNA, 75 bp, synthetic construct
  source 1..75: mol_type = other DNA
cttagcctgaccgacggcgctgacgttcccgatatggtgcgcgctcgactgcataaggtgaccggcctaaccctg

SEQ ID NO: 648426 - DNA, 75 bp, synthetic construct
  source 1..75: mol_type = other DNA
tgctggtaaagctggccgatgaccgccgcacgttgaaaaccatccgttcaaacgaactgaaagccgcgaaaaagc

SEQ ID NO: 648427 - DNA, 75 bp, synthetic construct
  source 1..75: mol_type = other DNA
accgcgaccttgccgccaacaccatgccgggttctaacgacatcatggaagtgaaagacgcctttatgaacggca

SEQ ID NO: 648428 - DNA, 75 bp, synthetic construct
  source 1..75: mol_type = other DNA
caggtgcttgctgttccgccagcgtaaacaagccagcgttgcgcgtgctgtggtcatacagcgaaagacaatcgc

SEQ ID NO: 648429 - DNA, 75 bp, synthetic construct
  source 1..75: mol_type = other DNA
ggtgtttgcgctcgatgtggcagcaaggcacagggtacagttcctgatgcccggtgacgatgctgtggctatgct

SEQ ID NO: 648430 - DNA, 75 bp, synthetic construct
  source 1..75: mol_type = other DNA
gccactgaccattattgccatgattgcgggcggtatgtctggcacctggatgtttaacttacttgatggcggttt

SEQ ID NO: 648431 - DNA, 75 bp, synthetic construct
  source 1..75: mol_type = other DNA
gtgaaagacgcctttatgaacggcaccgcgccgatggcgatttactccacctatatccttccggctgtgattaaa

SEQ ID NO: 648432 - DNA, 75 bp, synthetic construct
  source 1..75: mol_type = other DNA
ccaggccgtcatcagcaaattgattgcccgttttgaaaaagaaaacccaggtatcaccgtaaaacaagtgcccgt

SEQ ID NO: 648433 - DNA, 75 bp, synthetic construct
  source 1..75: mol_type = other DNA
acgacatcatggaagtgaaagacgcctttatgaacggcaccgcgccgatggcgatttactccacctatatccttc

SEQ ID NO: 648434 - DNA, 75 bp, synthetic construct
  source 1..75: mol_type = other DNA
gcatcaccgttaaacaagtgccagtggaagaagatgcctataacaccaaagtcatcaccctttcacgtagcggct

SEQ ID NO: 648435 - DNA, 75 bp, synthetic construct
  source 1..75: mol_type = other DNA
tgatgatgtcgccaggcgcggcgctgccggtgaacaaagcggttgtcactaccgccacctggaaagacaacgacg

SEQ ID NO: 648436 - DNA, 75 bp, synthetic construct
  source 1..75: mol_type = other DNA
gattgtgcgcaccgaagatggcagcgcctggaccggtgttcctgtcagcgcatggattggcgggatctggtatcg

SEQ ID NO: 648437 - DNA, 75 bp, synthetic construct
  source 1..75: mol_type = other DNA
agccattcactcccggtcgcgacgtggcgagctatctctccgggcaaagtctgcttagcggtgcggatcgtagct

SEQ ID NO: 648438 - DNA, 75 bp, synthetic construct
  source 1..75: mol_type = other DNA
gaaaaacgccactggaacgcaatggcttaaagattcgccctcacagccattgcaacagtcactgaaagaccttga

SEQ ID NO: 648439 - DNA, 75 bp, synthetic construct
  source 1..75: mol_type = other DNA
ttgcaacagtcactgaaagaccctgagcgggcttacaaaaacttcttccggaatcgggctgcttttccccgattc

SEQ ID NO: 648440 - DNA, 75 bp, synthetic construct
  source 1..75: mol_type = other DNA
aggtatgtggatatacagcgaacgccgatgtaaatggcgctcgtaacattttagcggtggggcacgccgttcttg

SEQ ID NO: 648441 - DNA, 75 bp, synthetic construct
  source 1..75: mol_type = other DNA
accgcgattttggccccacgctggcacgggaaaaactagaggaagttcacggtctgatcttgggcaaggaaacca

SEQ ID NO: 648442 - DNA, 75 bp, synthetic construct
  source 1..75: mol_type = other DNA
ccactttccgtaaagaactggaaaatattctgcgggatcccgaactgagtcaggccttacgtgacgaactgagtg

SEQ ID NO: 648443 - DNA, 75 bp, synthetic construct
  source 1..75: mol_type = other DNA
cagcttgagtacaagcagctctggcgtggcggtcaggtgcttgctgttccgccagcgtacataagccagcgttgc

SEQ ID NO: 648444 - DNA, 75 bp, synthetic construct
  source 1..75: mol_type = other DNA
atggttacgttttggggaaattatgaggggatctctcagcgcttcgcaggcgcatgtcgtttcgttttcaatcgc

SEQ ID NO: 648445 - DNA, 75 bp, synthetic construct
  source 1..75: mol_type = other DNA
ggcgtggttaaactcgccacgctgtcagatggcacagtctttgagcctgtaaacagttttcagaaaaaccagaag

SEQ ID NO: 648446 - DNA, 75 bp, synthetic construct
  source 1..75: mol_type = other DNA
gccgtcaggtcacgggtgttgtgaaaaatgtcactgtcagccagtcctgcggtaagtggtacatcagtattcaga

SEQ ID NO: 648447 - DNA, 75 bp, synthetic construct
  source 1..75: mol_type = other DNA
ccgttcttgcctgtggagagatggtgcagtcaggccgctcgttgaagcaggaacccaccgaaatgattcaggcga

SEQ ID NO: 648448 - DNA, 75 bp, synthetic construct
  source 1..75: mol_type = other DNA
tggatgcgctaccggaatagccgtcaggtcacgggtgttgtgaaaaatgtcactgtcagccagtcctgcggtaag

SEQ ID NO: 648449 - DNA, 75 bp, synthetic construct
  source 1..75: mol_type = other DNA
gcgtggcggtcaggtgcttgctgttccgccagcgtatacaagccagcgttgcgcgtactgtggtcatacagcgaa

SEQ ID NO: 648450 - DNA, 75 bp, synthetic construct
  source 1..75: mol_type = other DNA
cactgaacgaagatgacctacttgaagccatgataaagcttcagggaagctctgaagccatctttggtaaaaggt

SEQ ID NO: 648451 - DNA, 75 bp, synthetic construct
  source 1..75: mol_type = other DNA
tcgattatggatatcggtttttactgtctggcagcagcggtggcgttatttggcgaaccgaaaaacgtgcaggcg

SEQ ID NO: 648452 - DNA, 75 bp, synthetic construct
  source 1..75: mol_type = other DNA
ttacggtgatttcagcgtcaccttgcagcactcaaaggtcagtgattctgtcctggcaagcgagattcagggcga

SEQ ID NO: 648453 - DNA, 75 bp, synthetic construct
  source 1..75: mol_type = other DNA
gcgtaaagtcttttttaactactgccagtactcttcgcgttatcaacgttatctcgacggcgagaatcccaatac

SEQ ID NO: 648454 - DNA, 75 bp, synthetic construct
  source 1..75: mol_type = other DNA
gcaactacacgctgtgggtcggaccaccaccgtccacggtcacgttgttcgggcttatcagccgtcctggcaagc

SEQ ID NO: 648455 - DNA, 75 bp, synthetic construct
  source 1..75: mol_type = other DNA
atcagccgtcctggcaagcagccattcactccaggtcgcgacgtggcgagctatctctctgaccagagcctgctc

SEQ ID NO: 648456 - DNA, 75 bp, synthetic construct
  source 1..75: mol_type = other DNA
acatcgcgtcgtacacgcttcttgttgccgggaagaaaaaatacaccggggaagagtgggacgtcctggaattca

SEQ ID NO: 648457 - DNA, 75 bp, synthetic construct
  source 1..75: mol_type = other DNA
ccgctggcgtcgaatctggcggaagtggatgccgccattgcctgtgcgcgggaaaatcaggtggtgctgtttgag

SEQ ID NO: 648458 - DNA, 75 bp, synthetic construct
  source 1..75: mol_type = other DNA
acgtcgtatgcaggcacgctgccgcagcaagtctgacaagaaaacccgtctggttcataccctgaacggttctgg

SEQ ID NO: 648459 - DNA, 75 bp, synthetic construct
  source 1..75: mol_type = other DNA
agcagccgcgttaccgccgtgcttgtgccggtgaactcatacaaatcgacggctgtgaccatcactggtttgaaa

SEQ ID NO: 648460 - DNA, 75 bp, synthetic construct
  source 1..75: mol_type = other DNA
aggcgctgccgaaagtcggcaaattgcgtaaagtcttttttaactactgccagtactcttcgcgttatcaacgtt

SEQ ID NO: 648461 - DNA, 75 bp, synthetic construct
  source 1..75: mol_type = other DNA
ctgaatgccagaaagtgtgcttcgtgccgcgtggcagccaaatgcaggatctcacccagccgcagcatattaata

SEQ ID NO: 648462 - DNA, 75 bp, synthetic construct
  source 1..75: mol_type = other DNA
gcggaagtggatgccgccattgcctgtgcgcgggaaaatcaggtggtgctgtttgaggcatttaaaaccgcctgc

SEQ ID NO: 648463 - DNA, 75 bp, synthetic construct
  source 1..75: mol_type = other DNA
cagttaaaccggcatcttttgcttcaattacagcaaggttgtttacctctatcaggaataaataatgcaagcgct

SEQ ID NO: 648464 - DNA, 75 bp, synthetic construct
  source 1..75: mol_type = other DNA
ataaacaaagtaaatggtatgacgttccacctgaccggccattttttacggttgcagtccatggtcgggttgaaa

SEQ ID NO: 648465 - DNA, 75 bp, synthetic construct
  source 1..75: mol_type = other DNA
gcaaaagagatcctcaacgaaatgggatatacccatgttgaaaacgccggtggtctgaaagatattgagatgccg

SEQ ID NO: 648466 - DNA, 75 bp, synthetic construct
  source 1..75: mol_type = other DNA
aacttacgaggctatctcttctccggttttatttccgtgggctcatttttattgagcctgcatacctttgtcata

SEQ ID NO: 648467 - DNA, 75 bp, synthetic construct
  source 1..75: mol_type = other DNA
cccgcctgccaggccgttttttacggttgaagtccgtgggcgggtagaaatcaataaattttacgatgcaacttc

SEQ ID NO: 648468 - DNA, 75 bp, synthetic construct
  source 1..75: mol_type = other DNA
atattgccgtgcgctgcaccagcgatttacgcatcgtgacgatcggctgtagcgagcatctgctggataaacaaa

SEQ ID NO: 648469 - DNA, 75 bp, synthetic construct
  source 1..75: mol_type = other DNA
cctttccgccagcaaggcacaggcccacgtctttaagcagtacatcttcgacttcgccaaagaagtggaggtgga

SEQ ID NO: 648470 - DNA, 75 bp, synthetic construct
  source 1..75: mol_type = other DNA
gtttgtggacgatctcgcgtccgtgttccctctcagcgagctgcaggcgtgcatggtagacagctgggaaatctg

SEQ ID NO: 648471 - DNA, 75 bp, synthetic construct
  source 1..75: mol_type = other DNA
ccagattggcgcgaccttcttttttgcccgtgaggcgctgattgacgccatcaccaccgggcgcaaccagatttt

SEQ ID NO: 648472 - DNA, 75 bp, synthetic construct
  source 1..75: mol_type = other DNA
gaccgactttcatgcactggcccttcgcccgtttggctggcgcgaagtatggatcggttatgacccggcaaaagg

SEQ ID NO: 648473 - DNA, 75 bp, synthetic construct
  source 1..75: mol_type = other DNA
accgacatagcgcagtcctttatggcaatccgtcgcgccaccactgccagcggcaaccgcccgacctatgaggcc

SEQ ID NO: 648474 - DNA, 75 bp, synthetic construct
  source 1..75: mol_type = other DNA
ccgtggaagatgcagtgcgcggcggctgtaacctgttcgacctggaccagttgcgcatggaatacagcccggacg

SEQ ID NO: 648475 - DNA, 75 bp, synthetic construct
  source 1..75: mol_type = other DNA
tcactattggactttcaactaatttatatgcatgcttattttgcgtatggcttgcaatactaacggtatttcttt

SEQ ID NO: 648476 - DNA, 75 bp, synthetic construct
  source 1..75: mol_type = other DNA
agtaccgttctgtcattaattcaacgccatttcgacgttaccgagggcgacattcgtttccataatatccccctg

SEQ ID NO: 648477 - DNA, 75 bp, synthetic construct
  source 1..75: mol_type = other DNA
gatgctgaagacaccggtaagaaaaacatgcgggtggcgcgtattgatgctcgtttcgacccgaccatctatatc

SEQ ID NO: 648478 - DNA, 75 bp, synthetic construct
  source 1..75: mol_type = other DNA
cttcttatcagctggcggtggagctgcgggaagattactaccgtcagctgagccgtcaacatccagagttttacc

SEQ ID NO: 648479 - DNA, 75 bp, synthetic construct
  source 1..75: mol_type = other DNA
atgacagaggctgaaaataacactgttccggaaattaataaaacggttgagcaaatgctagctcaaggacaatgg

SEQ ID NO: 648480 - DNA, 75 bp, synthetic construct
  source 1..75: mol_type = other DNA
tggattgttgatacaaaaacaaaaaaggtcataaaaaaactaatgatgccatcttcattttctccattcatcaat

SEQ ID NO: 648481 - DNA, 75 bp, synthetic construct
  source 1..75: mol_type = other DNA
ggtcgatggcgtgacggaacaacactttacgaccggacagatcctgatgtggatcgccactatggtgctgattgc

SEQ ID NO: 648482 - DNA, 75 bp, synthetic construct
  source 1..75: mol_type = other DNA
cgtgcagggcagcttaacgttgggccagcttaccagttttatgatgtaccttggtttgatgatttggccgatgct

SEQ ID NO: 648483 - DNA, 75 bp, synthetic construct
  source 1..75: mol_type = other DNA
tgacggaggccagtgaaattattgtgatgcagcacggacatatcgcccagcgtggcaatcatgatgagctggcgc

SEQ ID NO: 648484 - DNA, 75 bp, synthetic construct
  source 1..75: mol_type = other DNA
cgcaaggttacgatacagaggtgggcgagcgcggcgtgatgctttccggcgggcaaaaacagcgtatctctattg

SEQ ID NO: 648485 - DNA, 75 bp, synthetic construct
  source 1..75: mol_type = other DNA
tcgccagtcggcgctatttgccgcagatgctgaagacactggcaagaaaaacatgcgggtggcgcgtattgatgc

SEQ ID NO: 648486 - DNA, 75 bp, synthetic construct
  source 1..75: mol_type = other DNA
gggaagaacggtaatcatcagtgcccatcgcctttctgcactgacggaagccagtgaaattattgtgatgcagca

SEQ ID NO: 648487 - DNA, 75 bp, synthetic construct
  source 1..75: mol_type = other DNA
gacgccattccttttttctgacaccgtggcgaataacatcgcgctgggttgcccgaatgccacccagcaagagat

SEQ ID NO: 648488 - DNA, 75 bp, synthetic construct
  source 1..75: mol_type = other DNA
gttcgtggacgatctcgcgtccgtattcccgctcagcgagctgcaggcgtgcatggtagacagctgggaagtctg

SEQ ID NO: 648489 - DNA, 75 bp, synthetic construct
  source 1..75: mol_type = other DNA
ggaagatgcggtgcgcggcggctgcaacctgttcgaccttgaccagttgcgcatggagtacagcccggacgaata

SEQ ID NO: 648490 - DNA, 75 bp, synthetic construct
  source 1..75: mol_type = other DNA
accgacattgcgcagtcatttatggcaatccgtcgcgcaaccaccgccagcggcaaccgcccgacctatgaagcc

SEQ ID NO: 648491 - DNA, 75 bp, synthetic construct
  source 1..75: mol_type = other DNA
cgtgacctatatcggcattgactcgaccggcgtcggtcacggggtttacgagaacgtgaaagcgttttttccagc

SEQ ID NO: 648492 - DNA, 75 bp, synthetic construct
  source 1..75: mol_type = other DNA
gcccggtctggattggttacgacccgtcacaccgtggcgacagcgccggatgcgtggtgctggcaccgccggtag

SEQ ID NO: 648493 - DNA, 75 bp, synthetic construct
  source 1..75: mol_type = other DNA
gctggaagaatgggaagactatgcgccgtttgccgccaatccgttcggctcccgcccggtctggattggttacga

SEQ ID NO: 648494 - DNA, 75 bp, synthetic construct
  source 1..75: mol_type = other DNA
ggtggacagttgggaagtctggaccgactttcatgctctggccctgcgcccgtttggctggcgcgaagtgtggat

SEQ ID NO: 648495 - DNA, 75 bp, synthetic construct
  source 1..75: mol_type = other DNA
ggcgctggtacatgcgggttatctgcctttgctgtcagtcatcaatgaaccggcgaaagtgcttttccttaataa

SEQ ID NO: 648496 - DNA, 75 bp, synthetic construct
  source 1..75: mol_type = other DNA
tgcttttcggtctggtttttttaaccaccgtcggcgctgccgagagaactttaaccccacaacaacagcgtatga

SEQ ID NO: 648497 - DNA, 75 bp, synthetic construct
  source 1..75: mol_type = other DNA
ttaaccccacaacaacagcgtatgacctcctgtaatcagcaggcgacggcgcaggcgttgaaaggggatgctcgt

SEQ ID NO: 648498 - DNA, 75 bp, synthetic construct
  source 1..75: mol_type = other DNA
cgaattttcaggtactgcgtaaggtggcatcaggtatggcctcacagagtcacctgcgttcgacctatttctcca

SEQ ID NO: 648499 - DNA, 75 bp, synthetic construct
  source 1..75: mol_type = other DNA
gacagcgttgctcccatcagccgtgtcgaaatgagtctggaagcgcggctgacccagctcatcataaaaccgcag

SEQ ID NO: 648500 - DNA, 75 bp, synthetic construct
  source 1..75: mol_type = other DNA
cagtcagccaatgcggttaaggcgatgaaacaagagggggcattctcgttaagccgggttaagcgtatcgccttt

SEQ ID NO: 648501 - DNA, 75 bp, synthetic construct
  source 1..75: mol_type = other DNA
tcaaaaaactgactgaacagtacaacgtgacatacataggtatcgactcaaccggcgtcggtcacggggtttacg

SEQ ID NO: 648502 - DNA, 75 bp, synthetic construct
  source 1..75: mol_type = other DNA
attatgtattacgttcagtcgtaagtgaccgggattatgttgagcatgtaatgaaatacaatcgggttactgagt

SEQ ID NO: 648503 - DNA, 75 bp, synthetic construct
  source 1..75: mol_type = other DNA
gaattatatcagttaaaaatgaacatgcgtcggtgttaaattcttataaagtaagcccgtttaaagagactcata

SEQ ID NO: 648504 - DNA, 75 bp, synthetic construct
  source 1..75: mol_type = other DNA
aactggcatcaattaagaacgaacatgtgtcggtgttagatagttacaaagtaagcccatttaaagaaactcata

SEQ ID NO: 648505 - DNA, 75 bp, synthetic construct
  source 1..75: mol_type = other DNA
ccgtctggagtttgacgccggacataccgacattgcgcagtcatttatggcaatccgtcgcgctaccactgccag

SEQ ID NO: 648506 - DNA, 75 bp, synthetic construct
  source 1..75: mol_type = other DNA
aagatgattgtgagtttatccccgtttatgccgggctcatcgcttatttagagttactgaatcacggtgtattgc

SEQ ID NO: 648507 - DNA, 75 bp, synthetic construct
  source 1..75: mol_type = other DNA
aattcgaagcggatgatggcgagattatccctgaatacacagggctgatcgcttactcagagtcacttgagcacg

SEQ ID NO: 648508 - DNA, 75 bp, synthetic construct
  source 1..75: mol_type = other DNA
ctctcaggtggagtattatcacgattaaatatcactccagtaagttttcaatcacaaggatgggataaacgacgt

SEQ ID NO: 648509 - DNA, 75 bp, synthetic construct
  source 1..75: mol_type = other DNA
ccgtggaagatgcggtgcgcggcgcctgtaacctgttcgaccttgaccagttgcgcatggagtacagccctgacg

SEQ ID NO: 648510 - DNA, 75 bp, synthetic construct
  source 1..75: mol_type = other DNA
tcaaaaaacttaccgaacagtacaacgtgacttatatcggaatcgactcaaccggcgttggtcacggggtttacg

SEQ ID NO: 648511 - DNA, 75 bp, synthetic construct
  source 1..75: mol_type = other DNA
gtattcgaaaatggacattatgattgggaatgcgttgttaatgatgttctgccaaatatttgcaaaggtaatgcg

SEQ ID NO: 648512 - DNA, 75 bp, synthetic construct
  source 1..75: mol_type = other DNA
attattggtgtcggcatacgctgagaaatggtgggatactgaagaaggacaattagcattaagtgaaaaagaaca

SEQ ID NO: 648513 - DNA, 75 bp, synthetic construct
  source 1..75: mol_type = other DNA
agtataattaatgaaacagaactctcaggtggcgttttatctcgattaaaaatcactcctattagttttcagtct

SEQ ID NO: 648514 - DNA, 75 bp, synthetic construct
  source 1..75: mol_type = other DNA
gggtatccaggccgcgacagccgcgcttcagggtctggcgggagagaatttagcgggggctctggccggagcttc

SEQ ID NO: 648515 - DNA, 75 bp, synthetic construct
  source 1..75: mol_type = other DNA
taaattcaaatgataacgattattcgataaatggtggttttggcgttggtgcagtggggctttctacgggtaaag

SEQ ID NO: 648516 - DNA, 75 bp, synthetic construct
  source 1..75: mol_type = other DNA
tcgccagtgatgcccggccttcgcaagctatccgcggcagtcgtggtagctcaatgcgcgtggctttggaactgg

SEQ ID NO: 648517 - DNA, 75 bp, synthetic construct
  source 1..75: mol_type = other DNA
cacaggagacgaaggagagcagtgacagccgtctgaaagccctgcaggccacaaagacagcgctgtctggtgtgc

SEQ ID NO: 648518 - DNA, 75 bp, synthetic construct
  source 1..75: mol_type = other DNA
atcagtctgagcggtggtggcagcttcggggataaatttcagggtaacatgccgggtggcatgatatccgccgga

SEQ ID NO: 648519 - DNA, 75 bp, synthetic construct
  source 1..75: mol_type = other DNA
ctcatggcggagcctcgatcggattatcctttggcccgtatttcccgggattaataaattcaaatgataacgatt

SEQ ID NO: 648520 - DNA, 75 bp, synthetic construct
  source 1..75: mol_type = other DNA
ccactaaaattattgccatatttattctgtcactcacggtgctggtcttcattctggggtttgctgtggcgtatc

SEQ ID NO: 648521 - DNA, 75 bp, synthetic construct
  source 1..75: mol_type = other DNA
cggaattaaaaaactatcgtctccgccttaagtacgccggtggctttacccgcattggccgtttctatgaggtaa

SEQ ID NO: 648522 - DNA, 75 bp, synthetic construct
  source 1..75: mol_type = other DNA
caccagttctttgccactccagggaaagattacgaaagcccgctccccgcaaggactgacgccagatagtttctg

SEQ ID NO: 648523 - DNA, 75 bp, synthetic construct
  source 1..75: mol_type = other DNA
tgttgaattttctcttgatgacatcgtcagtgaactgaatattccgcgcttgcggtcattgagcgtgaaatgggg

SEQ ID NO: 648524 - DNA, 75 bp, synthetic construct
  source 1..75: mol_type = other DNA
ctgatttccgccattgtcactaaaccggtgctgtggctgcgtgacgtgctggcagatgtggttctgactaacctt

SEQ ID NO: 648525 - DNA, 75 bp, synthetic construct
  source 1..75: mol_type = other DNA
accgcgccctgttggatgacgcgggcctgccgggtacggaaaaggaaattcaggcgaagtttcaggctgtcgccg

SEQ ID NO: 648526 - DNA, 75 bp, synthetic construct
  source 1..75: mol_type = other DNA
gtgaccgttaacgccggtgataacctgacggtagagggttcggatgtggtggctgaccaggatgtgtcactggcg

SEQ ID NO: 648527 - DNA, 75 bp, synthetic construct
  source 1..75: mol_type = other DNA
atggctaagggtaaaggcattaagttgcctcaattcaaagtcccgctctttgagcatacaacagttttcttctgc

SEQ ID NO: 648528 - DNA, 75 bp, synthetic construct
  source 1..75: mol_type = other DNA
aggcgtcgtggctaccactgatccatctcatccggcgaatgagacttacgcttacatggtgggccgcatctttga

SEQ ID NO: 648529 - DNA, 75 bp, synthetic construct
  source 1..75: mol_type = other DNA
tgcctcaattcaaagtcccgctctttgagcatacaacagttttcttttgcccgacccgcgagatgttttatgaat

SEQ ID NO: 648530 - DNA, 75 bp, synthetic construct
  source 1..75: mol_type = other DNA
cgtcaccaataccagtgcagtcctgagcggtaccaacgataaaggtaccttcagtattgctggcggcagtgcaac

SEQ ID NO: 648531 - DNA, 75 bp, synthetic construct
  source 1..75: mol_type = other DNA
gggctgaagccttttatcagaaaggagaaaatattgaatcaccaataactggtagtgctggtttccgtatcaact

SEQ ID NO: 648532 - DNA, 75 bp, synthetic construct
  source 1..75: mol_type = other DNA
tccttgcaggctgaggctggcgtgaagctggggatgaccttggacgttacaggaaaagaggtcaaaccgtacctg

SEQ ID NO: 648533 - DNA, 75 bp, synthetic construct
  source 1..75: mol_type = other DNA
agccggattggtgtcggcaatctgtaccgcctgatgcggggctatgcggaaggtggttatgtcggcggtgccgga

SEQ ID NO: 648534 - DNA, 75 bp, synthetic construct
  source 1..75: mol_type = other DNA
attttccagacaggtacatccttctggaaagccgcgaaattgaaattaccgtcaaccagccccagccaatcgaca

SEQ ID NO: 648535 - DNA, 75 bp, synthetic construct
  source 1..75: mol_type = other DNA
ttatttatcaggaactcagcgttattgatgaattaaccgtactggaaaatttatatattggtcgtcatctgacga

SEQ ID NO: 648536 - DNA, 75 bp, synthetic construct
  source 1..75: mol_type = other DNA
agaaaggcggtaacttctacgtgatcgcagtattcgacaatgagttaggaacgctggtacatgaagcggcgcaca

SEQ ID NO: 648537 - DNA, 75 bp, synthetic construct
  source 1..75: mol_type = other DNA
tgcctcacttcaagatcccgctctttgagcatacaaccgttttcttttgcccgacccgcgagatgttttatgaat

SEQ ID NO: 648538 - DNA, 75 bp, synthetic construct
  source 1..75: mol_type = other DNA
cgaatgtgctgaagtatgacccggatcagttacggcagcaattagaagatcctgatggtgctaaaaaataccctg

SEQ ID NO: 648539 - DNA, 75 bp, synthetic construct
  source 1..75: mol_type = other DNA
tctatgttgctgtttgtctttacctctgtctccgtaataaaaaggcactttaccgttcccagggcggagggcgtc

SEQ ID NO: 648540 - DNA, 75 bp, synthetic construct
  source 1..75: mol_type = other DNA
ccgtgcccaagtctctcaactttaccacgtgcatgaatgtgatggtgctgaggtcatcttcagttccgatggcac

SEQ ID NO: 648541 - DNA, 75 bp, synthetic construct
  source 1..75: mol_type = other DNA
tgtttgaacgccttgaaccgctggtctatgagttttttgaccgctttattgaagtgggcgacgacctgctctgca

SEQ ID NO: 648542 - DNA, 75 bp, synthetic construct
  source 1..75: mol_type = other DNA
cgcacgttatttccgtcgcaggacgtattcacaacgcggtactcagcttagaacgccgaaacaagcccaaagaag

SEQ ID NO: 648543 - DNA, 75 bp, synthetic construct
  source 1..75: mol_type = other DNA
atgaagaagctgaaaggcgttatctcagttttcgctctgagcctttgtctgctttcaccggctcaggccgaagaa

SEQ ID NO: 648544 - DNA, 75 bp, synthetic construct
  source 1..75: mol_type = other DNA
atatctgtgccaagcaatgattccggcgcaacaacaaccactcccgttgtgcttctgtacattcaaaattgccca

SEQ ID NO: 648545 - DNA, 75 bp, synthetic construct
  source 1..75: mol_type = other DNA
tttaccaacctgctgttcatgtcgccgcaaaaatcacaaatcgacctggacagcagccagaaagacaaaattctg

SEQ ID NO: 648546 - DNA, 75 bp, synthetic construct
  source 1..75: mol_type = other DNA
taaagagtacattcgtcgcggactccaggcgcgccagaagcgaatgcaaaatgcggagacagcacgaaaaacagt

SEQ ID NO: 648547 - DNA, 75 bp, synthetic construct
  source 1..75: mol_type = other DNA
ggcaaatgcaatcaatccaccacgccctgtttatcgaccgccatcagggcaaccaaactattttactttgccaca

SEQ ID NO: 648548 - DNA, 75 bp, synthetic construct
  source 1..75: mol_type = other DNA
atgacagaggctaaaaataacactgttttggaaatgaataaaacggttgagcaaatgctggcacaaggacaatgg

SEQ ID NO: 648549 - DNA, 75 bp, synthetic construct
  source 1..75: mol_type = other DNA
cctaatggaggagtgcgaaaagctgagtcagaaccagtcatttagagatgcagaacagcggtatgcgtttgaaca

SEQ ID NO: 648550 - DNA, 75 bp, synthetic construct
  source 1..75: mol_type = other DNA
aagattgtaagctgctaaccttggtgcgtcagctcttttccgcgctggtcagccataaccggctgaatgccacaa

SEQ ID NO: 648551 - DNA, 75 bp, synthetic construct
  source 1..75: mol_type = other DNA
tgaaggcgtgcattttgagtccgtaggtttcgacttgctgattggtggcaagctggctcccaaagatccacagat

SEQ ID NO: 648552 - DNA, 75 bp, synthetic construct
  source 1..75: mol_type = other DNA
ataccgtagcgatgcgttggcggcagaagaaattctgacgctggcgaactggtgtctgttgaactattccgggct

SEQ ID NO: 648553 - DNA, 75 bp, synthetic construct
  source 1..75: mol_type = other DNA
tcgtcatgtttatgctggtggagatcccgtaaattatctggtgccagatgatgctctgaccgggtttctgcatca

SEQ ID NO: 648554 - DNA, 75 bp, synthetic construct
  source 1..75: mol_type = other DNA
cattgaaatcaaatgccatccgctggctaagaggtgaatacaccacgaaaaccgacgcccgtaacgatctgggtg

SEQ ID NO: 648555 - DNA, 75 bp, synthetic construct
  source 1..75: mol_type = other DNA
atattttgattaatgacttccgtattggcagtcaggttcaggacgatatttaccagctttggttgcaaagccagc

SEQ ID NO: 648556 - DNA, 75 bp, synthetic construct
  source 1..75: mol_type = other DNA
gttatctggctttacgctgaagatggtaagaactggtatgaggcacaaaaagcctttcaggcagacacactaaaa

SEQ ID NO: 648557 - DNA, 75 bp, synthetic construct
  source 1..75: mol_type = other DNA
aaacaaaccagatggcaatgcgttaattagcgttgtggaaaggtttgttactgaggcaaggaaggaggctgatgc

SEQ ID NO: 648558 - DNA, 75 bp, synthetic construct
  source 1..75: mol_type = other DNA
tcgtcatgtttatgcaggtggagatccagagaattatctggtaccagatgaggcactgactggattcctgcatca

SEQ ID NO: 648559 - DNA, 75 bp, synthetic construct
  source 1..75: mol_type = other DNA
ccgccgtgaggagcatgagcgcttttcctgtactgaggaggattttaaattttttaattcatgtcctgatttgca

SEQ ID NO: 648560 - DNA, 75 bp, synthetic construct
  source 1..75: mol_type = other DNA
atggccgttctgggattgcaggggatgcggggtggcgtgggaacgacaacgatcactgccgcgttaggctggtca

SEQ ID NO: 648561 - DNA, 75 bp, synthetic construct
  source 1..75: mol_type = other DNA
caaacggcaattagtgttatagcagacgtgatcaccgcctgggagctggacgcgaaacgaattattactgaaacc

SEQ ID NO: 648562 - DNA, 75 bp, synthetic construct
  source 1..75: mol_type = other DNA
gcctgcccggacaacttgttgcgcctgtcatttaacgttgattttacccaccgtcagggttgggccagagctatg

SEQ ID NO: 648563 - DNA, 75 bp, synthetic construct
  source 1..75: mol_type = other DNA
atgctcgatcccaatctgctgcgtaatgagccagacgcagtcgctgaaaaactggcacgccggggctttaagctg

SEQ ID NO: 648564 - DNA, 75 bp, synthetic construct
  source 1..75: mol_type = other DNA
ggtgtctggtatcgttttatttccggctccatgaaacgttttgacggtcagccgctgggtgcactgcccgcaggt

SEQ ID NO: 648565 - DNA, 75 bp, synthetic construct
  source 1..75: mol_type = other DNA
atgagcgaacaacaggagatgatgacacccgttccggcagataaacccacaacacgccggcgttcacttctgcgg

SEQ ID NO: 648566 - DNA, 75 bp, synthetic construct
  source 1..75: mol_type = other DNA
gctgtatctgacgggacgcggcatgctggcgatggatacccgtctggcaacactggagcaacagcagggggagcg

SEQ ID NO: 648567 - DNA, 75 bp, synthetic construct
  source 1..75: mol_type = other DNA
gcaggcccgtttacaggctaatcctgcgatggcgaatgcagttgataccgtgactggcctcggtgcttcattcgg

SEQ ID NO: 648568 - DNA, 75 bp, synthetic construct
  source 1..75: mol_type = other DNA
cgtcaccaataccagtgcagccgtgagtggtaccaacgataacggcagcttcagtatcgctggcggcagtgcagc

SEQ ID NO: 648569 - DNA, 75 bp, synthetic construct
  source 1..75: mol_type = other DNA
gtctggatggtcaccccaaagggcaggtctcagaatctgaagcacagagtgccggtcgcagactggcgacattag

SEQ ID NO: 648570 - DNA, 75 bp, synthetic construct
  source 1..75: mol_type = other DNA
ttgcagtcacgcctgagtgaactggaggcgaagctgcagacggagagtgcgcgtctggcgcagctggcccggcag

SEQ ID NO: 648571 - DNA, 75 bp, synthetic construct
  source 1..75: mol_type = other DNA
ggcttacatcagctaagcaaaagtcattgctctataaatcattggctgatttggttcagtcaatgatggacacct

SEQ ID NO: 648572 - DNA, 75 bp, synthetic construct
  source 1..75: mol_type = other DNA
ttgttgacccatggttggagcgaattaccaaccggaagtctattttctccatgagcaaggaggatctggagacca

SEQ ID NO: 648573 - DNA, 75 bp, synthetic construct
  source 1..75: mol_type = other DNA
aacctgtattacctcaacaacagtgctgcgaccttcgcaggcaccctgacggggaccggcaccctgacgcaggaa

SEQ ID NO: 648574 - DNA, 75 bp, synthetic construct
  source 1..75: mol_type = other DNA
gagagtgttaatgcaggcatccgcatgttgtctctgtcggcgctggcgttacaggcgcgtctacaggctaatccg

SEQ ID NO: 648575 - DNA, 75 bp, synthetic construct
  source 1..75: mol_type = other DNA
gctcaacccggaacagcctcaccagttcacgccgcctgaattgtggctgctgactgacctgaccgaagactcaac

SEQ ID NO: 648576 - DNA, 75 bp, synthetic construct
  source 1..75: mol_type = other DNA
attcggcgagatgtttctgacttccagagggatgatcagtattcccataaacgacctggcccggacaatgggtat

SEQ ID NO: 648577 - DNA, 75 bp, synthetic construct
  source 1..75: mol_type = other DNA
gctggtagacggttttctggcacagattcattgtctgccatgtgtaccgattaatgaggtggcaaaagagaaact

SEQ ID NO: 648578 - DNA, 75 bp, synthetic construct
  source 1..75: mol_type = other DNA
ttgcagagcaccttcccaccgagtggatacagcacctcctgacgctttctgctcatgcgaccatttgtcgtctta

SEQ ID NO: 648579 - DNA, 75 bp, synthetic construct
  source 1..75: mol_type = other DNA
ccgggaatgctgcgacaacacagcgcgatgctttgctgggagagctggcaaaactggcacagtgctggcaggcgc

SEQ ID NO: 648580 - DNA, 75 bp, synthetic construct
  source 1..75: mol_type = other DNA
ttatccgaaaaaacagatattatcgcacctgcatttactgaacaggctgcagaatcaacacccgtcggaataaat

SEQ ID NO: 648581 - DNA, 75 bp, synthetic construct
  source 1..75: mol_type = other DNA
cagcaactttgctgaaggcgtcaactcgctgatgttcatgaaaaacctgacaatttctggcggattcctgctgct

SEQ ID NO: 648582 - DNA, 75 bp, synthetic construct
  source 1..75: mol_type = other DNA
tcggtttgatggggccgctggctggtgtaggcgacccgatcttctggggaacggtacgtccggtatttgcagcgc

SEQ ID NO: 648583 - DNA, 75 bp, synthetic construct
  source 1..75: mol_type = other DNA
agaattattatatataacatacgtatttaatacaggcttatttgttgctggtaataatgagcgcggaggcggagt

SEQ ID NO: 648584 - DNA, 75 bp, synthetic construct
  source 1..75: mol_type = other DNA
gctgaacccagctcaacctcatttattaaccgcaccagacatctggctgcttaccgatctgactgaggactcaac

SEQ ID NO: 648585 - DNA, 75 bp, synthetic construct
  source 1..75: mol_type = other DNA
gcgaagctggcagaacgtgcagaaatgaatgttcagacactgcgaaacaaactcaacccagaacaaccgcatcag

SEQ ID NO: 648586 - DNA, 75 bp, synthetic construct
  source 1..75: mol_type = other DNA
tgaatgttcagacactgcgaaacaaactcaatccagagcaaccgcatcagctcaccgcaccagaaatctggttgc

SEQ ID NO: 648587 - DNA, 75 bp, synthetic construct
  source 1..75: mol_type = other DNA
acatatccccgaatcgccagccaggaagaagaaaaaacaccgtttcccacgtccctcccactggacccgtgagta

SEQ ID NO: 648588 - DNA, 75 bp, synthetic construct
  source 1..75: mol_type = other DNA
ggctttcgcactgcgtcacaacatggtgaagctggcagaacgcgcaggaatgaatgtccagacgctgcgcaataa

SEQ ID NO: 648589 - DNA, 75 bp, synthetic construct
  source 1..75: mol_type = other DNA
atccacattttgatgaagcctgtcgtacattcgcgctgcgccacaacctggtgcaactggcagatcgtgcaggca

SEQ ID NO: 648590 - DNA, 75 bp, synthetic construct
  source 1..75: mol_type = other DNA
gagcgggcagagcaacatattgacctggcctatgccatcactgcccacggtgcgcagggggcgagtgaaaccttt

SEQ ID NO: 648591 - DNA, 75 bp, synthetic construct
  source 1..75: mol_type = other DNA
gatgcgccagttacacataaagctggttatgctatctgccgctcagcagattttaactcatgggaatatgtgcca

SEQ ID NO: 648592 - DNA, 75 bp, synthetic construct
  source 1..75: mol_type = other DNA
gaccatcgcggtgaaatcgtctataacaccgaaacgggagatgccaaagaaatcacagcactaggcgactatccc

SEQ ID NO: 648593 - DNA, 75 bp, synthetic construct
  source 1..75: mol_type = other DNA
atggataacgccatattaaatagcgagattatcgccaccaaagcagggaatattacagtgtataactatgatagt

SEQ ID NO: 648594 - DNA, 75 bp, synthetic construct
  source 1..75: mol_type = other DNA
agtctgattcagctgaaattacaggccggacggaagttgatgcaggcagaaacaacccggcttaacgctgtgctg

SEQ ID NO: 648595 - DNA, 75 bp, synthetic construct
  source 1..75: mol_type = other DNA
aaacacccgacttaacgctgtgctggattatattgacgcggtgacggcaacagataccagcacagcgccagacgt

SEQ ID NO: 648596 - DNA, 75 bp, synthetic construct
  source 1..75: mol_type = other DNA
aatttatcgccacccaagcaggaaatattacggtttataactatgatggtgaaacgcgggaatatatttccacat

SEQ ID NO: 648597 - DNA, 75 bp, synthetic construct
  source 1..75: mol_type = other DNA
gacgctcctggtacatataaggctggttatacaatttgccgttctgtggatttaaaatcatgggaatatgtgtca

SEQ ID NO: 648598 - DNA, 75 bp, synthetic construct
  source 1..75: mol_type = other DNA
aatcacagtgccaggcgactatcccgaaaatacaaccactatcgccccgttaacgccatacgataaatgggatgg

SEQ ID NO: 648599 - DNA, 75 bp, synthetic construct
  source 1..75: mol_type = other DNA
aggccagcgatacaactgttggcagtgacggtacgctggatgtccgcagcggcggtgtgctctacggcaccacca

SEQ ID NO: 648600 - DNA, 75 bp, synthetic construct
  source 1..75: mol_type = other DNA
gcaccaaaactggagaatcaaaagaaatcaaagctccgggtgattaccctgaaaatacaaccactatcgcccctt

SEQ ID NO: 648601 - DNA, 75 bp, synthetic construct
  source 1..75: mol_type = other DNA
accttattgcaacaaaggcaggggatgttaccgtttataactacgatggtgaaacacgggaatatatttccactt

SEQ ID NO: 648602 - DNA, 75 bp, synthetic construct
  source 1..75: mol_type = other DNA
gattacattgacgcggtgacggcaacagataccagtaccgcgccggatgtcatctggcctgaactgccggaggag

SEQ ID NO: 648603 - DNA, 75 bp, synthetic construct
  source 1..75: mol_type = other DNA
gcaccgaaacaggagaatcaaaagaaatcacagctccgggtgattaccctgaaaatacaaccactatcgccccgt

SEQ ID NO: 648604 - DNA, 75 bp, synthetic construct
  source 1..75: mol_type = other DNA
cgcatgcggtggtggctaatgtcacgcagcataacggcgaatggaagacactgagcagtgacaaagtggggaaaa

SEQ ID NO: 648605 - DNA, 75 bp, synthetic construct
  source 1..75: mol_type = other DNA
atgcggtggtggccaatgtcacgcagcataacggtgagtggaagacactgagcagtgacaaagtggggaaaacgg

SEQ ID NO: 648606 - DNA, 75 bp, synthetic construct
  source 1..75: mol_type = other DNA
gtggtggaaagtaaaaacctggccttcagcatggtggacctgctgacagaggcgaagtcgtttgctgcagaagga

SEQ ID NO: 648607 - DNA, 75 bp, synthetic construct
  source 1..75: mol_type = other DNA
acgggagcaggaagcggtccgggaggttgcccgggaaaatctgctgcaggagcgtctgcagcagatggagcggga

SEQ ID NO: 648608 - DNA, 75 bp, synthetic construct
  source 1..75: mol_type = other DNA
gttgcccgggaaaatctgctgcaggaacgacttcagcagatggagcgggatatggtccgtgacctgcagaaagag

SEQ ID NO: 648609 - DNA, 75 bp, synthetic construct
  source 1..75: mol_type = other DNA
aggttgcccgggaaaatctgctgcaggagcgactgcagcagatggagcgggatatggttcgtgacctgcagaaag

SEQ ID NO: 648610 - DNA, 75 bp, synthetic construct
  source 1..75: mol_type = other DNA
cagacgctgattgtcacgcacctgaatgaggaccggcgcgtgctgaacagcatgattcatgatgcacgggaaaag

SEQ ID NO: 648611 - DNA, 75 bp, synthetic construct
  source 1..75: mol_type = other DNA
cggtgaaccggtcacggcagaggtactggcacagcggcaggctgaagaggccatccgccgtgaaacggaacgccg

SEQ ID NO: 648612 - DNA, 75 bp, synthetic construct
  source 1..75: mol_type = other DNA
actgattgatgctgctatggcttccattagtctgattcagctgaaattgcaggccggacggaagctgacgcaggc

SEQ ID NO: 648613 - DNA, 75 bp, synthetic construct
  source 1..75: mol_type = other DNA
gtactgcggaaaaacttgcccgtcacccctcctttacggtggtttctgagcagataaaggcccgtgccggtgagg

SEQ ID NO: 648614 - DNA, 75 bp, synthetic construct
  source 1..75: mol_type = other DNA
cgggcaggagcgtgaccgggctgccataactgaacgggaagccgcgctgccggagagtgtgctgcgtgaaccaca

SEQ ID NO: 648615 - DNA, 75 bp, synthetic construct
  source 1..75: mol_type = other DNA
tgtgtccgggcagggcggtgcagccgggcagcgtgagcgggtggctgaactggtcatgatggcccgggagcaggg

SEQ ID NO: 648616 - DNA, 75 bp, synthetic construct
  source 1..75: mol_type = other DNA
gaaaatgagcgagttatgtgaaaaatatattcgctacaagcgcggggggaaattcacggaaaaggcagagaatcg

SEQ ID NO: 648617 - DNA, 75 bp, synthetic construct
  source 1..75: mol_type = other DNA
agctttgacgtctatcaggacgatgttacatcgcaagatgtgcttatcgtcctagttgataataaacgaactatg

SEQ ID NO: 648618 - DNA, 75 bp, synthetic construct
  source 1..75: mol_type = other DNA
ccctatcactgccatgtttatcgccgtgtttgtcgcctattatgtgttgggtatacgccagcatatgagcatggg

SEQ ID NO: 648619 - DNA, 75 bp, synthetic construct
  source 1..75: mol_type = other DNA
gaaggcaatggcggatgacggaaaactgacagcggataaagtggtccccgcgttaatcagccagctggggatatt

SEQ ID NO: 648620 - DNA, 75 bp, synthetic construct
  source 1..75: mol_type = other DNA
cgctccgtttgtttgcgaagatggtgtagatgcggtagctgatgctatcagaataaaacaatctaataagcaatg

SEQ ID NO: 648621 - DNA, 75 bp, synthetic construct
  source 1..75: mol_type = other DNA
gtttaaccgctcgttgctcaaagaacggttaggctttgaaaaagagagcaaaaaatctttccattcattccgtca

SEQ ID NO: 648622 - DNA, 75 bp, synthetic construct
  source 1..75: mol_type = other DNA
ggaatttactgaaagggactccgggtattactatatttccaggaaatataaatgcaaatagcaactattcatatt

SEQ ID NO: 648623 - DNA, 75 bp, synthetic construct
  source 1..75: mol_type = other DNA
tttatggaatggacttacgcctgtctttgttgatattgaaaatgatggatataatattgattacagaaaaataga

SEQ ID NO: 648624 - DNA, 75 bp, synthetic construct
  source 1..75: mol_type = other DNA
ggcgtggagtacgtctccttatttaataatgctacaattgctctgattacggcagtccaatcattagaattgact

SEQ ID NO: 648625 - DNA, 75 bp, synthetic construct
  source 1..75: mol_type = other DNA
gatgatggacatggggccgctggagatggtgaatgccattgaaagtgggattggaggaacgctggggtttctcgc

SEQ ID NO: 648626 - DNA, 75 bp, synthetic construct
  source 1..75: mol_type = other DNA
ttgaaattaaaaggaataatgtcaaggagatatttttacccattaattagtaatatgccaatgtattgtggtttt

SEQ ID NO: 648627 - DNA, 75 bp, synthetic construct
  source 1..75: mol_type = other DNA
aactttcgtctgtaaacggtattcgtatgattgagtatgtttcagccgctaatagtaatttttcatattttccaa

SEQ ID NO: 648628 - DNA, 75 bp, synthetic construct
  source 1..75: mol_type = other DNA
cgtactgcaggaaatatcaaaagttcttatgaatgccgcgattgtcaacggaattaagacggcggcaaacggtat

SEQ ID NO: 648629 - DNA, 75 bp, synthetic construct
  source 1..75: mol_type = other DNA
cacgcagattgccacggcgcgggcaagtgcagccgtgtaccgtgcacagcaggcagtggcggcagcccgcgggac

SEQ ID NO: 648630 - DNA, 75 bp, synthetic construct
  source 1..75: mol_type = other DNA
tacgcagattgccacggcgcgggcaagagcagccgtgtaccgtgcgcagcaggcagtggcggcagcccgcgggac

SEQ ID NO: 648631 - DNA, 75 bp, synthetic construct
  source 1..75: mol_type = other DNA
aacgcagattgccacggcgcgggcaagagcagccgtgtaccgtgctcagcaggcagtggcggcagcccgcgggac

SEQ ID NO: 648632 - DNA, 75 bp, synthetic construct
  source 1..75: mol_type = other DNA
tgaacagaaatattgctgccagaatcgcggcccagaatgcgctgaacagtacaacggcggtgggctcacgtctga

SEQ ID NO: 648633 - DNA, 75 bp, synthetic construct
  source 1..75: mol_type = other DNA
tgaacagaaatattgctgccagaatcgccgcccagaatgggctgaacagtacaacggcggtgggctcacgtctga

SEQ ID NO: 648634 - DNA, 75 bp, synthetic construct
  source 1..75: mol_type = other DNA
tgaacagaaatattgctgccagaaacgcagcccagaatgtgctgaacagtacaacggcggtgggctcacgtctga

SEQ ID NO: 648635 - DNA, 75 bp, synthetic construct
  source 1..75: mol_type = other DNA
ggcaagccaggaacgtaaagcgtttcactggatggcgagccataagcctgatctggtcatcaaactcaatgtcga

SEQ ID NO: 648636 - DNA, 75 bp, synthetic construct
  source 1..75: mol_type = other DNA
gggcgaggccgggcctgaagcaatcatgccactgacacgggcagcggacggctctcttggggtcagggccattgg

SEQ ID NO: 648637 - DNA, 75 bp, synthetic construct
  source 1..75: mol_type = other DNA
ggagatgcagattgctgcagaagcccgtctggcggccacacaggaacgcctgaacagaaatattgctgccagaac

SEQ ID NO: 648638 - DNA, 75 bp, synthetic construct
  source 1..75: mol_type = other DNA
gaaaaaaccagccaagaaaggcaaacgtaagcctaaagcaaaagaagcgcttgtaccgcgtgtaatgagctttaa

SEQ ID NO: 648639 - DNA, 75 bp, synthetic construct
  source 1..75: mol_type = other DNA
cagggctgaaaatttccggtgccagtgcggcagaggcgggttcggtgatcacccagttcagccaggcgctggcac

SEQ ID NO: 648640 - DNA, 75 bp, synthetic construct
  source 1..75: mol_type = other DNA
gttgatatcgatgccaaccagccgctggaacaggtactggttgacgcagaaaaagcgattacggattttatgaca

SEQ ID NO: 648641 - DNA, 75 bp, synthetic construct
  source 1..75: mol_type = other DNA
cttaaatgggcttaaacctgtttttgtcgatattgatcccaaaaccttaaatatcgatccgagaagaattgaaga

SEQ ID NO: 648642 - DNA, 75 bp, synthetic construct
  source 1..75: mol_type = other DNA
ctgctgtagcagcatcagtatttctggcaacgtcttcaaatgcagcagaaatatacaataaagatgcaaacaaag

SEQ ID NO: 648643 - DNA, 75 bp, synthetic construct
  source 1..75: mol_type = other DNA
ccttcattaggcgcaacgttattcaccatactgctacccattgcgctgatgttggttaaaacgattgccgaattg

SEQ ID NO: 648644 - DNA, 75 bp, synthetic construct
  source 1..75: mol_type = other DNA
gctggccattccgctgtgtaccgcattgatggctgtgcactgcgtggttcccccacatccggctgctttatatgt

SEQ ID NO: 648645 - DNA, 75 bp, synthetic construct
  source 1..75: mol_type = other DNA
gtatgctgatgccaataatctcaccccggaacagaagctggcaggactggataaacttgccaaaggtgagttacc

SEQ ID NO: 648646 - DNA, 75 bp, synthetic construct
  source 1..75: mol_type = other DNA
cgacatgtgctgataacccttccggtgccgcctgccagaaggcaatgaatgagcgggatgctgtagggctggctc

SEQ ID NO: 648647 - DNA, 75 bp, synthetic construct
  source 1..75: mol_type = other DNA
ccgcgacgccggacattgccgaagcgcattttctcatacgcctgagtcttgaaacagattgtgccgatgttcatg

SEQ ID NO: 648648 - DNA, 75 bp, synthetic construct
  source 1..75: mol_type = other DNA
tctgatgactgagcgatggtatccgtcactggaaccctgccggctcatttattacagcggaagctggtatctgat

SEQ ID NO: 648649 - DNA, 75 bp, synthetic construct
  source 1..75: mol_type = other DNA
tttgcgaaaaggcaggaattccgattgaacctgatttcgagttggctggaggattaacgcttacttgcactggcg

SEQ ID NO: 648650 - DNA, 75 bp, synthetic construct
  source 1..75: mol_type = other DNA
cagtctggtcgctgaagagcgttttatctccgccctgccacatttctctttcatccataaacttatcaacacctt

SEQ ID NO: 648651 - DNA, 75 bp, synthetic construct
  source 1..75: mol_type = other DNA
agtctcgctgatacgttggcagttattctctccaatatgcatatgcacccgattcttctggcctggttggtggca

SEQ ID NO: 648652 - DNA, 75 bp, synthetic construct
  source 1..75: mol_type = other DNA
tactttacagcgcgattttcatcagcgtctggttcacctggacttagagtacagaaatggccggtacagtctcag

SEQ ID NO: 648653 - DNA, 75 bp, synthetic construct
  source 1..75: mol_type = other DNA
attcctctggctttttcaattgccaaaaaaaccaatacctcattgttaaagctggccattccgctatgtaccgca

SEQ ID NO: 648654 - DNA, 75 bp, synthetic construct
  source 1..75: mol_type = other DNA
ctggcgcagtcactatcgtgaccatagcaaacgattagacttattcaaggagtggagggacgcaaatggctgcgg

SEQ ID NO: 648655 - DNA, 75 bp, synthetic construct
  source 1..75: mol_type = other DNA
gaacattactggactgtggccgcgccgcagaatatggcgcataaaaaacgctttgccagccagatcattaaacgt

SEQ ID NO: 648656 - DNA, 75 bp, synthetic construct
  source 1..75: mol_type = other DNA
cggctcctgtccccactccggcggcctccggtagttcaccacagaccaccgccacgtctgaaagcggcgtgacgc

SEQ ID NO: 648657 - DNA, 75 bp, synthetic construct
  source 1..75: mol_type = other DNA
ccagccagaacagcgcgcgttattgtttaagcgtgccgcagctgcgcaacaggctggcctgaagctgattgtcgg

SEQ ID NO: 648658 - DNA, 75 bp, synthetic construct
  source 1..75: mol_type = other DNA
gtgttgcagcgtctggcacgagacggctggttgactattcaacatggtaagccgacgaaggtgaataatttctgg

SEQ ID NO: 648659 - DNA, 75 bp, synthetic construct
  source 1..75: mol_type = other DNA
atggcaatggacttacgcgatccgaatgtctggatgtcgcacctgatggaaaatctgcaggaagagaaactggca

SEQ ID NO: 648660 - DNA, 75 bp, synthetic construct
  source 1..75: mol_type = other DNA
tgcacagacggcgcaccgtcttggttataccgctgtagccgatgccatccgcgatgaagtcgtttcctttcttgg

SEQ ID NO: 648661 - DNA, 75 bp, synthetic construct
  source 1..75: mol_type = other DNA
cctctaaacgggcggatgcatcttatagcaacacacctggcacggtttgcgctgtgatgactgccgactgcctgc

SEQ ID NO: 648662 - DNA, 75 bp, synthetic construct
  source 1..75: mol_type = other DNA
gaaaatgagacattcttctcttatcgtcgcgacaagaccactggtcgtatggcaagtttcatttggctgatataa

SEQ ID NO: 648663 - DNA, 75 bp, synthetic construct
  source 1..75: mol_type = other DNA
cctcaaaacgagcagatgcctcttatagcaatacgcccggcacggtttgcgcagtgatgactgccgactgcctcc

SEQ ID NO: 648664 - DNA, 75 bp, synthetic construct
  source 1..75: mol_type = other DNA
cgtaccgttggtggtttcacaaacgcctgccgccgatggtgccaccgtcaccataaccgtgcagaacatcctcga

SEQ ID NO: 648665 - DNA, 75 bp, synthetic construct
  source 1..75: mol_type = other DNA
gggcttcccggcgattaatctgacggtgaccgatgatggcagcaccattcagggcaaagatgccgacatcatgat

SEQ ID NO: 648666 - DNA, 75 bp, synthetic construct
  source 1..75: mol_type = other DNA
cttcaaaacgagcggatgcctcttatagcaacacgcccggcacaatttgcgcagtgatgactgccgactgcctgc

SEQ ID NO: 648667 - DNA, 75 bp, synthetic construct
  source 1..75: mol_type = other DNA
gaagtctttacaaagacgccaacacacagatccttcagggaaactacggcagtattaccggcagggtgggaatgc

SEQ ID NO: 648668 - DNA, 75 bp, synthetic construct
  source 1..75: mol_type = other DNA
gccaggcagagagcgaaccttaccgtcaggtgacagtatcacggggcgaggtcgtctccattctgtttgttgagc

SEQ ID NO: 648669 - DNA, 75 bp, synthetic construct
  source 1..75: mol_type = other DNA
agtgcctggcgaaacccagaccggtaagctgttccgtatgcgcggtaaaggcgtcaagtctgtccgcggcggcgc

SEQ ID NO: 648670 - DNA, 75 bp, synthetic construct
  source 1..75: mol_type = other DNA
gcatgatgataccagtcgctattctctgggggcatcggtacagaaagatgtttccaatcagatacaaagtattct

SEQ ID NO: 648671 - DNA, 75 bp, synthetic construct
  source 1..75: mol_type = other DNA
gtctaaatacggcggcatggaagcgtctgatattaaaaagataaaggaccttgaggacgagaaccgacgcctcaa

SEQ ID NO: 648672 - DNA, 75 bp, synthetic construct
  source 1..75: mol_type = other DNA
ttgaggacgagaaccgccgtctcaaacagatgtttgctgacctgagtctggaaaaacgggcgctgaaagacgtta

SEQ ID NO: 648673 - DNA, 75 bp, synthetic construct
  source 1..75: mol_type = other DNA
caaaatccggcaaaaagctgtcagccctgctggttatggggggcgtgattattatcgggggcggatacctgctgc

SEQ ID NO: 648674 - DNA, 75 bp, synthetic construct
  source 1..75: mol_type = other DNA
aacgcccggcggcgctgtggggggtgccaatggtgcccctgctggctgttacgggtgtaaccatcatcgttgctg

SEQ ID NO: 648675 - DNA, 75 bp, synthetic construct
  source 1..75: mol_type = other DNA
gggcggccgttactatcgggttatcagtggcgagcctacggggtggaacccgttctcactgcctgcaaccaaacg

SEQ ID NO: 648676 - DNA, 75 bp, synthetic construct
  source 1..75: mol_type = other DNA
tcccgcgtggtggcctccgtacctgccggcccatgggccggggccgtcctctacagccaggacgccagactcgcc

SEQ ID NO: 648677 - DNA, 75 bp, synthetic construct
  source 1..75: mol_type = other DNA
tcaccgtccggtaccgttacatcacagcatccccgtctgcaggagacgagtctggcaacaccggctacacgtcag

SEQ ID NO: 648678 - DNA, 75 bp, synthetic construct
  source 1..75: mol_type = other DNA
aggaagaagcagagcgtcaggcgtctgacaggatccaggcagctgtcatacgtaaacagaacgaaatgcggcaac

SEQ ID NO: 648679 - DNA, 75 bp, synthetic construct
  source 1..75: mol_type = other DNA
gcaatttacgctgacatttgcaccgattgtgactcgcggctatgaatccagtaaacgagatgtgcggattgaagg

SEQ ID NO: 648680 - DNA, 75 bp, synthetic construct
  source 1..75: mol_type = other DNA
tgacccgtcatcctgaaaagccggaataccatgtggtgctgtgcgtcagacaggagtatttcgacggccccgaac

SEQ ID NO: 648681 - DNA, 75 bp, synthetic construct
  source 1..75: mol_type = other DNA
accttatctgggcgttcagtgatttcgcccgcgatcgccgtggagtgtgcgatccggaagcccgttgccttgccg

SEQ ID NO: 648682 - DNA, 75 bp, synthetic construct
  source 1..75: mol_type = other DNA
cgtcagtgcgctgatgaatgcaacacctggacgcgacctttgctggctcctgacccgtcatcctgaaaagccgga

SEQ ID NO: 648683 - DNA, 75 bp, synthetic construct
  source 1..75: mol_type = other DNA
tggaccagctgattcttgatgcctggagcaacgtactgggcttcatgtcaccgggtgaagcggcacccgtagtag

SEQ ID NO: 648684 - DNA, 75 bp, synthetic construct
  source 1..75: mol_type = other DNA
cctgctcccgggtacggcggatcctgcttcgtctgccatgtgaatatgacagtaccttcagcagcagaaagacct

SEQ ID NO: 648685 - DNA, 75 bp, synthetic construct
  source 1..75: mol_type = other DNA
tgaaagagttaggggaaatcacccgttcgatgaaggtattgggctgttacccaagtgagaacgtagtgcctgttg

SEQ ID NO: 648686 - DNA, 75 bp, synthetic construct
  source 1..75: mol_type = other DNA
tggatcggctgattctggatgcctggagcaacgtactgggcttcgcgtcaccgggtgaagcggcaccgtaccaga

SEQ ID NO: 648687 - DNA, 75 bp, synthetic construct
  source 1..75: mol_type = other DNA
ggctatcccttttcattaagtcttgatcgtaaccgtgaaggaatgcagtcctggcaattgggcgtcaactatcgt

SEQ ID NO: 648688 - DNA, 75 bp, synthetic construct
  source 1..75: mol_type = other DNA
ggcgataaaagttttggctatgcattgggtgcggtaaaaataaaaccgagtgaaaagagtttacttaaattaggt

SEQ ID NO: 648689 - DNA, 75 bp, synthetic construct
  source 1..75: mol_type = other DNA
gcgctgggaagcgaagcaggcggcacattgtacggtttgcaggtgctcgagcgtattgaagcgaatcagcgccaa

SEQ ID NO: 648690 - DNA, 75 bp, synthetic construct
  source 1..75: mol_type = other DNA
cttgagcgtgcgctgcgtgaacagtcctgctcccgggtacggcggatcctgcttcgtctgccgtgggaacatgac

SEQ ID NO: 648691 - DNA, 75 bp, synthetic construct
  source 1..75: mol_type = other DNA
atagcctggcccccttctggccgtcttatcagaacaaaatcatcggtgttctcaaccgtgcgctgcgtgaacagt

SEQ ID NO: 648692 - DNA, 75 bp, synthetic construct
  source 1..75: mol_type = other DNA
aacgcccggcggcactgtggggggtgccaatggtgcccctactggccgtcacgggtgtaaccatcatcgttgcta

SEQ ID NO: 648693 - DNA, 75 bp, synthetic construct
  source 1..75: mol_type = other DNA
tctcattgttggtagttgccataattttgtttgcaacgggcaaagtgcgtatggatgcggtcgctttgtttgtca

SEQ ID NO: 648694 - DNA, 75 bp, synthetic construct
  source 1..75: mol_type = other DNA
aacgtttcctgggatgcactgaacacggcatacagtgaacaccctgagtggttttcagggcttgtctccgtggtt

SEQ ID NO: 648695 - DNA, 75 bp, synthetic construct
  source 1..75: mol_type = other DNA
catgcccaaaccctggctgcagcagagttatcacgacaaaactttattaatttgatttgcggattcttacgcaaa

SEQ ID NO: 648696 - DNA, 75 bp, synthetic construct
  source 1..75: mol_type = other DNA
tcgcgatcttatccgtgaatatcgactgaccgggcgtgcgcgtcgtctggctattcgccccggatcgccaatgat

SEQ ID NO: 648697 - DNA, 75 bp, synthetic construct
  source 1..75: mol_type = other DNA
ggtgaaagggctgatggacattggcggtggttacgggccacatatgatgctggggtgtttgtttgtcttgtcggc

SEQ ID NO: 648698 - DNA, 75 bp, synthetic construct
  source 1..75: mol_type = other DNA
gccatgcgtatgcaaacgtcgccgtcgcgcctgatgatgccgttaagttttgccgggctgattagcggcatgatg

SEQ ID NO: 648699 - DNA, 75 bp, synthetic construct
  source 1..75: mol_type = other DNA
aaccgccaggacgttttgtgctgtgtgtcctgtggatgcccgttaacacttcagcgggcaatgacggacaaccac

SEQ ID NO: 648700 - DNA, 75 bp, synthetic construct
  source 1..75: mol_type = other DNA
taaggtttacgcaaaggtttacatcaataccggcaacctgcccgccatcaaactgggggaggcccgcgttcgact

SEQ ID NO: 648701 - DNA, 75 bp, synthetic construct
  source 1..75: mol_type = other DNA
agtgcctgaagtgattagcgcacgtcattgcgaaatgaaagtcgttgccgtctcagcaataactaacatggcgga

SEQ ID NO: 648702 - DNA, 75 bp, synthetic construct
  source 1..75: mol_type = other DNA
aagatcacatcaacacgatgccggggactccaatgacgggtcttaatgatgaccgcttcggcgaacgttttttct

SEQ ID NO: 648703 - DNA, 75 bp, synthetic construct
  source 1..75: mol_type = other DNA
aatgtggattacgtcaccacttttgagctgccttttcgtttggtgcttacccgggcaccacagctgattgctgtg

SEQ ID NO: 648704 - DNA, 75 bp, synthetic construct
  source 1..75: mol_type = other DNA
cacggcgtaccgacggtcaataaagtgcaacttggaacgactcctgtggtgcgcggggcgattacttccggtgaa

SEQ ID NO: 648705 - DNA, 75 bp, synthetic construct
  source 1..75: mol_type = other DNA
caacatcgggataacgcctgttccggctgagatatcgctttcagcggcgtatatggcacaactgccaggcaactt

SEQ ID NO: 648706 - DNA, 75 bp, synthetic construct
  source 1..75: mol_type = other DNA
gaaggggaaatggtgttttcgtcacagctggcattctatgaatacctgctgacgcaccagtggcgaaaggtgcgc

SEQ ID NO: 648707 - DNA, 75 bp, synthetic construct
  source 1..75: mol_type = other DNA
gctcgacgatcttcccacgcgatgaacgccgtctgagtgatgcggttaatgctgtgatgaatgacgagccacaat

SEQ ID NO: 648708 - DNA, 75 bp, synthetic construct
  source 1..75: mol_type = other DNA
cattaccagcctgcttgacgggcgacgtctggtcattttcatggatgaattctggaaatggttacgcgacccggt

SEQ ID NO: 648709 - DNA, 75 bp, synthetic construct
  source 1..75: mol_type = other DNA
cgatgaacgccgtctgaacgacgcggttaatgccgtcatgagcgatgagccggagtatcgtcgttttggtattac

SEQ ID NO: 648710 - DNA, 75 bp, synthetic construct
  source 1..75: mol_type = other DNA
tggccgcgctgcataatttctaccccggcaaacgtaataacgcgccgtggggggatgcgatggcgttaatgcgca

SEQ ID NO: 648711 - DNA, 75 bp, synthetic construct
  source 1..75: mol_type = other DNA
atgccttattgctgtgattgttttgctttatatcgctggcgcgatcctgatgtcatgttttattaagtttagcgg

SEQ ID NO: 648712 - DNA, 75 bp, synthetic construct
  source 1..75: mol_type = other DNA
ttgcagcagctgaatgccagcattgcagtggaaggactggatgccaaaaaagtggcagccgacgtaatttcccgt

SEQ ID NO: 648713 - DNA, 75 bp, synthetic construct
  source 1..75: mol_type = other DNA
gtcactggcaggtggcgacacggcagtgacgattaaagccgcagcccagcaaacgtccggcgttaatgcggcgat

SEQ ID NO: 648714 - DNA, 75 bp, synthetic construct
  source 1..75: mol_type = other DNA
agtggtgagtctacagggtggaacccgttctcgttgccagcaaccaaacgcaatatcaatttcatcaagcaactg

SEQ ID NO: 648715 - DNA, 75 bp, synthetic construct
  source 1..75: mol_type = other DNA
tgcaactctgtagaagaattgaagccatcaaaattagatgtcattgctaagcctggtgatatattaatagcaaga

SEQ ID NO: 648716 - DNA, 75 bp, synthetic construct
  source 1..75: mol_type = other DNA
atgaattctggaaatggcttcaggacccggagttttcaaaattcgccctcgacatgctgaaggtcattcgaaagc

SEQ ID NO: 648717 - DNA, 75 bp, synthetic construct
  source 1..75: mol_type = other DNA
gttatgctatctgccgttcgatggatttaaattcatgggaatatgtgccagatcatcgcggtgaaatcgtctata

SEQ ID NO: 648718 - DNA, 75 bp, synthetic construct
  source 1..75: mol_type = other DNA
gtagtacggcattccgggcagaatcaaaggatatcagtctggataatggtatgaaggcgaaagcagggacaacca

SEQ ID NO: 648719 - DNA, 75 bp, synthetic construct
  source 1..75: mol_type = other DNA
atgcataacgccatcttaaataataaatttattgccacaaaggcgggagagattaccgtttataactatgacggt

SEQ ID NO: 648720 - DNA, 75 bp, synthetic construct
  source 1..75: mol_type = other DNA
gattaatactgcaatggcttccattagtctgattcaacttaaattgcaggccgggcggaagctgatgcaggcaga

SEQ ID NO: 648721 - DNA, 75 bp, synthetic construct
  source 1..75: mol_type = other DNA
cggtaactttgtgctggatatcaaaaacaccggtctggagccagtatctgctggtgcgccgcttcaggtggtgca

SEQ ID NO: 648722 - DNA, 75 bp, synthetic construct
  source 1..75: mol_type = other DNA
tgagaaatgggtgacagataccgaggcacagcacggcgcagcagtagatgcagcagaagcactgcgccagtcgct

SEQ ID NO: 648723 - DNA, 75 bp, synthetic construct
  source 1..75: mol_type = other DNA
caggtgcttggagaaatgccctttctatttgggaacctgtctgcaatgaaattttcgatcgtttgattaaaccac

SEQ ID NO: 648724 - DNA, 75 bp, synthetic construct
  source 1..75: mol_type = other DNA
ccgggcggaagctgacgcagacagaaaacacccgacttaacgctgtgctggattacattgacgcggtgacggcaa

SEQ ID NO: 648725 - DNA, 75 bp, synthetic construct
  source 1..75: mol_type = other DNA
gctttattgcaatagaggctggggatattacagtttataactatgatggcgagacgcgggaatatatttccacat

SEQ ID NO: 648726 - DNA, 75 bp, synthetic construct
  source 1..75: mol_type = other DNA
gtttgagccagatgtacgtattttgcttaccaaatacagtaatagtaatggctctcagtctccatggatggagga

SEQ ID NO: 648727 - DNA, 75 bp, synthetic construct
  source 1..75: mol_type = other DNA
tgtttataaaacctctgtttctgttcaccttgctcaggatatggctctgaaagggctacgtgttctgctcgtgga

SEQ ID NO: 648728 - DNA, 75 bp, synthetic construct
  source 1..75: mol_type = other DNA
cttaccaaatacagtaataacaatggttcgcagtcaccgtggatggaagaacaaattcgcgatgcatggggaagc

SEQ ID NO: 648729 - DNA, 75 bp, synthetic construct
  source 1..75: mol_type = other DNA
agcttattgctacaaagtcgggggatattaccgtttataactatgatagtgagacgcaggaatatatttcagcat

SEQ ID NO: 648730 - DNA, 75 bp, synthetic construct
  source 1..75: mol_type = other DNA
gaccatcgcggtgaaatcatctataacaccgaaacaggagaatcaaaagaaatcacagctccgggtgattaccct

SEQ ID NO: 648731 - DNA, 75 bp, synthetic construct
  source 1..75: mol_type = other DNA
gtacagcatagcgccgcactagacgcggcagaagcacagcgccagtcactgattaatgcagcaatggcttccatt

SEQ ID NO: 648732 - DNA, 75 bp, synthetic construct
  source 1..75: mol_type = other DNA
aacaacccgccttaacgctgtgctggattacattgacgcggtgacggcaacagataccagcaccgcgccggatgt

SEQ ID NO: 648733 - DNA, 75 bp, synthetic construct
  source 1..75: mol_type = other DNA
aatcacagctccgggtgattaccctgaaaatacggcactgttgcaaatagtcggtggtgataaacttatcatccc

SEQ ID NO: 648734 - DNA, 75 bp, synthetic construct
  source 1..75: mol_type = other DNA
gataatacaaccaatatcgccccgttaacgccatacgataaatgggatggtgagaaatgggtgacggatactaag

SEQ ID NO: 648735 - DNA, 75 bp, synthetic construct
  source 1..75: mol_type = other DNA
gttatgcaatctgccgatctgcagattttaactcatgggaatatgtgccagaccatcgcggtgaaatcgtcttta

SEQ ID NO: 648736 - DNA, 75 bp, synthetic construct
  source 1..75: mol_type = other DNA
aatgagactgtttactcaatcgaaaatggtgctgctgttacagtgggttatatcggtgccatcaaaaacggttat

SEQ ID NO: 648737 - DNA, 75 bp, synthetic construct
  source 1..75: mol_type = other DNA
tattactgtttataactatgatggtgaaactcgggaatatatttccacttcaagtgaatatcttgccgttggtgt

SEQ ID NO: 648738 - DNA, 75 bp, synthetic construct
  source 1..75: mol_type = other DNA
gaccatcgcggtgaaatcgtttatagcaccgaaacaggagaatcgaaagaaatcacaggtccgggtgattatcct

SEQ ID NO: 648739 - DNA, 75 bp, synthetic construct
  source 1..75: mol_type = other DNA
agacattaccgtttacaattatgatggtgagacacgagaatatatttccacatcaactgaatatcttgctgtggg

SEQ ID NO: 648740 - DNA, 75 bp, synthetic construct
  source 1..75: mol_type = other DNA
caactgaatatcttgcggttggcgtcggtatcccggcatgttcttgtttagatgcgccagttacacataaagctg

SEQ ID NO: 648741 - DNA, 75 bp, synthetic construct
  source 1..75: mol_type = other DNA
gattacattgacgcggtgacggcaacaaataccagcacagcgccggatgtcatttggcctgaactgccggaggcg

SEQ ID NO: 648742 - DNA, 75 bp, synthetic construct
  source 1..75: mol_type = other DNA
cgttaatatgctgctggagaatggtggttctctgagcgtttatagtggtcatcaggccacgaacaccattattaa

SEQ ID NO: 648743 - DNA, 75 bp, synthetic construct
  source 1..75: mol_type = other DNA
gcagagcggcgcgaactggccgtcgaggtgggcaaagccaaactgctctcgcatcgcccggtacgtgatattgat

SEQ ID NO: 648744 - DNA, 75 bp, synthetic construct
  source 1..75: mol_type = other DNA
tcaaagtgggtacctcgtggcgttttaagaaagaagagatagatatatggatagcgcagcaacacaaccaaacat

SEQ ID NO: 648745 - DNA, 75 bp, synthetic construct
  source 1..75: mol_type = other DNA
ataccacgtggtgctgtgcgtcagacaggagtatttcgacggccctgaactggatcggctgattctggatgcctg

SEQ ID NO: 648746 - DNA, 75 bp, synthetic construct
  source 1..75: mol_type = other DNA
gttaccgcgccagcgggctgacgttactgacagcggcgatcacgttgtggaacacggtatatatagaaagagcta

SEQ ID NO: 648747 - DNA, 75 bp, synthetic construct
  source 1..75: mol_type = other DNA
cggcatcaatctggggctgacaaaaatggcggagtcctgcccgggggcaacaaaatcgtcactcgaaggtattca

SEQ ID NO: 648748 - DNA, 75 bp, synthetic construct
  source 1..75: mol_type = other DNA
gcggttgcgcaaaatttgctgatatttttaatcaggtggaaaccggtcaggccgactatgcggtagtaccgattg

SEQ ID NO: 648749 - DNA, 75 bp, synthetic construct
  source 1..75: mol_type = other DNA
ataccacgtggtgctgtgtgtcagacaggagtatttcgacggccctgaactggaccggctgattctggatgcctg

SEQ ID NO: 648750 - DNA, 75 bp, synthetic construct
  source 1..75: mol_type = other DNA
ccaaccggcgagcacaacagcccacgctcgaagagtttctttgatggcgtgaagaagttttttgacgacctgact

SEQ ID NO: 648751 - DNA, 75 bp, synthetic construct
  source 1..75: mol_type = other DNA
agagtgtgacgtttgccacggtagcggtgcaaaaccaggtacgcagccgcagacctgtccgacctgtcatggttc

SEQ ID NO: 648752 - DNA, 75 bp, synthetic construct
  source 1..75: mol_type = other DNA
gatttcctgcgctacccggcggttcaccccgaactggtctggcgggagctggcgaggcttgccggggcgctgctg

SEQ ID NO: 648753 - DNA, 75 bp, synthetic construct
  source 1..75: mol_type = other DNA
cgcgatgctctgacgtccggaaagctgaaaacgcaggcagtacgcctgcgttttgctgatggcacattgatcgat

SEQ ID NO: 648754 - DNA, 75 bp, synthetic construct
  source 1..75: mol_type = other DNA
gtcaccaggtgaagcaaagccgtaccagaagcagatcacccgggatgtggtactggatcgccggtcaccggactg

SEQ ID NO: 648755 - DNA, 75 bp, synthetic construct
  source 1..75: mol_type = other DNA
gctctttctatttgggaacctgtctgcaatgaaattttcgatcgtctgattaaaccacgctgggagattagataa

SEQ ID NO: 648756 - DNA, 75 bp, synthetic construct
  source 1..75: mol_type = other DNA
gacccgggcgaaaacattcctggaaaagtggcagtatttacgggtaagggatggatccatgaagaagaccatcgc

SEQ ID NO: 648757 - DNA, 75 bp, synthetic construct
  source 1..75: mol_type = other DNA
gaccatcgcggtgaaatcgtctataacaccgaaacgggggacgccaaagaaatcactgcaccgggcgactatcct

SEQ ID NO: 648758 - DNA, 75 bp, synthetic construct
  source 1..75: mol_type = other DNA
gtcgcggacatttctacgaaggtcgtggaatgaccattatgactgacgcaattcgtacctttaagctgctgggct

SEQ ID NO: 648759 - DNA, 75 bp, synthetic construct
  source 1..75: mol_type = other DNA
tgagaaatgggtgaccgatactgaggcacagcatagcgccgcagtagaagcggcagaagcacagcgccagtcact

SEQ ID NO: 648760 - DNA, 75 bp, synthetic construct
  source 1..75: mol_type = other DNA
aacaacagtgcggcgacctttgcgggtaccctgacggggagcggtaccctgacccaggaaggcggaaatacccgc

SEQ ID NO: 648761 - DNA, 75 bp, synthetic construct
  source 1..75: mol_type = other DNA
gctggataatctgcgtttccgtcatggtgatgtgatgcaaaatacccgtgcaccagggggcgtatggggccgtta

SEQ ID NO: 648762 - DNA, 75 bp, synthetic construct
  source 1..75: mol_type = other DNA
gaccccaaatgctggtgtctgggctgaagctcgttatgaaaacggtaagcagaccgagtcaccaataactggtgg

SEQ ID NO: 648763 - DNA, 75 bp, synthetic construct
  source 1..75: mol_type = other DNA
aattgatactgcaatggcttccattagtctgattcaactgaaattgcaggccgggaggaagctgacgcagacaga

SEQ ID NO: 648764 - DNA, 75 bp, synthetic construct
  source 1..75: mol_type = other DNA
agaaaaagacatgttaacagattgcttctgtatatttatcttgtttatatcgtttattatgctgtaagttatgtc

SEQ ID NO: 648765 - DNA, 75 bp, synthetic construct
  source 1..75: mol_type = other DNA
gcacagcatagcgccgcagtagacgcggcagaagcacagcgccagtcactgattgatgctgctatggcttccatc

SEQ ID NO: 648766 - DNA, 75 bp, synthetic construct
  source 1..75: mol_type = other DNA
tgacccagaacggtttcgaaaccggcgccgatatggtctttgacctgagtgacagcagtttagcggtaggtactt

SEQ ID NO: 648767 - DNA, 75 bp, synthetic construct
  source 1..75: mol_type = other DNA
gcacagcatagcgccgcagtcgaagcggcagaagcacagcgccagtcactgattgatgctgctatggcttccatc

SEQ ID NO: 648768 - DNA, 75 bp, synthetic construct
  source 1..75: mol_type = other DNA
tgaacagaaatattgctgccagaaccgctgcccagaatgggctgaacagtacaacggcggtgggctcacgtctga

SEQ ID NO: 648769 - DNA, 75 bp, synthetic construct
  source 1..75: mol_type = other DNA
ggtgagtgggggttgtgtttaaggctgggggagagtcggggtaagactacgaaagcccgctctccgcaaggactg

SEQ ID NO: 648770 - DNA, 75 bp, synthetic construct
  source 1..75: mol_type = other DNA
cggtaatatcatggtgaacgccgacaaggagggtaaagcggaactgaaagtggtctccgtgactgccggaacgta

SEQ ID NO: 648771 - DNA, 75 bp, synthetic construct
  source 1..75: mol_type = other DNA
atgccgctcttcaacggccagccagcagccaccgaagccgcgcagttgacggtcatcgccggagagatgtcatca

SEQ ID NO: 648772 - DNA, 75 bp, synthetic construct
  source 1..75: mol_type = other DNA
gattggcgttgagaaacgtctcggcacactcgccgcaggtaaagtagccaaccacacgccttcttcaaaatcttt

SEQ ID NO: 648773 - DNA, 75 bp, synthetic construct
  source 1..75: mol_type = other DNA
agcgttgaaacgctggaaatcatgcaaaaagccaatgagaaatctggctgtactaactatctgccaacgcttatc

SEQ ID NO: 648774 - DNA, 75 bp, synthetic construct
  source 1..75: mol_type = other DNA
cggatatgcatccctctgatttcagtctgcttgccccccggcgtgaggaagcgcagacggagatgccggatgagg

SEQ ID NO: 648775 - DNA, 75 bp, synthetic construct
  source 1..75: mol_type = other DNA
ttgccgggctggaagaccgtcgtgtggcgttaattcgtcagcaggcggcagagcagaataaggtgtaccagtcca

SEQ ID NO: 648776 - DNA, 75 bp, synthetic construct
  source 1..75: mol_type = other DNA
tgggcggtgcggtggccaatgcaaaaggcggcgtgtatacctcggcaaacctgagtgcgtacagcaacagcattg

SEQ ID NO: 648777 - DNA, 75 bp, synthetic construct
  source 1..75: mol_type = other DNA
acagtattgtggatacgcccacgtactttgcctttgcaaaaggggcgggactgatgggggaggccggacctgaag

SEQ ID NO: 648778 - DNA, 75 bp, synthetic construct
  source 1..75: mol_type = other DNA
tgacgtatggcgggtacgaaatgacgcctgtgaaggtgacaattaacgccgttgctgcagagactgaaaatggcg

SEQ ID NO: 648779 - DNA, 75 bp, synthetic construct
  source 1..75: mol_type = other DNA
tgtcaacggttgcgggggaacacagcatcacggcctcagtgaataatgctcagaagacggttacggtgaaattca

SEQ ID NO: 648780 - DNA, 75 bp, synthetic construct
  source 1..75: mol_type = other DNA
cttgctgcgaagtctggcactgttgccctggcagcggcgcaggcagatgctgcggttcaggtgcaacgtaaggcg

SEQ ID NO: 648781 - DNA, 75 bp, synthetic construct
  source 1..75: mol_type = other DNA
gtggcggatgtcacagtggatgatgatgttgcattaatgatgacttctgcggggatttcgggaggtgtgagatat

SEQ ID NO: 648782 - DNA, 75 bp, synthetic construct
  source 1..75: mol_type = other DNA
gcccgtcgggctgcgggaaaagcactctgctacgcctgctcgccgggctggaaccggtcagcgaaggccaaatct

SEQ ID NO: 648783 - DNA, 75 bp, synthetic construct
  source 1..75: mol_type = other DNA
ggaaagcggcaggtctttctggtggtgtccgctttggggctgacgggaaggaaatcgttatggtcagtgatgaca

SEQ ID NO: 648784 - DNA, 75 bp, synthetic construct
  source 1..75: mol_type = other DNA
tggtggatgatgccgtattaatgatggtttcagcggggatttccggaggtgtgagatatgtcccagccggttggt

SEQ ID NO: 648785 - DNA, 75 bp, synthetic construct
  source 1..75: mol_type = other DNA
taataactagagaaaacattgatgaaatatttaaactcacctataccaatgaaattggagaggaaagagacttta

SEQ ID NO: 648786 - DNA, 75 bp, synthetic construct
  source 1..75: mol_type = other DNA
gccctgcgccaacggtgaagtactgttgggagaacagcgccatccgctgccgccgcgccaccgggatcagacccg

SEQ ID NO: 648787 - DNA, 75 bp, synthetic construct
  source 1..75: mol_type = other DNA
tctgcaacctcgacgcccgcctgcgcagcgaagtgcgcgacagcattatggccctccatcagcagctgaaaacca

SEQ ID NO: 648788 - DNA, 75 bp, synthetic construct
  source 1..75: mol_type = other DNA
ccagatggcttttcgatctggcatcatcttgacgcccacggcattcctttcaaaagcatcacccccaaaaacgac

SEQ ID NO: 648789 - DNA, 75 bp, synthetic construct
  source 1..75: mol_type = other DNA
tacatcattgcgcagcaggacaataatagtcaggctatgcaatggctaacccgattgcgggataactctcatcgc

SEQ ID NO: 648790 - DNA, 75 bp, synthetic construct
  source 1..75: mol_type = other DNA
cgcacgcattattttcacgatacccaactggatatgcatttttccgggctgacgtacaccgtactcagcctgttt

SEQ ID NO: 648791 - DNA, 75 bp, synthetic construct
  source 1..75: mol_type = other DNA
accgaatatgccgactggcgacgtttttactgcacgcattattttcaggatacccaactggacgctcatttttcc

SEQ ID NO: 648792 - DNA, 75 bp, synthetic construct
  source 1..75: mol_type = other DNA
agacgccggacgaaaatgatgtactgatgcagaaggcggcgggcctcgccggtggagtccgtttcggggaggagg

SEQ ID NO: 648793 - DNA, 75 bp, synthetic construct
  source 1..75: mol_type = other DNA
tcaaggcacaacgatgccagacggtttttcaatctggcatcaccttgacgctcatggcattcctttcaaaagtat

SEQ ID NO: 648794 - DNA, 75 bp, synthetic construct
  source 1..75: mol_type = other DNA
agcgatgtctgcgacggcaggacttgtgaccgccgcacgtaatgaagtggcactggctgaggcccagttaagggg

SEQ ID NO: 648795 - DNA, 75 bp, synthetic construct
  source 1..75: mol_type = other DNA
cggcgcttatcacaccgatgcagtttaccggggattaattgccggcgttgccggcatcagtgccgaccgcatcta

SEQ ID NO: 648796 - DNA, 75 bp, synthetic construct
  source 1..75: mol_type = other DNA
ctcattctgaccattgtcatacgacccgttcagtggctgcgtgatgcactggttgacgttgtgctgcccggtatg

SEQ ID NO: 648797 - DNA, 75 bp, synthetic construct
  source 1..75: mol_type = other DNA
aaacggcatggtttggtcggggagctgttggggccttaactgatgaggtgaaacgccgtggttatcagaaggcac

SEQ ID NO: 648798 - DNA, 75 bp, synthetic construct
  source 1..75: mol_type = other DNA
aacacaacgggttatctacctccgtgaaggctatgagcatgagtgcttcagtccgctcgaacagtttcgtcgtaa

SEQ ID NO: 648799 - DNA, 75 bp, synthetic construct
  source 1..75: mol_type = other DNA
tatgtgcgaatttgtcgacgacaaagcgtcggtgttcccgttcgaggagctgcaacgctgcatggtcgacgtgat

SEQ ID NO: 648800 - DNA, 75 bp, synthetic construct
  source 1..75: mol_type = other DNA
ctatccgcaagaccatgaccagcagcggacgcagcgccacctatgaggccagccgcagcgaggaagccagccacg

SEQ ID NO: 648801 - DNA, 75 bp, synthetic construct
  source 1..75: mol_type = other DNA
gctttccgtgggagaggggccagggattgccaccaatattggcgtagcgttgtttgatgatgaaggaaacctcgt

SEQ ID NO: 648802 - DNA, 75 bp, synthetic construct
  source 1..75: mol_type = other DNA
cggtgccttttgttattcatttacgggaatgtagcacggtggtgagtgaacgtgtaggtgtggcgtttcacggtg

SEQ ID NO: 648803 - DNA, 75 bp, synthetic construct
  source 1..75: mol_type = other DNA
cgtgtgggggtggcgtttcacggtgtcgcggatggtaaaaatccggatgtgctttccgtgggagaggggccaggg

SEQ ID NO: 648804 - DNA, 75 bp, synthetic construct
  source 1..75: mol_type = other DNA
attgacgctgacatgatggatggtatgccgcctgcgctgaaagccgcgacgggtgtcgatgcactcactcatgct

SEQ ID NO: 648805 - DNA, 75 bp, synthetic construct
  source 1..75: mol_type = other DNA
tgcggtagggggcggttcttcaatcgatacggctaaagcaattggaataattattgctaatcctggttttgccga

SEQ ID NO: 648806 - DNA, 75 bp, synthetic construct
  source 1..75: mol_type = other DNA
gtctgggggcgcagattggtaagggcctcgtgctgccccaccattcaggtgtcgtcattcacggaaatgtaaaga

SEQ ID NO: 648807 - DNA, 75 bp, synthetic construct
  source 1..75: mol_type = other DNA
ttgccgctgaggtgagaacaggtgacacgctgcgcatggagtttagaaagacgcgctatacgctggcgtactggc

SEQ ID NO: 648808 - DNA, 75 bp, synthetic construct
  source 1..75: mol_type = other DNA
tggcccgacaaccagcaccggcttattgcttacgacacgctgtttctgggggctatcaacactaccacagtgcat

SEQ ID NO: 648809 - DNA, 75 bp, synthetic construct
  source 1..75: mol_type = other DNA
ggacgctgaacattctggaacgccagttacgcgaacccggtgcggtcttcacctccagcagttcggtaagcgact

SEQ ID NO: 648810 - DNA, 75 bp, synthetic construct
  source 1..75: mol_type = other DNA
ccgcttgcttcagctttatgtaaacaaagacagagaaatgagcttgataaaaatatctgatttaatgagtagaga

SEQ ID NO: 648811 - DNA, 75 bp, synthetic construct
  source 1..75: mol_type = other DNA
cgagcggtgggcagtatgaacggcagtgcgggtctggtgtattccccggtctaccatatcgccattcagaatgac

SEQ ID NO: 648812 - DNA, 75 bp, synthetic construct
  source 1..75: mol_type = other DNA
ccagcaagacggggaatacggtaacaaccgatgcggcaggtaaagccgacattgagctgatgtcaacggttgccg

SEQ ID NO: 648813 - DNA, 75 bp, synthetic construct
  source 1..75: mol_type = other DNA
ctacgtgtcgaccttaacgctgggatctgccgcgggtcagttgtctgtgatgccgcgagtgaacggccaaaatgc

SEQ ID NO: 648814 - DNA, 75 bp, synthetic construct
  source 1..75: mol_type = other DNA
tgcggaaatggtgatcgagaaggcaaaacgcctggttgagcacaaaaaagacgttatcatcctgctcgactccat

SEQ ID NO: 648815 - DNA, 75 bp, synthetic construct
  source 1..75: mol_type = other DNA
cgacagcaggaggcgaggctatccacctgggacgaatgggatttaaaaaactgggtatggacagtcccaaaagag

SEQ ID NO: 648816 - DNA, 75 bp, synthetic construct
  source 1..75: mol_type = other DNA
atggctatcacagaacgcgaggcaagcatcattaaagccattggcgaggaaacaagagacaccatagcgccattg

SEQ ID NO: 648817 - DNA, 75 bp, synthetic construct
  source 1..75: mol_type = other DNA
tcgacgaacgtccggaagaagtcaccgagatgcagcgtctggttaaaggtgaagttgttgcttctacctttgacg

SEQ ID NO: 648818 - DNA, 75 bp, synthetic construct
  source 1..75: mol_type = other DNA
ctggctcgtatgcgtaagcaggacattatttttgctatcctgaagcagcacgcaaagagtggcgaagatatcttt

SEQ ID NO: 648819 - DNA, 75 bp, synthetic construct
  source 1..75: mol_type = other DNA
tgttgaccggtggtgtggatgccaacgccctgcatcgtccgaaacgcttcttcggtgcggcgcgtaacgtggaag

SEQ ID NO: 648820 - DNA, 75 bp, synthetic construct
  source 1..75: mol_type = other DNA
ggtgatgattactggcgataaccgtctgactgccgccgccattgctgcggaagcgggcgtcgatgattttctcgc

SEQ ID NO: 648821 - DNA, 75 bp, synthetic construct
  source 1..75: mol_type = other DNA
gaaagaagcgggcaatatggtggatctcgactctaacccgaccaagttgatcgaggtggtacatattggcaaaca

SEQ ID NO: 648822 - DNA, 75 bp, synthetic construct
  source 1..75: mol_type = other DNA
ttggcgtaactatcatttcaggttgtgcatcttccgtaccattgataaagaaaactcaatcaggaaaacctgaag

SEQ ID NO: 648823 - DNA, 75 bp, synthetic construct
  source 1..75: mol_type = other DNA
gctgaaagaagcggtgaaaaaattaaacccgcaggcgcaatggcgcaatccggtgatgtttatcgtctggatcgg

SEQ ID NO: 648824 - DNA, 75 bp, synthetic construct
  source 1..75: mol_type = other DNA
tagataagcagccagcctggctggtggccgcaatcaaaaaaacgatcaccgagcttcctggcgggtattccgaag

SEQ ID NO: 648825 - DNA, 75 bp, synthetic construct
  source 1..75: mol_type = other DNA
atgccaaaattaccggcaatgcagaaaaacttaacgaaccagggcaagattacgaaagcccgctccccgcaagga

SEQ ID NO: 648826 - DNA, 75 bp, synthetic construct
  source 1..75: mol_type = other DNA
gtggtttacgacgcactgggttacaccgatatgctgcctgagtttggcggtgacacggcatacagcgatgacttc

SEQ ID NO: 648827 - DNA, 75 bp, synthetic construct
  source 1..75: mol_type = other DNA
tgttggcggttctatcagctacgaatacgaaggctttggtatcgttggtgcttatggtgccgctgaccgtaccaa

SEQ ID NO: 648828 - DNA, 75 bp, synthetic construct
  source 1..75: mol_type = other DNA
tcgttggtgcttatggtgcagctgaccgtaccaacctgcaagaagctcaacctcttggcaacggtaaaaaagctg

SEQ ID NO: 648829 - DNA, 75 bp, synthetic construct
  source 1..75: mol_type = other DNA
cgcactggttgtccatgccaaaatgatcccggatgccgatttagccgcattgatgaaacaaatgccaggcatggt

SEQ ID NO: 648830 - DNA, 75 bp, synthetic construct
  source 1..75: mol_type = other DNA
caggcaatgaccgagcttttgggacgaggaagaaatttcactgcggtagcctgttataacgattcaatggcggcg

SEQ ID NO: 648831 - DNA, 75 bp, synthetic construct
  source 1..75: mol_type = other DNA
aactggtaacaaaacgcgtctggcattcgcgggtcttaaatacgctgacgttggttctttcgattacggccgtaa

SEQ ID NO: 648832 - DNA, 75 bp, synthetic construct
  source 1..75: mol_type = other DNA
attttcctttaacgctgcagcagcgacgtcatattttgaagcgcgtaacgatgcaatgggtggcaccggggtagc

SEQ ID NO: 648833 - DNA, 75 bp, synthetic construct
  source 1..75: mol_type = other DNA
aaaatgccccggtaaaaatgtggaccaaaggcgtgccggtagaggccgatgcgcgtcagcaacttattaatacgg

SEQ ID NO: 648834 - DNA, 75 bp, synthetic construct
  source 1..75: mol_type = other DNA
catcaccagcattcgtgccgggcgggcgaaaccggggctgttgcgccagcatctgaccgcggtaaaagcggctgc

SEQ ID NO: 648835 - DNA, 75 bp, synthetic construct
  source 1..75: mol_type = other DNA
ccacgcttttctgatgtcttttgtcgaaccagaggcccgggaggaatttaaaaaagtactccaggaagaggcagc

SEQ ID NO: 648836 - DNA, 75 bp, synthetic construct
  source 1..75: mol_type = other DNA
atgccgcggcgatgtaatttatctcacggaaataggtacgtttatcgcgcggcgcatcagctggaggccggttat

SEQ ID NO: 648837 - DNA, 75 bp, synthetic construct
  source 1..75: mol_type = other DNA
gtaccgcgttaacggcggcagacctgcctgaaaacctggcagagctgcgtcaggcgattgaaacggccgtgccgc

SEQ ID NO: 648838 - DNA, 75 bp, synthetic construct
  source 1..75: mol_type = other DNA
gcctgaaaacctggcggagctgcgtcaggcgattgaaactgccgtgccgcacggacgttccaataatcgtagccg

SEQ ID NO: 648839 - DNA, 75 bp, synthetic construct
  source 1..75: mol_type = other DNA
caattgtccgacccgggtaatatcaccgacaacgccgataaaatcagtgatgactggaaagcctttgagcgtgcc

SEQ ID NO: 648840 - DNA, 75 bp, synthetic construct
  source 1..75: mol_type = other DNA
gtaaagtcagtgatgccgaccttaactacctggaaagcattgccagcagtagccagtctgtcgataaagacaggc

SEQ ID NO: 648841 - DNA, 75 bp, synthetic construct
  source 1..75: mol_type = other DNA
aatccggtgcaaaagatgacttcagtcttctgcttccgtccgtcggggcgcaattgtccgacccgggtaatatca

SEQ ID NO: 648842 - DNA, 75 bp, synthetic construct
  source 1..75: mol_type = other DNA
ccgacaacgccgacaaaatcagcgatgactggaaagccttcgaccgtgccgtcgacagccactccggggtaccgc

SEQ ID NO: 648843 - DNA, 75 bp, synthetic construct
  source 1..75: mol_type = other DNA
ggctaccgccagaatctggccagcaatgatggcagtgcgttcaccgccgggctgggtatctcaccatttgatgtc

SEQ ID NO: 648844 - DNA, 75 bp, synthetic construct
  source 1..75: mol_type = other DNA
ttacacgctgcgtttcccttgctcttctggtttccgcagtgccatcggttaatgctgcgacgaactggatggagg

SEQ ID NO: 648845 - DNA, 75 bp, synthetic construct
  source 1..75: mol_type = other DNA
agctacgaattcgaaggctttggtatcgtaggtgcttacggtgcagcagaccgtaccgacgcccaggaagcctaa

SEQ ID NO: 648846 - DNA, 75 bp, synthetic construct
  source 1..75: mol_type = other DNA
gctcaagcctacgcgttaatgaaaacgcttctcttgaaaaaatggttatagggatgcgtgtaaaagcaaatcaat

SEQ ID NO: 648847 - DNA, 75 bp, synthetic construct
  source 1..75: mol_type = other DNA
gcatcatcttttattatatcaaaaacgacggcagcaacccgcgcaagcgatatggtcatagtcccaatcaagaat

SEQ ID NO: 648848 - DNA, 75 bp, synthetic construct
  source 1..75: mol_type = other DNA
aaggacatcaataggagcagcaaacctgaaccttaccacccgcataattagcaagacaggtcagacaagccgtgt

SEQ ID NO: 648849 - DNA, 75 bp, synthetic construct
  source 1..75: mol_type = other DNA
gcgctcagcgccgaagagcaggatgaagacgacccgtatgccgacttcaaagtgcctgatgatttgatgtggtaa

SEQ ID NO: 648850 - DNA, 75 bp, synthetic construct
  source 1..75: mol_type = other DNA
cttattgaaatgaaccgaatcaccattgccaatggcgatattggttttaacttcactgacggcaatctgattaag

SEQ ID NO: 648851 - DNA, 75 bp, synthetic construct
  source 1..75: mol_type = other DNA
tggaacgcgccacttgttcggacatatcagaaattttcgtatttggcacaaagcattaactgattctcaattaag

SEQ ID NO: 648852 - DNA, 75 bp, synthetic construct
  source 1..75: mol_type = other DNA
cagaaaattacgaataaagttaaatcgaattcaaccggaaaacgcgccagatattgactggtcagactttgaata

SEQ ID NO: 648853 - DNA, 75 bp, synthetic construct
  source 1..75: mol_type = other DNA
tgaattgggcgatattctgattcagaagattggaagccgtgagttaagccttaaagttgtcgatctttcaatatc

SEQ ID NO: 648854 - DNA, 75 bp, synthetic construct
  source 1..75: mol_type = other DNA
atggacttcgattttgatgatatggcatacccggatatttttttaatttccggcgaggagtttaaaggaagccgg

SEQ ID NO: 648855 - DNA, 75 bp, synthetic construct
  source 1..75: mol_type = other DNA
atatatcaacaaatctggcgaactgaaaacggcggaaattaatgagccgcgatttgagtgtgatggcctgcttat

SEQ ID NO: 648856 - DNA, 75 bp, synthetic construct
  source 1..75: mol_type = other DNA
caccgactccgaagaagaaggtgaaatctacatgggttgtgcgggggtatcgacttcacctccaacctgcattta

SEQ ID NO: 648857 - DNA, 75 bp, synthetic construct
  source 1..75: mol_type = other DNA
ccggcgggttttgctgccgtgtttaatgctgatgaaatgaaatggcatctgatggaagaccaccgagggaaaacg

SEQ ID NO: 648858 - DNA, 75 bp, synthetic construct
  source 1..75: mol_type = other DNA
tggtctgtctgatcccgaccaccatcggcggcctgctgtcggctatcggcgtcgccgggatgagtcggatgctgg

SEQ ID NO: 648859 - DNA, 75 bp, synthetic construct
  source 1..75: mol_type = other DNA
tattgcttcttgcagtcattattcttgctgcatgtcaggcaaactatatccgtgatgttcagggcgggactgtat

SEQ ID NO: 648860 - DNA, 75 bp, synthetic construct
  source 1..75: mol_type = other DNA
ctggcggtatcttcgtcgcacaaaacggcgtctgctttttacagcaggaagaggccatcgacagccatcgcaaac

SEQ ID NO: 648861 - DNA, 75 bp, synthetic construct
  source 1..75: mol_type = other DNA
tcggcggcggcgacggtgccatgctgcgtgaagtgacccgacataaaaacgttgagtcaatcacgatggtggaaa

SEQ ID NO: 648862 - DNA, 75 bp, synthetic construct
  source 1..75: mol_type = other DNA
gtggtttatgatgcactgggttacaccgatatgctgccagaatttggtggtgatactgcatacagcgatgacttc

SEQ ID NO: 648863 - DNA, 75 bp, synthetic construct
  source 1..75: mol_type = other DNA
atatgacctatgcccgtcttggttttaaaggggaaactcaaatcaattccgatctgaccggttacggtcagtggg

SEQ ID NO: 648864 - DNA, 75 bp, synthetic construct
  source 1..75: mol_type = other DNA
attcgttcatatctattgaaagagggatataatattattttcaacggagaaggtaactcatatctcgcgtttaat

SEQ ID NO: 648865 - DNA, 75 bp, synthetic construct
  source 1..75: mol_type = other DNA
gatccgtaaaggttctgtcgatgccattcgccgtcatgtcgaggctaacggtagccacttccctgccgatgtcga

SEQ ID NO: 648866 - DNA, 75 bp, synthetic construct
  source 1..75: mol_type = other DNA
ccggggaatcggcaccggtgatccgtgaatccggcggcgattttgcctccgtcactggtggcacgcgtattcttt

SEQ ID NO: 648867 - DNA, 75 bp, synthetic construct
  source 1..75: mol_type = other DNA
ggccgacgaaacgccggaaggccgcagtattgtgatcctcgccaagcagcgttttaacctgcgcgagcgcgatgt

SEQ ID NO: 648868 - DNA, 75 bp, synthetic construct
  source 1..75: mol_type = other DNA
tttggtcgcgtaatggcgctggatggcgtagtacaaaccaccgagcgcgacgagtttatctatcatgagatgatg

SEQ ID NO: 648869 - DNA, 75 bp, synthetic construct
  source 1..75: mol_type = other DNA
aagtctgttcacttctgcattttatgaaggttgcaaacgctgcctgaatcctggcggtatcttcgtcgcgcagaa

SEQ ID NO: 648870 - DNA, 75 bp, synthetic construct
  source 1..75: mol_type = other DNA
aaacgctacacgaccagtttgggcagtactttgcggtagataacgttctgtatcatgaaaagaccgatcaccagg

SEQ ID NO: 648871 - DNA, 75 bp, synthetic construct
  source 1..75: mol_type = other DNA
gaacgcatgcgggagttgcagcagatccgcgacagcttccgccagaaggatgcggaccttcagtctcagtatcag

SEQ ID NO: 648872 - DNA, 75 bp, synthetic construct
  source 1..75: mol_type = other DNA
ttgaccagcaaaaaatccgggaacagttgcgatcccgggaagagaccctgaagaatgataatgtggctgcgcgtg

SEQ ID NO: 648873 - DNA, 75 bp, synthetic construct
  source 1..75: mol_type = other DNA
atgcaggaaaaagcgcagtccattcaggatgtgcttgccgggctggaagaccgtcgtgtggcgttaattcgtcag

SEQ ID NO: 648874 - DNA, 75 bp, synthetic construct
  source 1..75: mol_type = other DNA
tcaggaggcgaggcagcgttacatccgtaattcgatggaagcctggcgcaataatgaggcgaataaacccaaatc

SEQ ID NO: 648875 - DNA, 75 bp, synthetic construct
  source 1..75: mol_type = other DNA
cgtcatcacagaaagtgctgatggatatcagccagcggacaggcacggcattttcagataatgcggccctgtttg

SEQ ID NO: 648876 - DNA, 75 bp, synthetic construct
  source 1..75: mol_type = other DNA
tacgcccacgtactttgcctttgcaaaaggggccgggctgatgggggaagccggacctgaagccattatgcccct

SEQ ID NO: 648877 - DNA, 75 bp, synthetic construct
  source 1..75: mol_type = other DNA
tggcccggatgcgcttatcatctcaacaatgggcggagctcaggattatctggcacacagaacagtgattgatga

SEQ ID NO: 648878 - DNA, 75 bp, synthetic construct
  source 1..75: mol_type = other DNA
ggcggtctgcttgatggtgcggcaacgggcaaagcacaacggatacaaaatcaggagtgtcatggttttgttaac

SEQ ID NO: 648879 - DNA, 75 bp, synthetic construct
  source 1..75: mol_type = other DNA
caggtggaaaaggcgtcggcgccagaacccttgagctggcgctgacggaacaacgcccgctcgttgctgtcgttc

SEQ ID NO: 648880 - DNA, 75 bp, synthetic construct
  source 1..75: mol_type = other DNA
gccggggcttttgccaccggacatcttatttcccttgctgatgagtggaattcagtaaatgcccgtctgaaacag

SEQ ID NO: 648881 - DNA, 75 bp, synthetic construct
  source 1..75: mol_type = other DNA
cgagtttaatcgccttctcgggcttggtaatgaattacttcagcagcgacaggggctggtgaatgtaccgttacg

SEQ ID NO: 648882 - DNA, 75 bp, synthetic construct
  source 1..75: mol_type = other DNA
gccggggcttttgctaccggtcatcttatttctttcgccgatgagtggaattcagtaaatgcccgtctgaagcag

SEQ ID NO: 648883 - DNA, 75 bp, synthetic construct
  source 1..75: mol_type = other DNA
ggtactttggcaatatggccgcaggcgtgggaaaggtcaccacagagctgatcgcggcgaagtccgggacggttg

SEQ ID NO: 648884 - DNA, 75 bp, synthetic construct
  source 1..75: mol_type = other DNA
tatgcccatatgcagaccctggtcgaacagggaaaccccatcgatctgatcaccctgagcgaatcgctggaacag

SEQ ID NO: 648885 - DNA, 75 bp, synthetic construct
  source 1..75: mol_type = other DNA
ggagatgcagaagcaggaactgctgcgtaacgcgaccctgattgaccagcaaaaaatccgggaacagttgcgatc

SEQ ID NO: 648886 - DNA, 75 bp, synthetic construct
  source 1..75: mol_type = other DNA
actggagaaactgggggagttcagttctccaggaagtttcaaaaattctgatgaacgcggccatcgttaacgggc

SEQ ID NO: 648887 - DNA, 75 bp, synthetic construct
  source 1..75: mol_type = other DNA
agagcggcgcggatctggtggtcaccgactgcgaaacctgtaaatggcagattgagatgtcaaccagcaaacgct

SEQ ID NO: 648888 - DNA, 75 bp, synthetic construct
  source 1..75: mol_type = other DNA
ttttgtgttgagtcataccgacctgatgggtagcgtttccacgccgttcgcacccatcgtcaacaccgctacctc

SEQ ID NO: 648889 - DNA, 75 bp, synthetic construct
  source 1..75: mol_type = other DNA
cgtgctggcaggcatcgctcagcgctacgaggctgaacgtggcagcctcagcggcacaccttccgggctggaaca

SEQ ID NO: 648890 - DNA, 75 bp, synthetic construct
  source 1..75: mol_type = other DNA
aagcggaagacagtttttcccgtctgctgaagcagcagaaggaacaactgggactggcagggaagaatacagaac

SEQ ID NO: 648891 - DNA, 75 bp, synthetic construct
  source 1..75: mol_type = other DNA
gagatgcagaagcaggaactgctgcgtaacgcgaccctgattgacagcaaaaaatccgggaacagttgcgatccc

SEQ ID NO: 648892 - DNA, 75 bp, synthetic construct
  source 1..75: mol_type = other DNA
gggagccggtgcctggtacacggtgtaccagaatcaggaacaggccagggagtccgcccgtcagtatgcatcgac

SEQ ID NO: 648893 - DNA, 75 bp, synthetic construct
  source 1..75: mol_type = other DNA
ggctgctgcggcagccagggagcagcgccgggctctggctgagctgaacagccagttgacggaaatccgcgcttc

SEQ ID NO: 648894 - DNA, 75 bp, synthetic construct
  source 1..75: mol_type = other DNA
gtccgactggggtatgcggcggatgacctcggttttgtgggtgatccgtatcaggaggcgagacaacgttatatc

SEQ ID NO: 648895 - DNA, 75 bp, synthetic construct
  source 1..75: mol_type = other DNA
agccttgtgcagctgattgaccagcgggtgcaggcggtgatgctgtccatgcgacgagacggaggaatgctgagt

SEQ ID NO: 648896 - DNA, 75 bp, synthetic construct
  source 1..75: mol_type = other DNA
atgacaccgtggctactctttggtgcgggcggaaaaggtgtgggtgccagaacgcttgaactggcgctggcggaa

SEQ ID NO: 648897 - DNA, 75 bp, synthetic construct
  source 1..75: mol_type = other DNA
actgaacggggaggaaaaagagcgggcccgactggggtatgcggcggatgacctgggttttgtgggggatccgta

SEQ ID NO: 648898 - DNA, 75 bp, synthetic construct
  source 1..75: mol_type = other DNA
actgaatggggaggaaaaagagcgggcccgcctggggtatgcggcggatgaccttggttttgtgggggatccgta

SEQ ID NO: 648899 - DNA, 75 bp, synthetic construct
  source 1..75: mol_type = other DNA
actgaatggggaggaaaaagagcgggcccgtctggggtatgcggcggatgacctcggttttgtgggggatccgta

SEQ ID NO: 648900 - DNA, 75 bp, synthetic construct
  source 1..75: mol_type = other DNA
actgaagggggaggaaaaagagcgggcccgactggggtatgcggcggatgacctcggttttgtgggggatccgta

SEQ ID NO: 648901 - DNA, 75 bp, synthetic construct
  source 1..75: mol_type = other DNA
actgaacggggaggaaaaagagcgggcccggctggggtatgcggcggatgacctaggttttgtgggggatccgta

SEQ ID NO: 648902 - DNA, 75 bp, synthetic construct
  source 1..75: mol_type = other DNA
actgaacggggaggaaaaagagcgggcccgtctggggtatgcggcggatgaccttggttttgtgggggatccgta

SEQ ID NO: 648903 - DNA, 75 bp, synthetic construct
  source 1..75: mol_type = other DNA
cagagcgtgagctggccctgtcccgactgaaaggggacgaaaaagagcggggccgcctggggtatgcggcggatg

SEQ ID NO: 648904 - DNA, 75 bp, synthetic construct
  source 1..75: mol_type = other DNA
cagagcgtgagctggccctgtccagactgaacggggacgaaaaagagcggggccgcctggggtatgcggcggatg

SEQ ID NO: 648905 - DNA, 75 bp, synthetic construct
  source 1..75: mol_type = other DNA
tgaacagaaatattgctgccagaagcgctgcccagaatgcgctgaacagtacaacggcggtgggctcacgtctga

SEQ ID NO: 648906 - DNA, 75 bp, synthetic construct
  source 1..75: mol_type = other DNA
actgaaaggggaggaaaaagagcgggcccggctggggtatgcggcggatgacctcggttttgtgggggatccgta

SEQ ID NO: 648907 - DNA, 75 bp, synthetic construct
  source 1..75: mol_type = other DNA
actgaaaggggaggaaaaagagcgggcccgcctggggtatgcggcggatgacctgggttttgtgggggatccgta

SEQ ID NO: 648908 - DNA, 75 bp, synthetic construct
  source 1..75: mol_type = other DNA
cagagcgtgagctggccctgtcccgactgaacggggacgaaaaagagcggggccgactggggtatgcggcggatg

SEQ ID NO: 648909 - DNA, 75 bp, synthetic construct
  source 1..75: mol_type = other DNA
actgaagggggaggaaaaagagcgggcccgcctggggtatgcggcggatgacctaggttttgtgggggatccgta

SEQ ID NO: 648910 - DNA, 75 bp, synthetic construct
  source 1..75: mol_type = other DNA
accagaatcaggagcaggccagggagtcagcgcgccagtatgcactgacgatagatgaaatcgcgcataaaacgc

SEQ ID NO: 648911 - DNA, 75 bp, synthetic construct
  source 1..75: mol_type = other DNA
aaatctcaaaagttcttatgaatgccgcgattgtcaacggaattaagacggcggcaaacggtatgtccggtgcgg

SEQ ID NO: 648912 - DNA, 75 bp, synthetic construct
  source 1..75: mol_type = other DNA
tatgcccctgacccgggcggcggatggctcgctgggcgtacgcgcggtgggcagtatgaacggcagtgccggtct

SEQ ID NO: 648913 - DNA, 75 bp, synthetic construct
  source 1..75: mol_type = other DNA
tgcctcaattcaaagtcccgctctttgagcatacaacagtattcttctgccctactcgcgatatgttttacgagt

SEQ ID NO: 648914 - DNA, 75 bp, synthetic construct
  source 1..75: mol_type = other DNA
ctcagttgcgctgattgcagggcaaacactggctggtatggcgcatgatggtattgatcgcgtaccggaaacggg

SEQ ID NO: 648915 - DNA, 75 bp, synthetic construct
  source 1..75: mol_type = other DNA
acctcggttttgtgggtgaaccgtatcaggaggcgagacaacgttatatcagtaatgccctggaagcctggcgca

SEQ ID NO: 648916 - DNA, 75 bp, synthetic construct
  source 1..75: mol_type = other DNA
aagaccaggaggctttttatgccgaatcggatgcgcagcgtgctgactggcagaaagggctgcaggaagggctaa

SEQ ID NO: 648917 - DNA, 75 bp, synthetic construct
  source 1..75: mol_type = other DNA
ggtttaacacttacttgcactggcgagaaaggcggtaacttctacgtgatcgcagtattcgataatgagctgggt

SEQ ID NO: 648918 - DNA, 75 bp, synthetic construct
  source 1..75: mol_type = other DNA
agccgaaagaagagaaaaaaccagctaagaaaggcaaacgtaagccgaaagcaaaagaggcgcttgtaccgcgcg

SEQ ID NO: 648919 - DNA, 75 bp, synthetic construct
  source 1..75: mol_type = other DNA
cgcagttgctgggatatggtgaaggctcacggatgcgtgaacgactccaggaaatgtggagtatccggcagacgt

SEQ ID NO: 648920 - DNA, 75 bp, synthetic construct
  source 1..75: mol_type = other DNA
aagcagcagactgcactgaataacagcaagcgcgaactggctctgtcccgtctgaagggggaagcgcgtgagcgt

SEQ ID NO: 648921 - DNA, 75 bp, synthetic construct
  source 1..75: mol_type = other DNA
aggcggttgttgctgctcgcggtaccgaaaggcaggccgcagcagaagcgaagctgacagctgctcaggcgtcac

SEQ ID NO: 648922 - DNA, 75 bp, synthetic construct
  source 1..75: mol_type = other DNA
cgccagcgccgccgaacgcgtggaaatcgacgtcagtcataacgcccttgccggtgggcttctctgtgcggacgg

SEQ ID NO: 648923 - DNA, 75 bp, synthetic construct
  source 1..75: mol_type = other DNA
aggcgcagcaacgggagagctggcagccagagcgattaccggaatgctgtatcctggcgtgaagcagtcagacct

SEQ ID NO: 648924 - DNA, 75 bp, synthetic construct
  source 1..75: mol_type = other DNA
ctccatgaccggctcaggttacatcgctgcctcccgggataagatgaagagccgctttgactccgttgctgaaca

SEQ ID NO: 648925 - DNA, 75 bp, synthetic construct
  source 1..75: mol_type = other DNA
caggttattcctgcgcagtcagttatcgccagtgatgcccggccttcgcaagctatccgcgccagtcgcggtagc

SEQ ID NO: 648926 - DNA, 75 bp, synthetic construct
  source 1..75: mol_type = other DNA
accgacatagcgcagtcctttatggcaatccgtcgcgccaccaccgccagtggcaaccgcccgacctatgaagcc

SEQ ID NO: 648927 - DNA, 75 bp, synthetic construct
  source 1..75: mol_type = other DNA
ccccgtccacgctggcgcacgacgcctacccgttctggtcgggtgaactgttcaaccggggacgcgccagcgccg

SEQ ID NO: 648928 - DNA, 75 bp, synthetic construct
  source 1..75: mol_type = other DNA
ggatcgtcggtgtttaacctctacaccgatccgcaggaaagcgactccatcggcgtgcgccatattccgatgggt

SEQ ID NO: 648929 - DNA, 75 bp, synthetic construct
  source 1..75: mol_type = other DNA
tgatgcgcggctatgccaccggtggttatgtcggtacaccgggcagcctggcggacagccggtcgcaggcgtccg

SEQ ID NO: 648930 - DNA, 75 bp, synthetic construct
  source 1..75: mol_type = other DNA
tgcgtggtggtggcaccgccagccgtgccgggcggcaagtttcgcattcttgaacgtcaccagtggcgcgggatg

SEQ ID NO: 648931 - DNA, 75 bp, synthetic construct
  source 1..75: mol_type = other DNA
ttctgaaagtgacacagtatccggcagtacgctgaatgccgggaataatctgtctgttgtcgcaaccggcaaaaa

SEQ ID NO: 648932 - DNA, 75 bp, synthetic construct
  source 1..75: mol_type = other DNA
tcctgaagctcaggctgcgtatggcagagcaacagatgctattaataaaatagaatcagccttgaaaggatatgg

SEQ ID NO: 648933 - DNA, 75 bp, synthetic construct
  source 1..75: mol_type = other DNA
cgcccctttggctggcgcgaagtgtggatcggttatgacccggcaaaaggtacgcaaaacggcgacagcgccgga

SEQ ID NO: 648934 - DNA, 75 bp, synthetic construct
  source 1..75: mol_type = other DNA
caaagtggcttccggtatggctattcacaagaaatggcggcagacctatttttccacaccatccagcctgaccca

SEQ ID NO: 648935 - DNA, 75 bp, synthetic construct
  source 1..75: mol_type = other DNA
aacgttttctccgacgaacagatcgaaaagctggaagaagtcttccacgcctcaatgttcgactatcagcgtcac

SEQ ID NO: 648936 - DNA, 75 bp, synthetic construct
  source 1..75: mol_type = other DNA
aaagcaaccggcgttaatgtctgggtacaggatggcagcggcgtggataaactcaccgccgggcagcgcgaacgt

SEQ ID NO: 648937 - DNA, 75 bp, synthetic construct
  source 1..75: mol_type = other DNA
cgctaaagggtgcacactgtttaacatcgacacgctgaagcgcgagaacagcgtcgatgagttccgtaatctgtt

SEQ ID NO: 648938 - DNA, 75 bp, synthetic construct
  source 1..75: mol_type = other DNA
catgcggtaggggaagatagcgcaccggtgccttttgttattcatttacgggaatgtagcacggtggtgagcgaa

SEQ ID NO: 648939 - DNA, 75 bp, synthetic construct
  source 1..75: mol_type = other DNA
accggcctcggtctcggcgtgttccagctggtgcgctcattttacccggcggcacgcggcatccgttacacacct

SEQ ID NO: 648940 - DNA, 75 bp, synthetic construct
  source 1..75: mol_type = other DNA
cactcaaaaccggccataaccagatatttttatcagccagtaaaacgcaggcttacgtgttccgcgaatacatca

SEQ ID NO: 648941 - DNA, 75 bp, synthetic construct
  source 1..75: mol_type = other DNA
gacttccgcgcccaagctgacgccatcaaaaaacttaccgaacagtacaacgtgacttatatcggtatcgactca

SEQ ID NO: 648942 - DNA, 75 bp, synthetic construct
  source 1..75: mol_type = other DNA
gtggcggcaatgcagggtaataatgtcgctgccggtgcagcaggcgcagcaacgggagagctggcagccagagcg

SEQ ID NO: 648943 - DNA, 75 bp, synthetic construct
  source 1..75: mol_type = other DNA
ccagctcatcatgaaggagcacaaagaagggaaagactttaaagaaattgacctgctggcgcgccagtcggagcg

SEQ ID NO: 648944 - DNA, 75 bp, synthetic construct
  source 1..75: mol_type = other DNA
caagttggggttggagtgcaactgaaattaaaggcgttgacgttaatggcacttcaacaagtgaggtttatcgat

SEQ ID NO: 648945 - DNA, 75 bp, synthetic construct
  source 1..75: mol_type = other DNA
tgagcagtctttcgactatcagttgcactggtatcgcgccgggcttgagcaccgcatccgcgatatcctgaaatc

SEQ ID NO: 648946 - DNA, 75 bp, synthetic construct
  source 1..75: mol_type = other DNA
ccgatctcgcctgggcgaccatgcacgccctgttaaatgagccactcaccgccggtatcagcaccccgctgacat

SEQ ID NO: 648947 - DNA, 75 bp, synthetic construct
  source 1..75: mol_type = other DNA
cctaacggggccacgctttacttcctcggcaccaatgcccgcactgcccagagttaccacggcaacctgtatctg

SEQ ID NO: 648948 - DNA, 75 bp, synthetic construct
  source 1..75: mol_type = other DNA
tctgcaggtgttgcgcgtaaaccgggtatggatcgttctgacctgtttaacgttaacgccggtatcgtgaaaaac

SEQ ID NO: 648949 - DNA, 75 bp, synthetic construct
  source 1..75: mol_type = other DNA
gtatggatcgttccgacctgtttaacgttaacgccggtattgtaaagaatctggttcagcaagttgcgaaaactt

SEQ ID NO: 648950 - DNA, 75 bp, synthetic construct
  source 1..75: mol_type = other DNA
ggctgtcgacctgagccatatccctactgctgtgaaaataaaaggtttttctggtgaagatgctactccagcgct

SEQ ID NO: 648951 - DNA, 75 bp, synthetic construct
  source 1..75: mol_type = other DNA
tttttctcgggacaaactcaaacactgcgcagagccataacggcgacctgtatgtcgatgaaatcttctggatcc

SEQ ID NO: 648952 - DNA, 75 bp, synthetic construct
  source 1..75: mol_type = other DNA
agccgcaccgaggaagccagtcacgccgatatcgcatgggcgaccatgcacgccctgttaaacgaaccgctttcc

SEQ ID NO: 648953 - DNA, 75 bp, synthetic construct
  source 1..75: mol_type = other DNA
caaagtgaccctggcaccggaaatggttccagcggaagtcatcagcaaactggcaaatgccgggattgtggtttc

SEQ ID NO: 648954 - DNA, 75 bp, synthetic construct
  source 1..75: mol_type = other DNA
tacaggaaaaaattgctggctatcagtatgtgctggcaaacccgggctggacaaccgataacggttttatgatta

SEQ ID NO: 648955 - DNA, 75 bp, synthetic construct
  source 1..75: mol_type = other DNA
atggcgacattacgtgaactgattattaaaatatcggcaaactcccggtcattccagtcagagatctcccgggct

SEQ ID NO: 648956 - DNA, 75 bp, synthetic construct
  source 1..75: mol_type = other DNA
gatactgtttcatcctctgcaaccaaagttgaaaacgcctttatggcctgggttggtggtgcgaacgaggcaagc

SEQ ID NO: 648957 - DNA, 75 bp, synthetic construct
  source 1..75: mol_type = other DNA
tgtgcctacgttgaaggcgacggtcagtacgcccgtttcttctctcaaccgctgctgctgggtaaaaacggcgtg

SEQ ID NO: 648958 - DNA, 75 bp, synthetic construct
  source 1..75: mol_type = other DNA
atgaaaataattatttttagagtgctaacttttttctttgttatcttttcagttaatgtggtggcgaaggaattt

SEQ ID NO: 648959 - DNA, 75 bp, synthetic construct
  source 1..75: mol_type = other DNA
ttgccgggctggaggagcgacgggtggcgttgattcgtcaacaggcggcggagcaaaataaagcgtatcagtccc

SEQ ID NO: 648960 - DNA, 75 bp, synthetic construct
  source 1..75: mol_type = other DNA
atgatgatgaaggtaaccttgttcgtgaggctataactattacgcatgaagcaggagaacgctatgcattcagaa

SEQ ID NO: 648961 - DNA, 75 bp, synthetic construct
  source 1..75: mol_type = other DNA
ggctcagttatctatgcttcttgaaggtatcaactggaagcacccgaaacgaacagaacgcgctggaatccgtat

SEQ ID NO: 648962 - DNA, 75 bp, synthetic construct
  source 1..75: mol_type = other DNA
gaagaaaccgccccgttaaaccgggtcgagttcacgctcgaggcgcggctgattcagctctatgccaagcctgac

SEQ ID NO: 648963 - DNA, 75 bp, synthetic construct
  source 1..75: mol_type = other DNA
gcatccagagcagttctgcgttttgtcactgtcacagcagaagccttacggttcaggcagatacagagagaattt

SEQ ID NO: 648964 - DNA, 75 bp, synthetic construct
  source 1..75: mol_type = other DNA
atgagccagcaccacgttaatcctgacctcatacaccgcacggcctggggaaacccgttgtggaatgcactgcac

SEQ ID NO: 648965 - DNA, 75 bp, synthetic construct
  source 1..75: mol_type = other DNA
atatgacgctggaagggatggcaaaactctattgccgtggccttgatgaccagtggccggaagaagctatcgcac

SEQ ID NO: 648966 - DNA, 75 bp, synthetic construct
  source 1..75: mol_type = other DNA
accctggaagtcaaaaaatacaaaggcagcttcccctatatcttgaaccgccccgggtttcctggagagtgtttt

SEQ ID NO: 648967 - DNA, 75 bp, synthetic construct
  source 1..75: mol_type = other DNA
gaccgtattgctgtggaagccactcaggtgcgttcactggattttgctctgattttgatggcacaggaccaggaa

SEQ ID NO: 648968 - DNA, 75 bp, synthetic construct
  source 1..75: mol_type = other DNA
atatctgtttacaacaacaattgctgagactggttcctctctaggagggaaggggtattcaaagacaaaatggaa

SEQ ID NO: 648969 - DNA, 75 bp, synthetic construct
  source 1..75: mol_type = other DNA
accgacgtcacgcagtcgtttatgtccatccgcaaaaccatgaccagcagcgggcgcagcgccacctatgaggcc

SEQ ID NO: 648970 - DNA, 75 bp, synthetic construct
  source 1..75: mol_type = other DNA
cttcaggcagatacagagagaatttcgtcaggcactgtctgaaactgctcctgtgtatacgatgacgccgggaga

SEQ ID NO: 648971 - DNA, 75 bp, synthetic construct
  source 1..75: mol_type = other DNA
gcagttataccactctgcaacgtgtcgcagcgctggaacgttccggaatgcaaatcagtcgtcactcactggttt

SEQ ID NO: 648972 - DNA, 75 bp, synthetic construct
  source 1..75: mol_type = other DNA
aatgatacggcaagaacgatctggtatctggccagacgctttggccgtgaagacgatgtggaagtcatcaacttc

SEQ ID NO: 648973 - DNA, 75 bp, synthetic construct
  source 1..75: mol_type = other DNA
caggtgcttgctgttccgccagcgtatacaagccagcgttgcgcgttctgtggtcatacagcgaaagacaatcgc

SEQ ID NO: 648974 - DNA, 75 bp, synthetic construct
  source 1..75: mol_type = other DNA
tgcgcgacgcctgacatgcagttaaccgggatcgaaattgcaccagaggccattgcctgtgcaaagcagtcagcc

SEQ ID NO: 648975 - DNA, 75 bp, synthetic construct
  source 1..75: mol_type = other DNA
gtaccgctgtggatccgtccgcaaagtttcttccagactaatccggcggtcgccagccagctgtacgccaccgcg

SEQ ID NO: 648976 - DNA, 75 bp, synthetic construct
  source 1..75: mol_type = other DNA
ggaatggtgcgcgccggtgtcaggcccggaacaagggtttcgtaataaagccaaaatggtggtgagtggtagcgt

SEQ ID NO: 648977 - DNA, 75 bp, synthetic construct
  source 1..75: mol_type = other DNA
gtggatccgtccgcaaagtttcttccagactaatccggcggtcgccagccagctgtacgctaccgcgcgcgactg

SEQ ID NO: 648978 - DNA, 75 bp, synthetic construct
  source 1..75: mol_type = other DNA
ctcatttgcgcccgtttttgcggcactgaaaccatttattgctcgcgccgggcttacgccttacaacgtggcgcg

SEQ ID NO: 648979 - DNA, 75 bp, synthetic construct
  source 1..75: mol_type = other DNA
ccggagctggtgctggttaacccgccgcgccgcggcattggtaaaccgctgtgtgattatctctcaacgatggca

SEQ ID NO: 648980 - DNA, 75 bp, synthetic construct
  source 1..75: mol_type = other DNA
gcctggccgtcagcccgtgatggcaaagtgttccttacgcaggcgcagctggcgatgctgctggaaggtatcgac

SEQ ID NO: 648981 - DNA, 75 bp, synthetic construct
  source 1..75: mol_type = other DNA
ggcagtcaggttaaactgctgtggtccaccggtgacggactgtgcctcctgaccaaacggctggagcgtgggctc

SEQ ID NO: 648982 - DNA, 75 bp, synthetic construct
  source 1..75: mol_type = other DNA
gtctggcgcgtattgctgtttggcgcgtcttatcaactggctgttgaactgcgtgaagattattaccgtcagcta

SEQ ID NO: 648983 - DNA, 75 bp, synthetic construct
  source 1..75: mol_type = other DNA
atggctacatacggcggtcagtttacgcttacaccttccgggacaaagatctggctggttgccggtatcaccgat

SEQ ID NO: 648984 - DNA, 75 bp, synthetic construct
  source 1..75: mol_type = other DNA
tcgcagattattcgtggtgagcgccgtggttcgccgcaggatgccgagcaaatgggtatttcgctggcggaagag

SEQ ID NO: 648985 - DNA, 75 bp, synthetic construct
  source 1..75: mol_type = other DNA
gatggcaaagtgttcctgaccccggcgcagctggcaatgcttctggaaggcatcgactggcggcagcctaaaaga

SEQ ID NO: 648986 - DNA, 75 bp, synthetic construct
  source 1..75: mol_type = other DNA
tggcaaagtgttccttacgcaggcgcagctggcgatgctgctggaaggtatcgactggcgacagcctaagcggct

SEQ ID NO: 648987 - DNA, 75 bp, synthetic construct
  source 1..75: mol_type = other DNA
gaaaaagcccggtcactgctggcacaggccacagtggaagccatgcgcaatgagcttgagctgaaaagcgcggcg

SEQ ID NO: 648988 - DNA, 75 bp, synthetic construct
  source 1..75: mol_type = other DNA
cgcaacaaattaagagcgactgccagacgctggcggataacgtacagcagaatgcggaatccgttgccgaagata

SEQ ID NO: 648989 - DNA, 75 bp, synthetic construct
  source 1..75: mol_type = other DNA
cggctgcaaagcaaaccgaaggtggacgggccgcagagtgcgatagtgacggggccagcgggagaggagattttc

SEQ ID NO: 648990 - DNA, 75 bp, synthetic construct
  source 1..75: mol_type = other DNA
ccggtcgttatgtcgtttatggcgcagataaagtgattcccggggtcctgttcagcggcaccgttgaaattatct

SEQ ID NO: 648991 - DNA, 75 bp, synthetic construct
  source 1..75: mol_type = other DNA
cgtcatggacgagacgaaaacaaaagcaccgctggacagcccggcgttcaccggcacgcccaccacaccaacacc

SEQ ID NO: 648992 - DNA, 75 bp, synthetic construct
  source 1..75: mol_type = other DNA
cgcagagcaggctgtcaaggatgctgacgcgatagtccagaaagcgctcgataaacttgctgatgccgcaacgct

SEQ ID NO: 648993 - DNA, 75 bp, synthetic construct
  source 1..75: mol_type = other DNA
gttaaggagcagatcgttgaaatggcacataacggcgcagggggctgttataccgccagaacactgaaaatcggc

SEQ ID NO: 648994 - DNA, 75 bp, synthetic construct
  source 1..75: mol_type = other DNA
cacaggaaaagatcgcaattgttcagcagagctttgaaccggggatgacggtctccctcgttgcccggcaacatg

SEQ ID NO: 648995 - DNA, 75 bp, synthetic construct
  source 1..75: mol_type = other DNA
aaaagccccgtaagcaacactcgcctgaatttcgcaatgaagccctgaaacttgcagaacgcatcggtgttgctg

SEQ ID NO: 648996 - DNA, 75 bp, synthetic construct
  source 1..75: mol_type = other DNA
atggatacggaggtgctcaacgaccggacaacggatgtgaaacatgaccatacggaaaccatcgggaacgaccag

SEQ ID NO: 648997 - DNA, 75 bp, synthetic construct
  source 1..75: mol_type = other DNA
ataaagatgtcatggcaattgatggaaaaacgcttcggcactcttatgacaagagtcgccgcaagggagcgattt

SEQ ID NO: 648998 - DNA, 75 bp, synthetic construct
  source 1..75: mol_type = other DNA
tactgcccgtacgctgaaaatcggcattaatacagtcatccgaactttaaaaactctcgccacgaagaataacgt

SEQ ID NO: 648999 - DNA, 75 bp, synthetic construct
  source 1..75: mol_type = other DNA
cgcgtgacccagcactatgccaatgccgattacctgccacagcgacggattatgcatcgggcgacgattcttggg

SEQ ID NO: 649000 - DNA, 75 bp, synthetic construct
  source 1..75: mol_type = other DNA
tcatcagcgcggctacggttcgaagtgggatgttatccgcgcgcgtgtgctgaagcgtgacaaaggtttatgtca

SEQ ID NO: 649001 - DNA, 75 bp, synthetic construct
  source 1..75: mol_type = other DNA
gaaagccacaaaagtgaaggctggaagcaatacaagccgggccagtcccgccatcagcgtggttatggttcgaag

SEQ ID NO: 649002 - DNA, 75 bp, synthetic construct
  source 1..75: mol_type = other DNA
gttatgtctgcgtgccggtgtggcgcgtgaagcgaaaaccgttgaccacatcatccctaaagcacatggcggcac

SEQ ID NO: 649003 - DNA, 75 bp, synthetic construct
  source 1..75: mol_type = other DNA
gccgtgttcgcggttgccgccataccacgactgacccgtcaggctactgcgaaagccacaaaagcgaaggctgga

SEQ ID NO: 649004 - DNA, 75 bp, synthetic construct
  source 1..75: mol_type = other DNA
tcatcagcgcggttatggttcgaagtgggatgttatccgcgtgcgtgttctgaagcgtgacaaaggcctgtgtca

SEQ ID NO: 649005 - DNA, 75 bp, synthetic construct
  source 1..75: mol_type = other DNA
atgcccccacgaaccccaaaagcctgccgtgttcgcggctgccgcaataccacgactgacccgtcaggctactgc

SEQ ID NO: 649006 - DNA, 75 bp, synthetic construct
  source 1..75: mol_type = other DNA
tcatccctaaagcacatggcggcactgaggccgacaataatctgcagagtctgtgctggccgtgtcataaggcga

SEQ ID NO: 649007 - DNA, 75 bp, synthetic construct
  source 1..75: mol_type = other DNA
gatgccgacagtaatctgcagagcctgtgctggccgtgtcataaggcgaagacggcccgtgaacggctgaagtga

SEQ ID NO: 649008 - DNA, 75 bp, synthetic construct
  source 1..75: mol_type = other DNA
gccgtaagcgtggatgcgcaggtacaaccacagacagttctggttactgcgataaacatcgtggtgaaggatggg

SEQ ID NO: 649009 - DNA, 75 bp, synthetic construct
  source 1..75: mol_type = other DNA
aaccggaatctctcgatgatatccttggcgatattctgaaaaaagagacaacgataacctcgtttttaaatatgc

SEQ ID NO: 649010 - DNA, 75 bp, synthetic construct
  source 1..75: mol_type = other DNA
gtgtttattaatgaggactgtttcatccacgatgcttctaacagtcagcgcatcaagcacatcattaatcaacat

SEQ ID NO: 649011 - DNA, 75 bp, synthetic construct
  source 1..75: mol_type = other DNA
aaaccgttgatgaccttgccatagcttgtgattcacagcgcccttcagtggtgtttattaatgaggactgtttca

SEQ ID NO: 649012 - DNA, 75 bp, synthetic construct
  source 1..75: mol_type = other DNA
ttaccgggcgtttcgtagtaagggcaatcaccgctgggatacgtgcgttttcgtgaatgaatccggggcttactc

SEQ ID NO: 649013 - DNA, 75 bp, synthetic construct
  source 1..75: mol_type = other DNA
agctttaccatgcggtgctgcgccatcaggtggtgtttctgcgcgatcaaactattacgccgcagcagcaacgcg

SEQ ID NO: 649014 - DNA, 75 bp, synthetic construct
  source 1..75: mol_type = other DNA
atgagtgaacgtctgagcattaccccgctggggccgtatatcggcgcacaaatttcgggtgccgacctgacgcgc

SEQ ID NO: 649015 - DNA, 75 bp, synthetic construct
  source 1..75: mol_type = other DNA
caaacctggccagccaaattggtcgcgaagagccgaataagataaccttaaccggggatgcaaatctggatatga

SEQ ID NO: 649016 - DNA, 75 bp, synthetic construct
  source 1..75: mol_type = other DNA
gaagctgctgcgaaaaatccaccgttgttacatccggtggtgcgtacacatccggtgagtggtaagcaggcgttg

SEQ ID NO: 649017 - DNA, 75 bp, synthetic construct
  source 1..75: mol_type = other DNA
ggaggaggagcatcaacgctggcgcgaggcggcagcgaaaaatcctcctttactacatccggtggtgcgaacgca

SEQ ID NO: 649018 - DNA, 75 bp, synthetic construct
  source 1..75: mol_type = other DNA
cggactatctgccgcagcgccggattatgcagcgggcgacgattttgggggataagccgttttatcgtgcgcctt

SEQ ID NO: 649019 - DNA, 75 bp, synthetic construct
  source 1..75: mol_type = other DNA
cgcgtttgaccatcttgacgatatgcaccaggcctttttggcagcaaaacttcgatctgcctccaggcagcgtgc

SEQ ID NO: 649020 - DNA, 75 bp, synthetic construct
  source 1..75: mol_type = other DNA
gcctgcgtcgtggcgaagtggtcggcgcggtgagtattcaacatcaggcgctaccaagctgtcttgtcgataaac

SEQ ID NO: 649021 - DNA, 75 bp, synthetic construct
  source 1..75: mol_type = other DNA
ctggaagaagagtggctgggcgatgaacaaaccggttcgactccgttgctgctttcactggcggtcaacgcagac

SEQ ID NO: 649022 - DNA, 75 bp, synthetic construct
  source 1..75: mol_type = other DNA
cattgctcgtcagcggcctgctcgttggctgtaatcaactcacccagtacacgattagcgaacaagaaattaacc

SEQ ID NO: 649023 - DNA, 75 bp, synthetic construct
  source 1..75: mol_type = other DNA
gttcatggttctctcattgctggcatcagataccaaatttgtagatccgaaactcgatataaacaacgagtttcg

SEQ ID NO: 649024 - DNA, 75 bp, synthetic construct
  source 1..75: mol_type = other DNA
ttagtgcgtactgtcccgccgcgacctacagaacaagggcaaaaactgctggcactgcttcgccaggtggaattg

SEQ ID NO: 649025 - DNA, 75 bp, synthetic construct
  source 1..75: mol_type = other DNA
agctcgatgcggctggtcttgatgaacagcagcaggttcgggttatggaacgcttgcaactggcccgtcagttct

SEQ ID NO: 649026 - DNA, 75 bp, synthetic construct
  source 1..75: mol_type = other DNA
cgtgccgtcacccgcaactgcattaccaaagccactctctccagcgacacgaaagcaagccactattacagggaa

SEQ ID NO: 649027 - DNA, 75 bp, synthetic construct
  source 1..75: mol_type = other DNA
cttcaggggcatctttgtcgccatcggtacgagcctgctgagtctggggccgtacgttgaagttgtcttcgctat

SEQ ID NO: 649028 - DNA, 75 bp, synthetic construct
  source 1..75: mol_type = other DNA
agaatttaccgcgaatttcatggctcaggatattaacgaagtaaaagaatttgtagcacgtcacctttttggtcg

SEQ ID NO: 649029 - DNA, 75 bp, synthetic construct
  source 1..75: mol_type = other DNA
gtacggcaaagcggtcaatatcaaaaccaaacgcggcgtaattaagccgcgcacgccaaaccaggcgcagtacat

SEQ ID NO: 649030 - DNA, 75 bp, synthetic construct
  source 1..75: mol_type = other DNA
caagcagctcgaacgccgtctcggcatcgagatcaatcgccgcgataaccactttaaactgaccggccgtccgat

SEQ ID NO: 649031 - DNA, 75 bp, synthetic construct
  source 1..75: mol_type = other DNA
tgttttgcgcccagcttatcagtggcttgttgaaaggtaaggaattaactgacgcggtacatagcgcgggattac

SEQ ID NO: 649032 - DNA, 75 bp, synthetic construct
  source 1..75: mol_type = other DNA
gatgcggtgcaccgtgcggggttgcgcgtactggaagtgatgcgctatacccagcagcatgagagcgatgaattg

SEQ ID NO: 649033 - DNA, 75 bp, synthetic construct
  source 1..75: mol_type = other DNA
acgcaacttactgaaggcgagttgattgttgaagctggcggaagagccgaaaataccgtggtcacggggctggct

SEQ ID NO: 649034 - DNA, 75 bp, synthetic construct
  source 1..75: mol_type = other DNA
gtcccttttcagattacattaagtgaatgcagcaaagggacaacgggagttcgggttgcatttaacggtattgag

SEQ ID NO: 649035 - DNA, 75 bp, synthetic construct
  source 1..75: mol_type = other DNA
caattcgcaccatccataatattgcgctgaacccaaacttcggtggcgaagtgatggtggtgggtctcggttgcg

SEQ ID NO: 649036 - DNA, 75 bp, synthetic construct
  source 1..75: mol_type = other DNA
ttcgacaagctgaaagctgagttggatgaagcctttcagaagaaattggctgcatacgagcgtgattatgccgtc

SEQ ID NO: 649037 - DNA, 75 bp, synthetic construct
  source 1..75: mol_type = other DNA
gcgtcagaacgtcctggcgggtgaggtgatcaagtatcagaacgtagaaggtgaatttgttctcaaaactgaaaa

SEQ ID NO: 649038 - DNA, 75 bp, synthetic construct
  source 1..75: mol_type = other DNA
aaagctgctattaccttcttcagagagcccccagctacttcctgtgactcttgatgcagttgccgaacagccaga

SEQ ID NO: 649039 - DNA, 75 bp, synthetic construct
  source 1..75: mol_type = other DNA
ttcttccacagcgaagacgtggttcgtcacccggtggtggcgcgtatcgttaacgcctatgaagcctgggaagaa

SEQ ID NO: 649040 - DNA, 75 bp, synthetic construct
  source 1..75: mol_type = other DNA
ctggcctatatgcgtggtcgtacgctgaacgacgcgtttatcattctcgatgagagccagaacaccaccatcgaa

SEQ ID NO: 649041 - DNA, 75 bp, synthetic construct
  source 1..75: mol_type = other DNA
cgggcaaagggggtgttggaaagacaacctccagcgcggccatcgccactggtttggcccagaagggaaagaaaa

SEQ ID NO: 649042 - DNA, 75 bp, synthetic construct
  source 1..75: mol_type = other DNA
cgtagaacgtctgttgggagaagaacgtccttttcgcttcattgaagaagagaagaaaggcttcctcaaacgctt

SEQ ID NO: 649043 - DNA, 75 bp, synthetic construct
  source 1..75: mol_type = other DNA
gtattcagcgaattccacgacgccgatgcgcagaactctcatagctattgctttgagattctggagcggcggtaa

SEQ ID NO: 649044 - DNA, 75 bp, synthetic construct
  source 1..75: mol_type = other DNA
aagagggatatgagacggggcagaaaacggtcagcccatactggcaggtgaccggcgactggccgcaggaacccg

SEQ ID NO: 649045 - DNA, 75 bp, synthetic construct
  source 1..75: mol_type = other DNA
agaatctccaacttcaccggaacactgaaagcgggaacgattgtacagtttgagaaccacaagaaaatctacacg

SEQ ID NO: 649046 - DNA, 75 bp, synthetic construct
  source 1..75: mol_type = other DNA
tgagaaccacaagaaaatctacacgatcaccgaagacgtgaaatcaggtggtgaaatgaaactcttccctaactt

SEQ ID NO: 649047 - DNA, 75 bp, synthetic construct
  source 1..75: mol_type = other DNA
atgacaccgactaccgcacagatcatgacggaaaataccgtcagccagacttaccgggcaacttattcacccgat

SEQ ID NO: 649048 - DNA, 75 bp, synthetic construct
  source 1..75: mol_type = other DNA
gtcccgccgcgcgcgggaaaacctggacgcgctcaatgccgaagagtacgacctctggtattgcacggcctatgt

SEQ ID NO: 649049 - DNA, 75 bp, synthetic construct
  source 1..75: mol_type = other DNA
gcccggtatggcaggtcgcggcgtccgaaggggtggtgatcgataaaattcagttgctgatggcggtcgttaccg

SEQ ID NO: 649050 - DNA, 75 bp, synthetic construct
  source 1..75: mol_type = other DNA
cctaaccgacacggggtaaatttttactcattgtttaaacctgggcgcttcggtcacgctaatgatttggcgttt

SEQ ID NO: 649051 - DNA, 75 bp, synthetic construct
  source 1..75: mol_type = other DNA
ccattaatgcagccaaaaatgcccgtctccatcggaatgctgcatcttcagcggcgaccagtgctgagcaatcgg

SEQ ID NO: 649052 - DNA, 75 bp, synthetic construct
  source 1..75: mol_type = other DNA
ggtcgttatcaggccctgtcaggttatcgtgcaacgtatggcgacagaggctttatctgtttgttcgtgcgcatt

SEQ ID NO: 649053 - DNA, 75 bp, synthetic construct
  source 1..75: mol_type = other DNA
ggttcgtaaggatgaggcagaagagctaaaaaatcagacacagcagagcgccgaagctgcagccggaaacgcaca

SEQ ID NO: 649054 - DNA, 75 bp, synthetic construct
  source 1..75: mol_type = other DNA
cttccccggtcgttacacggcgctttcgggcctgggtaacaattatggtactcagcgtggctttatcggtctttt

SEQ ID NO: 649055 - DNA, 75 bp, synthetic construct
  source 1..75: mol_type = other DNA
ccccagagcgatatccgcgaccgcacaccaggcagactggcactgtccggcatgtacggattcggtcaggcattt

SEQ ID NO: 649056 - DNA, 75 bp, synthetic construct
  source 1..75: mol_type = other DNA
cgcaggcaatgcgcaggaagcgaaacagcagagggacgaggcgcaacggattgttgatgacctgaagggaagcaa

SEQ ID NO: 649057 - DNA, 75 bp, synthetic construct
  source 1..75: mol_type = other DNA
cccgcgtacgagcccgatataggtgcattagtacaggcagcgtacagtcccacgagcaatcctggaaaccttccg

SEQ ID NO: 649058 - DNA, 75 bp, synthetic construct
  source 1..75: mol_type = other DNA
ctgaccggaacgccgtccacgccaacaccacaggatgatgcagcaggcactgaaatagccaatgcggcgtttgtg

SEQ ID NO: 649059 - DNA, 75 bp, synthetic construct
  source 1..75: mol_type = other DNA
gctgaacgagctggcagcggcgctgggtcatgacccgaactttgcgacgacaatcacgaacgcactggcaggtaa

SEQ ID NO: 649060 - DNA, 75 bp, synthetic construct
  source 1..75: mol_type = other DNA
ctctgtcatttaacggacaggctgatttcgttatatggctgcagacagtcaccccggggcgttatgcggtcagta

SEQ ID NO: 649061 - DNA, 75 bp, synthetic construct
  source 1..75: mol_type = other DNA
gctgggcaatgacccgaactttgcgacaacggttactaaagcactggcaggtaaacagccgcttaacaatacgtt

SEQ ID NO: 649062 - DNA, 75 bp, synthetic construct
  source 1..75: mol_type = other DNA
aaaatattttccagtagcgacagaactgaatttaaatcagggactgattttctcaggtgggtaaaaacagcaaaa

SEQ ID NO: 649063 - DNA, 75 bp, synthetic construct
  source 1..75: mol_type = other DNA
acattgaacgtactatgaagctgaccattccagaagtagaactgccgaacgcagaactgctgggcaaacgccgtc

SEQ ID NO: 649064 - DNA, 75 bp, synthetic construct
  source 1..75: mol_type = other DNA
agattggctctctgctgggtaagatcaaatctccggttatcgctggttttttaatcagcaagattaaccgcgcga

SEQ ID NO: 649065 - DNA, 75 bp, synthetic construct
  source 1..75: mol_type = other DNA
tcagccatttaaaggtgatgacatccttaaagcgctgaatggcgaagaaaatgtcgctatcaatcgcggttttct

SEQ ID NO: 649066 - DNA, 75 bp, synthetic construct
  source 1..75: mol_type = other DNA
aaataagcggggcggtaggccgttattcaaagaaattcgcgccaggtaaggtatttactgtatatcaggtgataa

SEQ ID NO: 649067 - DNA, 75 bp, synthetic construct
  source 1..75: mol_type = other DNA
atgacgaagctggatgtttgcctgagacaattaaacacttaatcgacactggcattgtcgagcgtgtatatacat

SEQ ID NO: 649068 - DNA, 75 bp, synthetic construct
  source 1..75: mol_type = other DNA
ggtattgttgagcgtgtgtatacatatttcggaccgcgccgccgcttgcttgggtatcgaattaaatacttgtac

SEQ ID NO: 649069 - DNA, 75 bp, synthetic construct
  source 1..75: mol_type = other DNA
caacgatctgctgtttattgtcgttaccgatatgcaaagtcttcgctactcgcatcctgaagcccagcgtattgg

SEQ ID NO: 649070 - DNA, 75 bp, synthetic construct
  source 1..75: mol_type = other DNA
gcaattacgtgccctgcgtcaggggccgcagatcgttgtcggtactccaggccgtctgctggaccacctgaaacg

SEQ ID NO: 649071 - DNA, 75 bp, synthetic construct
  source 1..75: mol_type = other DNA
ttacgaaaaaccatctccaattcaggcagagtgtattccacatctgctgaatggccgcgacgttctgggtatggc

SEQ ID NO: 649072 - DNA, 75 bp, synthetic construct
  source 1..75: mol_type = other DNA
tcttgatcctgagctgaaagcaccacagattctggtgttggcaccgacccgcgaactggcggtacaggttgctga

SEQ ID NO: 649073 - DNA, 75 bp, synthetic construct
  source 1..75: mol_type = other DNA
tatattataaagatcagttccatagagaacattctatatgggggaaaataaaaatggcaataagatatatccaat

SEQ ID NO: 649074 - DNA, 75 bp, synthetic construct
  source 1..75: mol_type = other DNA
atcagtttaagcgtgaaaccaactacattcgaaaattaaaaatgttgattcgttattttcagtgtaaattatatg

SEQ ID NO: 649075 - DNA, 75 bp, synthetic construct
  source 1..75: mol_type = other DNA
cccgagggacgtcgcgagttttggagagctaccttttcctgctggctaggcactacaatggagtatgccgatttt

SEQ ID NO: 649076 - DNA, 75 bp, synthetic construct
  source 1..75: mol_type = other DNA
taaccacccaaacaggcgaaacctttacgggtaagatgtcacgacgtcagcgtgagctggttaatggctttatgc

SEQ ID NO: 649077 - DNA, 75 bp, synthetic construct
  source 1..75: mol_type = other DNA
gcaaggtgcaccttactccggcccagttatccatgcttcttgagggcatcaactggaaacatccaaaacgaacgg

SEQ ID NO: 649078 - DNA, 75 bp, synthetic construct
  source 1..75: mol_type = other DNA
gcaaaactgtgggccgatcgtgacgggttatgcctgttcgccaaacgcctggaacggggccgcttcgtctggccg

SEQ ID NO: 649079 - DNA, 75 bp, synthetic construct
  source 1..75: mol_type = other DNA
cagagattcaagagatcacaagatacgagcgatacacaagacagcaacaccagctaaggctgcacggcatcccgt

SEQ ID NO: 649080 - DNA, 75 bp, synthetic construct
  source 1..75: mol_type = other DNA
gttagcgtactgcgaaatcctgcatcgatggatggatttgcccctatatttccagacacctgttatcacttaacc

SEQ ID NO: 649081 - DNA, 75 bp, synthetic construct
  source 1..75: mol_type = other DNA
gtcagataccctgaagaccggaatcgaagaacttgacgccatcaccggagggatgaacgcggaagacctggtgat

SEQ ID NO: 649082 - DNA, 75 bp, synthetic construct
  source 1..75: mol_type = other DNA
caggtgagcggcgagattaaacatgaaatcgagctggccctgacctccgccaaccactttctgcgtcaacagcaa

SEQ ID NO: 649083 - DNA, 75 bp, synthetic construct
  source 1..75: mol_type = other DNA
ttcgccatgctccggggcaaaaagaaccggtgttgcatttttcgcatgtcgcgccaatcgaccgtttaatccaac

SEQ ID NO: 649084 - DNA, 75 bp, synthetic construct
  source 1..75: mol_type = other DNA
gggaagattcgctgttcgcccagccaattcaggcgttgcttcatgccgcttacgctaacgcctcgttgtatgctc

SEQ ID NO: 649085 - DNA, 75 bp, synthetic construct
  source 1..75: mol_type = other DNA
ttcgtgtggccggtgagccgtgaagggaaagtgcatctgacacctgcccagttgtccatgctactggaggggatc

SEQ ID NO: 649086 - DNA, 75 bp, synthetic construct
  source 1..75: mol_type = other DNA
tacccgctgtgagaggcactgttgcaaagttagcgatgaggcagccttttgtcttattcaaaggccttacatttc

SEQ ID NO: 649087 - DNA, 75 bp, synthetic construct
  source 1..75: mol_type = other DNA
atgcttaacgagcaactggcgcgcgcctccgcagtgctggcggtgctggactatacgcaactgaagtcaatctcc

SEQ ID NO: 649088 - DNA, 75 bp, synthetic construct
  source 1..75: mol_type = other DNA
tgcatgcgggagctggaagcgttattgcttgccgcctgggagggtaaaaacagtctgattttgtccctttcaggg

SEQ ID NO: 649089 - DNA, 75 bp, synthetic construct
  source 1..75: mol_type = other DNA
ttggtgatagtgaaaactgttacaatatagtagaccggaataatgcgacttcactggatttccatgctcccagac

SEQ ID NO: 649090 - DNA, 75 bp, synthetic construct
  source 1..75: mol_type = other DNA
tacgctggataaagcggctatgccggatttaagctccgtgaattcaggaagcggtgtggcgacactaattaaccc

SEQ ID NO: 649091 - DNA, 75 bp, synthetic construct
  source 1..75: mol_type = other DNA
gcgtgcatgccctggcaggcaaatcctttgccggtggtttgtttgtggatggtatggccggataccgtgagttgt

SEQ ID NO: 649092 - DNA, 75 bp, synthetic construct
  source 1..75: mol_type = other DNA
cagaaccccaataatctgatgtggcaagataacgtggatcacacgatccactaccttaacctgttgcaaaccgac

SEQ ID NO: 649093 - DNA, 75 bp, synthetic construct
  source 1..75: mol_type = other DNA
agagaatgcgggcacgacagtgaatggcagttcgctgtttaagggcgcggataacacatctcttctgaagaaagc

SEQ ID NO: 649094 - DNA, 75 bp, synthetic construct
  source 1..75: mol_type = other DNA
accgggcgctgtctgaagactacaccattcagggggagctgagtgacctgtcaggcagggcgaagagtcatatcc

SEQ ID NO: 649095 - DNA, 75 bp, synthetic construct
  source 1..75: mol_type = other DNA
gtgtgcatgttctggcgggcaaatcctttgccggtggtctgtttgtggatggtatgaccggataccgggagctgt

SEQ ID NO: 649096 - DNA, 75 bp, synthetic construct
  source 1..75: mol_type = other DNA
aaaaccgaactggcgctgaagattgccgaaggcgttgcaagccgcgttattcctggttctgacgtccggcgcggg

SEQ ID NO: 649097 - DNA, 75 bp, synthetic construct
  source 1..75: mol_type = other DNA
atgaacacttcagacgtaatccagactgcccttttcgccagaaaaatattcgctttacggtaatcattgatgaac

SEQ ID NO: 649098 - DNA, 75 bp, synthetic construct
  source 1..75: mol_type = other DNA
ttacttcatcctgaagcagagcacctatggttatttccccacggatcagagcagcaacgccacctgggagtttgt

SEQ ID NO: 649099 - DNA, 75 bp, synthetic construct
  source 1..75: mol_type = other DNA
tggctggtcggaatcacgtaaaggaactgccggaaatttatataaatacaataacccgtacacaaatacgacgga

SEQ ID NO: 649100 - DNA, 75 bp, synthetic construct
  source 1..75: mol_type = other DNA
gtgggctgttattccactggattttatcgggcagaaatttaatgaagacaatgatgccccggtcacgttcagaac

SEQ ID NO: 649101 - DNA, 75 bp, synthetic construct
  source 1..75: mol_type = other DNA
catctggaacaacctgccttaccaaccatgaaatactcccgctttgtgaaatataagattgatgagaagaaaggc

SEQ ID NO: 649102 - DNA, 75 bp, synthetic construct
  source 1..75: mol_type = other DNA
ggctggccgatttcagcgttaatttcgcccatggtgaaaactatcgtttgttaatggccgaacatgatatgagtc

SEQ ID NO: 649103 - DNA, 75 bp, synthetic construct
  source 1..75: mol_type = other DNA
aaaaccgtcagcgaagaagacgtgctgcaactggtgcagttaagcaaaccggaaatcgcgcaggcgatatttggt

SEQ ID NO: 649104 - DNA, 75 bp, synthetic construct
  source 1..75: mol_type = other DNA
gactggcggaaggcggggcagcaggtgtggcgttagatctccaccagcgtgcgctgcaacaggggctggcgtcac

SEQ ID NO: 649105 - DNA, 75 bp, synthetic construct
  source 1..75: mol_type = other DNA
tgaaacgatgggaacaaaccctgatgcaccaatcaactctattggcggtaaattttttgatcccgaaaccggaga

SEQ ID NO: 649106 - DNA, 75 bp, synthetic construct
  source 1..75: mol_type = other DNA
tgcccgtggcgctactgcaacaatcgcgatgtacgcacaattgttgaactgggaaattccattggctttgatgtc

SEQ ID NO: 649107 - DNA, 75 bp, synthetic construct
  source 1..75: mol_type = other DNA
cctgactgtggcgcggtgatgggcgacgcaacataccaggaaacattcgatgaaaaaaatcaggctgaagttcag

SEQ ID NO: 649108 - DNA, 75 bp, synthetic construct
  source 1..75: mol_type = other DNA
ggggcttgggctggcggcaaatttccgccagttgattaccgtgctcggcgtgcttgccggggcaggcatctttaa

SEQ ID NO: 649109 - DNA, 75 bp, synthetic construct
  source 1..75: mol_type = other DNA
tgccatctggctgctgttatcgaataaatttaccgctatgcgagatctctttgcctggcagttggtgggcgatgt

SEQ ID NO: 649110 - DNA, 75 bp, synthetic construct
  source 1..75: mol_type = other DNA
cggaaaagcgcgatatcacccgggaagtggtgaagtcgctgaaattcgtcttaccagcagtggcggtggcgagtt

SEQ ID NO: 649111 - DNA, 75 bp, synthetic construct
  source 1..75: mol_type = other DNA
gaagcgattctggcggatctgcctccggtgcgcgaaacccagggcaagccgaaaatcgcggtggtggcgcatgac

SEQ ID NO: 649112 - DNA, 75 bp, synthetic construct
  source 1..75: mol_type = other DNA
attcatcaccatccttcgagacctactggcgaaaaagtgcgaattatcacccggtacgacgctgggctcgatcct

SEQ ID NO: 649113 - DNA, 75 bp, synthetic construct
  source 1..75: mol_type = other DNA
cggtgcgatgaaaaaacggataacgataagaaacatgaccagatcctgacctttaccccattcaaagggcgtcac

SEQ ID NO: 649114 - DNA, 75 bp, synthetic construct
  source 1..75: mol_type = other DNA
ttttccctaatcctggtaattcagacctgggactaataactgcttttttcgaagcatacttggacgctgactaca

SEQ ID NO: 649115 - DNA, 75 bp, synthetic construct
  source 1..75: mol_type = other DNA
gtgcgaaaactcagacttcgactttacctacacccagcataccgcctggatttccagcaaaggaacgctcaccat

SEQ ID NO: 649116 - DNA, 75 bp, synthetic construct
  source 1..75: mol_type = other DNA
aaaggcgtagaaatcagctatcccgtgggtcaggaatcactaaaaacttacgatggtgtaccgatttttggtctt

SEQ ID NO: 649117 - DNA, 75 bp, synthetic construct
  source 1..75: mol_type = other DNA
ggaaactggcaccctccgttatttctaaaacgcaggggtatgatcctgactcccgtctgagcagagccacgcttg

SEQ ID NO: 649118 - DNA, 75 bp, synthetic construct
  source 1..75: mol_type = other DNA
gtggatcactattgcaccgttcgtgacaatcacaaactaccgcgcggatttgctgacgccactcatgagtccatt

SEQ ID NO: 649119 - DNA, 75 bp, synthetic construct
  source 1..75: mol_type = other DNA
caaagaagtgaaagtggaaatcgacgtgctgtcagataaacccaatcagactcactaccgtgcgctgttagtccg

SEQ ID NO: 649120 - DNA, 75 bp, synthetic construct
  source 1..75: mol_type = other DNA
tcacaaactaccgcgcggatttgctgacgctactcatgaatccattgagacgccaaatggcacggtactgttgcg

SEQ ID NO: 649121 - DNA, 75 bp, synthetic construct
  source 1..75: mol_type = other DNA
taccccacaatgcgctggacgatgcccgtcaccaggcaaaacaagtttcagcaatctggcaaaaactgttcccga

SEQ ID NO: 649122 - DNA, 75 bp, synthetic construct
  source 1..75: mol_type = other DNA
cgaaaaaaactccggcgggtgttttgtccaagtatggggaaatggagccaacttcgacaacgtaattttacgccg

SEQ ID NO: 649123 - DNA, 75 bp, synthetic construct
  source 1..75: mol_type = other DNA
gaggagaacatgctcctgccggtttcaggtcagattctgcctgttcgatggctggcgcaacacaacagcgaaaaa

SEQ ID NO: 649124 - DNA, 75 bp, synthetic construct
  source 1..75: mol_type = other DNA
ggtgagttccgctaaccaattaaaagtcaccgctgacgaagtaaacaaaactatgcaggcagccagtatcagcca

SEQ ID NO: 649125 - DNA, 75 bp, synthetic construct
  source 1..75: mol_type = other DNA
cgatgaagagaatcaggttgaagttcaggaaaatgatccggaggaaatggaaggcgctgaacatccacacaagga

SEQ ID NO: 649126 - DNA, 75 bp, synthetic construct
  source 1..75: mol_type = other DNA
agcgatagtgaaactggcgaggcgacagatcctttaattaatgtgaacggtcatcacgaaatcacatccaccagc

SEQ ID NO: 649127 - DNA, 75 bp, synthetic construct
  source 1..75: mol_type = other DNA
atcgaagaactggactgtctcttctttgatgaacatcctcatttttcctggcatccgggtatgctggtaccggat

SEQ ID NO: 649128 - DNA, 75 bp, synthetic construct
  source 1..75: mol_type = other DNA
ggattagtggtgcgatggggtcggttgcactgacgtacttctgggaacgactgacaggggtgaaaaatgcaaaat

SEQ ID NO: 649129 - DNA, 75 bp, synthetic construct
  source 1..75: mol_type = other DNA
aaaattaacccagcgctaaatatcgcatcgggtcaggtcaaaagcactgtgctgattgatatttattatgaatag

SEQ ID NO: 649130 - DNA, 75 bp, synthetic construct
  source 1..75: mol_type = other DNA
gacattttgctctccgcaccgtcgattgtggttggtctttttgtttacaccatcgtggtggcgcagatggagcac

SEQ ID NO: 649131 - DNA, 75 bp, synthetic construct
  source 1..75: mol_type = other DNA
atggctatggttgaaatgcaaaccactgcggcgctggctgaatcccgccgtaaaatgcaggcgcgtcgccgcctt

SEQ ID NO: 649132 - DNA, 75 bp, synthetic construct
  source 1..75: mol_type = other DNA
tgaaaaaatcaattctgcttctgtcgttgctattcagcgccacttcccctgtggttgcaggacaggatgttgaca

SEQ ID NO: 649133 - DNA, 75 bp, synthetic construct
  source 1..75: mol_type = other DNA
ttgaggtggaggttgccgggcaatggtgcaaagttaactttgcggttaatacgctggggttctcccgccgcttcc

SEQ ID NO: 649134 - DNA, 75 bp, synthetic construct
  source 1..75: mol_type = other DNA
ttgaagcagggtaaacgaacatatccatgccaccttcgcgatgcctgggttcgggaggtgggtgagattaatcag

SEQ ID NO: 649135 - DNA, 75 bp, synthetic construct
  source 1..75: mol_type = other DNA
gttgcactgtctgacggtgggtttctgcagaccgacatggttattctcgccatcggggtaaaacctgagagcagc

SEQ ID NO: 649136 - DNA, 75 bp, synthetic construct
  source 1..75: mol_type = other DNA
cccggactcttcttcgcttatttagtagcatatagtggcttcggaattttatctatcggcatgattgcttatctt

SEQ ID NO: 649137 - DNA, 75 bp, synthetic construct
  source 1..75: mol_type = other DNA
tgcttgcttctactgtttcatttggcgttaatgctgctaatcagggacagggtgttattaacttcaaaggtacag

SEQ ID NO: 649138 - DNA, 75 bp, synthetic construct
  source 1..75: mol_type = other DNA
tgcgttactacatccagcccaaacgtaagatgcggccatcgagaaaacggttcgcttcgaaactcagcccggtta

SEQ ID NO: 649139 - DNA, 75 bp, synthetic construct
  source 1..75: mol_type = other DNA
aagatctggtcagtgcagttgcacctacaaatccctacagctttgttaactatctggtgaagcacaaaaagttct

SEQ ID NO: 649140 - DNA, 75 bp, synthetic construct
  source 1..75: mol_type = other DNA
cactacagacccgtcaggctactgcgaaagccacaaaaacgaaggctggaaacaatacaagccggggcaatcccg

SEQ ID NO: 649141 - DNA, 75 bp, synthetic construct
  source 1..75: mol_type = other DNA
agcaaagcggctggtatcgcgatatgtatcgttatcaacaactggaagcggcgcttgatgacgctccagaaattc

SEQ ID NO: 649142 - DNA, 75 bp, synthetic construct
  source 1..75: mol_type = other DNA
gccgtgttcgcggctgccgctctacaaccacggacccgtcaggctactgcgaaagccataaaagcgaaggctgga

SEQ ID NO: 649143 - DNA, 75 bp, synthetic construct
  source 1..75: mol_type = other DNA
tcatcagcgcggctacggttcgaagtgggacagtatccgcgcgcgcatattgaagcgtgacaaaggcctgtgtca

SEQ ID NO: 649144 - DNA, 75 bp, synthetic construct
  source 1..75: mol_type = other DNA
acgaagttacaactcgatagctggcgtagccgcctggcggtggtcagccagacgccattccttttttccgacacc

SEQ ID NO: 649145 - DNA, 75 bp, synthetic construct
  source 1..75: mol_type = other DNA
atgccaccacgaaccccaaaagcctgccgttttcgcggctgccgccataccaccacagatccttcaggctactgc

SEQ ID NO: 649146 - DNA, 75 bp, synthetic construct
  source 1..75: mol_type = other DNA
aatattatgatgcacctgatgaaggtgtgtttttctttttcggcattggtgtaatagtcattcctaggagttgta

SEQ ID NO: 649147 - DNA, 75 bp, synthetic construct
  source 1..75: mol_type = other DNA
ccgactgtgcattacagggaactggcgatgtgctaaatcagttacatattgattttagagccttagcggtgtcat

SEQ ID NO: 649148 - DNA, 75 bp, synthetic construct
  source 1..75: mol_type = other DNA
caggatgcgcttgatttctggattaataataccgattcgttaacattaattaaatggctggcacaattcatttct

SEQ ID NO: 649149 - DNA, 75 bp, synthetic construct
  source 1..75: mol_type = other DNA
aagcgcaacggcgatgccttgcatgaacgttttaagttggcgcaggcggcgttttccagtcttaatgaccgaact

SEQ ID NO: 649150 - DNA, 75 bp, synthetic construct
  source 1..75: mol_type = other DNA
tcacagggaagtttaagcccggccccatatgatccagtccatgcaccgtcatgttcagaaaaaaaattatttatg

SEQ ID NO: 649151 - DNA, 75 bp, synthetic construct
  source 1..75: mol_type = other DNA
cacgactgacccgtcaggctactgcgaaagccacaaaagcgaaggctggaagcaatacaagccaggacaatcccg

SEQ ID NO: 649152 - DNA, 75 bp, synthetic construct
  source 1..75: mol_type = other DNA
atcccgttttaacatagacgtccgtatccgtcatgaagtgatgtcagtagacccggttaataagatggtgacggt

SEQ ID NO: 649153 - DNA, 75 bp, synthetic construct
  source 1..75: mol_type = other DNA
tgtatatgccgacgatgatgtcatttatggatgcacttggcttgaaacattatatgatgagtttttgaaaaactc

SEQ ID NO: 649154 - DNA, 75 bp, synthetic construct
  source 1..75: mol_type = other DNA
gtcattattaacggtagtgcgctggcaccccatctggaaattgttggctacgtcatgactggtattgtcgctttc

SEQ ID NO: 649155 - DNA, 75 bp, synthetic construct
  source 1..75: mol_type = other DNA
atagcgtcaggcctcaccattataacggagggctgacgccggaagagtcagagaacagatatcatttttactgta

SEQ ID NO: 649156 - DNA, 75 bp, synthetic construct
  source 1..75: mol_type = other DNA
ccaaccagttctggagcacggacatgatgcagccgatcgccaacttgccggtgacgatctttaagtttgcgatga

SEQ ID NO: 649157 - DNA, 75 bp, synthetic construct
  source 1..75: mol_type = other DNA
cagtcatcttctgaagaggatttagttcttttacaatccatttttaaatggaaggaaggcgatgatgaacaacgc

SEQ ID NO: 649158 - DNA, 75 bp, synthetic construct
  source 1..75: mol_type = other DNA
aggttatattcagttccgatggcacgggattcggaaaaagctatggcgtacttcaagggtatgtcgaatatctgg

SEQ ID NO: 649159 - DNA, 75 bp, synthetic construct
  source 1..75: mol_type = other DNA
agacaactttaaccactgctgcggtatattcttcgaataataatggggcggatcatcagtatggtgctcttgctg

SEQ ID NO: 649160 - DNA, 75 bp, synthetic construct
  source 1..75: mol_type = other DNA
cgccagtctgctgccggtaatgcctggtgggggatgggggcagagttttaccgggggcacagcagcacagatggc

SEQ ID NO: 649161 - DNA, 75 bp, synthetic construct
  source 1..75: mol_type = other DNA
gatttcagcgctgtggattcggaaataggtgtggcaacactgataaacccgcagtatatcgtcagtgtgaaacat

SEQ ID NO: 649162 - DNA, 75 bp, synthetic construct
  source 1..75: mol_type = other DNA
caatatgattgcccgccaggttgatgggttaatcgtcgcatccagtatgctgcatgataatgactatcaaaaact

SEQ ID NO: 649163 - DNA, 75 bp, synthetic construct
  source 1..75: mol_type = other DNA
tgtttctcccaccgccgctctggtggcagatattgcacggagtcacccggatgaattctattttctgggggggac

SEQ ID NO: 649164 - DNA, 75 bp, synthetic construct
  source 1..75: mol_type = other DNA
taccggaggtgaaggtataaaacctcaaattagctataacaatgctgttgatataaacggttttaataacggagt

SEQ ID NO: 649165 - DNA, 75 bp, synthetic construct
  source 1..75: mol_type = other DNA
atgtctgtattccctgaacgttttgcatcccctcctcgtgatacaaccccttttttcagtgacctactgagttgc

SEQ ID NO: 649166 - DNA, 75 bp, synthetic construct
  source 1..75: mol_type = other DNA
ggtgtagaggaaatggtcattggcatggcgcatcggggaagacttaatgtgctggtgaatctgctgaataaagat

SEQ ID NO: 649167 - DNA, 75 bp, synthetic construct
  source 1..75: mol_type = other DNA
accattaaacggcaactggcgttacgccaggatatggccgcaggtactcagccaatagactggggaatggctgaa

SEQ ID NO: 649168 - DNA, 75 bp, synthetic construct
  source 1..75: mol_type = other DNA
acaactggacgatgtggctgggcgcgctgataacgtctttgctgtttgccgccgtgcatatgcagtatcagaacc

SEQ ID NO: 649169 - DNA, 75 bp, synthetic construct
  source 1..75: mol_type = other DNA
cccgtagttattcctcaggatataaataatcttcctgcttacaataagattcagggtaattttttatctgtgatg

SEQ ID NO: 649170 - DNA, 75 bp, synthetic construct
  source 1..75: mol_type = other DNA
gctatcaggtataagtgacttcaaaatacatagctacattattaaaacaagtgaatatcctgaagagtttttttc

SEQ ID NO: 649171 - DNA, 75 bp, synthetic construct
  source 1..75: mol_type = other DNA
tatgctcctccatttaatagtgccagggatattattaatcaggctggaatggttgcggaaaatgttattaatgga

SEQ ID NO: 649172 - DNA, 75 bp, synthetic construct
  source 1..75: mol_type = other DNA
gacagcacaaagcgggcaaaacaaatggaatttatgccgtttgttccgcacatccgctggtgctggaggctgcaa

SEQ ID NO: 649173 - DNA, 75 bp, synthetic construct
  source 1..75: mol_type = other DNA
gtcattgatatcccacaagatacctggattgaacagccgtgggatatgggtgtcgtatttgtaccgcctatttcc

SEQ ID NO: 649174 - DNA, 75 bp, synthetic construct
  source 1..75: mol_type = other DNA
cgtgcagaaggcgacggtgaaggcttcatcgtcattgatgatctggtggataccggcggtactgcggttgcgatt

SEQ ID NO: 649175 - DNA, 75 bp, synthetic construct
  source 1..75: mol_type = other DNA
gccgatcgccaacctgccggtgacgatctttaagtttgcgatgagcccgtttgcggaatggcaacaactggcctg

SEQ ID NO: 649176 - DNA, 75 bp, synthetic construct
  source 1..75: mol_type = other DNA
gaatagttgtaacaggaaaggcatcagataaaaaaataaagatgttaaactgtggagaggaaattacctttacgg

SEQ ID NO: 649177 - DNA, 75 bp, synthetic construct
  source 1..75: mol_type = other DNA
gcgcttcatttgattacaacctgccgtgtatcgctgaaaaaagcctgattgtcgtggcatcagtggcagattatt

SEQ ID NO: 649178 - DNA, 75 bp, synthetic construct
  source 1..75: mol_type = other DNA
ttctggcgtcgaaatcacgtcgcgcagaaaacggcgaagaacccataaaagagcacctgctgttaacgcgctata

SEQ ID NO: 649179 - DNA, 75 bp, synthetic construct
  source 1..75: mol_type = other DNA
tttgataatcagacgacacaggatgccgtactgagccgtgctgttgcaaaaggcgactccccggtaacgttccat

SEQ ID NO: 649180 - DNA, 75 bp, synthetic construct
  source 1..75: mol_type = other DNA
acctcggggtggcaaccaccggacagggtatccgggttgtggatgcacagaatggtgccaccacagaagaaggtg

SEQ ID NO: 649181 - DNA, 75 bp, synthetic construct
  source 1..75: mol_type = other DNA
aaccgcctgggagcattctctgttgtggagggtaaagctgataatgtcgtactggaaaatggcggacgtctggat

SEQ ID NO: 649182 - DNA, 75 bp, synthetic construct
  source 1..75: mol_type = other DNA
tgcacaaatacggacttgcgctgaacacggtaattaacgaggggggctggcaggtgattaaggaaggaggaacta

SEQ ID NO: 649183 - DNA, 75 bp, synthetic construct
  source 1..75: mol_type = other DNA
gaagttcgttccgacaactctgcaggtgaaaaacctgaacgggcagaatggcaccatcagcctgcgtgtacgccc

SEQ ID NO: 649184 - DNA, 75 bp, synthetic construct
  source 1..75: mol_type = other DNA
actggacctgcaggccggactggaagcccgtgtccgggaaaatatcaccctgggcgttcaggccggttatgccca

SEQ ID NO: 649185 - DNA, 75 bp, synthetic construct
  source 1..75: mol_type = other DNA
cagggtggaaaaatcaggaagtggcacactcactgtcagcaacaccacactcacccagaaagccgtcaacctgaa

SEQ ID NO: 649186 - DNA, 75 bp, synthetic construct
  source 1..75: mol_type = other DNA
gggttggggctggctgggttcactggaaaccggtctgcccttcagtatcactgacaacctgatgctggagccaca

SEQ ID NO: 649187 - DNA, 75 bp, synthetic construct
  source 1..75: mol_type = other DNA
tgggaacagccgcagccgggagtaacatgacgttctcaccctcacagaatggcacgtcactggacctgcaggccg

SEQ ID NO: 649188 - DNA, 75 bp, synthetic construct
  source 1..75: mol_type = other DNA
acctggcagggactttccctggatgacggtaaggacaacgccggttatgtgaagttcgggcatggcagtgcacaa

SEQ ID NO: 649189 - DNA, 75 bp, synthetic construct
  source 1..75: mol_type = other DNA
tggcacgtcactggatctgcaggccggactggaagcccgtgtccgggaaaatatcaccctgggcgttcaggccgg

SEQ ID NO: 649190 - DNA, 75 bp, synthetic construct
  source 1..75: mol_type = other DNA
accctaacgttgccaaccgcaacaaaggcccgcgccgtcagccggaaaaaaatgtcttcaccgatgaacagattg

SEQ ID NO: 649191 - DNA, 75 bp, synthetic construct
  source 1..75: mol_type = other DNA
ggcgggcaatggatacaaaatggcggtatcgccaacaacactactgtcaccggtggtggtcttcagagagtgaat

SEQ ID NO: 649192 - DNA, 75 bp, synthetic construct
  source 1..75: mol_type = other DNA
accggattctggcaggctcccgcagccatcagaccggtgtaaacggtgaaccgccccgggaatcctggagactaa

SEQ ID NO: 649193 - DNA, 75 bp, synthetic construct
  source 1..75: mol_type = other DNA
aactggtgggtacagccttctgttatccgcaccttcagctcccggggagatatgcgtgtggggacttccactgca

SEQ ID NO: 649194 - DNA, 75 bp, synthetic construct
  source 1..75: mol_type = other DNA
agttcgggcatggcagtgcacaacatgtgcgtgccggcttccgtctgggcagccaccacgatatgaactttggta

SEQ ID NO: 649195 - DNA, 75 bp, synthetic construct
  source 1..75: mol_type = other DNA
gcaaaattaagctgaaagacttcaacattaagactgatttaggtccagcttcgcaggaggttgatctgattattt

SEQ ID NO: 649196 - DNA, 75 bp, synthetic construct
  source 1..75: mol_type = other DNA
ctggtgggtacagccttctgttatccgcactttcagctcccggggtgacatgagcatgggtacagccgccgccgg

SEQ ID NO: 649197 - DNA, 75 bp, synthetic construct
  source 1..75: mol_type = other DNA
acgctgaatgggggataccagtatgtgcacaacggcggtacagcgtctgacactgttgtgaacagtgacggctgg

SEQ ID NO: 649198 - DNA, 75 bp, synthetic construct
  source 1..75: mol_type = other DNA
ccggtgtggtggttgcgctgtctcttgctgctgtcacatcagtcccggcactggctgctgacacggttgtacagg

SEQ ID NO: 649199 - DNA, 75 bp, synthetic construct
  source 1..75: mol_type = other DNA
tgacgttctcaccgtcccggaatggcacgtcactggacctgcaggccggactggaagcccgtgtccgggaaaata

SEQ ID NO: 649200 - DNA, 75 bp, synthetic construct
  source 1..75: mol_type = other DNA
gacaacctgatgctggagccacaactgcagtatacctggcagggactttccctggatgacggtaaggacaacgcc

SEQ ID NO: 649201 - DNA, 75 bp, synthetic construct
  source 1..75: mol_type = other DNA
tggggacagccgccgccggcagtaacatgacgttctcaccgtcccggaatggcacgtcactggacctgcaggccg

SEQ ID NO: 649202 - DNA, 75 bp, synthetic construct
  source 1..75: mol_type = other DNA
atttatcgacgatctggcgtccgtgtttccgcttagcgagctgcaggcatgcatggtggatagctgggaggtctg

SEQ ID NO: 649203 - DNA, 75 bp, synthetic construct
  source 1..75: mol_type = other DNA
gcacagggaacccgccacagtatgaaagcgtcatcgggcaataacgacttccgcgcacggggccggggctggctg

SEQ ID NO: 649204 - DNA, 75 bp, synthetic construct
  source 1..75: mol_type = other DNA
gtctgggcagccacaacgatatgaactttggtaaaggcacctcatcccgtgacaccctgcgcgacagtgccaaac

SEQ ID NO: 649205 - DNA, 75 bp, synthetic construct
  source 1..75: mol_type = other DNA
gaactggtgggtacagccttccgttatccgcaccttcagctcccggggtgatatgcgtgtggggacctccaccgc

SEQ ID NO: 649206 - DNA, 75 bp, synthetic construct
  source 1..75: mol_type = other DNA
gtgcgtgccggtttccgtctgggcagccacaacgatatgacctttggtgaaggcacctcatcccgtgacaccctg

SEQ ID NO: 649207 - DNA, 75 bp, synthetic construct
  source 1..75: mol_type = other DNA
ttgatggcagcaatgcctctgaccagctggtgattaatggtggtcaggcaaccggcaaaacctggcttgcgttta

SEQ ID NO: 649208 - DNA, 75 bp, synthetic construct
  source 1..75: mol_type = other DNA
ctggagccacaactgcagtatacctggcagggactttccctggatgacggccaggataacgccggttatgtgaag

SEQ ID NO: 649209 - DNA, 75 bp, synthetic construct
  source 1..75: mol_type = other DNA
ctgcaacttgttcgacctcgaccagttacgcatggaatacagcccggatgaataccagaacctgctgatgtgtga

SEQ ID NO: 649210 - DNA, 75 bp, synthetic construct
  source 1..75: mol_type = other DNA
agtgaaaatgcttatcgtgctgaagtccccctgtatacatccatgctgacacaggcaatggactatgaccggatt

SEQ ID NO: 649211 - DNA, 75 bp, synthetic construct
  source 1..75: mol_type = other DNA
aaccgcctggtattacagggtgatgaggtgccagaacgtctggtggattatgcagcattccagtggcagagggct

SEQ ID NO: 649212 - DNA, 75 bp, synthetic construct
  source 1..75: mol_type = other DNA
cgtgcacgacagattcaggcctggctgcgcagcgatctgatgcccatccgcgaagaacgcccgacggatgttgtc

SEQ ID NO: 649213 - DNA, 75 bp, synthetic construct
  source 1..75: mol_type = other DNA
cgccacagcatgaaagcgtcatcggacaataacgacttccgcgcccggggctggggctggctgggctcactggaa

SEQ ID NO: 649214 - DNA, 75 bp, synthetic construct
  source 1..75: mol_type = other DNA
ttgctggcagagctccgtgcacagcagattccggtagggctggcttccgtctccctgaatgcgccgacgatttta

SEQ ID NO: 649215 - DNA, 75 bp, synthetic construct
  source 1..75: mol_type = other DNA
gcatgtatcggcattgaagatgcgcaggcgggcattgacgccattaacgccagcggtatgcgctcggtggggatc

SEQ ID NO: 649216 - DNA, 75 bp, synthetic construct
  source 1..75: mol_type = other DNA
tgcttaccggacgtaaccagatttttctttccgccagcaaggcacaggcccacgtctttaagcagtacatcatcg

SEQ ID NO: 649217 - DNA, 75 bp, synthetic construct
  source 1..75: mol_type = other DNA
attgaccccacgaatgtcactctcgcctccggtgccacctggaatatccccgataacgccacggtgcagtcggtg

SEQ ID NO: 649218 - DNA, 75 bp, synthetic construct
  source 1..75: mol_type = other DNA
tggaaaccggtctgcccttcagtatcactgacaatctgatgctggagccacaactgcagtacacctggcagggac

SEQ ID NO: 649219 - DNA, 75 bp, synthetic construct
  source 1..75: mol_type = other DNA
gacaggctggcaacaccactgtcggacatcgtggaacactgacgctggctgccgggggaaatctgagtggcagaa

SEQ ID NO: 649220 - DNA, 75 bp, synthetic construct
  source 1..75: mol_type = other DNA
tattgcccgtggggccacgccggaaagcagcggcagctatggcttcgtccgcctggagggtgacctgctgagaac

SEQ ID NO: 649221 - DNA, 75 bp, synthetic construct
  source 1..75: mol_type = other DNA
gtccgtctcagcattcagggcggccatctcggtcacgataacaacggcggtattgcccgtggggccacgccggaa

SEQ ID NO: 649222 - DNA, 75 bp, synthetic construct
  source 1..75: mol_type = other DNA
ccggtgatacggccacggataccacggtaaatggcggactgttcaccgccaggggcggcacactggcgggcacca

SEQ ID NO: 649223 - DNA, 75 bp, synthetic construct
  source 1..75: mol_type = other DNA
ctgctggtaacaccaccataaatcagaacggtgaactgagggtacatgccggcggggaagccactgcagtcaccc

SEQ ID NO: 649224 - DNA, 75 bp, synthetic construct
  source 1..75: mol_type = other DNA
acactgaatgggggataccagtatgtgcacaacggaggcacagcctctgacacggttgtaaacagtgacggctgg

SEQ ID NO: 649225 - DNA, 75 bp, synthetic construct
  source 1..75: mol_type = other DNA
ccgtctggagggtgacctgctcagaacagaggttgccggtatgtctctgacgacaggggtgcatggtgccgcagg

SEQ ID NO: 649226 - DNA, 75 bp, synthetic construct
  source 1..75: mol_type = other DNA
tggcgaccagcggtaagggtattcaggtggttgaagccattaacggtgccaccacggaggaaggggcctttgtcc

SEQ ID NO: 649227 - DNA, 75 bp, synthetic construct
  source 1..75: mol_type = other DNA
taacaccaccataaatcagaacggtgaactgagggtacatgccggcggggaagccactgcagtcacccagaacac

SEQ ID NO: 649228 - DNA, 75 bp, synthetic construct
  source 1..75: mol_type = other DNA
ttaaaagtggcgggctggcaacaggaaccatcatcaacaccggcgcagaaggcggcccggattctgacaactcgt

SEQ ID NO: 649229 - DNA, 75 bp, synthetic construct
  source 1..75: mol_type = other DNA
cgccctggaatgtatccgatacatcgcaacacggtcgctgaatgacgctaaaaatattcttgttgctgattgtga

SEQ ID NO: 649230 - DNA, 75 bp, synthetic construct
  source 1..75: mol_type = other DNA
atgcacaataaaaccacaccggacgcagccgccgccgcactcactacgctgatgcacgcgcttattgatattgaa

SEQ ID NO: 649231 - DNA, 75 bp, synthetic construct
  source 1..75: mol_type = other DNA
gtcattaccctttcacgtagcggttcgctgccggaagtgatcgaaaccagccatgactacgccaaagtggtaatg

SEQ ID NO: 649232 - DNA, 75 bp, synthetic construct
  source 1..75: mol_type = other DNA
gtcttttacgcctttctggcaaatttgaatgggtagcgattggatgctgcggcccacacaggcacatacgctcta

SEQ ID NO: 649233 - DNA, 75 bp, synthetic construct
  source 1..75: mol_type = other DNA
ttacgaatacttagggggatcagaggggacgtgtctgaatcgtcgttctcagagataacgcaagcaattggggaa

SEQ ID NO: 649234 - DNA, 75 bp, synthetic construct
  source 1..75: mol_type = other DNA
aagcaggaaatcacgaacgtagtcgcgttttaacgctgttacgcaacgattggggaattcctgttgaacagtgta

SEQ ID NO: 649235 - DNA, 75 bp, synthetic construct
  source 1..75: mol_type = other DNA
caacaagttttgatcttttaattaagtcagttgatgaattcgccgccacaaataaagataatgattttatcttcc

SEQ ID NO: 649236 - DNA, 75 bp, synthetic construct
  source 1..75: mol_type = other DNA
atgttcgctaattttggcagcaaagtaaccattttagagtcagcttcgctgtttttgcctcgggaagatcgggat

SEQ ID NO: 649237 - DNA, 75 bp, synthetic construct
  source 1..75: mol_type = other DNA
gggtacagccttccgttatccgcaccttcagctcccggggagatatgcgtgtggggacctccactgcaggcagcg

SEQ ID NO: 649238 - DNA, 75 bp, synthetic construct
  source 1..75: mol_type = other DNA
atggataccattctggtagtacgaccacgtcaggttcagtttaaatggtccttcgacaaggtgacaggaacggta

SEQ ID NO: 649239 - DNA, 75 bp, synthetic construct
  source 1..75: mol_type = other DNA
ctcaatattcctgtgttcacattgtcatcaatagaaccaattccggttcaaagtctcatggagttcttacacgat

SEQ ID NO: 649240 - DNA, 75 bp, synthetic construct
  source 1..75: mol_type = other DNA
cataattttaaacctaatccctattataagattgagttcgataaaggcaaggaaatagctgattatataaggtca

SEQ ID NO: 649241 - DNA, 75 bp, synthetic construct
  source 1..75: mol_type = other DNA
agccgtaatattctcgtcgtcgtacccagccatgtctttggtgaagtgctgcgccagattaaaccgctgatgcgt

SEQ ID NO: 649242 - DNA, 75 bp, synthetic construct
  source 1..75: mol_type = other DNA
aatcttttacaaagatacaatttaattccaaaaccaggatgcgaattttttcaaaattgtctcgctatttaggta

SEQ ID NO: 649243 - DNA, 75 bp, synthetic construct
  source 1..75: mol_type = other DNA
acgccggattcaacaaaaataacacagtccggcgcatgatatatgcccgccagatccacaaccgatatttcagaa

SEQ ID NO: 649244 - DNA, 75 bp, synthetic construct
  source 1..75: mol_type = other DNA
cgaacttaccggtggacgttatgctgttgcccgccatgttggcgagctggacgatatttcacacacgatatgggg

SEQ ID NO: 649245 - DNA, 75 bp, synthetic construct
  source 1..75: mol_type = other DNA
aattatctgttggcaattatggtattatctgtctttatagtactggccgtgattatatcgatgccatactggaga

SEQ ID NO: 649246 - DNA, 75 bp, synthetic construct
  source 1..75: mol_type = other DNA
gcatgcaggaaaacttagcgaagcaattaacaatattgtatacataaatcagacaaagaagaaaataaaatctgc

SEQ ID NO: 649247 - DNA, 75 bp, synthetic construct
  source 1..75: mol_type = other DNA
gcagcaataattatgatgggacttatcttcatgtggatagtttctggtatgttcgcgttacaacaacaaataagt

SEQ ID NO: 649248 - DNA, 75 bp, synthetic construct
  source 1..75: mol_type = other DNA
ctgtgatcggtgccggctcgtacggcaccgctcttgccagggtaatggcaagaaatggccacgaggttgtcctct

SEQ ID NO: 649249 - DNA, 75 bp, synthetic construct
  source 1..75: mol_type = other DNA
gttttggcgcgaatgcgcgtacggcgctgatcacccgtgggctggctgaaatgtcgcgtcttggcgcggcgctgg

SEQ ID NO: 649250 - DNA, 75 bp, synthetic construct
  source 1..75: mol_type = other DNA
gctgatcacccgtgggctggctgaaatgtcgcgtcttggcgcggcgctgggggccgatcctgccacctttatggg

SEQ ID NO: 649251 - DNA, 75 bp, synthetic construct
  source 1..75: mol_type = other DNA
agtaataaatgaatcaggagtaaaatatgatgtaattcactttggcgcttgccgagtaaatagagaggagaaata

SEQ ID NO: 649252 - DNA, 75 bp, synthetic construct
  source 1..75: mol_type = other DNA
tatatagaaaagaatacgcaacaagtaatgagaagataaaaaactatgctctatattaccatgaacaagcccaaa

SEQ ID NO: 649253 - DNA, 75 bp, synthetic construct
  source 1..75: mol_type = other DNA
acttcatctacgaacacgacaagccggtttatgtgcgcagttactgccgcatacgtttcggtgagctcgaacatg

SEQ ID NO: 649254 - DNA, 75 bp, synthetic construct
  source 1..75: mol_type = other DNA
tggaggggaaagctgataatgtcgttctggaaaatggcggacgtctggatgtactgagcggccataccgccacaa

SEQ ID NO: 649255 - DNA, 75 bp, synthetic construct
  source 1..75: mol_type = other DNA
atgttgctattaatcacggttttctggcgcaagccttacgcgtatttacccctgtctacgacgaaaatcataaac

SEQ ID NO: 649256 - DNA, 75 bp, synthetic construct
  source 1..75: mol_type = other DNA
gcagcggcagctatggcttcgtccgtctggagggtgacctgctcagaacagaggttgccggtatgtctctgacga

SEQ ID NO: 649257 - DNA, 75 bp, synthetic construct
  source 1..75: mol_type = other DNA
tacagtcattaaccgcgacggttaccagagcgttaaaagtggtggactggcaacaggaaccatcatcaacaccgg

SEQ ID NO: 649258 - DNA, 75 bp, synthetic construct
  source 1..75: mol_type = other DNA
aaatcgatcgcatttttgacaaaggcatctcgacaaaaggaagcgagcgaggcgtcggtttagctcttgtcaaac

SEQ ID NO: 649259 - DNA, 75 bp, synthetic construct
  source 1..75: mol_type = other DNA
accaatatgcaaagccttcgctactcgcaccccgaagcgcaacgcattggtcagccttttaaaggggacgatatc

SEQ ID NO: 649260 - DNA, 75 bp, synthetic construct
  source 1..75: mol_type = other DNA
tatccgcaccttcagttcccggggtgacatgagcatgggtacagccgccgccggcagtaacatgacgttctcacc

SEQ ID NO: 649261 - DNA, 75 bp, synthetic construct
  source 1..75: mol_type = other DNA
ctgtacatggtcacgcactggataccacgctgaatgggggataccagtatgtgcacaacggcggtacagcgtctg

SEQ ID NO: 649262 - DNA, 75 bp, synthetic construct
  source 1..75: mol_type = other DNA
acaggctggtatggaatcacattacgggcgctttcgtggttgcctccgaactggcccgctcacggggtaaacgtg

SEQ ID NO: 649263 - DNA, 75 bp, synthetic construct
  source 1..75: mol_type = other DNA
cacagcatgaaagcgtcatcggacaataacgacttccgcgcccggggctggggctggctgggctcactggaaacc

SEQ ID NO: 649264 - DNA, 75 bp, synthetic construct
  source 1..75: mol_type = other DNA
gatggtggtattttctgaaggcgcatcagccagcgcactcggggtcgcaacgtttcagaccgcactgatctccgc

SEQ ID NO: 649265 - DNA, 75 bp, synthetic construct
  source 1..75: mol_type = other DNA
gccgccggcagtaacatgacgttctcaccgtcccggaatggcacgtcactggacctgcaggccggactggaagcc

SEQ ID NO: 649266 - DNA, 75 bp, synthetic construct
  source 1..75: mol_type = other DNA
tgtaatttacagttcgcacattaaaccgactgctgctgatgttggggcgttgtcattatctggaggtcaattgaa

SEQ ID NO: 649267 - DNA, 75 bp, synthetic construct
  source 1..75: mol_type = other DNA
gatggcgatgatgaagccatcttcagaccaatacaaaaatacatcaatggcacatggtataacgtcgcacaggtg

SEQ ID NO: 649268 - DNA, 75 bp, synthetic construct
  source 1..75: mol_type = other DNA
acaaaccgtctggggaatttctccgtgggaaatggcatggcagataacgtcgttctggaaaatggcggtcgcctg

SEQ ID NO: 649269 - DNA, 75 bp, synthetic construct
  source 1..75: mol_type = other DNA
cggctggagggagggaaccagtatgtgcataaggacgggctggcactgaatacggtgattaacgacggtggctgg

SEQ ID NO: 649270 - DNA, 75 bp, synthetic construct
  source 1..75: mol_type = other DNA
tttgtccaggggaacaggctgcaggccggggcctttaactacaccctcaaccgggacagtgatgagagctggtat

SEQ ID NO: 649271 - DNA, 75 bp, synthetic construct
  source 1..75: mol_type = other DNA
atgagcatacaaaacgtcaacgtaaaaccctccaccaaagaaagcacaaccctccggactgactgttttgtgcgc

SEQ ID NO: 649272 - DNA, 75 bp, synthetic construct
  source 1..75: mol_type = other DNA
aagcagcggcagctatggcttcgtccgtctggagggtgacctgctcagaacagaggttgccggtatgtctgtgac

SEQ ID NO: 649273 - DNA, 75 bp, synthetic construct
  source 1..75: mol_type = other DNA
cgctgcaggccggggtgtatgactacaccctgacccgtgacggtgaccagagctggtatctgcgcagtgaaacgc

SEQ ID NO: 649274 - DNA, 75 bp, synthetic construct
  source 1..75: mol_type = other DNA
accaccgttaaccagaaaggcaaactgcaggtgaacgccggtggtacagccacgaatgtcaccctgaagcagggc

SEQ ID NO: 649275 - DNA, 75 bp, synthetic construct
  source 1..75: mol_type = other DNA
ggcggcgaccagacggtacacgggcatgcgctggataccacactgaatggcggttaccagtatgtgcacaacgga

SEQ ID NO: 649276 - DNA, 75 bp, synthetic construct
  source 1..75: mol_type = other DNA
cctgcgcgacagtgccaaacacagtgtgcgtgaattgccggtgaactggtgggtacagccttctgttatccgcac

SEQ ID NO: 649277 - DNA, 75 bp, synthetic construct
  source 1..75: mol_type = other DNA
atgtatcgctatcaacaactggaggcggcgctcgacgacgctccggaaattcgcgaggaggccgtcgatgcgtag

SEQ ID NO: 649278 - DNA, 75 bp, synthetic construct
  source 1..75: mol_type = other DNA
aaccgtctgggcaatttcgcggtggaaaacggtaaggctgacggcgtggttctggaatccggtggtcgcctggat

SEQ ID NO: 649279 - DNA, 75 bp, synthetic construct
  source 1..75: mol_type = other DNA
cctcacagaatggcacatcactggacctgcaggccggactggaagcccgtgtccgggaaaatatcaccctgggcg

SEQ ID NO: 649280 - DNA, 75 bp, synthetic construct
  source 1..75: mol_type = other DNA
tttccattaatagtcagggggaaggtaacgttcgcgtaatatctaaaagtaatgaagttcaatatataaaagcga

SEQ ID NO: 649281 - DNA, 75 bp, synthetic construct
  source 1..75: mol_type = other DNA
ccggtgtggcagttgcgctgtctcttgccaccgccacttcagtcccggccctggctgctgacagtgttgtacagg

SEQ ID NO: 649282 - DNA, 75 bp, synthetic construct
  source 1..75: mol_type = other DNA
gccgtattcggacgatgctggctgaagcgccggtggtgaatgatggtagcgaaccagtgccgcaagggcgtggcg

SEQ ID NO: 649283 - DNA, 75 bp, synthetic construct
  source 1..75: mol_type = other DNA
ttaccgctatcccgtactcagaacgctacggctaccgtccggcgctaatcccccgcccggtcatggccggaacgc

SEQ ID NO: 649284 - DNA, 75 bp, synthetic construct
  source 1..75: mol_type = other DNA
cactgccgcttcgccatccttcagggctgtttgatggtgaaacggaagcggtatgggggctgaataccgcgtaca

SEQ ID NO: 649285 - DNA, 75 bp, synthetic construct
  source 1..75: mol_type = other DNA
agcaatcatgggaggaacgctgctgattggcgtctgctttgtgttgataaataacttaaccgacctgctggtccg

SEQ ID NO: 649286 - DNA, 75 bp, synthetic construct
  source 1..75: mol_type = other DNA
attgtcaaggaaggtggtctggcggatttcaccaccgttaaccagaaaggcaaactgcaggtgaacgccggtggt

SEQ ID NO: 649287 - DNA, 75 bp, synthetic construct
  source 1..75: mol_type = other DNA
tgaggttgtcgagttttacgacgaccagagcggctatgagcgcggactgacgctgccgcttcgccatccttcagg

SEQ ID NO: 649288 - DNA, 75 bp, synthetic construct
  source 1..75: mol_type = other DNA
acagcgtggtggaaaaaagtgtctccacgcgggactacaactaccgtgaagccacggcggaaatgaccacaggcc

SEQ ID NO: 649289 - DNA, 75 bp, synthetic construct
  source 1..75: mol_type = other DNA
atcttccctggtcaggaaagaaatcttgaaagcatatctggctacgacaaaatcgttgtcaaatatggatttgcc

SEQ ID NO: 649290 - DNA, 75 bp, synthetic construct
  source 1..75: mol_type = other DNA
agggaagttcgttccgacaactctgcaggtgaaaaacctgaacgggcagaatggcaccatcagcctgcgtgtacg

SEQ ID NO: 649291 - DNA, 75 bp, synthetic construct
  source 1..75: mol_type = other DNA
aagttcgggcatggcagtgcacaacatgtgcgtgccggtttccgtctgggcagccacaacgatatgacctttggc

SEQ ID NO: 649292 - DNA, 75 bp, synthetic construct
  source 1..75: mol_type = other DNA
cggtaaggacaacgccggttatgtgaagttcgggcatggcagtgcacaacatgtgcgtgccggtttccgtctggg

SEQ ID NO: 649293 - DNA, 75 bp, synthetic construct
  source 1..75: mol_type = other DNA
aactggtgggtacagccttctgttatccgcaccttcagctcccggggagacatgagcatgggtacagccgcagcc

SEQ ID NO: 649294 - DNA, 75 bp, synthetic construct
  source 1..75: mol_type = other DNA
actgacgctggctgccgggggaagtctgagtggcagaacacagctcagtaaaggcgccagtatggtactgaatgg

SEQ ID NO: 649295 - DNA, 75 bp, synthetic construct
  source 1..75: mol_type = other DNA
tcaccctgggcgttcaggccggttatgcccacagcatcagcggcagcagcgctgaaggttataacggtcaggcca

SEQ ID NO: 649296 - DNA, 75 bp, synthetic construct
  source 1..75: mol_type = other DNA
gcgctggagaatgtcagtttcgcactcaaacccggtcagatgctgggtatttgcgggccgaccggttctggcaaa

SEQ ID NO: 649297 - DNA, 75 bp, synthetic construct
  source 1..75: mol_type = other DNA
gggtgctgacgctggtggattcactggtgatgggctgcgctgtgttgattatgatgtctacgcaaattagctggc

SEQ ID NO: 649298 - DNA, 75 bp, synthetic construct
  source 1..75: mol_type = other DNA
ggggctggcgaccagcggtaagggtattcaggtggttgaagccattaacggtgccaccacggaggaaggggcctt

SEQ ID NO: 649299 - DNA, 75 bp, synthetic construct
  source 1..75: mol_type = other DNA
aacgccggtgatacagccacggataccacggtaaatggcggacaactgactgcacatggcggaatcctggaaggt

SEQ ID NO: 649300 - DNA, 75 bp, synthetic construct
  source 1..75: mol_type = other DNA
gcgcacggggctggggctggctgggctcactggaaaccggtctgcccttcagtatcactgacaacctgatgctgg

SEQ ID NO: 649301 - DNA, 75 bp, synthetic construct
  source 1..75: mol_type = other DNA
ttttttggcttggtctgctgatgctggcgctgttctacgccagactgcaatggagtgccgggccgggcaggctgg

SEQ ID NO: 649302 - DNA, 75 bp, synthetic construct
  source 1..75: mol_type = other DNA
ggaaaaaactgcgaaaaaaaattcggaaataattgcgaaacaaaatgcgaatagcattgaggagaagaatattga

SEQ ID NO: 649303 - DNA, 75 bp, synthetic construct
  source 1..75: mol_type = other DNA
tgaaaccgtttattactggtgctgagttgccaccttttaaggaggatgtcttttctaaaacagaagaacaattta

SEQ ID NO: 649304 - DNA, 75 bp, synthetic construct
  source 1..75: mol_type = other DNA
aaggatcagctgtaacctcatcagttatgagtgcggcaagtaattcattccaggctggttacagtcagatgagcg

SEQ ID NO: 649305 - DNA, 75 bp, synthetic construct
  source 1..75: mol_type = other DNA
aagagcattgaggagaagaatattgaaaaaaacaagaaagaaacaaatcctgaagataattttgtcttaaaattc

SEQ ID NO: 649306 - DNA, 75 bp, synthetic construct
  source 1..75: mol_type = other DNA
aaattctggccattcttcatggttgtcctgcagagtccatcgaagtcattaagaatgcgaaacgaacggggcaat

SEQ ID NO: 649307 - DNA, 75 bp, synthetic construct
  source 1..75: mol_type = other DNA
acgcttattattctaaacgtacaaaacaattagagaagaaaattgccgatgcggggtttataacagggaaggtta

SEQ ID NO: 649308 - DNA, 75 bp, synthetic construct
  source 1..75: mol_type = other DNA
agtgagaaatgtcgatggcattcctatttttattgcggcgatgggaactgtcaccacgaaccttagccagggctt

SEQ ID NO: 649309 - DNA, 75 bp, synthetic construct
  source 1..75: mol_type = other DNA
attttgctgacgaggctattattaccaccaacccggaagtctcttccgtccgcgactccgaccgtattttaggca

SEQ ID NO: 649310 - DNA, 75 bp, synthetic construct
  source 1..75: mol_type = other DNA
cgataaagatgcccttactcgcgaaggcgtcgctaaagttcttgatgatctgaaagcgatggattttgaatttat

SEQ ID NO: 649311 - DNA, 75 bp, synthetic construct
  source 1..75: mol_type = other DNA
gggtattaacacgattgcacaggcgcaggatcgcaccccagaacatgtaaatacgtccagcgtaatgagcgctga

SEQ ID NO: 649312 - DNA, 75 bp, synthetic construct
  source 1..75: mol_type = other DNA
atgaaagtctcttaactgatttgagtaaagctattacgactcaattgactgaaaactcaggcctgactgatcaaa

SEQ ID NO: 649313 - DNA, 75 bp, synthetic construct
  source 1..75: mol_type = other DNA
cgagctcgctattgggcaaggttggaaatcacctgcaaatgtcagatggtgttagcgcggtgaccagcaggtata

SEQ ID NO: 649314 - DNA, 75 bp, synthetic construct
  source 1..75: mol_type = other DNA
tacaagggcatttactcgccgctttggtatatctcctgttgcatatcgaaaactcgctaaggaagaagtgagatg

SEQ ID NO: 649315 - DNA, 75 bp, synthetic construct
  source 1..75: mol_type = other DNA
acagatgctgaatgaacattacgatgtcaccacagcagcctatgctgtcggttacgaaagctatcccatttcagt

SEQ ID NO: 649316 - DNA, 75 bp, synthetic construct
  source 1..75: mol_type = other DNA
cattgagtttaccagtaccaataaagcaataacgccggagtcggtgctgatgcaggacggcgcattcagcctgac

SEQ ID NO: 649317 - DNA, 75 bp, synthetic construct
  source 1..75: mol_type = other DNA
aattgaggttatcgagttttacgacgaccagagtggctatgagcgcgggctgacgttgccactgcgccatccttc

SEQ ID NO: 649318 - DNA, 75 bp, synthetic construct
  source 1..75: mol_type = other DNA
accgttgctctgacgctactcggcctgctgctgattacctttgcgctttcggctctctcaccggtcgatcgcgta

SEQ ID NO: 649319 - DNA, 75 bp, synthetic construct
  source 1..75: mol_type = other DNA
tcctgcgcgagcggcaccagatgcgcggtcaggacttcgtgtttaacctcaaaagcgcatacccgtcccgcgaac

SEQ ID NO: 649320 - DNA, 75 bp, synthetic construct
  source 1..75: mol_type = other DNA
cctgaaaagcccggtggacgtgctgacttttacaggccacgaacagctcagctcacccttccgctacgacattga

SEQ ID NO: 649321 - DNA, 75 bp, synthetic construct
  source 1..75: mol_type = other DNA
tccgattcgtttggtggtaacccaccattatattcgtgcggtcttagtgcgctgtaatatccaacgatatagtcc

SEQ ID NO: 649322 - DNA, 75 bp, synthetic construct
  source 1..75: mol_type = other DNA
actaccggaagcgccgccgttacacacactgccactggcaaccaaagtcccggaacccttaccgccgctggaagg

SEQ ID NO: 649323 - DNA, 75 bp, synthetic construct
  source 1..75: mol_type = other DNA
atgccagcaccggcactgtacgatataaacatccggtaccggggatacgaatggaatgacgaatacgccagaaaa

SEQ ID NO: 649324 - DNA, 75 bp, synthetic construct
  source 1..75: mol_type = other DNA
atttattcattttatccaaacagaatagttaactctatcgaaggcggagccttgagggtaaaaaaagaaaaacac

SEQ ID NO: 649325 - DNA, 75 bp, synthetic construct
  source 1..75: mol_type = other DNA
aaccaatagtagaccacaacaagtttatatctatttttctgctattgatgtttttgccggtcgagtaaatctggc

SEQ ID NO: 649326 - DNA, 75 bp, synthetic construct
  source 1..75: mol_type = other DNA
ggctccggtgctgttgatattcttgcagtacaggaagccggaagtccgccatcaactgcaatagacacaggtcgt

SEQ ID NO: 649327 - DNA, 75 bp, synthetic construct
  source 1..75: mol_type = other DNA
caatccgtcgcgccaccactgccagcggcaaccgcccgacctatgaggccagccgcagcgaagaagccagccacg

SEQ ID NO: 649328 - DNA, 75 bp, synthetic construct
  source 1..75: mol_type = other DNA
ccacgcttaccctttccgggaaaacggtgaataacgataccctgaccatccatgaaggtgatgcactcctgcagg

SEQ ID NO: 649329 - DNA, 75 bp, synthetic construct
  source 1..75: mol_type = other DNA
cccggatatggcgcagaacaatgctgacagactggtcattgacggtggcagggcaaccggaaaaaccatcctgaa

SEQ ID NO: 649330 - DNA, 75 bp, synthetic construct
  source 1..75: mol_type = other DNA
ggcaccatcagcctgcgtgtacgcccggatatggcacagaacaatgctgacagactggtcattgacggtggcagg

SEQ ID NO: 649331 - DNA, 75 bp, synthetic construct
  source 1..75: mol_type = other DNA
gaacgccggtgatacggccacggataccacggtaaatggcggactgttcaccgccaggggcggcacactggcggg

SEQ ID NO: 649332 - DNA, 75 bp, synthetic construct
  source 1..75: mol_type = other DNA
gggctggcgaccagcggtaagggtattcaggtggttgaagccattaacggtgccaccacggaggaaggggctttt

SEQ ID NO: 649333 - DNA, 75 bp, synthetic construct
  source 1..75: mol_type = other DNA
tggcggtattgcccgtggggccacgccggaaagcagcggcagctatggattcgtccgtctggagggtgacctgat

SEQ ID NO: 649334 - DNA, 75 bp, synthetic construct
  source 1..75: mol_type = other DNA
aaccgtctgggcaatttcgcggtggaaaacggtaaggctgacggtgttgttctggaatccggcggtcgtctggat

SEQ ID NO: 649335 - DNA, 75 bp, synthetic construct
  source 1..75: mol_type = other DNA
aaccgtgacagcgatgaagactggtacctgcgcagtgaagatgcgtatcgttctgaagtccccctgtatgcctcc

SEQ ID NO: 649336 - DNA, 75 bp, synthetic construct
  source 1..75: mol_type = other DNA
ggcgaccaccggtaagggtattcaggtggttgaggccattaacggtgccaccacggaggaaggggcttttgtcca

SEQ ID NO: 649337 - DNA, 75 bp, synthetic construct
  source 1..75: mol_type = other DNA
ttcaggtggttgaagccattaacggtgccaccacggaggaaggggcctttgtccaggggaacaggctgcaggccg

SEQ ID NO: 649338 - DNA, 75 bp, synthetic construct
  source 1..75: mol_type = other DNA
cgccaaagaagtcgaggtggaactgaaaggcgatccgatggtgcttcctaacggagccacgctttacttcctcgg

SEQ ID NO: 649339 - DNA, 75 bp, synthetic construct
  source 1..75: mol_type = other DNA
actggaagcccgtgtccgggaaaatatcaccctgggcgttcaggcaggttatgtccacagcgtcagcggcagcag

SEQ ID NO: 649340 - DNA, 75 bp, synthetic construct
  source 1..75: mol_type = other DNA
ccttcagtatcactgacaacctgatgctggagccacaactgcagtacacctggcaggggctctccctggatgacg

SEQ ID NO: 649341 - DNA, 75 bp, synthetic construct
  source 1..75: mol_type = other DNA
gccacggataccacggtaaatggcggactgttcaccgccaggggcggcacactggcgggcaccaccacgctgaat

SEQ ID NO: 649342 - DNA, 75 bp, synthetic construct
  source 1..75: mol_type = other DNA
cctgagccgtgctgttgcaaaaggcgacgccccggtaacgttccataaactgaccaccagtaacctcaccggtca

SEQ ID NO: 649343 - DNA, 75 bp, synthetic construct
  source 1..75: mol_type = other DNA
cgtgcacgacagattcaggcctggctgcgcagcgatctgatgcccatccgcgaagagcgccctacggacgttgtc

SEQ ID NO: 649344 - DNA, 75 bp, synthetic construct
  source 1..75: mol_type = other DNA
tgccgttattacaaatcgatgattttgagttgagtgaatcttctgccattgcggagtatctggaagatcgatttg

SEQ ID NO: 649345 - DNA, 75 bp, synthetic construct
  source 1..75: mol_type = other DNA
agggcggtcatctcgggcacgataacaacggtggtattgcccgtggggccacgccggaaagcagcggcagctatg

SEQ ID NO: 649346 - DNA, 75 bp, synthetic construct
  source 1..75: mol_type = other DNA
acaggctggtatggaatcacattacgggcaccctggtggtggcttccgaactggcccgctcacggggaaaacgca

SEQ ID NO: 649347 - DNA, 75 bp, synthetic construct
  source 1..75: mol_type = other DNA
aaccgtctgggcaatttcacggtggaaaacggtaatgctgacggtgttgttctggagtccggcggtcgcctggat

SEQ ID NO: 649348 - DNA, 75 bp, synthetic construct
  source 1..75: mol_type = other DNA
tactccctcaaccgggacagtgatgagagctggtatctgcgcagtgaaaatgcttatcgtgcagaagtctgtagt

SEQ ID NO: 649349 - DNA, 75 bp, synthetic construct
  source 1..75: mol_type = other DNA
aaccgtctggggagtttctccgtgggaaatggcatggcagataacgtcgttctggaaaatggcggtcgtctggat

SEQ ID NO: 649350 - DNA, 75 bp, synthetic construct
  source 1..75: mol_type = other DNA
tactgctgcaactgtcaccggcacaaaccgtctggggagtttctccgtgggaaatggcatggcagataacgtcgt

SEQ ID NO: 649351 - DNA, 75 bp, synthetic construct
  source 1..75: mol_type = other DNA
ctgcgcgacagtgcaaaacaccgtgtgagtgaactgccggtgaactggtgggtacagccttctgttatccgcact

SEQ ID NO: 649352 - DNA, 75 bp, synthetic construct
  source 1..75: mol_type = other DNA
aaccgtgacagcgatgaagactggtacctgcgcagtgaagatgcttatcgttctgaagtcccccggtatgcctcc

SEQ ID NO: 649353 - DNA, 75 bp, synthetic construct
  source 1..75: mol_type = other DNA
ctagccatattaacaataattctccttttgcattgcctcatcataattagacaaaacattagaatattgctaaaa

SEQ ID NO: 649354 - DNA, 75 bp, synthetic construct
  source 1..75: mol_type = other DNA
gtgcgtgaactgccggtgaactggtgggtacagccttctgttatccgcaccttcagctcccggggggacatgagc

SEQ ID NO: 649355 - DNA, 75 bp, synthetic construct
  source 1..75: mol_type = other DNA
aacgctttaagctggcacaggcggcgttttccagtcttaatgaccgcacccaggaaagcctcaccagtatccgca

SEQ ID NO: 649356 - DNA, 75 bp, synthetic construct
  source 1..75: mol_type = other DNA
acttccgcgcccggggccggggctggctgggttcactggaaaccggtctgcccttcagtatcactgacaacctga

SEQ ID NO: 649357 - DNA, 75 bp, synthetic construct
  source 1..75: mol_type = other DNA
atagaaaattaaaacatcaatacgtgatactgcttggattttctgccctagtattactggggctgtttttgttat

SEQ ID NO: 649358 - DNA, 75 bp, synthetic construct
  source 1..75: mol_type = other DNA
cgcgtggtgtttgccgccggagaaggggtgctgacgctggttgattcgctggtgatgggctgtgctgtgcttatt

SEQ ID NO: 649359 - DNA, 75 bp, synthetic construct
  source 1..75: mol_type = other DNA
ggcggggaagccactgcagtcacccagaacacgggcggtgcactggttaccagtactgctgcaactgtcaccggc

SEQ ID NO: 649360 - DNA, 75 bp, synthetic construct
  source 1..75: mol_type = other DNA
aaggcgccagcatggtactgaatggtgatgtggtcagtaccggcgatattgttaacgcaggagagattcactttg

SEQ ID NO: 649361 - DNA, 75 bp, synthetic construct
  source 1..75: mol_type = other DNA
ataatcagacgacacaggaagccgcgctgagccgtgctgttgcaaaaagtaactccccggtaacgttccataaac

SEQ ID NO: 649362 - DNA, 75 bp, synthetic construct
  source 1..75: mol_type = other DNA
ctgcgcagtgaaaatgcttatcgtgcagaagtccccctgtatgcctccatgctgacacaggcaatggactatgac

SEQ ID NO: 649363 - DNA, 75 bp, synthetic construct
  source 1..75: mol_type = other DNA
tgctgaagtccccctgtatgcctccatgctgacacaggcaatggactatgaccggattctggctggctcccgcag

SEQ ID NO: 649364 - DNA, 75 bp, synthetic construct
  source 1..75: mol_type = other DNA
aaccgtctgggcaatttcacggtggaaacggtaaggctgacggcgttgttctggagtccggcggtcgcctggatg

SEQ ID NO: 649365 - DNA, 75 bp, synthetic construct
  source 1..75: mol_type = other DNA
agcagggcggcgtactggtcaccagtacggcggcaaccgtcaccggcagcaaccgtctgggcaatttcgcggtgg

SEQ ID NO: 649366 - DNA, 75 bp, synthetic construct
  source 1..75: mol_type = other DNA
gctggatgtccgcaacggtggtaccgccaccaccgtatccatgggaaatggcggtgtactgctggccgattccgg

SEQ ID NO: 649367 - DNA, 75 bp, synthetic construct
  source 1..75: mol_type = other DNA
aaccgtgacagcgatgaagactggtacctgcgcagtgaatatgcctatcgttctgaagtccccccgtatgcctcc

SEQ ID NO: 649368 - DNA, 75 bp, synthetic construct
  source 1..75: mol_type = other DNA
gctggaaaatggcggcagctttacggttaatgccggaggactggccagcaacaccactgtcggacatcgtggaac

SEQ ID NO: 649369 - DNA, 75 bp, synthetic construct
  source 1..75: mol_type = other DNA
aatattgccgtgcgctgcgccagcgatttacgcatcgtgacaatcggctgtagcgagcatctgctggataaacaa

SEQ ID NO: 649370 - DNA, 75 bp, synthetic construct
  source 1..75: mol_type = other DNA
tgaggaactcaaggcgataccacatcagcttattatggataaaatttttgatgttctgcgcgcctatcgttacgg

SEQ ID NO: 649371 - DNA, 75 bp, synthetic construct
  source 1..75: mol_type = other DNA
ttctcggcggcgatcatctggggccaaactgctggcagcaagaaaatgcggatgcggcgatggaaaaatccgtcg

SEQ ID NO: 649372 - DNA, 75 bp, synthetic construct
  source 1..75: mol_type = other DNA
tggaaaccgctttattgctatgacaggcgcaaagaactttgcctgttttgatgaaaatggtgagtctggtctttg

SEQ ID NO: 649373 - DNA, 75 bp, synthetic construct
  source 1..75: mol_type = other DNA
gctcagcgcggtacagccctgaagctgaccggcagcactgtgctgaacggtgccattgaccccacgaatgtcact

SEQ ID NO: 649374 - DNA, 75 bp, synthetic construct
  source 1..75: mol_type = other DNA
tggaatatccccgataacgccacggttcagtcggtggtggatgacctcagccatgccggacagattcatttcacc

SEQ ID NO: 649375 - DNA, 75 bp, synthetic construct
  source 1..75: mol_type = other DNA
gttgaagtccatggtcgggttgaaatcaataaattttacgatgcaacttcacaagaaccggcgctggcagcaagg

SEQ ID NO: 649376 - DNA, 75 bp, synthetic construct
  source 1..75: mol_type = other DNA
tgaagcctatgagctgattggccttaacgctgaaagaatgtcgtcagcgatcgccagtggcggcgcggtcgcgcg

SEQ ID NO: 649377 - DNA, 75 bp, synthetic construct
  source 1..75: mol_type = other DNA
caggccggaaatcagcggatttttagaaattttcggcaacccacgcagttataaatcaagtttccttgcgcgttg

SEQ ID NO: 649378 - DNA, 75 bp, synthetic construct
  source 1..75: mol_type = other DNA
acgttatccctttactcagtttcacatctcccgacaaatctatatgggtgtctgggattcgctattgtacgaagg

SEQ ID NO: 649379 - DNA, 75 bp, synthetic construct
  source 1..75: mol_type = other DNA
gctttgttcaggggttaccactggcaaataaggatcaacagggggaggtaatctatggtgaaatttatctggcct

SEQ ID NO: 649380 - DNA, 75 bp, synthetic construct
  source 1..75: mol_type = other DNA
attatctggaagggatacccgcagctaaatcactgtacgaaaagtgtcagtcagcgacctatccgcaattgctgg

SEQ ID NO: 649381 - DNA, 75 bp, synthetic construct
  source 1..75: mol_type = other DNA
cggcagcgcagaagacggccagcgctacagccgtatgattcagagcatccgtgcgtcaggtgcggccacggatat

SEQ ID NO: 649382 - DNA, 75 bp, synthetic construct
  source 1..75: mol_type = other DNA
acggttgtcgatctcagcgggcagatcctctgtcctggttttattgatcaacacgtccatttgattggtggtggc

SEQ ID NO: 649383 - DNA, 75 bp, synthetic construct
  source 1..75: mol_type = other DNA
gaaaaatggcaacgaccgatgatgcgaattcgtttgaaatcggtgaaaaaaccgtccgctggcgcaggcaactcg

SEQ ID NO: 649384 - DNA, 75 bp, synthetic construct
  source 1..75: mol_type = other DNA
caatggtcagcgcattgcagacgttgatgctgacacctttcacatcattcgatggatccccaattcattattggt

SEQ ID NO: 649385 - DNA, 75 bp, synthetic construct
  source 1..75: mol_type = other DNA
aggcttatgaaagcatagggcttaatgcggcgcagatgtcttcggctattgccagtggcggggtcgccgcccgtg

SEQ ID NO: 649386 - DNA, 75 bp, synthetic construct
  source 1..75: mol_type = other DNA
accgttgttgatctcagtgggcagctcctctgcccagggttcattgatcagcacgtccatttgattggcggcggc

SEQ ID NO: 649387 - DNA, 75 bp, synthetic construct
  source 1..75: mol_type = other DNA
tgcccgcgccgttcaggcgggtattccgctggcacgcgtcaccctcagctccgacggcaacggtagccagccgtt

SEQ ID NO: 649388 - DNA, 75 bp, synthetic construct
  source 1..75: mol_type = other DNA
ctctgaatttcagcagtggatggcaaaacgccgcaggtggcttatcgcgcatggaaaattacttgctgaagatct

SEQ ID NO: 649389 - DNA, 75 bp, synthetic construct
  source 1..75: mol_type = other DNA
gacaaggcgctgttcggcgatttaaccgaccgtgccgattttgccgcgctgctgcgcgaaaaaattgctgacgtc

SEQ ID NO: 649390 - DNA, 75 bp, synthetic construct
  source 1..75: mol_type = other DNA
ggacactaaccagcgcgttgccgccgatggtttctctaaaattccggcgatgattgcgccaactttgcgtgaatg

SEQ ID NO: 649391 - DNA, 75 bp, synthetic construct
  source 1..75: mol_type = other DNA
caggcactcagtgcacagaaaggtcgctatgtgctggaaaccgtcagcccggaaggggtaagcgaatatgaagag

SEQ ID NO: 649392 - DNA, 75 bp, synthetic construct
  source 1..75: mol_type = other DNA
cccggtgccacgttgttggacttgggcgatttggaagaagaactgaaatcgctgctcggcgttgacgtcgatctg

SEQ ID NO: 649393 - DNA, 75 bp, synthetic construct
  source 1..75: mol_type = other DNA
tgaagcgaagcgcagtgcgtgaagcggtaggccgctttcgcgccgcgaacccgcgcgtcttcggctcggtgctgc

SEQ ID NO: 649394 - DNA, 75 bp, synthetic construct
  source 1..75: mol_type = other DNA
tggtttgtgcactcttcagtatcacggcagttctcgggtgtctggcgtttatctgggctattgcatatatccttc

SEQ ID NO: 649395 - DNA, 75 bp, synthetic construct
  source 1..75: mol_type = other DNA
agaacaaactgaaggtgaatgagaagaagagcgcggtggcgcgcccgtgggatcggaagttcctcgggtacagtg

SEQ ID NO: 649396 - DNA, 75 bp, synthetic construct
  source 1..75: mol_type = other DNA
tcgtcgcgcactggtctttttcgcccagcaaaaccagtgggatctcagtaattacgacaccttcgacatgaaatc

SEQ ID NO: 649397 - DNA, 75 bp, synthetic construct
  source 1..75: mol_type = other DNA
tattcggcagcctgatggccgtttgcgcaaacagttacgcgctcagcgagtctgaagccgaagatatggccgatt

SEQ ID NO: 649398 - DNA, 75 bp, synthetic construct
  source 1..75: mol_type = other DNA
cgcctgctggtggggggggatgcgcgctggagtattgcagcgggcaatattcgtaacgatgccgaacatgttgtg

SEQ ID NO: 649399 - DNA, 75 bp, synthetic construct
  source 1..75: mol_type = other DNA
agtacttacaattggttcgatatagccgaattgttagctaattcctcagttcatcagtacacaaaaaattatttt

SEQ ID NO: 649400 - DNA, 75 bp, synthetic construct
  source 1..75: mol_type = other DNA
tggatcaaacggaaactgcggtgcctgttgtggaggcagtggaagaggccgggaacccggacgaagaacccgcaa

SEQ ID NO: 649401 - DNA, 75 bp, synthetic construct
  source 1..75: mol_type = other DNA
aatcgccatgtccggagcaaaccgttgagcaggatgatggcatagtcattaagaccgaagcatcagagtgccacc

SEQ ID NO: 649402 - DNA, 75 bp, synthetic construct
  source 1..75: mol_type = other DNA
ggcaggcgctgccggaagatctccgcgtaagtccgcatcgttatctggcgacgaacagtccgcaggggccgtggt

SEQ ID NO: 649403 - DNA, 75 bp, synthetic construct
  source 1..75: mol_type = other DNA
ggcaggcgctgccggaagaactccgcttaagtccgcatcgttatctggcgacgaacagtccgcaggggccgtggt

SEQ ID NO: 649404 - DNA, 75 bp, synthetic construct
  source 1..75: mol_type = other DNA
ggcaggcgctgccggaagaacttcgcctaagtccgcatcgttatctggcgacgaacagtccgcaggggccgtggt

SEQ ID NO: 649405 - DNA, 75 bp, synthetic construct
  source 1..75: mol_type = other DNA
gtaaagcaagtaatgatacaaaagaagctgctggccgttgtgacctcgttgaaaccgataatagttgtgtgggtg

SEQ ID NO: 649406 - DNA, 75 bp, synthetic construct
  source 1..75: mol_type = other DNA
ttaaataaaataaatagccaatctatttgcgaagataaagagttcgctggtttaatatgtaaggataatagtggc

SEQ ID NO: 649407 - DNA, 75 bp, synthetic construct
  source 1..75: mol_type = other DNA
ggcaggcgctgccggaagatctgcgcctaagtccgcatcgttatctggcgacgaacagtccgcaggggccgtggt

SEQ ID NO: 649408 - DNA, 75 bp, synthetic construct
  source 1..75: mol_type = other DNA
aagaagacgcagaagttctgcgctttgatagttttgacgatgccgttgaatgctgcgcagacctgaatattccct

SEQ ID NO: 649409 - DNA, 75 bp, synthetic construct
  source 1..75: mol_type = other DNA
atggcccgttcagctaaaccccgaaaacgaaaaccagcccctcaaagaagcaaactctcccgctatgtcgtgacg

SEQ ID NO: 649410 - DNA, 75 bp, synthetic construct
  source 1..75: mol_type = other DNA
tatctatgtgggaggatgcaaaatcgggggcatgtactaatggtctttgcggcacactatccgctatgataggtc

SEQ ID NO: 649411 - DNA, 75 bp, synthetic construct
  source 1..75: mol_type = other DNA
gtgcgcctaatgttttcaaaacattcttcagagcattaagcccttacgactacacactgtattgcaggaagtggg

SEQ ID NO: 649412 - DNA, 75 bp, synthetic construct
  source 1..75: mol_type = other DNA
cagccatctcagcgaaggccaccgggtgacggtgcattacgggtatgatgagaaaggccgcctgaccggtgagcg

SEQ ID NO: 649413 - DNA, 75 bp, synthetic construct
  source 1..75: mol_type = other DNA
agccgccggtgaattcagcggcgaaatcaccggcgtgacggatggtgccgggcgtcacttccggctggtactgac

SEQ ID NO: 649414 - DNA, 75 bp, synthetic construct
  source 1..75: mol_type = other DNA
atctggcgctgatcccgctggtgattttgtggtttggcattgatgaatccgcaaaaatctttctggtggcgctcg

SEQ ID NO: 649415 - DNA, 75 bp, synthetic construct
  source 1..75: mol_type = other DNA
caacgatcctttgatgcgttgccagagcgcgcgcggtaccagccgggtgatctgcttttcaccggatcacagtaa

SEQ ID NO: 649416 - DNA, 75 bp, synthetic construct
  source 1..75: mol_type = other DNA
tttggctatatcaaaattatttaatatagaacaaccaatcactatttttaacattgatacaattaggcctaattt

SEQ ID NO: 649417 - DNA, 75 bp, synthetic construct
  source 1..75: mol_type = other DNA
tgaagtgaagaaaactcgccgctctctaggggcaaataaaattggagaggaactgctcattgatatggcccgtta

SEQ ID NO: 649418 - DNA, 75 bp, synthetic construct
  source 1..75: mol_type = other DNA
tcaccatggctgagagtttcgcctgggacgatcgctatgtatatgcctggcggggccagcgaccttccagaactg

SEQ ID NO: 649419 - DNA, 75 bp, synthetic construct
  source 1..75: mol_type = other DNA
attgccaagtttacgggaattaacagacgcgatttgtaccctgtggaaaatatctctggcgagcaggaacgatat

SEQ ID NO: 649420 - DNA, 75 bp, synthetic construct
  source 1..75: mol_type = other DNA
acgcattgaggatcttgaaaggcaagttcgatttcttgaaacgcggcttgtgtatctacaaaagctgaaagcctt

SEQ ID NO: 649421 - DNA, 75 bp, synthetic construct
  source 1..75: mol_type = other DNA
agacgcaaatactcatgattggcgcttaaagatcattggagacggagaagagctgaaccatttaaattctctaat

SEQ ID NO: 649422 - DNA, 75 bp, synthetic construct
  source 1..75: mol_type = other DNA
atttaagttcgaaaggtggtattgagcgtgtttcagtagcattagccaatggattggctaaattttatgatgtca

SEQ ID NO: 649423 - DNA, 75 bp, synthetic construct
  source 1..75: mol_type = other DNA
ggtggctcactgggtttgattctgggtctgattagcgggctgtcgcactggggtgaacgactgctggacacttca

SEQ ID NO: 649424 - DNA, 75 bp, synthetic construct
  source 1..75: mol_type = other DNA
tagttaaacattacaaacctatttttgatgcagccagagaagatttagctcactccgtcacggctcagactatgg

SEQ ID NO: 649425 - DNA, 75 bp, synthetic construct
  source 1..75: mol_type = other DNA
tgagattaatgacgagtatgatgtacaggatcttgttcatgctcttctgctgctgcattttgatgatgtcagacc

SEQ ID NO: 649426 - DNA, 75 bp, synthetic construct
  source 1..75: mol_type = other DNA
taaatacagtgactgggttgagtcatctgataacgatgaacattatgacctggagaaaagagtcacatatcgtga

SEQ ID NO: 649427 - DNA, 75 bp, synthetic construct
  source 1..75: mol_type = other DNA
tcatggagtggccggtgtttggcagccgctggccagaatctttactggcagcgaaaaccggattgcaggtctgga

SEQ ID NO: 649428 - DNA, 75 bp, synthetic construct
  source 1..75: mol_type = other DNA
atgggtatgccatggttccagctcaggcaaacgcagttcccggagccggtaatggcattttccagcaattacgag

SEQ ID NO: 649429 - DNA, 75 bp, synthetic construct
  source 1..75: mol_type = other DNA
tctgagccctattacgccaacgtggcagttgaaaagctccagacagccacccaggatacgcgtgacattatagct

SEQ ID NO: 649430 - DNA, 75 bp, synthetic construct
  source 1..75: mol_type = other DNA
aaagtggcgcagagcgacagcgtgatcaacgggttaaaagaagagaatcagaagctaaaaaacgaactgattgtc

SEQ ID NO: 649431 - DNA, 75 bp, synthetic construct
  source 1..75: mol_type = other DNA
ttgtccagggaatgatcaaagccaccaccgatgcctggctgaaaggctgggacgagcgcaatggtggtaacctga

SEQ ID NO: 649432 - DNA, 75 bp, synthetic construct
  source 1..75: mol_type = other DNA
cctgatagaattaaaagggataacaaaataaatagaatatttaaatttacgggtattacactgttaaggtcaaga

SEQ ID NO: 649433 - DNA, 75 bp, synthetic construct
  source 1..75: mol_type = other DNA
ccggactctgccgacaggtatttctggaagccggacaggaggtggaaatgccggaaccggagaagaaaaaacaac

SEQ ID NO: 649434 - DNA, 75 bp, synthetic construct
  source 1..75: mol_type = other DNA
atcctgcgtccgggcgaggagaaaaaactgcgccgtccgctcaataaggaaaccacggcgctggggatccttgcc

SEQ ID NO: 649435 - DNA, 75 bp, synthetic construct
  source 1..75: mol_type = other DNA
tttgcattgagtgtgaagtgccaattccgccagcacgccgccgcgccattccgggagtgcagctttgcattacct

SEQ ID NO: 649436 - DNA, 75 bp, synthetic construct
  source 1..75: mol_type = other DNA
agtgcgtggagactatcgaaggcgatattcttcagttcattaaagatcgcattgcggcgaaggactatgttgata

SEQ ID NO: 649437 - DNA, 75 bp, synthetic construct
  source 1..75: mol_type = other DNA
gcgtcattgagctttatttcaaatatggtaagaagctggctcccgtcgtacgcgaactgggctaccgccaacaat

SEQ ID NO: 649438 - DNA, 75 bp, synthetic construct
  source 1..75: mol_type = other DNA
aaggtgccgtggcctcgttgacgtcggtggcgaaactgccgttcacctacgccaaagacgggatctcgtacacct

SEQ ID NO: 649439 - DNA, 75 bp, synthetic construct
  source 1..75: mol_type = other DNA
ttacacgtcataaaacgcatggcacctgataaaaatgttcagtcatgtgattggttccctggcttgaatgaaaga

SEQ ID NO: 649440 - DNA, 75 bp, synthetic construct
  source 1..75: mol_type = other DNA
ccttgaagcgaaatattctgaagcaagagtactattggagaaagtaaaccaaacaactccaatgaagttccatgt

SEQ ID NO: 649441 - DNA, 75 bp, synthetic construct
  source 1..75: mol_type = other DNA
tcccgtttttcaaactaaacctgctcaggactggtcaagtgcggtacttgaagcaatgtccgatcaatcttacca

SEQ ID NO: 649442 - DNA, 75 bp, synthetic construct
  source 1..75: mol_type = other DNA
aaaccgcttttgaacgccgtgccgagatcacgccagccaatgcagacaccgttacccgcgaagcggtaaatcagg

SEQ ID NO: 649443 - DNA, 75 bp, synthetic construct
  source 1..75: mol_type = other DNA
gcgaaaactttgccgtcttcctgaaagcgattattccagttgctgaagaagtcggcgtgcgtatggctgttcacc

SEQ ID NO: 649444 - DNA, 75 bp, synthetic construct
  source 1..75: mol_type = other DNA
aaaccttccacgaagcggcgcacctgaacggtgacgttgatatgtacgaagtggtgaaagcgattgttgaagaag

SEQ ID NO: 649445 - DNA, 75 bp, synthetic construct
  source 1..75: mol_type = other DNA
agtggttgcagtaagcaaactgggtgacattgaataccgtgaagttccagtagaagtgaaaccagaagttcgcgt

SEQ ID NO: 649446 - DNA, 75 bp, synthetic construct
  source 1..75: mol_type = other DNA
acaggatataaccgttacggtcgttccttcattgatgaagctttcggcggattaataagagcagaaaatttcaca

SEQ ID NO: 649447 - DNA, 75 bp, synthetic construct
  source 1..75: mol_type = other DNA
ctctttggggttggtatatacccggtcacagccttccttttgttggcaatcacctgggtgattcgcgctatcgga

SEQ ID NO: 649448 - DNA, 75 bp, synthetic construct
  source 1..75: mol_type = other DNA
aagtgatgaatatgtcagggaagagcttgatgtaaatgttgctggggtttttccgaggttacgtgacgcattcaa

SEQ ID NO: 649449 - DNA, 75 bp, synthetic construct
  source 1..75: mol_type = other DNA
tcattttgcatgttcttttacctgctatcgaaaatgaaggcttaaccattaaaacccgccgtgatggtgagttaa

SEQ ID NO: 649450 - DNA, 75 bp, synthetic construct
  source 1..75: mol_type = other DNA
ccatcggcgtgcgctacaacgatttcggcgtggtcgagcccatcgtcgccgacatccgcgccatgctggccacgc

SEQ ID NO: 649451 - DNA, 75 bp, synthetic construct
  source 1..75: mol_type = other DNA
gctcttctcctacgatgagtggcgcgaagagcacggcgatagcattgaactggttactgatgatcatcagcgaga

SEQ ID NO: 649452 - DNA, 75 bp, synthetic construct
  source 1..75: mol_type = other DNA
tccggaagcccgacgaatcgcgcttccgggtgtgggcttgtgcgtgacctgccagcaaatcgccgagcttaaatc

SEQ ID NO: 649453 - DNA, 75 bp, synthetic construct
  source 1..75: mol_type = other DNA
acaagccgctgacatgtgacacgctgccgggttatctctcgtccagactgaccccttcatgcgaaccgggagggt

SEQ ID NO: 649454 - DNA, 75 bp, synthetic construct
  source 1..75: mol_type = other DNA
atttcccggaaacctcaagtaccgcattactgacttcgcagcttgaagaagccatcgcccaactggattgtgaag

SEQ ID NO: 649455 - DNA, 75 bp, synthetic construct
  source 1..75: mol_type = other DNA
gtgaagaattccgtgtacaggcgctggagtgtggacaccgagggctgaccagtctggtggacgagttaggccgct

SEQ ID NO: 649456 - DNA, 75 bp, synthetic construct
  source 1..75: mol_type = other DNA
tttgggagggcaggaaacgtgatgctccggacgagacaggggtgaaaaaaaagaggcctgaaataatcagcatgc

SEQ ID NO: 649457 - DNA, 75 bp, synthetic construct
  source 1..75: mol_type = other DNA
tctggctgcttgtgggatatgatcagatggctctgaaagcgtttcaggcatctcactttggtctgatttcccggc

SEQ ID NO: 649458 - DNA, 75 bp, synthetic construct
  source 1..75: mol_type = other DNA
gattggttggactggagcgtgtagatctcatccgagaggttgtatttgaaaatggatattatgattggggatgtg

SEQ ID NO: 649459 - DNA, 75 bp, synthetic construct
  source 1..75: mol_type = other DNA
ccatatccagattaaaaacaattgcttatgatatgaagagtacttttctggagaatgatacacctgtgaatgtaa

SEQ ID NO: 649460 - DNA, 75 bp, synthetic construct
  source 1..75: mol_type = other DNA
cggatagtgtccttacggaaatgcttatgaattattcaggatgttcggaaattacgccgaattcaacggactctt

SEQ ID NO: 649461 - DNA, 75 bp, synthetic construct
  source 1..75: mol_type = other DNA
caacaaaaacgcagactggacagatttcgtcaggtaaataataaaaaggcgcaactccacctcacgtgggaagaa

SEQ ID NO: 649462 - DNA, 75 bp, synthetic construct
  source 1..75: mol_type = other DNA
catgacaccactgaaatcatgaaagaagcggtagcagacctgcaaccactcattaatgaactaatcgacaaggct

SEQ ID NO: 649463 - DNA, 75 bp, synthetic construct
  source 1..75: mol_type = other DNA
tcacacaggcggttattaatctggaatcgacgcgggaagcactgcaattgcttattgaagcgtgcaaacaatccg

SEQ ID NO: 649464 - DNA, 75 bp, synthetic construct
  source 1..75: mol_type = other DNA
agatcaacctgcttgataagagtgattatgttctcgctcatggactgaacaccgacgaccaactggcagttggta

SEQ ID NO: 649465 - DNA, 75 bp, synthetic construct
  source 1..75: mol_type = other DNA
agcaacacttaaaattaatgaaaacgtcagttcactggatgccatattgtcagccgtacccaaaggggtaacgct

SEQ ID NO: 649466 - DNA, 75 bp, synthetic construct
  source 1..75: mol_type = other DNA
aagtggatagacctaccaggtattgaacctgaacaatttcatctgattactggcaatattgcgcaatataaagat

SEQ ID NO: 649467 - DNA, 75 bp, synthetic construct
  source 1..75: mol_type = other DNA
ttatacatggaccgatacagaggtaaggattacgccctccccctgcccggcgaaaacacgcgtcagagaagagaa

SEQ ID NO: 649468 - DNA, 75 bp, synthetic construct
  source 1..75: mol_type = other DNA
gtgaagttcaaaacagagacatcattattccggtgacggatgaatcatgccggaacgcagcagcagaggtgcaaa

SEQ ID NO: 649469 - DNA, 75 bp, synthetic construct
  source 1..75: mol_type = other DNA
gcgccatattcgtgctgcccgtgccaaaacaccgggcgtgtctcgtgtgctttgcattgagtgtgaagcgccaat

SEQ ID NO: 649470 - DNA, 75 bp, synthetic construct
  source 1..75: mol_type = other DNA
agagcgtgcaaattattccagttaacggtccgctaactaaaaacgatcgcttcgcttatgacgatcgcaatgttt

SEQ ID NO: 649471 - DNA, 75 bp, synthetic construct
  source 1..75: mol_type = other DNA
taatcgcggcaaacaacatgcttactttatccgccaattacggtcacgcaagagcgtgcaaattattccagttaa

SEQ ID NO: 649472 - DNA, 75 bp, synthetic construct
  source 1..75: mol_type = other DNA
gagaaagccagagaatccgaacattaatcgcgatgcactccctctgattaatatctcgcgctcaatggatatcag

SEQ ID NO: 649473 - DNA, 75 bp, synthetic construct
  source 1..75: mol_type = other DNA
acccattatgccatccgcctgtgggaagggcgcaaaacggagaaggtttccggtgacggtaaaccccgtccgggt

SEQ ID NO: 649474 - DNA, 75 bp, synthetic construct
  source 1..75: mol_type = other DNA
atgccgcaggcaataaaacgtgccggggggatttaccgggattccctggcggataatccctatgccgatgaagct

SEQ ID NO: 649475 - DNA, 75 bp, synthetic construct
  source 1..75: mol_type = other DNA
cgttattctctggcgtggcaaaatcgttagcaatccaccgggaacccccactgtcgatattgccagctttcaggc

SEQ ID NO: 649476 - DNA, 75 bp, synthetic construct
  source 1..75: mol_type = other DNA
gcgccatatccgtgctgtccgtgccaaaacaccgggcgtgtcacgcgtactttgcattgaatgtgaagcgccaat

SEQ ID NO: 649477 - DNA, 75 bp, synthetic construct
  source 1..75: mol_type = other DNA
ggagtgcagctttgcattacctgtcaggaaatcgcagagctgaaaggcaaacattacaacggaggtgttgtatga

SEQ ID NO: 649478 - DNA, 75 bp, synthetic construct
  source 1..75: mol_type = other DNA
gacggcgaagggatggacgaccttaaagaatacaaccgcaatcagttgcttctgtctggcgttatcaagccgaga

SEQ ID NO: 649479 - DNA, 75 bp, synthetic construct
  source 1..75: mol_type = other DNA
ggagaaacggcaatctatgatgaagagcaaatcaaagatattgtcgacgagctgaccgatggtgcattcgaactg

SEQ ID NO: 649480 - DNA, 75 bp, synthetic construct
  source 1..75: mol_type = other DNA
ggtaaagtcgctgcggcgctgggtgcgactctactgctggagcactgcaagccagatgtgattattaacaccggt

SEQ ID NO: 649481 - DNA, 75 bp, synthetic construct
  source 1..75: mol_type = other DNA
tcggtatcacttttatcttcgttacccacgatcagggcgaagcgttatcgatgtccgatcgtgtggcggttttca

SEQ ID NO: 649482 - DNA, 75 bp, synthetic construct
  source 1..75: mol_type = other DNA
atgtccgatcgtgtggcggttttcaataatggacgcattgaacaggtcgattccccgcgcgatctctatatgcgc

SEQ ID NO: 649483 - DNA, 75 bp, synthetic construct
  source 1..75: mol_type = other DNA
ggccagtcagccagatccggctatggttgctgcgcaaggtcagcttcttgctggtcaggctgaattgcagaaagc

SEQ ID NO: 649484 - DNA, 75 bp, synthetic construct
  source 1..75: mol_type = other DNA
agcaagcgctgccggatggcgcacatattttgattaatgacttccgtatcggcagtcaagttcaggacgatattt

SEQ ID NO: 649485 - DNA, 75 bp, synthetic construct
  source 1..75: mol_type = other DNA
catacgctgcacgtcgtcacatccagactgaaatcgatcgcagactcacccgcgctgcacacatcgcctttatca

SEQ ID NO: 649486 - DNA, 75 bp, synthetic construct
  source 1..75: mol_type = other DNA
atggcaaaccgcaaacagcaccgcgctatcgcggagcgtcgtcacatccagactgaaatcgaccgcagactcacc

SEQ ID NO: 649487 - DNA, 75 bp, synthetic construct
  source 1..75: mol_type = other DNA
ccgacctgaatcttaacgccgtgcgcggtctgattgtcagcggcgacgctttcatcaacggctccgtagcgctgg

SEQ ID NO: 649488 - DNA, 75 bp, synthetic construct
  source 1..75: mol_type = other DNA
ggtaaagtcgctgcggcactgggcgcgactctgctactggaacactgcaagccagatgtgattattaacacgggc

SEQ ID NO: 649489 - DNA, 75 bp, synthetic construct
  source 1..75: mol_type = other DNA
cgcgcatcacgcgtcgcgcaaatcatgtacatcaacatgctgcatgaacacgcacacgcgctgtcagaccgttac

SEQ ID NO: 649490 - DNA, 75 bp, synthetic construct
  source 1..75: mol_type = other DNA
attgaacggcggtgaaaaactgcttgtgagtcaggccaatatgacaggcgaagaactgcctgccacgctcacgcc

SEQ ID NO: 649491 - DNA, 75 bp, synthetic construct
  source 1..75: mol_type = other DNA
tccggaaggagtgatgacggcgttctggacgctctccgccagcggcgaattgtggcagcatctggcgatcagctc

SEQ ID NO: 649492 - DNA, 75 bp, synthetic construct
  source 1..75: mol_type = other DNA
ttccggcagcggaaaatcaaccctgctacgctcgctgtacgccaactatctgcccgacgaagggcaaatccagat

SEQ ID NO: 649493 - DNA, 75 bp, synthetic construct
  source 1..75: mol_type = other DNA
ggtttctcatcacagtaacaatgccggtggcggtactagcagtaactatcatcatggtagcagcgcgcagaatac

SEQ ID NO: 649494 - DNA, 75 bp, synthetic construct
  source 1..75: mol_type = other DNA
agagtacagcccggatgtggtgacgggactcatcacgcgcatcaccacgccggatggcagggcatcggcgtttta

SEQ ID NO: 649495 - DNA, 75 bp, synthetic construct
  source 1..75: mol_type = other DNA
gaaggtcaccggctggccgcactctggcaggcgctgccggaagagcttcgcttaagtccgcatcgttatctggcg

SEQ ID NO: 649496 - DNA, 75 bp, synthetic construct
  source 1..75: mol_type = other DNA
gagtgtgacgcgatgactgagcactattatcgcttacgcgactacgcgctgaactatccagagtgcagcgccatt

SEQ ID NO: 649497 - DNA, 75 bp, synthetic construct
  source 1..75: mol_type = other DNA
atcccgggtattgccgctggctctatctttaccttctcactcacactgggcgattttatcgtcccgcagctggtt

SEQ ID NO: 649498 - DNA, 75 bp, synthetic construct
  source 1..75: mol_type = other DNA
cggacaacaggtgatggtttcctggtcgcgtgatgtgatggtgccgctggttgaggagaggggaatggcgatgaa

SEQ ID NO: 649499 - DNA, 75 bp, synthetic construct
  source 1..75: mol_type = other DNA
gaccggaacatatccgcttcaacacccccggcgaagtgcaggctaatggcacgatccaggcagtgcaatatcagg

SEQ ID NO: 649500 - DNA, 75 bp, synthetic construct
  source 1..75: mol_type = other DNA
cgcagaatacgatgaatggggcaacctgctgaatgaagagaacccgcatcagctgcagcagctcatccgcctgcc

SEQ ID NO: 649501 - DNA, 75 bp, synthetic construct
  source 1..75: mol_type = other DNA
aacggcgaactcatccgcatcagcagcccgcgccagacccggagttacagctacagcaccaccggcaggctgacc

SEQ ID NO: 649502 - DNA, 75 bp, synthetic construct
  source 1..75: mol_type = other DNA
taatggacgcattgagcaggtcgattccccgcgcgatctctatatgcgcccgcgcacgccgtttgttgccggatt

SEQ ID NO: 649503 - DNA, 75 bp, synthetic construct
  source 1..75: mol_type = other DNA
aaggccaccgtgttgccgtccactatggctatgacgataaaggccgcctgaccggcgaacggcagacggtggaga

SEQ ID NO: 649504 - DNA, 75 bp, synthetic construct
  source 1..75: mol_type = other DNA
cgctggatatggctgccacgctggcagtgcctttcacaggtgacgggcgggatgctgcagagatcctgcgtacac

SEQ ID NO: 649505 - DNA, 75 bp, synthetic construct
  source 1..75: mol_type = other DNA
gttcgatggaggtttataccagagtgtttgcactggatatggctgccacgctggcagtgcctttcacaggtgacg

SEQ ID NO: 649506 - DNA, 75 bp, synthetic construct
  source 1..75: mol_type = other DNA
gccccggaaagtcatccaggcactggctggtcacagggatccacgttctatggaggtttataccagagtttttgc

SEQ ID NO: 649507 - DNA, 75 bp, synthetic construct
  source 1..75: mol_type = other DNA
caccatgatcctgcatcccggcgcgattggcgtacccgccaatcgtgaactgccggataagaaggcgctgtacca

SEQ ID NO: 649508 - DNA, 75 bp, synthetic construct
  source 1..75: mol_type = other DNA
ggcggcgattgacgtggtcagcactcaccagggatacgccaagcgctacggttttatttatgtcgatcgcggcga

SEQ ID NO: 649509 - DNA, 75 bp, synthetic construct
  source 1..75: mol_type = other DNA
cgccattaactactactcaaccgcgacgattgctgccagccggggcgatggtgccgatgttgccccccgcgcggg

SEQ ID NO: 649510 - DNA, 75 bp, synthetic construct
  source 1..75: mol_type = other DNA
cttcagcgacagttaagccgcaaggtcaaattcagcaataactggcagaagcagaaacgcaaaatacagcgactg

SEQ ID NO: 649511 - DNA, 75 bp, synthetic construct
  source 1..75: mol_type = other DNA
caggtgcttgctgttccgccagcgtagacaagccagcgttgcgcgtactgtggtcatacagcgaaagacaatcgc

SEQ ID NO: 649512 - DNA, 75 bp, synthetic construct
  source 1..75: mol_type = other DNA
caggtgcttgctgttccgccagcgtacacaagccagcgttgcgcgtcctgtggtcatacagcgaaagaaaatcgc

SEQ ID NO: 649513 - DNA, 75 bp, synthetic construct
  source 1..75: mol_type = other DNA
atttgcatttatggaaatattactttccattctcaaacaggggtaactgaagaatatatggtatcaaatgcagat

SEQ ID NO: 649514 - DNA, 75 bp, synthetic construct
  source 1..75: mol_type = other DNA
tgcacatgcaaagcaagctgctggagaaccgcaataaaatgctgaaggctcaggggattaacgagacgttgttta

SEQ ID NO: 649515 - DNA, 75 bp, synthetic construct
  source 1..75: mol_type = other DNA
ctggatgctggcgtggctaaactcgccacgctgtcagatggcacagtctttgagcctgtaaacagttttcagaaa

SEQ ID NO: 649516 - DNA, 75 bp, synthetic construct
  source 1..75: mol_type = other DNA
ccggataagctggagcatgatgggacggtgaatgacgattaccgtatcgctttccttgaagcgcacattgagcaa

SEQ ID NO: 649517 - DNA, 75 bp, synthetic construct
  source 1..75: mol_type = other DNA
gcttgaccgtgactacgactggaacgacaacggacagctaatccgcatcagcggcccgcaggagagccgggagta

SEQ ID NO: 649518 - DNA, 75 bp, synthetic construct
  source 1..75: mol_type = other DNA
tgaagatgaggggcttgtcaccctctggtactacgatgaatcggaccgtatcactcaccgcacggtgaacggcga

SEQ ID NO: 649519 - DNA, 75 bp, synthetic construct
  source 1..75: mol_type = other DNA
tcaccacccgcccgcgccggcgtgaaccgctgtgggccgtcacagatgaaaccatgcggaactggctgaagcagg

SEQ ID NO: 649520 - DNA, 75 bp, synthetic construct
  source 1..75: mol_type = other DNA
ggcagtcacagcgacttcggttacgatgcgctggaccgtctggtacggcagagcggctttgacggccggacgcaa

SEQ ID NO: 649521 - DNA, 75 bp, synthetic construct
  source 1..75: mol_type = other DNA
tggcaaaccgcgtcacgccggacagcctgccgccggtggagtggctgacgtatggcagcggttacctggcgggaa

SEQ ID NO: 649522 - DNA, 75 bp, synthetic construct
  source 1..75: mol_type = other DNA
ttgacgggcggacgcaacgttatcattatgacctgaccggaaaactcacgcagagtgaagatgaggggcttatca

SEQ ID NO: 649523 - DNA, 75 bp, synthetic construct
  source 1..75: mol_type = other DNA
cgccgctggtacgctatggctggacgccgcgcggcgaactggcggcggtgtatgaccgcagcaatacacaggtgc

SEQ ID NO: 649524 - DNA, 75 bp, synthetic construct
  source 1..75: mol_type = other DNA
tatgccacggacccggcaggcaaccgcctgcccgacccggagctgcacccggacagcaccctcagcatgtggccg

SEQ ID NO: 649525 - DNA, 75 bp, synthetic construct
  source 1..75: mol_type = other DNA
ggatgatctgaagagtttgcaaaggatccgcaaacgcagtttctggtggtataaggatgtcatcgcgcaaaacgg

SEQ ID NO: 649526 - DNA, 75 bp, synthetic construct
  source 1..75: mol_type = other DNA
gtcgtgaaccattatgggccgtgaccgacgaaaccatgcgcaactggctgaagcaggctgtcagacgggccgaag

SEQ ID NO: 649527 - DNA, 75 bp, synthetic construct
  source 1..75: mol_type = other DNA
cgtcaccgacagcctgaaccggcgtgaggtgctgcatacagagggcggggccgggctgaaacgggtggtgaaaaa

SEQ ID NO: 649528 - DNA, 75 bp, synthetic construct
  source 1..75: mol_type = other DNA
gtcagtttgacgcggtgggcaggcttaaggcacagacggatgccgcaggccggacgactgagtacagcccggatg

SEQ ID NO: 649529 - DNA, 75 bp, synthetic construct
  source 1..75: mol_type = other DNA
caacggtcagttgcaggcgctgaacgaagctgacggcgccattaaatggacggttaaccttgatatgccttcgct

SEQ ID NO: 649530 - DNA, 75 bp, synthetic construct
  source 1..75: mol_type = other DNA
atgcaattgcgtaaattactgctgccaggactgctttccgttacccttttaagcggctgttcgctgtttaacagc

SEQ ID NO: 649531 - DNA, 75 bp, synthetic construct
  source 1..75: mol_type = other DNA
ccagactgaaccggttgccgctgacggcaaactgctgatccaggcaaaagacggaaccgtgtactctattacacg

SEQ ID NO: 649532 - DNA, 75 bp, synthetic construct
  source 1..75: mol_type = other DNA
tgaacaccagcgatggtactgttgcatggcaaaccaaagtagcgggtgaagcactttctcgtccggtagtcagtg

SEQ ID NO: 649533 - DNA, 75 bp, synthetic construct
  source 1..75: mol_type = other DNA
tgaatgcggatgacggcaaagaaatctggtctgtcagtctggccgagaaagatggctggttatctaaagagcctg

SEQ ID NO: 649534 - DNA, 75 bp, synthetic construct
  source 1..75: mol_type = other DNA
tcggtggtgacaatggtcgtgtcagtgcggtgctgatgcaacaaggtcagatgatttggcaacaacgtatctccc

SEQ ID NO: 649535 - DNA, 75 bp, synthetic construct
  source 1..75: mol_type = other DNA
gatgacgaagggtatccggaaatagcccgctgtacggagcgggagtttgcaaccattcttgccggtatcagcgcc

SEQ ID NO: 649536 - DNA, 75 bp, synthetic construct
  source 1..75: mol_type = other DNA
agcatgagcgattttcctgtactgaggaggattttaaattttttaattcatgtcctgatttgcagggcaaacctg

SEQ ID NO: 649537 - DNA, 75 bp, synthetic construct
  source 1..75: mol_type = other DNA
atggcccgctcagctaaaccccgtaaacgaaaacccgcccctcaaagaagcaaacttccccgctatgtcgtgaag

SEQ ID NO: 649538 - DNA, 75 bp, synthetic construct
  source 1..75: mol_type = other DNA
gaagaagatgtggtaaagatgtccccattgccgaccgttgaaaaccagtttacgccgacgaccgtatggagttct

SEQ ID NO: 649539 - DNA, 75 bp, synthetic construct
  source 1..75: mol_type = other DNA
atggtctggtgttgattcacaccagcaacggccagttgcaggcgctgaacgaagctgatggcgctgttaaatgga

SEQ ID NO: 649540 - DNA, 75 bp, synthetic construct
  source 1..75: mol_type = other DNA
tggtatgaaatgcgccgccagcttgagtacaagcagctctggcgtggcggtcaggtgcttgctgttccgccagcg

SEQ ID NO: 649541 - DNA, 75 bp, synthetic construct
  source 1..75: mol_type = other DNA
gaccattcttgccggtatcagcgccggcggtatgtactgtccggaatgcggcacagttcactggccggatggcgt

SEQ ID NO: 649542 - DNA, 75 bp, synthetic construct
  source 1..75: mol_type = other DNA
cgcctgaccagtgaaaacggcagccacaccaccttccgttacgatgtactcgaccggctgatacaggaaaccggc

SEQ ID NO: 649543 - DNA, 75 bp, synthetic construct
  source 1..75: mol_type = other DNA
cgtcactccagacagtcaaacgataaaaaagatagcccttgtggaggttcctgcaatgtcaaatacataccagaa

SEQ ID NO: 649544 - DNA, 75 bp, synthetic construct
  source 1..75: mol_type = other DNA
accggtgagcgccagacggtgcatcacccgcagccggaagcactgctctggcagcatgagaccagacatgcgtac

SEQ ID NO: 649545 - DNA, 75 bp, synthetic construct
  source 1..75: mol_type = other DNA
accgcgattacacctggaacgacaacggcgaactcatccgcatcagcagcccgcgccagacccggagttacagct

SEQ ID NO: 649546 - DNA, 75 bp, synthetic construct
  source 1..75: mol_type = other DNA
gcccagtggtaattttaaagcaatagataaccacgggaaggaaataacaaacagaaaaggattacctaatgtctg

SEQ ID NO: 649547 - DNA, 75 bp, synthetic construct
  source 1..75: mol_type = other DNA
tgccgtttggatgcagcaataacttaacgctgatatttaaccagcttctgcgaaacgtccgcaaaggagcagccc

SEQ ID NO: 649548 - DNA, 75 bp, synthetic construct
  source 1..75: mol_type = other DNA
aaatccacctgtaccactgcgaccatcgcggcctgccgctggcccttatcagtaaggaaggggcaacagaatggt

SEQ ID NO: 649549 - DNA, 75 bp, synthetic construct
  source 1..75: mol_type = other DNA
aacgaaaacccgcccctcaaagaagcaagctcccccgctatgtcgtgaagcgtcacgacgatgacttctttgacg

SEQ ID NO: 649550 - DNA, 75 bp, synthetic construct
  source 1..75: mol_type = other DNA
aaccattcttgccggtatcagcgccggcggcatgtactgtcctgagtgcggcatggttcactggccggacggagt

SEQ ID NO: 649551 - DNA, 75 bp, synthetic construct
  source 1..75: mol_type = other DNA
tgcaggggcgatatatcactcaggatccgattggactgaaggggggatggaatttttatcagtatccgttgaatc

SEQ ID NO: 649552 - DNA, 75 bp, synthetic construct
  source 1..75: mol_type = other DNA
atgtttatgatagtctaaatttttcaagcaaagatttaacgaattcttatatgaatggaatgggaaaaaaagaat

SEQ ID NO: 649553 - DNA, 75 bp, synthetic construct
  source 1..75: mol_type = other DNA
ggaagatgccaccggcagccggaaaaccatgacgtggagccgttacggtcagttgctgaccttcactgactgttc

SEQ ID NO: 649554 - DNA, 75 bp, synthetic construct
  source 1..75: mol_type = other DNA
aacgaaaacccgctcttcaaagaagcaaacttccccgctatgtcgtgaagcttcacgacgatgacttctttgacg

SEQ ID NO: 649555 - DNA, 75 bp, synthetic construct
  source 1..75: mol_type = other DNA
cagcatgaacggcaatgatgcggaaatgagtgcagaagcggcaggcatcgcggtctgcctgattgcgtacagtca

SEQ ID NO: 649556 - DNA, 75 bp, synthetic construct
  source 1..75: mol_type = other DNA
atgatggcaacgccagtgaagaagtggttattgcgcgttgctccctggtttttaccggtgggcatcgtggcggtg

SEQ ID NO: 649557 - DNA, 75 bp, synthetic construct
  source 1..75: mol_type = other DNA
ttggttatctggcgatgaatgcgcgggagtttctgcaaacggacgtggtggtagtcgccattattctttacgccc

SEQ ID NO: 649558 - DNA, 75 bp, synthetic construct
  source 1..75: mol_type = other DNA
tgatgtccgctaatgaacctcaatttgacctcactgcaacaccagtgcctgatgaacagcgcctcgatttctggc

SEQ ID NO: 649559 - DNA, 75 bp, synthetic construct
  source 1..75: mol_type = other DNA
gcgatgaccgcgcactattaccgcctgcgggactatgccctgcagcatccagaggcccacgccattctgcgtatt

SEQ ID NO: 649560 - DNA, 75 bp, synthetic construct
  source 1..75: mol_type = other DNA
ccatcacgcctgccgtacagagtgtgacgcaatgaccgcgcactattaccgcctgcgggactatgccctgcagca

SEQ ID NO: 649561 - DNA, 75 bp, synthetic construct
  source 1..75: mol_type = other DNA
tatcactcaggatccgattggactgaaggggggatggaacctgtatggatatcaattgaatccgatatcagacat

SEQ ID NO: 649562 - DNA, 75 bp, synthetic construct
  source 1..75: mol_type = other DNA
ggcagccacaccaccttcacttacgatgtccgcgaccggctgatacaggaaatcggctttgacggacggatacag

SEQ ID NO: 649563 - DNA, 75 bp, synthetic construct
  source 1..75: mol_type = other DNA
ctagaccattccccttgccaattccatggcccaaaagccctgcacagcagcaagcagatgataatgctgcaaaag

SEQ ID NO: 649564 - DNA, 75 bp, synthetic construct
  source 1..75: mol_type = other DNA
tgtggcagcatctggcgatcagctcctggcgtgcgctgattggcttttcaattggcggatcgctgggattaattc

SEQ ID NO: 649565 - DNA, 75 bp, synthetic construct
  source 1..75: mol_type = other DNA
cgcatctggcgctgatcccgctggtgattttgtggttcggcattgatgaatccgcaaaaatatttctggtggcgc

SEQ ID NO: 649566 - DNA, 75 bp, synthetic construct
  source 1..75: mol_type = other DNA
gtcagtgcgcagctgttagagcgtctctggttgcgctggaacccggcttatcatttgaaggaggccacggtatga

SEQ ID NO: 649567 - DNA, 75 bp, synthetic construct
  source 1..75: mol_type = other DNA
tcgcaccgaatgcgatgccatgacggagcactattacctcctgcggaactatgccctgcagcatcctgaagctca

SEQ ID NO: 649568 - DNA, 75 bp, synthetic construct
  source 1..75: mol_type = other DNA
aacaggtgaatgatggcgtggaacgccaggtgaatattgtcatcaacaacctgctctacaatccccaggccgtcg

SEQ ID NO: 649569 - DNA, 75 bp, synthetic construct
  source 1..75: mol_type = other DNA
ctggaaagtatgcccagcgagctgcaacaggtgaatgatggcgtggaacgccaggtgaatatcgtcatcaacaac

SEQ ID NO: 649570 - DNA, 75 bp, synthetic construct
  source 1..75: mol_type = other DNA
tttgtctggatggaccgcttctgtgacaagtacagcggcggtatctggtcgttttacacactcagcaatggcggg

SEQ ID NO: 649571 - DNA, 75 bp, synthetic construct
  source 1..75: mol_type = other DNA
gaccattcttgccggtatcagcgccggcggcatgtactgcccggaatgcggcacagttcactggccggatggcgt

SEQ ID NO: 649572 - DNA, 75 bp, synthetic construct
  source 1..75: mol_type = other DNA
aagatgggagcttctgcggggcattggtcgtcataaatggccaattttcgcttgccctgacagataacggcctga

SEQ ID NO: 649573 - DNA, 75 bp, synthetic construct
  source 1..75: mol_type = other DNA
caaacttccccgctatgtcgtgaaacttcatccggatgatttttttgacgaagaagacgctgaagttctgcgctt

SEQ ID NO: 649574 - DNA, 75 bp, synthetic construct
  source 1..75: mol_type = other DNA
ttgcctgaacggcaacgatgcccaaatgagtgcagaagccgcaggtgtcgctgtctgcctgattgaatacagcca

SEQ ID NO: 649575 - DNA, 75 bp, synthetic construct
  source 1..75: mol_type = other DNA
tttgcctggatggaccgcttctgcgcggattacagtggcggtatctggcagttttacacgctgagcaatggcggt

SEQ ID NO: 649576 - DNA, 75 bp, synthetic construct
  source 1..75: mol_type = other DNA
gccatgactgagcactattaccgactgcgggattatgccctgcagcaccctgaatccagcaccattctgcgcatt

SEQ ID NO: 649577 - DNA, 75 bp, synthetic construct
  source 1..75: mol_type = other DNA
ataccggtaaccgatgagaaccgcatcagcttctggccgcagcactttggcagcattccgcagtggataatcctt

SEQ ID NO: 649578 - DNA, 75 bp, synthetic construct
  source 1..75: mol_type = other DNA
cctggagccccgggtcttcggctggatggaccgtctgtatgaagactactgcggtggtatctggaatctgtacac

SEQ ID NO: 649579 - DNA, 75 bp, synthetic construct
  source 1..75: mol_type = other DNA
tggtaacggcgctgaaatgagtgctgaagctgcgggtattgccgtctgtctgatggcttacagccaccatgcctg

SEQ ID NO: 649580 - DNA, 75 bp, synthetic construct
  source 1..75: mol_type = other DNA
gcccaaacgatccggtttctttagctgatgtccgtcaggcgggcgcgactggcgtggttaccgctttgcaccata

SEQ ID NO: 649581 - DNA, 75 bp, synthetic construct
  source 1..75: mol_type = other DNA
taaaaacagcctgattctgtcactttcagggacgtttaagcgggcctttatcagcgcctggcgcacgcaccagac

SEQ ID NO: 649582 - DNA, 75 bp, synthetic construct
  source 1..75: mol_type = other DNA
gcaagaagcactagaagcaatcccagaagttgtaggctctgcaatgaaatatcaggatggtggaagcgggtcgaa

SEQ ID NO: 649583 - DNA, 75 bp, synthetic construct
  source 1..75: mol_type = other DNA
gtcgtccagttgtttatgaaattagggatgatggcgggctttttttgttttatgcacaaaggaacccagataaaa

SEQ ID NO: 649584 - DNA, 75 bp, synthetic construct
  source 1..75: mol_type = other DNA
tatccatgctggtaacggtgagtggatctggcgtccgctaaacaacccgaaacatctggcgatcagcagcttctc

SEQ ID NO: 649585 - DNA, 75 bp, synthetic construct
  source 1..75: mol_type = other DNA
aaacatctggcggtcagcagcttcgccatggagaatccgcaaggtttcggtttgttgcagcgtggacgcgatttc

SEQ ID NO: 649586 - DNA, 75 bp, synthetic construct
  source 1..75: mol_type = other DNA
cccgcggcctggcaattgataccgccttgccatcgggtgaagaatttccacgcttcaaagagttctggatcgagc

SEQ ID NO: 649587 - DNA, 75 bp, synthetic construct
  source 1..75: mol_type = other DNA
ttacggcaatgtgcgctcaccatgccggaaaagcggttagcccggcgatgcacacttttattcagtgtgttgaag

SEQ ID NO: 649588 - DNA, 75 bp, synthetic construct
  source 1..75: mol_type = other DNA
cgcacatcatgctggaaaagcggttagcccggcgatgcacatttttattcagtgtgttgaagagtgttttgtggc

SEQ ID NO: 649589 - DNA, 75 bp, synthetic construct
  source 1..75: mol_type = other DNA
cgcacagcgatgccgcgcaggaagtgctggccaaatcaggcggcaaaacgttcagcgaagcggacgtattgcagc

SEQ ID NO: 649590 - DNA, 75 bp, synthetic construct
  source 1..75: mol_type = other DNA
ctgaaacgactggtgcatccgaacgccgtctatagcattaagctggggaatcgcgcactgccggaacgtatcctc

SEQ ID NO: 649591 - DNA, 75 bp, synthetic construct
  source 1..75: mol_type = other DNA
ccatgtgcgcacaccatgctggaaaagcggttagcccggcgatgcacacttttattcagtgtgttgaagagagtt

SEQ ID NO: 649592 - DNA, 75 bp, synthetic construct
  source 1..75: mol_type = other DNA
tcgcgttgtttcgggcgaaacgttgctctcttaccgaatgccgcaggtgctgcaacgttttcgacaacgggcgcc

SEQ ID NO: 649593 - DNA, 75 bp, synthetic construct
  source 1..75: mol_type = other DNA
gtgcgctataacccggttaccaaaggctggcgtctggtgatgcgtgtgaaagtgaaagatgccaagaaaaccact

SEQ ID NO: 649594 - DNA, 75 bp, synthetic construct
  source 1..75: mol_type = other DNA
gcataccttacgctggtgttatcgcgcaagaagcactagaagcaatcccagaagttgtaggctctgcaatgaaat

SEQ ID NO: 649595 - DNA, 75 bp, synthetic construct
  source 1..75: mol_type = other DNA
atgacatcaaaacgctaaaatccgatgttagcaaattaaaaactgatcttggaagctacgcaacaaaatcctatg

SEQ ID NO: 649596 - DNA, 75 bp, synthetic construct
  source 1..75: mol_type = other DNA
cgttagcaaattaaaaaacgatcaaggaagctacgcaacaaaattatatgtagacagcaaagatgaaatcgttgg

SEQ ID NO: 649597 - DNA, 75 bp, synthetic construct
  source 1..75: mol_type = other DNA
tgtcatgccaccgcctttaaccaggcttccgaccgagatctgaaagataatcttcaggtgattgataatgcaaca

SEQ ID NO: 649598 - DNA, 75 bp, synthetic construct
  source 1..75: mol_type = other DNA
ttaccaacctttatggcggtacgatgatttttcccggtgacagcggatacctcaaaatgggtaactgccttatgt

SEQ ID NO: 649599 - DNA, 75 bp, synthetic construct
  source 1..75: mol_type = other DNA
aaggcattgccgaccactggaactatatttagcggtaagattcacttgtcaaataagactggtgaaacggaaaac

SEQ ID NO: 649600 - DNA, 75 bp, synthetic construct
  source 1..75: mol_type = other DNA
atggctacatcgacagtaattcctgaagacatcaaaacgctaaaatccgacgttagcaaattaaaaaacgatcaa

SEQ ID NO: 649601 - DNA, 75 bp, synthetic construct
  source 1..75: mol_type = other DNA
acattcaggttattgataatgccactgagcgcatcagattaatgaatgggtatacttaccgtctcaagtctaatg

SEQ ID NO: 649602 - DNA, 75 bp, synthetic construct
  source 1..75: mol_type = other DNA
atctggcgtccgttgaataacccgaaacatttagcggtcagcagcttctccatggaaaacccgcaaggcttcggt

SEQ ID NO: 649603 - DNA, 75 bp, synthetic construct
  source 1..75: mol_type = other DNA
gagaaattccgcggcgtgcgtctttatgtcagcgaaaaccagctgaaaatcaccgccaacaacccggaacaggaa

SEQ ID NO: 649604 - DNA, 75 bp, synthetic construct
  source 1..75: mol_type = other DNA
atgtcagcgaaaatcagctgaaaattaccgccaacaacccggaacaggaagaagcggaagagatccttgatgtca

SEQ ID NO: 649605 - DNA, 75 bp, synthetic construct
  source 1..75: mol_type = other DNA
tgttacaggttgctgacggtacgttgtcgctgaccggtactgatctcgagatggaaatggtggcacgtgttgcgc

SEQ ID NO: 649606 - DNA, 75 bp, synthetic construct
  source 1..75: mol_type = other DNA
agcagctggtgcgcgatattatcgcgctgggcgataaggtcgaggtccatacctttggtaagttctcgccgtttg

SEQ ID NO: 649607 - DNA, 75 bp, synthetic construct
  source 1..75: mol_type = other DNA
ttgatgtatcatctgttggtattgttacatgatcagggtctgaagttaacgacagtgattgagaacctgcgtaaa

SEQ ID NO: 649608 - DNA, 75 bp, synthetic construct
  source 1..75: mol_type = other DNA
agcattgcgccggactgcgacaacgacacattgctggtgctggcgaatcccatcggcccgacctgccacaaaggc

SEQ ID NO: 649609 - DNA, 75 bp, synthetic construct
  source 1..75: mol_type = other DNA
ttgatgtatcacctgctggtgctgttgcaggatcaggatctggctttaacgacggtaattgagaacctacgcaaa

SEQ ID NO: 649610 - DNA, 75 bp, synthetic construct
  source 1..75: mol_type = other DNA
tgcgcattatcggcagttgtcgctgcgagctgtgcattaccgggcgatacgctggaaaatgttgcatctgcctgt

SEQ ID NO: 649611 - DNA, 75 bp, synthetic construct
  source 1..75: mol_type = other DNA
gccgccatttttgtcatgaacttttatcttttaaaccggcagcgatacgtggtaatgcttcggaaatcatggcat

SEQ ID NO: 649612 - DNA, 75 bp, synthetic construct
  source 1..75: mol_type = other DNA
tgagctgaccaacgaggcatctgacttgatgtatcacctgctggtgctgttacaggatcaggatctggatttaac

SEQ ID NO: 649613 - DNA, 75 bp, synthetic construct
  source 1..75: mol_type = other DNA
gactgtggaccaaaggcgaaacgtcgggcaattttctcaatgtggtgagtattgccccggactgcgacaacgaca

SEQ ID NO: 649614 - DNA, 75 bp, synthetic construct
  source 1..75: mol_type = other DNA
gcttcgcgggttaatcgttctacaacgtttagtcatgcctgaagaacggataccgtgggaggggagttactttga

SEQ ID NO: 649615 - DNA, 75 bp, synthetic construct
  source 1..75: mol_type = other DNA
ggccgcatttttcctgggtattcccgtgttctttgatgtcgggtttattattctggcaccgattatttacggttt

SEQ ID NO: 649616 - DNA, 75 bp, synthetic construct
  source 1..75: mol_type = other DNA
tcgcgcaccaaagaacgcctgtggaccaaaggtgaaacctccggcaatttcctgaacgttgtcagcatcacgccc

SEQ ID NO: 649617 - DNA, 75 bp, synthetic construct
  source 1..75: mol_type = other DNA
gtcaccttcttctcgcgcactaaacagcgactgtggaccaaaggcgaaacgtcgggcaatttcctcaatgtggtg

SEQ ID NO: 649618 - DNA, 75 bp, synthetic construct
  source 1..75: mol_type = other DNA
ttgatatatcacctgttggtgctgttgcaggatcaggggctggatttaacgacggtaattgaaaatctgcgtaaa

SEQ ID NO: 649619 - DNA, 75 bp, synthetic construct
  source 1..75: mol_type = other DNA
ggtaatgcttcggaaatcatggcattagctggcgttgctaatggtggacggggagtggataccactgacgccgca

SEQ ID NO: 649620 - DNA, 75 bp, synthetic construct
  source 1..75: mol_type = other DNA
ttgcgttagctggcgtaatcatgctgttgctactggtcatcaaggcaaaggtacaaccattcgttgctctgctcc

SEQ ID NO: 649621 - DNA, 75 bp, synthetic construct
  source 1..75: mol_type = other DNA
gttgcgttggttaagcgtcccacaacgattaaccatgcttgaaggactgatgcagtgggatgaccgcaattctga

SEQ ID NO: 649622 - DNA, 75 bp, synthetic construct
  source 1..75: mol_type = other DNA
atcagaagtataaatatattttatggtgaaactggaactggaaagacgacattatcttattcgttggctaaatat

SEQ ID NO: 649623 - DNA, 75 bp, synthetic construct
  source 1..75: mol_type = other DNA
atgagcgaactgaacccgttggacgctctgctgttcagctcgcgggtagataattacccgctgattctgtgcgaa

SEQ ID NO: 649624 - DNA, 75 bp, synthetic construct
  source 1..75: mol_type = other DNA
ggctccggccagtgaggaaggcgcgacaaaattaagcgataaaataaatccaccgggcgtcgcgctggtcacctc

SEQ ID NO: 649625 - DNA, 75 bp, synthetic construct
  source 1..75: mol_type = other DNA
tattattggtctgggcgctatgctggggcgtatgatcgaacactctggtggtgcagagtcactggctaattattt

SEQ ID NO: 649626 - DNA, 75 bp, synthetic construct
  source 1..75: mol_type = other DNA
acagctcatcgaagagcttgaaaaagaaactatgcagaattgcatagtttcgttcgaaggccgtggcggcggcac

SEQ ID NO: 649627 - DNA, 75 bp, synthetic construct
  source 1..75: mol_type = other DNA
cagcagctggtggccgccgctcctaaagtcgattttgccgaccgggtatcagtagctaaagggatcctgattggg

SEQ ID NO: 649628 - DNA, 75 bp, synthetic construct
  source 1..75: mol_type = other DNA
ctgccgtagaacaggcaacacgctcccaaaccccctggacgcttgatccggtcgcggttggcgcactcgaatatc

SEQ ID NO: 649629 - DNA, 75 bp, synthetic construct
  source 1..75: mol_type = other DNA
aaaattagttgtgttacaagtgattatggctttcgactaatatattgtggaaggctagataatgttcagaaaaac

SEQ ID NO: 649630 - DNA, 75 bp, synthetic construct
  source 1..75: mol_type = other DNA
gtctaataaatggcgggcacgaatttcagagtattgagtttataaacgaactatataaaacgagaaaatcaattt

SEQ ID NO: 649631 - DNA, 75 bp, synthetic construct
  source 1..75: mol_type = other DNA
atttatcgactatcgagccggaagattacaacctgctattccgcagagtctccctgaagctctccgtttggctgc

SEQ ID NO: 649632 - DNA, 75 bp, synthetic construct
  source 1..75: mol_type = other DNA
ggtactcgcttggcggacgggtggcgatgatggccgcttgccaggggctggcggggctttgtggggttgttgtcg

SEQ ID NO: 649633 - DNA, 75 bp, synthetic construct
  source 1..75: mol_type = other DNA
atgatcctccacgcacaggcaaaacacggtaagcctggtttgccctggctggtgtttttgcacggtttctctggc

SEQ ID NO: 649634 - DNA, 75 bp, synthetic construct
  source 1..75: mol_type = other DNA
aacatccttaacttctggctggtggggtactcgcttggcggacgggtggcgatgatggcggcttgtcaggggatg

SEQ ID NO: 649635 - DNA, 75 bp, synthetic construct
  source 1..75: mol_type = other DNA
taaattcagacctgggactgatgacctccttcatcgaagcatacctggacgctgactacactgatcgtggtctgc

SEQ ID NO: 649636 - DNA, 75 bp, synthetic construct
  source 1..75: mol_type = other DNA
ggtggagcatgtcctcccaaaggagataaaccccatcattaccagtttaaagtatgggctctaaaaactgataaa

SEQ ID NO: 649637 - DNA, 75 bp, synthetic construct
  source 1..75: mol_type = other DNA
gatgatggcggcttgtcaggggatgccggggattggtggggtgattgtcgaaggcgggcatccagggctgcaaag

SEQ ID NO: 649638 - DNA, 75 bp, synthetic construct
  source 1..75: mol_type = other DNA
atcgaggagcttgaaacttgtgcgaaatgtaagcgcccttatattgtcccgtataccaatgatactcattgtcct

SEQ ID NO: 649639 - DNA, 75 bp, synthetic construct
  source 1..75: mol_type = other DNA
gctggtggcggtggtgtcggtgaagattctgtcgttcatccaccagcaggatattgcatcactggtgtccggcct

SEQ ID NO: 649640 - DNA, 75 bp, synthetic construct
  source 1..75: mol_type = other DNA
gcgcggtggcactgaccattggcggtgccggtgtgtacggccttatcaccaataccgatttcggtgtggtcgtgg

SEQ ID NO: 649641 - DNA, 75 bp, synthetic construct
  source 1..75: mol_type = other DNA
ggtactcgctcggtggacgcgtggcgatgatggcggcctgtcagggaatgccggggctttgtggcgttattgtcg

SEQ ID NO: 649642 - DNA, 75 bp, synthetic construct
  source 1..75: mol_type = other DNA
gttttcgcacagaaccattaacggcagtatttgccgactggtatcaacaaccagtttttgcctcgcttaacgacg

SEQ ID NO: 649643 - DNA, 75 bp, synthetic construct
  source 1..75: mol_type = other DNA
ctgatggtggcaccatcgaatggtggctgaagcagtccagcgaagccagagctgccattttaactgaccaggtaa

SEQ ID NO: 649644 - DNA, 75 bp, synthetic construct
  source 1..75: mol_type = other DNA
atggcacgattaaacgttgaagttatcccgccaagcagcgaggcgctgaacgggatttttgcagagattgagcgt

SEQ ID NO: 649645 - DNA, 75 bp, synthetic construct
  source 1..75: mol_type = other DNA
atggcacgattaaacgttgaagttaccccaccagacagcgaggcgctgaacgggatttttgcagagattgagcgc

SEQ ID NO: 649646 - DNA, 75 bp, synthetic construct
  source 1..75: mol_type = other DNA
ccatatgcgggaaacatgtttgtttatgacaaccttatccgaattcgtggcgaaattccgactgaatacctggca

SEQ ID NO: 649647 - DNA, 75 bp, synthetic construct
  source 1..75: mol_type = other DNA
tgcatggcgcactgggcgcggcgcaggcctatatggcaacctatatcgtctatttttctctttgttgtggcgtgt

SEQ ID NO: 649648 - DNA, 75 bp, synthetic construct
  source 1..75: mol_type = other DNA
tgctatctggctgctgttgtcgaataaatttaccgctatgcgcgatctctttgcctggcagttggtgggtgatgt

SEQ ID NO: 649649 - DNA, 75 bp, synthetic construct
  source 1..75: mol_type = other DNA
aaatttaccgctatgcgcgatctctttgcctggcagttggtgggtgatgtgttaaaagtgggcgcttatgtcttt

SEQ ID NO: 649650 - DNA, 75 bp, synthetic construct
  source 1..75: mol_type = other DNA
gaaatatcagaaactgcggtcagaactccatgaaggaaggaaaaacattccaccccaaaatcctgttgatgccga

SEQ ID NO: 649651 - DNA, 75 bp, synthetic construct
  source 1..75: mol_type = other DNA
gtgaattttttgttcaggtctggggaaatggagccaacttcgacaacgtgattttacgccgttcatatgaacggc

SEQ ID NO: 649652 - DNA, 75 bp, synthetic construct
  source 1..75: mol_type = other DNA
gggccagaattcagcaaaactatcgatctggaaaccgcgggcggagtcatcgatcgggacaccattaagtggtgg

SEQ ID NO: 649653 - DNA, 75 bp, synthetic construct
  source 1..75: mol_type = other DNA
ccaatgatattagtagataaactgttcatcagaaatttatcaaatcatgtccgtaattcttttaccggactgtat

SEQ ID NO: 649654 - DNA, 75 bp, synthetic construct
  source 1..75: mol_type = other DNA
ggccttgtccgtgaacgtccgatcgacattcacaaagaccctgtggcactgaacaaatacattactgaatacctg

SEQ ID NO: 649655 - DNA, 75 bp, synthetic construct
  source 1..75: mol_type = other DNA
gcgacgcaacatatcaggaaacattcgatgaagaaaatcaggctgaatctcagaaaaaagatccggaggaaatga

SEQ ID NO: 649656 - DNA, 75 bp, synthetic construct
  source 1..75: mol_type = other DNA
ctgcagaggcagtgaaggaagtcctgcgctctgaagaagtcctgagcgcactgaaacaaaaactccgccagaatc

SEQ ID NO: 649657 - DNA, 75 bp, synthetic construct
  source 1..75: mol_type = other DNA
tcactgcaatctggaagaagatatgcggcaagggcagtttcgccgtgatctgttttatcggctgagtattttgcg

SEQ ID NO: 649658 - DNA, 75 bp, synthetic construct
  source 1..75: mol_type = other DNA
gatgagattggcgaaatgccgctacctttgcagactcgcctgttacgggtgctggaagaaaaagaggttactcgc

SEQ ID NO: 649659 - DNA, 75 bp, synthetic construct
  source 1..75: mol_type = other DNA
tttaatctgcgcctcgatcaacgtagctacattaccgaagaagacgcccgcgggcagattaacgagctgaaagct

SEQ ID NO: 649660 - DNA, 75 bp, synthetic construct
  source 1..75: mol_type = other DNA
gctacatcaccgaagaagacgcacgcgggcagattaacgagctaaaagctaacggcaccgaagccgtggtcggtg

SEQ ID NO: 649661 - DNA, 75 bp, synthetic construct
  source 1..75: mol_type = other DNA
cgatatgctcggtcaatcaccacagatggaacaagtacggcagactattttgctgtatgcccgctccagtgcggc

SEQ ID NO: 649662 - DNA, 75 bp, synthetic construct
  source 1..75: mol_type = other DNA
ggcaaagagctggcagcgcaggcaattcatcgggaatacgttgcccgccacgatgcgcgacaggggaaaaaatcg

SEQ ID NO: 649663 - DNA, 75 bp, synthetic construct
  source 1..75: mol_type = other DNA
aaagaggcttgccaggcattttatctgttccagttagcactccagttagataatggtagctatgctgttaacccg

SEQ ID NO: 649664 - DNA, 75 bp, synthetic construct
  source 1..75: mol_type = other DNA
gatgtctgccgggaggcaggcttctctgagccacttactacaactggaagtccagatacggtggtatggaatctt

SEQ ID NO: 649665 - DNA, 75 bp, synthetic construct
  source 1..75: mol_type = other DNA
atcagatcatcgctgtgattaagtcagttgaagctggacgaaccgttaaagatgtctgccgggaggccagtatct

SEQ ID NO: 649666 - DNA, 75 bp, synthetic construct
  source 1..75: mol_type = other DNA
ggcgtataactgaggcggccactagtgctggtggtgctttgaaaggtgctgttgatttagcaaaagaagttaatg

SEQ ID NO: 649667 - DNA, 75 bp, synthetic construct
  source 1..75: mol_type = other DNA
atggatgcagtccgttttgtgaaagtgtatcagccatcactggcttgccgtatccataaccagtcgccgcaaaaa

SEQ ID NO: 649668 - DNA, 75 bp, synthetic construct
  source 1..75: mol_type = other DNA
cgcgaagagattgtaccgttctgggaggggcgctcgctggatgaaatttgtgaagcacaataccgcgaagctggc

SEQ ID NO: 649669 - DNA, 75 bp, synthetic construct
  source 1..75: mol_type = other DNA
tttaatttgcgcctcgaccaacgtagctacattaccgaagaagacgcacgcgggcagattaacgagctaaaagct

SEQ ID NO: 649670 - DNA, 75 bp, synthetic construct
  source 1..75: mol_type = other DNA
gcgctctgaagaagtccggagcgcactgaaacagaaacttcgccataacctggaagcgcgtcttgatacagaagt

SEQ ID NO: 649671 - DNA, 75 bp, synthetic construct
  source 1..75: mol_type = other DNA
catgtgctgcacagctactggttgaatctaaagaacgtagtgcgtttttgtgaaaaggtaaaaaaacataaaccg

SEQ ID NO: 649672 - DNA, 75 bp, synthetic construct
  source 1..75: mol_type = other DNA
ggaagtgctgcaaaaatccggtggtaaaaccgtcagcgaagaagatgtgctgcaactggtgcagttaagcaaacc

SEQ ID NO: 649673 - DNA, 75 bp, synthetic construct
  source 1..75: mol_type = other DNA
cataacctggaagcgcgtcttgatgcagaagtggatgccattctggatgaactgctgggcgcaccggcagctccg

SEQ ID NO: 649674 - DNA, 75 bp, synthetic construct
  source 1..75: mol_type = other DNA
tcttgatgcagaagttgatgccattctggatgagctgcttggtgtacaggcagagccaccgactgaagcgggaga

SEQ ID NO: 649675 - DNA, 75 bp, synthetic construct
  source 1..75: mol_type = other DNA
gcgctctgaagaagtcagaagcgcactgaaacagcaacttcggcagaaccttgaggcgcgtcttgatgcagaagt

SEQ ID NO: 649676 - DNA, 75 bp, synthetic construct
  source 1..75: mol_type = other DNA
cagaacagcggtatgcgtttgaacaggctatcgtagaaaatggtcgccgcatcgatgctgttcataagcgagtcc

SEQ ID NO: 649677 - DNA, 75 bp, synthetic construct
  source 1..75: mol_type = other DNA
aagaatgcgccaaacatcaagattatccgctcgcagtccggggacttcactcgcagtaaaggcaaagaagtgatg

SEQ ID NO: 649678 - DNA, 75 bp, synthetic construct
  source 1..75: mol_type = other DNA
acgccagtgttgaactgacgccgaacatggcgggacccgctttcgatgcgctggagaaatacaaaaagacggcac

SEQ ID NO: 649679 - DNA, 75 bp, synthetic construct
  source 1..75: mol_type = other DNA
gactggcggaaggtggggcagcaggtgtggcgttagatctccaccagcgcgcgctgcaacaggggctggcgtcac

SEQ ID NO: 649680 - DNA, 75 bp, synthetic construct
  source 1..75: mol_type = other DNA
gcgcgaaatgaagcgcaattgcactatctgaaggctattgagagtaagcagctgatattcgctacgggcgaagcc

SEQ ID NO: 649681 - DNA, 75 bp, synthetic construct
  source 1..75: mol_type = other DNA
aagatgaaatggttgggatcgtccggttcggtaaagaggattgcgtacgttcggcactttgccaacgtacgctac

SEQ ID NO: 649682 - DNA, 75 bp, synthetic construct
  source 1..75: mol_type = other DNA
ccgcataaataccggatgaccaatatgcagggtgaatcgcgctttttacatccattaaatcattacaacaactag

SEQ ID NO: 649683 - DNA, 75 bp, synthetic construct
  source 1..75: mol_type = other DNA
ggaagatgaacacgtttcttacaacgccggttacaccaacgttcacgagctgatcccatggcgtacgctctctgg

SEQ ID NO: 649684 - DNA, 75 bp, synthetic construct
  source 1..75: mol_type = other DNA
tcttccgccagcggggaattacattcacccagtgggcagaagaaaacggctacagccgttacgaggtctaccgcg

SEQ ID NO: 649685 - DNA, 75 bp, synthetic construct
  source 1..75: mol_type = other DNA
gaaaaaacgggcggctgacgcccatctcaccccgtcggccgtactgttgtcggtgtggtcaacggttctctctgc

SEQ ID NO: 649686 - DNA, 75 bp, synthetic construct
  source 1..75: mol_type = other DNA
cgaacaacgggtattaaccctctattaccaggaagagctgaatctcaaagagattggcgcagtgctggaagtcgg

SEQ ID NO: 649687 - DNA, 75 bp, synthetic construct
  source 1..75: mol_type = other DNA
cgtgcgacgcaatgcacgtgaagtggcgcaggcaatagggcaactggagcaggagcttggccgcaatgccacaga

SEQ ID NO: 649688 - DNA, 75 bp, synthetic construct
  source 1..75: mol_type = other DNA
ggccacaccgctgtctgcactggttatgaccggtaagcccggtccctcatccgtcgtttatttacgtgaagcacg

SEQ ID NO: 649689 - DNA, 75 bp, synthetic construct
  source 1..75: mol_type = other DNA
accactgtcagcagccagagtaccgcactgcctccccgcccgcttcttcaggccacaccgctgtctgcactggtt

SEQ ID NO: 649690 - DNA, 75 bp, synthetic construct
  source 1..75: mol_type = other DNA
aaaaccggcaaattaccgtccccacaggtcgtcggtgctgaatccgaagaggaagatgcctcacacgcggcctga

SEQ ID NO: 649691 - DNA, 75 bp, synthetic construct
  source 1..75: mol_type = other DNA
cactgcctccccgcccgcttcttcaggccacaccgctgtctgcactggttatgaccggtaagcccggtccctcat

SEQ ID NO: 649692 - DNA, 75 bp, synthetic construct
  source 1..75: mol_type = other DNA
gctggacgtcgtccgaaaaatgcccccacggtacctggacgctgcgctgggaaacgcccgttaactacagcattg

SEQ ID NO: 649693 - DNA, 75 bp, synthetic construct
  source 1..75: mol_type = other DNA
agagcacaacagggacatccggtacatctgcgccccgcacaaccacgccagccccagtggtcacgaaaccggtag

SEQ ID NO: 649694 - DNA, 75 bp, synthetic construct
  source 1..75: mol_type = other DNA
cgcccggcgtaatctgctcaaaccggtctggggcatctcccagacgccgcaggtctggctcgatcaccagattta

SEQ ID NO: 649695 - DNA, 75 bp, synthetic construct
  source 1..75: mol_type = other DNA
gccgaacgttgcgtcaggtagaatttaacccgcaatggaaaccagactggctaggtttgattctccgtgacaagc

SEQ ID NO: 649696 - DNA, 75 bp, synthetic construct
  source 1..75: mol_type = other DNA
tccctttttgcgcagatggtatgcccgcgataaccgctacatttacagctttgatggcgcgcagctctggcgata

SEQ ID NO: 649697 - DNA, 75 bp, synthetic construct
  source 1..75: mol_type = other DNA
gcagccgtaagatgacagaaatcgcgcaaaagctgaaagaaagcaacgagccgatactctatctggcagaacgtt

SEQ ID NO: 649698 - DNA, 75 bp, synthetic construct
  source 1..75: mol_type = other DNA
atgactgacagtgaactgatgcaattgagtgaacaggtcgggctggcactgaaagcccgtggcgcaaccgtcaca

SEQ ID NO: 649699 - DNA, 75 bp, synthetic construct
  source 1..75: mol_type = other DNA
gtcgatatcgcctcattcaaggcatggggagattttgccgcggataaacacagtctctattttgaaggcaagcgc

SEQ ID NO: 649700 - DNA, 75 bp, synthetic construct
  source 1..75: mol_type = other DNA
taaaaacgggctacagcgtaaagtcctcgacaaggaaaatctggcgtgggatgaagatttaacaaagcactgtct

SEQ ID NO: 649701 - DNA, 75 bp, synthetic construct
  source 1..75: mol_type = other DNA
cttacgctgcatcaggccctgaagcgggtggcggaagagggagactgtgctgacacagccaggggcctgcttggt

SEQ ID NO: 649702 - DNA, 75 bp, synthetic construct
  source 1..75: mol_type = other DNA
tgagccagtgtacgacttctggagctatttcaaaacctcggtacgctatcagtcttctcaggaagcaacaactgg

SEQ ID NO: 649703 - DNA, 75 bp, synthetic construct
  source 1..75: mol_type = other DNA
aaacccggggcggttcaggatgaacagggccgggactgccctgactgggtgccgggtgaattatggattggcggc

SEQ ID NO: 649704 - DNA, 75 bp, synthetic construct
  source 1..75: mol_type = other DNA
atgaaaatagcgcgggtgtatttgcgggttagtacagatgaacaggatttgacccggcaaaatgaaattattgaa

SEQ ID NO: 649705 - DNA, 75 bp, synthetic construct
  source 1..75: mol_type = other DNA
ctcaaagttgccctgcagctggcaagggatgattatgaaaaccgtcgcaaacgccagaaagagggcattgagctg

SEQ ID NO: 649706 - DNA, 75 bp, synthetic construct
  source 1..75: mol_type = other DNA
cgaatctttgtgaatgtagcgtgagtcttgtaaagtctgtatgggctaaatacaaacaacaaaagagtgataata

SEQ ID NO: 649707 - DNA, 75 bp, synthetic construct
  source 1..75: mol_type = other DNA
ggcccctgggataccctggctcgtacacggatcaaaatcctgatcaacggcgaacaactggatgccgacccggac

SEQ ID NO: 649708 - DNA, 75 bp, synthetic construct
  source 1..75: mol_type = other DNA
gccagcccatgcctttactggcaaatacgccgtttattgtcaccggctccggcaaattcttccgtaacgtccagc

SEQ ID NO: 649709 - DNA, 75 bp, synthetic construct
  source 1..75: mol_type = other DNA
acccgatgaaagcgtgccgttatatctacaacgtctggagtattatcgtcggctttatcggccgaagcaggtaga

SEQ ID NO: 649710 - DNA, 75 bp, synthetic construct
  source 1..75: mol_type = other DNA
tgcaatcgactttagtaccgaagatgtgactgccgctgtgcgcccgtcacttcgtatcgtctacaactggattga

SEQ ID NO: 649711 - DNA, 75 bp, synthetic construct
  source 1..75: mol_type = other DNA
gaaatattgcaaaagaaaaaacaatgcgtggatggtctggtgattatgtgtgctgcgattgcggatacaacgact

SEQ ID NO: 649712 - DNA, 75 bp, synthetic construct
  source 1..75: mol_type = other DNA
ctaaagacgcatttggagagcgtggtaaaaacgattttgtcaaaattaataaagaacgcgaaggcggtgatgctg

SEQ ID NO: 649713 - DNA, 75 bp, synthetic construct
  source 1..75: mol_type = other DNA
atcagccgtgaagagttgatagcgctcggcaagcgcttcggcgttacaccactcgccagtgcgctggcgctgtaa

SEQ ID NO: 649714 - DNA, 75 bp, synthetic construct
  source 1..75: mol_type = other DNA
ttctaatatttatactcacaggctgtgtcaataatgaaaaaatcagtcatgtagaaaatgatattcatctgataa

SEQ ID NO: 649715 - DNA, 75 bp, synthetic construct
  source 1..75: mol_type = other DNA
aatattttatgttcgtagagaaatttgatcattacttcccacgaaaaagcccttttaactcattattattcgagt

SEQ ID NO: 649716 - DNA, 75 bp, synthetic construct
  source 1..75: mol_type = other DNA
tatctaacaggaagtgtattaaccggaggtctggttctttcactggcttcaattgcctcgaaaaacattatttcg

SEQ ID NO: 649717 - DNA, 75 bp, synthetic construct
  source 1..75: mol_type = other DNA
tgcatctcggacgaagcacatcgcagccaagttaacctcgaccagaaagtcatcgtcgataaagaaagcggaaaa

SEQ ID NO: 649718 - DNA, 75 bp, synthetic construct
  source 1..75: mol_type = other DNA
aagccaagcacgaagtaaaaatttgctgccgatatccgcagtactatgccgcccgcaaactctattacagcatca

SEQ ID NO: 649719 - DNA, 75 bp, synthetic construct
  source 1..75: mol_type = other DNA
atcatcagcgtcgatatggacgaatataaaaacatttacgttatatcccaaaaacacacaggtcttagggaggtt

SEQ ID NO: 649720 - DNA, 75 bp, synthetic construct
  source 1..75: mol_type = other DNA
gtagcctcgttccattcatggggcgattttgccgtcgataaaaacagcatttattacaaaggccaacggacagat

SEQ ID NO: 649721 - DNA, 75 bp, synthetic construct
  source 1..75: mol_type = other DNA
gtactgacggcccgcaatggcgattacgccatcatggtgcgaacaaaagataaggatggtatcgaggcggtacaa

SEQ ID NO: 649722 - DNA, 75 bp, synthetic construct
  source 1..75: mol_type = other DNA
gtagaattttccaatctcaagggaaagagatataaagatatcatattttcaaatatttccgcattcattaataca

SEQ ID NO: 649723 - DNA, 75 bp, synthetic construct
  source 1..75: mol_type = other DNA
atattgtggagatcgctcgcatagaagcggtgatcgcccgatccggtgagcgcctggcacgccgcgtattaagcg

SEQ ID NO: 649724 - DNA, 75 bp, synthetic construct
  source 1..75: mol_type = other DNA
tcggcaacccggagcttatcggcaagcacgccggacatccggtacctgtcgggacgggcgggacactgcgtgact

SEQ ID NO: 649725 - DNA, 75 bp, synthetic construct
  source 1..75: mol_type = other DNA
tgtatggtaagtacggctccgaaatattggccggagcagcatataactgggggatgggtaacgtggataaactga

SEQ ID NO: 649726 - DNA, 75 bp, synthetic construct
  source 1..75: mol_type = other DNA
agcccaggggaaataccagttaatgccgggcacagggaaagaactggcggccaagcgtggcgttgaatacaaccc

SEQ ID NO: 649727 - DNA, 75 bp, synthetic construct
  source 1..75: mol_type = other DNA
atgcactatcgcaatgtggtttgtttgttgtcttgttcattgtttttatcgtcggcatggggatgtcggctttcc

SEQ ID NO: 649728 - DNA, 75 bp, synthetic construct
  source 1..75: mol_type = other DNA
tattgcacagtacaaaaaccaactctacgtcgtcaggcgctcgcattttggagaagatcggctcgaaatcataga

SEQ ID NO: 649729 - DNA, 75 bp, synthetic construct
  source 1..75: mol_type = other DNA
tcttcatttatcgtaaataaatcgggagtaggctggcgaaaagcgctttcacccgacctgcaatggagtgagtgg

SEQ ID NO: 649730 - DNA, 75 bp, synthetic construct
  source 1..75: mol_type = other DNA
aagctgggtgtcgcacatatgcatgtgacgctggcagatgaacgccactatgcttgcgccacggtaataattgaa

SEQ ID NO: 649731 - DNA, 75 bp, synthetic construct
  source 1..75: mol_type = other DNA
ctggcgtgataaaaacgggctgcagcgtaaagtgctgaatcagggaaatctggacaaagatagggcaaatagctg

SEQ ID NO: 649732 - DNA, 75 bp, synthetic construct
  source 1..75: mol_type = other DNA
gggcgcacaggcctggtatcctcattattcctggcatagcgatggtcgctatatcctctacgcgggtgaagttgt

SEQ ID NO: 649733 - DNA, 75 bp, synthetic construct
  source 1..75: mol_type = other DNA
taccgatcatgaatatcgtttgccagttaagcaccatcacaagaagactgattacacaacatccggctttagtcg

SEQ ID NO: 649734 - DNA, 75 bp, synthetic construct
  source 1..75: mol_type = other DNA
tgttgaaacagaagagattgaatcacgctattacacgctatcgtaacgaggctttcaagaaaggctatggtgata

SEQ ID NO: 649735 - DNA, 75 bp, synthetic construct
  source 1..75: mol_type = other DNA
gaagcaccgaacatcacagacagagtttcagcgagtccgtgaatggtttgattttgatatcaagcgttattatcg

SEQ ID NO: 649736 - DNA, 75 bp, synthetic construct
  source 1..75: mol_type = other DNA
tccctgccgtacatcatctggtcagcactattacagcacggctaccagagcaattacatgccagcgatctgctgc

SEQ ID NO: 649737 - DNA, 75 bp, synthetic construct
  source 1..75: mol_type = other DNA
ctgctctgcggggggtggaattgtcgccgatagccaggaagaagcggaatatcaggaaacttttgataaagttaa

SEQ ID NO: 649738 - DNA, 75 bp, synthetic construct
  source 1..75: mol_type = other DNA
tgcttaaacagaagagattgaatcatgccattacacgctatcgtaacgtggcttttaagaaaggctatggtgata

SEQ ID NO: 649739 - DNA, 75 bp, synthetic construct
  source 1..75: mol_type = other DNA
atgaatttcaggataccgacccccaacagtatcgaatttttcgccgtatctggcaccatcagccggaaaccgcat

SEQ ID NO: 649740 - DNA, 75 bp, synthetic construct
  source 1..75: mol_type = other DNA
aagcgccgccgcccgatgatgaaacgctggcttcccgccacgcgcaaattgtggcgcgtattgatacggtaaaac

SEQ ID NO: 649741 - DNA, 75 bp, synthetic construct
  source 1..75: mol_type = other DNA
gatatcttcacttatatgaaggcgcgtaatgaagttcacgcgcactacaccttagacaccaactggcgctcagca

SEQ ID NO: 649742 - DNA, 75 bp, synthetic construct
  source 1..75: mol_type = other DNA
ttcaagaaagggtatggtgatacaagggaattgttcgttgaactcgctaacgtgcgatatagccattattacaac

SEQ ID NO: 649743 - DNA, 75 bp, synthetic construct
  source 1..75: mol_type = other DNA
tccgcgtccaggatcaggcgttttatcacgatcgccactcgtttgaggcagttctggatcttaatgctgcgccag

SEQ ID NO: 649744 - DNA, 75 bp, synthetic construct
  source 1..75: mol_type = other DNA
aaactggaacttggcggttttgaagcgcactgggaacctgtattaaccgaatggatcaccgctattcttcaggcg

SEQ ID NO: 649745 - DNA, 75 bp, synthetic construct
  source 1..75: mol_type = other DNA
gcaaatttactgctctgcgggcggcggtattgtcgccgatagccaggaagaggcggaatatcaggaaacttttga

SEQ ID NO: 649746 - DNA, 75 bp, synthetic construct
  source 1..75: mol_type = other DNA
ttacatcactacgggcagctctctgcgctatgccttgtggggcgggttgatgtctacccgtgccatgcatctgaa

SEQ ID NO: 649747 - DNA, 75 bp, synthetic construct
  source 1..75: mol_type = other DNA
ttcagcgtctgcctggggcgattggttacgttgaatatgcttacgccaagcagaacaacctcgcctacaccaaac

SEQ ID NO: 649748 - DNA, 75 bp, synthetic construct
  source 1..75: mol_type = other DNA
gaagcaagcctgacaggtgcgggtgcaaccttccctgcgccggtgtatgccaaatgggctgacacttaccagaaa

SEQ ID NO: 649749 - DNA, 75 bp, synthetic construct
  source 1..75: mol_type = other DNA
tatttcactggcaatggaaggtgcgctggctgttattgctgttgtgggcgtttactgcctggttgtgtttttgat

SEQ ID NO: 649750 - DNA, 75 bp, synthetic construct
  source 1..75: mol_type = other DNA
gtaaaaacgttcgccgggattaacaccaaaggagggaatatgtcggatgatatatcactggcaatggaaggtgcg

SEQ ID NO: 649751 - DNA, 75 bp, synthetic construct
  source 1..75: mol_type = other DNA
agaaagctcagtttgaatatctcttcgtgaccaaagtggatgagctgaccatcggtgatctgtaccgactctatg

SEQ ID NO: 649752 - DNA, 75 bp, synthetic construct
  source 1..75: mol_type = other DNA
acgcaatctttaaggcttttttatcccgaccagaaacggcccgtgactttattgaaattcatctgccgccttctt

SEQ ID NO: 649753 - DNA, 75 bp, synthetic construct
  source 1..75: mol_type = other DNA
atggatgccgtggcagctggtttggtttctttaggcgcagagaaagaactcattctgtggcgctggctggtagca

SEQ ID NO: 649754 - DNA, 75 bp, synthetic construct
  source 1..75: mol_type = other DNA
ttaaagggaaaacacaaggtttgatctctgagggctgtggttcgtatgcatctattggtaataaatatcaaataa

SEQ ID NO: 649755 - DNA, 75 bp, synthetic construct
  source 1..75: mol_type = other DNA
aaaacagattatcgctaacaccgttgatttcggtgcctctgacgcgccgctgtctgacgaaaaactggctcagga

SEQ ID NO: 649756 - DNA, 75 bp, synthetic construct
  source 1..75: mol_type = other DNA
ttcagcgtctgccgggtgcaattggttacgttgaatatgcttacgcgaagcagaacaacctggcgtacaccaaac

SEQ ID NO: 649757 - DNA, 75 bp, synthetic construct
  source 1..75: mol_type = other DNA
ctggatatgcaaaacaaaggtaatgcaatgccgttgccacaattacttggttatcaacagcttggtattttacct

SEQ ID NO: 649758 - DNA, 75 bp, synthetic construct
  source 1..75: mol_type = other DNA
aaactggaactcggcggctttgaatcgcagtgggaaccggtgttgaccgagtggatcacggctgtcctccaggca

SEQ ID NO: 649759 - DNA, 75 bp, synthetic construct
  source 1..75: mol_type = other DNA
ccgctggtggagtacacccgcgaccgcctgcaccgggaaacgctgcgcagcttcggccgttatgaactcaccacc

SEQ ID NO: 649760 - DNA, 75 bp, synthetic construct
  source 1..75: mol_type = other DNA
ggcgtcacttccggctggtactgaccacgcaggcgcagcgggcagaagaagcccggcagcaggccatttccggcg

SEQ ID NO: 649761 - DNA, 75 bp, synthetic construct
  source 1..75: mol_type = other DNA
cttaaaaacagtggctatttaatcggggcgcgtagttctggggggatccacaacgcagtgctaacggctaaaggt

SEQ ID NO: 649762 - DNA, 75 bp, synthetic construct
  source 1..75: mol_type = other DNA
tgcgcagctttacttacgatgataaataccggggccggatggtggcgcaccgtcacacgggccgaccggaaatcc

SEQ ID NO: 649763 - DNA, 75 bp, synthetic construct
  source 1..75: mol_type = other DNA
cgtccggccatccggtcaatccgctgctcggtgcaaaggtccttcccggtgaaaccgacatcgccctgcccgccc

SEQ ID NO: 649764 - DNA, 75 bp, synthetic construct
  source 1..75: mol_type = other DNA
ctaatgttttcaaaacattcttcagagcattaagcccttacgactacacactgtattgcaggaagtgggtaaaac

SEQ ID NO: 649765 - DNA, 75 bp, synthetic construct
  source 1..75: mol_type = other DNA
agtcaggggcaacgtgccgatgaccttacccgccagacggcgggtgaatttgccgagcagtttaatctgcgcctg

SEQ ID NO: 649766 - DNA, 75 bp, synthetic construct
  source 1..75: mol_type = other DNA
cgggcgtgagttaatgctgacgttaaatagtcagcaagagtatcgcgcctgtgaaacgcaactgcgggatgcccg

SEQ ID NO: 649767 - DNA, 75 bp, synthetic construct
  source 1..75: mol_type = other DNA
agtcagggacaacgtgccgacgaccttacccgccagacggcgggagaatttgccgaacagtttaatctgcgcctg

SEQ ID NO: 649768 - DNA, 75 bp, synthetic construct
  source 1..75: mol_type = other DNA
tttagtcagaatgcgctggtactgcttgatctggaaaaggagcaagaatactgggaaggcgtggctggctggcgg

SEQ ID NO: 649769 - DNA, 75 bp, synthetic construct
  source 1..75: mol_type = other DNA
ttctgacggggcgttacgcgaaggcgtactgtatgaaatggaaggacgtttccgtcatcaggatgtgcgtagtcg

SEQ ID NO: 649770 - DNA, 75 bp, synthetic construct
  source 1..75: mol_type = other DNA
agggtatcggttcttccggtggcgtaaaacagattatcgcaaataccgttgattttggtgcctctgacgcgccgc

SEQ ID NO: 649771 - DNA, 75 bp, synthetic construct
  source 1..75: mol_type = other DNA
tggtggccaagaccaacggggagaatcaaaaggagatggtctatgggggccaggtaaagcaagtaatgatacaaa

SEQ ID NO: 649772 - DNA, 75 bp, synthetic construct
  source 1..75: mol_type = other DNA
tgaagtattaaaaattggtcgtacaacattatggcgcaaacttaaaatctataatctctatccaaatgttgagca

SEQ ID NO: 649773 - DNA, 75 bp, synthetic construct
  source 1..75: mol_type = other DNA
attttacctttgacagtttacatgcggcttcaggtggtatgaagcaggtattacttatcgctcgccgggcaatta

SEQ ID NO: 649774 - DNA, 75 bp, synthetic construct
  source 1..75: mol_type = other DNA
caggctgcgacccgaacatggcagtcgcagcaaaggcctcttagcgacggaaatcaatcaccatacggccacgga

SEQ ID NO: 649775 - DNA, 75 bp, synthetic construct
  source 1..75: mol_type = other DNA
gcgcgatgccttaacgttgctggaaatcccttccgtttacctttcgaaccgcgacagtgtttttgaaactctgga

SEQ ID NO: 649776 - DNA, 75 bp, synthetic construct
  source 1..75: mol_type = other DNA
gcaacggcaggcggcgagcggcgtcttactgatatcttgcatattagcgagctgctccaggaagcgggaacacag

SEQ ID NO: 649777 - DNA, 75 bp, synthetic construct
  source 1..75: mol_type = other DNA
acgaatttcaggacaccgaccctcaacagtaccggatttttcgccgtatctggcaccatcagccggaaacggcgt

SEQ ID NO: 649778 - DNA, 75 bp, synthetic construct
  source 1..75: mol_type = other DNA
aggtgacggcggtgcaccgcgaggaaggcctgagccagtaccacgcatacgacagccgtggacagttaactgcgg

SEQ ID NO: 649779 - DNA, 75 bp, synthetic construct
  source 1..75: mol_type = other DNA
aaaccatgacgtggagccgttacggtcagttgctgagcttcactgactgttccggttatgtaacccgttatgacc

SEQ ID NO: 649780 - DNA, 75 bp, synthetic construct
  source 1..75: mol_type = other DNA
gcactctggcaggcgctgccggaagaactccgcttaagtccgcatcgttatctggcgacaaacagtccgcagggg

SEQ ID NO: 649781 - DNA, 75 bp, synthetic construct
  source 1..75: mol_type = other DNA
ttaaattcaaagcgattgtctggaaggtatgtcaccatatattggataagtattattttactttactttttgtct

SEQ ID NO: 649782 - DNA, 75 bp, synthetic construct
  source 1..75: mol_type = other DNA
tggctgtagcgatattgttatggtttcttagtacattaagacaaaaaccaagtccaaaaaaaggatgtgttgatg

SEQ ID NO: 649783 - DNA, 75 bp, synthetic construct
  source 1..75: mol_type = other DNA
gatgagcgctttctctgtgtttgcagaagcaagcctgacaggtgcaggtgcaaccttccctgcgccggtgtatgc

SEQ ID NO: 649784 - DNA, 75 bp, synthetic construct
  source 1..75: mol_type = other DNA
tggctctgcttgccagtagtgccagcctggcagcgacgccgtggcaaaaaataacccaacctgtgccgggtagcg

SEQ ID NO: 649785 - DNA, 75 bp, synthetic construct
  source 1..75: mol_type = other DNA
tgtagataacaagagacttggccatgtgttggatgttgcccgtcaggtccagagaaaacgggacaataatcgctc

SEQ ID NO: 649786 - DNA, 75 bp, synthetic construct
  source 1..75: mol_type = other DNA
ggagaaaacggctgagcattaccgcaacaaaattgccatttacttgcattggtatcagaaaaaaggtatcgaggt

SEQ ID NO: 649787 - DNA, 75 bp, synthetic construct
  source 1..75: mol_type = other DNA
gagtggaccgttgaagtcattattcaaaagtatggtgataatattgaaaatgacaaaaacgagctttttattcca

SEQ ID NO: 649788 - DNA, 75 bp, synthetic construct
  source 1..75: mol_type = other DNA
cagcactgttgctgatattcgcctgcgtcaccggtaatgcgggcaatatgttccaggggacgttggtagtttcca

SEQ ID NO: 649789 - DNA, 75 bp, synthetic construct
  source 1..75: mol_type = other DNA
aaattttcagcttgatcaaactcgccgcccaggacaaagacgtcacgcgcatttttgttaatccggcgattaaac

SEQ ID NO: 649790 - DNA, 75 bp, synthetic construct
  source 1..75: mol_type = other DNA
cagcaagccttcttcggcctcttcaccggcgaaaccgaagataaatggggctggttagatcaagttaatcaataa

SEQ ID NO: 649791 - DNA, 75 bp, synthetic construct
  source 1..75: mol_type = other DNA
gtattccgccatcgtgagcatatgcagcgtctgcatgactccgccaaaatctatcgcttcccggtttcgcagagc

SEQ ID NO: 649792 - DNA, 75 bp, synthetic construct
  source 1..75: mol_type = other DNA
taacggctcaccattttttatggaaatagagccgcgttttagtatcgacaaattaacgggattagacttaagttt

SEQ ID NO: 649793 - DNA, 75 bp, synthetic construct
  source 1..75: mol_type = other DNA
aagaactatcagcgttataacgaacggataaaaggaaaacgtcaggaatgggggatactatgcaacaacgattaa

SEQ ID NO: 649794 - DNA, 75 bp, synthetic construct
  source 1..75: mol_type = other DNA
cggcagaaatcacgccagtgcgcagtgtagatggtattcaggttggtgaaggccgttgcggcccggttaccaaac

SEQ ID NO: 649795 - DNA, 75 bp, synthetic construct
  source 1..75: mol_type = other DNA
gtcgcgcgaatcactgtacctggcggatgaagtgtttatgtctggtacagcggctgaaatcacgccagtgcgcag

SEQ ID NO: 649796 - DNA, 75 bp, synthetic construct
  source 1..75: mol_type = other DNA
atttttggaacgatcaatttgagttaaaggatttgaaagagcttaaaagtttagaaggtttcaaattttcagatc

SEQ ID NO: 649797 - DNA, 75 bp, synthetic construct
  source 1..75: mol_type = other DNA
tatgactcacaatgggcggtaatttgttccattgccccaaagattggctgtacaccggagactctgcatgtctgg

SEQ ID NO: 649798 - DNA, 75 bp, synthetic construct
  source 1..75: mol_type = other DNA
gggccatgcgttgccttaatatcacccctctgtgcgcggaaaccagtcaggcaaaaggccgcgttgaacgcgccc

SEQ ID NO: 649799 - DNA, 75 bp, synthetic construct
  source 1..75: mol_type = other DNA
aaaattactggcgacgagaatgtggcaaaaaatgaattagaaccgtggacacctgaaggaaacgcaccaaattat

SEQ ID NO: 649800 - DNA, 75 bp, synthetic construct
  source 1..75: mol_type = other DNA
agccgctggtacaaaagtgaagtggagcagtggatgcaacaacgaatcgaggaatcccggggggcagcagcatga

SEQ ID NO: 649801 - DNA, 75 bp, synthetic construct
  source 1..75: mol_type = other DNA
tcaccgtgaaagaaattaaccgcctcaaaatccttcaggacgtcatcgatcgcaacctgcgtcctggccaggctg

SEQ ID NO: 649802 - DNA, 75 bp, synthetic construct
  source 1..75: mol_type = other DNA
gtacgccagcatgagcgggatcgagtaggaggagggataactcccgccgtcctctcacaccaccgtacatgcggc

SEQ ID NO: 649803 - DNA, 75 bp, synthetic construct
  source 1..75: mol_type = other DNA
tgcctacgaagacgattattttaatgtccatatcacgctggtaaacggcggaccagtgattccactgagtgttga

SEQ ID NO: 649804 - DNA, 75 bp, synthetic construct
  source 1..75: mol_type = other DNA
ttgaccacttcactgttgcccatttcagcagcggataagcggaggttttattattattttcaggaaaaaaacacc

SEQ ID NO: 649805 - DNA, 75 bp, synthetic construct
  source 1..75: mol_type = other DNA
caaaaatctcaatgactcagagattgaaatcaataaaataaccacaccaagcccttttgacttgaggaaaagaaa

SEQ ID NO: 649806 - DNA, 75 bp, synthetic construct
  source 1..75: mol_type = other DNA
acctgaaggagtcgaaccaaattattgctggtgggatgttgatccagttgatgctgcaaatgaagctatgagtta

SEQ ID NO: 649807 - DNA, 75 bp, synthetic construct
  source 1..75: mol_type = other DNA
aagaagcgtcgtaaaaccgatgaagagcttgaggcgatagccacaagcggcattgaaatggatagcggtctctgg

SEQ ID NO: 649808 - DNA, 75 bp, synthetic construct
  source 1..75: mol_type = other DNA
ttcaacgtatcgaaaccgggaaggttgctgcaaagctgagtctcgcacaggcaatatgcaatgccctggataaac

SEQ ID NO: 649809 - DNA, 75 bp, synthetic construct
  source 1..75: mol_type = other DNA
aaaagatcagatctatatccagaatatcgcgcatgggctcatgtggattggtttgatttctatggttatgcggat

SEQ ID NO: 649810 - DNA, 75 bp, synthetic construct
  source 1..75: mol_type = other DNA
tgcttcccgggtagtgccaactgcaaatgaaaatcgcccgcgaaatcttgcattcaattacatagttcgtgcagc

SEQ ID NO: 649811 - DNA, 75 bp, synthetic construct
  source 1..75: mol_type = other DNA
ctgttccgtggccctcagccactccgccaacaggctggctaaaatgcaacggagcagctttttctgctgaagaat

SEQ ID NO: 649812 - DNA, 75 bp, synthetic construct
  source 1..75: mol_type = other DNA
tgcgtaataaaaaacgccgccgcgaactgggcaatctcatcaaacgctttcgtagcggcgcggagtcgctgcccg

SEQ ID NO: 649813 - DNA, 75 bp, synthetic construct
  source 1..75: mol_type = other DNA
aagcagatgatgaagaaaaagatgccgccgctgaacatgaaatactacgtgcattcaggacattactggattcag

SEQ ID NO: 649814 - DNA, 75 bp, synthetic construct
  source 1..75: mol_type = other DNA
atgaagatgtcgatgagccaacacctgaaaaccatgaagaaaaaaatgatgagggtgaaaaaccacagagcatta

SEQ ID NO: 649815 - DNA, 75 bp, synthetic construct
  source 1..75: mol_type = other DNA
cggaactcattcctgtagccaaacagtggcaaatggaagaaccagaaagcgaagatgcccgatattacttgtgtg

SEQ ID NO: 649816 - DNA, 75 bp, synthetic construct
  source 1..75: mol_type = other DNA
cattcaaagaaagagtgattctgtactaatccctgcaggtactgagtttttcgttttcccatctgaggaagaaag

SEQ ID NO: 649817 - DNA, 75 bp, synthetic construct
  source 1..75: mol_type = other DNA
ttgttttaatgatggcgtttccattggtaaacttcgcatatgcgaaaaatgaacaagtttttagagttttgaata

SEQ ID NO: 649818 - DNA, 75 bp, synthetic construct
  source 1..75: mol_type = other DNA
ccgcaaactcggcatcaaacccacccatattgttgtccccacctcgctggaaaaacaggcggtgcagctgctgga

SEQ ID NO: 649819 - DNA, 75 bp, synthetic construct
  source 1..75: mol_type = other DNA
ccaacgtaagccatgagttacgcacgccattgaccgtgttacagggttacctggagatgatggatgagcaaccgc

SEQ ID NO: 649820 - DNA, 75 bp, synthetic construct
  source 1..75: mol_type = other DNA
aaatggcatccacgcggcgtttcattatttgaaaaagaattacatttcaggttgcgttatgacagtcccaacagg

SEQ ID NO: 649821 - DNA, 75 bp, synthetic construct
  source 1..75: mol_type = other DNA
gacaatcgccagtacatttattggttgattatgtagctacgactatcctgtgggcgttatttgctttgtttatat

SEQ ID NO: 649822 - DNA, 75 bp, synthetic construct
  source 1..75: mol_type = other DNA
ggccattatcacccggatgctgttgacgaaagtgaaactcgagccggaggatgaagatgtcgatgagccaacacc

SEQ ID NO: 649823 - DNA, 75 bp, synthetic construct
  source 1..75: mol_type = other DNA
taactgatcctaaactaaaaatctctacaaaaatagaaccaattgatggcttaaatcacgactcagcagttcaat

SEQ ID NO: 649824 - DNA, 75 bp, synthetic construct
  source 1..75: mol_type = other DNA
gcgataaagaagagcttcatacacaactcattataagcacacattcgagccatattgcccacgagtgtaaatttt

SEQ ID NO: 649825 - DNA, 75 bp, synthetic construct
  source 1..75: mol_type = other DNA
gatgaggaatggtggcaggatttccgagccgcaatgctagagcttcaggaacgtcgtcgggaggagttgaagtga

SEQ ID NO: 649826 - DNA, 75 bp, synthetic construct
  source 1..75: mol_type = other DNA
cgcatttaatagtaaaggagaaatgaccacaatagattcaacgggatgggcatattatttaactgtcgggtacac

SEQ ID NO: 649827 - DNA, 75 bp, synthetic construct
  source 1..75: mol_type = other DNA
gaggtgctggcgatggattaccctgagccactggataccctcagcctgccaattctggcatgggcgcgcctgtat

SEQ ID NO: 649828 - DNA, 75 bp, synthetic construct
  source 1..75: mol_type = other DNA
gcattcagggcattactggattctgaaagtgatcgttttcagccctccgcctggcagaaatttattcagcaatta

SEQ ID NO: 649829 - DNA, 75 bp, synthetic construct
  source 1..75: mol_type = other DNA
aaaaaatgatgaggatgaaaaaccacagagcattaccagcattatcaaaatcagcttaacggtgctggtgatagg

SEQ ID NO: 649830 - DNA, 75 bp, synthetic construct
  source 1..75: mol_type = other DNA
gtgatggttatcgaagcgcggagcatggtagatgcgcaaggtaaaccgttgaaatatgttcctggtgagagcgcc

SEQ ID NO: 649831 - DNA, 75 bp, synthetic construct
  source 1..75: mol_type = other DNA
tgttgttgcagtggagcaagcgtcattgcccggattatttcgcgttattagtgatggttatcgaagcgcagagca

SEQ ID NO: 649832 - DNA, 75 bp, synthetic construct
  source 1..75: mol_type = other DNA
atgaaaacatgttggcaaattctcgaaatcgaaagcacaacgcaaattgatattatccgtcaggcttatcttgct

SEQ ID NO: 649833 - DNA, 75 bp, synthetic construct
  source 1..75: mol_type = other DNA
cacaagctgataatttgttgttgcagtggagtaagcgtcattgtccggattacttcgcgttgttagtgatggtta

SEQ ID NO: 649834 - DNA, 75 bp, synthetic construct
  source 1..75: mol_type = other DNA
tccagaatgtcactgagaatgcggataacacagcctggacagtggaacagttgttcacgtctgcgttcagtagca

SEQ ID NO: 649835 - DNA, 75 bp, synthetic construct
  source 1..75: mol_type = other DNA
taaaacagcaggagcttcagaaacagacggcactcaacgagctgaagaaaaaaacaattcagctgaccagtcaac

SEQ ID NO: 649836 - DNA, 75 bp, synthetic construct
  source 1..75: mol_type = other DNA
tcttttacttcttctgtgctgtcagatatgtccagaatcatggctcagatagctttaatgaaagcggtaaaaggc

SEQ ID NO: 649837 - DNA, 75 bp, synthetic construct
  source 1..75: mol_type = other DNA
gtggatgcagacaatacggcaggcactgctgagcagatgcttacagcggcatttaacagtgcaggtaatgcactg

SEQ ID NO: 649838 - DNA, 75 bp, synthetic construct
  source 1..75: mol_type = other DNA
aacagcttctggctctgcagcagcgcatcagcgacctggacgggaaagaactgacggcagatgaaaagagtgtgc

SEQ ID NO: 649839 - DNA, 75 bp, synthetic construct
  source 1..75: mol_type = other DNA
gttgtctccacgctgtggaagccagaaattttcagcttgatcaaactcgccgcccaggacaaagacgtcacgcgc

SEQ ID NO: 649840 - DNA, 75 bp, synthetic construct
  source 1..75: mol_type = other DNA
aagagaaagagaagccacgggtgaaaaaacgccatcgcgataccaaaaatattggtaagcgccgcaaaccaagcg

SEQ ID NO: 649841 - DNA, 75 bp, synthetic construct
  source 1..75: mol_type = other DNA
ataaaaccgcgttgctggtgcacctgttaaaacagcctgaagcgactcgctcaatcgtatttgtgcgtaagcgtg

SEQ ID NO: 649842 - DNA, 75 bp, synthetic construct
  source 1..75: mol_type = other DNA
accgtatcgggcgtaccgctcgcgctggtcgtaaaggtatcgctatctcgctggttgaagctcatgaccatctgc

SEQ ID NO: 649843 - DNA, 75 bp, synthetic construct
  source 1..75: mol_type = other DNA
cacgcggtatcgacattccggatgtcagccacgtctttaacttcgatatgccgcgcagtggcgatacttatttgc

SEQ ID NO: 649844 - DNA, 75 bp, synthetic construct
  source 1..75: mol_type = other DNA
ataaaaccgcgttgctggtgcatctgttaaaacagccggaagcgacccgctcaattgtgtttgtgcgtaagcgtg

SEQ ID NO: 649845 - DNA, 75 bp, synthetic construct
  source 1..75: mol_type = other DNA
cgatttcccccgtaagaaatccggtccgccgcgtattttgatcctcaccccgactcgcgaactggcgatgcaggt

SEQ ID NO: 649846 - DNA, 75 bp, synthetic construct
  source 1..75: mol_type = other DNA
tagtcgggctggatgctggcgtggctaaactcgccacgctgtcagatggcacagtctttgagcctgtaaacagtt

SEQ ID NO: 649847 - DNA, 75 bp, synthetic construct
  source 1..75: mol_type = other DNA
gataccaggcacagttcagtctgcaacaaaaatatcagcagcagcgggaacagttggagcgtgacagtaagcgga

SEQ ID NO: 649848 - DNA, 75 bp, synthetic construct
  source 1..75: mol_type = other DNA
gcgcataagcagcttctggccctgcagcagcgtatcagtgatctggcgggtaaaaagctgacagcagatgaaaaa

SEQ ID NO: 649849 - DNA, 75 bp, synthetic construct
  source 1..75: mol_type = other DNA
acagcggcatttaacagtgcaggtaatgcactggcgacgttctgcacgacaggtaaactgaatttcaaatccttt

SEQ ID NO: 649850 - DNA, 75 bp, synthetic construct
  source 1..75: mol_type = other DNA
tggtcaggctggctggaaagagtgaatgcagaaggtcttattcgctcaatgtcccgcaaaggatgttcacctgat

SEQ ID NO: 649851 - DNA, 75 bp, synthetic construct
  source 1..75: mol_type = other DNA
gaaacgggagagccctatgctgagttcgaccgactatatgcactgaaagacaaacagttcggcacgctgaaataa

SEQ ID NO: 649852 - DNA, 75 bp, synthetic construct
  source 1..75: mol_type = other DNA
cgttttttgcttttgcaaaaggcgcgggtgtgatgggggaagcgggacctgaagccattctgccattgcgtcgtg

SEQ ID NO: 649853 - DNA, 75 bp, synthetic construct
  source 1..75: mol_type = other DNA
gtgcggctgaggtgtatatcagcaaaatggaaaaagccgggaaggtcacgcattcgctggggctgaaaagtgcgg

SEQ ID NO: 649854 - DNA, 75 bp, synthetic construct
  source 1..75: mol_type = other DNA
cgcgctcagcgtcagcaacatgacctggatatcgccacggtgggtatgggtgatcagcagcggcagcgatatcag

SEQ ID NO: 649855 - DNA, 75 bp, synthetic construct
  source 1..75: mol_type = other DNA
gatttgaaggtcagcaacatgtcaaagtcagcagcgggtacggtcagccagccggggcgcaatgtccgggcaaaa

SEQ ID NO: 649856 - DNA, 75 bp, synthetic construct
  source 1..75: mol_type = other DNA
caggcaaccatgatgaaggctgtcaaagggattggcagtgtgatggggtttgatttcggtgatgtgaaaaccaat

SEQ ID NO: 649857 - DNA, 75 bp, synthetic construct
  source 1..75: mol_type = other DNA
gcggtcagggacgcagcgatacagcgtgaaaatgaacgttacgaaaaagccattaagaaaaaaacgcctgccacc

SEQ ID NO: 649858 - DNA, 75 bp, synthetic construct
  source 1..75: mol_type = other DNA
gattggtgaactggcgcgtggtaatttcggtgcgcttcgtggctccgggatcaccctggctaaccgtgccggctg

SEQ ID NO: 649859 - DNA, 75 bp, synthetic construct
  source 1..75: mol_type = other DNA
gagcgtctgctggaagatccggtggaggtttctgcgaatccgtccactcgtgagcgcaaaaaaattcatcagtgg

SEQ ID NO: 649860 - DNA, 75 bp, synthetic construct
  source 1..75: mol_type = other DNA
acagcctatggattggtgaactttttattatatctacctggcggctgggctgccgatagattttctgcacgtaaa

SEQ ID NO: 649861 - DNA, 75 bp, synthetic construct
  source 1..75: mol_type = other DNA
aacgcgatccggtcggaaacggtggtgttcctcgcgttctctgggagatcaggagaatgagtaccgctggcattc

SEQ ID NO: 649862 - DNA, 75 bp, synthetic construct
  source 1..75: mol_type = other DNA
gactgatgacatcagcagagcgctggcttttgctattaagtgggtggctgttggtattgctgtgtctccgatgct

SEQ ID NO: 649863 - DNA, 75 bp, synthetic construct
  source 1..75: mol_type = other DNA
cagtttgccgaagaagttcaaacggaaaatcgtctgcgctatctggtatgcctgacagtggctgacatttgcgcc

SEQ ID NO: 649864 - DNA, 75 bp, synthetic construct
  source 1..75: mol_type = other DNA
aacgcgatccggtcggaaacggtggtattcctcgtgtgctctgggaaatcaggagaatgagtaccgctggcattc

SEQ ID NO: 649865 - DNA, 75 bp, synthetic construct
  source 1..75: mol_type = other DNA
gtacacgcgatctggtcggaagtggtggtgttccttgtgtgctccgggaaatcaggagaatgagcactactgtca

SEQ ID NO: 649866 - DNA, 75 bp, synthetic construct
  source 1..75: mol_type = other DNA
tggtcggactggatgctggcgtggctaaactcgccacgctgtcagatggcacagtctttggacctgtaaacagtt

SEQ ID NO: 649867 - DNA, 75 bp, synthetic construct
  source 1..75: mol_type = other DNA
ggttttataagctgatcagtgaagaccatttctctcacttcatcaagccgggccgatccagccgcaggtataaaa

SEQ ID NO: 649868 - DNA, 75 bp, synthetic construct
  source 1..75: mol_type = other DNA
aactgctggttgccggtgatttcagtaacggacaggaagagcgtccactgtcagagcgtgtaaaaacggatatta

SEQ ID NO: 649869 - DNA, 75 bp, synthetic construct
  source 1..75: mol_type = other DNA
gacagcgaaacgagaacaacaggtttctttcagccaaccctattatgaagggctatctgctgtggttgtcactcg

SEQ ID NO: 649870 - DNA, 75 bp, synthetic construct
  source 1..75: mol_type = other DNA
atgttgacctcaataacaggccacgacagcgtattgctgcgtgtcgacgatccactgatcgacatgaactacatc

SEQ ID NO: 649871 - DNA, 75 bp, synthetic construct
  source 1..75: mol_type = other DNA
aatggttttacaagttgatcagtgaaggccatttccctaaacccatcaaactggggcgcagcagccgctggtaca

SEQ ID NO: 649872 - DNA, 75 bp, synthetic construct
  source 1..75: mol_type = other DNA
accaacgaaacactgtggaatagctggaagcaaagtctgttgcgcgaactctattttgccaccgaaaagcagcta

SEQ ID NO: 649873 - DNA, 75 bp, synthetic construct
  source 1..75: mol_type = other DNA
aaacatacgcatctggatatcgccaccatcaccggcggcgtagcctatatgaaccacgcggaagtgttcagcgaa

SEQ ID NO: 649874 - DNA, 75 bp, synthetic construct
  source 1..75: mol_type = other DNA
tcgccgcactgtttcacgatatcgccaaagggcgcggcggtgaccactccatactcggcgcacaagacgtggtgc

SEQ ID NO: 649875 - DNA, 75 bp, synthetic construct
  source 1..75: mol_type = other DNA
tttgacagcgggatttctgcggaacaattgattgaggcgcgcactgagtttatcgaccagctcctgcaacgttta

SEQ ID NO: 649876 - DNA, 75 bp, synthetic construct
  source 1..75: mol_type = other DNA
cgcccaggatatcgaacatattgctggcgaaactcgctggcgtaaacaaaccctgctcttctcagcaacgctgga

SEQ ID NO: 649877 - DNA, 75 bp, synthetic construct
  source 1..75: mol_type = other DNA
gtgcgccaagcgagaagcagaccggcaagccatcgaagaaagtactggcaaaacgcgccgagaagaaaaaagcta

SEQ ID NO: 649878 - DNA, 75 bp, synthetic construct
  source 1..75: mol_type = other DNA
gttgaaacgctgatcctcgacgaagcagaccgtatgctggatatgggcttcgctcaggatatcgaacatattgct

SEQ ID NO: 649879 - DNA, 75 bp, synthetic construct
  source 1..75: mol_type = other DNA
ggaagcaaagtctgttgcgtgaactctattttgccaccgaaaagcagctacgacgcggaatgcaaaacacgccgg

SEQ ID NO: 649880 - DNA, 75 bp, synthetic construct
  source 1..75: mol_type = other DNA
cgccacgcccgtcgccatctgcaacaaccactgtgcaatattccggaagcgcgaaaactgtttttgagcattcta

SEQ ID NO: 649881 - DNA, 75 bp, synthetic construct
  source 1..75: mol_type = other DNA
attttgccgaactccacgggcttaactcgcgcgaaacacagctggtggcgtggctggttcgccagcacctgttga

SEQ ID NO: 649882 - DNA, 75 bp, synthetic construct
  source 1..75: mol_type = other DNA
gttcacgacgcacaaattttcaccactcgcgacggtatggcgatggatacctttatcgtgctggaacccgatggt

SEQ ID NO: 649883 - DNA, 75 bp, synthetic construct
  source 1..75: mol_type = other DNA
agatttttatctggagcccggaccgtccttatctgtttgccgctgtatgcgccgagttagaccgccgtaacttaa

SEQ ID NO: 649884 - DNA, 75 bp, synthetic construct
  source 1..75: mol_type = other DNA
cgacgcggaatgcaaaacacgccggatatgcgcgaacgggttcgccatcatcagttacaggcactggcgttgctg

SEQ ID NO: 649885 - DNA, 75 bp, synthetic construct
  source 1..75: mol_type = other DNA
gagcagatcgataaaatcgctcagggccacgtctggactggtcaggatgcgaaagctaacggtctggtcgatagt

SEQ ID NO: 649886 - DNA, 75 bp, synthetic construct
  source 1..75: mol_type = other DNA
ttggtaaagccctgaaagagtttcgtgacagcggcaaaccggtttatgccattggcgagaactacagccaggggc

SEQ ID NO: 649887 - DNA, 75 bp, synthetic construct
  source 1..75: mol_type = other DNA
tgccaattacatcgtggcaaacccaagcactctgacaggttccatcggtatcttcggcgtaatcaccaccgtaga

SEQ ID NO: 649888 - DNA, 75 bp, synthetic construct
  source 1..75: mol_type = other DNA
ggcgctgtggatcaagttgattcataacccgacagatcacccacgtatgtctgcggaagagctgaagtttatctc

SEQ ID NO: 649889 - DNA, 75 bp, synthetic construct
  source 1..75: mol_type = other DNA
tatcaactacgtgccttcagctggcgcaatttccactggcacagcctccccggatgtaagaagggtgcaaaaagg

SEQ ID NO: 649890 - DNA, 75 bp, synthetic construct
  source 1..75: mol_type = other DNA
ataaagtcgttggcgttcgtaataataatttcgcgccgggcgccggtgcggtagcaaccggtacggcttccccgg

SEQ ID NO: 649891 - DNA, 75 bp, synthetic construct
  source 1..75: mol_type = other DNA
tgattgagaagattttccctaatatcactgaagcgatgaaaaaggaatttgataaagatctcttgaaatttccgc

SEQ ID NO: 649892 - DNA, 75 bp, synthetic construct
  source 1..75: mol_type = other DNA
tcaaaccttgatgccattattcaggatcagacatttagccagttggccataccggtgcagtcacttttacctggt

SEQ ID NO: 649893 - DNA, 75 bp, synthetic construct
  source 1..75: mol_type = other DNA
tactgaggcgatgaaaaaggaatttgataaagatctcttgaattttccgccaaaaaatgatctaaatacccttga

SEQ ID NO: 649894 - DNA, 75 bp, synthetic construct
  source 1..75: mol_type = other DNA
aaagaaaccgccggtcgtggcgcactactgctcgatatttccggcgtgatcgtcgataagcccgacagttcgcag

SEQ ID NO: 649895 - DNA, 75 bp, synthetic construct
  source 1..75: mol_type = other DNA
tgatgatatgtcccctgcggcccgtgaagctgatagtcgctggattggtgaactgtggcaaaactatctcaacac

SEQ ID NO: 649896 - DNA, 75 bp, synthetic construct
  source 1..75: mol_type = other DNA
aaatggggacaaaacgtgtcttcaccttcgattctgagagcggtaatcagccattctatctgtctccagacccga

SEQ ID NO: 649897 - DNA, 75 bp, synthetic construct
  source 1..75: mol_type = other DNA
ttaataacattacctatgcgttgatgctttcactatcgggtgtgccggcttacgctgtagactttaatactgatg

SEQ ID NO: 649898 - DNA, 75 bp, synthetic construct
  source 1..75: mol_type = other DNA
atgtctatttgtggctcattgaatgtccaggctatagtttttcaaacctgtatgcctagtcaacgactcactttt

SEQ ID NO: 649899 - DNA, 75 bp, synthetic construct
  source 1..75: mol_type = other DNA
ataccgagcagcatggctatagtgaaaactatgtcccgtatctggttaaccaggatacgctttacggtacaggtc

SEQ ID NO: 649900 - DNA, 75 bp, synthetic construct
  source 1..75: mol_type = other DNA
gcgcaaatatatcggctgttgaaaataattatacctcttttggtgttaatttatctggtgggacaaccattacta

SEQ ID NO: 649901 - DNA, 75 bp, synthetic construct
  source 1..75: mol_type = other DNA
tttctgctgacgtgacccagtccgtggcccgtattcccggtaaggagacgaaacagggtaaatcctggcgtctga

SEQ ID NO: 649902 - DNA, 75 bp, synthetic construct
  source 1..75: mol_type = other DNA
ggtgaaccgttacttcgatgccttcgggtttaagaacatttccctggggctgtccgcatcccgttcgaaatacca

SEQ ID NO: 649903 - DNA, 75 bp, synthetic construct
  source 1..75: mol_type = other DNA
ctgaagcgtcacaggaaaaagttacgtactggaataacggacagtgttcggacctcagtcagttgccgggagtgg

SEQ ID NO: 649904 - DNA, 75 bp, synthetic construct
  source 1..75: mol_type = other DNA
aatgcccgtgttgtggtgtcgcagcagggacgggtgctgtacgactctatggtccccgcagggccattcagtatt

SEQ ID NO: 649905 - DNA, 75 bp, synthetic construct
  source 1..75: mol_type = other DNA
ctacagtaccagcaggcccctttactattcgggatcttgacagttccatcagggggcgtttagacgttgaaatta

SEQ ID NO: 649906 - DNA, 75 bp, synthetic construct
  source 1..75: mol_type = other DNA
ataagaatgaacagtcaaaatacctgagttataacggaactgccggagcaaacttaggtgcatggcgtttgcgtg

SEQ ID NO: 649907 - DNA, 75 bp, synthetic construct
  source 1..75: mol_type = other DNA
tctaatgctggctatatcatgccagggatatacgaactttatgttaatgtgaacaaacaggaaatctctccaaaa

SEQ ID NO: 649908 - DNA, 75 bp, synthetic construct
  source 1..75: mol_type = other DNA
caagggcgtatactgtatgatgcaacagtacctgctggtccctttactatacaggacttagagagttctgtaaga

SEQ ID NO: 649909 - DNA, 75 bp, synthetic construct
  source 1..75: mol_type = other DNA
ttgtgggggggtaaagggtggtggccggttatgaaaaataataacgcgtttatattgaatatgccttttgttgtt

SEQ ID NO: 649910 - DNA, 75 bp, synthetic construct
  source 1..75: mol_type = other DNA
caagctggctgacctgctcgacaatacctcttctatcgtgagtcgcgatcctgagttttcagctatctaccttgc

SEQ ID NO: 649911 - DNA, 75 bp, synthetic construct
  source 1..75: mol_type = other DNA
gcatctgaagaaggcattactgaccgattcagtggagacacgcttaagactgcgcttgaacgcggctcgccccct

SEQ ID NO: 649912 - DNA, 75 bp, synthetic construct
  source 1..75: mol_type = other DNA
cgtggggatatgccctgcaccacaacaataacgatcaggcaaaagcacaggattttgtgcaatctttgtataaaa

SEQ ID NO: 649913 - DNA, 75 bp, synthetic construct
  source 1..75: mol_type = other DNA
aagcctacctgaaatatctctataccccagaaggtcaggagattgcagccaaaaactattaccgtccgcgcgatc

SEQ ID NO: 649914 - DNA, 75 bp, synthetic construct
  source 1..75: mol_type = other DNA
tttgatctgttgaagaaacgtggcatcagtacccaggggctggttggtagctttgaaaaactcgctagcctggat

SEQ ID NO: 649915 - DNA, 75 bp, synthetic construct
  source 1..75: mol_type = other DNA
ctcagaacttgaaaaactaatcaatttcatatttaaagacaaagcccccccagcgacttcaacacgaatatctac

SEQ ID NO: 649916 - DNA, 75 bp, synthetic construct
  source 1..75: mol_type = other DNA
tgaatattcccacccccataattggtgcgaacgatattaattatggcatttctgttagtatcaacggcgagttat

SEQ ID NO: 649917 - DNA, 75 bp, synthetic construct
  source 1..75: mol_type = other DNA
gttcccgctttgtggtgatgaaagggcagattgctcgcatgcaccgcgcactgtcgcagtttatgctggatctgc

SEQ ID NO: 649918 - DNA, 75 bp, synthetic construct
  source 1..75: mol_type = other DNA
ctctccgggtgaggaatcaaacaccatggcgacatatgacaaaacgccagcgcaaaaaccgtaagcgtataaatc

SEQ ID NO: 649919 - DNA, 75 bp, synthetic construct
  source 1..75: mol_type = other DNA
gatattcgacgagctgatacaggatatcgccatcagagaactggcgtttggcgctggtacattacgcgcggcagt

SEQ ID NO: 649920 - DNA, 75 bp, synthetic construct
  source 1..75: mol_type = other DNA
tattcaccattgatgaagagttcggcggctggacgaaagcgcaaaaagagcattttgctaacggcggtacgttcg

SEQ ID NO: 649921 - DNA, 75 bp, synthetic construct
  source 1..75: mol_type = other DNA
ggaacgcgggcggattgataaagagtggatcaaacgtctgccggataactccgcaccgtacacttccaccattgt

SEQ ID NO: 649922 - DNA, 75 bp, synthetic construct
  source 1..75: mol_type = other DNA
tggttaaatcgggtgtttcagtgattacgccaaacccaaaaagctctggcggcgctcgctggaactatctggctg

SEQ ID NO: 649923 - DNA, 75 bp, synthetic construct
  source 1..75: mol_type = other DNA
atgagaaaaacctcatcctctgtacagaagggaaatatattttccctgtacaacaaattatagatacaaccctga

SEQ ID NO: 649924 - DNA, 75 bp, synthetic construct
  source 1..75: mol_type = other DNA
accattctttggcggtgtacaggagacaaagaatgtcaggttgagtgatgacgcttacagaacactcatattttg

SEQ ID NO: 649925 - DNA, 75 bp, synthetic construct
  source 1..75: mol_type = other DNA
aatactcagcaagcaaaaaattgctatctatcattgatacttttgatcaggcagttaaccttgatgatttcactg

SEQ ID NO: 649926 - DNA, 75 bp, synthetic construct
  source 1..75: mol_type = other DNA
cacgttaacggtcaccaccaaagattgcgtcggtaatgttgtggggaatattccttttgttatcaaacgcaaaga

SEQ ID NO: 649927 - DNA, 75 bp, synthetic construct
  source 1..75: mol_type = other DNA
tcactgaaggtattgcgcttctgaaaccggtacacatcaaacgttatgaaaaacacaaatcgctgatctggagcg

SEQ ID NO: 649928 - DNA, 75 bp, synthetic construct
  source 1..75: mol_type = other DNA
atcgcggcgcttctgcatgatgtggtcgaagacacccatgtaaccatagagatggttcgtgatcacttcggtgag

SEQ ID NO: 649929 - DNA, 75 bp, synthetic construct
  source 1..75: mol_type = other DNA
atgccatcttatcagtttctgactgtagcacgcattcagtttatccagcgtgatattgtttatttcggaaagcag

SEQ ID NO: 649930 - DNA, 75 bp, synthetic construct
  source 1..75: mol_type = other DNA
cgctggccttagttcggctattcaagagtcagcgaccggcaccaaacctcaaggtatgggatggattgaagatct

SEQ ID NO: 649931 - DNA, 75 bp, synthetic construct
  source 1..75: mol_type = other DNA
aaagtcgttggacactgcgcatgggcaaaaccagaagataaaatcactcctgactttttgcgttcaagagtagaa

SEQ ID NO: 649932 - DNA, 75 bp, synthetic construct
  source 1..75: mol_type = other DNA
gctaccggaaaatactgcaccggatctgatgtcacaactcacagaggcaaccgtcttcagataccgtcacaacgg

SEQ ID NO: 649933 - DNA, 75 bp, synthetic construct
  source 1..75: mol_type = other DNA
agccttacctaaccgacttcaaaagcaaattaaatatcttatagataatgaacttgatttaattggaacctcaat

SEQ ID NO: 649934 - DNA, 75 bp, synthetic construct
  source 1..75: mol_type = other DNA
cgtagcgcccgctttgataacaaaggcgatcgcttttacgatctcatttccgcactgcataagtcggtacgtggt

SEQ ID NO: 649935 - DNA, 75 bp, synthetic construct
  source 1..75: mol_type = other DNA
gatttttatcttcctaaagccgcgatagacagatcatcaattcgtatggcggagctattgaagtcaagaggtttg

SEQ ID NO: 649936 - DNA, 75 bp, synthetic construct
  source 1..75: mol_type = other DNA
ggaaaaaattcagaaactgatccctgcaattctggcaatccttccgcgcgaactgcgccaccgactcagcatttt

SEQ ID NO: 649937 - DNA, 75 bp, synthetic construct
  source 1..75: mol_type = other DNA
aacgcaattactgaagaatatctgcggcaggggggcggcgaattgcccctggtaccaggcaaggactggaataat

SEQ ID NO: 649938 - DNA, 75 bp, synthetic construct
  source 1..75: mol_type = other DNA
aacgcaattactgaagaatatctgcggcaggggggcggcgaattgcctctggtaccaggcaaggactggaacaat

SEQ ID NO: 649939 - DNA, 75 bp, synthetic construct
  source 1..75: mol_type = other DNA
ccgcaggaatgcgggaacgcgtgggagatgaccccggagttcctggcgatgagcgggaaggtgaacgacatcgaa

SEQ ID NO: 649940 - DNA, 75 bp, synthetic construct
  source 1..75: mol_type = other DNA
acatcaaacgtgaggggaatgcgctggtgaaagagcgggatattctcgaaaaagagatgaccggactcagaaaag

SEQ ID NO: 649941 - DNA, 75 bp, synthetic construct
  source 1..75: mol_type = other DNA
aagcgggaactcagcgatgccgcacgtcgcgcagcggaagcccttaatctgaccattcccgccgcgaatgcctca

SEQ ID NO: 649942 - DNA, 75 bp, synthetic construct
  source 1..75: mol_type = other DNA
ggaaactcaccagtaatgccatgtcgatgatggcagatatgcaggcgacgcgcagacgctgggaagagctgaaca

SEQ ID NO: 649943 - DNA, 75 bp, synthetic construct
  source 1..75: mol_type = other DNA
gtaaagcgggcgagtccggtacgctggcccgttcgctggatgccatcgctgaccaggcaaaacccgtgaccgttg

SEQ ID NO: 649944 - DNA, 75 bp, synthetic construct
  source 1..75: mol_type = other DNA
agatcatcaatggcgggcagaatggtatcgacgaccggcgcgcgcggtacatcacagccagtaaggtgctggcgg

SEQ ID NO: 649945 - DNA, 75 bp, synthetic construct
  source 1..75: mol_type = other DNA
acgggaaaaactagaggaagttcacggtctgatcttgggcaaggaaaccatccggcgtctcatgataaaagccgg

SEQ ID NO: 649946 - DNA, 75 bp, synthetic construct
  source 1..75: mol_type = other DNA
attattgtcatatccattgccaggtctctctggggcgcttgatcaactttccagaacaacctgagtttagcgaag

SEQ ID NO: 649947 - DNA, 75 bp, synthetic construct
  source 1..75: mol_type = other DNA
aaattggatgaaatccctccggtctgggatacccgtgacaaaatgcgcccattagccgcggcgacaaagggtgaa

SEQ ID NO: 649948 - DNA, 75 bp, synthetic construct
  source 1..75: mol_type = other DNA
aagccgaagcggaagcgcgccggaaggaacaggagcatgaggcgcggctgaaacgtcatgataaccaccgtctga

SEQ ID NO: 649949 - DNA, 75 bp, synthetic construct
  source 1..75: mol_type = other DNA
tttgccgtgattatcggcacgggatgtggcgcaggtgtggcgttcaatgggcgggcgcatatcggtggcaacggc

SEQ ID NO: 649950 - DNA, 75 bp, synthetic construct
  source 1..75: mol_type = other DNA
cggctggcaaatgacgccaactgtctggcggtttcagaagcagtagatggcgcggcagcgggagcgcagacggta

SEQ ID NO: 649951 - DNA, 75 bp, synthetic construct
  source 1..75: mol_type = other DNA
actgcgttatcgcgaggaagtcccttgttattgcggtaaacaaggttgtattgaaacctttatttcgggcacggg

SEQ ID NO: 649952 - DNA, 75 bp, synthetic construct
  source 1..75: mol_type = other DNA
aaaaagatccaggaaattgacgcactcagaagcagaggggtcaggctcaggatcgcctgcgaccatgcgggcctt

SEQ ID NO: 649953 - DNA, 75 bp, synthetic construct
  source 1..75: mol_type = other DNA
gctcggccgatcagaatacggcccgtcaggaagaggcattgtcaaaggcgggttttcagcctgataaaatttgtg

SEQ ID NO: 649954 - DNA, 75 bp, synthetic construct
  source 1..75: mol_type = other DNA
ggagaatgtgaaacgccggtacgcaaggcgaaacatggtgattcgagcggcgtacgcggcgctgcatggttatgg

SEQ ID NO: 649955 - DNA, 75 bp, synthetic construct
  source 1..75: mol_type = other DNA
ggccctcttacggttttccggcgctgccgcatcactggccggataatttttatttcagcgacgaccgcaggcccg

SEQ ID NO: 649956 - DNA, 75 bp, synthetic construct
  source 1..75: mol_type = other DNA
cctgatgcagttccggctcaaaggccatcatgacaggcttttggctgctgtccacaaaccggaagagatgccgga

SEQ ID NO: 649957 - DNA, 75 bp, synthetic construct
  source 1..75: mol_type = other DNA
atcaccgctgatactgtaccggaacaactcatgcctgttgtattttcgagagagggaaacagcaggacgctgaat

SEQ ID NO: 649958 - DNA, 75 bp, synthetic construct
  source 1..75: mol_type = other DNA
accggagatgtgcagaacgtcagtaataaatttgtggcacagactgccgaaaaaagcgattacaccggtccggcc

SEQ ID NO: 649959 - DNA, 75 bp, synthetic construct
  source 1..75: mol_type = other DNA
ggtcctgcctggtatctgctcgactgttcacgcgcaatcaaaccgctgatttatcaggatcgccgtaaggctgaa

SEQ ID NO: 649960 - DNA, 75 bp, synthetic construct
  source 1..75: mol_type = other DNA
ccgttcttgtgcttccgtcgccggattacagtcatctgatagtcagcaccatcacggagaacggggtatgcctgg

SEQ ID NO: 649961 - DNA, 75 bp, synthetic construct
  source 1..75: mol_type = other DNA
cggcccgcagcgcggcgtggttctttgctaccaaaggctgcatgaagtacaccggcgacctggtgcgcgtcacgc

SEQ ID NO: 649962 - DNA, 75 bp, synthetic construct
  source 1..75: mol_type = other DNA
acaagctggcgaaagcgccgaccgatagcgagcaggatcgcgcgctgatgcaggaagctctgctggccgttgtgc

SEQ ID NO: 649963 - DNA, 75 bp, synthetic construct
  source 1..75: mol_type = other DNA
aaaggtgtcgataccggctttaaagcggttcacccattaacgggcgaagaaattccggtttgggcagcaaacttc

SEQ ID NO: 649964 - DNA, 75 bp, synthetic construct
  source 1..75: mol_type = other DNA
ataagaagacttctgcggtcaactggtgcccgaacgaccagaccgtactggcgaacgaacaagttatcgacggct

SEQ ID NO: 649965 - DNA, 75 bp, synthetic construct
  source 1..75: mol_type = other DNA
caacgccggggtgatcctcggtggtcgtcccattaagcccgatgagttggatctacgttggatctccgccctgat

SEQ ID NO: 649966 - DNA, 75 bp, synthetic construct
  source 1..75: mol_type = other DNA
cccggttccggcgcgtaagggcgacaccttccacgtcgattacggcaacatgggctccattagctgccgctttgt

SEQ ID NO: 649967 - DNA, 75 bp, synthetic construct
  source 1..75: mol_type = other DNA
tggttatgactggagccgcgagctggcaacctgtacgccggattactaccgttgggaacagaaattcttcaccga

SEQ ID NO: 649968 - DNA, 75 bp, synthetic construct
  source 1..75: mol_type = other DNA
gtgtcattggtgctatctgtgttgccgctgctggtgggtttggtcttggccatattcgcggaaccagcaaagcag

SEQ ID NO: 649969 - DNA, 75 bp, synthetic construct
  source 1..75: mol_type = other DNA
cgcgactgacgtccgtctggcacaggacgaagcagagcgcgtacgtttctgggccggtcgcaaaaatgcgttccc

SEQ ID NO: 649970 - DNA, 75 bp, synthetic construct
  source 1..75: mol_type = other DNA
tcgttatcgcggtgtttgctgctattgccgccgcgtttggcctgggtcattcacgcggaaccagcaaagcggaag

SEQ ID NO: 649971 - DNA, 75 bp, synthetic construct
  source 1..75: mol_type = other DNA
tggcggtagctgcgggtcatccgctggcgcagaaagcggcggaaaataatcctgaactggcggcctttattgacg

SEQ ID NO: 649972 - DNA, 75 bp, synthetic construct
  source 1..75: mol_type = other DNA
tcaacgttaacgactatgacaacacgctgaccgtttatacgacccgcccggacacctttatgggctgtacttatc

SEQ ID NO: 649973 - DNA, 75 bp, synthetic construct
  source 1..75: mol_type = other DNA
caaaagcgaaccagcaacgcactgaagaacgtgcagcagctactgaagccgttgcggaacgcagggtagagacaa

SEQ ID NO: 649974 - DNA, 75 bp, synthetic construct
  source 1..75: mol_type = other DNA
gatcgactgccgtgactacccgctggcgctgcgcatcggggaatacgtgatccgtcatggtctggccctcccgga

SEQ ID NO: 649975 - DNA, 75 bp, synthetic construct
  source 1..75: mol_type = other DNA
ctcgctcagggacaggccaacgcattgggtcgccgcgcaggcgaacctccattgccactcgagcgccagagagcg

SEQ ID NO: 649976 - DNA, 75 bp, synthetic construct
  source 1..75: mol_type = other DNA
agattatcaacggtggccagaacggtatcgacgaccggcgatcgcgttacggtgctgcctgtaaggcgctgttat

SEQ ID NO: 649977 - DNA, 75 bp, synthetic construct
  source 1..75: mol_type = other DNA
gcaaaccagaagatcaggcaatgtttattgctcaggtcgggcatgagtctggaggcttcacccggctgcaggaga

SEQ ID NO: 649978 - DNA, 75 bp, synthetic construct
  source 1..75: mol_type = other DNA
tgattatcaatggtggcaggaacggcatcgacgaccggagagcgcggtacatcactgccagtaaggtgctggcgg

SEQ ID NO: 649979 - DNA, 75 bp, synthetic construct
  source 1..75: mol_type = other DNA
atttcaactacagcgttaccggactggcgagctttgtcaggactggacgcctcacccagggacaggctaatgcac

SEQ ID NO: 649980 - DNA, 75 bp, synthetic construct
  source 1..75: mol_type = other DNA
gaactgctggcgcaggacgaatatgcggctcgtagcgcggcgtggttcttcgccagcaaaggctgcatgaagtat

SEQ ID NO: 649981 - DNA, 75 bp, synthetic construct
  source 1..75: mol_type = other DNA
aagcagcaacattaagcgatgccgatgcaaaagcgattgccaatcagggctgtgccgaaatggacagcggcaatc

SEQ ID NO: 649982 - DNA, 75 bp, synthetic construct
  source 1..75: mol_type = other DNA
ctgccggtattactgagcaactggccgcgcgctggtatccacatatcagctcagccatgaatgaatttggcatta

SEQ ID NO: 649983 - DNA, 75 bp, synthetic construct
  source 1..75: mol_type = other DNA
ttgtgctgacagaagccgccaccaacagcgaaaccgacttatccggctatatccgtatgctggacgagctggatg

SEQ ID NO: 649984 - DNA, 75 bp, synthetic construct
  source 1..75: mol_type = other DNA
acatgcgtaaaaaacaatacaactactatcgcgaccagttatttagttttggtgcccacgatgttaaacgtctga

SEQ ID NO: 649985 - DNA, 75 bp, synthetic construct
  source 1..75: mol_type = other DNA
ctgcccagaaaacccggaaaaatcccttgccatccagtctgaaatcgttcgaattctggataaatttactgcact

SEQ ID NO: 649986 - DNA, 75 bp, synthetic construct
  source 1..75: mol_type = other DNA
cgattgcggcctctgcagcattactgacagggtgtcaaaatacccacggtattgataccaatatggctatcagct

SEQ ID NO: 649987 - DNA, 75 bp, synthetic construct
  source 1..75: mol_type = other DNA
gaatccattcgtcataagcaccgttactccgatgagcaaaaacaggttgccggtgaacattatcttaaccacggc

SEQ ID NO: 649988 - DNA, 75 bp, synthetic construct
  source 1..75: mol_type = other DNA
caacgcccatagcgcgcgcgactggttcctgaaaacagctggtgatgaaaaacacgttgcgaaacactttgccgc

SEQ ID NO: 649989 - DNA, 75 bp, synthetic construct
  source 1..75: mol_type = other DNA
ctgaacatgaactttgtgtcaaacctcgatggtacccaaattaccgaagtgctgaagaaagtgaacccggaaacc

SEQ ID NO: 649990 - DNA, 75 bp, synthetic construct
  source 1..75: mol_type = other DNA
caacgcccatagcgcgcgtgactggttcctgaaagcggcaggtgatgaaaaacacgttgcgaaacactttgcggc

SEQ ID NO: 649991 - DNA, 75 bp, synthetic construct
  source 1..75: mol_type = other DNA
cggcgcttaccataccgatgctgtttatcgcggactgattgcaggcgtcgcaggtatcagtgcagaccgtatcta

SEQ ID NO: 649992 - DNA, 75 bp, synthetic construct
  source 1..75: mol_type = other DNA
acagtggtcaggcatcgcagccgtttattgatgcggtcaatgattttatcaatacgcaggggcatcacggccatg

SEQ ID NO: 649993 - DNA, 75 bp, synthetic construct
  source 1..75: mol_type = other DNA
ggaataccgtgatcagggtaaagatccggcgacgctcgattatgttgtgccgttcaaagtgttcgaaggcaaccg

SEQ ID NO: 649994 - DNA, 75 bp, synthetic construct
  source 1..75: mol_type = other DNA
ttgcgacgcgaatacggcgggtggacagctatggcatgacgacgcgttgtttcactgatatagccgggcaggtta

SEQ ID NO: 649995 - DNA, 75 bp, synthetic construct
  source 1..75: mol_type = other DNA
ataaaacctttgcgcagacggaatcactgacattttcgctgggagacattaccagtgaactgagcgtgccgcgtc

SEQ ID NO: 649996 - DNA, 75 bp, synthetic construct
  source 1..75: mol_type = other DNA
actgacattttcgctgggagacattaccagtgaactgagcgtgccgcgtctgaaatcactgacggtgaatattga

SEQ ID NO: 649997 - DNA, 75 bp, synthetic construct
  source 1..75: mol_type = other DNA
ttatctctggaagctggaaaggctataccggtaaagccattactgatgtagtgaacattggtatcggcggttccg

SEQ ID NO: 649998 - DNA, 75 bp, synthetic construct
  source 1..75: mol_type = other DNA
ggtacggcaaatgcttacctgttgctggacagtggcgaaatatcacagccctttattgatgcggttaacgactat

SEQ ID NO: 649999 - DNA, 75 bp, synthetic construct
  source 1..75: mol_type = other DNA
agactgcgtcagtcaggtatggttatagtcacccgggaagttgaggtatcagactccctgaccggaaccaccaga

SEQ ID NO: 650000 - DNA, 75 bp, synthetic construct
  source 1..75: mol_type = other DNA
aatagcttgattgttattgatgaacctgaacttttcttacacccaacattagaaatcgaatttgttggacttttg

SEQ ID NO: 650001 - DNA, 75 bp, synthetic construct
  source 1..75: mol_type = other DNA
cgattacctgtggaatgaagtgctgctgccggataacttattaaaaatcctcgccagtttcgtccatttgcagat

SEQ ID NO: 650002 - DNA, 75 bp, synthetic construct
  source 1..75: mol_type = other DNA
atgttgtcatccaataaaaatagtgaagcccggcagtgcgcgaacacaaaccgggcctctatgtcagtaaccgta

SEQ ID NO: 650003 - DNA, 75 bp, synthetic construct
  source 1..75: mol_type = other DNA
gcggtgcccacctaatcgcgatgtttgctcgcactccggtagccaaagggttccgccgctgggtgctggatattt

SEQ ID NO: 650004 - DNA, 75 bp, synthetic construct
  source 1..75: mol_type = other DNA
gagcaagatttacgcttgaaggaagaagctcctggctatacgctggatgcaagtaatgatatcggttcggcaaaa

SEQ ID NO: 650005 - DNA, 75 bp, synthetic construct
  source 1..75: mol_type = other DNA
cgagcgcactaaaaaaacgggcgatacggtgttaatcaccaatgcggaaaacagttttaaagcctgtaagcagga

SEQ ID NO: 650006 - DNA, 75 bp, synthetic construct
  source 1..75: mol_type = other DNA
taaacatgaaccccggcctgaaagggcgggatatgcgcaaagccttcgacagcgatgattatcaggtcatgttgg

SEQ ID NO: 650007 - DNA, 75 bp, synthetic construct
  source 1..75: mol_type = other DNA
aatgatcattttcatattgcttcttttgaggggaacaaaaaatcctgtgtggagaaaaacttcactggcagattt

SEQ ID NO: 650008 - DNA, 75 bp, synthetic construct
  source 1..75: mol_type = other DNA
agctcttccatctgatattgatttttatcaaatactcatatctaaaataggtgaggaatcaacagtcaatcttct

SEQ ID NO: 650009 - DNA, 75 bp, synthetic construct
  source 1..75: mol_type = other DNA
atgttttcggtgataaatcgatttctaaaccttttgatgaatggcttgagatgcagttgcaagatattggagatc

SEQ ID NO: 650010 - DNA, 75 bp, synthetic construct
  source 1..75: mol_type = other DNA
ccgggcctctatgtcagtaaccgtatgcaaggaaactaacatgaatattgtagcaaaatcagattataacttcca

SEQ ID NO: 650011 - DNA, 75 bp, synthetic construct
  source 1..75: mol_type = other DNA
gcgaaagcttcacggaaaactcgatgaaccctggcctgcaaggtcgggatatgcgtaaagcattcgatactgatg

SEQ ID NO: 650012 - DNA, 75 bp, synthetic construct
  source 1..75: mol_type = other DNA
tggctgcgtattttggggcgctacttacatctggagcaaaagcgcgttgatgatgcgcttggtcatcaggaaatc

SEQ ID NO: 650013 - DNA, 75 bp, synthetic construct
  source 1..75: mol_type = other DNA
gctgactttttcactgggcgacatcaccagtgaactgagcgtgccgcgcctgaaatcacttgtggtgaacattga

SEQ ID NO: 650014 - DNA, 75 bp, synthetic construct
  source 1..75: mol_type = other DNA
tgctgttccgccagcgtatacaagccagcgttgcgcgtactgtggtcatacagcgaaagagaaccgcctgtcaca

SEQ ID NO: 650015 - DNA, 75 bp, synthetic construct
  source 1..75: mol_type = other DNA
ctgaaagttgagtgccgcaaacctgctgatgctgaaagctatggtaatgctatctatattgctaaccaccagaac

SEQ ID NO: 650016 - DNA, 75 bp, synthetic construct
  source 1..75: mol_type = other DNA
ctggagaatcagcctgacgctgatgtctggatcacctgggctgactgggcagccagtaatccgggaattggtgat

SEQ ID NO: 650017 - DNA, 75 bp, synthetic construct
  source 1..75: mol_type = other DNA
cttgagaatcagcctgaagcagatgtgtggatcacatgggctgactgggcggccagtaatcctggaattggcgat

SEQ ID NO: 650018 - DNA, 75 bp, synthetic construct
  source 1..75: mol_type = other DNA
ggaggatatcgcaggtcgaaaaggggatttgaagactgtggccgggatccgcaagaatattgtgatgtttgcccc

SEQ ID NO: 650019 - DNA, 75 bp, synthetic construct
  source 1..75: mol_type = other DNA
gatcaggaaaacagccgtatttttctgccgaaactgggctggatgcgctaccggaatagccgtcaggtcacggga

SEQ ID NO: 650020 - DNA, 75 bp, synthetic construct
  source 1..75: mol_type = other DNA
gctctggctatcattagggaccataaagacagattcagtgaaaaagatatacaacctctttatctgcgaaaaagt

SEQ ID NO: 650021 - DNA, 75 bp, synthetic construct
  source 1..75: mol_type = other DNA
gatgacggctacacgatgaatatcgcacagcttgccaggatgaaagatgaaatactgactgacagctacacaaca

SEQ ID NO: 650022 - DNA, 75 bp, synthetic construct
  source 1..75: mol_type = other DNA
atggaactaaaaatctggcagggtatcgacgtagttgataatgaattgtctatgttcgccactaacgggaaacgc

SEQ ID NO: 650023 - DNA, 75 bp, synthetic construct
  source 1..75: mol_type = other DNA
ctgaagcagatgtctggataacctgggctgactgggcagccagtaatccagaaattggtgatgtcgtggaaatag

SEQ ID NO: 650024 - DNA, 75 bp, synthetic construct
  source 1..75: mol_type = other DNA
taatctttctatcttctgctgcatatgcagatatcaacttgtatgggcctggtggcccgcatacagcgttgctgg

SEQ ID NO: 650025 - DNA, 75 bp, synthetic construct
  source 1..75: mol_type = other DNA
aatatagaaacggttgcagcaatccggaaaaatattattttgtatgcgcccaatagcgggagtgcacgtaaggca

SEQ ID NO: 650026 - DNA, 75 bp, synthetic construct
  source 1..75: mol_type = other DNA
atgaaacgccccaattttctgttcatcatgaccgatacccaggccaccaatatggtcggttgctatagcggtaaa

SEQ ID NO: 650027 - DNA, 75 bp, synthetic construct
  source 1..75: mol_type = other DNA
caacatcaccccaaaaccggccagtaaggcccgtggcgtgatctggtttgccaaaaccagggcaaatgatgatgt

SEQ ID NO: 650028 - DNA, 75 bp, synthetic construct
  source 1..75: mol_type = other DNA
ttccatgcctgaaacgcgccatgccctgaccgtgacactctggctgtatgcaacgctgaacctcaacgctgaaga

SEQ ID NO: 650029 - DNA, 75 bp, synthetic construct
  source 1..75: mol_type = other DNA
gtaacggcactggatggcctgttctggctgggaactcagcgaattgccgctgatgtgcagagactgcgtcagtca

SEQ ID NO: 650030 - DNA, 75 bp, synthetic construct
  source 1..75: mol_type = other DNA
gacgtggccatattcgcggttctcgttttctcagttggggggggagatccacaaaacctttgcgctggcggattc

SEQ ID NO: 650031 - DNA, 75 bp, synthetic construct
  source 1..75: mol_type = other DNA
tgtacgaactggccacgacgggcgatgtggtgatcccgtcaggaaccgccagtgcattgctgccggtgaaagcga

SEQ ID NO: 650032 - DNA, 75 bp, synthetic construct
  source 1..75: mol_type = other DNA
ctgattacggccattgtgactgcaccggtcatgtggctgaaggatgttctggtgtccaccgtgctggccaatatg

SEQ ID NO: 650033 - DNA, 75 bp, synthetic construct
  source 1..75: mol_type = other DNA
cacaggatgacctggcgaacaaaccggaacatcaccgcttatgggcgcaggcgatgccatcgccagtcggtgatg

SEQ ID NO: 650034 - DNA, 75 bp, synthetic construct
  source 1..75: mol_type = other DNA
cagcccgcgcgcgccgaggaacccttcctgatggtggtttcgtatgatgagccgcatcacccgtttacctgtccg

SEQ ID NO: 650035 - DNA, 75 bp, synthetic construct
  source 1..75: mol_type = other DNA
ctgatcatccgttcgccgcaaggggagcggcggcaggtcgatacgccagtcagtcatatcgatttactgccgaca

SEQ ID NO: 650036 - DNA, 75 bp, synthetic construct
  source 1..75: mol_type = other DNA
ccgcggcggccggtgccagtggatacagcatcacttctgccaccaacaacaataaattaagcggtactgcggtaa

SEQ ID NO: 650037 - DNA, 75 bp, synthetic construct
  source 1..75: mol_type = other DNA
gccgctgctggaagccttagatatcgcaaaatactttagcgtggtcatcggcggcgatgacgtacaaaacaaaaa

SEQ ID NO: 650038 - DNA, 75 bp, synthetic construct
  source 1..75: mol_type = other DNA
gcggcgatgatgtgcaaaataaaaaaccgcacccggacccgctgttactggtggctgaacggatgggcattgccc

SEQ ID NO: 650039 - DNA, 75 bp, synthetic construct
  source 1..75: mol_type = other DNA
gtaagcggaacattgctgaattgaagacacgggatctgcttgtccccatcaaaaccgtcgagtcatccgggcggc

SEQ ID NO: 650040 - DNA, 75 bp, synthetic construct
  source 1..75: mol_type = other DNA
cgagggatgcagtagagcggcagatgagtcatcaggaacgtagctcagtacgggcggcttatatccataaggcgg

SEQ ID NO: 650041 - DNA, 75 bp, synthetic construct
  source 1..75: mol_type = other DNA
acagtggtgggctgattttctggatgcgaaccgggagaagggtatcagtccgtttgaatatgcaaagattaacaa

SEQ ID NO: 650042 - DNA, 75 bp, synthetic construct
  source 1..75: mol_type = other DNA
tgttggttttcatccgttcaagcgagctacgctttgctcgctggtcagaagtggatttccaaactgctatgtgga

SEQ ID NO: 650043 - DNA, 75 bp, synthetic construct
  source 1..75: mol_type = other DNA
cgcaattttggaaaagatcaaaagcatgagtggaaaccgtgagctaattttcgttggtgatcacgatccgcgtaa

SEQ ID NO: 650044 - DNA, 75 bp, synthetic construct
  source 1..75: mol_type = other DNA
catcgtgctgcattagaacttaaccatattcctgaattacttcatcgcattgataattactctggcaggccatta

SEQ ID NO: 650045 - DNA, 75 bp, synthetic construct
  source 1..75: mol_type = other DNA
ttatcaggctatatattattctaaatagatgttatatatcattgaaatataaagatctgaaatatttgaaaggat

SEQ ID NO: 650046 - DNA, 75 bp, synthetic construct
  source 1..75: mol_type = other DNA
ggtacccatttgggtataaatattgattggctgctcaccggcagaggaggaatgtatctgtctgaacatgcggat

SEQ ID NO: 650047 - DNA, 75 bp, synthetic construct
  source 1..75: mol_type = other DNA
tagcctgtcttcataatggtgagctttgcattttgcgcgggattcagaagaaggttaaaacgcccggggaggcgg

SEQ ID NO: 650048 - DNA, 75 bp, synthetic construct
  source 1..75: mol_type = other DNA
tggcttcaggaccatggcgtgtagttctttgattgaatcgggattgtggtcgagggatgcggtagaaaggcagat

SEQ ID NO: 650049 - DNA, 75 bp, synthetic construct
  source 1..75: mol_type = other DNA
gtacagagtggtttactggactataaccccgcgcaggagatggttggcgctgttgcttcaagtaataggcagcat

SEQ ID NO: 650050 - DNA, 75 bp, synthetic construct
  source 1..75: mol_type = other DNA
aggtcagcaacatgtcaaagtcagcagcgggtacggtcagccagccggggcgcaatgtccgggcaaaatcaggtt

SEQ ID NO: 650051 - DNA, 75 bp, synthetic construct
  source 1..75: mol_type = other DNA
atggttttgctggttcaccctaacggctccaaatactggcggctacgttatcgcttcggtggtaaagagaagatg

SEQ ID NO: 650052 - DNA, 75 bp, synthetic construct
  source 1..75: mol_type = other DNA
ttagcattgggtgtttatccaatggtctctcttggtgaagctcgcaggaaacgagatgaggccaaaaagttggta

SEQ ID NO: 650053 - DNA, 75 bp, synthetic construct
  source 1..75: mol_type = other DNA
actcatgttttcccctttattggttcacgtgacattaccaccctcaggactcccgatttacttgttcccgttaaa

SEQ ID NO: 650054 - DNA, 75 bp, synthetic construct
  source 1..75: mol_type = other DNA
ggagcaagaggcaataacgtttgaagtggttgccagagactggcatgccagcaatcagaaatggtcggcatcgca

SEQ ID NO: 650055 - DNA, 75 bp, synthetic construct
  source 1..75: mol_type = other DNA
tactggtattcatacgttcaagtgaactgcgttttgcaagatggcaagaaatcgattgtaaaaatgcgctttgga

SEQ ID NO: 650056 - DNA, 75 bp, synthetic construct
  source 1..75: mol_type = other DNA
gtagcaaaaaatggtctgagtcccatagtgagcgggtgcttaaaagcttagtggataatcttttctctgcgttag

SEQ ID NO: 650057 - DNA, 75 bp, synthetic construct
  source 1..75: mol_type = other DNA
gccaggggtcaaacattcgcaccgtggttcgaaaatgcgaactccacatcttgttcctttgagttgtcaggcatt

SEQ ID NO: 650058 - DNA, 75 bp, synthetic construct
  source 1..75: mol_type = other DNA
ggagcaagaggcgataacgtttgaagtggtagccagagactggcatgccagtaatcagaagtggtctgagtctca

SEQ ID NO: 650059 - DNA, 75 bp, synthetic construct
  source 1..75: mol_type = other DNA
tactggttttcatccgttcgagcgagttacgttttgctcgctggacagaagtggattttgaaacggctatgtgga

SEQ ID NO: 650060 - DNA, 75 bp, synthetic construct
  source 1..75: mol_type = other DNA
acaatcctgcacaagagatcgctggtgcgatcgcaacagctaaacgaaagcatcgcgctgcgctagatctcaatc

SEQ ID NO: 650061 - DNA, 75 bp, synthetic construct
  source 1..75: mol_type = other DNA
ctggcgctggggaaataccccgaagtctcgctagcagatgccagggctcgccgggatgaggcgcgtaagctgttg

SEQ ID NO: 650062 - DNA, 75 bp, synthetic construct
  source 1..75: mol_type = other DNA
gttcggcaaagcctgaagcaaaagcctataagctgactgacggcgaaggcatggtgttgctggttcaccctaacg

SEQ ID NO: 650063 - DNA, 75 bp, synthetic construct
  source 1..75: mol_type = other DNA
ttgtgggcgatcacgatccacgtaagccgatgagtgagaatacggtgaacaaggctttgcgcgtaatggggtatg

SEQ ID NO: 650064 - DNA, 75 bp, synthetic construct
  source 1..75: mol_type = other DNA
gcgtgtcagcgacgacctggctgtggttgcttcaatggtggagaacaaccagagggcggcgatgcatccggcaga

SEQ ID NO: 650065 - DNA, 75 bp, synthetic construct
  source 1..75: mol_type = other DNA
atgaaaactatcaatactattgttgctgctatggcgctttccactctgtcttttggcgtgttcgcggcggaaccg

SEQ ID NO: 650066 - DNA, 75 bp, synthetic construct
  source 1..75: mol_type = other DNA
cggcggcggctggtgccagtggatacagcatcacatccgccaccaacaacaataaattaagcggcacagcggtta

SEQ ID NO: 650067 - DNA, 75 bp, synthetic construct
  source 1..75: mol_type = other DNA
ctgcggctgctggtgctagtggatacagcatcacttctgccaccaacaacaataaattaagcggtaccgcggtta

SEQ ID NO: 650068 - DNA, 75 bp, synthetic construct
  source 1..75: mol_type = other DNA
gatgccggaatgaaagtgggaataccgaccatggccgtgactggcgtgggcaaagatatggtgcgcgatcagcgt

SEQ ID NO: 650069 - DNA, 75 bp, synthetic construct
  source 1..75: mol_type = other DNA
aaagctgcgcgatctggtagccacacaaatcaatatgcagggcaactacatggcccagcaaggcgaccggacggc

SEQ ID NO: 650070 - DNA, 75 bp, synthetic construct
  source 1..75: mol_type = other DNA
gctattatgtgccggcacaagtgcgtcgtttaccgtcatttcacacagaggcatcatcaaatgaaaatcagaaat

SEQ ID NO: 650071 - DNA, 75 bp, synthetic construct
  source 1..75: mol_type = other DNA
tacgtggataaagccctcggcggcgtcgagtgcgtgcagacgctctcccgcctgaatcgcacctatccgggcaaa

SEQ ID NO: 650072 - DNA, 75 bp, synthetic construct
  source 1..75: mol_type = other DNA
gttccactccgttatcgtggtgacggaccgcacggtgctggacgaccagcttcaggacaccatctatcagttcga

SEQ ID NO: 650073 - DNA, 75 bp, synthetic construct
  source 1..75: mol_type = other DNA
cccgatgaaccggcgtcaaaaaccaataaacctgaggccttccacgtctactccatgcgccaggcaatcgaagaa

SEQ ID NO: 650074 - DNA, 75 bp, synthetic construct
  source 1..75: mol_type = other DNA
atgagaacattagaagaagtaattgcggcccagtcacctgaaagtcaggctattatcaaagctatggctgataag

SEQ ID NO: 650075 - DNA, 75 bp, synthetic construct
  source 1..75: mol_type = other DNA
tgatattcttgtcaacattatactggttcagacaggtgagaaagagttgtacaaactttcaaaactattacaaga

SEQ ID NO: 650076 - DNA, 75 bp, synthetic construct
  source 1..75: mol_type = other DNA
cgtttcgggatgagtcagaatacagcaacggttgcagcgaaacatccattaagtatttcccaaaagggacggggg

SEQ ID NO: 650077 - DNA, 75 bp, synthetic construct
  source 1..75: mol_type = other DNA
atgcagtcacgcttatcgtggatatttaatccgaaaacgggtaaaactgtgatgctggcctttgaccatggttat

SEQ ID NO: 650078 - DNA, 75 bp, synthetic construct
  source 1..75: mol_type = other DNA
gctgggttcctgcctggatgcggtcacctgatgcgcaacctgacgtcgctgacggtaaggcgacagattctgatg

SEQ ID NO: 650079 - DNA, 75 bp, synthetic construct
  source 1..75: mol_type = other DNA
tactgattgacgaaattgaaaatgcggcatcgatccgggcgtggacaccggagcagaaagcagcctgtggcgtgg

SEQ ID NO: 650080 - DNA, 75 bp, synthetic construct
  source 1..75: mol_type = other DNA
gaagtgcagaccattcgtcgtctggtgaccgaaagtgaagtggcggtggcggggaacagtaaattccgctttgtg

SEQ ID NO: 650081 - DNA, 75 bp, synthetic construct
  source 1..75: mol_type = other DNA
gctgggttcctgcctggatgcggtcacttgatgcgcaacctgacgtcgctgagggtgaggcgacagactctgata

SEQ ID NO: 650082 - DNA, 75 bp, synthetic construct
  source 1..75: mol_type = other DNA
cgatggcgtggaaacggcgctcgggttccacctgcgcgactggtggcagccaacggcagaaaacttcctcggtct

SEQ ID NO: 650083 - DNA, 75 bp, synthetic construct
  source 1..75: mol_type = other DNA
aggagaagctggagtccgccgcaatggcaatcgaactgcaggaagggtggtcatggtcactggcccgggagggct

SEQ ID NO: 650084 - DNA, 75 bp, synthetic construct
  source 1..75: mol_type = other DNA
atggacaaaaagatggcggagtttaaggcgcgcgtggtgcgcaacagccagcgcccgcctgccgttgagggaata

SEQ ID NO: 650085 - DNA, 75 bp, synthetic construct
  source 1..75: mol_type = other DNA
ctttgtaatgcaggactgtcagttgaggatatcaagcgccaggtgatggaaaacagtgaagaggaaattgattat

SEQ ID NO: 650086 - DNA, 75 bp, synthetic construct
  source 1..75: mol_type = other DNA
agttgccgaacaatccagcggtgaacaagaggaaaagaatttaatccgcctggatacgcggcatcttttgatgct

SEQ ID NO: 650087 - DNA, 75 bp, synthetic construct
  source 1..75: mol_type = other DNA
agcgggtgaatccggtgcagacgacgcggcttcagataccgacagccctgacaacgacaccaccaacacggcaca

SEQ ID NO: 650088 - DNA, 75 bp, synthetic construct
  source 1..75: mol_type = other DNA
actggctgcggatatccgggataacgaaggtcgtatctttgcccgccagggggaggtgatgaacccgctgcagta

SEQ ID NO: 650089 - DNA, 75 bp, synthetic construct
  source 1..75: mol_type = other DNA
tgccggcgcgggtaacggcggcacccagcggaaagcgcctgcaggtggaaatcattccgcccgatatggcgcagc

SEQ ID NO: 650090 - DNA, 75 bp, synthetic construct
  source 1..75: mol_type = other DNA
gctaccgtttcaaagtgaaatatttcgtgccgattaccgatctgtggggcggtcaactgagctacatcggcttca

SEQ ID NO: 650091 - DNA, 75 bp, synthetic construct
  source 1..75: mol_type = other DNA
gttaccgtttcaaaattaaatactttgtgccgattaccgatctgtggggcggtcagctgagctacatcggcttca

SEQ ID NO: 650092 - DNA, 75 bp, synthetic construct
  source 1..75: mol_type = other DNA
aacggtattaagacccgtaccaataactctatcgcttccagccatattctggctctgaactacgatcactggcac

SEQ ID NO: 650093 - DNA, 75 bp, synthetic construct
  source 1..75: mol_type = other DNA
gcagcgaacgaaaacgagtgggacggctaccgttttaaagtgaaatactttgtaccgattaccgatctgtggggc

SEQ ID NO: 650094 - DNA, 75 bp, synthetic construct
  source 1..75: mol_type = other DNA
acaaactgactaataccgatctcagcttcggtccgttcaaagagtggtacttcgcgaacaactacatctacgaca

SEQ ID NO: 650095 - DNA, 75 bp, synthetic construct
  source 1..75: mol_type = other DNA
tcgacaagctgaccaatactgaccttagcttcggtccgttcaaagagtggtacttcgcgaacaactacatttacg

SEQ ID NO: 650096 - DNA, 75 bp, synthetic construct
  source 1..75: mol_type = other DNA
tgctcaatgcccatcacggtgatgtgatgatgctctccggcgtgatgctgacgctgaccgtgctgttctgcgtac

SEQ ID NO: 650097 - DNA, 75 bp, synthetic construct
  source 1..75: mol_type = other DNA
ccttcacggcactgatggggtatataccattcagttctgccagttacggcatccccggtctgctgatgcttgccg

SEQ ID NO: 650098 - DNA, 75 bp, synthetic construct
  source 1..75: mol_type = other DNA
tggcgttcacaaggcggctacccaagcctagctcacggtgggttgagcttgttagaggtggccgtaccctttatc

SEQ ID NO: 650099 - DNA, 75 bp, synthetic construct
  source 1..75: mol_type = other DNA
ttttactgtcaacgcagctgaaaacgacaaaccgcagtatctttccgactggtggcaccagagcgttaacgttgt

SEQ ID NO: 650100 - DNA, 75 bp, synthetic construct
  source 1..75: mol_type = other DNA
gatgcagcaacgcgcttttcgtctcatcttgatgccatgattcgccacatcacaaaggcggagttatcccgcgtg

SEQ ID NO: 650101 - DNA, 75 bp, synthetic construct
  source 1..75: mol_type = other DNA
caatcgccattaagaccagcaagaaaaatataggtttcataacatgcggcaaacgttctgacgaggctgtaggtt

SEQ ID NO: 650102 - DNA, 75 bp, synthetic construct
  source 1..75: mol_type = other DNA
tagtaatgatgttaaaagcatcggtttttcacttacaccatcagttgataatatattgcatttttttgcggctta

SEQ ID NO: 650103 - DNA, 75 bp, synthetic construct
  source 1..75: mol_type = other DNA
cctgcgtgcatttcaggattttaccgtggatgcagacaatacggcaggaactgaaccgccccggaaatcctggag

SEQ ID NO: 650104 - DNA, 75 bp, synthetic construct
  source 1..75: mol_type = other DNA
gaaatcgataaaagggattggcagtgtactgggatttgatctcagcagcctttccctgaatgccaatggggggat

SEQ ID NO: 650105 - DNA, 75 bp, synthetic construct
  source 1..75: mol_type = other DNA
agccattctgccattgcgtcgtggtgctgacggtaagctgggggttgtggcggatattgggggttcaggtatggc

SEQ ID NO: 650106 - DNA, 75 bp, synthetic construct
  source 1..75: mol_type = other DNA
ttggtcgtgaagactcgctggatgcgcagattgatgcgttacaggaaaaaattcagcgcgcgaaaaaatatccgt

SEQ ID NO: 650107 - DNA, 75 bp, synthetic construct
  source 1..75: mol_type = other DNA
gtcctgggtctgggtaaagcctggcatgacggccggaaggagggcgaggaatttaaccgtcagctggcgctgacg

SEQ ID NO: 650108 - DNA, 75 bp, synthetic construct
  source 1..75: mol_type = other DNA
atcagcagaagctggaacagctggagcgtgacagtaggcagaaaggaacattcggcacggatgaataccggaacg

SEQ ID NO: 650109 - DNA, 75 bp, synthetic construct
  source 1..75: mol_type = other DNA
tggatatcgccacggtgggtatgggtgatcagcagcgacagcgatatgaaccgccccggaaatcctggagactaa

SEQ ID NO: 650110 - DNA, 75 bp, synthetic construct
  source 1..75: mol_type = other DNA
ccgccgccagaacccaacatgaaaaagctggttgatgttaataagacgtatcccgccgagctgtatcgtgcagat

SEQ ID NO: 650111 - DNA, 75 bp, synthetic construct
  source 1..75: mol_type = other DNA
catcccttgacgcaaattacaccgttgacgctggaatcaatagcgaagtggccgttaattacttaccgacagggg

SEQ ID NO: 650112 - DNA, 75 bp, synthetic construct
  source 1..75: mol_type = other DNA
gtacaactgagtcttcgccagaaataccagcaacagctggagcagttgaggcgggatagtgagcagaaagggaca

SEQ ID NO: 650113 - DNA, 75 bp, synthetic construct
  source 1..75: mol_type = other DNA
ggcagataggtccggctgccctgaaggtggtttatgaccttgggaaaaagcggcagcggactttatgcaacagca

SEQ ID NO: 650114 - DNA, 75 bp, synthetic construct
  source 1..75: mol_type = other DNA
gggcattatgccggagtcactgccgggcagctgtggacgctcagtcgtgctatttccgggaatggtatcacgcaa

SEQ ID NO: 650115 - DNA, 75 bp, synthetic construct
  source 1..75: mol_type = other DNA
gtgacaaacccggctctgtatgactggacagagcattacctgacagagcggtccgtgattgaagccggtcagggt

SEQ ID NO: 650116 - DNA, 75 bp, synthetic construct
  source 1..75: mol_type = other DNA
cctgggcagggatctccatgttctttatgcgctttatgctgggcttctcggaagcgccatcattcccggcgaacg

SEQ ID NO: 650117 - DNA, 75 bp, synthetic construct
  source 1..75: mol_type = other DNA
ggcgctggctttttttggcaaaggatttggtgctctgggctggccggtgatttctgacaccgcgccgaaagagat

SEQ ID NO: 650118 - DNA, 75 bp, synthetic construct
  source 1..75: mol_type = other DNA
ccgaaagagattattggcctctgcggcggcgtatttaacgtctttggcaatgttgcttccatcgtcactcccctg

SEQ ID NO: 650119 - DNA, 75 bp, synthetic construct
  source 1..75: mol_type = other DNA
ttaacccaagctaaaacccatggatttatgctatttgatttggctcatgagcttggtcatattgcactaggccat

SEQ ID NO: 650120 - DNA, 75 bp, synthetic construct
  source 1..75: mol_type = other DNA
tgccgttgcatattctgcggcgaggattgtagcagagaatttcagtatcccgtttaatccaaacgcagaacttaa

SEQ ID NO: 650121 - DNA, 75 bp, synthetic construct
  source 1..75: mol_type = other DNA
agagattattacaggaaactcattaagaagaaaaaaatgaatcaaaacaacaaagaggaagttttttttggtagt

SEQ ID NO: 650122 - DNA, 75 bp, synthetic construct
  source 1..75: mol_type = other DNA
caagcggcgtcacccttgccgatggacaagaaatcttattgtggccgaacagtgaaattgatctgccagaagaca

SEQ ID NO: 650123 - DNA, 75 bp, synthetic construct
  source 1..75: mol_type = other DNA
tatggtcggttgctatagcggtaagccgctgaatacgcaaaatattgatagtctggcggcagaaggtattcgctt

SEQ ID NO: 650124 - DNA, 75 bp, synthetic construct
  source 1..75: mol_type = other DNA
gtggttaaccgtccgacgttttttgcttttgcaaaaggcgcgggtgtgatgggggaagctggacctgaagccatt

SEQ ID NO: 650125 - DNA, 75 bp, synthetic construct
  source 1..75: mol_type = other DNA
tatctggtgcaggaaaaaggcatgtcgattctgaaagtgggtctggtcgcctcgattccggcactgtgtggtttt

SEQ ID NO: 650126 - DNA, 75 bp, synthetic construct
  source 1..75: mol_type = other DNA
ttatctattcaccagaggcctgattggaatttccattttatcatggctttcttatatctgtctgagtatctccaa

SEQ ID NO: 650127 - DNA, 75 bp, synthetic construct
  source 1..75: mol_type = other DNA
tttatttcactcgccaaaacatgggctattgctggtgcaatagccggtctttccgctgtcattttttcgttcata

SEQ ID NO: 650128 - DNA, 75 bp, synthetic construct
  source 1..75: mol_type = other DNA
atggaaaaagggacgattttccccgcaatgggatatttacatattgatggtagaggcatgaagccaaatggagga

SEQ ID NO: 650129 - DNA, 75 bp, synthetic construct
  source 1..75: mol_type = other DNA
ccacactgaacatcaaaggagaaagctaccgattaaaggaaaaacgcaaagcgggagtgctggcaaaaaacgcca

SEQ ID NO: 650130 - DNA, 75 bp, synthetic construct
  source 1..75: mol_type = other DNA
ctctggacaatgagctgcattttcttactgccactcagcttgagcagatacgcgtccttggggaacaggggcggt

SEQ ID NO: 650131 - DNA, 75 bp, synthetic construct
  source 1..75: mol_type = other DNA
tggtggtgtttatcagtctgctgatttgagtcgctacagtggcacggtggttaaccgtccgacgttttttgcttt

SEQ ID NO: 650132 - DNA, 75 bp, synthetic construct
  source 1..75: mol_type = other DNA
ggtatgggaaccagtagcaacgggatcacttagcctggttaacatcaaggtttctgacgttaaaaacatcgtcct

SEQ ID NO: 650133 - DNA, 75 bp, synthetic construct
  source 1..75: mol_type = other DNA
tacgatccatagagtattcaaccgaagaggctcgcgccgtatttggtgggcgcccagctgaccacataaaaatga

SEQ ID NO: 650134 - DNA, 75 bp, synthetic construct
  source 1..75: mol_type = other DNA
gtgatattatgattgaacctatggttcaagaagaaaaagcgcgtaaagagttttcccaacggctagcgctggcct

SEQ ID NO: 650135 - DNA, 75 bp, synthetic construct
  source 1..75: mol_type = other DNA
cctgattatgtccgtatcggacaggtggttcgccaactacgacggcactattgggccaacattgacactattggg

SEQ ID NO: 650136 - DNA, 75 bp, synthetic construct
  source 1..75: mol_type = other DNA
acactccgcgcagcagtggtctgagtgggccgcagcaggcggcgcaaacactgaaaaaagcggcctccggcgcga

SEQ ID NO: 650137 - DNA, 75 bp, synthetic construct
  source 1..75: mol_type = other DNA
gaacagtgcggcgaccacaagaacggcaacgggcggtagcgcagcagctcagtcagccggttctcgcgtcggtgg

SEQ ID NO: 650138 - DNA, 75 bp, synthetic construct
  source 1..75: mol_type = other DNA
atggcgcagatggccatgatgcaggcggtgaaggggattggttcggcgtttggctgggggagtgcagccgctgcc

SEQ ID NO: 650139 - DNA, 75 bp, synthetic construct
  source 1..75: mol_type = other DNA
cagcaggcgcaggtggaggggcagatcgccgccgccagacagtccgcgggactgaccacggaaaaaatgacagag

SEQ ID NO: 650140 - DNA, 75 bp, synthetic construct
  source 1..75: mol_type = other DNA
gtagggctgacggctggcgctttatgacattaacgattgtaaccttatggggaagtcccttgcagtttaatgtgg

SEQ ID NO: 650141 - DNA, 75 bp, synthetic construct
  source 1..75: mol_type = other DNA
atcatccagaaacgtattgcagctagctctatgggctttatcgaacgtccgaaagattctggtgacgattttgat

SEQ ID NO: 650142 - DNA, 75 bp, synthetic construct
  source 1..75: mol_type = other DNA
caagccgaaaagagcgcactaaatattatcgttaatggcgagggtgaagaaaaaaattccccagccgatccctaa

SEQ ID NO: 650143 - DNA, 75 bp, synthetic construct
  source 1..75: mol_type = other DNA
gtttcgtaaaatcaacctactgactcagacctacacaggtgataactatcgcgtagatgcttcgcaagtatgcca

SEQ ID NO: 650144 - DNA, 75 bp, synthetic construct
  source 1..75: mol_type = other DNA
ttcactagcgtatcaatgggcttaggcgtgtttaaacagggcttgactggtgatactagccagatcaactactca

SEQ ID NO: 650145 - DNA, 75 bp, synthetic construct
  source 1..75: mol_type = other DNA
attgctttaattgataaaggacttaaatcacgtactgccgttattttggaacgtggtgatgatcctgaaaaagta

SEQ ID NO: 650146 - DNA, 75 bp, synthetic construct
  source 1..75: mol_type = other DNA
gcgtagatgcttctcaagtgtgtcattactatcagcccttgtgcgccgaaagtttgcgcggcgtgaccgacttcc

SEQ ID NO: 650147 - DNA, 75 bp, synthetic construct
  source 1..75: mol_type = other DNA
ggtagtgctgaccctgatgttttatcgtcgaggcgattcgcgacatcgaccatggatatctcgcctggcgtggct

SEQ ID NO: 650148 - DNA, 75 bp, synthetic construct
  source 1..75: mol_type = other DNA
cggggccaactttattttcctgtccgtgctggtcgccgtaagaggcaacgtggcacgtctggttgatcatctgag

SEQ ID NO: 650149 - DNA, 75 bp, synthetic construct
  source 1..75: mol_type = other DNA
cttttaatgcattgctttgtgctggggtagtgttaaccctgatgttttaccgtcgcggcgactcgcgacatcggc

SEQ ID NO: 650150 - DNA, 75 bp, synthetic construct
  source 1..75: mol_type = other DNA
attgatggacagcttcaacaagatactatcaccggaaccttcaataaggctctcaaatcgaacggtaagcgcctt

SEQ ID NO: 650151 - DNA, 75 bp, synthetic construct
  source 1..75: mol_type = other DNA
ccattacaggaaccttcaataaggctctcaaatcgaacggtaagcgcctttatgatcagggtcgtactctggcct

SEQ ID NO: 650152 - DNA, 75 bp, synthetic construct
  source 1..75: mol_type = other DNA
tgaagcgttccgcgagactgtaataatcggtaagcgcgtgcacgcaagcagcatggcctttatcacaagcgataa

SEQ ID NO: 650153 - DNA, 75 bp, synthetic construct
  source 1..75: mol_type = other DNA
gattacggtatcagcttgcatttagatgaatggctttataatgaactgatcttaaatggcctgatgacagcggaa

SEQ ID NO: 650154 - DNA, 75 bp, synthetic construct
  source 1..75: mol_type = other DNA
gcaggcgtgagtcactgatcgacaggattaaaggcgctgacgcaatcactcttcatacgtggcttgaccgatatg

SEQ ID NO: 650155 - DNA, 75 bp, synthetic construct
  source 1..75: mol_type = other DNA
tttgctcaacgtcttctcgggcataaatcagattcaatggcggcgcggtatagggacagtcgtgggcgtgaatgg

SEQ ID NO: 650156 - DNA, 75 bp, synthetic construct
  source 1..75: mol_type = other DNA
aacccgcgcagcaaagtcagaagtaaggcgctcaaggctgacagctaatgagtatgtcgcgatttaccatgcagc

SEQ ID NO: 650157 - DNA, 75 bp, synthetic construct
  source 1..75: mol_type = other DNA
atggagctaaaaatctggaaggctatcgacgtagttgataatgagttaagtatgtttgccactgacggaaagcgc

SEQ ID NO: 650158 - DNA, 75 bp, synthetic construct
  source 1..75: mol_type = other DNA
gccagcaaaatcagggcaatccgaagaaaattgccggacaaaccgctcactgacatatcaacgaaagaagtggca

SEQ ID NO: 650159 - DNA, 75 bp, synthetic construct
  source 1..75: mol_type = other DNA
aatcaggtcaacccttgttgacgtttttcgtgaggcaatagccgaggggcatgtggaaacgaatccagtaacagc

SEQ ID NO: 650160 - DNA, 75 bp, synthetic construct
  source 1..75: mol_type = other DNA
gtggtcgcaccattgttgatgccacagggtctgagtctatcggacgagatgcgcaggcattacgagaagtcgcat

SEQ ID NO: 650161 - DNA, 75 bp, synthetic construct
  source 1..75: mol_type = other DNA
atcattgttgaaaactccgacgtgtattatcgactatgccaacttaatcaaattcagactcgctggtcactggtc

SEQ ID NO: 650162 - DNA, 75 bp, synthetic construct
  source 1..75: mol_type = other DNA
atagcctggcatccctggttggcccgacgtattacaggacaacttacccagccaatcaaggtacgcttacaacag

SEQ ID NO: 650163 - DNA, 75 bp, synthetic construct
  source 1..75: mol_type = other DNA
atgtggcaacgaatccggtaacagcaacccgtgcagcaaagtcagaagtaaggcgctcaaggctgacagctaatg

SEQ ID NO: 650164 - DNA, 75 bp, synthetic construct
  source 1..75: mol_type = other DNA
agtttggtttaggccgagacaggaggatagcaatcactgaagcaatacaggccaatattgagttactctcagaca

SEQ ID NO: 650165 - DNA, 75 bp, synthetic construct
  source 1..75: mol_type = other DNA
tgagcatatcacctctgttcaggtggccaaattcagtgtgccactacaccgggagcaggcgtgagtcactgatag

SEQ ID NO: 650166 - DNA, 75 bp, synthetic construct
  source 1..75: mol_type = other DNA
actggaacccgccgacgctcaacggcgtactgatgaaactcagcgttggtcaatatctggcaaaagataaagggg

SEQ ID NO: 650167 - DNA, 75 bp, synthetic construct
  source 1..75: mol_type = other DNA
ccattcattgacacgatacaaaaaatgtcaatgcgccccagcttgtggatattattcgtcgtcatcgttgtgatg

SEQ ID NO: 650168 - DNA, 75 bp, synthetic construct
  source 1..75: mol_type = other DNA
aacgttgttaccgcaggtcgtattgctgctcgcggcgctggtggcgctgtgggtgatgcggcgcaaaagcgcggt

SEQ ID NO: 650169 - DNA, 75 bp, synthetic construct
  source 1..75: mol_type = other DNA
tggtcgggctggatgctggcgtggctaaactcgccacgctgtcagatggcacagtctttgggcctgtaaacagtt

SEQ ID NO: 650170 - DNA, 75 bp, synthetic construct
  source 1..75: mol_type = other DNA
attccgcaaccacagcagcgcgaggcgaccgaccgtcctttattaccggcggagcacaatgcactcaaacagctg

SEQ ID NO: 650171 - DNA, 75 bp, synthetic construct
  source 1..75: mol_type = other DNA
aaagatggtgagttaattccagcgaaactgtttaaccatctggtgacctggctacaggcgcgtcagacgctaagc

SEQ ID NO: 650172 - DNA, 75 bp, synthetic construct
  source 1..75: mol_type = other DNA
ctcccgggcaactgccagaccgggaaaacagcgcaggcactcagcctttatccagtctgcaacgtaccgccctgg

SEQ ID NO: 650173 - DNA, 75 bp, synthetic construct
  source 1..75: mol_type = other DNA
taactaccgtgatgagcaggctatcgcagcaggtatgcacttccgcaccactgaaaattctgctgacgtttgaat

SEQ ID NO: 650174 - DNA, 75 bp, synthetic construct
  source 1..75: mol_type = other DNA
gcttatcgaaatccccttagtcaggcgtttgcattacggtctattataaaaatagctcaggaggtaaaaaaggat

SEQ ID NO: 650175 - DNA, 75 bp, synthetic construct
  source 1..75: mol_type = other DNA
tacacaagaacatcctagagcgtttggctgtacaggttcctcacgaggctgcttatcgaaatccccttagtcagg

SEQ ID NO: 650176 - DNA, 75 bp, synthetic construct
  source 1..75: mol_type = other DNA
cagttaccgctgcctgtatgcttgcagcaaatgcgggtgctgaggaaggtaaaagcggattttatctgaccggta

SEQ ID NO: 650177 - DNA, 75 bp, synthetic construct
  source 1..75: mol_type = other DNA
atgattatgacttttttactcttaaaaatcaataactcagcgcaatatcgccaaaataatttgcaatttttcttg

SEQ ID NO: 650178 - DNA, 75 bp, synthetic construct
  source 1..75: mol_type = other DNA
cgttttggaatgaccttggatttccaggaaaggggtatcaggatggacgaatagtaaaagttgagaatggtaaaa

SEQ ID NO: 650179 - DNA, 75 bp, synthetic construct
  source 1..75: mol_type = other DNA
gaggaccagtcagaacagaaattaccaacttaacgccggagcaggctgcagaagcgtataaaaaaatgatgggct

SEQ ID NO: 650180 - DNA, 75 bp, synthetic construct
  source 1..75: mol_type = other DNA
tcagggcgctgtcagaacaatcaaaaggcgcacaggccgcagccatgaactcgtggtcagggatgacggcacaga

SEQ ID NO: 650181 - DNA, 75 bp, synthetic construct
  source 1..75: mol_type = other DNA
gccattggtcgggttgtgacaaaaggggccggggcactgggctggatggggaaaggcgcgggtcgtgcactgtca

SEQ ID NO: 650182 - DNA, 75 bp, synthetic construct
  source 1..75: mol_type = other DNA
tgatgccgggcgtgctgttggcgggtggttttccggtatcggaaacaaacttgcaggcagtgcgatcggtcgggt

SEQ ID NO: 650183 - DNA, 75 bp, synthetic construct
  source 1..75: mol_type = other DNA
acaagattcccggttactgtccgattttaatcccgataagttcgattgcgatgatgagggggattgccagcatac

SEQ ID NO: 650184 - DNA, 75 bp, synthetic construct
  source 1..75: mol_type = other DNA
gagtatctgggcggttttgtaaccgacctgtatcagaagtggacggccacggataaggaaccgcaggagcaaaaa

SEQ ID NO: 650185 - DNA, 75 bp, synthetic construct
  source 1..75: mol_type = other DNA
gccgggtgcttaactggcacgatgcggcggataaatccggggagcttgataaacgggctgatgaaattggtcaga

SEQ ID NO: 650186 - DNA, 75 bp, synthetic construct
  source 1..75: mol_type = other DNA
ggccacagccgctggcattacctgcaccacgccctgtactggcattacccccacccggcgtaccggtaacagcac

SEQ ID NO: 650187 - DNA, 75 bp, synthetic construct
  source 1..75: mol_type = other DNA
ccccgtggatttggtggctacgggagtggcggcggtcgtcgcggacggagcggcggaagaatggccccgctgtta

SEQ ID NO: 650188 - DNA, 75 bp, synthetic construct
  source 1..75: mol_type = other DNA
tgcctatgtattgcgacggctgactgaaatagaccagatggacgtgctggatatcctgcttgccaatggcgaact

SEQ ID NO: 650189 - DNA, 75 bp, synthetic construct
  source 1..75: mol_type = other DNA
ttacctttacccggcaaatccggtctgttgagcaggcttgcaggcagtgctgccggacaactggttacgggaaca

SEQ ID NO: 650190 - DNA, 75 bp, synthetic construct
  source 1..75: mol_type = other DNA
tggcacttccggccccacgcactgttcccgcattaccagcaccgaaaccactggcattacctgcaccgtccccgg

SEQ ID NO: 650191 - DNA, 75 bp, synthetic construct
  source 1..75: mol_type = other DNA
aactcgctgtatcacggcgataaggtcagagcgcaggccatgatggcctgggcaaagcagaacgcgaaggacacc

SEQ ID NO: 650192 - DNA, 75 bp, synthetic construct
  source 1..75: mol_type = other DNA
gcagcagagcggctgttcccgtcggtacggttccgcgtcagggagcgcagtcgccataaatccgcgttggtcatg

SEQ ID NO: 650193 - DNA, 75 bp, synthetic construct
  source 1..75: mol_type = other DNA
cgagtgtggtcacacgtcacgcagtccgcttgactcgctggaaaccgctatcggctttcacatgcgcgactggtg

SEQ ID NO: 650194 - DNA, 75 bp, synthetic construct
  source 1..75: mol_type = other DNA
ggcgtttttccgctgtctgaacggaagccgcagggtttcgctgtctgacctgcgatttttcatgccatccctgac

SEQ ID NO: 650195 - DNA, 75 bp, synthetic construct
  source 1..75: mol_type = other DNA
cagaaatgaagctgatgcgctgcatggcgaaggtcagagcgtggacgccggagatgcgtgccggaagcggtgtgg

SEQ ID NO: 650196 - DNA, 75 bp, synthetic construct
  source 1..75: mol_type = other DNA
cgcagtgaggatgacgtggctgacgacgctgaccgcacggaacaggtgcaggagaaagcatcagtggaggaaatc

SEQ ID NO: 650197 - DNA, 75 bp, synthetic construct
  source 1..75: mol_type = other DNA
ccgagaacggtcatcgtcgggatatgcaccctgccgaacagattgccggattccgcgcaatggcgcaggaaggca

SEQ ID NO: 650198 - DNA, 75 bp, synthetic construct
  source 1..75: mol_type = other DNA
gccgtgaggatgccggaacataccgcagtctgccggagccggaagcggtgctgacggaggcagaagaagaacgcc

SEQ ID NO: 650199 - DNA, 75 bp, synthetic construct
  source 1..75: mol_type = other DNA
gtaaaccagcacaaatcagcctggaatgtaaacattattcgctgaccagcgatgcgccgtcagggaaggaaggtg

SEQ ID NO: 650200 - DNA, 75 bp, synthetic construct
  source 1..75: mol_type = other DNA
ggacatgacgacgttcctttcactcagtcaggaggtgctgttatccctgctcagtttctgcaccgcatgcagcct

SEQ ID NO: 650201 - DNA, 75 bp, synthetic construct
  source 1..75: mol_type = other DNA
acgctggagtgaccgggtggcagagcatgacctggaaacactgttctggcagtggggggagcgtttcccgtcact

SEQ ID NO: 650202 - DNA, 75 bp, synthetic construct
  source 1..75: mol_type = other DNA
caccaccgaacactgtcaggcgctggcgctggagaacgacaccgagcgtcaggtacaggtgtttgaagccgcctg

SEQ ID NO: 650203 - DNA, 75 bp, synthetic construct
  source 1..75: mol_type = other DNA
gtggcgctcgatgctgccctgctggaaaaactccaggctgtcgctgaacaccttcgggaagccgaaggctgggaa

SEQ ID NO: 650204 - DNA, 75 bp, synthetic construct
  source 1..75: mol_type = other DNA
cggaaacagtcggaagctggcatgcacgctggagtgaccgggtggcagagcatgacctggaaatcctgttctggc

SEQ ID NO: 650205 - DNA, 75 bp, synthetic construct
  source 1..75: mol_type = other DNA
tgaccgaaagtgaagtggcggtggccgggaacagtaaattccgcttcgtgggggctgatgccttctcgccagagg

SEQ ID NO: 650206 - DNA, 75 bp, synthetic construct
  source 1..75: mol_type = other DNA
tcaccgaaagtgaagtggcggtggcggggaacagtaaattccgcttcgtgggggctgatgccttctcgccagagg

SEQ ID NO: 650207 - DNA, 75 bp, synthetic construct
  source 1..75: mol_type = other DNA
cgcagcggaatcgctgggattgggcggggtatatatcggcggcctgcgcaataatattgaagcggtgacggaact

SEQ ID NO: 650208 - DNA, 75 bp, synthetic construct
  source 1..75: mol_type = other DNA
gagatgcgtaccggaagcggtgtggtggtgtcctggcgttacggtaatgtgtgtgtccagcgtggtgtgcagttg

SEQ ID NO: 650209 - DNA, 75 bp, synthetic construct
  source 1..75: mol_type = other DNA
caggaaggcaaaacacctgcacaaatcggtgatttgctgggctattcaccccgctatgtccagcgaatgctgaaa

SEQ ID NO: 650210 - DNA, 75 bp, synthetic construct
  source 1..75: mol_type = other DNA
tcattccgcaggagctggcgactgccgcatcgatgaccgagaacggtcatcgtcgggatatgcaccctgccgaac

SEQ ID NO: 650211 - DNA, 75 bp, synthetic construct
  source 1..75: mol_type = other DNA
gacaaccgctgggtgcctggctggatgtgtgcaccacgcccacagacggatgccactgaacgcaccgataacctg

SEQ ID NO: 650212 - DNA, 75 bp, synthetic construct
  source 1..75: mol_type = other DNA
cagattgaccttgcgtttcatactccctccacggtcggaagctggttgtcccgctggtctggtgttgttgaggag

SEQ ID NO: 650213 - DNA, 75 bp, synthetic construct
  source 1..75: mol_type = other DNA
gcagaagaactgcacggcaaccgtcttcagtggctgtatgccatcgatgtgctgattgaaacacagggcgaggtc

SEQ ID NO: 650214 - DNA, 75 bp, synthetic construct
  source 1..75: mol_type = other DNA
gtttaccggcctccattttggtgcatgaaaacagctatcaaccgctggataaagacgcactggcgcagtatgacg

SEQ ID NO: 650215 - DNA, 75 bp, synthetic construct
  source 1..75: mol_type = other DNA
caatgatggcgcagaatgcattaatcgcagcggaatcgctgggattgggcggggtatatatcggcggcctgcgca

SEQ ID NO: 650216 - DNA, 75 bp, synthetic construct
  source 1..75: mol_type = other DNA
cgcagcggaatcgctgggattgggcggggtatatatcggcggcctgcgcaataatattgaagcggtgacgggtag

SEQ ID NO: 650217 - DNA, 75 bp, synthetic construct
  source 1..75: mol_type = other DNA
cgcacggtgccgtattccgcagagtctgtcagcgaactggcggagtccattaagggcgttggcctgttacagaat

SEQ ID NO: 650218 - DNA, 75 bp, synthetic construct
  source 1..75: mol_type = other DNA
agcggtcagtctcagccggaaccacaggcggaggccggtacgaaaaaaggaggcgcaaaaacgaaaggccgtgga

SEQ ID NO: 650219 - DNA, 75 bp, synthetic construct
  source 1..75: mol_type = other DNA
tccgaacccgtagctgggaagataacggtatcacccgttacgtcaccgaaattcttgttaagaccacgggcacca

SEQ ID NO: 650220 - DNA, 75 bp, synthetic construct
  source 1..75: mol_type = other DNA
tgcgccggacgtatggagcctgtcggtttctgcagtgaggatgccggaacatatcgcagtctgccggagccggaa

SEQ ID NO: 650221 - DNA, 75 bp, synthetic construct
  source 1..75: mol_type = other DNA
ttcccctctgcacagagcaacaggccgcatggcgggcggtggcggagacggaaaaacgccgccatcagggaaaca

SEQ ID NO: 650222 - DNA, 75 bp, synthetic construct
  source 1..75: mol_type = other DNA
ggcgaaggtcagggcgtggacgccggagatgcgtgccggaagcggcgtggtggtgtcctggcgttatggcaacgt

SEQ ID NO: 650223 - DNA, 75 bp, synthetic construct
  source 1..75: mol_type = other DNA
accgccacggtgtcgccgcaggtggtcgcagactggcagcactcaatatgctggcagagcgtggcatcattccgg

SEQ ID NO: 650224 - DNA, 75 bp, synthetic construct
  source 1..75: mol_type = other DNA
taagtaagagaggtgccggacgggaacgcgtccggcagacatacaaccatcccggtcaaaggagaaatatatgtc

SEQ ID NO: 650225 - DNA, 75 bp, synthetic construct
  source 1..75: mol_type = other DNA
ggaaaaactccaggctgtcgcagagttccttcgggaagccgaaggctgggaatggtgcgccggacgcatggagcc

SEQ ID NO: 650226 - DNA, 75 bp, synthetic construct
  source 1..75: mol_type = other DNA
tgcggctgaacatgcagagttccatatgaaagacaaccgctgggtgcctggctggatgtgtacaccacgtccaca

SEQ ID NO: 650227 - DNA, 75 bp, synthetic construct
  source 1..75: mol_type = other DNA
ccgaaagtgaagtggcggtggcgaggaacagtaaattccgcttcgtgggggctgatgccttctcgccagatgaac

SEQ ID NO: 650228 - DNA, 75 bp, synthetic construct
  source 1..75: mol_type = other DNA
gacgctgaccgtacggaacaggtgcaggagaaagcgtcagtggaggaaatcagtctgccactgctgacgaaaatg

SEQ ID NO: 650229 - DNA, 75 bp, synthetic construct
  source 1..75: mol_type = other DNA
cgcgttacgacgcgctggaaaaccagtgtgaggaatccgacctgctggaagcagaaatgaagctgattgactgca

SEQ ID NO: 650230 - DNA, 75 bp, synthetic construct
  source 1..75: mol_type = other DNA
ccgccacgttcagcgaatgctgaaactggcagaccttgccccagtgatcctagatgcgctggcagaagaccgcat

SEQ ID NO: 650231 - DNA, 75 bp, synthetic construct
  source 1..75: mol_type = other DNA
aagccgggctggatgagccgaaaaactggcaacagttgctggatgtcgcacagaaactgaacgatccggcgaata

SEQ ID NO: 650232 - DNA, 75 bp, synthetic construct
  source 1..75: mol_type = other DNA
tcgttctctcagtttgcgttatccaatcaggccaacgtttttaacgccgaaggcaaaatcacccttgatacgccg

SEQ ID NO: 650233 - DNA, 75 bp, synthetic construct
  source 1..75: mol_type = other DNA
ccgccacgttcagcgaatgctgaaactggcggaccttgccccagtgatcctggatgcgctggcagaagaccgcat

SEQ ID NO: 650234 - DNA, 75 bp, synthetic construct
  source 1..75: mol_type = other DNA
cgcgaaaacgaaaggccgtggacgtaaggccgcgcagccgtctgaacccgcgtatgacttcgatgacgacattcc

SEQ ID NO: 650235 - DNA, 75 bp, synthetic construct
  source 1..75: mol_type = other DNA
gcagaacgctcaggtgcaaccgcagcctcagcagaatggtcagtcacagagtgctgacgcgacgaaaaaaggtgg

SEQ ID NO: 650236 - DNA, 75 bp, synthetic construct
  source 1..75: mol_type = other DNA
ggcaaaacgcctgcacaaatcggtgatttgctgggctattcgccccgccacgttcagcgaatgctgaaactggca

SEQ ID NO: 650237 - DNA, 75 bp, synthetic construct
  source 1..75: mol_type = other DNA
ccgccacgttcagcgaatgctgaaactggctgaccttgccccagtgatccttgatgcgctggcagaagaccgcat

SEQ ID NO: 650238 - DNA, 75 bp, synthetic construct
  source 1..75: mol_type = other DNA
ccgccacgttcagcgaatgctgaaactggcagaccttgccccagtgatcctggatgcgctggcagaagaccacat

SEQ ID NO: 650239 - DNA, 75 bp, synthetic construct
  source 1..75: mol_type = other DNA
ccgccacgttcagcgaatgctgaaactggcagaccttgccccagtgatccttgatgcgctggcagaagacctcat

SEQ ID NO: 650240 - DNA, 75 bp, synthetic construct
  source 1..75: mol_type = other DNA
ccgccacgttcagcgaatgctgaaactggccgaccttgccccagtgatcctggatgcgctggcagaagaccccat

SEQ ID NO: 650241 - DNA, 75 bp, synthetic construct
  source 1..75: mol_type = other DNA
ccgccacgttcagcgaatgctgaaactggccgaccttgccccagtgatcctcgatgcgctggcagaagaccgcat

SEQ ID NO: 650242 - DNA, 75 bp, synthetic construct
  source 1..75: mol_type = other DNA
ccgccacgttcagcgaatgctgaaactggctgaccttgccccagtgatcctggatgcgctggcagaagacctcat

SEQ ID NO: 650243 - DNA, 75 bp, synthetic construct
  source 1..75: mol_type = other DNA
tggaacttaccaccccgcaccgtgattttgacaaaaacggtcgcgtgatggtggaaagcaagaaagacctcgcaa

SEQ ID NO: 650244 - DNA, 75 bp, synthetic construct
  source 1..75: mol_type = other DNA
agcctggtggctggtggcggatcgcttccgtaacaccttcaacgcggtaaagaacggcgagcagtacccggtaga

SEQ ID NO: 650245 - DNA, 75 bp, synthetic construct
  source 1..75: mol_type = other DNA
cgacgctgaatccggctttacgtagtttctggactatgcgggcacgtaacaaagtgctttatggtggccggtcat

SEQ ID NO: 650246 - DNA, 75 bp, synthetic construct
  source 1..75: mol_type = other DNA
gccgcgttcttgctgggcggctatgtggcaacatttaccgcggtgccggacaacattaccgatccgcttgagacg

SEQ ID NO: 650247 - DNA, 75 bp, synthetic construct
  source 1..75: mol_type = other DNA
atccgccgaaagatccgcggcttgatggcgcattcaccctgttctatatgtcgatcaatatcggctcgttgatag

SEQ ID NO: 650248 - DNA, 75 bp, synthetic construct
  source 1..75: mol_type = other DNA
aaaacccctttttgtccgacaccatgctgaaggttatcgaagccgctaaacgccgggatccggatgggtttaagc

SEQ ID NO: 650249 - DNA, 75 bp, synthetic construct
  source 1..75: mol_type = other DNA
ggggcgcagtggcaaacctgcaggtggccacgtcagaaagctggcgtgacaaacagacgggggagatacgggagc

SEQ ID NO: 650250 - DNA, 75 bp, synthetic construct
  source 1..75: mol_type = other DNA
ccgtcagtgaactggcggagtccgttaagggcgttggcctgttgcagaatctggtcgtgcataccctgcctggtg

SEQ ID NO: 650251 - DNA, 75 bp, synthetic construct
  source 1..75: mol_type = other DNA
aggtcatcctcgtaggacgcctgggaaaagatccggaagtccgttacatccccaacgggggcgcagtggcaaacc

SEQ ID NO: 650252 - DNA, 75 bp, synthetic construct
  source 1..75: mol_type = other DNA
ccaaacctgaacaatttggatggtagtcccttcttcgcatggaggcaatataaacatgctgacgaaatatgccct

SEQ ID NO: 650253 - DNA, 75 bp, synthetic construct
  source 1..75: mol_type = other DNA
ttgccaatctgaaagcccaggcatggtggctggtagctgatcgctttcgtaatacgttcaacgcggtgaaaaatg

SEQ ID NO: 650254 - DNA, 75 bp, synthetic construct
  source 1..75: mol_type = other DNA
atatcccctcacctaacattgccgacgctttcataatggcgttcgcgccgaccgatacaacaatggatatttggg

SEQ ID NO: 650255 - DNA, 75 bp, synthetic construct
  source 1..75: mol_type = other DNA
acaccattctgggcctggccgtagaacctgagcagtatcaggcactgaacccgttctggatcatcattggtagcc

SEQ ID NO: 650256 - DNA, 75 bp, synthetic construct
  source 1..75: mol_type = other DNA
atgaggggagagcggcgttgccttcacttttctcctcaggcggccagaatctggatggactattacaacgatgtg

SEQ ID NO: 650257 - DNA, 75 bp, synthetic construct
  source 1..75: mol_type = other DNA
ggctgcgcttcgcccgtcgcgtcagactaccccgcgcggttggcctggctggcatgttcttaccgattgcttcaa

SEQ ID NO: 650258 - DNA, 75 bp, synthetic construct
  source 1..75: mol_type = other DNA
cccttacactgcagaaatggcgagagaattagcagtatggtacggtaatgagtatgtgcggttgtctaatccgtt

SEQ ID NO: 650259 - DNA, 75 bp, synthetic construct
  source 1..75: mol_type = other DNA
ttgcggataatggtcaggtttacctcagcggaatgcctttagcgggaaaagttcaggtgaaatggggagaagagg

SEQ ID NO: 650260 - DNA, 75 bp, synthetic construct
  source 1..75: mol_type = other DNA
atctcaacggtcggatgaccaatctggtcggtgtatacggtacgttgctggaagacaacaacctcagctatagcg

SEQ ID NO: 650261 - DNA, 75 bp, synthetic construct
  source 1..75: mol_type = other DNA
agcttgaacttttcaactggataaaaagctattgcattgagaaggggatcccctgtatgaaaaaaaatgacattt

SEQ ID NO: 650262 - DNA, 75 bp, synthetic construct
  source 1..75: mol_type = other DNA
ttatggcatagccttagagtccttgctgatggtcgagctggaagtgaaatcaagcaggaaacgatggcttgggtg

SEQ ID NO: 650263 - DNA, 75 bp, synthetic construct
  source 1..75: mol_type = other DNA
ttatttcacgcgacggaacctatagcgctaaatataataaaaaggggcgtgacatcattcctctgtctgtagctg

SEQ ID NO: 650264 - DNA, 75 bp, synthetic construct
  source 1..75: mol_type = other DNA
accaagtttgctatcggcatggtgatgtgttctggtgcgttcctgattctgccgctgggtgcgaaattcgcgtct

SEQ ID NO: 650265 - DNA, 75 bp, synthetic construct
  source 1..75: mol_type = other DNA
aacgcaggggacaagaataataaccggagataattattcatcacagtatcaggatttgtttgaacagaggatcaa

SEQ ID NO: 650266 - DNA, 75 bp, synthetic construct
  source 1..75: mol_type = other DNA
tcccggccggcggagcagaagcgacgatggcgacgccggtatgccagaccgcggatggaggcgttccatgcgtgg

SEQ ID NO: 650267 - DNA, 75 bp, synthetic construct
  source 1..75: mol_type = other DNA
catttgtggtctgctgcgatgaagcaggttacgatccatctggagtaagggaaggtgcatattcccacgcatggc

SEQ ID NO: 650268 - DNA, 75 bp, synthetic construct
  source 1..75: mol_type = other DNA
agacaaccgctgggtgcctggctggatgtgtgcaccacgcccacagacggatgccactgaacgcaccgataacct

SEQ ID NO: 650269 - DNA, 75 bp, synthetic construct
  source 1..75: mol_type = other DNA
aaacacagggcgaggtctgcctccttccccttccaggcgatgcagcagaacgcttgttcccgtcggtgcggtttc

SEQ ID NO: 650270 - DNA, 75 bp, synthetic construct
  source 1..75: mol_type = other DNA
tcatcctcgtaggacgcctgggaaaggatccggaagtccgtgacatccccaacgggggcgcagtggcaaacctgc

SEQ ID NO: 650271 - DNA, 75 bp, synthetic construct
  source 1..75: mol_type = other DNA
cgtctgggaaaagatccggaagtccgttacatcccaaacgggggcgcagtggcaaacctgcaggtggccacgtca

SEQ ID NO: 650272 - DNA, 75 bp, synthetic construct
  source 1..75: mol_type = other DNA
tgcgctggcagaagaccgcatcaccaccgaacactgtcaggcgctggcgctggagaacgacaccgcgcgtcaggt

SEQ ID NO: 650273 - DNA, 75 bp, synthetic construct
  source 1..75: mol_type = other DNA
caaacttcttcggacacctgaaaaagccgcagattatcgcagccctgaatgaggccggactgtccggtgccgcac

SEQ ID NO: 650274 - DNA, 75 bp, synthetic construct
  source 1..75: mol_type = other DNA
acgggatatgacgacgttcctgtcactcagccaggacgtgctgttatcactgctcagtttctgcaccgcgtgcag

SEQ ID NO: 650275 - DNA, 75 bp, synthetic construct
  source 1..75: mol_type = other DNA
actgctgtctgccggagccggaagcagtgctgacggaggcggaagaagaacgcctgaacgaactgatgacgcgtt

SEQ ID NO: 650276 - DNA, 75 bp, synthetic construct
  source 1..75: mol_type = other DNA
ctggcagagcgtggcatccttccggctgactggcctgtacgcgtgaaggtcattccgcaggagctggcgactgcc

SEQ ID NO: 650277 - DNA, 75 bp, synthetic construct
  source 1..75: mol_type = other DNA
ataccagacatgttttgctcaggcgcagattgaccttgcgtttcatactcccgccacggtcggaagctggttgtc

SEQ ID NO: 650278 - DNA, 75 bp, synthetic construct
  source 1..75: mol_type = other DNA
cacggtatgggttttgaaggcatgcgcgtttccgtttctggctccggcaacgtcgcccagtacgctatcgaaaaa

SEQ ID NO: 650279 - DNA, 75 bp, synthetic construct
  source 1..75: mol_type = other DNA
tggtggtgaaggtgagcaaaccaactacgtgcagggcgcgaacattgccggttttgtgaaggttgcggatgcgat

SEQ ID NO: 650280 - DNA, 75 bp, synthetic construct
  source 1..75: mol_type = other DNA
gagcagacggaatggcaccgcgtggtgctgttcggcaagctcgcggaagtggcaggtgaatatctgcgcaagggt

SEQ ID NO: 650281 - DNA, 75 bp, synthetic construct
  source 1..75: mol_type = other DNA
cagcgaatgctgaaactggctgaccttgcgcctgtcatcctcgatgcgctggcagaagaccgcatcaccaccgaa

SEQ ID NO: 650282 - DNA, 75 bp, synthetic construct
  source 1..75: mol_type = other DNA
cattccgcaggagctggcgactgcagcatcaatgactgaaaacggtcatcgtcgggatatgcaccctgccgaaca

SEQ ID NO: 650283 - DNA, 75 bp, synthetic construct
  source 1..75: mol_type = other DNA
tattccgcaggagctggcgacggccgcatcaatgactgaaaacggtcatcgtcgggatatgcaccctgccgaaca

SEQ ID NO: 650284 - DNA, 75 bp, synthetic construct
  source 1..75: mol_type = other DNA
aattccgcaggagctggcgactgccgcatcaatgactgaaaacggtcatcgtcgggatatgcaccctgccgaaca

SEQ ID NO: 650285 - DNA, 75 bp, synthetic construct
  source 1..75: mol_type = other DNA
acgctgaccgcacggaacaggtgcaggagaaagcgtccgtggaggaaatcagtctgccactgctgacgaaaatgt

SEQ ID NO: 650286 - DNA, 75 bp, synthetic construct
  source 1..75: mol_type = other DNA
ggagccggaagcggtgctgacggaggcggaagaagaacgtctgaacgaactgatggcacgttacgacgcgctgga

SEQ ID NO: 650287 - DNA, 75 bp, synthetic construct
  source 1..75: mol_type = other DNA
cattccgcaggagctggcgacggctgcatcaatgactgaaaacggtcatcgtcgggatatgcaccctgccgaaca

SEQ ID NO: 650288 - DNA, 75 bp, synthetic construct
  source 1..75: mol_type = other DNA
tgcagagttccacatgaaagacaaccgctgggtgcctggctggatgggttcaccacgtccacagacggatgccac

SEQ ID NO: 650289 - DNA, 75 bp, synthetic construct
  source 1..75: mol_type = other DNA
gagatgcgtgccggaagcggtgtggtggtgtcctggcgttatggtaacgtgtgtgtccagcgtggtgtgcagttg

SEQ ID NO: 650290 - DNA, 75 bp, synthetic construct
  source 1..75: mol_type = other DNA
ctgacactgctggcatggacgctctgcctgaatgtgtttggcagcaaagcgcatagtagtcccgccagaattcgc

SEQ ID NO: 650291 - DNA, 75 bp, synthetic construct
  source 1..75: mol_type = other DNA
tcgccgactggctgcactcaacatgctggcagagcgtggcatcattccggctgactggcctgttcgcgtgaaggt

SEQ ID NO: 650292 - DNA, 75 bp, synthetic construct
  source 1..75: mol_type = other DNA
atgagcgcacgttcacaggcactggttcccctcagcacagagcaacaggccgcatggcgggcggtggcggagaca

SEQ ID NO: 650293 - DNA, 75 bp, synthetic construct
  source 1..75: mol_type = other DNA
cacggcaaccgtcttcagtggctgtatgccatcgatgtgctgattgaaacacagggcgaggtttgcctccttccc

SEQ ID NO: 650294 - DNA, 75 bp, synthetic construct
  source 1..75: mol_type = other DNA
cgcagcgaggatgatgcggctgacgacgctgaccgcacggaacaggtgcaggaaaaagcggcggtggaggaaatc

SEQ ID NO: 650295 - DNA, 75 bp, synthetic construct
  source 1..75: mol_type = other DNA
aggtccaggcttttgggggttttttgacggcaatggtcatccccaatatcggtgcttttattgcctggggcttta

SEQ ID NO: 650296 - DNA, 75 bp, synthetic construct
  source 1..75: mol_type = other DNA
gaggccggtcatgctgtccgtgagatggagcggtggatggtgccgaacaaactccgggaggtggcgtgatgcggc

SEQ ID NO: 650297 - DNA, 75 bp, synthetic construct
  source 1..75: mol_type = other DNA
cgcagcgaggatgatgcggctgacgacgctgaccgcacggaacaggtgccggacaaagcggccgtggaggaaatc

SEQ ID NO: 650298 - DNA, 75 bp, synthetic construct
  source 1..75: mol_type = other DNA
cgcagcgaggatgatgcggctgacgacgctgaccgcacggaacaggtgctggataaagcggcagtggaggaaatc

SEQ ID NO: 650299 - DNA, 75 bp, synthetic construct
  source 1..75: mol_type = other DNA
cgcagcgaggatgatgcggctgacgacgctgaccgcacggaacaggtgcaggagaaagcggcagtggaggaaatc

SEQ ID NO: 650300 - DNA, 75 bp, synthetic construct
  source 1..75: mol_type = other DNA
cggaaacagtcggaagctggcatgcacgctggagtgaccgggtggcagagcatgatctggaaaccctgttctggc

SEQ ID NO: 650301 - DNA, 75 bp, synthetic construct
  source 1..75: mol_type = other DNA
ggagccaaaagcggtcacccgcgccccgcgtaagacccggtgcgtgacaccggcacaacgtgggcgcccgaaaaa

SEQ ID NO: 650302 - DNA, 75 bp, synthetic construct
  source 1..75: mol_type = other DNA
tcgccataaatccgcgctggttatgcagaagtacagccgccagcaggcacgggaggcagagcagaaagcccgtgc

SEQ ID NO: 650303 - DNA, 75 bp, synthetic construct
  source 1..75: mol_type = other DNA
atgagcgcacgttcacaggcactggttcccctcagcacagagcaacaggccgcatggcaggcggtggcggagacg

SEQ ID NO: 650304 - DNA, 75 bp, synthetic construct
  source 1..75: mol_type = other DNA
ggcaaaggtgcacaggatgacattctgatgacggtcatgctgtggcgtctggataccggcgatattgccggtgcg

SEQ ID NO: 650305 - DNA, 75 bp, synthetic construct
  source 1..75: mol_type = other DNA
ttcaccgaggaggtcgcgctcgcggccatgcgcgcccacgctgccggtgagtctgtggatccccgcctgctgacg

SEQ ID NO: 650306 - DNA, 75 bp, synthetic construct
  source 1..75: mol_type = other DNA
cgcagcgaggatgatgcggctgacgacgctgaccgcacggaacaggtgcgggaaaaagcggcagtggaggaaatc

SEQ ID NO: 650307 - DNA, 75 bp, synthetic construct
  source 1..75: mol_type = other DNA
cgctgaccagcgatgcgccgtcagggaaggaaggggccgcattcatggcgatgatggcagaaaaagcccgtcttg

SEQ ID NO: 650308 - DNA, 75 bp, synthetic construct
  source 1..75: mol_type = other DNA
aacggagagcgaagatgagtttgctcagtcagccaatgcggttaaggcgatgaaacaagagggtgcatactcgtt

SEQ ID NO: 650309 - DNA, 75 bp, synthetic construct
  source 1..75: mol_type = other DNA
cctgggcgctggcagaaaaaggcaccgatcaaccgcgttctctggcggcggctttctatgaacccattaatggca

SEQ ID NO: 650310 - DNA, 75 bp, synthetic construct
  source 1..75: mol_type = other DNA
gagcattattcgctgaccagcgatgcgccgtcagggaaggaaggtgccgcattcatgacgatgatggcagaaaaa

SEQ ID NO: 650311 - DNA, 75 bp, synthetic construct
  source 1..75: mol_type = other DNA
ttggtacgattggggtgatcgtcggcgctgaaatcccgatgttccttggttcgatgattatgggaccgctcggtg

SEQ ID NO: 650312 - DNA, 75 bp, synthetic construct
  source 1..75: mol_type = other DNA
tggattcgctggaaagcgccatcggctttcacatgcgcgactggtggcagccgacaaaagcaaacttcttcggac

SEQ ID NO: 650313 - DNA, 75 bp, synthetic construct
  source 1..75: mol_type = other DNA
ccgccctgttgccggagggatggtcacgggacatgacgacattcttgtcactcagccaggaggtgctgttgtccc

SEQ ID NO: 650314 - DNA, 75 bp, synthetic construct
  source 1..75: mol_type = other DNA
agcactggaaaaacgcatacctgctggttttgagatggttatcaataaattctcattaggtattgccgggatgat

SEQ ID NO: 650315 - DNA, 75 bp, synthetic construct
  source 1..75: mol_type = other DNA
gctgacgaaaatgtcctcagagcgcacgctggcagtccaggcggcactgatgcagcagccggacaaatctctggc

SEQ ID NO: 650316 - DNA, 75 bp, synthetic construct
  source 1..75: mol_type = other DNA
gttgaagccgcctgccaggtcgcgcatgcatttggtgtcagtgaaacgattgtcgaagatgattttttcaccgcc

SEQ ID NO: 650317 - DNA, 75 bp, synthetic construct
  source 1..75: mol_type = other DNA
gtttgcgatgcggggatgggatcgagtgcgatgggcgcgaccaccttccgcaaacgtctggaaaaagccgggctg

SEQ ID NO: 650318 - DNA, 75 bp, synthetic construct
  source 1..75: mol_type = other DNA
cgaaaggctcgttcctggcgacaattgccggtgttacggtaggtacagaagctgctgccggtggaactggcggcc

SEQ ID NO: 650319 - DNA, 75 bp, synthetic construct
  source 1..75: mol_type = other DNA
cggaaacagtcggaagctggcatgcccgctggagtgacagggtggcagagcatgatctggaaaccctgttctggc

SEQ ID NO: 650320 - DNA, 75 bp, synthetic construct
  source 1..75: mol_type = other DNA
ccgtcagtgcggttccgtgtcagggaacgcagtcgccataaatccgcactggtcatgcagaagtacagccgccag

SEQ ID NO: 650321 - DNA, 75 bp, synthetic construct
  source 1..75: mol_type = other DNA
gtgactgacgacgctgaccgcacggaacaggtgcaggagaaagcgtcagtggaggaaatcagtctgccactgctg

SEQ ID NO: 650322 - DNA, 75 bp, synthetic construct
  source 1..75: mol_type = other DNA
tctggctgcttgtgggatatgatcagatggctctgaaagcgtttcaggcatcccactttggcctgatttcccggc

SEQ ID NO: 650323 - DNA, 75 bp, synthetic construct
  source 1..75: mol_type = other DNA
caggtgcttgctgttccgccagcgtacacaagccagcgttgcgcgtcctgtggtcatacagcgaaagacaatcgc

SEQ ID NO: 650324 - DNA, 75 bp, synthetic construct
  source 1..75: mol_type = other DNA
caggtgcttgctgttccgccagcgtacacaagccagcgttgcgcgtgctgtggtcatacagcgaaagagaatcgc

SEQ ID NO: 650325 - DNA, 75 bp, synthetic construct
  source 1..75: mol_type = other DNA
caggtgcttgctgttccgccagcgtagacaagccagcgttgcgcgtcctgtggtcatacagcgaaagagaatcgc

SEQ ID NO: 650326 - DNA, 75 bp, synthetic construct
  source 1..75: mol_type = other DNA
acagctcgtccatatcagcccggcagaatttgacgccgtaaaagcgctggcccatcaactggcagaagaaaagcg

SEQ ID NO: 650327 - DNA, 75 bp, synthetic construct
  source 1..75: mol_type = other DNA
ttctacacctatatctgcatcgataaagatctgctggtcgaaaacctcggcggtgacgaagcgttagctaatcag

SEQ ID NO: 650328 - DNA, 75 bp, synthetic construct
  source 1..75: mol_type = other DNA
gcgcactgcttgccggtgaggaaaacgccaggctgcgtgcaactcactggttacatgagaggggcttgaaagtat

SEQ ID NO: 650329 - DNA, 75 bp, synthetic construct
  source 1..75: mol_type = other DNA
ccggtaagttaatgagagccactgtagtattttgtctgggggttgtcctcagtctgtttggttttgagtcaggca

SEQ ID NO: 650330 - DNA, 75 bp, synthetic construct
  source 1..75: mol_type = other DNA
tgggctaccgctgtgtatggcttcttgtcgggtatgatcagcttgcattaaaaacgtttcaggcagcacatctgg

SEQ ID NO: 650331 - DNA, 75 bp, synthetic construct
  source 1..75: mol_type = other DNA
gcgaaaataatgagtatgccggaagctattaagatgactggcggcctctacagagattctcttgctgataatccc

SEQ ID NO: 650332 - DNA, 75 bp, synthetic construct
  source 1..75: mol_type = other DNA
atgtcagttacagagtttaagacaaaaacggagcgtaaatccagccgtaaaccgtcaaaagtgcaggagactgcc

SEQ ID NO: 650333 - DNA, 75 bp, synthetic construct
  source 1..75: mol_type = other DNA
ccgattcaaaaagcggggacagaatgatgcattccgctacccgcagggcgttaagctcgatcaggaaaacagccg

SEQ ID NO: 650334 - DNA, 75 bp, synthetic construct
  source 1..75: mol_type = other DNA
caacggcgtcacccgttacatcactgaaatccttgttaaaaccacgggcaccatgcagatgttgggacgtgccgc

SEQ ID NO: 650335 - DNA, 75 bp, synthetic construct
  source 1..75: mol_type = other DNA
tggcggtcaggtgcttgctgttccgccagcgtatacaagccagcgttgcgcgtactgtggtcatacagcgaaaga

SEQ ID NO: 650336 - DNA, 75 bp, synthetic construct
  source 1..75: mol_type = other DNA
cgctgaccagcgatgcgccatcggggaaggaaggtgccgcattcatggcgctgatggcagaaaaatcccgtcttg

SEQ ID NO: 650337 - DNA, 75 bp, synthetic construct
  source 1..75: mol_type = other DNA
gctggtcacagggatccacgttcgatggaggtttataccagagtgtttgcactggatatggctgccacgctggca

SEQ ID NO: 650338 - DNA, 75 bp, synthetic construct
  source 1..75: mol_type = other DNA
attcgccagaacgcgtctccctgttacccattgcgccgggggtggattttgcaacagcgctctccctgagaagaa

SEQ ID NO: 650339 - DNA, 75 bp, synthetic construct
  source 1..75: mol_type = other DNA
ggccgtggacgtaaggccgagcagcccgagcctcagccgcaaccgccggagggggaggattacgggttttcagac

SEQ ID NO: 650340 - DNA, 75 bp, synthetic construct
  source 1..75: mol_type = other DNA
gttccacatgaaagacaaccgctgggtgcctggctggatgtgtacaccacgtccacaggcagagacggaaaccac

SEQ ID NO: 650341 - DNA, 75 bp, synthetic construct
  source 1..75: mol_type = other DNA
ctcagccaggaggtgctgttatccctgctcagtttctgcaccgcatgcagcctttacggtgtccagacccgcaat

SEQ ID NO: 650342 - DNA, 75 bp, synthetic construct
  source 1..75: mol_type = other DNA
caggtgcttgctgttccgccagcgtaaacaagccagcgttgcgcgtcctgtggtcatacagcgaaagaaaatcgc

SEQ ID NO: 650343 - DNA, 75 bp, synthetic construct
  source 1..75: mol_type = other DNA
caggtgcttgctgttccgccagcgtacacaagccagcgttgcgcgtactgtggtcatacagcgaaagaaaatcgc

SEQ ID NO: 650344 - DNA, 75 bp, synthetic construct
  source 1..75: mol_type = other DNA
caacagttcagcggtcagcctcagccggagtcgcagccgcaaccgccggagagtgacgattacgggttttcagat

SEQ ID NO: 650345 - DNA, 75 bp, synthetic construct
  source 1..75: mol_type = other DNA
gagcagacagaatggcaacgcgtggtgctgttcggcaagctcgcggaagtggcaggcgaatatctgcgcaagggg

SEQ ID NO: 650346 - DNA, 75 bp, synthetic construct
  source 1..75: mol_type = other DNA
tgacaaacagaccggggagatgcgggagcagacagaatggcatcgcgtggtgctgttcggcaagctcgcggaagt

SEQ ID NO: 650347 - DNA, 75 bp, synthetic construct
  source 1..75: mol_type = other DNA
tgacaaacagactggggagatgcgggagcagacggaatggcagcgcgtggtgctgttcggcaagctcgcggaagt

SEQ ID NO: 650348 - DNA, 75 bp, synthetic construct
  source 1..75: mol_type = other DNA
gagcagaccgaatggcatcgcgtggtgctgttcggcaagctcgcggaagtggcaggtgaatatctgcgcaagggg

SEQ ID NO: 650349 - DNA, 75 bp, synthetic construct
  source 1..75: mol_type = other DNA
gagcagaccgaatggcaacgcgtggtgctgttcggcaagctcgcggaagtggcaggagaatatctgcgcaagggg

SEQ ID NO: 650350 - DNA, 75 bp, synthetic construct
  source 1..75: mol_type = other DNA
gagcagactgaatggcatcgcgtggtgctgttcggcaagctcgcggaagtggcaggcgaatatctgcgcaagggg

SEQ ID NO: 650351 - DNA, 75 bp, synthetic construct
  source 1..75: mol_type = other DNA
cttcagtgggtgtatgccatcgatgtgctgattgaaacacagggcgaggtctgcctccttccccttcctggggat

SEQ ID NO: 650352 - DNA, 75 bp, synthetic construct
  source 1..75: mol_type = other DNA
cttcagtggctgtatgccatcgatgtgctgattgaaacacagggcgaggtctgcctccttccgcttcctggggat

SEQ ID NO: 650353 - DNA, 75 bp, synthetic construct
  source 1..75: mol_type = other DNA
cttcagtggctgtatgccatcgatgtgctgattgaaacacagggcgaggtctgcctccttccccttcctggcgat

SEQ ID NO: 650354 - DNA, 75 bp, synthetic construct
  source 1..75: mol_type = other DNA
tgacaaacagacaggggagatgcgggagcagactgaatggcagcgcgtggtgctgttcggcaagctcgcggaagt

SEQ ID NO: 650355 - DNA, 75 bp, synthetic construct
  source 1..75: mol_type = other DNA
ccgcacgttaaaaaacatccgttcaaatgagcgtaaagccgagaaaaagcgcgagctgctgccgttctatgcgcc

SEQ ID NO: 650356 - DNA, 75 bp, synthetic construct
  source 1..75: mol_type = other DNA
ttggctgccgaatgaacatttcgccaaaattgtcggcccgatgattacctatttattgcccgtgatgattggttc

SEQ ID NO: 650357 - DNA, 75 bp, synthetic construct
  source 1..75: mol_type = other DNA
gagcagaccgaatggcaccgcgtggtgctgttcggcaagctcgcggaagtggcaggcgaatatctgcgcaagggg

SEQ ID NO: 650358 - DNA, 75 bp, synthetic construct
  source 1..75: mol_type = other DNA
ccactgctgacgaaaatgtcttccgaacgcacgctggcagtccaggcggcattcatgcagcaaccggacaaatct

SEQ ID NO: 650359 - DNA, 75 bp, synthetic construct
  source 1..75: mol_type = other DNA
ggaaccacaggcggaggccggtacgaaaaaaggaggcgcaaaaacgaaaggccgtggacgtaaggccgcgcagcc

SEQ ID NO: 650360 - DNA, 75 bp, synthetic construct
  source 1..75: mol_type = other DNA
ggcgtaaggccgcgcagccggagcctcagccgcaaccgccagagggtgaggattacggattttcagacgatatcc

SEQ ID NO: 650361 - DNA, 75 bp, synthetic construct
  source 1..75: mol_type = other DNA
gcatcaatgactgaaaacggtcatcgtcgggatatgcaccctgctgaacagattgccggattccgcgcaatggcg

SEQ ID NO: 650362 - DNA, 75 bp, synthetic construct
  source 1..75: mol_type = other DNA
acgtaaggctgcgcagccggagcctcagccgcaaccaccggagggggaggattacgggttttcagacgatatccc

SEQ ID NO: 650363 - DNA, 75 bp, synthetic construct
  source 1..75: mol_type = other DNA
gtgcctggctggatgtgtgcaccacatccacagacagatgccactgaacgcaccgataacctggctgatgccgcc

SEQ ID NO: 650364 - DNA, 75 bp, synthetic construct
  source 1..75: mol_type = other DNA
ctggcgctggagaacgacaccgcgcgtcaggtgcaggtgtttgaagccgcctgtcagtcgggatggggcggtaaa

SEQ ID NO: 650365 - DNA, 75 bp, synthetic construct
  source 1..75: mol_type = other DNA
gagcagacggaatggcagcgcgtggtgctgttcggcaagctcgcggaagtggcaggcgaatatctgcgcaagggg

SEQ ID NO: 650366 - DNA, 75 bp, synthetic construct
  source 1..75: mol_type = other DNA
gagcagaccgaatggcagcgcgtggtgctgttcggcaagctcgcggaagtggcaggggaatatctgcgcaagggg

SEQ ID NO: 650367 - DNA, 75 bp, synthetic construct
  source 1..75: mol_type = other DNA
tattacccgttacgtcaccgaaatccttgttaaaaccacgggcaccatgcagatgctggggagtgcaccacagca

SEQ ID NO: 650368 - DNA, 75 bp, synthetic construct
  source 1..75: mol_type = other DNA
gatgcgccctcggggaaggaaggtgccgcattcatggcgatgatggcagaaaagcccgtcttgcagccctgctgc

SEQ ID NO: 650369 - DNA, 75 bp, synthetic construct
  source 1..75: mol_type = other DNA
gggcattaaagccgaaagcggaagcgctaccccgtaaaacgactaaaccgcgcacgcgcaaaactgctaccaaac

SEQ ID NO: 650370 - DNA, 75 bp, synthetic construct
  source 1..75: mol_type = other DNA
cttcagtggctgtatgccatcgatgtgctgattgaaacacagggcgaggtctgcctccttcctcttcctggtgat

SEQ ID NO: 650371 - DNA, 75 bp, synthetic construct
  source 1..75: mol_type = other DNA
tgtgccgcgtatctcacgcgcacaatcgctggacgcactaagctcgatggcgaacatcgccggttatcgcgccat

SEQ ID NO: 650372 - DNA, 75 bp, synthetic construct
  source 1..75: mol_type = other DNA
atgttactggcaattaccgccttcgccagcggttttatcgccattcccctggtggacagcgtaacgctggtggtg

SEQ ID NO: 650373 - DNA, 75 bp, synthetic construct
  source 1..75: mol_type = other DNA
ggcttctttcgtaggcggggcttttgcatcgtgtatttcccaatatgtgatggtgattgccgacggcgattttgc

SEQ ID NO: 650374 - DNA, 75 bp, synthetic construct
  source 1..75: mol_type = other DNA
gcgtctgccgacgcaatcctcacagctttatggcaccaacctcgtcaatctgctgaaactgttgtgcaaagagaa

SEQ ID NO: 650375 - DNA, 75 bp, synthetic construct
  source 1..75: mol_type = other DNA
tcatcaaagcggaaatggaactctttgccgcccaggcaaaagaggtcgatatcattgtcaccaccgcgcttattc

SEQ ID NO: 650376 - DNA, 75 bp, synthetic construct
  source 1..75: mol_type = other DNA
agagaaatgcgcctgttcgccgtggcgtaaatacgcactgatggcgctggctattattcttttcggctggctggc

SEQ ID NO: 650377 - DNA, 75 bp, synthetic construct
  source 1..75: mol_type = other DNA
ttacgtcactgaaattcttgttaagaccacgggcaccgtgcagatgctgggacgtgcaccacagcagaacgctca

SEQ ID NO: 650378 - DNA, 75 bp, synthetic construct
  source 1..75: mol_type = other DNA
ctgaaaaagccgcagattatcgacgccctgaatgacgccggactgtccggtgctgcacgggacgcggagaagatg

SEQ ID NO: 650379 - DNA, 75 bp, synthetic construct
  source 1..75: mol_type = other DNA
aaacggagcgtaaatccagccgtaaaccgtcaaaagagcaggagactgccctgtcagccctgctggcgcagacgg

SEQ ID NO: 650380 - DNA, 75 bp, synthetic construct
  source 1..75: mol_type = other DNA
ttgcgccgccaggaatgaaagccagctatttttccgcccagtctttaggctggcttggtgctgcgattaacccat

SEQ ID NO: 650381 - DNA, 75 bp, synthetic construct
  source 1..75: mol_type = other DNA
ggtgctgcacgggacgcggagaagatgaagaaaggcgatgcggctgaacatgcagagttccacatgaaagacaac

SEQ ID NO: 650382 - DNA, 75 bp, synthetic construct
  source 1..75: mol_type = other DNA
ttccgtggatggtgtccagactcgcgagcatggtcacacgtcacgcagtccgctggattcgctggaaaccgctat

SEQ ID NO: 650383 - DNA, 75 bp, synthetic construct
  source 1..75: mol_type = other DNA
tggcaccgcgtggtgctgttcggcaagctcgcggaagtggcaggtgaatatctgcgtaagggggcgcaggtctac

SEQ ID NO: 650384 - DNA, 75 bp, synthetic construct
  source 1..75: mol_type = other DNA
gaacagacggaatggcaccgcgtggtgctgttcggcaagctcgcggaagtggcaggtgaatatctgcgtaagggc

SEQ ID NO: 650385 - DNA, 75 bp, synthetic construct
  source 1..75: mol_type = other DNA
ggcgaaggtcagggcgtggacgccggagatgcgtgccggaagtggcgtggtggtgtcctggcgttacggtaatgt

SEQ ID NO: 650386 - DNA, 75 bp, synthetic construct
  source 1..75: mol_type = other DNA
atgcagcagccggacaaatctctggccctgctggcatggacgctctgtctgaatgtgtttggcagcggagcgtac

SEQ ID NO: 650387 - DNA, 75 bp, synthetic construct
  source 1..75: mol_type = other DNA
cttcagtggctgtatgccatcgatgtgctgattgaaacacagggcgaggtctgcctccttccacttcctggagat

SEQ ID NO: 650388 - DNA, 75 bp, synthetic construct
  source 1..75: mol_type = other DNA
cttcagtggatgtatgccatcgatgtgctgattgaaacacagggcgaggtctgcctccttccccttcctggagat

SEQ ID NO: 650389 - DNA, 75 bp, synthetic construct
  source 1..75: mol_type = other DNA
gaccgggatggaacgctggcagtggcaggatatgccattctggcaggtcatcgcagaggctggtatggcggcaag

SEQ ID NO: 650390 - DNA, 75 bp, synthetic construct
  source 1..75: mol_type = other DNA
cggaagtgagcgtgccgctggcctcactgattaaatcaccactgaatgtgcgcacggtgccgtattctgcggagt

SEQ ID NO: 650391 - DNA, 75 bp, synthetic construct
  source 1..75: mol_type = other DNA
ccggagggatggtcacgggacatgacgacattcctgtcactcagtcaggaggtgctgttatccctgctcagtttc

SEQ ID NO: 650392 - DNA, 75 bp, synthetic construct
  source 1..75: mol_type = other DNA
actggcggagtccattaagggcgttggcctgttgcagaatctggtcgtgcataccctgcctggtgaccgttacgg

SEQ ID NO: 650393 - DNA, 75 bp, synthetic construct
  source 1..75: mol_type = other DNA
gccgaaggctgggaatggtgcgccggacgcatggagcctgtcggtttctgccgtgaggatgccggaacataccgc

SEQ ID NO: 650394 - DNA, 75 bp, synthetic construct
  source 1..75: mol_type = other DNA
aaaaactccaggctgtcgcagagttccttcgggaagccgaaggctggggatggtgtgccggacgcatggagcctg

SEQ ID NO: 650395 - DNA, 75 bp, synthetic construct
  source 1..75: mol_type = other DNA
agtctgccactgctgacgaaaatgtcctcagagcgcacgctggcagtccaggcagcactgatgcagcagccggac

SEQ ID NO: 650396 - DNA, 75 bp, synthetic construct
  source 1..75: mol_type = other DNA
gacagtaaatctcagtggcgacatgccagtgccagttacagcatgtcacacgatctcaacggtcggatgaccaat

SEQ ID NO: 650397 - DNA, 75 bp, synthetic construct
  source 1..75: mol_type = other DNA
ttgttgacgaaaaccaagcggtaattgtcgagacattgaaaacggcaaatatgatgaaaaatcaccatctggctc

SEQ ID NO: 650398 - DNA, 75 bp, synthetic construct
  source 1..75: mol_type = other DNA
aagcgtatgcggcagcgcgtctggcaaaaattcgttgccagaaccggagaaaagccgaacttcaggctgtgctgg

SEQ ID NO: 650399 - DNA, 75 bp, synthetic construct
  source 1..75: mol_type = other DNA
caaaatggaaggtgaaaaagcagaagctggcggagaaagctgcccgggaggcagagctggcggcaaaaaaagcgc

SEQ ID NO: 650400 - DNA, 75 bp, synthetic construct
  source 1..75: mol_type = other DNA
ttttgaagcaatgccagctggtacgttgttcgttaatatgaaacggttgagggaaaggttgcttcttacaacccc

SEQ ID NO: 650401 - DNA, 75 bp, synthetic construct
  source 1..75: mol_type = other DNA
cgagaagccgctggcgtcgaacctggcggaagtggatgccgccattgcttgcgcgcgggaaaatcaggtggtgct

SEQ ID NO: 650402 - DNA, 75 bp, synthetic construct
  source 1..75: mol_type = other DNA
gatttttctgtcgagcatctgtttacgtcgctggaagcgatggcagaaagcgatgccattgacgcggtgtatatt

SEQ ID NO: 650403 - DNA, 75 bp, synthetic construct
  source 1..75: mol_type = other DNA
agcaagctgctgcgtcgccgtctggcttcacttccgcagtatatccgccgccactttgccgcgaagctggatgca

SEQ ID NO: 650404 - DNA, 75 bp, synthetic construct
  source 1..75: mol_type = other DNA
aaacgcatctggcgatgccctgagtgtggagcagagcacgaccgcgatatcaatgcggcactcaacatcggcaaa

SEQ ID NO: 650405 - DNA, 75 bp, synthetic construct
  source 1..75: mol_type = other DNA
atcactcgcagtgccaccgggaaatactacgcatccatcctttgtgaagacggtattcccacaccagcgaaacct

SEQ ID NO: 650406 - DNA, 75 bp, synthetic construct
  source 1..75: mol_type = other DNA
gatccgcgtctttggtttccgcgtggtcgaaccgcaccacgatgcaacgccacactggcatttacttctttttat

SEQ ID NO: 650407 - DNA, 75 bp, synthetic construct
  source 1..75: mol_type = other DNA
agttaaaaagactggcttatacgcttgccgatatctttacgagcgagtttatacgcgagtccgatcaccagttgg

SEQ ID NO: 650408 - DNA, 75 bp, synthetic construct
  source 1..75: mol_type = other DNA
tgccagtgccggaatggtcagatcgatgatggccggtgcatcagtggcgtgtggagatcttgttatgacagtgca

SEQ ID NO: 650409 - DNA, 75 bp, synthetic construct
  source 1..75: mol_type = other DNA
ggttaagaaaggtagagatatccagttccagatttttaaaagaagtccaaaacttgctctggcaaaacacagttg

SEQ ID NO: 650410 - DNA, 75 bp, synthetic construct
  source 1..75: mol_type = other DNA
aagcaatcatcttcttcgtgctgtacagtcagatgccgacgtcgctgaacttctttgcgattcgtaacgttgaac

SEQ ID NO: 650411 - DNA, 75 bp, synthetic construct
  source 1..75: mol_type = other DNA
cgcttagcgtagtcggtctgttgatcaccattgttaactttgccttctgccagcgctgggttaaacagtacggtt

SEQ ID NO: 650412 - DNA, 75 bp, synthetic construct
  source 1..75: mol_type = other DNA
ttgtaggcctgctgatcactatcgttaacttcgccttctgccaacgctgggttaaacagtacggttcaaaaccag

SEQ ID NO: 650413 - DNA, 75 bp, synthetic construct
  source 1..75: mol_type = other DNA
tttagcggcaatatactggatacagtgcgcaggcagagtgctaaaaatattgatgggtgggtgaaagatgaacag

SEQ ID NO: 650414 - DNA, 75 bp, synthetic construct
  source 1..75: mol_type = other DNA
caaacttgcttgcagacaagttttaccagaaacatatcgagccggatattgatattgtaaaactacgaaatgaga

SEQ ID NO: 650415 - DNA, 75 bp, synthetic construct
  source 1..75: mol_type = other DNA
cttgcttgcggacaagttttaccagaaacatatcgattcggatattgatattgtaaaactacgaaatgatatccc

SEQ ID NO: 650416 - DNA, 75 bp, synthetic construct
  source 1..75: mol_type = other DNA
ggcgcaacaatcgttatggaagatttacaaggcgctgggattcagcgaagcgttcaatattccgtttgcgctgcg

SEQ ID NO: 650417 - DNA, 75 bp, synthetic construct
  source 1..75: mol_type = other DNA
aacgatttattcagttatccgaccgcggcgcaactggcggcttatgtgaaggtggatgaggcgcagaccagtgtc

SEQ ID NO: 650418 - DNA, 75 bp, synthetic construct
  source 1..75: mol_type = other DNA
cgggatggaagcgccggcaaagcccgcactgatatcaaatgtgacagggctggatatggggctggcgcattttgt

SEQ ID NO: 650419 - DNA, 75 bp, synthetic construct
  source 1..75: mol_type = other DNA
gttttaccagaaacatatcgattcggatattgatattgtaaaactacgaaatgatatcccagcttatttgatgcg

SEQ ID NO: 650420 - DNA, 75 bp, synthetic construct
  source 1..75: mol_type = other DNA
cagccgcaaatgctatccgcaatacccgtgaagccgttcgccttcagcctggcctgggtaatctgactttccaga

SEQ ID NO: 650421 - DNA, 75 bp, synthetic construct
  source 1..75: mol_type = other DNA
aaagagcctcttgatcaggcactgaaacgggcctcagggcatcattttgaactggataatgagttgcccattcgt

SEQ ID NO: 650422 - DNA, 75 bp, synthetic construct
  source 1..75: mol_type = other DNA
acggagcatatttctcaggaggaggaagcgtatgcggcagcgcgtctggcgaaaatccgccgccagaaccggata

SEQ ID NO: 650423 - DNA, 75 bp, synthetic construct
  source 1..75: mol_type = other DNA
cgccagaggtggaatgcaccaaccatctgaaggcgaaaacctttgatttctctgagggcggcgcgctgaccggca

SEQ ID NO: 650424 - DNA, 75 bp, synthetic construct
  source 1..75: mol_type = other DNA
gaaggaaatcgtggtcacagcgcctgacggcgcggtgttccgctacgatgcggacgcaggtgcactgagcgccag

SEQ ID NO: 650425 - DNA, 75 bp, synthetic construct
  source 1..75: mol_type = other DNA
cggcatgaaaacggccaccctgcaggcatccgtcagcgtgaaactggatacgcccgtcgtggaatgcacaaacct

SEQ ID NO: 650426 - DNA, 75 bp, synthetic construct
  source 1..75: mol_type = other DNA
ctatcagttctttagggtgcagttcttttaggcggtctaccatcctgggtaagcaggaagatattctgcaatact

SEQ ID NO: 650427 - DNA, 75 bp, synthetic construct
  source 1..75: mol_type = other DNA
gaatctgggctcatcactcagtcagggaacgtgggtgatcacttctttcgggtggcgaatgccatctcgatcccg

SEQ ID NO: 650428 - DNA, 75 bp, synthetic construct
  source 1..75: mol_type = other DNA
tgatttgctgaaattaagttacggcgatggtataaaaccattaatgcgatttgagttggcatttttaaataaaat

SEQ ID NO: 650429 - DNA, 75 bp, synthetic construct
  source 1..75: mol_type = other DNA
cggcatgaaaacagccaccctacaggcatccgtcagcgtgaaactggatacgcccgtcgtggaatgcacaaacct

SEQ ID NO: 650430 - DNA, 75 bp, synthetic construct
  source 1..75: mol_type = other DNA
caagtcgtaacgatcaagatacagccgaacgtctgcagaacgctttactccagttaaatgttcaggatctcaaaa

SEQ ID NO: 650431 - DNA, 75 bp, synthetic construct
  source 1..75: mol_type = other DNA
ggcaagatagctggtccgcacaaattgatggcgtacgaaatatcatgcgggaaatagaacaactgcaaaactcac

SEQ ID NO: 650432 - DNA, 75 bp, synthetic construct
  source 1..75: mol_type = other DNA
gcatccgtcagcgtgacactggatacgcctgtcgtggaatgcacagaccttctgagaacagcgacgcttgacgtc

SEQ ID NO: 650433 - DNA, 75 bp, synthetic construct
  source 1..75: mol_type = other DNA
aatgtgtggttgccgccatcacccggcgaacaggtggtaattgcctgcatcggcggcaacccggaaacagccatg

SEQ ID NO: 650434 - DNA, 75 bp, synthetic construct
  source 1..75: mol_type = other DNA
gaacaccacgcgcgcgggatccttcaatgtgtggttgccgccatcacccggcgaacaggtggtaattgcctgcat

SEQ ID NO: 650435 - DNA, 75 bp, synthetic construct
  source 1..75: mol_type = other DNA
atcctgagttcggtctcccggcagagcactaaagatcttttagcatggaaaagagatgaagaaatagtttatacc

SEQ ID NO: 650436 - DNA, 75 bp, synthetic construct
  source 1..75: mol_type = other DNA
tgacactgaagcggaaaacagagggaacaacacctgtccgcagccggaaaaccatcatcaatgttaccacgccac

SEQ ID NO: 650437 - DNA, 75 bp, synthetic construct
  source 1..75: mol_type = other DNA
ttggcgccatgaaagccggtgcctgccgctatgatacagaaggctatgtgacagaacatatcacacaggaagaag

SEQ ID NO: 650438 - DNA, 75 bp, synthetic construct
  source 1..75: mol_type = other DNA
tgacactgaagcggaaaacagagggaacaacacctgtccgcagccggaaaactatcatcaatgtcaccacgccac

SEQ ID NO: 650439 - DNA, 75 bp, synthetic construct
  source 1..75: mol_type = other DNA
taccctgaagccctggtggccggggttatttgacggtgacaccccccggcttctggcctgcggtatccgggaggt

SEQ ID NO: 650440 - DNA, 75 bp, synthetic construct
  source 1..75: mol_type = other DNA
atctgaagtttttatcctggcgtattcttgaacatgcttcaattaacgatagtgatgaatcattacaacaagcag

SEQ ID NO: 650441 - DNA, 75 bp, synthetic construct
  source 1..75: mol_type = other DNA
aagcgtatgcggcagaacgtctggcgaaaatccgccgccagaaccggataaaggcagaacttcaggccgtactta

SEQ ID NO: 650442 - DNA, 75 bp, synthetic construct
  source 1..75: mol_type = other DNA
cggtcggcaatcagtgcggtaaatgtgtccgggccgcgcgtgaagtgatggaggatgaattaatgcagctgccgg

SEQ ID NO: 650443 - DNA, 75 bp, synthetic construct
  source 1..75: mol_type = other DNA
cggttggaaaccagtgcggtaaatgtgtcagagccgcacgtgaggtgatggaggatgaattaatgcagctgccgg

SEQ ID NO: 650444 - DNA, 75 bp, synthetic construct
  source 1..75: mol_type = other DNA
aaacatttccagtgaagtacggcaaagagtttttaaattcattgaaaaggattacagtctcaagttgaatatcat

SEQ ID NO: 650445 - DNA, 75 bp, synthetic construct
  source 1..75: mol_type = other DNA
accatcatcaatgtcaccacgccaccaaaatggaaggtgaaaaagcagaagctggcggagaaagcggcccgggaa

SEQ ID NO: 650446 - DNA, 75 bp, synthetic construct
  source 1..75: mol_type = other DNA
agctggcggcaaaaaaagcgcaggccagacaggcgctgtccatttatctgaacctgcccacactggatgaagccg

SEQ ID NO: 650447 - DNA, 75 bp, synthetic construct
  source 1..75: mol_type = other DNA
gtaaaaaattagcttccctttgtgaggggatgagtagagatgataagaataagaccagagagatactggaaaata

SEQ ID NO: 650448 - DNA, 75 bp, synthetic construct
  source 1..75: mol_type = other DNA
ttcgtcattttgctggtgacctttttcggtcaaaacatcctgctgattttcgtggcgataggcatggtttcctgg

SEQ ID NO: 650449 - DNA, 75 bp, synthetic construct
  source 1..75: mol_type = other DNA
cgtactcggtgtggtggtggtctacgcatcgcttctggtgcccagcatgatcctctttgaatctttccttagctt

SEQ ID NO: 650450 - DNA, 75 bp, synthetic construct
  source 1..75: mol_type = other DNA
ctgtcgcagtttatgctggatctgcataccgaacagcatggctacagtgagaactatgttccgtacctggttaac

SEQ ID NO: 650451 - DNA, 75 bp, synthetic construct
  source 1..75: mol_type = other DNA
cgaagcgggatcgctggtgattgaaaaactgtctgaatgccagaaagtttgctttgtgccgcgcggcagccagat

SEQ ID NO: 650452 - DNA, 75 bp, synthetic construct
  source 1..75: mol_type = other DNA
attcggtaatgatgcgtttgctggaaatcctcaactccttcccattcatgttcttcgtcattttgctggtgacct

SEQ ID NO: 650453 - DNA, 75 bp, synthetic construct
  source 1..75: mol_type = other DNA
gatgcattaattaagttgctgcattcaatatcatctgatgactcttgttatgtaaaaaaaaaatatttactgcga

SEQ ID NO: 650454 - DNA, 75 bp, synthetic construct
  source 1..75: mol_type = other DNA
aatcgataatagtaatccgtacagaaaaattataattgatgatgcattaattaagttgctgcattcaatatcatc

SEQ ID NO: 650455 - DNA, 75 bp, synthetic construct
  source 1..75: mol_type = other DNA
ttccggttacgcgtgaccagtccgacatctacgaagtctttaacgtggcgggttcttcttttggttcttatgctg

SEQ ID NO: 650456 - DNA, 75 bp, synthetic construct
  source 1..75: mol_type = other DNA
tgccgatcgcattcaggagatccacattaaagttatccatatcctgatccagttaattgaaaaagagatggttaa

SEQ ID NO: 650457 - DNA, 75 bp, synthetic construct
  source 1..75: mol_type = other DNA
aaattcgcgttccgcactttggttatgccgaccgcattcaggagatccacattaaagtgatccatatcctgatcc

SEQ ID NO: 650458 - DNA, 75 bp, synthetic construct
  source 1..75: mol_type = other DNA
gatggcttcaattttggcagcttcgtggttgccgttattggtgcgattgtcgtgctatttatctacaggaagatt

SEQ ID NO: 650459 - DNA, 75 bp, synthetic construct
  source 1..75: mol_type = other DNA
ctaaaaccggaccggatgacgcagggcttaatattttactgacagaggctcgtctggaagaacgccgggcaaggg

SEQ ID NO: 650460 - DNA, 75 bp, synthetic construct
  source 1..75: mol_type = other DNA
gtacataacctgctgaaaattgaagtgcaaacgctggacggcgaggcgctgacgctgggatcggacgcgctggat

SEQ ID NO: 650461 - DNA, 75 bp, synthetic construct
  source 1..75: mol_type = other DNA
aatgtgcgcccagttcaacagcgatgaaatcacgaccttccatgcggtcaaggcggcgtttgaccccgatggttt

SEQ ID NO: 650462 - DNA, 75 bp, synthetic construct
  source 1..75: mol_type = other DNA
atgagcatcttgtacgaagagcgtcttgatggcgctttacccgatgtcgaccgcacatcggtactgatggcactg

SEQ ID NO: 650463 - DNA, 75 bp, synthetic construct
  source 1..75: mol_type = other DNA
ccaacgtctttcatgccggagatggcaacatgcacccgttaatccttttcgatgccaacgaacccggtgaatttg

SEQ ID NO: 650464 - DNA, 75 bp, synthetic construct
  source 1..75: mol_type = other DNA
tggtggcgcgctgccgctggaaaaaggtgtgttgttggtgatggcgcgctttaaagaaatcctcgacattaaccc

SEQ ID NO: 650465 - DNA, 75 bp, synthetic construct
  source 1..75: mol_type = other DNA
ggataacctgtcgattcgcgcggcggaagattttattcatgccggttatcccgtcgatgccgaagcgattttatt

SEQ ID NO: 650466 - DNA, 75 bp, synthetic construct
  source 1..75: mol_type = other DNA
cgtctggaagaacgtcgggcaagaactgaagcaatggcagctcgccttgatagccttgcgtgccatatcacatcc

SEQ ID NO: 650467 - DNA, 75 bp, synthetic construct
  source 1..75: mol_type = other DNA
aactgaacgaagcggcggaaacgctggctaactttttaaaagatgatgccaatattcacgccattcagcgcgcgg

SEQ ID NO: 650468 - DNA, 75 bp, synthetic construct
  source 1..75: mol_type = other DNA
tagcctggcgtgtcatatcacatcccgccagctaaaccacgtcgaagcggcagaactgctgcgtgtaactgctga

SEQ ID NO: 650469 - DNA, 75 bp, synthetic construct
  source 1..75: mol_type = other DNA
tggtgtgccacggtagctggccgggcgtgattactcgtgaaccggcgggtactggcggctttggttatgatccaa

SEQ ID NO: 650470 - DNA, 75 bp, synthetic construct
  source 1..75: mol_type = other DNA
ttaatactgatagtgacgcgctggccgtgctgctgacagatgccaaaaaagaagaacgcaaagaccgtgcactcg

SEQ ID NO: 650471 - DNA, 75 bp, synthetic construct
  source 1..75: mol_type = other DNA
tagcctggcgtgtcatatcacatcccgccagctaaaccacgtcgaagcagcagaactactgcgtgtaactgctga

SEQ ID NO: 650472 - DNA, 75 bp, synthetic construct
  source 1..75: mol_type = other DNA
accaattcattaaagatgatgccgcgcgtgccgcatctatccttgaagctgcacgtaaagacccgatttttgcgg

SEQ ID NO: 650473 - DNA, 75 bp, synthetic construct
  source 1..75: mol_type = other DNA
gaaatttattagtgattataaaaatagtcctttgctggttgtttctcattcattggcaaaaaagtataataatga

SEQ ID NO: 650474 - DNA, 75 bp, synthetic construct
  source 1..75: mol_type = other DNA
cgctgaattcaggaatttataaaattaaatttcgtaatgattataattatcttattattcatcagattactgatg

SEQ ID NO: 650475 - DNA, 75 bp, synthetic construct
  source 1..75: mol_type = other DNA
ttacgcgagcctaatcaattaaccattcaatcaatcaaaaacagcgaagctggcgttggtgttcataaggccaaa

SEQ ID NO: 650476 - DNA, 75 bp, synthetic construct
  source 1..75: mol_type = other DNA
ctggtttacgagcacacagcgaaaggtgatgttgcggcactgaacgttgatgcgctgactgaagatcagaaagcg

SEQ ID NO: 650477 - DNA, 75 bp, synthetic construct
  source 1..75: mol_type = other DNA
gataaactgactgcgatgggcgttggcgagcgtaaagtgaactaccgcctgcgcgactggggtgtttctcgtcag

SEQ ID NO: 650478 - DNA, 75 bp, synthetic construct
  source 1..75: mol_type = other DNA
aaaaaaatatataaatctaataaaatttgctcgaatcatcctgacacgacttctagtgataaaacatatccaaat

SEQ ID NO: 650479 - DNA, 75 bp, synthetic construct
  source 1..75: mol_type = other DNA
atatttatgactataccaacgaaaccgcgaacgacgttttcgacgtgcgtttagcgcagatggaaatcaacccgg

SEQ ID NO: 650480 - DNA, 75 bp, synthetic construct
  source 1..75: mol_type = other DNA
ggtgcgatctccatgggcgataactgggacatgatgtacgtcggtatgtaccaagacatcaactgggataacgat

SEQ ID NO: 650481 - DNA, 75 bp, synthetic construct
  source 1..75: mol_type = other DNA
gttttaccagaaacatatcgattcggatattgatattgtaaaactacgaaatgatatcccagcttacttgacgcg

SEQ ID NO: 650482 - DNA, 75 bp, synthetic construct
  source 1..75: mol_type = other DNA
cccgaatcgatgaagatctgaagaatcaggcggcggacgtactggccgggatggggctgaccatctctgacctgg

SEQ ID NO: 650483 - DNA, 75 bp, synthetic construct
  source 1..75: mol_type = other DNA
agctggtttttgcgctgacgcctttccttgcgatgaacgcgtttcgtgaattttccgagattgtctccctactcc

SEQ ID NO: 650484 - DNA, 75 bp, synthetic construct
  source 1..75: mol_type = other DNA
tggcaggctggcgacagcatctggtcgcgtccggctattcgtgtgtttgccacctacgccaagtgggatgagaaa

SEQ ID NO: 650485 - DNA, 75 bp, synthetic construct
  source 1..75: mol_type = other DNA
actgggtttccccggttgatgctatcgttgaacgtgacgagaaaggccgtatcgtgaaagcgaaagacgcggcag

SEQ ID NO: 650486 - DNA, 75 bp, synthetic construct
  source 1..75: mol_type = other DNA
atcctgaggcctggctgcagggctggcgtggtggtacgctggtgagtgacggatacagcgtgtacaaatctctgg

SEQ ID NO: 650487 - DNA, 75 bp, synthetic construct
  source 1..75: mol_type = other DNA
cgaagaggatgttgacgcggatatcgcagaaatctcggcgcatctggacaaactgcttcctcagaccggggacga

SEQ ID NO: 650488 - DNA, 75 bp, synthetic construct
  source 1..75: mol_type = other DNA
aaaagctggagtatattcccgctcactttgtggtgaaccgttatgtccgtccgcaatacagttgtccctgttgcc

SEQ ID NO: 650489 - DNA, 75 bp, synthetic construct
  source 1..75: mol_type = other DNA
ggttcggctatcaacgatatgcacccacgtaacggcgctgactacttcacgcgtgtaactctgactatggccaaa

SEQ ID NO: 650490 - DNA, 75 bp, synthetic construct
  source 1..75: mol_type = other DNA
ttcacgcccgatacgcaaacccttaccggttcatcttccacgggtggaaaaaattatccagccggacactgacca

SEQ ID NO: 650491 - DNA, 75 bp, synthetic construct
  source 1..75: mol_type = other DNA
gagccacgcaagacgcggcttcgcaaatctgtataaggccagcagggagccccgtgcagccatggcgctgagaaa

SEQ ID NO: 650492 - DNA, 75 bp, synthetic construct
  source 1..75: mol_type = other DNA
ggtaaatcctgctccggctggctgtgggcttacgtcagcggagaaagaagcggcccgccggtcgtctgttttgac

SEQ ID NO: 650493 - DNA, 75 bp, synthetic construct
  source 1..75: mol_type = other DNA
aaactgtctgaatgccagaaagtttgctttgttccgcgtggcagccagagttccgcgtggcagccagatgcagga

SEQ ID NO: 650494 - DNA, 75 bp, synthetic construct
  source 1..75: mol_type = other DNA
ctgtatcgtcagcagcacattttcgcccggatgggtgtggagcttcccgtcagtacaatggcggatatggttggt

SEQ ID NO: 650495 - DNA, 75 bp, synthetic construct
  source 1..75: mol_type = other DNA
ttgcagcactcaaaagtcagtgattctgtcctggcgagcgagattcagggcgaagcaggatcgctggtgattgaa

SEQ ID NO: 650496 - DNA, 75 bp, synthetic construct
  source 1..75: mol_type = other DNA
atcgcgagttgataaaccgtccggtggtgcatgcagatgagactaccctgaagatcctgaacacgaagaaaggcg

SEQ ID NO: 650497 - DNA, 75 bp, synthetic construct
  source 1..75: mol_type = other DNA
cagggctggcatggcggtacgctggtgagtgacgggtacaacgtgtacaaatctctggcggataatcacccaggt

SEQ ID NO: 650498 - DNA, 75 bp, synthetic construct
  source 1..75: mol_type = other DNA
accttggcattggtcaacgctggaggcatggcacatggttgatgggatacaacacgttttatgacaacttgttag

SEQ ID NO: 650499 - DNA, 75 bp, synthetic construct
  source 1..75: mol_type = other DNA
agaatcaaaataacctcgggctgaatcttaactaccgttttggtgtaccactcaaaaaacaactttctgcgggcg

SEQ ID NO: 650500 - DNA, 75 bp, synthetic construct
  source 1..75: mol_type = other DNA
ataaccaggggcagcgtgtctcctccaatgagatcacgctaacgcttgtcgaaccgttcgatgcattgtcaaacg

SEQ ID NO: 650501 - DNA, 75 bp, synthetic construct
  source 1..75: mol_type = other DNA
acacgtcgatccagctgcggccattcagcagggcaaagtagaaagttcgaaagactttcttatcgcgaccctgaa

SEQ ID NO: 650502 - DNA, 75 bp, synthetic construct
  source 1..75: mol_type = other DNA
ctggcatgtaaaaccttcttgcgtgactacaccgacggtatgaaggttgaagcgttagctaacttcccgatcgaa

SEQ ID NO: 650503 - DNA, 75 bp, synthetic construct
  source 1..75: mol_type = other DNA
gacattttaccggcagtcgtggaagctggtttgtgccgttacaagataatgatcgttatctcacctggagccagc

SEQ ID NO: 650504 - DNA, 75 bp, synthetic construct
  source 1..75: mol_type = other DNA
gcggggtataaccacctttgtgatgaaaatattgataattttgattttctgaatacacctgaaaagacgttaatc

SEQ ID NO: 650505 - DNA, 75 bp, synthetic construct
  source 1..75: mol_type = other DNA
gcaaaaagtcgaagaggatatgtggactataccggcaagaccaaaaagcggaggtggccttgatacagcaccata

SEQ ID NO: 650506 - DNA, 75 bp, synthetic construct
  source 1..75: mol_type = other DNA
gacgtgatcgccgttgcccgtgctttacgcgacgcaattgagggcaaggcctatatcacccgatggggtgaacaa

SEQ ID NO: 650507 - DNA, 75 bp, synthetic construct
  source 1..75: mol_type = other DNA
actaccccgtgcggttggcctggctggcatgttcttaccgattgcttcaacgctggtttcgcacccgccgccggg

SEQ ID NO: 650508 - DNA, 75 bp, synthetic construct
  source 1..75: mol_type = other DNA
cgtaaacgtgctgccttccaccgcgatgttgatgattatgtgtctgaatttgatgggggcaggcggcccccgtct

SEQ ID NO: 650509 - DNA, 75 bp, synthetic construct
  source 1..75: mol_type = other DNA
ctctggcggttgccgtcgcagcgggcgtaatgtctgctcaggcaatggctgttgatttccacggctatgcacgtt

SEQ ID NO: 650510 - DNA, 75 bp, synthetic construct
  source 1..75: mol_type = other DNA
gtcgattcaccgcgtctgctgtttatcgtcattatggtggctatcctgattgtcggcatggtcatggatttaacg

SEQ ID NO: 650511 - DNA, 75 bp, synthetic construct
  source 1..75: mol_type = other DNA
ggccgatatcgcctgggcggttattcaatactggcagaccacgggggatgaaagtttcattgcgcatgaaggcat

SEQ ID NO: 650512 - DNA, 75 bp, synthetic construct
  source 1..75: mol_type = other DNA
gcgacgcaacgcctgataatatttcgccacatttactgaaaaatattttagccctgctaaataatcctgccgtag

SEQ ID NO: 650513 - DNA, 75 bp, synthetic construct
  source 1..75: mol_type = other DNA
gccaatctcccaggctatgcatgaattcaccgatacccgcgctgaaaatacccttgatgagatctggctggtcga

SEQ ID NO: 650514 - DNA, 75 bp, synthetic construct
  source 1..75: mol_type = other DNA
tgcaaaaactggtgtggatcgactggcgggatgacaggcaagctgctttagacgagtggggcagcgcgtcgcttc

SEQ ID NO: 650515 - DNA, 75 bp, synthetic construct
  source 1..75: mol_type = other DNA
gaacaagtatgcttcgctgatggcgcaggggaacggctatcttgggcttcgcgccagccatgaagaagattacac

SEQ ID NO: 650516 - DNA, 75 bp, synthetic construct
  source 1..75: mol_type = other DNA
gcccgaagtttactgcgttatcgctggcacaacttgcctggcgcgcaggagaaagcgcgacgcaatggctggcag

SEQ ID NO: 650517 - DNA, 75 bp, synthetic construct
  source 1..75: mol_type = other DNA
cgatgccgccgccattaacgccttacgccagcaaattcaggcgttgaaagtgacgggcaggcaaaaaatcaatct

SEQ ID NO: 650518 - DNA, 75 bp, synthetic construct
  source 1..75: mol_type = other DNA
aatctcctgtctgatgtggtcaatttacttgttaaacgcgctgtatttcacaagcaaatctcctccgtggatgaa

SEQ ID NO: 650519 - DNA, 75 bp, synthetic construct
  source 1..75: mol_type = other DNA
tacgtcctggttttatattcattattagtcgtatttgtttttattcccgatctcatcatcctccctttgaaatgg

SEQ ID NO: 650520 - DNA, 75 bp, synthetic construct
  source 1..75: mol_type = other DNA
gcgttactgcatgtggctgcaacccgtgccgtaaaagggctgtttgtttcatcatctggtgtccctagtccgcta

SEQ ID NO: 650521 - DNA, 75 bp, synthetic construct
  source 1..75: mol_type = other DNA
gggctgttaactggtgtgaaggttgataacctcgatggcgaagcggataccagtaatgattatttgtcattactg

SEQ ID NO: 650522 - DNA, 75 bp, synthetic construct
  source 1..75: mol_type = other DNA
tggttatctcagcgtctggcagataaacccggtaagaaagtacttttcacgacctttacgcgtaacctggcggca

SEQ ID NO: 650523 - DNA, 75 bp, synthetic construct
  source 1..75: mol_type = other DNA
caaggcctatatcacccgatggggtgaacaaagccgtgatcctgaaacaatgcgataccgctattccttcgatgt

SEQ ID NO: 650524 - DNA, 75 bp, synthetic construct
  source 1..75: mol_type = other DNA
gcgtcggcagacggcattctggatgcagttctggaagacgaaggcacaaccgtaacgtctcgtcagatcctgggt

SEQ ID NO: 650525 - DNA, 75 bp, synthetic construct
  source 1..75: mol_type = other DNA
ggccagagcggtattcctgggcgacacctcacagacaaaagccgtagaggcgggcaagccatttgaacagctgat

SEQ ID NO: 650526 - DNA, 75 bp, synthetic construct
  source 1..75: mol_type = other DNA
tggatttagcgaacggcgaccgttttaaggtaaaaggcgtccagagtggtgaggtactgctggagaacgagaaag

SEQ ID NO: 650527 - DNA, 75 bp, synthetic construct
  source 1..75: mol_type = other DNA
gctggtctcggtggtgtcggtgaagattctctcgttcatccaccagcaggatattgcatcgctggtgtccggtgt

SEQ ID NO: 650528 - DNA, 75 bp, synthetic construct
  source 1..75: mol_type = other DNA
attctgtcgttcatccaccagcaggatatcgcatcgctggtgtcaggactgttctcccgccagcgaggcggagga

SEQ ID NO: 650529 - DNA, 75 bp, synthetic construct
  source 1..75: mol_type = other DNA
gccgttaaaatcctgacgtttctgaataaccaggatatcggttcgctggtggcgcttataacgcgccggggaggt

SEQ ID NO: 650530 - DNA, 75 bp, synthetic construct
  source 1..75: mol_type = other DNA
aaaaacggcaggcttaaaaagaccagccaccgcgtcactaccgtggagggtattcgccttgagcgttccattctg

SEQ ID NO: 650531 - DNA, 75 bp, synthetic construct
  source 1..75: mol_type = other DNA
attcagcgccagaagaatgaggttttgcttgaagcggttaagtatgccgctgaaggtaatgcggcgcgcgccctg

SEQ ID NO: 650532 - DNA, 75 bp, synthetic construct
  source 1..75: mol_type = other DNA
cagtaacccagaataccaataaccttgtcgtcgctactttccgccacgaaacgtccagggcgctagatcctgatt

SEQ ID NO: 650533 - DNA, 75 bp, synthetic construct
  source 1..75: mol_type = other DNA
cgggcctcagataaaaaaattggccccggctcagtagtttttattgacgaagcaggggtaatcccggcccgccag

SEQ ID NO: 650534 - DNA, 75 bp, synthetic construct
  source 1..75: mol_type = other DNA
aggcgttacgcttcaggcactggtcaacggtgataaacgtatcattgaagcgcacgatcgggcggtcactaaagc

SEQ ID NO: 650535 - DNA, 75 bp, synthetic construct
  source 1..75: mol_type = other DNA
tgtcgtcgctactttccgccacgaaacttccagggcgctagatcctgatttgcacacacacgcttttgtcatgaa

SEQ ID NO: 650536 - DNA, 75 bp, synthetic construct
  source 1..75: mol_type = other DNA
cagcaggatatcgcatcactggtgtccggcctgttctcgcgcctgcggggcggaggaggcggcaatgttaagtaa

SEQ ID NO: 650537 - DNA, 75 bp, synthetic construct
  source 1..75: mol_type = other DNA
cagggaaagaatttaaggttcttgcctcagagatagacaggctgatcggcaatgaatacacctcagaccgtacca

SEQ ID NO: 650538 - DNA, 75 bp, synthetic construct
  source 1..75: mol_type = other DNA
gaataagtgtggcgctaggcagtgcaactgcattcggcttgttcacgggaacggatttcgggattgtgtttgggg

SEQ ID NO: 650539 - DNA, 75 bp, synthetic construct
  source 1..75: mol_type = other DNA
tggcgtgtgcggcacattttctggtgtcgttcattgttggtgtgctgggggcagaagttctggcatcctggctgg

SEQ ID NO: 650540 - DNA, 75 bp, synthetic construct
  source 1..75: mol_type = other DNA
cccgctgtgaagtgatttctggggtaacgttaccgttagttgaacagatgctggcctaccgtgaaacattatcca

SEQ ID NO: 650541 - DNA, 75 bp, synthetic construct
  source 1..75: mol_type = other DNA
aaatcaacgatattttcgcgcgaattctgttatgccgcgaaaaagatcacaaactgtgccatatcatctggcggg

SEQ ID NO: 650542 - DNA, 75 bp, synthetic construct
  source 1..75: mol_type = other DNA
cgtaaatttgcaaagctcatcccgctgcgtgggaccagtgcagacagttacctgaaggggagagggcttaatacc

SEQ ID NO: 650543 - DNA, 75 bp, synthetic construct
  source 1..75: mol_type = other DNA
attctgtcgttcatccaccagcaggatattgcatcgttggtgtccggtgtgttctcccgtctgcggggtggaggc

SEQ ID NO: 650544 - DNA, 75 bp, synthetic construct
  source 1..75: mol_type = other DNA
gcacggctgctgcgctgggtggcgcgacggtattcgggctgtttaccgggatggatttcgggattgtgtttggcg

SEQ ID NO: 650545 - DNA, 75 bp, synthetic construct
  source 1..75: mol_type = other DNA
gttggtatcggtggtgtcggtaaagattctgtcgtttattcaccagcaggatattgcatcgttggtatcgggctt

SEQ ID NO: 650546 - DNA, 75 bp, synthetic construct
  source 1..75: mol_type = other DNA
attctctcgttcatccaccagcaggatattgcatcgctggtgtccggcttgttctcccgcctgcggggtggagga

SEQ ID NO: 650547 - DNA, 75 bp, synthetic construct
  source 1..75: mol_type = other DNA
gcactgctgtggcgctcggcggggcgacggtattcgggctgtttaccgggacggatttcgggattgtatttggtg

SEQ ID NO: 650548 - DNA, 75 bp, synthetic construct
  source 1..75: mol_type = other DNA
gctggtgtcagtggtgtcggtgaagattctctcgttcatccaccagcaggatattgcatcactggtgtccggtct

SEQ ID NO: 650549 - DNA, 75 bp, synthetic construct
  source 1..75: mol_type = other DNA
atgactcaagactatgaactggttgtgaaaggagttcgcaattttgagaataaagtggcggtaactgtagcctta

SEQ ID NO: 650550 - DNA, 75 bp, synthetic construct
  source 1..75: mol_type = other DNA
ctacggtcagggctggttgtacagcaaagctttgccaaaagaagatttcattatctgggcaaaacagcatctctg

SEQ ID NO: 650551 - DNA, 75 bp, synthetic construct
  source 1..75: mol_type = other DNA
aggtcaatcccaaacaaatcgcccttgaactcacggagcgtgagtttgccgatcctaaaaccagcgcgccaatca

SEQ ID NO: 650552 - DNA, 75 bp, synthetic construct
  source 1..75: mol_type = other DNA
gtctcgttgctgatgcaaaaccggcaagccgccatctgacgggactggctatcagtttaagtacaaccggcaaca

SEQ ID NO: 650553 - DNA, 75 bp, synthetic construct
  source 1..75: mol_type = other DNA
tcgccaccttatcggcctgaacattatccaggacattcccggctatctgtatacaggcggtgtggtctgtgatgg

SEQ ID NO: 650554 - DNA, 75 bp, synthetic construct
  source 1..75: mol_type = other DNA
ccgggaagaattactggttctctgaagacgccaccgacggcattgcggtcagaaaaagatgatattgaatcgccc

SEQ ID NO: 650555 - DNA, 75 bp, synthetic construct
  source 1..75: mol_type = other DNA
tgcgtaagcgtgtggcagagcgtctgctggaagcgaaaaactcccccgccatgctgaccacgttcaacgaagtca

SEQ ID NO: 650556 - DNA, 75 bp, synthetic construct
  source 1..75: mol_type = other DNA
gacgtcctggctttttaatatgtgttactggcatctgccggggctgaacagccagtttaaagtgttgccggagtc

SEQ ID NO: 650557 - DNA, 75 bp, synthetic construct
  source 1..75: mol_type = other DNA
atgcgacttgcgctccgtctggggcgcaccttatccgaactgcgccacagtctgagtgcgagcgaggcgatgatg

SEQ ID NO: 650558 - DNA, 75 bp, synthetic construct
  source 1..75: mol_type = other DNA
tagctcatggcaaattgatgccgccattattggcaatgcccataacgttgtcataaccagcagcgatgaaattgc

SEQ ID NO: 650559 - DNA, 75 bp, synthetic construct
  source 1..75: mol_type = other DNA
atacgggtactgttttcatatcatctcttccgttaagtctaatatatattgtttctgtaattgtaaaaaggcttt

SEQ ID NO: 650560 - DNA, 75 bp, synthetic construct
  source 1..75: mol_type = other DNA
atatgtggtggggatggtttatgggggggtatactctgtatatgtcatgggattatgagtttaaatacagattgc

SEQ ID NO: 650561 - DNA, 75 bp, synthetic construct
  source 1..75: mol_type = other DNA
ccgccgcgttgcgccaggctggtgtgtcgaccgcccacacttagtcaaactggtcgaaaacctgtttagccgcga

SEQ ID NO: 650562 - DNA, 75 bp, synthetic construct
  source 1..75: mol_type = other DNA
acatcttccctcagacgctgaccgaacagaaacgcctcatcgggatccctctcgatgaggctaccgttggactga

SEQ ID NO: 650563 - DNA, 75 bp, synthetic construct
  source 1..75: mol_type = other DNA
gcgtaacaaagcgctttcttttgaagaggcgatgcaatgtacaaaagaaaaatacgagggagtcataaaaaaact

SEQ ID NO: 650564 - DNA, 75 bp, synthetic construct
  source 1..75: mol_type = other DNA
atgatgatgactaaggtgtctgtcgttattatgaatataacggttttcccggaaggctttttacgggcaatcctt

SEQ ID NO: 650565 - DNA, 75 bp, synthetic construct
  source 1..75: mol_type = other DNA
ccgtgctggctggaatggtaaggggatgtatctgttcattatccagcagaatgcttgggggtttgagtgtgacct

SEQ ID NO: 650566 - DNA, 75 bp, synthetic construct
  source 1..75: mol_type = other DNA
tgaaaaactcacagaacctccttgctacatgggttccatccattggcgacctgatggctgaagactggcaaatca

SEQ ID NO: 650567 - DNA, 75 bp, synthetic construct
  source 1..75: mol_type = other DNA
atggtgctttctgattgttattcatgggctaacgagcagtctggacatgcccgtctcggtgatccacgtcgtacg

SEQ ID NO: 650568 - DNA, 75 bp, synthetic construct
  source 1..75: mol_type = other DNA
gtccatcagcacaaaggcaccatcagcgcattgcgtcgggtggttgagccgctcggctttctgattgaggtgcgc

SEQ ID NO: 650569 - DNA, 75 bp, synthetic construct
  source 1..75: mol_type = other DNA
cgtgctcgacagcggcatcactgatgaaatgtatcaggagcttgagcgtctgattaatgacgccaaaccggcaag

SEQ ID NO: 650570 - DNA, 75 bp, synthetic construct
  source 1..75: mol_type = other DNA
gaaatgtatcaggagcttgagcgcctgattgaagacgccaaaccggcaagtcgccacctgaccgggctggctatc

SEQ ID NO: 650571 - DNA, 75 bp, synthetic construct
  source 1..75: mol_type = other DNA
atgagtaattcgttgttaccaccatcagccagcaatttcatgcgttgtgccgaagccgtcggaacgcgcattaca

SEQ ID NO: 650572 - DNA, 75 bp, synthetic construct
  source 1..75: mol_type = other DNA
cgggacattcccggctacctgttcgccggtggtgtggcttacgacggcgatgtaattacggtttaccccggataa

SEQ ID NO: 650573 - DNA, 75 bp, synthetic construct
  source 1..75: mol_type = other DNA
agaagtggccggaggcgacaaagcgcagcgtctgcgcgtcctcgtttttcgtccatcagcacaaaggcaccatca

SEQ ID NO: 650574 - DNA, 75 bp, synthetic construct
  source 1..75: mol_type = other DNA
tgtgttggtgatttgtgacaatcggctggtgatgcgtccctatggcgcgacttttctcgccagtctgccacccgc

SEQ ID NO: 650575 - DNA, 75 bp, synthetic construct
  source 1..75: mol_type = other DNA
gtggcccacggtttcgctttatgactatccgccgcaagagcaatggagcgccttccagaagctggcgcaaatgtt

SEQ ID NO: 650576 - DNA, 75 bp, synthetic construct
  source 1..75: mol_type = other DNA
cctgctcactacttgcgggatggctgataaaagtgcgatccagacggcgtcagctgccctggaccaacgccttcg

SEQ ID NO: 650577 - DNA, 75 bp, synthetic construct
  source 1..75: mol_type = other DNA
aacttgctgacgctggcgtacgggtgggagataccttacgccttagcggtacaggtatgtgtaatatcccggcgt

SEQ ID NO: 650578 - DNA, 75 bp, synthetic construct
  source 1..75: mol_type = other DNA
tacccgccgcaagaacagtggaacgctttccagaaactggcgcaaatgctgatgcatacgccgtttaacgccgaa

SEQ ID NO: 650579 - DNA, 75 bp, synthetic construct
  source 1..75: mol_type = other DNA
acccgaaaccggatgatgaatctcgcgtcagcgccacattgcgttcagcaattcagaaatccggcatggtactgc

SEQ ID NO: 650580 - DNA, 75 bp, synthetic construct
  source 1..75: mol_type = other DNA
tccgtcaacgcaggcgtcgattcgcggcgaagaaagcgaacaaatcgaactgctcaatattcgcaaagaaacaca

SEQ ID NO: 650581 - DNA, 75 bp, synthetic construct
  source 1..75: mol_type = other DNA
cagcccgacggcgttttgccgcaggatgattcgtttatggcgaaaccggcgatagatctggcgaaatacaaagcg

SEQ ID NO: 650582 - DNA, 75 bp, synthetic construct
  source 1..75: mol_type = other DNA
aattttatgaaccgcgcaccattcacgactcttcactgagtaaagcgatccacggcattgttgccgcacgctgtg

SEQ ID NO: 650583 - DNA, 75 bp, synthetic construct
  source 1..75: mol_type = other DNA
tgttgccgcacgctgtggcctgttggcgcaaagttatcagttctggcgggaggggactgaaatcgatctcggtgc

SEQ ID NO: 650584 - DNA, 75 bp, synthetic construct
  source 1..75: mol_type = other DNA
atgcgctggtcaatctcggcaacagtaaagactgggacgcgctggtaaaacgcgccaacgccgggaagctcgatg

SEQ ID NO: 650585 - DNA, 75 bp, synthetic construct
  source 1..75: mol_type = other DNA
gtggaaacctccacagcaccattcattactcatgaaacggcgcgagcggcgcaatcactgaatagcccggcaccg

SEQ ID NO: 650586 - DNA, 75 bp, synthetic construct
  source 1..75: mol_type = other DNA
atgttccttaaagaactgcggctgccagaaattcagcccgacggcgttttgccgcaggatgattcgtttatggct

SEQ ID NO: 650587 - DNA, 75 bp, synthetic construct
  source 1..75: mol_type = other DNA
atgtcctgttctcattcagttgtattactgaacaatgccttaaaaatcgccgttatgaaaaatggcgatttgtct

SEQ ID NO: 650588 - DNA, 75 bp, synthetic construct
  source 1..75: mol_type = other DNA
ggcgacgggaagcagtatgccagtagccgagactttgccgccgcaacagggttggtacctcgacaatacagcacg

SEQ ID NO: 650589 - DNA, 75 bp, synthetic construct
  source 1..75: mol_type = other DNA
tgaagaaagcggcggcgctggcggcagagattcacggcgtgaaaaaaaacgcgctgtataagtatgcgctggaac

SEQ ID NO: 650590 - DNA, 75 bp, synthetic construct
  source 1..75: mol_type = other DNA
acctgggaaaccattcacggcgcgcccgttggcgagctgctggcgtgggtaaaagaagatgaaaaccgtcgcaaa

SEQ ID NO: 650591 - DNA, 75 bp, synthetic construct
  source 1..75: mol_type = other DNA
gcccagagtgcgcaggattttcgtctgcaactcggtgagccaggttatcgcggtaacctgcgtgagctgttagct

SEQ ID NO: 650592 - DNA, 75 bp, synthetic construct
  source 1..75: mol_type = other DNA
tagtgacctgcgctctggcaaacaagctggccagaatagcctgggcactgacaacacgacagcagacttacgaag

SEQ ID NO: 650593 - DNA, 75 bp, synthetic construct
  source 1..75: mol_type = other DNA
caggttggccaactgggtccgggagttactgtgccggaaaagtaactttgtagtgacctgcgctctggcaaacaa

SEQ ID NO: 650594 - DNA, 75 bp, synthetic construct
  source 1..75: mol_type = other DNA
tttttatgaatcgacccaccgtctgttagatagcctggaagatatcgtcgcggtgctgggggagtcccgctacgt

SEQ ID NO: 650595 - DNA, 75 bp, synthetic construct
  source 1..75: mol_type = other DNA
cacttcctggctttttaacatgtgttactggcacctgcccggactgaacggacagtttaaggtcctgccggaatc

SEQ ID NO: 650596 - DNA, 75 bp, synthetic construct
  source 1..75: mol_type = other DNA
tttaatcgatctggtaggccaaccacggctggcaaacagctggtggcccggtgcggtgattagcgaagagctggc

SEQ ID NO: 650597 - DNA, 75 bp, synthetic construct
  source 1..75: mol_type = other DNA
gccgagaagcggggattcgcgtggtgccactaccggggccgtgtgctgctatcactgcattaagtgctgcgggtt

SEQ ID NO: 650598 - DNA, 75 bp, synthetic construct
  source 1..75: mol_type = other DNA
gtgccatgcccggaaggatcaacgggaaggataccgttctgaaaaggaatatttgcaactccgccgccgagattt

SEQ ID NO: 650599 - DNA, 75 bp, synthetic construct
  source 1..75: mol_type = other DNA
gccgctaccgggaccgtgtgctgccattactgcattaagtgccgctggtttaccatccgaccgtttttgttatga

SEQ ID NO: 650600 - DNA, 75 bp, synthetic construct
  source 1..75: mol_type = other DNA
cgggaacggtcagccagccggggcggaatgtccgggcaaaatcaggtttaaaccgttcgatactggatcagggct

SEQ ID NO: 650601 - DNA, 75 bp, synthetic construct
  source 1..75: mol_type = other DNA
ggaggaacggctaaatatccgacttctgacccgcactacccgaagcgttgcccccacagaagccggtgagagaat

SEQ ID NO: 650602 - DNA, 75 bp, synthetic construct
  source 1..75: mol_type = other DNA
atgctcaaagaaaacttcaacgaactgcaaatctttcttgtggtggcaagagagcgaagttttaccaaagcagcg

SEQ ID NO: 650603 - DNA, 75 bp, synthetic construct
  source 1..75: mol_type = other DNA
cgcccggtaaaaaatgtcggacacgataactgtctggttatccatcgtaacggtgtttatacccacgttatggat

SEQ ID NO: 650604 - DNA, 75 bp, synthetic construct
  source 1..75: mol_type = other DNA
tgtcgatattgttgaaggccgttttgatgccgggatacgtctgggtgaaactgtagataatgatatgattgcagt

SEQ ID NO: 650605 - DNA, 75 bp, synthetic construct
  source 1..75: mol_type = other DNA
tgtcgatattgttgaaggtcgttttgatgccgggatacgtctgggtgaaactgtggataacgatatgattgcagt

SEQ ID NO: 650606 - DNA, 75 bp, synthetic construct
  source 1..75: mol_type = other DNA
tgtcgatattgttgaaggacgttttgatgccgggatacgtctgggtgaaactgtcgataatgatatgattgcagt

SEQ ID NO: 650607 - DNA, 75 bp, synthetic construct
  source 1..75: mol_type = other DNA
gcaaaatgcagcgactgcattcctgtttcgcaaatatccgcagggactaccttcacaaagtcacaacgaccgtca

SEQ ID NO: 650608 - DNA, 75 bp, synthetic construct
  source 1..75: mol_type = other DNA
aggtgcttgctgttccgccagcgtacacaagccagcgttacgcgtgctgtggtcatacagcgaaagaaaatcgcc

SEQ ID NO: 650609 - DNA, 75 bp, synthetic construct
  source 1..75: mol_type = other DNA
accgtccgatactggatcagggctggtatgaaatacgccgccagcttgagtacaagcagctctggagtggcggtc

SEQ ID NO: 650610 - DNA, 75 bp, synthetic construct
  source 1..75: mol_type = other DNA
acaaaattacgccgccggaagccgtttatcgcgttggttttggtgatatctggcgcagtatttacgggcaggata

SEQ ID NO: 650611 - DNA, 75 bp, synthetic construct
  source 1..75: mol_type = other DNA
gccgactggaaacctcacactgtgaatgaaaaatttgatggcgggtggtgtccatcaattcacatgccgcgctgg

SEQ ID NO: 650612 - DNA, 75 bp, synthetic construct
  source 1..75: mol_type = other DNA
tcaaagtcagcagcgggtacggtcagccagccggggcgcaatgtccgggcaaaatcaggtttaaaccgttcgata

SEQ ID NO: 650613 - DNA, 75 bp, synthetic construct
  source 1..75: mol_type = other DNA
tgtcgatattgttgaagggcgttttgatgccgggatacgtctgggtgaaactgttgataacgatatgattgcagt

SEQ ID NO: 650614 - DNA, 75 bp, synthetic construct
  source 1..75: mol_type = other DNA
atacgacgaatgccatcgagtcgctaaacagcgtgatccgccatgcgatcaaaaagcgtaaagtgttcccgacag

SEQ ID NO: 650615 - DNA, 75 bp, synthetic construct
  source 1..75: mol_type = other DNA
ttacgaaggctcaaattatcgctaaaaccgtacgacaaggtgtgtattggataaatcctaactttgctttcaatg

SEQ ID NO: 650616 - DNA, 75 bp, synthetic construct
  source 1..75: mol_type = other DNA
aggaagttgcagcatcacgcaataacgatacgtaccaggaatatgcgggggcggcactggcccgcatggtgagcg

SEQ ID NO: 650617 - DNA, 75 bp, synthetic construct
  source 1..75: mol_type = other DNA
gttgtataccgtatgggcttcggtgccgctcgtgcagaagcatgtcagctggttagccataaagcaattatggta

SEQ ID NO: 650618 - DNA, 75 bp, synthetic construct
  source 1..75: mol_type = other DNA
atgaaaattcgcgccttattggtagcaatgagcgtggcaacggtactgactggttgccagaatatggactccagt

SEQ ID NO: 650619 - DNA, 75 bp, synthetic construct
  source 1..75: mol_type = other DNA
ggcggtcgcacccagtccatgtttgactctcacccaccatcaacagagcgtgcgcaacacatccgtgatcgtatc

SEQ ID NO: 650620 - DNA, 75 bp, synthetic construct
  source 1..75: mol_type = other DNA
ttgttgaaggccgttttgatgccgggatacgactgggtgaaaatgttgataaagatatggttgcagtcaggattg

SEQ ID NO: 650621 - DNA, 75 bp, synthetic construct
  source 1..75: mol_type = other DNA
gctgcaaaccctgcgcctgaaacgcctcacgagctacaaaaccatcgctgcatcaacatgcgtttgccaactgcc

SEQ ID NO: 650622 - DNA, 75 bp, synthetic construct
  source 1..75: mol_type = other DNA
gaactggtggtggataacggttttgtcgatattgttgaaggccgttttgatgccgggatacgactgggtgaaaat

SEQ ID NO: 650623 - DNA, 75 bp, synthetic construct
  source 1..75: mol_type = other DNA
acccaccagcagacaaaaatgccaccccgcgccgtggaattcatctcgtcgaactcgaaggagagaaggggcctc

SEQ ID NO: 650624 - DNA, 75 bp, synthetic construct
  source 1..75: mol_type = other DNA
gcacctaagcatggtttatgcccgttcggtaacgttggtgatcgcatctgggtccgtgaagcgtgggcaatatta

SEQ ID NO: 650625 - DNA, 75 bp, synthetic construct
  source 1..75: mol_type = other DNA
ggcaaactcggcgtctctcagtctgcacttagccatgcaatgaaggcactggaggaaaggttaaatatccgtctc

SEQ ID NO: 650626 - DNA, 75 bp, synthetic construct
  source 1..75: mol_type = other DNA
taaaggcacgccgctgcatatgtacctgcccggcactcacggcggtgtgtggaacgagcaggcgctgatcgggtc

SEQ ID NO: 650627 - DNA, 75 bp, synthetic construct
  source 1..75: mol_type = other DNA
accgtatctgacgacggcaatgagccatgagttttcggataacaacagggtccggataaatgacagctataactt

SEQ ID NO: 650628 - DNA, 75 bp, synthetic construct
  source 1..75: mol_type = other DNA
ggaatgaatccacagggatgtgggtcgttacttctgagttgacccgtaaagggggacgtcgcccccgacaaatca

SEQ ID NO: 650629 - DNA, 75 bp, synthetic construct
  source 1..75: mol_type = other DNA
tgggatgcgcgggatatgtcgcggcaaatcgagttaaatatcggcaaagatctccagtttatccgtgtcaacggt

SEQ ID NO: 650630 - DNA, 75 bp, synthetic construct
  source 1..75: mol_type = other DNA
gtatgtcctgaccggaacgaacacgacccgttccgagtttgatcgctacggtaaggcgaaaaagatagaattttc

SEQ ID NO: 650631 - DNA, 75 bp, synthetic construct
  source 1..75: mol_type = other DNA
ctggcgctcggtgaacagctttatgccgataagatcatcaatcgcccacgggtttttcaatggctgctgcgtatc

SEQ ID NO: 650632 - DNA, 75 bp, synthetic construct
  source 1..75: mol_type = other DNA
ttcgcagcggcggtgtgctctacggcaccacaaccctgactgataaagggacgttggtcggtgacgtagtcacaa

SEQ ID NO: 650633 - DNA, 75 bp, synthetic construct
  source 1..75: mol_type = other DNA
cgcgatcgtgcgcatcagatccgccatgcgtttgatcgcgccacctttgccctgatcgacaagttgaaaaacgat

SEQ ID NO: 650634 - DNA, 75 bp, synthetic construct
  source 1..75: mol_type = other DNA
attcttacgatatgaataaaatcattgaactccgacgcgccaaaatgctggcgctctctttactgctcgttgctg

SEQ ID NO: 650635 - DNA, 75 bp, synthetic construct
  source 1..75: mol_type = other DNA
aatctcggtcagttcgtgcaggaaaaatttctcgatacccagtcgctggtggcattgattcgacgtcacgaaccg

SEQ ID NO: 650636 - DNA, 75 bp, synthetic construct
  source 1..75: mol_type = other DNA
ggctggagactgaacacccgctgaaagcgaaaatcctgcctactgaatggctcggcgagcacagcgctgaactgg

SEQ ID NO: 650637 - DNA, 75 bp, synthetic construct
  source 1..75: mol_type = other DNA
ggtgttaaggctatcgcagaggcagcaatggtcggcgcgctggcagactggtttgcggtggtggcgttgtttcgc

SEQ ID NO: 650638 - DNA, 75 bp, synthetic construct
  source 1..75: mol_type = other DNA
ccgcgtgccgattccgatcatttctcgtcatacggcgattatcccgcgtaataaagaccggattggcgaaaatct

SEQ ID NO: 650639 - DNA, 75 bp, synthetic construct
  source 1..75: mol_type = other DNA
catctgtgggggatttgctgaataacctgaaagacgctgccagtgcggcgggagaacgggtttcttcaatggctt

SEQ ID NO: 650640 - DNA, 75 bp, synthetic construct
  source 1..75: mol_type = other DNA
ggcttcttccttagccgctgacgggatcgccacgttccgcgtactgttcccggcgggcatggatgcgaacggcta

SEQ ID NO: 650641 - DNA, 75 bp, synthetic construct
  source 1..75: mol_type = other DNA
tgaacgcgccggaagcggtggcgtatctggaaaagcgccgccttaaccatcctgaactggtcgcggcctttaaat

SEQ ID NO: 650642 - DNA, 75 bp, synthetic construct
  source 1..75: mol_type = other DNA
cgttggtcactcacttgcaatgcagggcgctagtgcagaggaaattgctcacattctcggccattcatctctggt

SEQ ID NO: 650643 - DNA, 75 bp, synthetic construct
  source 1..75: mol_type = other DNA
cctgaactggttgcgcagttccgcctgggcttcgccaaccgcacgctggcctaccgtctcccgtccaaaaaagtg

SEQ ID NO: 650644 - DNA, 75 bp, synthetic construct
  source 1..75: mol_type = other DNA
cggcgggcatggatgcgaacggctatctgtgccaggtggcagagccggaacaggcgttcagtgtgttgctggatg

SEQ ID NO: 650645 - DNA, 75 bp, synthetic construct
  source 1..75: mol_type = other DNA
cgcggagagtatcgcgccgcaggccagcgcggagcctgcacaccttaccgctttagccgctgatgttgccgcact

SEQ ID NO: 650646 - DNA, 75 bp, synthetic construct
  source 1..75: mol_type = other DNA
ttgtgctgaaacattcccaggtttcaatcttgaagattacgatgatcttgagttcgtccctcgaccgtatctcga

SEQ ID NO: 650647 - DNA, 75 bp, synthetic construct
  source 1..75: mol_type = other DNA
gatattgacaatgctgctttttattccgtgctattcggattaaaaatactttgtgctgaaaaattcccgggtttc

SEQ ID NO: 650648 - DNA, 75 bp, synthetic construct
  source 1..75: mol_type = other DNA
gtatgtcctgactgaaacgaatacgacctgctccgagtttgatcgctacggtaaggcgaaaaagatagaattttc

SEQ ID NO: 650649 - DNA, 75 bp, synthetic construct
  source 1..75: mol_type = other DNA
aactacagtttgaacaccattcgagatgcagcaattctgggactgacttatgtcaccggagcccgcccggcacaa

SEQ ID NO: 650650 - DNA, 75 bp, synthetic construct
  source 1..75: mol_type = other DNA
aatggcaaggccagcgcgtggtcggcatagtcggtgatcagttgcatgatgggattggcggttgctccagagatg

SEQ ID NO: 650651 - DNA, 75 bp, synthetic construct
  source 1..75: mol_type = other DNA
catctgccaagtgtccggcccagattcctggtgtactccatgcctggtctttggcaactgatcattgcataaccc

SEQ ID NO: 650652 - DNA, 75 bp, synthetic construct
  source 1..75: mol_type = other DNA
catggtacgcagcttgagctgctactgcgttttattgatcgggcgctggcgatcggcgtaattgcgacagcttaa

SEQ ID NO: 650653 - DNA, 75 bp, synthetic construct
  source 1..75: mol_type = other DNA
attaatagtagggatcttggtctagataagccgcaacctattatgacaattcaattatcggtggatgaggatggt

SEQ ID NO: 650654 - DNA, 75 bp, synthetic construct
  source 1..75: mol_type = other DNA
caatgagcgtggcaacggcactgaccggttgccagaatatggacaccaatggactgctctcatctggagcggaag

SEQ ID NO: 650655 - DNA, 75 bp, synthetic construct
  source 1..75: mol_type = other DNA
agatggtagaaatgttgtacgaaatgagagaaaaagcggggttaacaaagtctgctctggccgaacgaatggggt

SEQ ID NO: 650656 - DNA, 75 bp, synthetic construct
  source 1..75: mol_type = other DNA
cggctatttctttatccgcgcaccggaacttgggattttcgccattgcagcgtttattgcgggtctgttctgcgt

SEQ ID NO: 650657 - DNA, 75 bp, synthetic construct
  source 1..75: mol_type = other DNA
ttttaaaatttgatctggagatgcttaaaaagcaccgcagagcgatccagtttattgccgtgctgctgtttatcg

SEQ ID NO: 650658 - DNA, 75 bp, synthetic construct
  source 1..75: mol_type = other DNA
gcccctatgcttcttcatttctaatggatagtgagggtatcacattcaaaatgattgaggatttgattaatataa

SEQ ID NO: 650659 - DNA, 75 bp, synthetic construct
  source 1..75: mol_type = other DNA
tcgttggatttcgaggctgcatataaacgtaacaaggacatagtcgatgcgtggtcagaagtgctacgtattcat

SEQ ID NO: 650660 - DNA, 75 bp, synthetic construct
  source 1..75: mol_type = other DNA
gttgtgccaatgccgtgaataacggtttgtatgatgagcggtatctatatcgtgtttatggttctaccttaatct

SEQ ID NO: 650661 - DNA, 75 bp, synthetic construct
  source 1..75: mol_type = other DNA
caggcatgtcaggagatggacagtaaggcgacgattgcgccagccagtagcgaatatgctaaacgtctggccact

SEQ ID NO: 650662 - DNA, 75 bp, synthetic construct
  source 1..75: mol_type = other DNA
acgtcgcattaggtcatgtgaagaaagggatgcaggtagcgttaggtaccaatgcagtacgcgtcgcggcggcct

SEQ ID NO: 650663 - DNA, 75 bp, synthetic construct
  source 1..75: mol_type = other DNA
tatctgcaaaactactgcgctgattccactacgaaattctataagaaagtattgccagaacttagaaagatgaga

SEQ ID NO: 650664 - DNA, 75 bp, synthetic construct
  source 1..75: mol_type = other DNA
ggggccagtatgaaaactttgacaaaatatgctcaggcctgtggcgcaaccatcgatattcacgctgtctattga

SEQ ID NO: 650665 - DNA, 75 bp, synthetic construct
  source 1..75: mol_type = other DNA
gcacggttcgtctgtttactctcaccatgcggtgatcaccttcaccaatacgccattcagcgaattcctgatgac

SEQ ID NO: 650666 - DNA, 75 bp, synthetic construct
  source 1..75: mol_type = other DNA
tctgcttaatgagccggttccggtgaatggtcgtattcataaatcagtgcttgataaacccggtttcggcgtcga

SEQ ID NO: 650667 - DNA, 75 bp, synthetic construct
  source 1..75: mol_type = other DNA
gatgctgaacgttgccgcccgtcgcgccgccgcgctaaaggcagacaatgtccactggatccagcgcgcctggga

SEQ ID NO: 650668 - DNA, 75 bp, synthetic construct
  source 1..75: mol_type = other DNA
gccacgccggatcggatagcctgaaagcggttatctatgctgtgctgaacggtagcggattgctttatggtgaaa

SEQ ID NO: 650669 - DNA, 75 bp, synthetic construct
  source 1..75: mol_type = other DNA
tgagatcataacgttaggcatcgagaaggaaaggaagaaagagaagggcgctaatacaaaggcagctattcagga

SEQ ID NO: 650670 - DNA, 75 bp, synthetic construct
  source 1..75: mol_type = other DNA
gtttgctaatccgcaactttcgctgccatgccttgcctggacagtgctgatgatcgttgccatcattgtcctctg

SEQ ID NO: 650671 - DNA, 75 bp, synthetic construct
  source 1..75: mol_type = other DNA
ccgtccaccggagacgattccattgaacaatatgctacaagggtttttgatagctggaaactgggagataagcag

SEQ ID NO: 650672 - DNA, 75 bp, synthetic construct
  source 1..75: mol_type = other DNA
tctcgcggtagtttttaatatatgccgcgcatttcctatgatgctggccccccaaaataaaaacgctaaagtgaa

SEQ ID NO: 650673 - DNA, 75 bp, synthetic construct
  source 1..75: mol_type = other DNA
gtcaggagaaaaaagcaacaggaaaacggggaatcgtaatgctcattctcgctcttcgtcgagaaattctttccg

SEQ ID NO: 650674 - DNA, 75 bp, synthetic construct
  source 1..75: mol_type = other DNA
gcctacggacagctacctgcaacaactgacctcaaaaattgacctgcaaggtgcgcaaaccttattcgatatggg

SEQ ID NO: 650675 - DNA, 75 bp, synthetic construct
  source 1..75: mol_type = other DNA
tacgcccgtcagccatcagccggctggaaagtaatcctttaggagccagtatgaaaactttaacaagatatgctc

SEQ ID NO: 650676 - DNA, 75 bp, synthetic construct
  source 1..75: mol_type = other DNA
taataccccagaagctgttaaagggtatgaagatgctgacaaagaactggagatggtagaaatgttatacgaaat

SEQ ID NO: 650677 - DNA, 75 bp, synthetic construct
  source 1..75: mol_type = other DNA
gtggtggatggaagtttctttcagacatctggaactccagccctaccttctacccgggggtggcaggggcgctta

SEQ ID NO: 650678 - DNA, 75 bp, synthetic construct
  source 1..75: mol_type = other DNA
gaacagctcaatctcagtccgaaaacggtgaacagctaccgctatcgtatgttcagtaaactaaacattcatggc

SEQ ID NO: 650679 - DNA, 75 bp, synthetic construct
  source 1..75: mol_type = other DNA
tggcggttatcgatgaaaataactgtattggctgcaccaaatgtattcaggcgtgtccggtagacgccattgtcg

SEQ ID NO: 650680 - DNA, 75 bp, synthetic construct
  source 1..75: mol_type = other DNA
cgcagaaacacctgactcctggaaatgggatctgaacaccattcccgtgcgtatcattcccgtggaacaccatgc

SEQ ID NO: 650681 - DNA, 75 bp, synthetic construct
  source 1..75: mol_type = other DNA
gtttacctctttctcagggagtttagtctccaggatttccggggcggttcaaaaagacttcacaagaggttcctg

SEQ ID NO: 650682 - DNA, 75 bp, synthetic construct
  source 1..75: mol_type = other DNA
ctgcgttaaaaaatggcgatagcaaaacggttattgttgatgagatgagatcactcgtaatgcacagtttccact

SEQ ID NO: 650683 - DNA, 75 bp, synthetic construct
  source 1..75: mol_type = other DNA
gttcagtaaactaaacattcatggcgatgttgagctgactcacctggcaattcgccatggtctgtgtaatgcgga

SEQ ID NO: 650684 - DNA, 75 bp, synthetic construct
  source 1..75: mol_type = other DNA
ccgggccaggctgcatctccaggcagctgcatctcatctcgcagccgggggatctctagcagccgttcttccatt

SEQ ID NO: 650685 - DNA, 75 bp, synthetic construct
  source 1..75: mol_type = other DNA
cttatcaggttagtccgaatgacgttgtaagcattcgtgagaaagcgaagaagcagtctcgcgtgaaagccgctc

SEQ ID NO: 650686 - DNA, 75 bp, synthetic construct
  source 1..75: mol_type = other DNA
cgcgcgatcgataccaagtgtaaaattgaacaagctcctggccagcacggtgcgcggaaaccgcgtctgtctgac

SEQ ID NO: 650687 - DNA, 75 bp, synthetic construct
  source 1..75: mol_type = other DNA
cccgtgcgacgtccagttccagttttttgcagtgcagtagcattattcgcattaccgacaaagcgttacgtgaag

SEQ ID NO: 650688 - DNA, 75 bp, synthetic construct
  source 1..75: mol_type = other DNA
ttgtctgaaggtgaaataattgctatgggtacatttcgagtaccatgggattatttggggggcaatatcctctcc

SEQ ID NO: 650689 - DNA, 75 bp, synthetic construct
  source 1..75: mol_type = other DNA
tagggcgaaccccgtacagtgtagcctgtaaagtcagacaaattaagaaattacctgcagaatggaaggatcaat

SEQ ID NO: 650690 - DNA, 75 bp, synthetic construct
  source 1..75: mol_type = other DNA
atgaatagaactttccaaagacttctgttggctacgctctgtgcgctattttcagcaactctccaggccgctgat

SEQ ID NO: 650691 - DNA, 75 bp, synthetic construct
  source 1..75: mol_type = other DNA
ccggggtgctgtgtctgtgctggtcgtggctggttgcgcgttatctcgatcgcggtcaccgggtcgccttcggag

SEQ ID NO: 650692 - DNA, 75 bp, synthetic construct
  source 1..75: mol_type = other DNA
ttaaagggaagtatagggcagtattgataagctatccaacacctgaacagaaagatattatttgtaatggtgtaa

SEQ ID NO: 650693 - DNA, 75 bp, synthetic construct
  source 1..75: mol_type = other DNA
tagttatgctaaactattaagtgcaacattaaaacctgttagtgatcttgataacattgtattcaaacgaagtga

SEQ ID NO: 650694 - DNA, 75 bp, synthetic construct
  source 1..75: mol_type = other DNA
ccggtaagggcgcgaaatccatgatgcatgcgtttcttgctctggggctggacggtcgtacggtgagaaatctgt

SEQ ID NO: 650695 - DNA, 75 bp, synthetic construct
  source 1..75: mol_type = other DNA
gcctggctttccctgctctgttcgaagcaaaaaccgtgaacggcgaaggcgacccgcgcttctctgctgttttcc

SEQ ID NO: 650696 - DNA, 75 bp, synthetic construct
  source 1..75: mol_type = other DNA
gtattaaatggtctgcgtgataacggttttcatccattcatggtttgccagactcgcgttcgtaacctggataaa

SEQ ID NO: 650697 - DNA, 75 bp, synthetic construct
  source 1..75: mol_type = other DNA
aggcaatagcacgcgttaaaaatctattaccagtgcctgtcaaatatcgtttttgtggtgggaatgtacggattg

SEQ ID NO: 650698 - DNA, 75 bp, synthetic construct
  source 1..75: mol_type = other DNA
gcggtgatcggtcacgaaatggggcacgtcgcgttaggccatgtgaagaaagggatgcaagttgcattaggtacc

SEQ ID NO: 650699 - DNA, 75 bp, synthetic construct
  source 1..75: mol_type = other DNA
caatgagcgtggctacggtgctgaccggttgccagaatatggactccagtggactgctctcatcaggagcggaag

SEQ ID NO: 650700 - DNA, 75 bp, synthetic construct
  source 1..75: mol_type = other DNA
cactaccgtctggtcgaaagtggctaacgcccagcgcattattatctgcaatgacgaagtttataacgatgaagt

SEQ ID NO: 650701 - DNA, 75 bp, synthetic construct
  source 1..75: mol_type = other DNA
ccgcagggttgcgctgattatgcgttttacacccatattatcaaaagcctgaagccagataccggtcgtgctgcc

SEQ ID NO: 650702 - DNA, 75 bp, synthetic construct
  source 1..75: mol_type = other DNA
ttattgaaaacgatcggctcaagcagtttgatgtgatttttgctaacccaccgtactccattaagaaatggaatc

SEQ ID NO: 650703 - DNA, 75 bp, synthetic construct
  source 1..75: mol_type = other DNA
cgggaggtcatgaatgcagagcggctgttcagtacggcgcgggagctgcgggacgtggcagctggccgtgccgtt

SEQ ID NO: 650704 - DNA, 75 bp, synthetic construct
  source 1..75: mol_type = other DNA
cagagctggctgtcagggatattgccggacaggagcgtgaccggtctgccatatctgaacgggaaaccgcactgc

SEQ ID NO: 650705 - DNA, 75 bp, synthetic construct
  source 1..75: mol_type = other DNA
caggctgaagaggccatccgccgtgaaacggaacgccgcgcagatgaaattgtccgtaaaatggcagagaacaaa

SEQ ID NO: 650706 - DNA, 75 bp, synthetic construct
  source 1..75: mol_type = other DNA
cgggcagagcaacatattgacctggcctatgccatcaccgctcacggtgcgcagggggcaagtgaaacctttgcc

SEQ ID NO: 650707 - DNA, 75 bp, synthetic construct
  source 1..75: mol_type = other DNA
tagtctatcatattataatagcttccttctcccaggtaaaactatttccagactattgcaaatttacaatggtga

SEQ ID NO: 650708 - DNA, 75 bp, synthetic construct
  source 1..75: mol_type = other DNA
ccgggcactcagtcgtgacatcatgaaacagaaccgagtgaccgtacatccggagaaaagtgttccccggacggc

SEQ ID NO: 650709 - DNA, 75 bp, synthetic construct
  source 1..75: mol_type = other DNA
ggaaatggcgaaccggtcacggcagaggtgctggcacagcggcaggctgaagaggccatccgccgtgaaacggaa

SEQ ID NO: 650710 - DNA, 75 bp, synthetic construct
  source 1..75: mol_type = other DNA
cggaaatggcgaaccggtcacggcagaggtgctggcacagcggcaggctgaagaggccatccgccgtgaaacgga

SEQ ID NO: 650711 - DNA, 75 bp, synthetic construct
  source 1..75: mol_type = other DNA
gcgtatgaagcagcatgtgcaggtgtacaccgataaccgtcagggctggacggatgccatcaacaatgccgtaca

SEQ ID NO: 650712 - DNA, 75 bp, synthetic construct
  source 1..75: mol_type = other DNA
ttgtccgcgactataccggcaggacaccggaagcacgggagcagacgctgattgtcacacacctgaatgaggacc

SEQ ID NO: 650713 - DNA, 75 bp, synthetic construct
  source 1..75: mol_type = other DNA
taatcctgacagcggtgtggtggtaagaatcgccggtgaaggtcgtccgtggaatcccagaaccatcaccggtgg

SEQ ID NO: 650714 - DNA, 75 bp, synthetic construct
  source 1..75: mol_type = other DNA
cagagcaggctgtcagggagattaccgggcaggagcgtgaccgggctgccataactgaacgggaagccgcgctgc

SEQ ID NO: 650715 - DNA, 75 bp, synthetic construct
  source 1..75: mol_type = other DNA
aatggcgagccggtcacggcagaggtactggcacagcggcaggctgaagaggccatccgccgtgaaacggaacgc

SEQ ID NO: 650716 - DNA, 75 bp, synthetic construct
  source 1..75: mol_type = other DNA
tttacctggtacattgtggcggcggcgatttacctggtgatcaccctgctcagtcagtacattctcaaacgcatt

SEQ ID NO: 650717 - DNA, 75 bp, synthetic construct
  source 1..75: mol_type = other DNA
attaccctgttgagtcagtacattctcaaacgcattgacctgcgcgcgacacgttttgagcggaggcctggctga

SEQ ID NO: 650718 - DNA, 75 bp, synthetic construct
  source 1..75: mol_type = other DNA
gtaacgattctgcgcggcctgccagaaattctggtagtgctgtttatctattttggttcttcgcagctactactg

SEQ ID NO: 650719 - DNA, 75 bp, synthetic construct
  source 1..75: mol_type = other DNA
ttccattcttgcttttgtcgaacagggcgatcatgtgttgatgaccaacaccgcctatgaaccgagtcaggattt

SEQ ID NO: 650720 - DNA, 75 bp, synthetic construct
  source 1..75: mol_type = other DNA
tgatatgcgtaaatccttcaacggtctgggagaacaggtacaacatgtgctggatgagaaccccttctccaaacc

SEQ ID NO: 650721 - DNA, 75 bp, synthetic construct
  source 1..75: mol_type = other DNA
cgatatgcgtaaatccttcaacggtctgggagaacaggtacaacatgtgctggatgagaaccccttctcagatca

SEQ ID NO: 650722 - DNA, 75 bp, synthetic construct
  source 1..75: mol_type = other DNA
cgtgctcgcacgcgccatgttgcgtcgtggtgtggaagcgccggaacagctggaagagcaaggtatcagcgttta

SEQ ID NO: 650723 - DNA, 75 bp, synthetic construct
  source 1..75: mol_type = other DNA
cattttatctttcgggtgctaccactgacagtgccagacatgtgtttgctaacacagcaccagatgcaacaaaag

SEQ ID NO: 650724 - DNA, 75 bp, synthetic construct
  source 1..75: mol_type = other DNA
ggatgacgggctgataactctgcaggatgcggaaggtaacacgcggctgatttcgccccgggaggcggtggctga

SEQ ID NO: 650725 - DNA, 75 bp, synthetic construct
  source 1..75: mol_type = other DNA
cgtctggtgatgccgcagatgtggcgtcatgcgctgcctggtctcggtaaccagtggctggtgctgctgaaagat

SEQ ID NO: 650726 - DNA, 75 bp, synthetic construct
  source 1..75: mol_type = other DNA
gcgtggcctgccagaaattctggtggtgctgtttatctattttggctcctcgcagctgctgctgacgctttcgga

SEQ ID NO: 650727 - DNA, 75 bp, synthetic construct
  source 1..75: mol_type = other DNA
tgccgtttgtgcattgattgtcggactggcgctggcgatgttctttgcggtatgggagtcggcaaaatggcgtcc

SEQ ID NO: 650728 - DNA, 75 bp, synthetic construct
  source 1..75: mol_type = other DNA
ataatcctgacagcggtgtggtggtgagaattgccggtgaaggtcgtccgtggaatcccggtgccatcaccggtg

SEQ ID NO: 650729 - DNA, 75 bp, synthetic construct
  source 1..75: mol_type = other DNA
cgtggattttgctgtccgtcaggtggaggccagtgcctccacctgacggacggacagtcagaaacggtgctgacc

SEQ ID NO: 650730 - DNA, 75 bp, synthetic construct
  source 1..75: mol_type = other DNA
cgcccgaatcggcgccggaaatccagctactgcaatcacgtatgattctgggcaaaaccattgcggaacttaatc

SEQ ID NO: 650731 - DNA, 75 bp, synthetic construct
  source 1..75: mol_type = other DNA
actgaagctggagaacggctgggtggaaacgcccgggcattccgtcagtgacagtgcgacggtgtttgcctccgt

SEQ ID NO: 650732 - DNA, 75 bp, synthetic construct
  source 1..75: mol_type = other DNA
ccggtcaggggctgaacagcttgggctgcagggcagcgtcgataaggatgtttttacccgtcttctggagggcag

SEQ ID NO: 650733 - DNA, 75 bp, synthetic construct
  source 1..75: mol_type = other DNA
cagacccgggtgattcgccccggccaggagcgggcagagcaacatattgacctggcttatgccatcaccgcccac

SEQ ID NO: 650734 - DNA, 75 bp, synthetic construct
  source 1..75: mol_type = other DNA
aacaactatttgcaacagaatatcgctcgccaggcggcgcaggattcacaaagccttgaattcttacagcgccag

SEQ ID NO: 650735 - DNA, 75 bp, synthetic construct
  source 1..75: mol_type = other DNA
gatgccggggtgaacacatatcgctggcaggggggagaacagcggccggccaccatcatcagtgaaccggaccgt

SEQ ID NO: 650736 - DNA, 75 bp, synthetic construct
  source 1..75: mol_type = other DNA
cctgattaaccgggatgtggaaagggcactgtccgggcttgagagtgtgaaaccgtctcaggtgccacgtcagga

SEQ ID NO: 650737 - DNA, 75 bp, synthetic construct
  source 1..75: mol_type = other DNA
gaccagttgcaggccatcgcgcccggtcagcctttccgtctccagcagacgcgcagtgctgccgatgtggtcatc

SEQ ID NO: 650738 - DNA, 75 bp, synthetic construct
  source 1..75: mol_type = other DNA
aacggtcggtatattgccgccggaaaatggtgtgattgagcgggcccgtgccggtatcgatgaggccatcagccg

SEQ ID NO: 650739 - DNA, 75 bp, synthetic construct
  source 1..75: mol_type = other DNA
ttatcgacccggcagtcactcagccgcagccagtgaaaccgaaaaaagcgttgaatgtggtgcttggttttattc

SEQ ID NO: 650740 - DNA, 75 bp, synthetic construct
  source 1..75: mol_type = other DNA
ataaatggtggtgccggctcaggttattcactgacccagagtggtatggaaaccggcggcgacactgtttttgac

SEQ ID NO: 650741 - DNA, 75 bp, synthetic construct
  source 1..75: mol_type = other DNA
atgatgagtatcgcgcaggtcagatcggccggaagtgccggtaactattacaccgacaaggataattactatgta

SEQ ID NO: 650742 - DNA, 75 bp, synthetic construct
  source 1..75: mol_type = other DNA
ccggatttccgctttttgccctggtgtgggggctgaatctgtcccgccatgcgcatatccggcagtcggccatta

SEQ ID NO: 650743 - DNA, 75 bp, synthetic construct
  source 1..75: mol_type = other DNA
agatgcacagtttgtggccctgcagggcagccgtaacggagaaagcctgctggctgataatatgcaggatggcgt

SEQ ID NO: 650744 - DNA, 75 bp, synthetic construct
  source 1..75: mol_type = other DNA
gctgcagggcagcgtcgataaggatgtttttacccgtcttctggagggcaggctgccggacggggcggatttaag

SEQ ID NO: 650745 - DNA, 75 bp, synthetic construct
  source 1..75: mol_type = other DNA
gcgtgccggtgagacatcgctggaaacggctatcagtcatcagaagtccgcacttcacacgccggcacagcaggc

SEQ ID NO: 650746 - DNA, 75 bp, synthetic construct
  source 1..75: mol_type = other DNA
ctattgtgtccgggcagggcggtgcagccgggcagcgtgagcgggtggctgaactggtcatgatggcccgggagc

SEQ ID NO: 650747 - DNA, 75 bp, synthetic construct
  source 1..75: mol_type = other DNA
gtgattaaacgcgccagcaccgcttacagttacggctataactattacggttatagttactccgagaaagagtaa

SEQ ID NO: 650748 - DNA, 75 bp, synthetic construct
  source 1..75: mol_type = other DNA
agtggtgtggtggtaagaatcgccggtgaaggccgtccgtggaatcccggtgccatcaccggtggccgcgtgtgg

SEQ ID NO: 650749 - DNA, 75 bp, synthetic construct
  source 1..75: mol_type = other DNA
tctgagggtgacagggaaaattcccggacttcgcgtctccggtggtgaccgtctgcaggtgacatccgtcagtga

SEQ ID NO: 650750 - DNA, 75 bp, synthetic construct
  source 1..75: mol_type = other DNA
tgttcagtacggcgcgggagctgcgggacgtggtggccggccgtgccgttctccgtcaggcagggctggccgggg

SEQ ID NO: 650751 - DNA, 75 bp, synthetic construct
  source 1..75: mol_type = other DNA
cgtcgatccggaagtcagaatggctgaatggatgcagacgctgaaggaaaccgggttcgacatccgggcatatcg

SEQ ID NO: 650752 - DNA, 75 bp, synthetic construct
  source 1..75: mol_type = other DNA
ttcccggatgtccccatgacactgtatgaagccattgtccgcgactataccggcaggacgccggaagcacgggag

SEQ ID NO: 650753 - DNA, 75 bp, synthetic construct
  source 1..75: mol_type = other DNA
ctgtttatcactatccgacgttcatcatcattacgcgccaccagcggcagcagacagccgatccccatgtcaaat

SEQ ID NO: 650754 - DNA, 75 bp, synthetic construct
  source 1..75: mol_type = other DNA
gttgatgggcaactgacgtttaatttgctgccagaaagaattgatgccgcattatccggatttggtatcgcctga

SEQ ID NO: 650755 - DNA, 75 bp, synthetic construct
  source 1..75: mol_type = other DNA
ctccggcaatattcgcttgtcagcaggcgaacatgccgttcgctatcttctgtggccaaagctgaagccgtttct

SEQ ID NO: 650756 - DNA, 75 bp, synthetic construct
  source 1..75: mol_type = other DNA
ttattgggatggttattatatttattacccggaaaacagaaatcactcaaaagcattccagctggttgttgatgc

SEQ ID NO: 650757 - DNA, 75 bp, synthetic construct
  source 1..75: mol_type = other DNA
atgccggaagaaaataaaggcttccttagcgttgaagaagttgcaggaaatacaggagaaatccacagcctgaaa

SEQ ID NO: 650758 - DNA, 75 bp, synthetic construct
  source 1..75: mol_type = other DNA
aatgtggcgctacgtcgcggatcgtcagttacaacaaacacaacgaacgcaaccgaagaactatcaagcctcaaa

SEQ ID NO: 650759 - DNA, 75 bp, synthetic construct
  source 1..75: mol_type = other DNA
tgaatgttgaggaaatatcagggaataccggagaaatccacagcttaaagcctaacaataatagtactattcagc

SEQ ID NO: 650760 - DNA, 75 bp, synthetic construct
  source 1..75: mol_type = other DNA
gcaacagcctgtccccacagtgccatcggtgccgacgataccgcagcagccaggcccaattgagcacgaagatca

SEQ ID NO: 650761 - DNA, 75 bp, synthetic construct
  source 1..75: mol_type = other DNA
acgtcaacgcaccgaccctgcaaatgcaactcatgctggtgcagacgggtgaaattatctggtcaggtaaaggtg

SEQ ID NO: 650762 - DNA, 75 bp, synthetic construct
  source 1..75: mol_type = other DNA
tgcagccgatggtcagtaagatgcttggggctgacggcgtgactgcgggtagcgtcctgctggttgatagcgtta

SEQ ID NO: 650763 - DNA, 75 bp, synthetic construct
  source 1..75: mol_type = other DNA
caaagatcgtaaaaatttggggtaatagtttactacctgtacttaacaatggagattttgttgctgttgatgttt

SEQ ID NO: 650764 - DNA, 75 bp, synthetic construct
  source 1..75: mol_type = other DNA
aaatggcttcctggctggttgagtggaaaaacgccactgaaacgcaatggcttaaagattcgcccagtcacagcc

SEQ ID NO: 650765 - DNA, 75 bp, synthetic construct
  source 1..75: mol_type = other DNA
tcggtgccgacgatcccgcagcagccagggccaattgagcacgaagatcaaaccgcgcctcctgcaccgcatatt

SEQ ID NO: 650766 - DNA, 75 bp, synthetic construct
  source 1..75: mol_type = other DNA
cagagcaggctgtcagggaaattgccgggcaggagcgtgaccgggctgccataactgaacgggaagccgcgctgc

SEQ ID NO: 650767 - DNA, 75 bp, synthetic construct
  source 1..75: mol_type = other DNA
ggatgcgcagttcgtggccctgcagggcagccgtaacggagaaagcctgctggctgataatatgcaggatggtgt

SEQ ID NO: 650768 - DNA, 75 bp, synthetic construct
  source 1..75: mol_type = other DNA
atggccggctttgagtcagcctacgttgccctgtcgcgtatgaagcagcatgtgcaggtgtacactgatgaacgt

SEQ ID NO: 650769 - DNA, 75 bp, synthetic construct
  source 1..75: mol_type = other DNA
tgttcagtacggcgcgggagctgcgggacgtggcagctggccgtgccgttctccgtcaggcggggctggccgggg

SEQ ID NO: 650770 - DNA, 75 bp, synthetic construct
  source 1..75: mol_type = other DNA
atgttggcgctctctttactgcttatcgccgctgctacctttgtcgttacgctgtttttgccgcccaatttttgg

SEQ ID NO: 650771 - DNA, 75 bp, synthetic construct
  source 1..75: mol_type = other DNA
gcaccaccattaacaactatagtgtccagtttgtctacggtagtgctacgagtaccgccatcggcagcggttcta

SEQ ID NO: 650772 - DNA, 75 bp, synthetic construct
  source 1..75: mol_type = other DNA
aattgtccgtaaaatggcagagaacaaacctgaccagttggacgacaaaacagagcggactgtcagggatattgc

SEQ ID NO: 650773 - DNA, 75 bp, synthetic construct
  source 1..75: mol_type = other DNA
acttcctgcagaaaatggcaagcgacattaacagtatgaacctcagttcctgccaggctgcacaggggattaccc

SEQ ID NO: 650774 - DNA, 75 bp, synthetic construct
  source 1..75: mol_type = other DNA
cagaccgccggttatgcttacggtggctccctgtatgcccgtactcaggtcaaaaatgttcagctgatttccatg

SEQ ID NO: 650775 - DNA, 75 bp, synthetic construct
  source 1..75: mol_type = other DNA
atggtgcctgtcctgaacacagcgaatatacgcgacggggagttgcgtcgtctctccacctgggagacacatcgg

SEQ ID NO: 650776 - DNA, 75 bp, synthetic construct
  source 1..75: mol_type = other DNA
acgggaaaaggccggtgagctgggcaaagagcaggtcatggtgcctgtcctgaacacagcgaatatacgtgacgg

SEQ ID NO: 650777 - DNA, 75 bp, synthetic construct
  source 1..75: mol_type = other DNA
cgctgaccgtcgctcacagatgaacctgaagcaggatgaacggctgtccggtgaactgataaccggacgtcgtca

SEQ ID NO: 650778 - DNA, 75 bp, synthetic construct
  source 1..75: mol_type = other DNA
ctgggtagcatgggggaacgctgggcgggcaagggggctgaacagcttgggctgcagggcagtgttgataaggat

SEQ ID NO: 650779 - DNA, 75 bp, synthetic construct
  source 1..75: mol_type = other DNA
gtgctgtactccagcgcctctggcaacgttaacgctccgaccctacaaatgcagctgatgctggtgcagacgggc

SEQ ID NO: 650780 - DNA, 75 bp, synthetic construct
  source 1..75: mol_type = other DNA
agcgtgattcagcgcgcttcttcgctggtctttgacagtgtggaagccaaaaaacacgcgacgcgcaatcgcgcc

SEQ ID NO: 650781 - DNA, 75 bp, synthetic construct
  source 1..75: mol_type = other DNA
tggctggcggaacatccgcaggttgaacgggttaaccaccctgctctgccgggcagtaaaggtcacgaattctgg

SEQ ID NO: 650782 - DNA, 75 bp, synthetic construct
  source 1..75: mol_type = other DNA
tcgacaacacctgggcagccggtgtgctgtttaaggcgctggattttggcatcgatgtttctattcaagccgcca

SEQ ID NO: 650783 - DNA, 75 bp, synthetic construct
  source 1..75: mol_type = other DNA
cacggcctgaccaattgcgcgaacatgaacgtctgcgaaaactgggctttaccgtagtggtgctggatagcaaga

SEQ ID NO: 650784 - DNA, 75 bp, synthetic construct
  source 1..75: mol_type = other DNA
gaatgtaaatcacccggcaagccaccacggcctgaccagttgcgcaaacatgaacgtctgcgaaaactgggcttt

SEQ ID NO: 650785 - DNA, 75 bp, synthetic construct
  source 1..75: mol_type = other DNA
atctacagcctgttgaataaaaccccggatgcttcccccgattctgcaagtaatacttcggttatttgtaagcgt

SEQ ID NO: 650786 - DNA, 75 bp, synthetic construct
  source 1..75: mol_type = other DNA
gggagaatgcctatctgatgggccagatggtcgatgccgataccgcctatataaccagccgtggcctgcgcacat

SEQ ID NO: 650787 - DNA, 75 bp, synthetic construct
  source 1..75: mol_type = other DNA
atcgatatttccattcaggccgccaccaaatatcttgtgggtcactcagatgcgatgatcggcaccgcggtgtgc

SEQ ID NO: 650788 - DNA, 75 bp, synthetic construct
  source 1..75: mol_type = other DNA
gctgtttaaggcgctggattttggcattgatgtttctattcaggccgccaccaaatatctggttgggcattcaga

SEQ ID NO: 650789 - DNA, 75 bp, synthetic construct
  source 1..75: mol_type = other DNA
ttgtgccaattcttcaggatgcgcatgacaacattcatgctaatttagacatccagacgtataaaatcaggcatc

SEQ ID NO: 650790 - DNA, 75 bp, synthetic construct
  source 1..75: mol_type = other DNA
tggcagtaaaggccacgaattctggaaacgagactttacaggcagcagcgggctattttcctttgtgcttaagaa

SEQ ID NO: 650791 - DNA, 75 bp, synthetic construct
  source 1..75: mol_type = other DNA
gatggtcgatgtcgataccgcctatatgaccagccgtggcttgcgcactttaggcgtgcgtctgcgtcagcatca

SEQ ID NO: 650792 - DNA, 75 bp, synthetic construct
  source 1..75: mol_type = other DNA
aaaccgttattgcaaccaggtcaattcgctgctgaacaagttgttacgctggtgggaccaaaaggcaaattgcac

SEQ ID NO: 650793 - DNA, 75 bp, synthetic construct
  source 1..75: mol_type = other DNA
ctgaagcaggatgagcggctgtccggtgagctgataaccgggcggcgtcagctgctggagggcatggccttcaca

SEQ ID NO: 650794 - DNA, 75 bp, synthetic construct
  source 1..75: mol_type = other DNA
cagagcaggctgtcagggagattgccgggcaggagcgtgaccggtctgccatatctgaacgggaagccgcgctgc

SEQ ID NO: 650795 - DNA, 75 bp, synthetic construct
  source 1..75: mol_type = other DNA
cttcgtcaggcggggctggccgggggagacagtcctgcacggtttattgcaccggggcgcaaatatccgcagccg

SEQ ID NO: 650796 - DNA, 75 bp, synthetic construct
  source 1..75: mol_type = other DNA
gaaaaatgcccatgaaacacaatggattaaagattctccctcaccgccattgcaacagtcactgaaagaccttga

SEQ ID NO: 650797 - DNA, 75 bp, synthetic construct
  source 1..75: mol_type = other DNA
agcctgaataatggcatgaaagccaatatcggcgtgaccaaatctttgcaggctgaggctggcgtgaagctggga

SEQ ID NO: 650798 - DNA, 75 bp, synthetic construct
  source 1..75: mol_type = other DNA
aaacctgacctgccggacggcagaacagagcaggctgtcagggagattgccgggcaggagcgtgaacgggctgtc

SEQ ID NO: 650799 - DNA, 75 bp, synthetic construct
  source 1..75: mol_type = other DNA
ccttcagccatgtggacctgctgacagaggcaaagtcgtttgctgcagaaggaaccagttttactgaactggggc

SEQ ID NO: 650800 - DNA, 75 bp, synthetic construct
  source 1..75: mol_type = other DNA
ataagaaagatcacccgacctatcgtgcgctgttggaaaaacgccagacgctggagcaggagcgtaaacgcctga

SEQ ID NO: 650801 - DNA, 75 bp, synthetic construct
  source 1..75: mol_type = other DNA
ccggacagatgccagaacgttggggatcaccgctccgctacgcatgtcaggcgatctcagcggcacaccggggat

SEQ ID NO: 650802 - DNA, 75 bp, synthetic construct
  source 1..75: mol_type = other DNA
gaccgggagcgcggttatgtggccaacagcgtctggacggtgacagcggtttccggtgacagtgtcacgctgtcg

SEQ ID NO: 650803 - DNA, 75 bp, synthetic construct
  source 1..75: mol_type = other DNA
gcagtgccggcgtggatgcacagacactggcgtcctttctgcatgacacgcagctgcagcagcgcagcggagaaa

SEQ ID NO: 650804 - DNA, 75 bp, synthetic construct
  source 1..75: mol_type = other DNA
tgttcagtacggcacgggaactgcgggacgtggcggcagggcgtgccgttctccgtcaggcgggacttgccgggg

SEQ ID NO: 650805 - DNA, 75 bp, synthetic construct
  source 1..75: mol_type = other DNA
tgtcgggcacaacggaggaatggcgggagcacgtttcccgctactgcaccggcaactcccgcgtggcgtttgccg

SEQ ID NO: 650806 - DNA, 75 bp, synthetic construct
  source 1..75: mol_type = other DNA
ctgcggccgtgacacgtacttcagccgcatacggtgtatcggtcacccggttgcagcctcaaggggagcgtctgg

SEQ ID NO: 650807 - DNA, 75 bp, synthetic construct
  source 1..75: mol_type = other DNA
gtgtatattaatattgctgcgcttgggggatattatttgatcaaccagcatacgcttggcctggtttatccggtg

SEQ ID NO: 650808 - DNA, 75 bp, synthetic construct
  source 1..75: mol_type = other DNA
agggactactggtgaggctaacatcaccatttcaggtacaatacgtaaccccccttgtgaaatcaacaatggtaa

SEQ ID NO: 650809 - DNA, 75 bp, synthetic construct
  source 1..75: mol_type = other DNA
acggcaagcccttttgctggctatctggcacaggcgcacattaacaatgccgcggctattgttgcgggtaaagca

SEQ ID NO: 650810 - DNA, 75 bp, synthetic construct
  source 1..75: mol_type = other DNA
ccccggcacgcttgacccgcaaaaggtggaggagaataccgccgcgcagattgtgctggatctgtttgaaggtct

SEQ ID NO: 650811 - DNA, 75 bp, synthetic construct
  source 1..75: mol_type = other DNA
gaagatatggccaagcttcagcaacttgttgccctgctggtacgcttcgaaaaactgcttgagtccgacgcgcca

SEQ ID NO: 650812 - DNA, 75 bp, synthetic construct
  source 1..75: mol_type = other DNA
aatggctcaattgttaatggtgatatgcagtcagaaacacccaaatatattggtttctttttccattctctgggc

SEQ ID NO: 650813 - DNA, 75 bp, synthetic construct
  source 1..75: mol_type = other DNA
ccgcgcccttatgatcgaatctgcgacggaaggccaagtaagtagggcggagctacgaccccatgattgggagct

SEQ ID NO: 650814 - DNA, 75 bp, synthetic construct
  source 1..75: mol_type = other DNA
gctgagcctgtttcattccgcaaggagaacagagcaaggcacgaagcaaacacaaggctccgcctgtttgtaaga

SEQ ID NO: 650815 - DNA, 75 bp, synthetic construct
  source 1..75: mol_type = other DNA
gatacacaaaaagctcaggatcgagtcttactctgtaaaagataaagcgcgggagagaccgcttaaaataccttc

SEQ ID NO: 650816 - DNA, 75 bp, synthetic construct
  source 1..75: mol_type = other DNA
cccatcctaaagaaggggatagtcaaccacatctgaccagcctgcggaaaagtctgctgcttgtccgtccggtga

SEQ ID NO: 650817 - DNA, 75 bp, synthetic construct
  source 1..75: mol_type = other DNA
cgataaaaaacgttttatccctaacttttatccgaaccgtacgaatgagaaaaattgcctgaatgatcagtgtca

SEQ ID NO: 650818 - DNA, 75 bp, synthetic construct
  source 1..75: mol_type = other DNA
acggtgcctttgtgcttgataaatgggtagttaacgaaaagattaccgcacgcaaaaatccaaagtaccgcgatg

SEQ ID NO: 650819 - DNA, 75 bp, synthetic construct
  source 1..75: mol_type = other DNA
atgcaacacgaactacaacctgattcactggttgatttgaaattcatcatggccgatactggctttggtaaaacc

SEQ ID NO: 650820 - DNA, 75 bp, synthetic construct
  source 1..75: mol_type = other DNA
ggccgatactggcttcggtaaaaccttcatctatgaccggattaagtccggcgacctgccaaaagccaaagttat

SEQ ID NO: 650821 - DNA, 75 bp, synthetic construct
  source 1..75: mol_type = other DNA
acatcgctaaagttgacgctaacatcgctgaacaagtgatcattcagtacggcggctctgtaaacgcgtctaacg

SEQ ID NO: 650822 - DNA, 75 bp, synthetic construct
  source 1..75: mol_type = other DNA
atgaatagctgggatttacttattctgaaagataatataaatatacgtttttgtatcgtgtttgttaaggtgttt

SEQ ID NO: 650823 - DNA, 75 bp, synthetic construct
  source 1..75: mol_type = other DNA
atgataacgctgccgaccggtaccagaatctggatcatcgctggcatcacagatatgcgttgtggcttcaacggc

SEQ ID NO: 650824 - DNA, 75 bp, synthetic construct
  source 1..75: mol_type = other DNA
ttcatctatgaccggattaagtccggcgacctgccaaaagccaaagttatccacgggcgagcaagatggttatat

SEQ ID NO: 650825 - DNA, 75 bp, synthetic construct
  source 1..75: mol_type = other DNA
ataaattagaagcagaaaattcgaaattagtaagtgaaaataacagacttctacttatggttagagatcttcaaa

SEQ ID NO: 650826 - DNA, 75 bp, synthetic construct
  source 1..75: mol_type = other DNA
ggaatgaatccacaggggaagtgggtagtgacctcagcactggtcaggaaggtcaacaacaagtaaaaatcagac

SEQ ID NO: 650827 - DNA, 75 bp, synthetic construct
  source 1..75: mol_type = other DNA
ttgctgacaaccccaggtattgatgcacgtaacggcgaatatgaagcgttcggtgtacccgcgacgattcttgct

SEQ ID NO: 650828 - DNA, 75 bp, synthetic construct
  source 1..75: mol_type = other DNA
gctgttcacaaattcatccgtgaccacatcgctaaagttgacgctaacatcgctgaacaagtgatcattcagtac

SEQ ID NO: 650829 - DNA, 75 bp, synthetic construct
  source 1..75: mol_type = other DNA
accagtatgggcaatcggtactggcaaatctgcaactccggcgcaggcgcaggctgttcacaaattcatccgtga

SEQ ID NO: 650830 - DNA, 75 bp, synthetic construct
  source 1..75: mol_type = other DNA
acctgtatgggcaatcggtactggcaaatctgcaactccggctcaggcacaggctgttcacaaattcatccgtga

SEQ ID NO: 650831 - DNA, 75 bp, synthetic construct
  source 1..75: mol_type = other DNA
ggggtgttgccgcgctcgcgctgaccggcttgttcgttctggccgtaacgcggctgctgcgcgccttccggggcg

SEQ ID NO: 650832 - DNA, 75 bp, synthetic construct
  source 1..75: mol_type = other DNA
ttgacctggttgcgcgtgcaggcgttactttccgctacaccgagaacggtccggaaggtctggtaaccggtaaaa

SEQ ID NO: 650833 - DNA, 75 bp, synthetic construct
  source 1..75: mol_type = other DNA
ctacacttgcctggggaggacacgccgttatgcatgacggtctgcattactatctccatttactgagcgatctga

SEQ ID NO: 650834 - DNA, 75 bp, synthetic construct
  source 1..75: mol_type = other DNA
ttaaccagaatcagcaactggatgaagcggcatctaacccagcagggtttaataccgatgtcggtttcttcgata

SEQ ID NO: 650835 - DNA, 75 bp, synthetic construct
  source 1..75: mol_type = other DNA
taatttcaggtcgtttataacctttgctgttgttacaggcatcattcttactggcattaatatgctcctggtatc

SEQ ID NO: 650836 - DNA, 75 bp, synthetic construct
  source 1..75: mol_type = other DNA
agcgcaccacaacgcacttatctatgcggcaaatgaactggaaaatgcccaggcatttgggcgggaggtcggtca

SEQ ID NO: 650837 - DNA, 75 bp, synthetic construct
  source 1..75: mol_type = other DNA
ccggaaggtctggtaaccggtaaaaaagccatcgtgattaccagccgtggcggtatccataaagatgggccgacg

SEQ ID NO: 650838 - DNA, 75 bp, synthetic construct
  source 1..75: mol_type = other DNA
gcggtcgtgctgatggcaggcctgcaaggtgccggtaaaacaaccagcgttggtaaactcggtaagttcctgcgc

SEQ ID NO: 650839 - DNA, 75 bp, synthetic construct
  source 1..75: mol_type = other DNA
cgctctctattcgtcacatcactggcaaaccgatcaagttcctcggtgttggcgagaaaactgaggcgctggagc

SEQ ID NO: 650840 - DNA, 75 bp, synthetic construct
  source 1..75: mol_type = other DNA
cgtatcgccgccggttgcgggatgcaggtacaggacgttaaccgtcttctgaaacagttcgacgacatgcagcgc

SEQ ID NO: 650841 - DNA, 75 bp, synthetic construct
  source 1..75: mol_type = other DNA
tgaaccaagcgccgtattgcgacaggcagagcaaaggccaacggcggaacaggccggggatatggatcttcgtat

SEQ ID NO: 650842 - DNA, 75 bp, synthetic construct
  source 1..75: mol_type = other DNA
gttcgtaaatgtgaacacccatctttaaaagcctttctggaacggcacggtggcgtccgcgcatttcagtggacg

SEQ ID NO: 650843 - DNA, 75 bp, synthetic construct
  source 1..75: mol_type = other DNA
ctatctgtatattgctgagggtgagttagcccctctgttcagcagcgcctggggaagtattttgcttgcaaaaac

SEQ ID NO: 650844 - DNA, 75 bp, synthetic construct
  source 1..75: mol_type = other DNA
ggtcaaactggaccctgattttgtacgagtggatgagaacagcaatccccgttggtcggggactatacgctctat

SEQ ID NO: 650845 - DNA, 75 bp, synthetic construct
  source 1..75: mol_type = other DNA
gccccggacagtcgtttccggtcgtggcagtgatgccccttgcggcgaaggttctcaaaaaggtgatggtgaatc

SEQ ID NO: 650846 - DNA, 75 bp, synthetic construct
  source 1..75: mol_type = other DNA
attcaggctctgcgaaaagctatgtctgatgttagccaggggagacctgtagacgttgccagcattgttgagtct

SEQ ID NO: 650847 - DNA, 75 bp, synthetic construct
  source 1..75: mol_type = other DNA
tattttaaacaaccgctggcgttaccgggaatgggtaagctcttccacatccttcattccgccgactgtcttcat

SEQ ID NO: 650848 - DNA, 75 bp, synthetic construct
  source 1..75: mol_type = other DNA
caactccgagccctgaatgcccggttgtgggggataagaatgagactcgtggtgcagtatggccggagggccggc

SEQ ID NO: 650849 - DNA, 75 bp, synthetic construct
  source 1..75: mol_type = other DNA
ttgccagcgtcctttacgtaatgacaccccatgcctttgcgcaaggaatggtgactatttatctgcctggcgaac

SEQ ID NO: 650850 - DNA, 75 bp, synthetic construct
  source 1..75: mol_type = other DNA
atgctgtttaacgaggtctacgcccaggtctatgaccgggtgcttcgtgaaaaacagcgggagccggaagcatga

SEQ ID NO: 650851 - DNA, 75 bp, synthetic construct
  source 1..75: mol_type = other DNA
ccagggcgatgagctccagattgggcggctgatggtaagagtccacctgagtcggggagatgctccccactacga

SEQ ID NO: 650852 - DNA, 75 bp, synthetic construct
  source 1..75: mol_type = other DNA
tgagctggaaagcggacgggcggcgcgctgtctgttcacacagcagggaaatgtcggccatggccccgaatgcca

SEQ ID NO: 650853 - DNA, 75 bp, synthetic construct
  source 1..75: mol_type = other DNA
tagtcatccgtattatggttatgttaaaaaagccgtaaaagatgaacagccagaagacctatttacagtcaaagg

SEQ ID NO: 650854 - DNA, 75 bp, synthetic construct
  source 1..75: mol_type = other DNA
ctttgtgcagtaccgccgcagccatgaactgcgccagccgctggatgatgccggagcatggcaaatgtacagcca

SEQ ID NO: 650855 - DNA, 75 bp, synthetic construct
  source 1..75: mol_type = other DNA
agcagcgcttccgcagcaatgcagaacgccacgctaaccgtttctccaccagtgctgccagcacaaaacgctaca

SEQ ID NO: 650856 - DNA, 75 bp, synthetic construct
  source 1..75: mol_type = other DNA
agcagcgcttccgcaacggcgcagaacgctatgccaaccgtttcgctaccagcgcatcacgcagcaacatccgct

SEQ ID NO: 650857 - DNA, 75 bp, synthetic construct
  source 1..75: mol_type = other DNA
agccccataacacgggatttcgtcgcaattactttgaaaatgggcgttatgccggggaagtaaataggtacggag

SEQ ID NO: 650858 - DNA, 75 bp, synthetic construct
  source 1..75: mol_type = other DNA
aggtctatttgcctgaggaaatcgacctcgaaccggacggcaccggcacggtgacagtctggcgaacagaagacg

SEQ ID NO: 650859 - DNA, 75 bp, synthetic construct
  source 1..75: mol_type = other DNA
agtgcatcacgcagcaactctcgctacagcctgagcgaaacacacgcaacgccggatggctacccagtaaaacaa

SEQ ID NO: 650860 - DNA, 75 bp, synthetic construct
  source 1..75: mol_type = other DNA
atgaccagttcggacaggatttcacattacacgaagcattgcgcacggttgatcgcttaattgcaggtcgtagtt

SEQ ID NO: 650861 - DNA, 75 bp, synthetic construct
  source 1..75: mol_type = other DNA
atttccgcaacagtgcaccacgcagcaataaccgctggagcctgcgcgaaacacacgcaacgccgggcggtcatg

SEQ ID NO: 650862 - DNA, 75 bp, synthetic construct
  source 1..75: mol_type = other DNA
aggaacggtccagactgaaacgggccacggtcagaaatccgaatgccagaattatcgttaaccgcggtgatctcc

SEQ ID NO: 650863 - DNA, 75 bp, synthetic construct
  source 1..75: mol_type = other DNA
tcatccagcgattaaataatgggcgctggcatgttatgcaacgtttgccagaagcccggtatgcgaagggcaatg

SEQ ID NO: 650864 - DNA, 75 bp, synthetic construct
  source 1..75: mol_type = other DNA
cacattgtacgaagcattacgcacggttgatcgtctgcttcgcgggcaaagctttattaaacaggctgacttata

SEQ ID NO: 650865 - DNA, 75 bp, synthetic construct
  source 1..75: mol_type = other DNA
atgaataagcaacagcgaaacagcgaacccaataacatgggatttcgccgcaattattttgaaaatgggcgttat

SEQ ID NO: 650866 - DNA, 75 bp, synthetic construct
  source 1..75: mol_type = other DNA
tcggacaggatttcacattgtacgaagcgctacgcacagttgatcgtctgctgcgcggacagaatttcattaaac

SEQ ID NO: 650867 - DNA, 75 bp, synthetic construct
  source 1..75: mol_type = other DNA
atgtactgaaccgtcaggaaatggtgctgattggcatgctgttaattgcctcagttccggcgacctggatgctgg

SEQ ID NO: 650868 - DNA, 75 bp, synthetic construct
  source 1..75: mol_type = other DNA
gtgcgctggttgaagcgttgctggtactgcgcaaccacaatctgattatgacccgtctggaatcacgcccgattc

SEQ ID NO: 650869 - DNA, 75 bp, synthetic construct
  source 1..75: mol_type = other DNA
aagggcaatgacgataaaggaaggaaaaagcgtaatcgtcttcccattcaggtggttaaaattccgatggcggcc

SEQ ID NO: 650870 - DNA, 75 bp, synthetic construct
  source 1..75: mol_type = other DNA
gtgaaagtgccggacccgaaattctcctcccagaccaaagacaaactggtttcttctgaggtgaaatcggcggtt

SEQ ID NO: 650871 - DNA, 75 bp, synthetic construct
  source 1..75: mol_type = other DNA
accggttccgattacaacacattgctcaccatcgcctcagaaatgattctggtgccctatttcctggttggcgcg

SEQ ID NO: 650872 - DNA, 75 bp, synthetic construct
  source 1..75: mol_type = other DNA
ttattactggccttcgcgatgctgattcttacgcgtattcgtcccgaccttgacggaggtatctttacctacgcc

SEQ ID NO: 650873 - DNA, 75 bp, synthetic construct
  source 1..75: mol_type = other DNA
aaatccgaatgccagaattatcgttaaccgcggtgatctccctgtgattaagctggggatcaggatgccggggcg

SEQ ID NO: 650874 - DNA, 75 bp, synthetic construct
  source 1..75: mol_type = other DNA
ccaaactgatagcatctgatatgacaaaagaaatgatggctgcgatcaaaaatcagataaggctggtgacaaaat

SEQ ID NO: 650875 - DNA, 75 bp, synthetic construct
  source 1..75: mol_type = other DNA
aggcatttgatgagaatgttgaccgtatccggcgtgaacgcctgcctaaagaactggcatccgcgctgaaacaac

SEQ ID NO: 650876 - DNA, 75 bp, synthetic construct
  source 1..75: mol_type = other DNA
tccaggaggttagcgatggtggcagagctattgagaccacaattactagtggctggcagaatgtattaagtggtg

SEQ ID NO: 650877 - DNA, 75 bp, synthetic construct
  source 1..75: mol_type = other DNA
cgcgatccgggggatctgacgaccattgatgatcctgcgtcgttggatcagatccgccaggcgatggaagagtaa

SEQ ID NO: 650878 - DNA, 75 bp, synthetic construct
  source 1..75: mol_type = other DNA
gcgcactgacgatgtaattaacgttgccgggcatcggctggggacgcgcgagattgaagagagtatctccagtca

SEQ ID NO: 650879 - DNA, 75 bp, synthetic construct
  source 1..75: mol_type = other DNA
ccgttgaaaacctcagtcgtatcagcaaaacggcggtgcccggtgcgtcagcaatggccattaaccgcgtggcca

SEQ ID NO: 650880 - DNA, 75 bp, synthetic construct
  source 1..75: mol_type = other DNA
aggtgggaaaagccaaactgctctcgcatcgcccggtacgtgatattgatcgtgaacgcgatttgctggaaagat

SEQ ID NO: 650881 - DNA, 75 bp, synthetic construct
  source 1..75: mol_type = other DNA
gacaccaccattgaggggggactgcagactgttttcggtggcggaagtgtctccgggactctcattaataacggg

SEQ ID NO: 650882 - DNA, 75 bp, synthetic construct
  source 1..75: mol_type = other DNA
actggcagaccgaatccggctggccgattatggcgattgctcgcggtctggacgacaggccgacgcgtctgggaa

SEQ ID NO: 650883 - DNA, 75 bp, synthetic construct
  source 1..75: mol_type = other DNA
gctgggtggtggggcattcgtatatcgtctacgcgccgctgctggcggggatggcgactatcgtttacgaaggat

SEQ ID NO: 650884 - DNA, 75 bp, synthetic construct
  source 1..75: mol_type = other DNA
ggcaggtggcggtggcgtttgtcattccgaaagagagcgacagtctggaagatcgtgatgtggcgcatccgacac

SEQ ID NO: 650885 - DNA, 75 bp, synthetic construct
  source 1..75: mol_type = other DNA
tggcgctggcgacctcgatggacaccatttttggcggcaaagcgggcggcgtgttcttttgcgcgtcggatatcg

SEQ ID NO: 650886 - DNA, 75 bp, synthetic construct
  source 1..75: mol_type = other DNA
caggtgagccggatgttctcagcgccgaccgccattcgcgtgctgaaaaaattccctaccgctgaaattcgcaaa

SEQ ID NO: 650887 - DNA, 75 bp, synthetic construct
  source 1..75: mol_type = other DNA
accgctttgtgaagacttactggtcgctgttttcccgtccggtttacgccacgtttgactggggtatccgcgacg

SEQ ID NO: 650888 - DNA, 75 bp, synthetic construct
  source 1..75: mol_type = other DNA
atgaaattaaaagaatctgatattaccgccgagtcggctttttttatgcaacgtcggcaagttctgaaagcatta

SEQ ID NO: 650889 - DNA, 75 bp, synthetic construct
  source 1..75: mol_type = other DNA
attgcatcaccgcagagtttccacccatctcctccgacgaagccagcgaaaaatatctctttgcgatggcaaact

SEQ ID NO: 650890 - DNA, 75 bp, synthetic construct
  source 1..75: mol_type = other DNA
aggtgggggcgttaaagagcaaacggccggaacctatgccgaaaaactggcggaaaagggatttgtcactattgc

SEQ ID NO: 650891 - DNA, 75 bp, synthetic construct
  source 1..75: mol_type = other DNA
tgaagatcccagacacagcgaattaggtgaatggctggcccaggcgtttgaattgcccctggtaaccagcgtcgg

SEQ ID NO: 650892 - DNA, 75 bp, synthetic construct
  source 1..75: mol_type = other DNA
atgactacacaaaaagcaaaaaccataattaaacgatacaacgtacgtagtggtgtggctggcgttgtcttttcc

SEQ ID NO: 650893 - DNA, 75 bp, synthetic construct
  source 1..75: mol_type = other DNA
caatccgtttaccggaaaccgcatttttgctctaagcagtggcgacaatcagttcgggcaggatttcacattata

SEQ ID NO: 650894 - DNA, 75 bp, synthetic construct
  source 1..75: mol_type = other DNA
tcaggtcgcccgtgaaacccgggtgccgagaaaactggttaaacagcgatccagactgaaacgggctacggtcag

SEQ ID NO: 650895 - DNA, 75 bp, synthetic construct
  source 1..75: mol_type = other DNA
gggcagcgttcagccctgaaaggtggcggcagtgtgcttgtggtgggaaaccgtcgtattcccggcgcgtttatt

SEQ ID NO: 650896 - DNA, 75 bp, synthetic construct
  source 1..75: mol_type = other DNA
ccgtggattggttttccgctgcacaaattgctggcactggcagaaccgaccagtaacgcgaaatacgtcgccttc

SEQ ID NO: 650897 - DNA, 75 bp, synthetic construct
  source 1..75: mol_type = other DNA
aaccagattattacctatgatgcttaccatatggcggaagtgtacctgactcagccgatgcagattgtggcgggc

SEQ ID NO: 650898 - DNA, 75 bp, synthetic construct
  source 1..75: mol_type = other DNA
cactgggcatcagcgcagctgcattttctttgcctcacgctgcgcatgccgatctgcttagctggtttaaaggga

SEQ ID NO: 650899 - DNA, 75 bp, synthetic construct
  source 1..75: mol_type = other DNA
gggcaaaccgttacagataatgtgcaaagagcacccagaacaatcactattagtggtgtcgttgtagttggctat

SEQ ID NO: 650900 - DNA, 75 bp, synthetic construct
  source 1..75: mol_type = other DNA
gattaagaatccaactaacttttcaggaaattaacttcagagctgttgtggggcagactgatatctcggctgcaa

SEQ ID NO: 650901 - DNA, 75 bp, synthetic construct
  source 1..75: mol_type = other DNA
ccgttgcaggcgcttcaggcagaaagtttgacggtggcgggtgatcctctctccgggatcgtcccaacccgctct

SEQ ID NO: 650902 - DNA, 75 bp, synthetic construct
  source 1..75: mol_type = other DNA
tccggtagtatccttatctcaagagataataagctggtggaaaacttcatcgacactctggaaaactggcgtgac

SEQ ID NO: 650903 - DNA, 75 bp, synthetic construct
  source 1..75: mol_type = other DNA
gagctatctgatgaagcgctaagggtccgtagcaattgctctaaaaatgtcacggtgaaagatggtgtaagcacc

SEQ ID NO: 650904 - DNA, 75 bp, synthetic construct
  source 1..75: mol_type = other DNA
acactggtaaagatggcgtttactttcatctacaaggccaaccagataatttcttgtcactatcagcaactgaaa

SEQ ID NO: 650905 - DNA, 75 bp, synthetic construct
  source 1..75: mol_type = other DNA
gatcactggaaaaacaccttctgaagttttaacgggggaccaaacatcggctcgtgttccggtaattacaggtat

SEQ ID NO: 650906 - DNA, 75 bp, synthetic construct
  source 1..75: mol_type = other DNA
catgatctggataaaagggaagttattgttaaatctgtaaccagagaagaattagggatgatgggggagcaactt

SEQ ID NO: 650907 - DNA, 75 bp, synthetic construct
  source 1..75: mol_type = other DNA
tttataccgtgaacggaataatgaagtaaaaaaggaagtcttctccagagttacaaatgaaaatattaactcgac

SEQ ID NO: 650908 - DNA, 75 bp, synthetic construct
  source 1..75: mol_type = other DNA
gcaataaaagggttactcgatctacaacagcaccgtaacagcctgtcggataaacatttgcgcccgctggaagat

SEQ ID NO: 650909 - DNA, 75 bp, synthetic construct
  source 1..75: mol_type = other DNA
ttgtggagtcgcttcgtgtcctgctggatgctttctcaccacaaaatctgctgcgccgctttgtgcagtaccgcc

SEQ ID NO: 650910 - DNA, 75 bp, synthetic construct
  source 1..75: mol_type = other DNA
atattaatcttgcctggaaagatgcgaaatcctttctgcttgaagtttattcacagcagttagaaaacacgccat

SEQ ID NO: 650911 - DNA, 75 bp, synthetic construct
  source 1..75: mol_type = other DNA
tctaaagatgttggtatttcaaatggtctaagaatccagctaacttttcaggaaattaactttaaagctattgta

SEQ ID NO: 650912 - DNA, 75 bp, synthetic construct
  source 1..75: mol_type = other DNA
ataatgcacctatgcttatgtgtaaggaactgtacagctactcagcatctgagctatctgatgaagctctaaaag

SEQ ID NO: 650913 - DNA, 75 bp, synthetic construct
  source 1..75: mol_type = other DNA
tctaccactattaatagtcgcggagtccaagttgtttccaacggaggcattgccacaaacactaccattaacggt

SEQ ID NO: 650914 - DNA, 75 bp, synthetic construct
  source 1..75: mol_type = other DNA
ggaaattaactttaaagctgtcgtagggcaaactgatatttcatctgctactggcaagaccgctaccacgaatga

SEQ ID NO: 650915 - DNA, 75 bp, synthetic construct
  source 1..75: mol_type = other DNA
cggctgcgaaacggcgaaaaaaatcagtgaggtgatcaaaaacccggatatccaggtcgggagcctgaaggagca

SEQ ID NO: 650916 - DNA, 75 bp, synthetic construct
  source 1..75: mol_type = other DNA
actatgaccagattgccagtacgccgttaccggatgtgttgggtaaaaactatatcgatcaccaggatttcaacc

SEQ ID NO: 650917 - DNA, 75 bp, synthetic construct
  source 1..75: mol_type = other DNA
cgttaaaaatggtgagagcaccttcacagcctcagctaatgagcaggcttcaaaagtgcttaagtcgggtaatgc

SEQ ID NO: 650918 - DNA, 75 bp, synthetic construct
  source 1..75: mol_type = other DNA
aggcagtttcagtatcgctggcggcagtgcagccaatatgctgctggaaaatggtggatacctgacggtgtttga

SEQ ID NO: 650919 - DNA, 75 bp, synthetic construct
  source 1..75: mol_type = other DNA
acagcctcagctaatgagcaggcttcaaaagtgcttaagtcgggtaatgctttacggaaatttagtgtgaatcct

SEQ ID NO: 650920 - DNA, 75 bp, synthetic construct
  source 1..75: mol_type = other DNA
ggaaattaactttaaagctattgtaggccaaactgatatttcggctgcgactggaaagactgctaccacgaatga

SEQ ID NO: 650921 - DNA, 75 bp, synthetic construct
  source 1..75: mol_type = other DNA
ggtgaccactcaaaatatgcaatcagggcaggctgtaacagataatgtaatgcgttcacccagaacaattactat

SEQ ID NO: 650922 - DNA, 75 bp, synthetic construct
  source 1..75: mol_type = other DNA
ttccattattacgagttttaaagcctctaaagatgttggaatttcaaacggtctaagaatccaattaacttttca

SEQ ID NO: 650923 - DNA, 75 bp, synthetic construct
  source 1..75: mol_type = other DNA
gtctgagaatccagttaacttttcaggaaattaacttcaaagccattgtgggtcagactgatatttcggctgcga

SEQ ID NO: 650924 - DNA, 75 bp, synthetic construct
  source 1..75: mol_type = other DNA
agaatagagaaaggtgatgcattgaaggaacaggccaccgaacaggaacaggccaccgaacaggcacaggccaca

SEQ ID NO: 650925 - DNA, 75 bp, synthetic construct
  source 1..75: mol_type = other DNA
cggcgctgtacgagagctggtcgattccgttctccgttatgctggtcgttccgctgggggttatcggtgcgttgc

SEQ ID NO: 650926 - DNA, 75 bp, synthetic construct
  source 1..75: mol_type = other DNA
atgccgctggttatcagtactggtgctggttccggcgcgcagaacgcagtaggtaccggtgtaatgggcgggatg

SEQ ID NO: 650927 - DNA, 75 bp, synthetic construct
  source 1..75: mol_type = other DNA
ggaacaactggcgagcaaactgcctaccggtgttggctatgactggacggggatgtcctatcaggaacgcctctc

SEQ ID NO: 650928 - DNA, 75 bp, synthetic construct
  source 1..75: mol_type = other DNA
cagttagagaagcttggggtattggtgaactatcaatttcaaacataattcatttactcgaggttaatggagtta

SEQ ID NO: 650929 - DNA, 75 bp, synthetic construct
  source 1..75: mol_type = other DNA
cgagagaaatcattgattttggaaaaggttttttcagcgttacactcccaaggtgttaaacgtgccgaaatcctt

SEQ ID NO: 650930 - DNA, 75 bp, synthetic construct
  source 1..75: mol_type = other DNA
agctgagcaggatgcagatcgattcgcatcggcctttttgatgcctgagcgtagtattttagctttagtgccaag

SEQ ID NO: 650931 - DNA, 75 bp, synthetic construct
  source 1..75: mol_type = other DNA
gagggtgaagcgctgcgggcaacccgcgtctgcctgaacgcatggctgaaagatcgcgggcacaccgccaatcag

SEQ ID NO: 650932 - DNA, 75 bp, synthetic construct
  source 1..75: mol_type = other DNA
cgccggagccgtgaccggtgcacagcttatcgccccgacgggtgaaaaaagcatactgcccggcagcacgatgaa

SEQ ID NO: 650933 - DNA, 75 bp, synthetic construct
  source 1..75: mol_type = other DNA
gcagccagtgcggcaatggtgatggtctggatctggttaagctcataaccggttacggcatcagaaaggcagcgc

SEQ ID NO: 650934 - DNA, 75 bp, synthetic construct
  source 1..75: mol_type = other DNA
cattatacatcagattcaactaattagaggcatcaccctgccacgctgcgatattgccgtggcttcccgctccac

SEQ ID NO: 650935 - DNA, 75 bp, synthetic construct
  source 1..75: mol_type = other DNA
tcagatgggaatttatgctcacgttgattttatccgtggacaaaattgccaacaggataacagcacctgggaacg

SEQ ID NO: 650936 - DNA, 75 bp, synthetic construct
  source 1..75: mol_type = other DNA
actgaaggatggatcgtggcggctgttgctgccaccaatttactgaaggtgacggagcagatccggaaacgctgg

SEQ ID NO: 650937 - DNA, 75 bp, synthetic construct
  source 1..75: mol_type = other DNA
tgccatgatattgctattgccgaaagggacgtcgttttacggcgttttccctatcctgcatcgcactggccgcgt

SEQ ID NO: 650938 - DNA, 75 bp, synthetic construct
  source 1..75: mol_type = other DNA
tgaaattgagaaagcacagggacgggattgcacgccggaagacggcaagattcttgaggcaattgatcgctttga

SEQ ID NO: 650939 - DNA, 75 bp, synthetic construct
  source 1..75: mol_type = other DNA
gagggggcattagtaacgtttgataggccatttgaaataattgccaattcatatgaagaataccgtactccagtg

SEQ ID NO: 650940 - DNA, 75 bp, synthetic construct
  source 1..75: mol_type = other DNA
ggtctccacatttatggagttcattggtaataatccgaatgccttccggttattattgcgagaacgctccggcac

SEQ ID NO: 650941 - DNA, 75 bp, synthetic construct
  source 1..75: mol_type = other DNA
caggcacaggccacagagcaggcacaggccacagagcaggcacaggccacagagcaggcacaggtcgcagagcag

SEQ ID NO: 650942 - DNA, 75 bp, synthetic construct
  source 1..75: mol_type = other DNA
agatttcagctctctcaaggatgctattgagtggggccgggttgaatgcgagctacatgatctcaataagcgcga

SEQ ID NO: 650943 - DNA, 75 bp, synthetic construct
  source 1..75: mol_type = other DNA
agatactcgccagtatttcagctaacgagcatatgatctccgggcttgaaaacttcctggttaaagaccgttctc

SEQ ID NO: 650944 - DNA, 75 bp, synthetic construct
  source 1..75: mol_type = other DNA
caccctgcacgaagcattaagaacggcagaccggttaatcagcggtcgcagttttcagcatccatgggggaatta

SEQ ID NO: 650945 - DNA, 75 bp, synthetic construct
  source 1..75: mol_type = other DNA
cagccagattggcaactttggccgcccggcgcacgtctggtttgtctcgcaattgccaaaaacgcgatccggaaa

SEQ ID NO: 650946 - DNA, 75 bp, synthetic construct
  source 1..75: mol_type = other DNA
gtggtggaaaattgtcgagaaatatcaggttagccgcatgttctcagcgccgaccgccattcgcgtgctgaaaaa

SEQ ID NO: 650947 - DNA, 75 bp, synthetic construct
  source 1..75: mol_type = other DNA
cgacagaggcctgctctgtcgcattgtggaatgacggtactgtcaacgctcatttcgagctttgtccacgcgaac

SEQ ID NO: 650948 - DNA, 75 bp, synthetic construct
  source 1..75: mol_type = other DNA
gaacggatgcaacagctttccggggaatgggtgacggtaggtacaggctggcaagcctggccggatctcggtaaa

SEQ ID NO: 650949 - DNA, 75 bp, synthetic construct
  source 1..75: mol_type = other DNA
ggctctgcacgccgcagcaagagagcggtggcaaagtgctggttatctcatgtataaccggaatggggacggcgg

SEQ ID NO: 650950 - DNA, 75 bp, synthetic construct
  source 1..75: mol_type = other DNA
gcaaaagcctggcaggagtttgatgatgatggacgtatgggcactgttgcaaagttagcgatgaggcagcctttt

SEQ ID NO: 650951 - DNA, 75 bp, synthetic construct
  source 1..75: mol_type = other DNA
agggaaaaaccctggccgtcatgcaggtcagcggcggctcacagtcgttcaacgctgtaaatcagatgcgtattc

SEQ ID NO: 650952 - DNA, 75 bp, synthetic construct
  source 1..75: mol_type = other DNA
tgaggaactgtttaaaattacgctgttgctcaaggggcaagccggttaccttgccgatcgctatagtgaacgaaa

SEQ ID NO: 650953 - DNA, 75 bp, synthetic construct
  source 1..75: mol_type = other DNA
atgagcaatttgacttccttcgactggtggctggcaacctaccttgttgcggccggcttcggatttgccttttac

SEQ ID NO: 650954 - DNA, 75 bp, synthetic construct
  source 1..75: mol_type = other DNA
catggtctagaacgtgagttcatgtatttacagaataaaatgcttaaagattttgaaatatctaaagatattaaa

SEQ ID NO: 650955 - DNA, 75 bp, synthetic construct
  source 1..75: mol_type = other DNA
atcgccaaagcgttccaagagttcgacgcggcgggccgcatgaagccctcgccgtactacgaccgaatagccgat

SEQ ID NO: 650956 - DNA, 75 bp, synthetic construct
  source 1..75: mol_type = other DNA
acgttcctacagccgactggcaactgaggaagcggcaaggttgctgactgccatgggtgcagaggtgcggatctt

SEQ ID NO: 650957 - DNA, 75 bp, synthetic construct
  source 1..75: mol_type = other DNA
agcgaaatgttgaggggctccaaggggccagagagatcatcctggctgaactaacgaagcgggtgcaccagattt

SEQ ID NO: 650958 - DNA, 75 bp, synthetic construct
  source 1..75: mol_type = other DNA
agcgaaatgttgaggggctccagggggccggagagatcatcctagctgagctaacaaagcgggtgcacaagattt

SEQ ID NO: 650959 - DNA, 75 bp, synthetic construct
  source 1..75: mol_type = other DNA
gaagaagcggcaaggttgttgactgccatgggcgcagaagttcggatcttcaatccttctggcttgcctcttcct

SEQ ID NO: 650960 - DNA, 75 bp, synthetic construct
  source 1..75: mol_type = other DNA
tgcttggtcgttggatgagaatgatcaccattccgaaccagtcctcggtagcaaaagcctggcaggagtttgatg

SEQ ID NO: 650961 - DNA, 75 bp, synthetic construct
  source 1..75: mol_type = other DNA
tcgttggtccgaagggatggtgtggtgttcccctgaacgccatggtgcgatgaccggcatcatgaaagcccagat

SEQ ID NO: 650962 - DNA, 75 bp, synthetic construct
  source 1..75: mol_type = other DNA
cttggtaccctggtggaaactcgctacgggcaacttaaggagaacgaaaccattactatccaagcgaaacgattc

SEQ ID NO: 650963 - DNA, 75 bp, synthetic construct
  source 1..75: mol_type = other DNA
accgcgatggtggtcgctaccgtggatgaacatgctcagccttatcagcgcatcgttttactcaaacattacgac

SEQ ID NO: 650964 - DNA, 75 bp, synthetic construct
  source 1..75: mol_type = other DNA
gtcttgaacaggttgagttctggcagggcggtgagcatcgtctgcatgaccgctttttgtaccagcgtgaaaatg

SEQ ID NO: 650965 - DNA, 75 bp, synthetic construct
  source 1..75: mol_type = other DNA
ggtttcgaagcagtccagtcgcatttctgcccgtggtatccttgaaagtaaattcctggagctgaagcagaagtt

SEQ ID NO: 650966 - DNA, 75 bp, synthetic construct
  source 1..75: mol_type = other DNA
ggcgacggcttcgatctcaacgacttccttgagcagctacgccagatgaaaaatatgggcggcatggccagtctg

SEQ ID NO: 650967 - DNA, 75 bp, synthetic construct
  source 1..75: mol_type = other DNA
tttaccgccagttggttaacgatctgacggaaacggcccgtcattacgccggaacacaacagttacgcgggcggt

SEQ ID NO: 650968 - DNA, 75 bp, synthetic construct
  source 1..75: mol_type = other DNA
atctatttgcaaaactggttaatgacctgacattatccgcgcggttgtgcggtgatacgcaacaattaagggcgt

SEQ ID NO: 650969 - DNA, 75 bp, synthetic construct
  source 1..75: mol_type = other DNA
ctaaaggccaggcaatggattttcatattgaaggtatcgcattaagcaatattcgcaaagccgcgttatctatgc

SEQ ID NO: 650970 - DNA, 75 bp, synthetic construct
  source 1..75: mol_type = other DNA
agctggaaggcgctaactcttctgaaaatgacgaggcacaaggacgcgatattgaaaagaaagagttgcgtacag

SEQ ID NO: 650971 - DNA, 75 bp, synthetic construct
  source 1..75: mol_type = other DNA
tggtgagagggatgaaaatggttttctggtgtccggttattgggaagatcccgaatttgagaacattggatttat

SEQ ID NO: 650972 - DNA, 75 bp, synthetic construct
  source 1..75: mol_type = other DNA
aatttagggatctcataaacggaataaccgataaagctaggatgtactcaaatgcgcaacagttaagggcggtta

SEQ ID NO: 650973 - DNA, 75 bp, synthetic construct
  source 1..75: mol_type = other DNA
aggtgggggcgttaaagaacaaacggccggaacctatgccaaaaaactggcggaaaagggatttgtcactattgc

SEQ ID NO: 650974 - DNA, 75 bp, synthetic construct
  source 1..75: mol_type = other DNA
cgcgcaggtggtgtaggatattacccacgcagtaactttgtgcatattgataccgggccagcacggcactggtaa

SEQ ID NO: 650975 - DNA, 75 bp, synthetic construct
  source 1..75: mol_type = other DNA
aaaagctgaaccgcatgctggaggaaatgtttgatgaatccgacatgtggcttgtgtctgagtttccgacagttc

SEQ ID NO: 650976 - DNA, 75 bp, synthetic construct
  source 1..75: mol_type = other DNA
tccggtctccatcagttaatccacaacggcaccggtttcccggtgccgtcttcacacaatgaagaggaccagacc

SEQ ID NO: 650977 - DNA, 75 bp, synthetic construct
  source 1..75: mol_type = other DNA
tgtcggataaacacctgcgtccactggaagacaacccgcttcgccttgatatggactacgccactgcgctgaacg

SEQ ID NO: 650978 - DNA, 75 bp, synthetic construct
  source 1..75: mol_type = other DNA
caaccggcgtatccgggaatgccgttccagcatcagcttgcccccacggtggcgcacggtttttccagcgatccg

SEQ ID NO: 650979 - DNA, 75 bp, synthetic construct
  source 1..75: mol_type = other DNA
tgcacgccctggccgcttgtaggcttcagctcggttttcgaggccggacgtataacggccagccagttgagcaat

SEQ ID NO: 650980 - DNA, 75 bp, synthetic construct
  source 1..75: mol_type = other DNA
gcggggctgggattgataaaactctgactatgtatgcctcacttggatattataaaagaatggaagatttgaaac

SEQ ID NO: 650981 - DNA, 75 bp, synthetic construct
  source 1..75: mol_type = other DNA
caatgtgattgcccacgacagtcgggacgatcaggaattcatttttgcagaatgctgttccgatgaaatcgcaaa

SEQ ID NO: 650982 - DNA, 75 bp, synthetic construct
  source 1..75: mol_type = other DNA
ggtgccgcaggtgcagccaccggcaagatggtggggatgatagccacagagatgtgcggaatatcccctggtact

SEQ ID NO: 650983 - DNA, 75 bp, synthetic construct
  source 1..75: mol_type = other DNA
ggcggcagttgatgtgcaactgatttatatgagcgacgactctaagttgcaggcagccgactatgaccagatcgc

SEQ ID NO: 650984 - DNA, 75 bp, synthetic construct
  source 1..75: mol_type = other DNA
gcgtgctgatgtgcgtcatattaaccggctgcgaaacggcgaaaaaaatcagtcaagtaatcaaaaatccgaata

SEQ ID NO: 650985 - DNA, 75 bp, synthetic construct
  source 1..75: mol_type = other DNA
gacctcgcaccgcccttcaccgctggcaaagggaaacccgtcgcacagcaatcttgtccagatcgaaaaggttta

SEQ ID NO: 650986 - DNA, 75 bp, synthetic construct
  source 1..75: mol_type = other DNA
aaaactggatgtccccatcaagtttttatggtgctacgccagtaacacattgatcaatcaacatggcgacatcaa

SEQ ID NO: 650987 - DNA, 75 bp, synthetic construct
  source 1..75: mol_type = other DNA
ggaccagacgtttatcaaacctttactgaaggtcgcagtcagcatgaatggatcaaatatctccatgcgaaaacg

SEQ ID NO: 650988 - DNA, 75 bp, synthetic construct
  source 1..75: mol_type = other DNA
gcagtgagatttcgcaactgctgcgccagaagcccacttaccgctacaagctggcgctgggaaccaaaccgaagc

SEQ ID NO: 650989 - DNA, 75 bp, synthetic construct
  source 1..75: mol_type = other DNA
ttgatctggcatccacgatgcagacatgaatgtattttcacgcagataacacgtaaagagctatacgcgagaggc

SEQ ID NO: 650990 - DNA, 75 bp, synthetic construct
  source 1..75: mol_type = other DNA
attatccgtggggagcggtggcaatgcctggtgagtatgtctggcttaatccaccatattctaatccggggccat

SEQ ID NO: 650991 - DNA, 75 bp, synthetic construct
  source 1..75: mol_type = other DNA
atacgccgaaagaaataaaagacctatggcagacgccgaaacctgtttttagaggaatggatcgggaattcgaat

SEQ ID NO: 650992 - DNA, 75 bp, synthetic construct
  source 1..75: mol_type = other DNA
aacactgacgccagcaagcacgagaaggaacggatcagtgcagtagtccaggaaatgtttgaagaggctgaattt

SEQ ID NO: 650993 - DNA, 75 bp, synthetic construct
  source 1..75: mol_type = other DNA
agatcgtcattaaatcgcccttcaatttcttgaaaaggtcgaaaaatcactgggaaacaaatgatccttatactg

SEQ ID NO: 650994 - DNA, 75 bp, synthetic construct
  source 1..75: mol_type = other DNA
atgatttcggaggcagcaacacgccgaaggaaataaaagacctgtggcagacgcctaaaccagttttcagtggaa

SEQ ID NO: 650995 - DNA, 75 bp, synthetic construct
  source 1..75: mol_type = other DNA
ttatcgaggtttgcaggcattaaggctgtttaacatatctcagaacaaaccatttttgttatctttatttaaggc

SEQ ID NO: 650996 - DNA, 75 bp, synthetic construct
  source 1..75: mol_type = other DNA
tgcaggtgctggtcgtcgacacgcgctgcgaacgcagactgttttcaacgacaacaccgacagaccccgagacgc

SEQ ID NO: 650997 - DNA, 75 bp, synthetic construct
  source 1..75: mol_type = other DNA
aacgggctcccggccacgccagtcgctggtacaaagggcgaacatccatctgtcgtcgtctgtatgactggctga

SEQ ID NO: 650998 - DNA, 75 bp, synthetic construct
  source 1..75: mol_type = other DNA
attgccgttgcccgacattatttctccggcgatcgggaggctagtgccgctgtccctcctgtgcctgaaagcacc

SEQ ID NO: 650999 - DNA, 75 bp, synthetic construct
  source 1..75: mol_type = other DNA
tattaccactttcaaaagaattaaatgaaaaagctggaaataagtctgttgtggataagcttgaaatttataaac

SEQ ID NO: 651000 - DNA, 75 bp, synthetic construct
  source 1..75: mol_type = other DNA
ctttgccagacattaggagtagatagagagaaatttatctacttggaagcgttgaaggctgtgcgggatcaagtt

SEQ ID NO: 651001 - DNA, 75 bp, synthetic construct
  source 1..75: mol_type = other DNA
cgttcgcctgtacagcgttgtgtgaatcatatttctgaaccggacaccgaaattccgccagggttcaggggataa

SEQ ID NO: 651002 - DNA, 75 bp, synthetic construct
  source 1..75: mol_type = other DNA
cgtttttaacccgtcatcctgatgcggttgtgttcagtgtgaaaaaacgccagtggggaactcaggaagatttga

SEQ ID NO: 651003 - DNA, 75 bp, synthetic construct
  source 1..75: mol_type = other DNA
gccaatcagcagctttgccgcactgcgtgctcaggtgggcactatgccggtaggcagcaaactgaccctgggctt

SEQ ID NO: 651004 - DNA, 75 bp, synthetic construct
  source 1..75: mol_type = other DNA
tgatccgtcagataaaagatcttcttgtccggacgcttcgcaaccggacccgcagacggctgaacagaatttttt

SEQ ID NO: 651005 - DNA, 75 bp, synthetic construct
  source 1..75: mol_type = other DNA
atgagtccggcaaaactccgggaaaaatgggatgagctggttattcgcctggggcgttcgcccgcgcagcgttgc

SEQ ID NO: 651006 - DNA, 75 bp, synthetic construct
  source 1..75: mol_type = other DNA
aagcgacagtggggaacccgtgatgatattacctgtgcgcagtggatctgggggcgtgttgttgcgctgtatgaa

SEQ ID NO: 651007 - DNA, 75 bp, synthetic construct
  source 1..75: mol_type = other DNA
aatacggccaggtgaaacgcggtgagctgggtattatggggactgagctgaactccgaactggcgaaagcgatga

SEQ ID NO: 651008 - DNA, 75 bp, synthetic construct
  source 1..75: mol_type = other DNA
gagacggtaacttccgggattgtctctgcgctgggacgtagcggcctgaatgctgaaaactacgaaaacttcatc

SEQ ID NO: 651009 - DNA, 75 bp, synthetic construct
  source 1..75: mol_type = other DNA
gggcgttcacctgtacagcgttgtgtgaatcatatttctgaaccagacaccgaaattccgccggggtttaggggg

SEQ ID NO: 651010 - DNA, 75 bp, synthetic construct
  source 1..75: mol_type = other DNA
aaacatcgctgaactgcgtaaaattctcgatagcaaaccatctgttctggcgctgaacattcagcgtggcgacag

SEQ ID NO: 651011 - DNA, 75 bp, synthetic construct
  source 1..75: mol_type = other DNA
gttaagtgatggtcgtaagttcgacgcgaaaatggtcggcaaagatccgcgttctgatatcgcgctgatccaaat

SEQ ID NO: 651012 - DNA, 75 bp, synthetic construct
  source 1..75: mol_type = other DNA
gcgaaagcaggtattaaagcgggtgatgtgatcacctcactgaacggtaagccaatcagcagctttgccgcgctg

SEQ ID NO: 651013 - DNA, 75 bp, synthetic construct
  source 1..75: mol_type = other DNA
cgagcttgtgagcaaagcgcacagtactgtgtaaaacatccgccagtctggctgacatataaaaagtgtggccgc

SEQ ID NO: 651014 - DNA, 75 bp, synthetic construct
  source 1..75: mol_type = other DNA
tatattgatgccgatgattcgccacgctttcacggcgcagaagataacttttaccaaagccaaacgccgcctcgc

SEQ ID NO: 651015 - DNA, 75 bp, synthetic construct
  source 1..75: mol_type = other DNA
gtaactccactgcccattgagtatgattattatcttgatcctaattttatgtatacagaaccctctcggggatta

SEQ ID NO: 651016 - DNA, 75 bp, synthetic construct
  source 1..75: mol_type = other DNA
ggtgcttccagcgaagaagagatttttgttaacgatgtcgcgaatatggacaacagcgttggggttattggttat

SEQ ID NO: 651017 - DNA, 75 bp, synthetic construct
  source 1..75: mol_type = other DNA
ctggcgcagcaacaccaggcgattaacctgtcgcaaggctttcctgattttgatggtccgcgctatttacaggag

SEQ ID NO: 651018 - DNA, 75 bp, synthetic construct
  source 1..75: mol_type = other DNA
atgattggcaaaaacctgaaagctcagaaaaacgcgccggaacatgtagttaaaaaagcaaaggaacttttgaac

SEQ ID NO: 651019 - DNA, 75 bp, synthetic construct
  source 1..75: mol_type = other DNA
ttaccaaagccaaacgccgcctcgccatagcgccaatcaaatgctttttctgaccggtgaattgcgtcagataaa

SEQ ID NO: 651020 - DNA, 75 bp, synthetic construct
  source 1..75: mol_type = other DNA
ttggttatatcatcgtcgccacctacctgccgctcatggcgaaagacgcgggccagcctgtgctgacggctcatc

SEQ ID NO: 651021 - DNA, 75 bp, synthetic construct
  source 1..75: mol_type = other DNA
gataacggtaaaagaatgtactggaatgggcaaggacgtcggcctaaggccatagcagaggctataaaagccgga

SEQ ID NO: 651022 - DNA, 75 bp, synthetic construct
  source 1..75: mol_type = other DNA
atgaagctgcgctcccggtggcacgccgccaggagcttgcagaatgggctgactctcttacgccgaaacaggagt

SEQ ID NO: 651023 - DNA, 75 bp, synthetic construct
  source 1..75: mol_type = other DNA
atgaacaccgatatttacgagaaaataatgtctgatctcgagtttgacagagacaatctggaagacgtctggcgt

SEQ ID NO: 651024 - DNA, 75 bp, synthetic construct
  source 1..75: mol_type = other DNA
ggcaaaacgctggggagcgttaccttgcctgacagcgaacttactggtgcaggcgatctgcgtactgttaaccct

SEQ ID NO: 651025 - DNA, 75 bp, synthetic construct
  source 1..75: mol_type = other DNA
ctgaccagtatgctcggcaacggaacgtcggcgctcgccaactccacgctttgtggcgcagcggcgctgtttatt

SEQ ID NO: 651026 - DNA, 75 bp, synthetic construct
  source 1..75: mol_type = other DNA
agacggctgaacaggattttttaacccgacaccctgacgcggttgtgttcagtgcgaaaaaacgccagtggggaa

SEQ ID NO: 651027 - DNA, 75 bp, synthetic construct
  source 1..75: mol_type = other DNA
gatctttatcagagcgattgttcagggaacagggaattgatacccaaattttgctgggtcattcgaatcaaaaaa

SEQ ID NO: 651028 - DNA, 75 bp, synthetic construct
  source 1..75: mol_type = other DNA
gaccctaggtgacgtggtgtcatcctgtcgtgattacatccttagtccgtggttattgcaccatcatcacgctaa

SEQ ID NO: 651029 - DNA, 75 bp, synthetic construct
  source 1..75: mol_type = other DNA
attaacgctatgcgcgccgccgcccagccgcaccgttttgttggcattaaccaggcagggcaggttgcgttgcta

SEQ ID NO: 651030 - DNA, 75 bp, synthetic construct
  source 1..75: mol_type = other DNA
catttaaaaaagcccgggattctgtgagcagagatctttatcagagcgattgttcagagagcagggggttgatac

SEQ ID NO: 651031 - DNA, 75 bp, synthetic construct
  source 1..75: mol_type = other DNA
ttgctgggtcattcgaatcaaaaaatgaccgatatttacaacgatgcacgcggtaaggagtggaaaaaactgatc

SEQ ID NO: 651032 - DNA, 75 bp, synthetic construct
  source 1..75: mol_type = other DNA
caggtaaaaatcatggactcggcagtattgaccagaaactggcggaaaccattgcagcagaagcgaacagccgtc

SEQ ID NO: 651033 - DNA, 75 bp, synthetic construct
  source 1..75: mol_type = other DNA
aaaatatatttatattatacaccgttccgagtctatctgtatatgttcctctaaataataccaatcaagataatg

SEQ ID NO: 651034 - DNA, 75 bp, synthetic construct
  source 1..75: mol_type = other DNA
cgcatgcgcaaaatgaatcatctttggtcgaaagtgtagatgaagacgtcgttattatcgcttatgtggactatc

SEQ ID NO: 651035 - DNA, 75 bp, synthetic construct
  source 1..75: mol_type = other DNA
gtttgatgaaatcaatatcgttcgtggtcagccagtatctggtggacgtatgggggtgaagatttaccccataat

SEQ ID NO: 651036 - DNA, 75 bp, synthetic construct
  source 1..75: mol_type = other DNA
tatcgccgtcagcctgcggtggcagaatccgtggttgctcaaatcaaagatggtaatcgctccattattggtctg

SEQ ID NO: 651037 - DNA, 75 bp, synthetic construct
  source 1..75: mol_type = other DNA
gctggccatcatcacaggacagcggttggccgatatttgtaatatgaggttttcagatgtcagagatggtcacct

SEQ ID NO: 651038 - DNA, 75 bp, synthetic construct
  source 1..75: mol_type = other DNA
gctgtggaagcaaatagccggctcgcagaaagacaaatgcggcacacttttaaaatcagagaagaaattaataaa

SEQ ID NO: 651039 - DNA, 75 bp, synthetic construct
  source 1..75: mol_type = other DNA
tcggcacgggcgttgactgcactatccgcgagctggcgcaaaccatcgccaaagtggtgggttacaaaggtcggg

SEQ ID NO: 651040 - DNA, 75 bp, synthetic construct
  source 1..75: mol_type = other DNA
taggggggcgatggttggccccgatccgtcagtattaaaacctgatccgtcagataaaagatcttcttgtccgga

SEQ ID NO: 651041 - DNA, 75 bp, synthetic construct
  source 1..75: mol_type = other DNA
gacttcgaacgtctgatggaaggcgctaaactgctgaaatgttcagaatttggtgatgcgatcatcaagaacatg

SEQ ID NO: 651042 - DNA, 75 bp, synthetic construct
  source 1..75: mol_type = other DNA
gacttcgaacgtctgatggaaggcgctaagctgctgaaatgttcagagtttggtgatgcgatcatcaagaacatg

SEQ ID NO: 651043 - DNA, 75 bp, synthetic construct
  source 1..75: mol_type = other DNA
ccgtttttcgaacatgagtacgacagcttaagcgatgacgaaaaacgcatctttattcgtctgctggagtgtgac

SEQ ID NO: 651044 - DNA, 75 bp, synthetic construct
  source 1..75: mol_type = other DNA
tgtgcgcacagtggatctggggacgaatcgtgagtctttacgagcaggcggccagcgatgatggcgagatcacta

SEQ ID NO: 651045 - DNA, 75 bp, synthetic construct
  source 1..75: mol_type = other DNA
tatcacgccccagagagcctaactggacgacctgggcgaatgatgtgcgcatgatgcgtatgctggatggacgta

SEQ ID NO: 651046 - DNA, 75 bp, synthetic construct
  source 1..75: mol_type = other DNA
caaaggtcgcggtgcgaaacttcgtctcttcgtggcgactcagacttttgccgacttcgctgccagattgggcag

SEQ ID NO: 651047 - DNA, 75 bp, synthetic construct
  source 1..75: mol_type = other DNA
ttgatgaagttctactacgacatcatccagcctgagcacccgaactctgatctggaaggcttgctgtcgatgttc

SEQ ID NO: 651048 - DNA, 75 bp, synthetic construct
  source 1..75: mol_type = other DNA
tcatttggctggcaggcactaaataacatcgcgcagggtttggttcttactcatgatcgccccaacctgacaaag

SEQ ID NO: 651049 - DNA, 75 bp, synthetic construct
  source 1..75: mol_type = other DNA
atgggctggactgaagccgcagacctgattgttaaaggtatggaaggcgcgatcaacgcgaagactgtaacctat

SEQ ID NO: 651050 - DNA, 75 bp, synthetic construct
  source 1..75: mol_type = other DNA
ttcgaacgtctgatggaaggtgctaaactgctgaaatgcagcgagtttggtgatgcgatcatcaagaacatgtaa

SEQ ID NO: 651051 - DNA, 75 bp, synthetic construct
  source 1..75: mol_type = other DNA
aagccgcagacctgattgttaaaggtatggaaggcgcaatcaacgccaagactgtaacctatgacttcgaacgtc

SEQ ID NO: 651052 - DNA, 75 bp, synthetic construct
  source 1..75: mol_type = other DNA
ggcgcaagcctgattaatgcaatcagccaggggcttggtggccccaaggttttggatgatgtctatcgtccagtc

SEQ ID NO: 651053 - DNA, 75 bp, synthetic construct
  source 1..75: mol_type = other DNA
atgctttccttaagagctactctcccccttgaaggaataaccggtttgacactgtcatcgcaacattatctggtg

SEQ ID NO: 651054 - DNA, 75 bp, synthetic construct
  source 1..75: mol_type = other DNA
tgtacagaactcaatgcacaaggcagtattaacgtcgtcaattattcccaacatgatgaacaggatggagtttag

SEQ ID NO: 651055 - DNA, 75 bp, synthetic construct
  source 1..75: mol_type = other DNA
caggtgcttgctgttccgccagcgtacacaagccagcgttgcacgtgctgtggtcatacagcgaaagaaaatcgc

SEQ ID NO: 651056 - DNA, 75 bp, synthetic construct
  source 1..75: mol_type = other DNA
caggttctcttgctgatgctgcaaatcaggagggcgattttgcacaaaatgctgccattaacggtggtatcaata

SEQ ID NO: 651057 - DNA, 75 bp, synthetic construct
  source 1..75: mol_type = other DNA
cagttggaaacgaagagttcaatcgcttagcgagggctggcattgtagcgtcgctaagcggaatagcacaggagt

SEQ ID NO: 651058 - DNA, 75 bp, synthetic construct
  source 1..75: mol_type = other DNA
atatatgttccttacatatgcctgagtattatcctgtaagagaagatataatctacacagaaagcataccattgc

SEQ ID NO: 651059 - DNA, 75 bp, synthetic construct
  source 1..75: mol_type = other DNA
tcgtgtcttccagccactcaaactcaaccatacgtggattaatgtacctccccccagaagaaaagaattacgcct

SEQ ID NO: 651060 - DNA, 75 bp, synthetic construct
  source 1..75: mol_type = other DNA
caataaaattgcactggcagcacgccccgtaaaagcgattacgcccccaactcctgcagtacgcgcatcatgggt

SEQ ID NO: 651061 - DNA, 75 bp, synthetic construct
  source 1..75: mol_type = other DNA
agcgttccgggaaatctcaatcttttaggctttgtgacgctcatttacggcattggacaaatcctcggcccggcg

SEQ ID NO: 651062 - DNA, 75 bp, synthetic construct
  source 1..75: mol_type = other DNA
ggagcactttctgccattatattgcttgctctggcgctgctcatcccgtcgaataaacacattatcgcgccagcg

SEQ ID NO: 651063 - DNA, 75 bp, synthetic construct
  source 1..75: mol_type = other DNA
ctccaaaaatcatcaacgttctgtatggcatcacaatgttacttctggttgttgccgccattataacgtttgtta

SEQ ID NO: 651064 - DNA, 75 bp, synthetic construct
  source 1..75: mol_type = other DNA
ataacgcccgaccgaaataccagccgcaaccgcaggatgccattttgcagcactcggtggtggcgaatcagttaa

SEQ ID NO: 651065 - DNA, 75 bp, synthetic construct
  source 1..75: mol_type = other DNA
tactggcgctgggcattagcacggcttgctatggcgaaacatatcctgcgcccattggtccgtcgcaatcggatt

SEQ ID NO: 651066 - DNA, 75 bp, synthetic construct
  source 1..75: mol_type = other DNA
atgaaaaaaagacatctgcttagcttactggcgctgggcattagcacagcttgctacggcgaaacatatcctgcg

SEQ ID NO: 651067 - DNA, 75 bp, synthetic construct
  source 1..75: mol_type = other DNA
tctggcgatcaaacgtataaagataaagccttcgatctcaaactgcgtttgtgggaagagagttactggctgccg

SEQ ID NO: 651068 - DNA, 75 bp, synthetic construct
  source 1..75: mol_type = other DNA
ctttgatagcggcgtggtggtgggtggctatgccacgatcactaatgtttcgaaagaggagtacggcgaagggga

SEQ ID NO: 651069 - DNA, 75 bp, synthetic construct
  source 1..75: mol_type = other DNA
aagtttaactacaccaatccgccgcaggactcgcacttaccgcgcgtgcgtacccatgtgcgcgagtatgtgcag

SEQ ID NO: 651070 - DNA, 75 bp, synthetic construct
  source 1..75: mol_type = other DNA
gtttgttgcgcgttgtcgacagtatgacagctttggtttttacgcggcactaagccagttattgcaggtgttggt

SEQ ID NO: 651071 - DNA, 75 bp, synthetic construct
  source 1..75: mol_type = other DNA
gcatttttcgctgggagaggggaccgttcctgcgcgaagaatcgacagtttgcggcaaaaaacactgacggcgct

SEQ ID NO: 651072 - DNA, 75 bp, synthetic construct
  source 1..75: mol_type = other DNA
acgacggaaaccgatgtcgccagcctgaaaaatcatctcgccggagagccgttgggccacgaaacgacgctggcg

SEQ ID NO: 651073 - DNA, 75 bp, synthetic construct
  source 1..75: mol_type = other DNA
atctgctgactaccggcagcctgtttgctaacctggcgaataactacgacaagtttaactacactaacccgccgc

SEQ ID NO: 651074 - DNA, 75 bp, synthetic construct
  source 1..75: mol_type = other DNA
ttttgacaaatcgcgctttgatttccatatcgatccagtactgaatcagtcagttggtggcccggaaaatttcta

SEQ ID NO: 651075 - DNA, 75 bp, synthetic construct
  source 1..75: mol_type = other DNA
aaagagctgggtattgtgatgctggctaacaaaaactatccaaaccctgtgagagtcgccgccgcctggcagatc

SEQ ID NO: 651076 - DNA, 75 bp, synthetic construct
  source 1..75: mol_type = other DNA
tgaaagacggtattcgtcatatccgcgccctcgccaatcgggtgctgaataaagaaggcgaagtcgaacgattgc

SEQ ID NO: 651077 - DNA, 75 bp, synthetic construct
  source 1..75: mol_type = other DNA
tgctgccggaagatcgccagcacgccgaaaaagtgattcgcgattcattgcaatcacgctctccctttaaactgg

SEQ ID NO: 651078 - DNA, 75 bp, synthetic construct
  source 1..75: mol_type = other DNA
tttaaactggaatttcgcattaccgtgaaagacggtattcgccatatccgcgccctcgccaaccgggtactgaat

SEQ ID NO: 651079 - DNA, 75 bp, synthetic construct
  source 1..75: mol_type = other DNA
tgaaagacggtattcgtcacatccgctccctcgctaatcgggtactgaataaagaaggcgaagttgaacgtctgc

SEQ ID NO: 651080 - DNA, 75 bp, synthetic construct
  source 1..75: mol_type = other DNA
tttcattattgtgctgctgatgtggagcgccgtgcgtttgccacggatggaagcctttttgatttttcttgccac

SEQ ID NO: 651081 - DNA, 75 bp, synthetic construct
  source 1..75: mol_type = other DNA
atggatacgctttctggcatcggcgtcgatctgatttatggcgatgtgattgccgatgcccaaccgctggatttg

SEQ ID NO: 651082 - DNA, 75 bp, synthetic construct
  source 1..75: mol_type = other DNA
acgttgagttttgccagtggctgacgcgggagcacggtgtagcggcgatcccgctgtcggtattttgcgccgatc

SEQ ID NO: 651083 - DNA, 75 bp, synthetic construct
  source 1..75: mol_type = other DNA
agcgcgattatgacgaatagtcgcggcgatgcgttgattacgcgtaccttccagacaggtcaccggcaaataacc

SEQ ID NO: 651084 - DNA, 75 bp, synthetic construct
  source 1..75: mol_type = other DNA
atcctgaacattatcttgcattaccggacttttatcgccagaagcgcgatattctggtgaacgcgttaagcgaga

SEQ ID NO: 651085 - DNA, 75 bp, synthetic construct
  source 1..75: mol_type = other DNA
gctttctggcatcggcgtcgatctgatttatggtgaggtgattgccgatgcccaaccgctggatttgctggtgaa

SEQ ID NO: 651086 - DNA, 75 bp, synthetic construct
  source 1..75: mol_type = other DNA
ttccgcctctgttagggggtgttctggttgtcctgctgacgcccggagacgatcctctcagggcatttttgatat

SEQ ID NO: 651087 - DNA, 75 bp, synthetic construct
  source 1..75: mol_type = other DNA
acctgaaagtacagaaaaacgcacaagacaggattatcaagaaagggagggaactgcttaaagcatttttgaaga

SEQ ID NO: 651088 - DNA, 75 bp, synthetic construct
  source 1..75: mol_type = other DNA
ttcactgccgtaatggcggcagctatgacgtgcattacagcattacgccgttaagcactcttgatggcagcaata

SEQ ID NO: 651089 - DNA, 75 bp, synthetic construct
  source 1..75: mol_type = other DNA
gaacctcgcattatcccgggtttttcaagccatgatattggtagcctgtgctctatgatggcagtcgctgccggt

SEQ ID NO: 651090 - DNA, 75 bp, synthetic construct
  source 1..75: mol_type = other DNA
gatccacgtattattcctggtttttccagccatgatattggtagcctttgttccatgatggctgtcgcagccggt

SEQ ID NO: 651091 - DNA, 75 bp, synthetic construct
  source 1..75: mol_type = other DNA
atgagaccaagaatgtgtatctgcttggatttgattttacgataaagggggggttcactagcaagatcccctgcg

SEQ ID NO: 651092 - DNA, 75 bp, synthetic construct
  source 1..75: mol_type = other DNA
gggatacaactggcacaatctcgctactggcaaaccggcgatatgtatcagggtctgggctgggaaatgctggac

SEQ ID NO: 651093 - DNA, 75 bp, synthetic construct
  source 1..75: mol_type = other DNA
tcgtgtcttccagccactcaaactcactcatacgtggattaatgtaccgcccgcagaagaaaagaattacgcctg

SEQ ID NO: 651094 - DNA, 75 bp, synthetic construct
  source 1..75: mol_type = other DNA
ggccgttttgtatggaaaccagaccttatgttcaaaacgacgctctgcgccttattaattaccgcctcttgctcc

SEQ ID NO: 651095 - DNA, 75 bp, synthetic construct
  source 1..75: mol_type = other DNA
atacaaataataaaagttaactacggtaggtttagtatcaagaacatattcaaacttcggaagttgttaattaac

SEQ ID NO: 651096 - DNA, 75 bp, synthetic construct
  source 1..75: mol_type = other DNA
tttgtgaacagcggcggacgctattcacaggggctgtttaaccgacgggacgacttccggaaatggtgttcacag

SEQ ID NO: 651097 - DNA, 75 bp, synthetic construct
  source 1..75: mol_type = other DNA
agttcgctcagggaaagaactggaacgcaatgtgcggcaggctgacggattttgtgaacagcggcggacgctatt

SEQ ID NO: 651098 - DNA, 75 bp, synthetic construct
  source 1..75: mol_type = other DNA
ggctattctgtacggcctggcgggatttggttatatcatcgtcgcgacttacctgccgctcatggcgaaagatgc

SEQ ID NO: 651099 - DNA, 75 bp, synthetic construct
  source 1..75: mol_type = other DNA
tggcaggcctgcattttgccctctcttcacaaacgttgtggcaaggtgccggggcactttctgccattatattgc

SEQ ID NO: 651100 - DNA, 75 bp, synthetic construct
  source 1..75: mol_type = other DNA
aaaatataaaattttttcaacagtgcatgatttatgcccagtacggatgagagattgttttccgctgcacctatc

SEQ ID NO: 651101 - DNA, 75 bp, synthetic construct
  source 1..75: mol_type = other DNA
gttgcgggactggatgacaccgaaacggaccgggcgactagcgcagattttgaggaagctatgagggccctacgt

SEQ ID NO: 651102 - DNA, 75 bp, synthetic construct
  source 1..75: mol_type = other DNA
gtcactatcaatcaaaatcagttcgatgcgctggttgattttgcctacaacctgggcgtaaaggcgttggaaggt

SEQ ID NO: 651103 - DNA, 75 bp, synthetic construct
  source 1..75: mol_type = other DNA
tgagtttccaaaatggaataaagcaggtggcaaggtgttgccggggctggttaagcgtcgggaagccgagcgtac

SEQ ID NO: 651104 - DNA, 75 bp, synthetic construct
  source 1..75: mol_type = other DNA
taaagagtatccgtgcagcagaagggctaacgcaaaaacagctgtcagagctaacaggcgtaagtttgggaatga

SEQ ID NO: 651105 - DNA, 75 bp, synthetic construct
  source 1..75: mol_type = other DNA
tgctggaagtcatggtggcgttggtagtgtttgcactggctggaatagccttaatgcaaaccacggtacagcagg

SEQ ID NO: 651106 - DNA, 75 bp, synthetic construct
  source 1..75: mol_type = other DNA
gcagccgcgatccttagaggtagaggtacggcgtactaaagaggatacgtccgccttggtttccttgcgtagcag

SEQ ID NO: 651107 - DNA, 75 bp, synthetic construct
  source 1..75: mol_type = other DNA
tattatcattacaaatcgatgagctcataaatgattgtttaactcccgcaatagataaattaaagcaaagcattg

SEQ ID NO: 651108 - DNA, 75 bp, synthetic construct
  source 1..75: mol_type = other DNA
cgaatttgccaccatgctgacggaaaagcacaccaataacatcactggcaccacctatgtgcagatgatgccgca

SEQ ID NO: 651109 - DNA, 75 bp, synthetic construct
  source 1..75: mol_type = other DNA
cggcagccaggcgatcggttatgcgtgggaagccattcgccacggttatcaaacggtgatggttgctggtggtgc

SEQ ID NO: 651110 - DNA, 75 bp, synthetic construct
  source 1..75: mol_type = other DNA
tggtaatctgggtgaaaacggaattaatgctcaaggcgggcttgctgatgacgcctatgtcatcttcacccctgt

SEQ ID NO: 651111 - DNA, 75 bp, synthetic construct
  source 1..75: mol_type = other DNA
gctgaaatgcgtaaagtgctggcggcaaaaccggccatcatcgccctgcaaattgtacgcggcaatgaaagcatc

SEQ ID NO: 651112 - DNA, 75 bp, synthetic construct
  source 1..75: mol_type = other DNA
aaccccgctagaaataaaaatcatgatggtatttatttagatgcaaaagaaaaagttataggtataactttcaaa

SEQ ID NO: 651113 - DNA, 75 bp, synthetic construct
  source 1..75: mol_type = other DNA
ggaaggtatcgctcaagcgtttgaacaaggtgatgttctttatcatcgcgcttggcgcgctgctgccgactatgc

SEQ ID NO: 651114 - DNA, 75 bp, synthetic construct
  source 1..75: mol_type = other DNA
atggaattttgacaatgattttttaagcaggttttcaaaaaaataccttgctctgttcacatccagcgcattcta

SEQ ID NO: 651115 - DNA, 75 bp, synthetic construct
  source 1..75: mol_type = other DNA
tgctgcgctgtattcgctgcggagcctgtatgaatacctgtccggcatatcgccatattggcggtcacggatatg

SEQ ID NO: 651116 - DNA, 75 bp, synthetic construct
  source 1..75: mol_type = other DNA
gcccaacgtaaaaacgcgcggaaggtggtgaagtccaaatcaatggtgaccgaagagattggtgtcaaccatgtg

SEQ ID NO: 651117 - DNA, 75 bp, synthetic construct
  source 1..75: mol_type = other DNA
gtttgcaacgaattatattttgaaggatttccctatagaaacgacccccggacaatgggattttcttctcaagca

SEQ ID NO: 651118 - DNA, 75 bp, synthetic construct
  source 1..75: mol_type = other DNA
gtgagtcaggccaatatgacaggcgaagaactgcctgccacgctcacgcccggacaacaggtgatggtttcctgg

SEQ ID NO: 651119 - DNA, 75 bp, synthetic construct
  source 1..75: mol_type = other DNA
actggcgtcagcggaaaatcgtcggtgaccgtcggcgcattagtcaccgctaatcagggagactctctggtaacc

SEQ ID NO: 651120 - DNA, 75 bp, synthetic construct
  source 1..75: mol_type = other DNA
tgggcaaaacgatcgccatcagtttgcgccaaccgccagtgcgattgcggcgctgctatcgggtgaaaatgtcag

SEQ ID NO: 651121 - DNA, 75 bp, synthetic construct
  source 1..75: mol_type = other DNA
ggaaatccacattcgccagcgcacgatgaagaaagagctggaaaagctgaccagtgcggatgaaatactggcata

SEQ ID NO: 651122 - DNA, 75 bp, synthetic construct
  source 1..75: mol_type = other DNA
acgggaagtcaacgcagacgcgtcttgagccgtcggtggccgcagcgaaagcggggaaactgccggagggatttt

SEQ ID NO: 651123 - DNA, 75 bp, synthetic construct
  source 1..75: mol_type = other DNA
gacaggttataacacctggcttacaggtccaagagaagaaggacatgttgacggcccggaagagttccatctcgt

SEQ ID NO: 651124 - DNA, 75 bp, synthetic construct
  source 1..75: mol_type = other DNA
ttttctggacggatgcggaaaacaatgatgtggaggtgacagcagaagagcttatagcgctgagtgaagcggcag

SEQ ID NO: 651125 - DNA, 75 bp, synthetic construct
  source 1..75: mol_type = other DNA
gcgatgaaataaacgcgtggcgtaatgcgatggaagcggcgaactacacgtttgagcacaatgggcgtaaatggg

SEQ ID NO: 651126 - DNA, 75 bp, synthetic construct
  source 1..75: mol_type = other DNA
ttgagccatcggtggcggcagcgaaagcggggaaactgccggaggcgtttttctggacggatgcggaaaacaatg

SEQ ID NO: 651127 - DNA, 75 bp, synthetic construct
  source 1..75: mol_type = other DNA
ctgtgacagcgtctgcccggtgcgcattccgttgtcaaaactgatcctgcgtcatcgccgggtgatggccgagga

SEQ ID NO: 651128 - DNA, 75 bp, synthetic construct
  source 1..75: mol_type = other DNA
tccctgagttgcttacaaaaatagatagctatactggtaggccgctaaggaaggtgcgaataagcaggtcatttc

SEQ ID NO: 651129 - DNA, 75 bp, synthetic construct
  source 1..75: mol_type = other DNA
tgccgctttcaaagcaggcgctggcgatcctgaagcagataaaacagttctgtggcgaacatgagctgattttta

SEQ ID NO: 651130 - DNA, 75 bp, synthetic construct
  source 1..75: mol_type = other DNA
gtttgatacggggattgcaccacttctacaaaaagagatgggcgctgtcctgtgggccccggagaagggtgagga

SEQ ID NO: 651131 - DNA, 75 bp, synthetic construct
  source 1..75: mol_type = other DNA
acaccccggagaatccggatgtaccgggggcgatgtacctgaaatcagaggatggtcaggactggtatgcatgcc

SEQ ID NO: 651132 - DNA, 75 bp, synthetic construct
  source 1..75: mol_type = other DNA
agaagcagaaatgcaaaatacagcgactgcattcccgtatcgcaaatatccgcagggactaccttcacaaagtca

SEQ ID NO: 651133 - DNA, 75 bp, synthetic construct
  source 1..75: mol_type = other DNA
ggtcaggaagaagatttatttcagtaaaatttttttcggacatgtcttttattcgccatcactggattgagtgta

SEQ ID NO: 651134 - DNA, 75 bp, synthetic construct
  source 1..75: mol_type = other DNA
tggaacttggtaaagcattgccatttggcaaaaacgatcttcgccagttttcacccaccgccagcgcgattgctg

SEQ ID NO: 651135 - DNA, 75 bp, synthetic construct
  source 1..75: mol_type = other DNA
atggataattttcttgctctgaccttaacgggtaaaaaaccggttatcaccgagcgagaaatcaacggcgttcgc

SEQ ID NO: 651136 - DNA, 75 bp, synthetic construct
  source 1..75: mol_type = other DNA
tggtacttggtgtgtctgatggttcaggcgggacgatcccgctgacgacagaaaagcgcgtcgataacggtgaat

SEQ ID NO: 651137 - DNA, 75 bp, synthetic construct
  source 1..75: mol_type = other DNA
cgtggctccttgcatccgcagttcggtgtattaccgcaacgcgacattccctgggacgagaaatttctgacgtgg

SEQ ID NO: 651138 - DNA, 75 bp, synthetic construct
  source 1..75: mol_type = other DNA
atcagagcaaagagcccgttcgctggcacctcgatttacatacggctattcgcggttcgtaccatccgcagtttg

SEQ ID NO: 651139 - DNA, 75 bp, synthetic construct
  source 1..75: mol_type = other DNA
tatcgggtcgtttcgcaaattacccgccactcatcatccttcgaactgcatatggcaagcgagacgctgaacttc

SEQ ID NO: 651140 - DNA, 75 bp, synthetic construct
  source 1..75: mol_type = other DNA
ggtcaggaagaaaacttatttcagtcaaatgcttttcggaagtatcttttattcgccatcaccgaattgagttca

SEQ ID NO: 651141 - DNA, 75 bp, synthetic construct
  source 1..75: mol_type = other DNA
catcgtacagaagccggagtacgaaattcgttatacttaatagtggacatattgatgatttcgaaattaacgttg

SEQ ID NO: 651142 - DNA, 75 bp, synthetic construct
  source 1..75: mol_type = other DNA
tggtacaagccccagtttaaggatgaatatcagatgattcgctatgagagtgtctggtattacgttcttgcacgc

SEQ ID NO: 651143 - DNA, 75 bp, synthetic construct
  source 1..75: mol_type = other DNA
accatcatttgagattgtcggtttttggaatgttctactgcaaatgttttatgtcttgaacttaatgaataatag

SEQ ID NO: 651144 - DNA, 75 bp, synthetic construct
  source 1..75: mol_type = other DNA
cgatctgaaaattttggagttgttttccgttgatgcaaatattataaacaaaaactactctaccaaaagtagtct

SEQ ID NO: 651145 - DNA, 75 bp, synthetic construct
  source 1..75: mol_type = other DNA
tgtctggtattacgttcttgcacgctatgatgatcgtcttgtgttatcaaaatcgtacagaagtgggagtacgaa

SEQ ID NO: 651146 - DNA, 75 bp, synthetic construct
  source 1..75: mol_type = other DNA
taaaggcgatgaagatcgtattttaccggctgtcgataaaggtgactcactgtcgcttgttgagctgacacctgc

SEQ ID NO: 651147 - DNA, 75 bp, synthetic construct
  source 1..75: mol_type = other DNA
ttgagtgtgaaaaatgcggttctgagatgcacctgaaaatggggcgttttggtaaatacatggcctgcaccaacg

SEQ ID NO: 651148 - DNA, 75 bp, synthetic construct
  source 1..75: mol_type = other DNA
aagagtgtaaaaacacacgtaagattttacgtaacggcgaagtggcaccaccgaaagaagatccggttccgctgc

SEQ ID NO: 651149 - DNA, 75 bp, synthetic construct
  source 1..75: mol_type = other DNA
tggcctgcaccaacgaagagtgtaaaaacacacgtaagattttacgtaacggcgaagtggcaccaccgaaagaag

SEQ ID NO: 651150 - DNA, 75 bp, synthetic construct
  source 1..75: mol_type = other DNA
tccgcgagttaatgaactacgacttcaccgcgcagatggaaaacagcctcgaccaggtggcaaatcacgaagcag

SEQ ID NO: 651151 - DNA, 75 bp, synthetic construct
  source 1..75: mol_type = other DNA
ggttctgaccagcatcgactgcccgacctgtggtcgcaaaatggggattcgcacagcgagcaccggggtattcct

SEQ ID NO: 651152 - DNA, 75 bp, synthetic construct
  source 1..75: mol_type = other DNA
gcgcctgatggcctgccttcggaaacgcaaatcgcccaatcgctggcgcacctgctgccgccagtgctgaaagat

SEQ ID NO: 651153 - DNA, 75 bp, synthetic construct
  source 1..75: mol_type = other DNA
gcacctgatggcctgccttcagaaacgcaaatcgcccaatcgctggcgcacctgctgccgccagtgctgaaagat

SEQ ID NO: 651154 - DNA, 75 bp, synthetic construct
  source 1..75: mol_type = other DNA
ccttacccgccgacggtgaacacttactggcgacgccgtggcagcacatattttgtatcaaaagccggggagcgt

SEQ ID NO: 651155 - DNA, 75 bp, synthetic construct
  source 1..75: mol_type = other DNA
aagcggatgcacagaagctgtaccagttaatctggcgtcagtttgtggcctgccaaatgaccccggctaaatatg

SEQ ID NO: 651156 - DNA, 75 bp, synthetic construct
  source 1..75: mol_type = other DNA
atgtatgaagcctggctgccgattgaagtgaaacagaaaatggcgatgtttgctggtggtgccagcggtgtgctg

SEQ ID NO: 651157 - DNA, 75 bp, synthetic construct
  source 1..75: mol_type = other DNA
cgcaaatcgcccaatcgctggcgcacctgctgccgccagtgctgaaagataaattcatctgcgatcgtccgctgg

SEQ ID NO: 651158 - DNA, 75 bp, synthetic construct
  source 1..75: mol_type = other DNA
aaccgtttctacaaaataaagacggtacagaatatacattaattagcgatcaacatattacagtaacggaattag

SEQ ID NO: 651159 - DNA, 75 bp, synthetic construct
  source 1..75: mol_type = other DNA
tccggaaggctggcaattaaaattattgcagagccaccggataagcgctgtcgtgacctggacaatattctcaaa

SEQ ID NO: 651160 - DNA, 75 bp, synthetic construct
  source 1..75: mol_type = other DNA
gcgccgccgtgatctggacaatattctgaaagcgccgctggatgcgctgacgcatgcggggttgctaatggacga

SEQ ID NO: 651161 - DNA, 75 bp, synthetic construct
  source 1..75: mol_type = other DNA
atgcgtatagagtttgttttgctttacccgccgacggtgaacacctactggcgacgtcgtggcagcacatatttt

SEQ ID NO: 651162 - DNA, 75 bp, synthetic construct
  source 1..75: mol_type = other DNA
gtgacctggacaacattctgaaagcaccgctggatgcgctgacgcatgcggaagtgctcattgatgacgagcagt

SEQ ID NO: 651163 - DNA, 75 bp, synthetic construct
  source 1..75: mol_type = other DNA
cgagcagtttgatgaaatcaatattgtgcgcggtctgcctgttcctggtgggcggctgggcgtgaagatttacaa

SEQ ID NO: 651164 - DNA, 75 bp, synthetic construct
  source 1..75: mol_type = other DNA
atgactgaacgcatagaatttgttttgccttacccgccaacggtgaacacttactggcgacgccgtggcagcaca

SEQ ID NO: 651165 - DNA, 75 bp, synthetic construct
  source 1..75: mol_type = other DNA
ccagcagcgactgaaattaagcctgtccggacggctggcaataaaaattattgcagagccaccggataagcgtcg

SEQ ID NO: 651166 - DNA, 75 bp, synthetic construct
  source 1..75: mol_type = other DNA
actggcgacgtcgtggcagcacatattttgtatcaaaagtcggtgagcgttatcgccgtgatgtggcgctaattg

SEQ ID NO: 651167 - DNA, 75 bp, synthetic construct
  source 1..75: mol_type = other DNA
cgtatgccgcgtcacggtggctcttgcccgatagctatggcgctctcctgttctgccgatcgcaatatcaaagca

SEQ ID NO: 651168 - DNA, 75 bp, synthetic construct
  source 1..75: mol_type = other DNA
ttgccgagccaccggataagcgccgccgtgacctggacaatattctgaaagcgccgctggatgcgctgacgcatg

SEQ ID NO: 651169 - DNA, 75 bp, synthetic construct
  source 1..75: mol_type = other DNA
atgatggttatacccagacgcctgtcagacgaggtagcagatcgtgtgcgggcgctgattgatgaaaaaaatctg

SEQ ID NO: 651170 - DNA, 75 bp, synthetic construct
  source 1..75: mol_type = other DNA
gttcgccagcagcggctgaaattaagcctgtccggaaggctggcgataaaggtgattgcagagccaccggataag

SEQ ID NO: 651171 - DNA, 75 bp, synthetic construct
  source 1..75: mol_type = other DNA
tcgtgacctggacaatatcctgaaagcaccactggatgcgctgacgcatgccggactactcatagacgacgagca

SEQ ID NO: 651172 - DNA, 75 bp, synthetic construct
  source 1..75: mol_type = other DNA
aagatcaagctcgccatgcacgcattacccgcctgcctggtgaccataatgagcattcgagggagaaaaacgcat

SEQ ID NO: 651173 - DNA, 75 bp, synthetic construct
  source 1..75: mol_type = other DNA
cggggttgctaatggacgatgagcagtttgatgaaatcaatattgtacgtggcaagccagtatctggtggacggc

SEQ ID NO: 651174 - DNA, 75 bp, synthetic construct
  source 1..75: mol_type = other DNA
atggggatagaatttgttttgccttacccgccgacggtgaatacctactggcgtcgtcgtggcagcacatatttt

SEQ ID NO: 651175 - DNA, 75 bp, synthetic construct
  source 1..75: mol_type = other DNA
aagtgaaacaaaaaatggccatgtttgcgggcggcgccagcggcgtgctgtgcctgattggcggcgtactgctgc

SEQ ID NO: 651176 - DNA, 75 bp, synthetic construct
  source 1..75: mol_type = other DNA
ggtcagcctgtgccaggtggacggctgggcgtgaagatttacgaaatcagaggtggaacgatggcgcgtgatatc

SEQ ID NO: 651177 - DNA, 75 bp, synthetic construct
  source 1..75: mol_type = other DNA
tcgccagcagcggctgaaattaagcctgtccggacggctggcaataaaaattattgcagaaccaccggataagcg

SEQ ID NO: 651178 - DNA, 75 bp, synthetic construct
  source 1..75: mol_type = other DNA
gtacaagcagctctggcgtggcggtcaggtgcttgctgttccgccagcgtatacaagccagcgttgcgcgtactg

SEQ ID NO: 651179 - DNA, 75 bp, synthetic construct
  source 1..75: mol_type = other DNA
cgcgcagtgctgttggcgcgcgtttgacgggatacaacacctggctgacagggctgcgcgaagccggacacgttg

SEQ ID NO: 651180 - DNA, 75 bp, synthetic construct
  source 1..75: mol_type = other DNA
gatggcccggaaacgcctgaagccatgaccttattcattcgtcaaaagatccgtgaggatttcctcagtgccgaa

SEQ ID NO: 651181 - DNA, 75 bp, synthetic construct
  source 1..75: mol_type = other DNA
tgatgaaatcaatattgtacgtggccagccagtatctggtggacggctggagataagaattacagaggtgggtgt

SEQ ID NO: 651182 - DNA, 75 bp, synthetic construct
  source 1..75: mol_type = other DNA
tagacgacgagcagtttgatgaaatcaatattgtgcgcggtcagctcgtttctggtgggcggctgggcgtgaaga

SEQ ID NO: 651183 - DNA, 75 bp, synthetic construct
  source 1..75: mol_type = other DNA
gtgcgcggtcagcttgttcctggtggtcggctgggcgtgaagattgacgaaataatgcatgacgggcaggtccaa

SEQ ID NO: 651184 - DNA, 75 bp, synthetic construct
  source 1..75: mol_type = other DNA
aatcaatattgtgcgcggtcagcctgtgccaggtggacggctgggcgtgaagatttacgaaatcagaggtggtaa

SEQ ID NO: 651185 - DNA, 75 bp, synthetic construct
  source 1..75: mol_type = other DNA
ccagcagcggctgaaattaaacctgtccggaagactggcaataaaaattactgcagagccaccggataagcgccg

SEQ ID NO: 651186 - DNA, 75 bp, synthetic construct
  source 1..75: mol_type = other DNA
agcaactggcgcagcaggggattggtgcctggccggatgcatcgcgcgttagcttttatctggccgggcgcgcgc

SEQ ID NO: 651187 - DNA, 75 bp, synthetic construct
  source 1..75: mol_type = other DNA
attgctggaactgttggcgcgctatggctatgacgtgaagcccaatatgacgccgcacgagcaaaagcgagtgat

SEQ ID NO: 651188 - DNA, 75 bp, synthetic construct
  source 1..75: mol_type = other DNA
atgactgaacgcatagaatttgttttgccttacccgccaacggtgaacacctactggcgacgtcgtggcagcaca

SEQ ID NO: 651189 - DNA, 75 bp, synthetic construct
  source 1..75: mol_type = other DNA
atgactgaacgcatagaatttgttttgccttacccgccaacggtgaatacttactggcgacgtcgtggcagcaca

SEQ ID NO: 651190 - DNA, 75 bp, synthetic construct
  source 1..75: mol_type = other DNA
gtttgatgaaatcaatattgtacgtagtcagcttgttcctggtggtcggttgggtgtgaagatttacaaaattga

SEQ ID NO: 651191 - DNA, 75 bp, synthetic construct
  source 1..75: mol_type = other DNA
aaaacgacggttctgtggcactgctgaaaggccaggaaatgggtcgctttaaactcggctctaccgttatcaacc

SEQ ID NO: 651192 - DNA, 75 bp, synthetic construct
  source 1..75: mol_type = other DNA
ccgcttcctgctgaagagatcgaagcagaacacgacgccagcccattggttgacgacaaaaaagaccaggtctaa

SEQ ID NO: 651193 - DNA, 75 bp, synthetic construct
  source 1..75: mol_type = other DNA
cccggaaggctgacaataaaaattattgcagagccaccggataagcgccgtcgtgacctggacaacattctgaaa

SEQ ID NO: 651194 - DNA, 75 bp, synthetic construct
  source 1..75: mol_type = other DNA
tacaccgcagatgattttgatagctcgctggcgacactgaccgataagcaggtcagctcgcattatctggtccct

SEQ ID NO: 651195 - DNA, 75 bp, synthetic construct
  source 1..75: mol_type = other DNA
taaatactacaaggtcgacatgaaagaggcgcagaagccggataccgccagctatcgcacgtttaacgaattctt

SEQ ID NO: 651196 - DNA, 75 bp, synthetic construct
  source 1..75: mol_type = other DNA
ccgaatctgtttgcccgtaacgaacgcgtgatttgcctgttcgataccgaatttggcccgatggcgcagattctg

SEQ ID NO: 651197 - DNA, 75 bp, synthetic construct
  source 1..75: mol_type = other DNA
cgagcggtggggcgatggatcacgacaccgcttatgtcgaagcggtaggttctctgcacactcttggcgggttgc

SEQ ID NO: 651198 - DNA, 75 bp, synthetic construct
  source 1..75: mol_type = other DNA
acggtcagggtgacagttaccggagaagcagaggaaagcggcaccctgagtctgtatgtcgggcgctaccgtgta

SEQ ID NO: 651199 - DNA, 75 bp, synthetic construct
  source 1..75: mol_type = other DNA
cgttcgcacatgccttacagtaagtcgccaagcggtgtcgcgctggaatgtaaagacggtcgaattttcagcggc

SEQ ID NO: 651200 - DNA, 75 bp, synthetic construct
  source 1..75: mol_type = other DNA
ctccaagcggcgtggcgctggaatgcaaagacggtcgtattttcagtggtagctatgctgaaaacgccgcattca

SEQ ID NO: 651201 - DNA, 75 bp, synthetic construct
  source 1..75: mol_type = other DNA
ttctccgtatttgtttttctcgccggactctaaagattgcctgcttactgttacttgtggcaggagcgaccatcc

SEQ ID NO: 651202 - DNA, 75 bp, synthetic construct
  source 1..75: mol_type = other DNA
cgaaatgaatgacagcagcggtcgctggagttatgcgcgccagttatacgggcatgtctataccgcaaaactggg

SEQ ID NO: 651203 - DNA, 75 bp, synthetic construct
  source 1..75: mol_type = other DNA
atgcaggtgtggtgacgctgactgcccgccataaggggctgtatggtaacgagttgcctgtctgcctgaattatt

SEQ ID NO: 651204 - DNA, 75 bp, synthetic construct
  source 1..75: mol_type = other DNA
cccactgaatggctgggcgaacatagcgcggagttggtttctgacgcggtgaattctttgcttgatgatattagt

SEQ ID NO: 651205 - DNA, 75 bp, synthetic construct
  source 1..75: mol_type = other DNA
tactgaccgtacttgtcggtcatgacgccagcgacacaactgttggcagtaacggtacactgtctgtacagagcg

SEQ ID NO: 651206 - DNA, 75 bp, synthetic construct
  source 1..75: mol_type = other DNA
gcgcggcggttggtgggcattatggaacacggcgcataacgtcggcggcgcactcattcccattgtgatggcagc

SEQ ID NO: 651207 - DNA, 75 bp, synthetic construct
  source 1..75: mol_type = other DNA
agattctcgtgtgaaagaacgtatcgcgcgggcggggcaatggtttggcgaaacgttaattgccgatgatgcctt

SEQ ID NO: 651208 - DNA, 75 bp, synthetic construct
  source 1..75: mol_type = other DNA
ctgcttaagcgcgcggtccatcgggcgattgataaggtcgatctttccggcaccagtgcgttgatgctggagagt

SEQ ID NO: 651209 - DNA, 75 bp, synthetic construct
  source 1..75: mol_type = other DNA
tcgctggtggcattgattcgacgtcacgaaccggcgttgttgattggcaactggtttagtcagccggaaaacgcc

SEQ ID NO: 651210 - DNA, 75 bp, synthetic construct
  source 1..75: mol_type = other DNA
ttgcttatagcaggagcaaccctttttattgccgatcgcgttatggtcaacgccagccaacaactgacctggagc

SEQ ID NO: 651211 - DNA, 75 bp, synthetic construct
  source 1..75: mol_type = other DNA
cagccaaccggctgaactggcagcccgcctgaacgcgctgaacatcaccgccgactatgaggtgatccgcgccgc

SEQ ID NO: 651212 - DNA, 75 bp, synthetic construct
  source 1..75: mol_type = other DNA
cagccaaccggctgaactggcagcccgcctgaacgcgctgaacatcaccgccgactatgaagtgatccgcaccgc

SEQ ID NO: 651213 - DNA, 75 bp, synthetic construct
  source 1..75: mol_type = other DNA
atgcacgcagataccgcgacccgccagcactggatgtccgtactggcacacagccaaccggctgaactggcagcc

SEQ ID NO: 651214 - DNA, 75 bp, synthetic construct
  source 1..75: mol_type = other DNA
actggcctgtcacacaggaggcattctgcaggattatttcttccggtgagaatgtggacattattctctggcatg

SEQ ID NO: 651215 - DNA, 75 bp, synthetic construct
  source 1..75: mol_type = other DNA
cacccagacgcctgccgacgagctggcggcaagccgtaccgcccgcgcagcggtgtttatccgcaacgatccggc

SEQ ID NO: 651216 - DNA, 75 bp, synthetic construct
  source 1..75: mol_type = other DNA
atgcacgcagataccgcgacccgccagcactggatgtccgtgctggcgcacagccaaccggctgaactggcagcc

SEQ ID NO: 651217 - DNA, 75 bp, synthetic construct
  source 1..75: mol_type = other DNA
ttgcgttttcttaccgtcaagctctattcttacgatatgaataaactcattgaactcagacgcgccaaaatgttg

SEQ ID NO: 651218 - DNA, 75 bp, synthetic construct
  source 1..75: mol_type = other DNA
cgcaatggcgggacgtcagttaccgttcctgtcggttcttgtgccgttctggctggtagcaatgatggacggctg

SEQ ID NO: 651219 - DNA, 75 bp, synthetic construct
  source 1..75: mol_type = other DNA
ttcgccgcgtttgtttttctcgccggactctaaagattgcctgcttactgttacttgtggcaggagcgacaattt

SEQ ID NO: 651220 - DNA, 75 bp, synthetic construct
  source 1..75: mol_type = other DNA
gacggcacgctcggctacagctgggtgctggggcgcgacaaacagcacgccgaacgctgcgcgctgattgacgcg

SEQ ID NO: 651221 - DNA, 75 bp, synthetic construct
  source 1..75: mol_type = other DNA
ccgccataaggggctgtatggtaacgagttgcctgtctgcctgaattattatggttctggtggtggtgagattct

SEQ ID NO: 651222 - DNA, 75 bp, synthetic construct
  source 1..75: mol_type = other DNA
tgaggcctttaaccgctatctcggcgaattgtggggggatttacgggaatggctgaaagcggatatcaacagcga

SEQ ID NO: 651223 - DNA, 75 bp, synthetic construct
  source 1..75: mol_type = other DNA
cccactgaatggctgggcgaacatagcgcggagttggtttctgacgcggtgaattctttgcttgatgatatcagc

SEQ ID NO: 651224 - DNA, 75 bp, synthetic construct
  source 1..75: mol_type = other DNA
tatcatccgctttctgactggaaagactctgaagatttcgacttttatgaagaacgccctgcgcgcggctgggat

SEQ ID NO: 651225 - DNA, 75 bp, synthetic construct
  source 1..75: mol_type = other DNA
tgaacaaaccaacaagggtaaatcgctgaaagagcgcggagccgattacgtcatcaactccgccacgcaagggtt

SEQ ID NO: 651226 - DNA, 75 bp, synthetic construct
  source 1..75: mol_type = other DNA
gaaaagcggaaccggtgcgcggatggtgtctggtggtcgcgtcttcgggcgtgaccagactggcggaggaagttt

SEQ ID NO: 651227 - DNA, 75 bp, synthetic construct
  source 1..75: mol_type = other DNA
ataattttgataaatggttattgggtggaaatatattttatgattatgattttacccgtgggcatcgccgtttag

SEQ ID NO: 651228 - DNA, 75 bp, synthetic construct
  source 1..75: mol_type = other DNA
tcatggatctcgacattaccgatagctttggcgacaacactgaccgtaacggtaatgtcttgccgcaggataatc

SEQ ID NO: 651229 - DNA, 75 bp, synthetic construct
  source 1..75: mol_type = other DNA
atggcgatgcgctgccggaagataacctcacgccgcagctttacgacgcgcaggacaaacgagtgacgttaacca

SEQ ID NO: 651230 - DNA, 75 bp, synthetic construct
  source 1..75: mol_type = other DNA
gtgatattcttgattccgtgacactgtcacttaaagtggcggcgctggcgacattaattgcgctggtgttaggga

SEQ ID NO: 651231 - DNA, 75 bp, synthetic construct
  source 1..75: mol_type = other DNA
ggaggaatgctggcgtttgccttgtcgttcgatgaaatcatcgttacgacttttacggcaggtcatgaacgaacg

SEQ ID NO: 651232 - DNA, 75 bp, synthetic construct
  source 1..75: mol_type = other DNA
aaaggggttggtgaactggttaatggtgttgaggttgcactggaatatacgccagaacgagggatcgcgctgctt

SEQ ID NO: 651233 - DNA, 75 bp, synthetic construct
  source 1..75: mol_type = other DNA
gctcagaagaaattcagatgcgctaccgggatgccatccgctttctggagaaagtcgcggcaggacaaatcaacc

SEQ ID NO: 651234 - DNA, 75 bp, synthetic construct
  source 1..75: mol_type = other DNA
ataaaaaggatgtttttttctacgacatgagtggtgaaagcattatacagataaatgacgttatgcatttgtcgg

SEQ ID NO: 651235 - DNA, 75 bp, synthetic construct
  source 1..75: mol_type = other DNA
tccttaaactggcggcctggggcggcgtggttttccttcattttcccatcctgattatcgccgcctatgctttta

SEQ ID NO: 651236 - DNA, 75 bp, synthetic construct
  source 1..75: mol_type = other DNA
acgttcggaacggttgccgaactggtgggcgtgggcaattacatcctcaagcgcctgatgaatcaccgtactatg

SEQ ID NO: 651237 - DNA, 75 bp, synthetic construct
  source 1..75: mol_type = other DNA
cgtttctatgacgagaaccataaacaggtaaaggcagagccgatcctgtacactttacttaaaaccattatctga

SEQ ID NO: 651238 - DNA, 75 bp, synthetic construct
  source 1..75: mol_type = other DNA
taatgagcttgtcggcaaagacggcggcgcaatccagattgaaacatcaccgatgagcactctattcggaaaatg

SEQ ID NO: 651239 - DNA, 75 bp, synthetic construct
  source 1..75: mol_type = other DNA
tgctcagtgagaacggctacctgcgctggtatgtggcatccatgagcatcggtgcggtcgtggtgctggcactgt

SEQ ID NO: 651240 - DNA, 75 bp, synthetic construct
  source 1..75: mol_type = other DNA
ttggcccgcagatgttaatcggcatggcggcggcagagtgttcccacaaagaggcggcaggggcggcgacggggt

SEQ ID NO: 651241 - DNA, 75 bp, synthetic construct
  source 1..75: mol_type = other DNA
aaatgttgaaaccgcatcaggaaccgacgctatatggggcgaacggtcagacctcaacaacccatcgcggcagta

SEQ ID NO: 651242 - DNA, 75 bp, synthetic construct
  source 1..75: mol_type = other DNA
aaatagcgttgatattagtcaacgctggcaggaaattactgtgaaaacgcagcaactacgccaaatgaatcaaca

SEQ ID NO: 651243 - DNA, 75 bp, synthetic construct
  source 1..75: mol_type = other DNA
catacagccagccgctgtggacgtggatgtcggtaggcgactttaatatcggtttcaatctggtgctggacggcc

SEQ ID NO: 651244 - DNA, 75 bp, synthetic construct
  source 1..75: mol_type = other DNA
gaccgaatttcccggctggagcaccaactcgccgccgagaaaaagactgactattccacgttcccggagatctaa

SEQ ID NO: 651245 - DNA, 75 bp, synthetic construct
  source 1..75: mol_type = other DNA
acgatttggtgctaaaaatggcgcaccaacatgaccgtctggaagcggtgatttttacgccaacggactggcatc

SEQ ID NO: 651246 - DNA, 75 bp, synthetic construct
  source 1..75: mol_type = other DNA
acttgatgacccacgcgttctttaaagcgttgctgttcctggcatccggttccgtcattctggcctgccatcacg

SEQ ID NO: 651247 - DNA, 75 bp, synthetic construct
  source 1..75: mol_type = other DNA
aatgaaagcgttcgtcgtgacccgtgtgggtgacgtgttcctcgctttcgcgctgttcattctctacaacgaact

SEQ ID NO: 651248 - DNA, 75 bp, synthetic construct
  source 1..75: mol_type = other DNA
ggcattctgctggctgcctggctatggctgggtaaacgtactctggtgacctccatcgccaacagtgcgccgggc

SEQ ID NO: 651249 - DNA, 75 bp, synthetic construct
  source 1..75: mol_type = other DNA
ggggcggcgacggggtttgtcggcttgtttgcttatctgggggcgtcgcttgctggttggccgctggcgaaagta

SEQ ID NO: 651250 - DNA, 75 bp, synthetic construct
  source 1..75: mol_type = other DNA
tcattcaaatgggaatatcagcatcagggccattaggctcacctgtaaatatcaccctgccgatatctttcagta

SEQ ID NO: 651251 - DNA, 75 bp, synthetic construct
  source 1..75: mol_type = other DNA
gtaaaaagaacctgaaaacgatgttatttatcagtcagttgaaagcaaaaacgaattttcaggttgttggtttaa

SEQ ID NO: 651252 - DNA, 75 bp, synthetic construct
  source 1..75: mol_type = other DNA
tggtgtgattgaacgggcacgcgccggtatcgatgaggccatcagccgtgagcagcttatccccctcgaccgtga

SEQ ID NO: 651253 - DNA, 75 bp, synthetic construct
  source 1..75: mol_type = other DNA
cccactgaccacggatgacggaaacgggctgcggggattcagtggtgaaggacgggtgaaaggcagcggggatgc

SEQ ID NO: 651254 - DNA, 75 bp, synthetic construct
  source 1..75: mol_type = other DNA
gggccggaaatggcgaaccggtcacggcagaggtactggcacagcggcaggctgaagaggccatccgccgtgaaa

SEQ ID NO: 651255 - DNA, 75 bp, synthetic construct
  source 1..75: mol_type = other DNA
acccgtactggcagtacatcatcaaaggggcaattattatctttgccgtggcgctggattcactgaagtacgcgc

SEQ ID NO: 651256 - DNA, 75 bp, synthetic construct
  source 1..75: mol_type = other DNA
aaacccgcttcggtaagaacatttttgccattggcggtaacccggaagcggcaaaagtatctggtgtcaacgtcg

SEQ ID NO: 651257 - DNA, 75 bp, synthetic construct
  source 1..75: mol_type = other DNA
tgctatcgcggcgtgcgtggtaggcggcgtatcgttcagcggcggtgtggggacggtgattggcgtggtgaccgg

SEQ ID NO: 651258 - DNA, 75 bp, synthetic construct
  source 1..75: mol_type = other DNA
ggccatctttccagttattcgggcgcttgaattgcataaaattaagcatcttttaattgttacttcgactattaa

SEQ ID NO: 651259 - DNA, 75 bp, synthetic construct
  source 1..75: mol_type = other DNA
gtggattgttataataatgtctaccgtttatccttatcaccctcgattaaacgttcagcagcaatcataaaagat

SEQ ID NO: 651260 - DNA, 75 bp, synthetic construct
  source 1..75: mol_type = other DNA
tgatgttcccgcatccgttcagaatgtcgttattaacaacaacaattttgactatgccggatttgagtgccgaaa

SEQ ID NO: 651261 - DNA, 75 bp, synthetic construct
  source 1..75: mol_type = other DNA
cagttacggcattgccgggctgctgatgctggcggtcagttaccgactgtaccgggcggaagacagagcggaacg

SEQ ID NO: 651262 - DNA, 75 bp, synthetic construct
  source 1..75: mol_type = other DNA
aggccattcatctggcccttcctgtgctggaaagtaaaaacctggccttcagcatggtggacctgctgacagagg

SEQ ID NO: 651263 - DNA, 75 bp, synthetic construct
  source 1..75: mol_type = other DNA
ctgggttacgctattcagctaataactacgtgaaatggaaagacgagtatctggatcaaagcaaccaaacccaac

SEQ ID NO: 651264 - DNA, 75 bp, synthetic construct
  source 1..75: mol_type = other DNA
ctgggttacgttactccgcgaataattacgtgaaatggaaagacgaatacctggatcagggtaaccagacccaac

SEQ ID NO: 651265 - DNA, 75 bp, synthetic construct
  source 1..75: mol_type = other DNA
ctggtgaaagaaacgatcgagctggcggaacaggtaaatcacaccgaagtccatctggttggcgcctaccccgta

SEQ ID NO: 651266 - DNA, 75 bp, synthetic construct
  source 1..75: mol_type = other DNA
ccgtaacggcaagtccgccggtatctggctgaacccgctgaccacggatgacggaaacgggctgcggggattcag

SEQ ID NO: 651267 - DNA, 75 bp, synthetic construct
  source 1..75: mol_type = other DNA
atcaatgcgcagataaaacggggtgatttactgtatgtggatgtggcaaaaggctatggcacaggcctgctggtt

SEQ ID NO: 651268 - DNA, 75 bp, synthetic construct
  source 1..75: mol_type = other DNA
caccaagtatgtgttgctgaatccgtatatctggctgctttcgttttgctatgtgctggtctatgtggttcgggc

SEQ ID NO: 651269 - DNA, 75 bp, synthetic construct
  source 1..75: mol_type = other DNA
tttactgaactgggaggggaaatcaatgcgcagataaaacgcggtgacttactgtatgtggatgtggcaaaaggc

SEQ ID NO: 651270 - DNA, 75 bp, synthetic construct
  source 1..75: mol_type = other DNA
caggtgcgggcagagcaacatattgacctggcctatgccatcaccgctcacggtgcgcagggggcaagtgaaacc

SEQ ID NO: 651271 - DNA, 75 bp, synthetic construct
  source 1..75: mol_type = other DNA
ctggacatcagaaataccggtcttgagcctgtttccgcaggcacaccacttcaggtcgttcataccggcagtggc

SEQ ID NO: 651272 - DNA, 75 bp, synthetic construct
  source 1..75: mol_type = other DNA
tgggcagaagcgagttaccagaatggcgagaatacagaatcgccggtaacgggtagcgtcggtttccggattaat

SEQ ID NO: 651273 - DNA, 75 bp, synthetic construct
  source 1..75: mol_type = other DNA
attacctacggcgtgtcgaagtttgtctccggcattgtcagcgaccgctcaaatgcccgttattttatggggata

SEQ ID NO: 651274 - DNA, 75 bp, synthetic construct
  source 1..75: mol_type = other DNA
cgccaacaaagtgttcccggaaatggcgacgatgccgattgcgctggttattctgattgtctgtgccattggtgc

SEQ ID NO: 651275 - DNA, 75 bp, synthetic construct
  source 1..75: mol_type = other DNA
gaggcttatcgccagactgacccgtttggcgagctgtatgtgattgccgttcctgaatccacaggcgcggcggca

SEQ ID NO: 651276 - DNA, 75 bp, synthetic construct
  source 1..75: mol_type = other DNA
gcgccatctggctggcaaagcaatacggcattgatgccatcggttttaacgcgccagacctgaatatgaaacacg

SEQ ID NO: 651277 - DNA, 75 bp, synthetic construct
  source 1..75: mol_type = other DNA
actcgtcagcggcgataacggaagtaaaaattacgatgaagcttctggaatgcaacaggcattaatcgctaaagg

SEQ ID NO: 651278 - DNA, 75 bp, synthetic construct
  source 1..75: mol_type = other DNA
cgtccgggcgcgcagaataagatgaaagtgattctggccgaagaagcaaagctcatcaaaaaagataatgtgaat

SEQ ID NO: 651279 - DNA, 75 bp, synthetic construct
  source 1..75: mol_type = other DNA
aagcgcccgttaccgtaccggttgttggcagtgataaacaattccccgtgcgtcgcgtttactgcgtcggacgta

SEQ ID NO: 651280 - DNA, 75 bp, synthetic construct
  source 1..75: mol_type = other DNA
gcccatcgcgccgctgcacaaagcccgcgatatcggcggtattgataatgcgccaatctggttacaggttaacgg

SEQ ID NO: 651281 - DNA, 75 bp, synthetic construct
  source 1..75: mol_type = other DNA
gtcttctcagcaggatggagcacatcatgcaggcacatgatatcagcgcaacaacgatggctgcattactggccc

SEQ ID NO: 651282 - DNA, 75 bp, synthetic construct
  source 1..75: mol_type = other DNA
gaggcttatcgccagaccgacccgtttggtgagctgtatgtgattgccgttcctgaatccacaggcgcggcggca

SEQ ID NO: 651283 - DNA, 75 bp, synthetic construct
  source 1..75: mol_type = other DNA
acccatgatgaacaggaactgtttgaagtcattaataaaaaattactggagcatcttgatgatgtcagctcataa

SEQ ID NO: 651284 - DNA, 75 bp, synthetic construct
  source 1..75: mol_type = other DNA
gacgccaaaatcctccatcgccagccgaaatatctcgggccgtcggtcatgattgggccatttagcgaacatggc

SEQ ID NO: 651285 - DNA, 75 bp, synthetic construct
  source 1..75: mol_type = other DNA
tttaccattcagattttttaaagttatatatgttcctatggggccagctatttctttgggatttttcttatgtct

SEQ ID NO: 651286 - DNA, 75 bp, synthetic construct
  source 1..75: mol_type = other DNA
atctggtcacggcgaatacggcagtgacgatgtttgaactgggcggatttatcggtgcgctggtagcgggttggg

SEQ ID NO: 651287 - DNA, 75 bp, synthetic construct
  source 1..75: mol_type = other DNA
atcttcaccggtacgccggaaggggttggcccggtagtgaaaggtgatgtgatcacgggcaacgtcgagggctta

SEQ ID NO: 651288 - DNA, 75 bp, synthetic construct
  source 1..75: mol_type = other DNA
ccatgtcacagaacagtgccgacgcctcttatttacagcagatggcgctgtcatttattgccctccgtctgaatg

SEQ ID NO: 651289 - DNA, 75 bp, synthetic construct
  source 1..75: mol_type = other DNA
tgtttttggtggcatcgattatcggaatgcctgcggtagcaaaggaatggcaagaaaacaaaagttggaatgctc

SEQ ID NO: 651290 - DNA, 75 bp, synthetic construct
  source 1..75: mol_type = other DNA
aacaatacacagattgccaccacggcttttgtgaaatcggcaattgcagcaatggtggggtctgcacctgctgca

SEQ ID NO: 651291 - DNA, 75 bp, synthetic construct
  source 1..75: mol_type = other DNA
gtgcgtattattatcgcgctcggtgtggcagggttaattgtcacccaggggaccgatctttctgctggtcgtcag

SEQ ID NO: 651292 - DNA, 75 bp, synthetic construct
  source 1..75: mol_type = other DNA
gaatgtcggtccagaagggactcaacaaattagaattcagaactatgcacccagcggccctaatgaaaactgctt

SEQ ID NO: 651293 - DNA, 75 bp, synthetic construct
  source 1..75: mol_type = other DNA
aaaatactattgctgacattctcacataccttggtttgggagaagccagatatatcattcagcgaggagctaatg

SEQ ID NO: 651294 - DNA, 75 bp, synthetic construct
  source 1..75: mol_type = other DNA
tatatttatgtcggtgcttattgtcctcagcctcgccgttaacgtcattcagggagtaaataactaccgtctgca

SEQ ID NO: 651295 - DNA, 75 bp, synthetic construct
  source 1..75: mol_type = other DNA
tcggcaaagcgtttgatctctcggcccccatcgcgccgctgcacaaagccagcgaaaccggcggtattgataacg

SEQ ID NO: 651296 - DNA, 75 bp, synthetic construct
  source 1..75: mol_type = other DNA
gaaaacgcccatgaatatgtctggggttatgccacggggcttgatatgacccgtcgcgatcgtcaaatggagatg

SEQ ID NO: 651297 - DNA, 75 bp, synthetic construct
  source 1..75: mol_type = other DNA
ctgatatcaaacattacattcttattctgaagcgggaaaacggggtgacctggctggataatttcggggaaacag

SEQ ID NO: 651298 - DNA, 75 bp, synthetic construct
  source 1..75: mol_type = other DNA
gtgtctggccacaatatggtcgtgtggaaatccgtggaattcggaaaacatggattggtaactccgaacctttta

SEQ ID NO: 651299 - DNA, 75 bp, synthetic construct
  source 1..75: mol_type = other DNA
ccgtgtcacagaacagtgccgacgcctcttatttacagcagatggcgctatcatttattgccctccgtctgaatg

SEQ ID NO: 651300 - DNA, 75 bp, synthetic construct
  source 1..75: mol_type = other DNA
ttggctcagaaggttactggtggcgcattgaaggcgctggtacccgcgattcccactacaaaatgaggaataagt

SEQ ID NO: 651301 - DNA, 75 bp, synthetic construct
  source 1..75: mol_type = other DNA
tggctctgagggctactggtggcgcatcgaaggggccggaacgcgcgattcacatcgctggatgaaagataagtt

SEQ ID NO: 651302 - DNA, 75 bp, synthetic construct
  source 1..75: mol_type = other DNA
tatcgcccggactgagcttgggcgcgcaaccggtgcattggatcaggcgcgtgcgctgtcaatcggctcgaatgg

SEQ ID NO: 651303 - DNA, 75 bp, synthetic construct
  source 1..75: mol_type = other DNA
cttgacggcatgaccggacacgccggatgcctgcctaactgcaagtgttggtcggaagtgcagatccccgaacca

SEQ ID NO: 651304 - DNA, 75 bp, synthetic construct
  source 1..75: mol_type = other DNA
tggggattggcgggctggaaggccgtttactgaaggatggtgaccgactcccgattggcaaatcgaagcgtgatt

SEQ ID NO: 651305 - DNA, 75 bp, synthetic construct
  source 1..75: mol_type = other DNA
tgtacaccacggtgcaggatggtggtcgtcacggttttcgccagtcgggtatcagccattgcggtgcgctggata

SEQ ID NO: 651306 - DNA, 75 bp, synthetic construct
  source 1..75: mol_type = other DNA
gtgggccaggtgatgcaatccatcatcgccgaacaggtcaagtacatcaaatcgctccccctcgaggcggctgac

SEQ ID NO: 651307 - DNA, 75 bp, synthetic construct
  source 1..75: mol_type = other DNA
ctggacggtatgatcggacacgccggatgtttgccgaactgcaaatgctggcctgaagtacagattccagcaccg

SEQ ID NO: 651308 - DNA, 75 bp, synthetic construct
  source 1..75: mol_type = other DNA
ctcaccgcaagatgaaagataaatttgtgcgctgggataacccgccgacgctggacggtatgatcggacacgccg

SEQ ID NO: 651309 - DNA, 75 bp, synthetic construct
  source 1..75: mol_type = other DNA
agatggtgacgtcaggcattctcatcgggaaatggaaggtaaatttgtcgaatggggcaaacctccaacgcttga

SEQ ID NO: 651310 - DNA, 75 bp, synthetic construct
  source 1..75: mol_type = other DNA
cggcatgaccggccacgcgggcgagctgccaaactgccgctgctataaagagatcgtgtttgttcgcgttccatt

SEQ ID NO: 651311 - DNA, 75 bp, synthetic construct
  source 1..75: mol_type = other DNA
cacgctggcgagttcccgaattgtcgctgttataaagaaatcgttttccccacctcccaatcttatcccgcctga

SEQ ID NO: 651312 - DNA, 75 bp, synthetic construct
  source 1..75: mol_type = other DNA
actgtatgaacaaaacagagttgtaccggttattgagggaaaaacgttgtgtgtcgcacctaactttgacctctg

SEQ ID NO: 651313 - DNA, 75 bp, synthetic construct
  source 1..75: mol_type = other DNA
gccgaacctgatttctttttcgctggctggaactatgggatgaaggtgggtggcgaagtgacgccggatacgcta

SEQ ID NO: 651314 - DNA, 75 bp, synthetic construct
  source 1..75: mol_type = other DNA
cgagctgccgcgtttacgcgatgatagcgatggctacggtccccgcgggcgagattttatcgttcacgttgattt

SEQ ID NO: 651315 - DNA, 75 bp, synthetic construct
  source 1..75: mol_type = other DNA
agtcacccaggcatggcaaacgctgaaacacgatgctgtgcttatcgaggcgatggaaagtcgctcgctacgttg

SEQ ID NO: 651316 - DNA, 75 bp, synthetic construct
  source 1..75: mol_type = other DNA
caccgcttatgtcgaagcggtaggttctctgcacactctaggcgggttgcaatatcttggtctggaattaccgga

SEQ ID NO: 651317 - DNA, 75 bp, synthetic construct
  source 1..75: mol_type = other DNA
cgctgaaggtaaattagactatctgtctgttgatcccccctctctgggacgattaaagaaattattcgacaaaag

SEQ ID NO: 651318 - DNA, 75 bp, synthetic construct
  source 1..75: mol_type = other DNA
agactttatggttcagcgctttactaaagagcgaaaagaaaaatccgctgattactatgcgcgaattcatcagga

SEQ ID NO: 651319 - DNA, 75 bp, synthetic construct
  source 1..75: mol_type = other DNA
acgctatcggtacacgtctacgaattacaaataacggtgctatcgctggcggcggtggcggcggtggcggcggta

SEQ ID NO: 651320 - DNA, 75 bp, synthetic construct
  source 1..75: mol_type = other DNA
cttccctagctcgttaacaaacgaatatgtaacattgatcattaactccggtgtgactgtctacggacgtggggg

SEQ ID NO: 651321 - DNA, 75 bp, synthetic construct
  source 1..75: mol_type = other DNA
tttaaggttgatatatttaaaatatctttttttcataaaattgattttaaaaaatatgatgttgtacactgtcat

SEQ ID NO: 651322 - DNA, 75 bp, synthetic construct
  source 1..75: mol_type = other DNA
tcgttcacgttgattttcctgcagaagtcacccaggcatggcaaacgctgaaacacgatgctgtgcttatcgagg

SEQ ID NO: 651323 - DNA, 75 bp, synthetic construct
  source 1..75: mol_type = other DNA
acgagttcatacggctatcgttgttcaggaccccaccatgcagcggcgcacgatggcgacgttccgccgtatgac

SEQ ID NO: 651324 - DNA, 75 bp, synthetic construct
  source 1..75: mol_type = other DNA
agtcaccatggcgtggcaaacattgaaacgagatgctgtgcttatcgagacgatggcgagtcgttcattacgtta

SEQ ID NO: 651325 - DNA, 75 bp, synthetic construct
  source 1..75: mol_type = other DNA
gccactgaacgcttacacagccagggcaacctgtcgcagaccaacaacagcaaagatgtcgcgattaaagggcag

SEQ ID NO: 651326 - DNA, 75 bp, synthetic construct
  source 1..75: mol_type = other DNA
cctcttcgagttcaccacggacgtgaaagttacggagtctccgatcttgttccgtgacgagagcatgcgcaccgc

SEQ ID NO: 651327 - DNA, 75 bp, synthetic construct
  source 1..75: mol_type = other DNA
cggtgtggctccggaagttaatgccaaagcactggcctggggaaaacaatacgagaacgacgccagagtcctgtt

SEQ ID NO: 651328 - DNA, 75 bp, synthetic construct
  source 1..75: mol_type = other DNA
ctgaagtgaagtcgttacgtgtgctaccgcgtattaatggtatttactttgaaaaaaactggccagattttctga

SEQ ID NO: 651329 - DNA, 75 bp, synthetic construct
  source 1..75: mol_type = other DNA
cgctactgcgggcaatggtgacaacttcgccaaactggcggaagcactggcgagtggcggcgcaatggatcacga

SEQ ID NO: 651330 - DNA, 75 bp, synthetic construct
  source 1..75: mol_type = other DNA
aactgaaacgtcgccagcaaaatgtgctgatcgccaccgccgggttatacatgggaacatcggcctgctccggtt

SEQ ID NO: 651331 - DNA, 75 bp, synthetic construct
  source 1..75: mol_type = other DNA
attttccgtaaaggctatcagtggccgttccacgccacgcgggtaatggattttggctccagcttgttagatatg

SEQ ID NO: 651332 - DNA, 75 bp, synthetic construct
  source 1..75: mol_type = other DNA
aaacctccctgcccggttgttttgcggtgggagaagtggccggaactcacggcgttacccgacctggtggcgcag

SEQ ID NO: 651333 - DNA, 75 bp, synthetic construct
  source 1..75: mol_type = other DNA
caaccgtgtattaacggtatttactttgaaaaaaactggccagactttttaaagggagacatttacacacaataa

SEQ ID NO: 651334 - DNA, 75 bp, synthetic construct
  source 1..75: mol_type = other DNA
agcggttctggaccaagcaaaacttcaatgagctacccagagcgcccaaatctcgaaccagagaaattgacccca

SEQ ID NO: 651335 - DNA, 75 bp, synthetic construct
  source 1..75: mol_type = other DNA
gaagagaagaagaaactcgctgttgagcggttctggaccaagcaaaacttcaatgagctacccagagcgcccaaa

SEQ ID NO: 651336 - DNA, 75 bp, synthetic construct
  source 1..75: mol_type = other DNA
accgacaactttgacgcgccggtatatctgctgacgccagatctgattacccggttcgagctggagcacacaccg

SEQ ID NO: 651337 - DNA, 75 bp, synthetic construct
  source 1..75: mol_type = other DNA
aaacgggccttgacgcccagcaaaccaatatggacgtcattgccaacaacctggcaaacgttagtaccaacggtt

SEQ ID NO: 651338 - DNA, 75 bp, synthetic construct
  source 1..75: mol_type = other DNA
cattataatgaaagattaattcgttcctcgataaaaggcactgatggtaaagtaggaaaaatagaaatttatacg

SEQ ID NO: 651339 - DNA, 75 bp, synthetic construct
  source 1..75: mol_type = other DNA
tatatctactgacccctgatctgattaccaggttcgagctggagcacactccgagcgtgattacagccagaggca

SEQ ID NO: 651340 - DNA, 75 bp, synthetic construct
  source 1..75: mol_type = other DNA
tgatgaccggcagacgaatgggcgcagaagaggcgctgcgttggggggtagtcaaccgcgtggttagccaggcgg

SEQ ID NO: 651341 - DNA, 75 bp, synthetic construct
  source 1..75: mol_type = other DNA
agcggcagcagaaggcgaagcaccggatgctgactttggtccgggtggttttgcgggattaaccgaaattttcaa

SEQ ID NO: 651342 - DNA, 75 bp, synthetic construct
  source 1..75: mol_type = other DNA
aaaagcaaatggagctgctcgccaagaagctgcctgaaattaagcaggaacctggcgtacaacggattacctata

SEQ ID NO: 651343 - DNA, 75 bp, synthetic construct
  source 1..75: mol_type = other DNA
agtaggaaaaatagaaatttatacggatacaggcgtgcttatttttgaacagtataaaacacctcagattgttta

SEQ ID NO: 651344 - DNA, 75 bp, synthetic construct
  source 1..75: mol_type = other DNA
tgcccataaattattacctccggcaattagtgaaacaatttctaatggtaagaccgtttattatgtaaacgactt

SEQ ID NO: 651345 - DNA, 75 bp, synthetic construct
  source 1..75: mol_type = other DNA
agcattacctgaaaatcggcgttaaaacgcagcggcagaccatcgccgcacgcatccgaaaactgacgcagggtt

SEQ ID NO: 651346 - DNA, 75 bp, synthetic construct
  source 1..75: mol_type = other DNA
tataaggacgaatccaatatattataccttgatgaaaatatgggattggctggggcacaaaatgcaggtctgaaa

SEQ ID NO: 651347 - DNA, 75 bp, synthetic construct
  source 1..75: mol_type = other DNA
atgaagcagcgcatcaccgtcaccatagacagcgacagttatcagttactgaaatccgcggacgtcaatatctcc

SEQ ID NO: 651348 - DNA, 75 bp, synthetic construct
  source 1..75: mol_type = other DNA
gaggcagtggctcgacgacggagccactgctacgaacaccattattaacaataacggcagtatgagtgtcaggga

SEQ ID NO: 651349 - DNA, 75 bp, synthetic construct
  source 1..75: mol_type = other DNA
tcacaatcgtctttagtgtccttcaccccggccggcttttacgagccagcggcccgcgcccaatccgcgctccgt

SEQ ID NO: 651350 - DNA, 75 bp, synthetic construct
  source 1..75: mol_type = other DNA
gattaaatctgctatcgaaagtaagttctatgacgcatcgtcctatgcaggcaaaacctgtacgctgcgcataaa

SEQ ID NO: 651351 - DNA, 75 bp, synthetic construct
  source 1..75: mol_type = other DNA
gcccaggcagacggcgttgatggcgtggtgatggatctcgacgtcactgacagcttcggtgatgacactgaccgc

SEQ ID NO: 651352 - DNA, 75 bp, synthetic construct
  source 1..75: mol_type = other DNA
attcactcgtcgctctgttgaagtctgaaatgaagacgtacgggaacaaagcaccagagacttacagaagaatca

SEQ ID NO: 651353 - DNA, 75 bp, synthetic construct
  source 1..75: mol_type = other DNA
attccctcgttgatctgttgaagtctgaaatgaagatacacggaaacaaagcaccagagacttacagaagaatta

SEQ ID NO: 651354 - DNA, 75 bp, synthetic construct
  source 1..75: mol_type = other DNA
cgaagagcgtccggcgcggggctgggatattcgggcggaagcctggctgcctgcgtatccacaactgggtggtaa

SEQ ID NO: 651355 - DNA, 75 bp, synthetic construct
  source 1..75: mol_type = other DNA
tatcataatgaaagattaattcgtttctcgataaaaggcactgatggtaaagtaggtaaaatagaaatttataca

SEQ ID NO: 651356 - DNA, 75 bp, synthetic construct
  source 1..75: mol_type = other DNA
tgttgtgaaagtgaatgcactgacggaaggtaataacaaccgctggaacctggtactgccggcctggcaaagtgc

SEQ ID NO: 651357 - DNA, 75 bp, synthetic construct
  source 1..75: mol_type = other DNA
ctgagcggaacatcaagaagcgaagcagttgaaaaactggtcgaaatgaagatagatgaaattataaaggtcttg

SEQ ID NO: 651358 - DNA, 75 bp, synthetic construct
  source 1..75: mol_type = other DNA
tggatgatcgacccggtactgactcgccgcattaaagatatggggccggacttgggtaaacctgagttttacgat

SEQ ID NO: 651359 - DNA, 75 bp, synthetic construct
  source 1..75: mol_type = other DNA
atggcacgaaacaagcaatcctctcagcgaacggcacaggccaccgctgacggctacgagaacttcgtcgcccgc

SEQ ID NO: 651360 - DNA, 75 bp, synthetic construct
  source 1..75: mol_type = other DNA
atggcacgaaacaaacaagccctgcggagaactgcgcaggccaccgctgatggctatgagaactttgtcgcccgc

SEQ ID NO: 651361 - DNA, 75 bp, synthetic construct
  source 1..75: mol_type = other DNA
cggtaccgttattgataacgacaactgtaccagcaagctgtcgcgctttttcgccactcgcgaagaagcagaatc

SEQ ID NO: 651362 - DNA, 75 bp, synthetic construct
  source 1..75: mol_type = other DNA
gaaggcatgacgctcatggactcgcgggataagtttgaaacccatcagtacagcttcagtggtctggatgacatc

SEQ ID NO: 651363 - DNA, 75 bp, synthetic construct
  source 1..75: mol_type = other DNA
cgcttacggatgccgatgcgtcggatactggacattatgcaccgctcggaactcggtaagccgctgccggacgat

SEQ ID NO: 651364 - DNA, 75 bp, synthetic construct
  source 1..75: mol_type = other DNA
gatatcatttttatcatcaacggtaaagagtatccggtcccacctgtcgacggaacacgaatgaatgagaacaaa

SEQ ID NO: 651365 - DNA, 75 bp, synthetic construct
  source 1..75: mol_type = other DNA
ctccattgtcgctgctgtcggaaccgcgcgtcgggcgaccgatgccatccttagtcgggaaaatatccgttccca

SEQ ID NO: 651366 - DNA, 75 bp, synthetic construct
  source 1..75: mol_type = other DNA
gatactgaagccctgaatgcgatgggcgtgccgctggacaaaaacggctggccagacgtcgaccataatggcgaa

SEQ ID NO: 651367 - DNA, 75 bp, synthetic construct
  source 1..75: mol_type = other DNA
ctgcctggcgcattcatcacagtcgactgattcgctttgatggcgtcacgctgccatttcagcagaagatgaccg

SEQ ID NO: 651368 - DNA, 75 bp, synthetic construct
  source 1..75: mol_type = other DNA
tatcccggatgatatgacccgcaaaggcattcgcatcacttcggaaattgatgcaaaagatcgcggcattctcga

SEQ ID NO: 651369 - DNA, 75 bp, synthetic construct
  source 1..75: mol_type = other DNA
cgtctccggtaactggagaatcacattcgagtttcggaacggcgatgcttatattcttaactacgaggattacca

SEQ ID NO: 651370 - DNA, 75 bp, synthetic construct
  source 1..75: mol_type = other DNA
attcactcgttgctctgttgaagtctgaaatgaagatacacggaaacaaagcaccagagacttacagaagaatta

SEQ ID NO: 651371 - DNA, 75 bp, synthetic construct
  source 1..75: mol_type = other DNA
cataccatcattgactaagcatggtgtatacccgcctccgccagaagcgaaaggttcagcccttgcacaaatggc

SEQ ID NO: 651372 - DNA, 75 bp, synthetic construct
  source 1..75: mol_type = other DNA
atcgaaaagcatggaaagaacaccgcgatcgataccagcaagatatggaaaagcttgaatcagaaaacatggaat

SEQ ID NO: 651373 - DNA, 75 bp, synthetic construct
  source 1..75: mol_type = other DNA
atgcttttaattcaacctggatttggccttagcatcaaaaaagggcacatgttcggcgagaaagagtctcaacga

SEQ ID NO: 651374 - DNA, 75 bp, synthetic construct
  source 1..75: mol_type = other DNA
atcatcttattactcagttttcttaaggttaaggtcgttaatgtatgatatggatttctcctctatagttgctga

SEQ ID NO: 651375 - DNA, 75 bp, synthetic construct
  source 1..75: mol_type = other DNA
atgtcgttagtgtcaatttttagacgcattgcattcagctattatgattattcatgtgaagatatcaatataaca

SEQ ID NO: 651376 - DNA, 75 bp, synthetic construct
  source 1..75: mol_type = other DNA
taagaagaaaacttggtgaagcacgtcgagacatcgatgcttacaagcgactttttaatggtgaaagccatgctt

SEQ ID NO: 651377 - DNA, 75 bp, synthetic construct
  source 1..75: mol_type = other DNA
accgcatattaaaggtatttactttgagaagaattggcctgattttcttaacggaacaatttatcagacacggca

SEQ ID NO: 651378 - DNA, 75 bp, synthetic construct
  source 1..75: mol_type = other DNA
ccaacgtcaattgtcacggtggacggtgttgattacccgctctggcaaacagatgctctggtcgttggtagcggc

SEQ ID NO: 651379 - DNA, 75 bp, synthetic construct
  source 1..75: mol_type = other DNA
gcaaaaacgtaatattgatggagatatagcacaactggtagctccggcactggcttctattaagagagatcatta

SEQ ID NO: 651380 - DNA, 75 bp, synthetic construct
  source 1..75: mol_type = other DNA
gccttagcatcaaaaaagggcacatgtttggcgagaaagagtctcaacgaaaaatggtgtctatccggttgccat

SEQ ID NO: 651381 - DNA, 75 bp, synthetic construct
  source 1..75: mol_type = other DNA
tgaaccatgcactggaacgttatcacttccgcctggcagagctgggagtgaaggaagacgtaaccgcacgcgaat

SEQ ID NO: 651382 - DNA, 75 bp, synthetic construct
  source 1..75: mol_type = other DNA
caatattcgcaaggttcttttattaccgaagtgaagtctttacgtatgcaaccgtgtattaacggtatttacttt

SEQ ID NO: 651383 - DNA, 75 bp, synthetic construct
  source 1..75: mol_type = other DNA
tggatttgatatcaatgtcccattttctactaaaataattattggccttgagtctgatgggttgattacctggtt

SEQ ID NO: 651384 - DNA, 75 bp, synthetic construct
  source 1..75: mol_type = other DNA
acgctactcagtttatggacaggtgtcatcgtctggctggggctggagctgatgggggtgcagtttgcgctgatg

SEQ ID NO: 651385 - DNA, 75 bp, synthetic construct
  source 1..75: mol_type = other DNA
ttttgccatcgttctcaacccgctcgtcacctggtttattcgtcggggagtacaacgccccgttgccattacgat

SEQ ID NO: 651386 - DNA, 75 bp, synthetic construct
  source 1..75: mol_type = other DNA
cccttacaaaatgcgttttgcgttgaataatccacagattcacatcgccggactacaccgcgccttaaaaggtgt

SEQ ID NO: 651387 - DNA, 75 bp, synthetic construct
  source 1..75: mol_type = other DNA
ggcatcagtagcgcaactcttgcctcaatcgcatgtggactgaaaaagaatatctatggtcatcacttcggcgct

SEQ ID NO: 651388 - DNA, 75 bp, synthetic construct
  source 1..75: mol_type = other DNA
ccgttggtgcgtggtttaccgcatttgcgcgctattcatcgccagctgtatcaggatattttcgactgggcgggg

SEQ ID NO: 651389 - DNA, 75 bp, synthetic construct
  source 1..75: mol_type = other DNA
cttactgcgctggtcggcgtactggcggcatcgtttaacgaatttatctctatgctgccgaagtttaataaggag

SEQ ID NO: 651390 - DNA, 75 bp, synthetic construct
  source 1..75: mol_type = other DNA
ttgaataatccacagattcacatcgcgggattacaccgtgcacttaaaggcgtttcgcattatctggcgttaaag

SEQ ID NO: 651391 - DNA, 75 bp, synthetic construct
  source 1..75: mol_type = other DNA
tttttatgctgtttgaagtgcgccacgtcccttacaaaatgcgttttgcgctgaataatccacagattcacatcg

SEQ ID NO: 651392 - DNA, 75 bp, synthetic construct
  source 1..75: mol_type = other DNA
gaaaccaccaaaggcggtagcaaactggcgattttactgggaccaggcagaccgaaaagtcggttaccgggatga

SEQ ID NO: 651393 - DNA, 75 bp, synthetic construct
  source 1..75: mol_type = other DNA
cgggcatgcacattctgcttaaactggcctcgctggtagtgatcctcgcgggcattcacgcagcggcagatatca

SEQ ID NO: 651394 - DNA, 75 bp, synthetic construct
  source 1..75: mol_type = other DNA
aaaatctggatggaaacgacgaaaggtggcagcaaactggcgattttactggggccgggcagaccgaaaagtcgg

SEQ ID NO: 651395 - DNA, 75 bp, synthetic construct
  source 1..75: mol_type = other DNA
tggggcatcgactgggaatgtccactctggtggtatttctttctttgttggtctggggatggttactcggtccgg

SEQ ID NO: 651396 - DNA, 75 bp, synthetic construct
  source 1..75: mol_type = other DNA
agaacgtaaaagcgttctttcctgccgtgcgggagtttgtctacaaccccaacgtcaaaaacgccctggtgctca

SEQ ID NO: 651397 - DNA, 75 bp, synthetic construct
  source 1..75: mol_type = other DNA
atccgcgatgcctacattgaccacctgctgggttacatcaatcccgccaaactgaaaccgatgaagctggtgttc

SEQ ID NO: 651398 - DNA, 75 bp, synthetic construct
  source 1..75: mol_type = other DNA
aggcgcgagcactggccgaaacgccgggtatgacggtagagagcgcacagcgcattctggctgctgcaccgcaaa

SEQ ID NO: 651399 - DNA, 75 bp, synthetic construct
  source 1..75: mol_type = other DNA
caccgagccggtggtgcgtctgaacgttgagtccagagctgatgtggcgcttatgaatgaaaaaacgaccgagct

SEQ ID NO: 651400 - DNA, 75 bp, synthetic construct
  source 1..75: mol_type = other DNA
cggtactgaaggagtatgttgaccatctgatgagctacgtggacttcgcgaacttcacccgtccactgaagttgg

SEQ ID NO: 651401 - DNA, 75 bp, synthetic construct
  source 1..75: mol_type = other DNA
cggcggccagccggtgatgtcgaagaccgggcatgcgttcatcaaggagcggatgcgccaggaggacgctatcta

SEQ ID NO: 651402 - DNA, 75 bp, synthetic construct
  source 1..75: mol_type = other DNA
tgaagccttaccggcagaggttcgccaggacatgcagcagcgcattgatgcggcgcgccggatgtttgccgaaaa

SEQ ID NO: 651403 - DNA, 75 bp, synthetic construct
  source 1..75: mol_type = other DNA
aaagcccgcccgatcctggctgcttcaccgcaggcggatgccggaccatcactccgtgatcagatcatggcactg

SEQ ID NO: 651404 - DNA, 75 bp, synthetic construct
  source 1..75: mol_type = other DNA
ggagagcgcccgggctgtgctggctgcgggatcaggtaaggccgaaccggtctctgcatccacaaccgccctgtt

SEQ ID NO: 651405 - DNA, 75 bp, synthetic construct
  source 1..75: mol_type = other DNA
ccaatatcattccgtatattctgtcaatggcggcaggtaatgactccaacttattgatagtgttttatgttcaga

SEQ ID NO: 651406 - DNA, 75 bp, synthetic construct
  source 1..75: mol_type = other DNA
ttttgttggcgcgatgtatagcttttatgcgctgtactcatccggggaagaagccatgctgtacggttccatcgt

SEQ ID NO: 651407 - DNA, 75 bp, synthetic construct
  source 1..75: mol_type = other DNA
aaatcttcatctgatgaaggctacttccctaaaattttctccctggttggacactgtatggtctggtatcaccac

SEQ ID NO: 651408 - DNA, 75 bp, synthetic construct
  source 1..75: mol_type = other DNA
agtttatcgagggttactatatagttggtctgctggcggaagcctttcttgaaaaacaccctggtgcaaaaatta

SEQ ID NO: 651409 - DNA, 75 bp, synthetic construct
  source 1..75: mol_type = other DNA
ggcaccgaagagatttatttcgccacgttccatctcggcgtggatggcggcatcgaagttactgccagccataac

SEQ ID NO: 651410 - DNA, 75 bp, synthetic construct
  source 1..75: mol_type = other DNA
ggcaccgaagagatttatttcgccacgttccatctcggcgtggatggcggcattgaagttacggccagccataag

SEQ ID NO: 651411 - DNA, 75 bp, synthetic construct
  source 1..75: mol_type = other DNA
cgatgtgctggatattggcatgtccggcaccgaagaaatctatttcgccacgttccatctcggcgtggatggcgg

SEQ ID NO: 651412 - DNA, 75 bp, synthetic construct
  source 1..75: mol_type = other DNA
cagcggtgataccggactgcgcgacgtccagcgtctggcagaagcgaacgactttccccccgtcgatgaaaccaa

SEQ ID NO: 651413 - DNA, 75 bp, synthetic construct
  source 1..75: mol_type = other DNA
cagcggagataccggactgcgcgatgtccagcgtctggcagaagccaacgactttccccccgtcgatgaaaccaa

SEQ ID NO: 651414 - DNA, 75 bp, synthetic construct
  source 1..75: mol_type = other DNA
ggcaccgaagagatttatttcgccacgttccatctcggcgtggatggcggcatcgaagttaccgccagccataat

SEQ ID NO: 651415 - DNA, 75 bp, synthetic construct
  source 1..75: mol_type = other DNA
gattatgatcgcattcgcaatgacattgaagctgtgctgccagagttcgccgactataaccagcgcatccgtcat

SEQ ID NO: 651416 - DNA, 75 bp, synthetic construct
  source 1..75: mol_type = other DNA
accgaacctgttgtgcgtttgaacgttgaatcaagaggtgatcagctcgtgatggaaaataatacggcaattatt

SEQ ID NO: 651417 - DNA, 75 bp, synthetic construct
  source 1..75: mol_type = other DNA
atgcaggcgttacttttagaacagcaggacggcaaaactctcgcatcagtacagactctggacgaaagtcgcctg

SEQ ID NO: 651418 - DNA, 75 bp, synthetic construct
  source 1..75: mol_type = other DNA
gaaaaacgctgggcgaactggtgcgcgatcggatggcggcgtttccggcaagcggtgagatcaacagcaaactgg

SEQ ID NO: 651419 - DNA, 75 bp, synthetic construct
  source 1..75: mol_type = other DNA
tctcacgccgctcaagctggtgatcaactccgggaatggcgcagcgggtccggtggtggacgccattgaagcccg

SEQ ID NO: 651420 - DNA, 75 bp, synthetic construct
  source 1..75: mol_type = other DNA
acgacgatttatggtatggatgatcgctatcgaggggtattcggtcaacgagatgtggtctttatgagtgctaaa

SEQ ID NO: 651421 - DNA, 75 bp, synthetic construct
  source 1..75: mol_type = other DNA
cggcaacgctggcggcgatgccggatatgacggtggaaaaagcccgcccgatcctggcggcttcacctctggcgg

SEQ ID NO: 651422 - DNA, 75 bp, synthetic construct
  source 1..75: mol_type = other DNA
attacctggggacgcataagagcttctgtgcgcaggacgtagctgcggtaacaggcgcaacagtaaccagcataa

SEQ ID NO: 651423 - DNA, 75 bp, synthetic construct
  source 1..75: mol_type = other DNA
ttaggcgtttcttatcgacatcttttatatgttctcgcgcagttcattcacgacggtttattaattaaaagcaag

SEQ ID NO: 651424 - DNA, 75 bp, synthetic construct
  source 1..75: mol_type = other DNA
ttatcaataataaaccggtggcgctggtagtgatggatgcgtttggcaaatatacccattttgccgatgccagcc

SEQ ID NO: 651425 - DNA, 75 bp, synthetic construct
  source 1..75: mol_type = other DNA
tgaatgcgaaagcgaaatcgctcggaatgaacaacacgcgctttgttgaaccgaccggattgtcggtgcataacg

SEQ ID NO: 651426 - DNA, 75 bp, synthetic construct
  source 1..75: mol_type = other DNA
ctgttccggcagcagcgttgagctataaaaaacaaaaagccccccaaaaggggggggggcggggcagacggcaca

SEQ ID NO: 651427 - DNA, 75 bp, synthetic construct
  source 1..75: mol_type = other DNA
attacctggggacgcataagagcttctgtgcgcaggacgttaccgcggtaacaggcgcaacagtaaccagcataa

SEQ ID NO: 651428 - DNA, 75 bp, synthetic construct
  source 1..75: mol_type = other DNA
acaggtgtgatagtaacctgcataaatcaggcagcggctaaaatggcgcgtgcaggaatcctggtcattgatggt

SEQ ID NO: 651429 - DNA, 75 bp, synthetic construct
  source 1..75: mol_type = other DNA
ataaaaattatcgtaatattgtttctttaactcagaatcaatcatttccgttagtggatttgcccctatatttcc

SEQ ID NO: 651430 - DNA, 75 bp, synthetic construct
  source 1..75: mol_type = other DNA
gcgccaggctttacgccacgcttgctaatggtcgcgtgtcgctgattgatttctttgctgcaccctgttttattg

SEQ ID NO: 651431 - DNA, 75 bp, synthetic construct
  source 1..75: mol_type = other DNA
gtgaaagaaatccacaataatgatcttaagcagcaattgatgagtgaatccgcgtttaaggattgcttttcaacg

SEQ ID NO: 651432 - DNA, 75 bp, synthetic construct
  source 1..75: mol_type = other DNA
ggtgatgcgtacggtcttcaataataaaccggtggcgttggtggtgatggatgcatttggcaaatatacccattt

SEQ ID NO: 651433 - DNA, 75 bp, synthetic construct
  source 1..75: mol_type = other DNA
tactcactggctggggcgttggtgaaaaccactggggtgggctggcggaacaggcgcgagtgaaaggtgactggc

SEQ ID NO: 651434 - DNA, 75 bp, synthetic construct
  source 1..75: mol_type = other DNA
gctgcttcaccgcaggcggatgccggaccctcactccgtgatcagatcatggcactggatgaggcaaaaggggct

SEQ ID NO: 651435 - DNA, 75 bp, synthetic construct
  source 1..75: mol_type = other DNA
ggtctgtctgttgatgctgtcacgggaacagaggccgccgtttttgaaggtcagtccggcattgaggccgggctg

SEQ ID NO: 651436 - DNA, 75 bp, synthetic construct
  source 1..75: mol_type = other DNA
agcagccggtggcatccacgcagagtgaagccgatcgcattatggcgtgtgaagaagcgaacggtcgtgaacaac

SEQ ID NO: 651437 - DNA, 75 bp, synthetic construct
  source 1..75: mol_type = other DNA
atgctattgacgtgatggcagcggcgctgaatacacacaatacaggaggcattatgccgcaattaactgcaacgg

SEQ ID NO: 651438 - DNA, 75 bp, synthetic construct
  source 1..75: mol_type = other DNA
aggacgtgaacagcttgccacgatgctggcaggacaacagggcatgagcgttgaacaggcccgggcgattctggc

SEQ ID NO: 651439 - DNA, 75 bp, synthetic construct
  source 1..75: mol_type = other DNA
atgcggcgcgccggatgtttgccgaaaaagtggcgatgtataccggtctgtctgttgatgccgtcacgggaacag

SEQ ID NO: 651440 - DNA, 75 bp, synthetic construct
  source 1..75: mol_type = other DNA
tgaaccgtcaggaaatggtgctgattggcatgctgttaattgcctcagttccggcgacctggatgctggtgggat

SEQ ID NO: 651441 - DNA, 75 bp, synthetic construct
  source 1..75: mol_type = other DNA
tgaccgcaatggtggtgcttgacgcacgactgccgctggatgaaaaactgaaagtggatatcagccagacgccag

SEQ ID NO: 651442 - DNA, 75 bp, synthetic construct
  source 1..75: mol_type = other DNA
cgctgatttactcaggggcgcacaaggtggatggcaatcagtttgaagccttaccggcagaggttcgccaggaca

SEQ ID NO: 651443 - DNA, 75 bp, synthetic construct
  source 1..75: mol_type = other DNA
atgcgcgggttttcttttgcgcgctcgggcgcgagatgggggcagcaagtctttcggtaccacaagcagcaggta

SEQ ID NO: 651444 - DNA, 75 bp, synthetic construct
  source 1..75: mol_type = other DNA
gatgcggcgcaccggatgtttgccgaaaaagtggcgatgtatacggggctgtctgtggaagctgtcacggggaca

SEQ ID NO: 651445 - DNA, 75 bp, synthetic construct
  source 1..75: mol_type = other DNA
gctgcgccgcgcttcggggcgatgtggctctgctgctccctggtattttctttcgccccttctatgccctgccgg

SEQ ID NO: 651446 - DNA, 75 bp, synthetic construct
  source 1..75: mol_type = other DNA
tggggactacccagcaccgtgacgccctgtttcggggcccgtctggtgcaggagggtaaccggttgcattacctt

SEQ ID NO: 651447 - DNA, 75 bp, synthetic construct
  source 1..75: mol_type = other DNA
tgacccattgcactcgctgtgatgcctgcattaatgcctgtgaaaacggtatattgcagcgcggcgcaggtggct

SEQ ID NO: 651448 - DNA, 75 bp, synthetic construct
  source 1..75: mol_type = other DNA
gctttacatcaaatggcgttgtggtgcatacccacaaacatggcggcgtagaacgtggcggaagccagacggacg

SEQ ID NO: 651449 - DNA, 75 bp, synthetic construct
  source 1..75: mol_type = other DNA
ctacgcgccggtgatgcccggacgtggtggcggccatcaacaggcgaacaggtgttactgctctgtttaagcgga

SEQ ID NO: 651450 - DNA, 75 bp, synthetic construct
  source 1..75: mol_type = other DNA
ggtatgttcgtcagcggctgcgccgcgcttcggggcgatgtggccccgctgctctcaggtattttctttcgcccc

SEQ ID NO: 651451 - DNA, 75 bp, synthetic construct
  source 1..75: mol_type = other DNA
atcccgattgcaggtggcgacgattttggttccgttactgccgggctggcgcgctgggcagaagtagtatttcgt

SEQ ID NO: 651452 - DNA, 75 bp, synthetic construct
  source 1..75: mol_type = other DNA
gaggcggaaacccgcgcatcgctgccgtttatccgtgacgaactggcaacgttgattagccagcaagggctggaa

SEQ ID NO: 651453 - DNA, 75 bp, synthetic construct
  source 1..75: mol_type = other DNA
attccggttgaaggcggcgacgactttggctccgttactgccggtctggcgcgttgggcggatgtggtctttcgc

SEQ ID NO: 651454 - DNA, 75 bp, synthetic construct
  source 1..75: mol_type = other DNA
ggtcgctgagcgtaatcgtctctatccttctcatccccaaagcaggaagagtatcgataacattattgatgcgct

SEQ ID NO: 651455 - DNA, 75 bp, synthetic construct
  source 1..75: mol_type = other DNA
ctctggtggctacgcagtttaatcctgccataaagctgttctaccagcgtttgcttgccgccggaaaacccaaaa

SEQ ID NO: 651456 - DNA, 75 bp, synthetic construct
  source 1..75: mol_type = other DNA
acttccaggggcttggcggcgatgaagcaaacacccaggcgcaggggattctggaacgcgcggcaaagcgtgccg

SEQ ID NO: 651457 - DNA, 75 bp, synthetic construct
  source 1..75: mol_type = other DNA
acgactggcagatctatgcggtgtagcccaacccactgtttggcgttggctacacggtggcggaattgatgcccg

SEQ ID NO: 651458 - DNA, 75 bp, synthetic construct
  source 1..75: mol_type = other DNA
gttatggacaattcgagtgataattgattttttgatgcttttttatatgagttatcgttgtaataatcttatgaa

SEQ ID NO: 651459 - DNA, 75 bp, synthetic construct
  source 1..75: mol_type = other DNA
aaagaccatattattgaactgttaaatatgtcaccaatatactacgtcgatgcgataaagtctctaatattatta

SEQ ID NO: 651460 - DNA, 75 bp, synthetic construct
  source 1..75: mol_type = other DNA
actggctggccagaccattgacggaacgtcagtgtgaatatgcggcggcggacgtccggtatttattaccgatca

SEQ ID NO: 651461 - DNA, 75 bp, synthetic construct
  source 1..75: mol_type = other DNA
ctgaaagcgcgtctggagaagattgaatccctgcgtcaattaatgcttgaagatggaattgaccctgaagagtta

SEQ ID NO: 651462 - DNA, 75 bp, synthetic construct
  source 1..75: mol_type = other DNA
ctgggcagcacatgttgaggatgggattgcggggttaagaaactatcgctcggtaaaaaattttgtatatggagt

SEQ ID NO: 651463 - DNA, 75 bp, synthetic construct
  source 1..75: mol_type = other DNA
atgggcagcacatgttgaggatggaatcgcttctgttagaaaccatcgaaatttaagagactttttaatttcatt

SEQ ID NO: 651464 - DNA, 75 bp, synthetic construct
  source 1..75: mol_type = other DNA
gtaagggaagggctttagacaggcaggaaatccgggcactggttcaggctgcaaaacagcatccgcaaccggtac

SEQ ID NO: 651465 - DNA, 75 bp, synthetic construct
  source 1..75: mol_type = other DNA
aacggcatcctgacggtgaggcaagggaaggggcgtaggtaccgtgaaattcacgtggcggatgcggtggacaag

SEQ ID NO: 651466 - DNA, 75 bp, synthetic construct
  source 1..75: mol_type = other DNA
gacggcctttaatctcaattgtgtggatgccgaaacgctggcacgtatccggtcagtaaagcgcgtgagcggtga

SEQ ID NO: 651467 - DNA, 75 bp, synthetic construct
  source 1..75: mol_type = other DNA
atcgatccacttgggatcactgactggtcgccgctgaaggcgatattgcgtgatccgtccatcaccaaattcctc

SEQ ID NO: 651468 - DNA, 75 bp, synthetic construct
  source 1..75: mol_type = other DNA
ggttggctcgacttatgcgaataattatttttctagatcaattcttaaacttatgaacgctggcttcatgagatt

SEQ ID NO: 651469 - DNA, 75 bp, synthetic construct
  source 1..75: mol_type = other DNA
atgatagtcgaaccttaaaacttgctatagaaggtgatgtttctgataatgcgaatatttttacagtaattgtag

SEQ ID NO: 651470 - DNA, 75 bp, synthetic construct
  source 1..75: mol_type = other DNA
cctatgatattcgcgggaaattaggcgaagaactgaatgaagatatcgcctggcgtattgggcgcgcctatggcg

SEQ ID NO: 651471 - DNA, 75 bp, synthetic construct
  source 1..75: mol_type = other DNA
gcaaaacgttgggtgaactggtgcgcgaccgcatggcggcgttcccggcgagcggtgaaatcaacagtcatctgg

SEQ ID NO: 651472 - DNA, 75 bp, synthetic construct
  source 1..75: mol_type = other DNA
cttcaaagcgctgaatgtgccggtgaacctgatcaaagtgcacaacaccccggacggaaccttcccgcacggtat

SEQ ID NO: 651473 - DNA, 75 bp, synthetic construct
  source 1..75: mol_type = other DNA
catcgaagttaccgccagccataacccgatggattataacggcatgaaactggtgcgcgaaggggctcgcccgat

SEQ ID NO: 651474 - DNA, 75 bp, synthetic construct
  source 1..75: mol_type = other DNA
gcggatgccggaccctcactccgtgatcagatcatggcactggatgaggcaaaaggggctgaggcgcaggctgaa

SEQ ID NO: 651475 - DNA, 75 bp, synthetic construct
  source 1..75: mol_type = other DNA
tcgctgcggcattcaatgagccgctgcttctggagcccgcctatgcgcgggttttcttttgcgcgctcgggcgtg

SEQ ID NO: 651476 - DNA, 75 bp, synthetic construct
  source 1..75: mol_type = other DNA
ccggtgcgtttgactgcgctgacatgatttaccgcctccggcagcagaagcctgtctgggcgctgtgcaatgaca

SEQ ID NO: 651477 - DNA, 75 bp, synthetic construct
  source 1..75: mol_type = other DNA
tgttcggttatatcaacgtcaaaaacctcacgccgctcaagctggtgatcaactccgggaacggcgcagcgggtc

SEQ ID NO: 651478 - DNA, 75 bp, synthetic construct
  source 1..75: mol_type = other DNA
cagcggcgataccggactgcgcgaggtccagcgtctggcagaagctaacgactttccccccgtcgatgaaaccaa

SEQ ID NO: 651479 - DNA, 75 bp, synthetic construct
  source 1..75: mol_type = other DNA
cagcggcgataccggactgcgcgatgtccagcgtctggcagaagcaaacgactttccccccgtcgatgaaaccaa

SEQ ID NO: 651480 - DNA, 75 bp, synthetic construct
  source 1..75: mol_type = other DNA
ccgatggattacaacggcatgaagctggtgcgcgaaggggctcgcccgatcagcggcgataccggactgcgcgat

SEQ ID NO: 651481 - DNA, 75 bp, synthetic construct
  source 1..75: mol_type = other DNA
atgctatttatggcggagaaatgagcgcacatcactatttccgcgattttgcttattgtgatagtgggatgatcc

SEQ ID NO: 651482 - DNA, 75 bp, synthetic construct
  source 1..75: mol_type = other DNA
tgcaaaaatcattcacgatccgcgtcttacctggaacacaattgatattgtgactaaagccggtggtgttccggt

SEQ ID NO: 651483 - DNA, 75 bp, synthetic construct
  source 1..75: mol_type = other DNA
gcggatgaattaatcaatgcgtcggacgccatcagcgtgatggctgcgacgctgaacacacatgatacaggaggc

SEQ ID NO: 651484 - DNA, 75 bp, synthetic construct
  source 1..75: mol_type = other DNA
ggatgaggcaaaaggggctgaggcgcaggctgaacagctggctgcctgcccgggaatgactgtggagagcgcccg

SEQ ID NO: 651485 - DNA, 75 bp, synthetic construct
  source 1..75: mol_type = other DNA
gctgaaacggacgagtacatggccggaggtaaacgaccggcccgtgtttaccgggtggtgaacggtattgctgta

SEQ ID NO: 651486 - DNA, 75 bp, synthetic construct
  source 1..75: mol_type = other DNA
cgaccggacagttaatgcttgatcacccgatggtcgttgccgacgtgcaaaatccccaccagccgaaaactgcaa

SEQ ID NO: 651487 - DNA, 75 bp, synthetic construct
  source 1..75: mol_type = other DNA
aactccgggaacggcgcagcgggtccggtagttgacgccatcgaagcccgctttaaagccctcggcgcaccggtg

SEQ ID NO: 651488 - DNA, 75 bp, synthetic construct
  source 1..75: mol_type = other DNA
ccgagaacaataaaagcatatgaagatgtatctgatcgcatagatgaattaaataaattgatagaatcatatgtt

SEQ ID NO: 651489 - DNA, 75 bp, synthetic construct
  source 1..75: mol_type = other DNA
gtcctggcggttgcaccacgggcggatgccgggccctcactccgtgatcagattatggatctggatgaggcaaaa

SEQ ID NO: 651490 - DNA, 75 bp, synthetic construct
  source 1..75: mol_type = other DNA
cgcaactatcttcactttatgaacggctcggagctgtggctcatgaactggaatattgtaaaattctgctccctg

SEQ ID NO: 651491 - DNA, 75 bp, synthetic construct
  source 1..75: mol_type = other DNA
gaaaaacgctgggcgaactggtgcgcgatcggatggcggtgttcccggcaagcggtgagatcaacagcaaactgg

SEQ ID NO: 651492 - DNA, 75 bp, synthetic construct
  source 1..75: mol_type = other DNA
cacgccccatcagcggcgacaccggcttgcgagatgtccagcgtctggcagagagtaatgacttctcgcccgtca

SEQ ID NO: 651493 - DNA, 75 bp, synthetic construct
  source 1..75: mol_type = other DNA
cccatcaacaatggtggaccgtattgtgcccgcagtgacagaggatacgctggcgaaaatcgaacaacttaccgg

SEQ ID NO: 651494 - DNA, 75 bp, synthetic construct
  source 1..75: mol_type = other DNA
tgccgctggcagcgttgaaagacagtattataaaaacagcaggagaggggcaggatgaagcgtccacgcccttct

SEQ ID NO: 651495 - DNA, 75 bp, synthetic construct
  source 1..75: mol_type = other DNA
ctggcagtattgaaagacagtattataaagacagcaggaggagagcgggatgaagcggctacgtctttcgggata

SEQ ID NO: 651496 - DNA, 75 bp, synthetic construct
  source 1..75: mol_type = other DNA
aaaagcagcattatcgctgggaaggcgtgcggttggcgtggaactggaagaagagagatttaatcagactgtaac

SEQ ID NO: 651497 - DNA, 75 bp, synthetic construct
  source 1..75: mol_type = other DNA
cagacccgccatacttcaaagtgaaacccgaaggctgggataaccagtggaagggcgatgatgattacctgaaat

SEQ ID NO: 651498 - DNA, 75 bp, synthetic construct
  source 1..75: mol_type = other DNA
ggaaagcctgcgggcgtattttccggccaccgagcgcattctgttcgcggaacattatcaggggccgtatcgtcc

SEQ ID NO: 651499 - DNA, 75 bp, synthetic construct
  source 1..75: mol_type = other DNA
gatgcgtgagcgctttaatgtgctgaaccacattatctgggcgaagccgtccggacgctggaacgggtgcaacaa

SEQ ID NO: 651500 - DNA, 75 bp, synthetic construct
  source 1..75: mol_type = other DNA
aaatgctgcagcagataatcagcgcaagtagtcgtcctggtgatctggttgcggattttttcatggggtcgggtt

SEQ ID NO: 651501 - DNA, 75 bp, synthetic construct
  source 1..75: mol_type = other DNA
ttgccgaacgagggtgattacagaaaactgcaggtgttatttgcacgtgtagcggcagaaaagcatcagcgcgga

SEQ ID NO: 651502 - DNA, 75 bp, synthetic construct
  source 1..75: mol_type = other DNA
aattacagtcgctgtttgcccgggtggcagaagagaaacatcagcggggagaactggaaagagtcccattaccaa

SEQ ID NO: 651503 - DNA, 75 bp, synthetic construct
  source 1..75: mol_type = other DNA
gtgcagttctatcccgggaaacatccgtgcgaaaaaccggcagaaatgctgcagcagataatcagcgcaagtagt

SEQ ID NO: 651504 - DNA, 75 bp, synthetic construct
  source 1..75: mol_type = other DNA
ccgacagtatgcggagctgcagagtgaatataaacatctgcggcggtattttggtgtgacggcgcaggtgccgta

SEQ ID NO: 651505 - DNA, 75 bp, synthetic construct
  source 1..75: mol_type = other DNA
tacggatgtctggatgtataagcctgtacagtattatccgggcaaacacccctgtgaaaaaccggcagatatgtt

SEQ ID NO: 651506 - DNA, 75 bp, synthetic construct
  source 1..75: mol_type = other DNA
tccggacgctggaacgggtgcaataaggaaagtctgcgggcgtattttccggcaacagagcgcattctgtttgca

SEQ ID NO: 651507 - DNA, 75 bp, synthetic construct
  source 1..75: mol_type = other DNA
cagcaaaaaatcgccaccgacttcatcgctgattttgccgaaggcaggatgatgtctctcggcgagtttggcgac

SEQ ID NO: 651508 - DNA, 75 bp, synthetic construct
  source 1..75: mol_type = other DNA
ggaaagcctgcgggcgtatttcccggcaacagagcgcattctgtttgccgaacattatcaggggccataccagcc

SEQ ID NO: 651509 - DNA, 75 bp, synthetic construct
  source 1..75: mol_type = other DNA
cgtgcaactggcgttgagctggataccgggcgttttgaacagactgcgcaggaaatcagggatgtatttagcggg

SEQ ID NO: 651510 - DNA, 75 bp, synthetic construct
  source 1..75: mol_type = other DNA
tgatgcgcgtgctgccctggggataacggcaaaacagattgtggatgccacaggaaagaaaaacatggtgtcgca

SEQ ID NO: 651511 - DNA, 75 bp, synthetic construct
  source 1..75: mol_type = other DNA
gtgttgagcttatcaacgctgactgcctgcaatacctcgctaccctcccagataacaccatcgaccttattgtta

SEQ ID NO: 651512 - DNA, 75 bp, synthetic construct
  source 1..75: mol_type = other DNA
cgtccgggtgacctggttgcagattttttcatggggtcgggttcgacagtcaaagcagcgatggcgctggggcgt

SEQ ID NO: 651513 - DNA, 75 bp, synthetic construct
  source 1..75: mol_type = other DNA
cgcggaacattatcaggggccgtatcgtccgaaagatgccgggtatgcggcgaagggcagtgcactgaaacagca

SEQ ID NO: 651514 - DNA, 75 bp, synthetic construct
  source 1..75: mol_type = other DNA
gcaacagaacgcattctgtttgcagaacattatcaggggccataccagcccaaaaatgacggctatgcggcaaag

SEQ ID NO: 651515 - DNA, 75 bp, synthetic construct
  source 1..75: mol_type = other DNA
tttccgtatcagctgccgttccgtatacggatgtctggacgcacaggcccgtgcagtattatccgggcaaacatc

SEQ ID NO: 651516 - DNA, 75 bp, synthetic construct
  source 1..75: mol_type = other DNA
ccggcaatatgccagcctgcaggaggagtataaatccctgcggcgttatttttccgtatcagctgctgttccgta

SEQ ID NO: 651517 - DNA, 75 bp, synthetic construct
  source 1..75: mol_type = other DNA
ggaaagcctgcgggcgtatttcccggcaacagaacgcattctgtttgctgaacattatcagggaccatatcagcc

SEQ ID NO: 651518 - DNA, 75 bp, synthetic construct
  source 1..75: mol_type = other DNA
gaactggaaaagtcccattaccaactggtcagcacatacagtgagctgaaccggcagtatacggaactgcagagt

SEQ ID NO: 651519 - DNA, 75 bp, synthetic construct
  source 1..75: mol_type = other DNA
gaccagtgtctggcgcagttctggcgggtgctgaaacctgccggaagtctttacctgttctgtggtcatcgcctg

SEQ ID NO: 651520 - DNA, 75 bp, synthetic construct
  source 1..75: mol_type = other DNA
tggtcagcacatacagtgaacttaaccggcaatatgccagcctgctggaggagtacaaatctttgcggcgttatt

SEQ ID NO: 651521 - DNA, 75 bp, synthetic construct
  source 1..75: mol_type = other DNA
cctggaatttatccagaccttaccggaaaactctgtcgatctgatagtcacagacccgccatgctttaaagtgaa

SEQ ID NO: 651522 - DNA, 75 bp, synthetic construct
  source 1..75: mol_type = other DNA
tcgacttcacctccaacctgcatttagatcgtgaagcggttccagctggttttgaaaccttcaaattaaccttaa

SEQ ID NO: 651523 - DNA, 75 bp, synthetic construct
  source 1..75: mol_type = other DNA
aggtgttgcggcaggtaaagcgcagatccctgttgtcaccggtaacggtgagtttgcggcggtggcggaaattac

SEQ ID NO: 651524 - DNA, 75 bp, synthetic construct
  source 1..75: mol_type = other DNA
aggtgttgcggcaggtaaagcgcagatccctgtggttaccggtaatggtgagtttgcggcagtggcggagatcac

SEQ ID NO: 651525 - DNA, 75 bp, synthetic construct
  source 1..75: mol_type = other DNA
gatccgtcaacgggaaccattgctgtgaaagatatggtgatcactgtgacgggggttaaggctggaaaagtgagt

SEQ ID NO: 651526 - DNA, 75 bp, synthetic construct
  source 1..75: mol_type = other DNA
agatccctgtggtgagcggaaatggtcagttcgccgcagtgctgaagtcaccgttactgaagcgggcgctgcagg

SEQ ID NO: 651527 - DNA, 75 bp, synthetic construct
  source 1..75: mol_type = other DNA
cgcgtgaagcctttgcgaccattgctgtcgcagctgataaagtcgacgcactgaaatctctggtgaatacctatc

SEQ ID NO: 651528 - DNA, 75 bp, synthetic construct
  source 1..75: mol_type = other DNA
caccacgctgaccgtggcattccagccggaaggcgtaaccgacaagagcttccgtgcggtgtcttcggataaaac

SEQ ID NO: 651529 - DNA, 75 bp, synthetic construct
  source 1..75: mol_type = other DNA
tggaaccggaaaatgcaacggataagacattcagggcgatttccaccgatccatcaaaagccaccattagcgtga

SEQ ID NO: 651530 - DNA, 75 bp, synthetic construct
  source 1..75: mol_type = other DNA
tttgagccggaaagtgcaaccgacaagacgttcagagcggtttccgccgatccgtcaacgggaaccattgctgtg

SEQ ID NO: 651531 - DNA, 75 bp, synthetic construct
  source 1..75: mol_type = other DNA
cggtaaaaggttccggcaccacgctctgggtgtacaccggcactggcgatgcctatgcaaaaccgttgtcagatg

SEQ ID NO: 651532 - DNA, 75 bp, synthetic construct
  source 1..75: mol_type = other DNA
agagtataccaacaccttcagactgcactggctggcggtaaaacgtgaacatatgatctggcgctgcgataacga

SEQ ID NO: 651533 - DNA, 75 bp, synthetic construct
  source 1..75: mol_type = other DNA
cttgataactatggcattgctgtgcgtaccggtcatcactgcgcgatgccattaatggcgtattacaacgtaccc

SEQ ID NO: 651534 - DNA, 75 bp, synthetic construct
  source 1..75: mol_type = other DNA
gggccgactttccggtgctttctcgtgaggtaaacggtttgccgctggcttatctcgacagcgccgccagtgcgc

SEQ ID NO: 651535 - DNA, 75 bp, synthetic construct
  source 1..75: mol_type = other DNA
gcaacagagcacatactgtttgctgaacattaccaggggccatatcggccaaaaaatgatggctatgtggcaaag

SEQ ID NO: 651536 - DNA, 75 bp, synthetic construct
  source 1..75: mol_type = other DNA
gctgccggtacatccgtggcagtggcagcaaaaaatcgccaccgacttcatcgctgattttgccgaaggcaggat

SEQ ID NO: 651537 - DNA, 75 bp, synthetic construct
  source 1..75: mol_type = other DNA
tctttatgggttctggttcaacggtgaaagctgcaatagcacttggccgtcgggctatcggtgtagaactggaag

SEQ ID NO: 651538 - DNA, 75 bp, synthetic construct
  source 1..75: mol_type = other DNA
tcattacctatgaaatgtgaggacgatatgccaacaccaaatcctctggcaccggtgaaaggggccgggaccaca

SEQ ID NO: 651539 - DNA, 75 bp, synthetic construct
  source 1..75: mol_type = other DNA
acggcagaaccctacgatgataactacctggatgatgaagacgcggactggactgcgaccgggcaggggcagaag

SEQ ID NO: 651540 - DNA, 75 bp, synthetic construct
  source 1..75: mol_type = other DNA
atctgtttgatgagaaaacccgcctgctggcgattactcacgtgtctaatgtgctggggacggaaaatccgctgc

SEQ ID NO: 651541 - DNA, 75 bp, synthetic construct
  source 1..75: mol_type = other DNA
gtggatcactattgcaccgttcgtgacaatgactggcagcgactggctaaggtgaaggatctgacgccgggcgag

SEQ ID NO: 651542 - DNA, 75 bp, synthetic construct
  source 1..75: mol_type = other DNA
gattaactggctgacactgcgcgcgggcaatgcccgcacatggtggaaaccatcagaaggtgagcaggtggtgct

SEQ ID NO: 651543 - DNA, 75 bp, synthetic construct
  source 1..75: mol_type = other DNA
gaatacccggacggcggctggtttgaatacgaacccgccaccgggcgctggtatgtcaggggcatcaaatcaatg

SEQ ID NO: 651544 - DNA, 75 bp, synthetic construct
  source 1..75: mol_type = other DNA
gaatacctatcacgaatgccgcatcaatgatgaatggggcggtgtggaaatcattaaacgccctgagtgggcacg

SEQ ID NO: 651545 - DNA, 75 bp, synthetic construct
  source 1..75: mol_type = other DNA
agcgaagtagtgatcaatggtggtgttacccagggcggcggtgcaatgagttctaacggaattgtggttgatgca

SEQ ID NO: 651546 - DNA, 75 bp, synthetic construct
  source 1..75: mol_type = other DNA
tgcgccttatcaccaatctgatccgcacaggggtagtcaccgaagtggaccgggaaaactggctttgcagggtga

SEQ ID NO: 651547 - DNA, 75 bp, synthetic construct
  source 1..75: mol_type = other DNA
aacgggatcgtggttgatgcgcatcagcatactggcgtcctgaaaggcggcgatacaaccggaggcccggtatga

SEQ ID NO: 651548 - DNA, 75 bp, synthetic construct
  source 1..75: mol_type = other DNA
gcccgctgacaatatcaccgtgaaaaccagtgagtttgtactggaggctgaccgcacgcgtattaacagcgaagt

SEQ ID NO: 651549 - DNA, 75 bp, synthetic construct
  source 1..75: mol_type = other DNA
ggggcatcaaatcaatggtcattgagaccgctgacaagatcaccttgaaaaccagtgagtttgtactggaggctg

SEQ ID NO: 651550 - DNA, 75 bp, synthetic construct
  source 1..75: mol_type = other DNA
ggggcatcaaatcaatggtcattgagaccgctgacaagatcaccatgaaaaccagtgagtttgttctggaggctg

SEQ ID NO: 651551 - DNA, 75 bp, synthetic construct
  source 1..75: mol_type = other DNA
gaacacctatcacgaatgccgcatcagcgatgaatggggcggcgtggaaattattaaacgccctgaatgggcacg

SEQ ID NO: 651552 - DNA, 75 bp, synthetic construct
  source 1..75: mol_type = other DNA
gaaagacgttgccgacatgggtatgacggtgatggatgccgagcagggccggaaactgaaactgatgcgcgacag

SEQ ID NO: 651553 - DNA, 75 bp, synthetic construct
  source 1..75: mol_type = other DNA
ggccgctgacaatatcaccttgaaaaccagtgagtttgtactggaggctgaccgcacgcgcattaacagcgaagt

SEQ ID NO: 651554 - DNA, 75 bp, synthetic construct
  source 1..75: mol_type = other DNA
tcacccagggcggcggcgcaatgagttctaacgggatcgtggttgatgaccatgagcatactggtgttctgaaag

SEQ ID NO: 651555 - DNA, 75 bp, synthetic construct
  source 1..75: mol_type = other DNA
tgcgccgctgggcagtcgtctgccgctgcatgcttccggagcgggcaaggcgctgctttatccgctggcggaaga

SEQ ID NO: 651556 - DNA, 75 bp, synthetic construct
  source 1..75: mol_type = other DNA
cgacgcttgtggatatgcccaccttgctgaaggacctggaacaagcgcgtgaactgggctataccgtagataaag

SEQ ID NO: 651557 - DNA, 75 bp, synthetic construct
  source 1..75: mol_type = other DNA
ccaaccaggcaatatctcaggcacccggtgataacccgacagtcgtctccggactgacggctgaattttcagcgt

SEQ ID NO: 651558 - DNA, 75 bp, synthetic construct
  source 1..75: mol_type = other DNA
acaggcgcaaccgtaaccagcataaatcaggctgcggctaaaatggcgcgggcaggaatcctggtcattgatggt

SEQ ID NO: 651559 - DNA, 75 bp, synthetic construct
  source 1..75: mol_type = other DNA
gacgtcggcggatgcctgcgtgacagagcatcctgacggcggctggtttgaatatgaacccgccaccgggcgctg

SEQ ID NO: 651560 - DNA, 75 bp, synthetic construct
  source 1..75: mol_type = other DNA
tggaaaccgcgtttgccctgcctgcggtctactcaaaccagtttccgccaccttcagactctgaggacggtaacg

SEQ ID NO: 651561 - DNA, 75 bp, synthetic construct
  source 1..75: mol_type = other DNA
tcaaatcaatggtcattgaggccgctgacaatatcaccatgaaaaccagtgagtttgtgctggaggctgaccgca

SEQ ID NO: 651562 - DNA, 75 bp, synthetic construct
  source 1..75: mol_type = other DNA
gcccagcaagtcactaccgttgtcatagtcgtcccgttgagcagatcaacctcttaacttacaggatgacaacgg

SEQ ID NO: 651563 - DNA, 75 bp, synthetic construct
  source 1..75: mol_type = other DNA
tcgtgcgtgaagagcacttgtggtcggtagcgcgttatatgccgggaagtctgggcgaactggacagcctgggct

SEQ ID NO: 651564 - DNA, 75 bp, synthetic construct
  source 1..75: mol_type = other DNA
cttttaaaaccagtgagtttgtggtggaggctgacaatacgcggattaacagtgatgtggtgattaacggcggtg

SEQ ID NO: 651565 - DNA, 75 bp, synthetic construct
  source 1..75: mol_type = other DNA
ggggcatcaaatcaatggtcattgagaccgctgacaatatcaccatgaaaaccagtgagtttgtactggaggctg

SEQ ID NO: 651566 - DNA, 75 bp, synthetic construct
  source 1..75: mol_type = other DNA
ataaaccggtgcagtactatccagggaaacatccgtgcgaaaaaccggcagaaatgctgcagcagataatcagcg

SEQ ID NO: 651567 - DNA, 75 bp, synthetic construct
  source 1..75: mol_type = other DNA
ttttcatggggtcaggttcaacggtaaaagcggcgctgtcactgggacgtcgggcgattggtgttgagctggaga

SEQ ID NO: 651568 - DNA, 75 bp, synthetic construct
  source 1..75: mol_type = other DNA
gaactggaaaagccacaccaccagctggtcagcacatacagtgaactgaaccggcaatacgccagcctgctggaa

SEQ ID NO: 651569 - DNA, 75 bp, synthetic construct
  source 1..75: mol_type = other DNA
gaactggaaaaaccacatcaccagctggtcagcgcatacagtgaactgaaccgacaatatgccagcctgctggca

SEQ ID NO: 651570 - DNA, 75 bp, synthetic construct
  source 1..75: mol_type = other DNA
gcggcagataatcgaggccagcagtcgtcccggtgatttggtcgctgacttttttatggggtcaggttccacaat

SEQ ID NO: 651571 - DNA, 75 bp, synthetic construct
  source 1..75: mol_type = other DNA
cagacccgccatactttaaagtgaaacccgaaggctgggataaccagtggaagggggacgctgattacctgaaat

SEQ ID NO: 651572 - DNA, 75 bp, synthetic construct
  source 1..75: mol_type = other DNA
ggaaagcctgcgggcgtatttcccggcaacagagcgcattctgtttgctgaacattatcaggggccatatcagcc

SEQ ID NO: 651573 - DNA, 75 bp, synthetic construct
  source 1..75: mol_type = other DNA
cctgcattttattcagtccctgcctgatgattccattgacctgattgttaccgatccgccgtacttcaaggtgaa

SEQ ID NO: 651574 - DNA, 75 bp, synthetic construct
  source 1..75: mol_type = other DNA
acggcaaaacagattgcagatgtcacaggaaagaaaaacatggtgtcgcactggttcagtgccagtcagtggcag

SEQ ID NO: 651575 - DNA, 75 bp, synthetic construct
  source 1..75: mol_type = other DNA
tggtcagcacatacagtgagctgaaccggcagtacacggaactgctgagtgaatataaaaatttgcggcggtatt

SEQ ID NO: 651576 - DNA, 75 bp, synthetic construct
  source 1..75: mol_type = other DNA
agcaatggcgctggggcgtcgggccttaggtgttgagcttgagtcagagcggtttaatcagacagtgaaagagat

SEQ ID NO: 651577 - DNA, 75 bp, synthetic construct
  source 1..75: mol_type = other DNA
cgggcgttaggtgttgagcttgagacagagcggtttaatcagacggtgaaagaggtaagtgaactggtggtgggg

SEQ ID NO: 651578 - DNA, 75 bp, synthetic construct
  source 1..75: mol_type = other DNA
aaccatatcatctgggcgaagccatccggacgctggaacgggtgcaacaaggaaagcctgcgtgcgtatttcccg

SEQ ID NO: 651579 - DNA, 75 bp, synthetic construct
  source 1..75: mol_type = other DNA
atgatacaggccatgaacgcacaattaaccgaaatcatgcgccttatcaccaacctgatccgcacaggtgtagtc

SEQ ID NO: 651580 - DNA, 75 bp, synthetic construct
  source 1..75: mol_type = other DNA
gaactggaaaagccccaccaccagctggtggatacgtatgcctctctgaaccgacagtatgcggagctgcagagt

SEQ ID NO: 651581 - DNA, 75 bp, synthetic construct
  source 1..75: mol_type = other DNA
ccggaaagaaaaacatggtgtcgcactggttcagtgccagccagtggcagttaccgaacgaggatgattacagaa

SEQ ID NO: 651582 - DNA, 75 bp, synthetic construct
  source 1..75: mol_type = other DNA
cgtcgccggatgagcaggtggtggtgctgagcatggggggcaatctggaaaccgcttttgtgctgcccgccatct

SEQ ID NO: 651583 - DNA, 75 bp, synthetic construct
  source 1..75: mol_type = other DNA
cacgcgtattaatagtgaagtagtgatcaatggcggcgttacccagggcggcggtgcgatgagttctaacgggat

SEQ ID NO: 651584 - DNA, 75 bp, synthetic construct
  source 1..75: mol_type = other DNA
aaacgggcgaccttgaaaccaactggatcagctggctgaccctgcgtgccgggaatgcccgcacatggtggaaac

SEQ ID NO: 651585 - DNA, 75 bp, synthetic construct
  source 1..75: mol_type = other DNA
ataacgtcaaaacagatagcggaagccaccggaaagaaaaacatggcttcgcactggtttggtaccagtcagtgg

SEQ ID NO: 651586 - DNA, 75 bp, synthetic construct
  source 1..75: mol_type = other DNA
accagtgtctggcgcagttctggcgggtactgaagcctgccggaagtctttacctgttctgtggtcatcgcctgg

SEQ ID NO: 651587 - DNA, 75 bp, synthetic construct
  source 1..75: mol_type = other DNA
ccgacaatatgtcagcctgcaggaagagtataaaaccctgcggcgttatttttccgtatcggctgcggttcctta

SEQ ID NO: 651588 - DNA, 75 bp, synthetic construct
  source 1..75: mol_type = other DNA
ctggttcagtgccagtcagtggcagctaccgaacgaaagcgattatctgaaattacagtcgctgtttgcccgggt

SEQ ID NO: 651589 - DNA, 75 bp, synthetic construct
  source 1..75: mol_type = other DNA
cggtgcagtactatccagggaaacatccgtgcgaaaaaccggcagaaatgctgcggcagataatctgcgcgagca

SEQ ID NO: 651590 - DNA, 75 bp, synthetic construct
  source 1..75: mol_type = other DNA
gggcgtgagctaaaacagcacgtcatggccccgctgatttcttactttcgtgatgcgcgtgaatcactgggaata

SEQ ID NO: 651591 - DNA, 75 bp, synthetic construct
  source 1..75: mol_type = other DNA
tcttccgcctgcatctggtgttgggaatgaccatcttcctgctcttcccgttcactagactggtgcatgtgtgga

SEQ ID NO: 651592 - DNA, 75 bp, synthetic construct
  source 1..75: mol_type = other DNA
gaccatcgcggtgaaattgtctataacaccgaaacgggagatgccaaagaaatcacagcaccaggcgactatccc

SEQ ID NO: 651593 - DNA, 75 bp, synthetic construct
  source 1..75: mol_type = other DNA
gaaacacgagaatatatttctacatcaactgaatatcttgctgttggcgtcggtatcccagcattttcttgtttg

SEQ ID NO: 651594 - DNA, 75 bp, synthetic construct
  source 1..75: mol_type = other DNA
agagcctggatgacacacagggctggctgtactggctggcgcggctggcggcggcgcaggtggcaccacaggcgg

SEQ ID NO: 651595 - DNA, 75 bp, synthetic construct
  source 1..75: mol_type = other DNA
agaaacaacccgacttaacgccgtgctggattacattgacgcggtgacggtaacagataccagcaccgcgccgga

SEQ ID NO: 651596 - DNA, 75 bp, synthetic construct
  source 1..75: mol_type = other DNA
ttagatgccccaggcgcatacaaagctggttatgcaatctgccgatctgcagattttaactcatgggaatatgtg

SEQ ID NO: 651597 - DNA, 75 bp, synthetic construct
  source 1..75: mol_type = other DNA
gcacaacacggtaccgcagtagaagcggcagaagcacagcgccagtcactgattgatgcagcaatggcttccatc

SEQ ID NO: 651598 - DNA, 75 bp, synthetic construct
  source 1..75: mol_type = other DNA
agactggcggcagtacatgtctcaccacagacagaacgctgcgggcgactggcggagcaggcagaccagctgtga

SEQ ID NO: 651599 - DNA, 75 bp, synthetic construct
  source 1..75: mol_type = other DNA
aattgaaaaaattgagaattatcagccgcaggcgttggcgattctgggtaagcaggcgtatgaacagggattcag

SEQ ID NO: 651600 - DNA, 75 bp, synthetic construct
  source 1..75: mol_type = other DNA
cggtttaaaccgcatttcactggagaaactggtggaggcttatcgggagttgaatgaggcgctggtagtgcgtgg

SEQ ID NO: 651601 - DNA, 75 bp, synthetic construct
  source 1..75: mol_type = other DNA
aagagagcctggatgacacgcagggctggttgtactggctggcgcagttggcggcagtatatgtctcaccacaga

SEQ ID NO: 651602 - DNA, 75 bp, synthetic construct
  source 1..75: mol_type = other DNA
acggcagctcatgtctcaccacagacagaacgctgcggacgactggtggagcagaccgaccagttgtgggcgcta

SEQ ID NO: 651603 - DNA, 75 bp, synthetic construct
  source 1..75: mol_type = other DNA
tgccatggccgggctggccggacaaaatgctgacgcaggcgcagcaggggcagggctggttctggcagcagaaca

SEQ ID NO: 651604 - DNA, 75 bp, synthetic construct
  source 1..75: mol_type = other DNA
gattgatgctgctatggcttccatcagtctgattcagctgaaattacaggccgggcggaaactgacgcaggcaga

SEQ ID NO: 651605 - DNA, 75 bp, synthetic construct
  source 1..75: mol_type = other DNA
tccgcaaaatggttgccgatatgggcttcgatattgagattgtcggcgtaccgattatgcgcgcgaaagacggtc

SEQ ID NO: 651606 - DNA, 75 bp, synthetic construct
  source 1..75: mol_type = other DNA
atttagttttcgcgccttcggtaaaagagatctacccgaacggtactgaaacccacacctatgttgatgttcccg

SEQ ID NO: 651607 - DNA, 75 bp, synthetic construct
  source 1..75: mol_type = other DNA
cattttcgcggcgtttcgactattgtcagcaagctgttcaacctggtccagccggacatcgcctgcttcggtgaa

SEQ ID NO: 651608 - DNA, 75 bp, synthetic construct
  source 1..75: mol_type = other DNA
gtcgtcgtcagtattttcgttaacccgatgcagtttgaccgcccggaagatctggcacgttatccacggaccttg

SEQ ID NO: 651609 - DNA, 75 bp, synthetic construct
  source 1..75: mol_type = other DNA
gccatcggtaaaagagatctacccgaacggtacagaaacccacacctatgttgatgttcccggcctttccactat

SEQ ID NO: 651610 - DNA, 75 bp, synthetic construct
  source 1..75: mol_type = other DNA
aaggattttcagcaactggcgctgatccgcaaaatggttgctgatatgggctttgatattgagattatcggcgtg

SEQ ID NO: 651611 - DNA, 75 bp, synthetic construct
  source 1..75: mol_type = other DNA
tcagatcgacggcgacaaggcggttgtcaataacgacggtgacaatgccatcagcaacggcggcaccggcacgca

SEQ ID NO: 651612 - DNA, 75 bp, synthetic construct
  source 1..75: mol_type = other DNA
aggagcttgccgacgccccgatgacgctcgtaacagacgtcggcaaacagtggttaacctcgtttcttaaaaaga

SEQ ID NO: 651613 - DNA, 75 bp, synthetic construct
  source 1..75: mol_type = other DNA
tgtgcaaatcacacagccgggagattacccttctgatacgacggtaaaacagccagctaccatctatgatatctg

SEQ ID NO: 651614 - DNA, 75 bp, synthetic construct
  source 1..75: mol_type = other DNA
cgaagccaaagcccgcgccgatgtggtcgtcgtcagtattttcgttaacccaatgcagttcgaccgcccggaaga

SEQ ID NO: 651615 - DNA, 75 bp, synthetic construct
  source 1..75: mol_type = other DNA
ttgacggtaaagattccaccggtacggaaatcaacggtaataacgggaaagtgattcaggacggcgatctggatg

SEQ ID NO: 651616 - DNA, 75 bp, synthetic construct
  source 1..75: mol_type = other DNA
gtggataacaaaggcggcatgaccgtcatcgatccggattcgattggcattcagatcgacggcgacaaggcggtt

SEQ ID NO: 651617 - DNA, 75 bp, synthetic construct
  source 1..75: mol_type = other DNA
tgctggattatcgttgtggcgtcaccaaactggtagaccgtccaacggtgcaagccaatgaagtttcaaagcagg

SEQ ID NO: 651618 - DNA, 75 bp, synthetic construct
  source 1..75: mol_type = other DNA
atgacacccagaaactgaaaaacatgggtgagcagattgatacccgcgacagctctaacctgcgtaaatactcca

SEQ ID NO: 651619 - DNA, 75 bp, synthetic construct
  source 1..75: mol_type = other DNA
ggctggatgacagtaggcttgctgcttactgcgtttgttgcctggtatgcggctaattccgcggccgttatggag

SEQ ID NO: 651620 - DNA, 75 bp, synthetic construct
  source 1..75: mol_type = other DNA
aagcccagacatcaacacggcaatgacttcacgtttactgctggatctgacctacggtgtactggccgatatcga

SEQ ID NO: 651621 - DNA, 75 bp, synthetic construct
  source 1..75: mol_type = other DNA
gttaaatattacaggcgtgtccattacagactcaattcactgtctgaaacgataaagcgcacacagggcggtgtt

SEQ ID NO: 651622 - DNA, 75 bp, synthetic construct
  source 1..75: mol_type = other DNA
cactctttttataattcttaaatttgctggatataaaaacattcattacataatacctggtgtttaccattatca

SEQ ID NO: 651623 - DNA, 75 bp, synthetic construct
  source 1..75: mol_type = other DNA
gaaaaaacaaataatgtaagtgtgtatcgttatgccaaaaaaggtttttttcggtcattatataattcgtttaga

SEQ ID NO: 651624 - DNA, 75 bp, synthetic construct
  source 1..75: mol_type = other DNA
gcatgcaccggaacggctgggatacggggtgctgtgggccctcatggtgttgctgatgaatatgcatgacgtgag

SEQ ID NO: 651625 - DNA, 75 bp, synthetic construct
  source 1..75: mol_type = other DNA
ctggtgaccaaccgtggtccagggacattttcacaggtatttgatttcgtcgaaaaagacgggtttatggaatcg

SEQ ID NO: 651626 - DNA, 75 bp, synthetic construct
  source 1..75: mol_type = other DNA
ttcgtcaggcaaccaaacgctggagtggcctggatacgctggcgcggcgggctccatacttctcaagcgtactga

SEQ ID NO: 651627 - DNA, 75 bp, synthetic construct
  source 1..75: mol_type = other DNA
ggacccggatcctcaatgctgccagagagattttttcagaaaatggatttcacagtgcctcgatgaaagccatct

SEQ ID NO: 651628 - DNA, 75 bp, synthetic construct
  source 1..75: mol_type = other DNA
ttggcgattgatcagatcgcacaatccgggctgagttccctcaaagtgatctactattccgcgcagctatttagc

SEQ ID NO: 651629 - DNA, 75 bp, synthetic construct
  source 1..75: mol_type = other DNA
atggggaatgaacctggcccggcacgcggaaatacgccagtcgcagctgaacagcctgtggggctgggcgctggt

SEQ ID NO: 651630 - DNA, 75 bp, synthetic construct
  source 1..75: mol_type = other DNA
tcctgcagactatgaacgcactggaatatgaagatatccgggctgccggaagtgatgaacgccgtgagctgacat

SEQ ID NO: 651631 - DNA, 75 bp, synthetic construct
  source 1..75: mol_type = other DNA
atatgaagatatccgggctgccggaagtgatgaacgtcgtgaactcacacatgccgtgatgcgggagctggatgc

SEQ ID NO: 651632 - DNA, 75 bp, synthetic construct
  source 1..75: mol_type = other DNA
acgcatcagtgcctcgctgggggtaagcagcagcgaggaaaccggtgattatgattttgaacaactccagtcatt

SEQ ID NO: 651633 - DNA, 75 bp, synthetic construct
  source 1..75: mol_type = other DNA
attaattagcagttccttacgtgcgcaggacgttgccgggcgggtcggtggtgaggagttttgtgtgattctgcc

SEQ ID NO: 651634 - DNA, 75 bp, synthetic construct
  source 1..75: mol_type = other DNA
gagtacggcagcgagtttggcggatttttccccgtccaggtccgtttcacgcctgcccacgaacgtttccacctg

SEQ ID NO: 651635 - DNA, 75 bp, synthetic construct
  source 1..75: mol_type = other DNA
gtctcttgccgcaacgctggatgcggaaggctatcgtgtcggggacatcatccacatcctgatggcggaaggggg

SEQ ID NO: 651636 - DNA, 75 bp, synthetic construct
  source 1..75: mol_type = other DNA
tcacacgctggcgctcgccgcgacacttgatgcgcagggatacagtgttaacgacatcattcatattttgatggc

SEQ ID NO: 651637 - DNA, 75 bp, synthetic construct
  source 1..75: mol_type = other DNA
gagttctaccgtattctgaaaacccaaaataaatcacagctaagcagttggttcaatcgagtccacgaaagcggt

SEQ ID NO: 651638 - DNA, 75 bp, synthetic construct
  source 1..75: mol_type = other DNA
agccattcactggcactggcggcgtcactggacgcgcaggggtacagcgtcagtgacatcatccatatcctgatg

SEQ ID NO: 651639 - DNA, 75 bp, synthetic construct
  source 1..75: mol_type = other DNA
agtgatgaacgtcgtgagctgacacacgccgtgatgcgggaactggatgcgccggacaactggacgatgaacggc

SEQ ID NO: 651640 - DNA, 75 bp, synthetic construct
  source 1..75: mol_type = other DNA
tcatctcaatatattaacgacctggcaaatggcgatatctgcgtcgctatcggctgggcgggcgatgtctggcag

SEQ ID NO: 651641 - DNA, 75 bp, synthetic construct
  source 1..75: mol_type = other DNA
tcctctcagtacataaacgatctggcaaacggtgatatctgcgtcgctatcggctgggcgggtgatgtctggcag

SEQ ID NO: 651642 - DNA, 75 bp, synthetic construct
  source 1..75: mol_type = other DNA
tttgcggtggttcaggtgcagcggcggtttgcaccggaagccgtcagccattcactggcactggcggcgtcactg

SEQ ID NO: 651643 - DNA, 75 bp, synthetic construct
  source 1..75: mol_type = other DNA
aagcctggctgaatgaagagaatctcttatcgctgccgtttgctcgtcgggctgaaaaagttgtgttcctgccgc

SEQ ID NO: 651644 - DNA, 75 bp, synthetic construct
  source 1..75: mol_type = other DNA
actaccggcagttaagcctccagttgccaaaagggagcgatccggtgtatcagaaagaagatatagccaaaaaat

SEQ ID NO: 651645 - DNA, 75 bp, synthetic construct
  source 1..75: mol_type = other DNA
cacggcgagcagttcctgaaagcgattgatatcgtgctggtggcggtcagtgaacatattgaacgtttcgctgcc

SEQ ID NO: 651646 - DNA, 75 bp, synthetic construct
  source 1..75: mol_type = other DNA
tcaaagcgagctagttgatagccttaatagcggctttaccgctgataaaatggagctagcaggatgcggtgtatc

SEQ ID NO: 651647 - DNA, 75 bp, synthetic construct
  source 1..75: mol_type = other DNA
taagcctggcatcgaacaggttgcgctgatggaagcagcagtcagcaccaaagcaacgctggcagaaatgctggc

SEQ ID NO: 651648 - DNA, 75 bp, synthetic construct
  source 1..75: mol_type = other DNA
atcagttacgacagctttttcagcagcacacggctcgctggcagcacgagttacctgacctcaccaaaccacagt

SEQ ID NO: 651649 - DNA, 75 bp, synthetic construct
  source 1..75: mol_type = other DNA
atcgggatgctatttttaatgcgttagagtctgttacttatgatgagtgggcaaagcatctagaaaagatctcta

SEQ ID NO: 651650 - DNA, 75 bp, synthetic construct
  source 1..75: mol_type = other DNA
ggggattgcaattgtcacaggtattgtttcttcttacataggggatgatgagttgagcaaacttaatgagttgtt

SEQ ID NO: 651651 - DNA, 75 bp, synthetic construct
  source 1..75: mol_type = other DNA
gaacgggatgctatttttaatgcgttagagtctgttaattatgatgagttatctaagaatttaacgaagatatca

SEQ ID NO: 651652 - DNA, 75 bp, synthetic construct
  source 1..75: mol_type = other DNA
tgacctccggcgatgcgcacctggcggtcaatttcccgctgttgctggaaaaagggcttgatggtctgcgcgaga

SEQ ID NO: 651653 - DNA, 75 bp, synthetic construct
  source 1..75: mol_type = other DNA
acaacattgtttcccgcgaaacattgctggaggcgaagaaacatccggatcaataccgcgatctggtggtacgcg

SEQ ID NO: 651654 - DNA, 75 bp, synthetic construct
  source 1..75: mol_type = other DNA
ccgccggtctgtaccgaacgagcacaacactataccgagatgtatcaacaacatctcgataagccgatcccggta

SEQ ID NO: 651655 - DNA, 75 bp, synthetic construct
  source 1..75: mol_type = other DNA
cagccgctacaggcgacggcaatctactgcgggctgaactggctgccaccgtttgccatgcactgcacctttatt

SEQ ID NO: 651656 - DNA, 75 bp, synthetic construct
  source 1..75: mol_type = other DNA
gggcgcaacggctcaagcgtgttttcaatatcgacatcgagacctgcagcggctgcggcggcgccatgaaagtca

SEQ ID NO: 651657 - DNA, 75 bp, synthetic construct
  source 1..75: mol_type = other DNA
ctcgaacggctgtgccggtacatcagccgcccggcggtatccgagaagcggctgtcgttaacacgaggcggcaac

SEQ ID NO: 651658 - DNA, 75 bp, synthetic construct
  source 1..75: mol_type = other DNA
gatatcgcggcatttaacgacctgaaagccgctggggtggaatgcttcgttcagggcgttccgacagaacctgct

SEQ ID NO: 651659 - DNA, 75 bp, synthetic construct
  source 1..75: mol_type = other DNA
gtgggcagctacttgggcatgtgcgaggcaaaacagaaactgaaccgccccgggtttcctggagagtgttttatc

SEQ ID NO: 651660 - DNA, 75 bp, synthetic construct
  source 1..75: mol_type = other DNA
ggaactgttgaacgtaatgcgcaagggcgattccatcaatattgcccgtttcactattgggcgccgttgttgggc

SEQ ID NO: 651661 - DNA, 75 bp, synthetic construct
  source 1..75: mol_type = other DNA
gcttccacggggtgttcgcacccaacagtcggcaccgggcgttggtcacgccggcaaaacggggcaggggcaaca

SEQ ID NO: 651662 - DNA, 75 bp, synthetic construct
  source 1..75: mol_type = other DNA
ctgtttctcgacggtgtgtatgtcgagcaatcccacggctcagcgcgtttccgctgggtcaaggcgccgaccagc

SEQ ID NO: 651663 - DNA, 75 bp, synthetic construct
  source 1..75: mol_type = other DNA
aaagccgaaaccagcgggaccagggcgttacccgaaagccgggcgccaccggctgagctgctcctgggtctgttt

SEQ ID NO: 651664 - DNA, 75 bp, synthetic construct
  source 1..75: mol_type = other DNA
cagccgctacaggcgacggcaatctactgcgggctgaactggctgccaccgtttgccatgcatgcactgcacctt

SEQ ID NO: 651665 - DNA, 75 bp, synthetic construct
  source 1..75: mol_type = other DNA
ccgtttcagctgcgtttcctgtttgccagccggcccgagatcatggggtgggtgctgggcatcgtttaccgcgtc

SEQ ID NO: 651666 - DNA, 75 bp, synthetic construct
  source 1..75: mol_type = other DNA
atgtgcaacgggaatttgaagaatctgcgtttcctgtttgccagccggcccgagatcatggggtgggtgctgggc

SEQ ID NO: 651667 - DNA, 75 bp, synthetic construct
  source 1..75: mol_type = other DNA
tgaacaacccatgcgtcagtgggtgttgagcttcccgtttcagctgcgtttcctgtttgccagccggcccgagat

SEQ ID NO: 651668 - DNA, 75 bp, synthetic construct
  source 1..75: mol_type = other DNA
gcgatggcatgacagcaaacgcacaggccgtcccggttgggtcgtcatgtgggatggctggttcagacttcagga

SEQ ID NO: 651669 - DNA, 75 bp, synthetic construct
  source 1..75: mol_type = other DNA
atggctaagaaaatcaaatgtgcttaccacctttgcaataaagaaattcaagaaagcaaaagtattaaaatacca

SEQ ID NO: 651670 - DNA, 75 bp, synthetic construct
  source 1..75: mol_type = other DNA
atgactaagaaaataaaatgtgcttaccacctttgcgataaagaagttgaagaaagcaatagtattaaaagacca

SEQ ID NO: 651671 - DNA, 75 bp, synthetic construct
  source 1..75: mol_type = other DNA
ttacttttgatgcttcattgcaaagtttattaatgctcacattcttttcctctatcgggctaagggtaatgactc

SEQ ID NO: 651672 - DNA, 75 bp, synthetic construct
  source 1..75: mol_type = other DNA
tctctgtcggcgtggctacgccactcaggtagggcgaataactaacccactgctcacctcctttggtgatgatga

SEQ ID NO: 651673 - DNA, 75 bp, synthetic construct
  source 1..75: mol_type = other DNA
aaatatcggctctcgcgactgaatgccacgctatagcatctgagtttgatgttggcgatgaacgaaccgagatgt

SEQ ID NO: 651674 - DNA, 75 bp, synthetic construct
  source 1..75: mol_type = other DNA
atggtgacgactaagaaaataaaatgtgcttaccacctttgcaaaaaagacgttgaagaaagcaaaactatagaa

SEQ ID NO: 651675 - DNA, 75 bp, synthetic construct
  source 1..75: mol_type = other DNA
tgaacaaagttattttgttacggtcaggggcagggacggtaaagaaaccacacactgggatagtgatttacaaaa

SEQ ID NO: 651676 - DNA, 75 bp, synthetic construct
  source 1..75: mol_type = other DNA
gagtgtgaaggtgagccgtgcctgtttgtaaatcgccatgatgagtttgctgcgacatgccgattgaaaaatttt

SEQ ID NO: 651677 - DNA, 75 bp, synthetic construct
  source 1..75: mol_type = other DNA
ttgttaatcggcaggatgagttcgccgccacctgtcgactgaaaaattttggtgtggcaattgccgaacctttct

SEQ ID NO: 651678 - DNA, 75 bp, synthetic construct
  source 1..75: mol_type = other DNA
gcatctatgaaaaagcgctccccgccggggatgaacttaatcaatctatattattgaataataagtatatattta

SEQ ID NO: 651679 - DNA, 75 bp, synthetic construct
  source 1..75: mol_type = other DNA
tttttttatcattatattagatcggtgttagataataaatttataatctttcatgaaccatttccattggctgat

SEQ ID NO: 651680 - DNA, 75 bp, synthetic construct
  source 1..75: mol_type = other DNA
tttattggcctgatgttggaggcgtagaaacagtagtccaacagcacgctaattttttaactacgaaagggaata

SEQ ID NO: 651681 - DNA, 75 bp, synthetic construct
  source 1..75: mol_type = other DNA
agataacaggaaggaaattttcagagttaggtgagtatctttattcaggaaatgtaataaaactcagtcagttat

SEQ ID NO: 651682 - DNA, 75 bp, synthetic construct
  source 1..75: mol_type = other DNA
taccgggcaccaggcattcctgacagcagaagctctgaccagtatttctcagactacgctgcaaaacttaagcaa

SEQ ID NO: 651683 - DNA, 75 bp, synthetic construct
  source 1..75: mol_type = other DNA
cgcgacgtatcgtcagccattacgagcgacgctggctgatagaggaataccacaaggcgtggaaaagtggtggta

SEQ ID NO: 651684 - DNA, 75 bp, synthetic construct
  source 1..75: mol_type = other DNA
cgcggcgtatcgtcagccactacgaacgacgcaggctgatagaggaatatcataaggcgtggaaaagtggtggta

SEQ ID NO: 651685 - DNA, 75 bp, synthetic construct
  source 1..75: mol_type = other DNA
caatatcgacattgccgccgaacaggaggcgctgtctcgtgccgatctgatcgtctggcagcacccgatgcagtg

SEQ ID NO: 651686 - DNA, 75 bp, synthetic construct
  source 1..75: mol_type = other DNA
caatatcgatattgccgccgagcaggaggcgctgtctcgcgccgatctgatcgtctggcagcacccgatgcagtg

SEQ ID NO: 651687 - DNA, 75 bp, synthetic construct
  source 1..75: mol_type = other DNA
gctcaggttgaaggtgcgtaccgcctgatgcgtaacccgtctatatccccggaagccattgccgaagccggattt

SEQ ID NO: 651688 - DNA, 75 bp, synthetic construct
  source 1..75: mol_type = other DNA
taccagggcagaaaaccgtgaatgatgcgctaagcccggtgattgataaggccgcgcgagagattgcgcgtgtgg

SEQ ID NO: 651689 - DNA, 75 bp, synthetic construct
  source 1..75: mol_type = other DNA
atgaccgacgatattctgacgcatcctgcgatgaatacccagccattccagccatcagtgggggggacaaaacca

SEQ ID NO: 651690 - DNA, 75 bp, synthetic construct
  source 1..75: mol_type = other DNA
cagagtttgttgctacatcgattatattcagatgaagtacttcagagaaatggaacacttatcccgacaccacta

SEQ ID NO: 651691 - DNA, 75 bp, synthetic construct
  source 1..75: mol_type = other DNA
atttggtacaaatacctggttctatgtcttccgccagcaacctggtcatgaaggtgtaacgcagcaaacgctgac

SEQ ID NO: 651692 - DNA, 75 bp, synthetic construct
  source 1..75: mol_type = other DNA
caaccaccggatgagcctcgccacagaagccgtacagcagcgtatcgatgccattggtaaaaatctgccgccacc

SEQ ID NO: 651693 - DNA, 75 bp, synthetic construct
  source 1..75: mol_type = other DNA
gtggcacagggctggctggtcaggcgggggcaggcaggcacctttgtcagcgaacagatacatccacaaaaatca

SEQ ID NO: 651694 - DNA, 75 bp, synthetic construct
  source 1..75: mol_type = other DNA
tgttactcgccacggtgtggaaattttacctgtgcctgttgatgacaacggactggatgtcgcaagtggaatgca

SEQ ID NO: 651695 - DNA, 75 bp, synthetic construct
  source 1..75: mol_type = other DNA
gatcccggctttccactgattcgcccgattgtcactcgccatgatgtggaaattttgcctgtgccggttgatgac

SEQ ID NO: 651696 - DNA, 75 bp, synthetic construct
  source 1..75: mol_type = other DNA
tgcgtgaggcgattgttgattaccttcgtgtttctcgtggtattgattgtcagccagagcaggtatttattactc

SEQ ID NO: 651697 - DNA, 75 bp, synthetic construct
  source 1..75: mol_type = other DNA
gtcagttaaaaacggctattgagcaaggggagctgaagcctggcgcgcggttgccttccagtcgaacctggtcgc

SEQ ID NO: 651698 - DNA, 75 bp, synthetic construct
  source 1..75: mol_type = other DNA
ctgataacaccagcacaccaaagtccgctgggtgtggcgctctctttagcgcgcaggcatcagatactggaatgg

SEQ ID NO: 651699 - DNA, 75 bp, synthetic construct
  source 1..75: mol_type = other DNA
gccgccggcagcagtggtcaggacctgatggcaagcggtaacaccacggttaaggcgaccttcggtaaggagtcc

SEQ ID NO: 651700 - DNA, 75 bp, synthetic construct
  source 1..75: mol_type = other DNA
gctgctggcggtcaggacctcatgcagtccggtaatgacaccgtcaaagccacctttggtaaggactccagtatt

SEQ ID NO: 651701 - DNA, 75 bp, synthetic construct
  source 1..75: mol_type = other DNA
attaaagaaccgactcgcgctggatatctgcacgctgatatttaatctgcaaacctccggtattgcgctgaaatt

SEQ ID NO: 651702 - DNA, 75 bp, synthetic construct
  source 1..75: mol_type = other DNA
ttcctgcctgtcatgttctgtagcggcattcgctggcttcgtcggttatgcggtaatgaacctcgcggtaaactt

SEQ ID NO: 651703 - DNA, 75 bp, synthetic construct
  source 1..75: mol_type = other DNA
tagcagccatgatgtcataaccctgatcccggtcctgggcaaccccgtgttgcacggctatctttacctggatga

SEQ ID NO: 651704 - DNA, 75 bp, synthetic construct
  source 1..75: mol_type = other DNA
gtgcttctgcgcccgtcaaaaagaaatcgtttttttctaaattcactcgtctgaatatgcttcgcctggttcgtg

SEQ ID NO: 651705 - DNA, 75 bp, synthetic construct
  source 1..75: mol_type = other DNA
aggattgctgctctcgtttaccaatatcgttagcgaaagcatggcgcagcaggtggcacaacaattacgcgatgc

SEQ ID NO: 651706 - DNA, 75 bp, synthetic construct
  source 1..75: mol_type = other DNA
ctaacgaatttcgtgatctgcttgttgagaaattcaaagacagcaaagtagaaacctttattggtactttcaccg

SEQ ID NO: 651707 - DNA, 75 bp, synthetic construct
  source 1..75: mol_type = other DNA
ccagaagtcactggcagaatggatcgaagactgggccgactaccttgtgggctttgatgctaatggtgacgccat

SEQ ID NO: 651708 - DNA, 75 bp, synthetic construct
  source 1..75: mol_type = other DNA
aatcgcttccgtttccgtggtgcactttccactgccagcatcgatgactttacccgttattctaaagatcttgca

SEQ ID NO: 651709 - DNA, 75 bp, synthetic construct
  source 1..75: mol_type = other DNA
gaaccaggtcacgcagataacaccgccaccctcaaactgaaaaagacagcaccgttttctgctctgttgtctgtt

SEQ ID NO: 651710 - DNA, 75 bp, synthetic construct
  source 1..75: mol_type = other DNA
gcccgggtaagccgctggttgatgccctggagaataaccagggatgaagaaaattatgcttcccgatttattagt

SEQ ID NO: 651711 - DNA, 75 bp, synthetic construct
  source 1..75: mol_type = other DNA
ctggaagcggtgcaggaagaaatggctaacgaatttcgtgatctgcttgttgagaaattcaaagacagcaaagta

SEQ ID NO: 651712 - DNA, 75 bp, synthetic construct
  source 1..75: mol_type = other DNA
caacccggcggatttgcgcattgatactttccgctcttcaggagcgggaggtcagcacgttaacaccaccgattc

SEQ ID NO: 651713 - DNA, 75 bp, synthetic construct
  source 1..75: mol_type = other DNA
gtacccgtactgtggcagaacacactggcagatttcatccgtgaggggcatttctggcggcatctgaagaaaatg

SEQ ID NO: 651714 - DNA, 75 bp, synthetic construct
  source 1..75: mol_type = other DNA
gattgcccggagatgacattgctcttgcgcgtaaagccagtgcagccgggctggcggtgcaagcgctgagtgact

SEQ ID NO: 651715 - DNA, 75 bp, synthetic construct
  source 1..75: mol_type = other DNA
attgaagcaaaccagaccgctgattttgaagataatgacttcagcggcaaacgctccctgatggagtctgtcgaa

SEQ ID NO: 651716 - DNA, 75 bp, synthetic construct
  source 1..75: mol_type = other DNA
tgcctctggtgctgacgcctacgctactggttatgctgctggtttttggcaatatttcctggcaaaactatattg

SEQ ID NO: 651717 - DNA, 75 bp, synthetic construct
  source 1..75: mol_type = other DNA
atgatgagcattgatgccctgacagccatagagaactttgccagcggtattttcagtgcaggcatggagtttctc

SEQ ID NO: 651718 - DNA, 75 bp, synthetic construct
  source 1..75: mol_type = other DNA
caatttttatggtctggagtcctctcttgaagaggcgaaagcgcataacgggctgccgaccaaaaccgaaacgcg

SEQ ID NO: 651719 - DNA, 75 bp, synthetic construct
  source 1..75: mol_type = other DNA
tggcgtaacagtagctcggctatagcttcatatgaacgcaattatccagaggaaggcggctttgctcaggggacg

SEQ ID NO: 651720 - DNA, 75 bp, synthetic construct
  source 1..75: mol_type = other DNA
tggtctgtatgacgatgccggaacactgattgcggtcgctaacatggcagaaagctataagcctgaactggctga

SEQ ID NO: 651721 - DNA, 75 bp, synthetic construct
  source 1..75: mol_type = other DNA
tgtaatcacggggcttggtattgtcggtgaagtcgatggtgatgaccccgcagtattcagaccaatacaaaaata

SEQ ID NO: 651722 - DNA, 75 bp, synthetic construct
  source 1..75: mol_type = other DNA
acagcaccagtgaaaagcaggctgcaacgccaaaggcagtaaaagcagcctatgacaatgctgagaaacgtctgc

SEQ ID NO: 651723 - DNA, 75 bp, synthetic construct
  source 1..75: mol_type = other DNA
cgaatgataaagccgttggatggaactggagtagcggagcctataacgcaactactggtggggcatcaacgttaa

SEQ ID NO: 651724 - DNA, 75 bp, synthetic construct
  source 1..75: mol_type = other DNA
cctacgattttgtgccgggcagtctgataaccgttcggctggataatatgaccaatattcccgacggtatggact

SEQ ID NO: 651725 - DNA, 75 bp, synthetic construct
  source 1..75: mol_type = other DNA
agttttattgaaaaaagcttacgcgcttactactcggatgttttgtggtcggtagaaaccagcgaaggtgacggc

SEQ ID NO: 651726 - DNA, 75 bp, synthetic construct
  source 1..75: mol_type = other DNA
tgaagcgtcgtctgttcagcccacgcgtgcgtgcaaccactaccggagcggatatcctgatcctgtcgctgctcg

SEQ ID NO: 651727 - DNA, 75 bp, synthetic construct
  source 1..75: mol_type = other DNA
attcctgcggggagtatacccataacaacaattccttcagatcatgaaatgagactggatgttataagcaaatgg

SEQ ID NO: 651728 - DNA, 75 bp, synthetic construct
  source 1..75: mol_type = other DNA
acggcaaggacaattaacggcgtaaaatttgacggctcggcaaatattgaagcgtttccgccaggtgttccgctg

SEQ ID NO: 651729 - DNA, 75 bp, synthetic construct
  source 1..75: mol_type = other DNA
aatgttggcgttaccagcctgacgtttatgaaaaataatggcgaaatgccgcttgatgccgacctgaatacattt

SEQ ID NO: 651730 - DNA, 75 bp, synthetic construct
  source 1..75: mol_type = other DNA
catccggacggcagtgaaatgatgaagctggtgggctgggcgcaaagcatcgtcactttccagggcggtgcatct

SEQ ID NO: 651731 - DNA, 75 bp, synthetic construct
  source 1..75: mol_type = other DNA
gacatggacacatcaggcaccgtccgggtgtgtatattccggcattattgttcaggataccggctcaaactctgc

SEQ ID NO: 651732 - DNA, 75 bp, synthetic construct
  source 1..75: mol_type = other DNA
cttccctcagatggccctggctgctggcggtcaggacctcatgcagtccgggaatgacaccgtcaaagccacctt

SEQ ID NO: 651733 - DNA, 75 bp, synthetic construct
  source 1..75: mol_type = other DNA
gaccttcggtaaggactccagtgttgttaaatgggttgttctggctgaagttctggtcggtgcagtcatgtacat

SEQ ID NO: 651734 - DNA, 75 bp, synthetic construct
  source 1..75: mol_type = other DNA
ggggttgcttcaacggcgggccagttactgggatcagtattgattgacgtattaattccatcgctgggcaatacc

SEQ ID NO: 651735 - DNA, 75 bp, synthetic construct
  source 1..75: mol_type = other DNA
gcatctttaaattagaaggtaatcggcttggacgcccctaccatcgcctgccgaccctgtttacggggaattttg

SEQ ID NO: 651736 - DNA, 75 bp, synthetic construct
  source 1..75: mol_type = other DNA
aacaagccggcactgattaaagagatcatccgctctctgccgttgaccctgaacgtcaaaatcgccgagctgtcg

SEQ ID NO: 651737 - DNA, 75 bp, synthetic construct
  source 1..75: mol_type = other DNA
gatgttcttcccgcaactggcgatggccgctggcagcagtggtcaggacctgatggcaagtggtaacaccacggt

SEQ ID NO: 651738 - DNA, 75 bp, synthetic construct
  source 1..75: mol_type = other DNA
gtcagcacgttaacaccaccgattcggcaattcgtattactcacttgccgaccggattgttgttgaatgtcagga

SEQ ID NO: 651739 - DNA, 75 bp, synthetic construct
  source 1..75: mol_type = other DNA
acacgtgttgtccagaccatgcagaaaggggtgatgtatgagaaagcagggcacgtaattaccgggcttggtatt

SEQ ID NO: 651740 - DNA, 75 bp, synthetic construct
  source 1..75: mol_type = other DNA
acagcaccagtgaaaagctggcagcaacgccaaaggcagtaaaagcagcctatgacaatgctgagaaacgtctgc

SEQ ID NO: 651741 - DNA, 75 bp, synthetic construct
  source 1..75: mol_type = other DNA
atgatctcatatcagggacttgttcgcaccttccctatgcaatcagcggtgaatggtcaattaggtcactggtta

SEQ ID NO: 651742 - DNA, 75 bp, synthetic construct
  source 1..75: mol_type = other DNA
gctattgctgtctggtttactttgcgatcgctttggtatcggtgtcgacgagaaaaaatactttaccccttatcg

SEQ ID NO: 651743 - DNA, 75 bp, synthetic construct
  source 1..75: mol_type = other DNA
ccttatggatgcttgccacgattcttgcgggtatgctctcccctatgcaatcagcggtgaatggtcaattaggtc

SEQ ID NO: 651744 - DNA, 75 bp, synthetic construct
  source 1..75: mol_type = other DNA
aacgagcggtgatcctggtagccgcctggcttggcgatgctcgcctgatcgacaacaaaatcgtagaactggcgt

SEQ ID NO: 651745 - DNA, 75 bp, synthetic construct
  source 1..75: mol_type = other DNA
tcgatgttccaggcctttccaccatgctggaaggtgccagccgtccaggacattttcgcggcgtttcgactattg

SEQ ID NO: 651746 - DNA, 75 bp, synthetic construct
  source 1..75: mol_type = other DNA
gtgttaattatcgaaactctgccgctgctgcgtcagcaaatccgccgcctgcgtatggaaggcaagcgtgtggcg

SEQ ID NO: 651747 - DNA, 75 bp, synthetic construct
  source 1..75: mol_type = other DNA
gagtgtcataagattaggggcaatggtagatatgtatcgtaaaatttacaaagggattaatattatctaccctaa

SEQ ID NO: 651748 - DNA, 75 bp, synthetic construct
  source 1..75: mol_type = other DNA
gtccccaaccagcatgggggcgatgctgagttgctatcgccagcaatataaaggactcggcattatttatccgaa

SEQ ID NO: 651749 - DNA, 75 bp, synthetic construct
  source 1..75: mol_type = other DNA
ttgcaggaagtctctgaaaacagcaaacgggcagtgattctggtagccgcctggcttggcgatgctcgcctgatc

SEQ ID NO: 651750 - DNA, 75 bp, synthetic construct
  source 1..75: mol_type = other DNA
cgccgactaacggtgcgtgcgggattatcccggctgtgctggcgtactacgataagtttatccgcgaagtgaacg

SEQ ID NO: 651751 - DNA, 75 bp, synthetic construct
  source 1..75: mol_type = other DNA
gagacgatgtatgaaaccggcaaagatatgaacgataaataccgcgaaacatcacgcggaggactggccattaaa

SEQ ID NO: 651752 - DNA, 75 bp, synthetic construct
  source 1..75: mol_type = other DNA
atgtcagaaataccaattactatgaccagtgcgggggcgcagcctacgccacccaatgatttgctcgcgaatctt

SEQ ID NO: 651753 - DNA, 75 bp, synthetic construct
  source 1..75: mol_type = other DNA
gccggacatcgcctgcttcggtgaaaaagattttcagcaactggcgctaatccgcaaaatggttgccgatatggg

SEQ ID NO: 651754 - DNA, 75 bp, synthetic construct
  source 1..75: mol_type = other DNA
agcaggatagcgcaccggttgaagttccttatccgtatagttcagcagccgatctgcaaaaacattgtcaggaaa

SEQ ID NO: 651755 - DNA, 75 bp, synthetic construct
  source 1..75: mol_type = other DNA
tggcgctgcgccgtaccagcgagccgcgcgtctgcctcgataaagttatcgagaccatgtacgaaacaggtaaag

SEQ ID NO: 651756 - DNA, 75 bp, synthetic construct
  source 1..75: mol_type = other DNA
gctacgttgggcggacgtgtggtgttagcgttacgaatctaagggctatgattggcagctatcgcaagcaataca

SEQ ID NO: 651757 - DNA, 75 bp, synthetic construct
  source 1..75: mol_type = other DNA
ggcggtgaatcgctgatattatcggaagtcgcagagccgccagcacaaatgattgattcactcaccaccttattt

SEQ ID NO: 651758 - DNA, 75 bp, synthetic construct
  source 1..75: mol_type = other DNA
tgacccttggcgaaacgctcttccttaatgccaaactgccgaccggtaaagaatttatgccgcgtgaaatcagtt

SEQ ID NO: 651759 - DNA, 75 bp, synthetic construct
  source 1..75: mol_type = other DNA
taactggtagtggattaggtgtattgttctggttgataatagctgtattcattgtaatttttaatcaaaaaaatg

SEQ ID NO: 651760 - DNA, 75 bp, synthetic construct
  source 1..75: mol_type = other DNA
agcaaggcgtggccaatgcctggctgttcatccccagcgctattttgctcggtgcgcttcacggactggagccag

SEQ ID NO: 651761 - DNA, 75 bp, synthetic construct
  source 1..75: mol_type = other DNA
gctaatgaagacattggcgcagaactagcaacattccgcgatcaggtgttggcagaagtggatattcctgatatt

SEQ ID NO: 651762 - DNA, 75 bp, synthetic construct
  source 1..75: mol_type = other DNA
aggtgaaaaaaggggaaaaaggaattagccactttattaccgaacatattgcgccattctatgaacgtcgctggg

SEQ ID NO: 651763 - DNA, 75 bp, synthetic construct
  source 1..75: mol_type = other DNA
ggcaggagggtaagattgaaggttggcaggaggggaagttggagggtttgcagaaaggcaaagtagaaggtatgc

SEQ ID NO: 651764 - DNA, 75 bp, synthetic construct
  source 1..75: mol_type = other DNA
tcaattggctggatgaatttgacgatccgcaacttgcccgacagctctataccgaggcatttccgttggtggata

SEQ ID NO: 651765 - DNA, 75 bp, synthetic construct
  source 1..75: mol_type = other DNA
acccgttttattcaggagattgccgaacgttcaccactacaaaaggagagattaatgactattgctgaacggctg

SEQ ID NO: 651766 - DNA, 75 bp, synthetic construct
  source 1..75: mol_type = other DNA
attgttgtttgcttatattttaatgaagttggacgtggtccacaccgtattatccaatattataagcatggtgcc

SEQ ID NO: 651767 - DNA, 75 bp, synthetic construct
  source 1..75: mol_type = other DNA
gattctaatcactttaactgtgttttttactagctatgaggtgataaatgatgctaataaacatggggtggtacc

SEQ ID NO: 651768 - DNA, 75 bp, synthetic construct
  source 1..75: mol_type = other DNA
cggtatcgcactacagggctggacaactcgtctcgaaagaggagtttgaggagctacgtgtcggtcgctgtgagt

SEQ ID NO: 651769 - DNA, 75 bp, synthetic construct
  source 1..75: mol_type = other DNA
atttacaaatctgtaccggatatttcgaaactgaccaacgatgtaagcaatccatccggtgcggcagtggaaaaa

SEQ ID NO: 651770 - DNA, 75 bp, synthetic construct
  source 1..75: mol_type = other DNA
caattaatcaaatccatgcccttatttctgctcagggtgttaatgaaattatcagtaagattggtgccgacgcag

SEQ ID NO: 651771 - DNA, 75 bp, synthetic construct
  source 1..75: mol_type = other DNA
taactcccagaagtcactggcagaatggattgaagactgggccgactaccttgtgggctttgatgctaatggtga

SEQ ID NO: 651772 - DNA, 75 bp, synthetic construct
  source 1..75: mol_type = other DNA
tgtgcttaacctaggtactattgatgaaccaggtcacgcagataacaccgccactctcaaactgaaaaagacagc

SEQ ID NO: 651773 - DNA, 75 bp, synthetic construct
  source 1..75: mol_type = other DNA
atggataaaacggtacctggggcatgagaatttttctgctccggagtctgtattaaccactccggtaaggggaga

SEQ ID NO: 651774 - DNA, 75 bp, synthetic construct
  source 1..75: mol_type = other DNA
aaatccagaacttctgtctgcacggcacggtcggggccggtaagtcggaggttatccgtcgtctggccaactatg

SEQ ID NO: 651775 - DNA, 75 bp, synthetic construct
  source 1..75: mol_type = other DNA
tgtacttaacctgggtactattgatgaaccaggtcacgcagataacaccgccactctcaaactgaaaaagacagc

SEQ ID NO: 651776 - DNA, 75 bp, synthetic construct
  source 1..75: mol_type = other DNA
acacctggcgtgcctcctcaagccagatgttggataaacgcggaatggtgctgtggtcgaacttgttccatatcg

SEQ ID NO: 651777 - DNA, 75 bp, synthetic construct
  source 1..75: mol_type = other DNA
tgctgtggcgcaggctgacaaatcagcgcgtgcgtgccacttccactacgccggatattatcatcatgagcattt

SEQ ID NO: 651778 - DNA, 75 bp, synthetic construct
  source 1..75: mol_type = other DNA
ccggatattatcatcatgagcattttgctgatccagtgtctgctgggggctaagtaccataccgttttcagcaca

SEQ ID NO: 651779 - DNA, 75 bp, synthetic construct
  source 1..75: mol_type = other DNA
actaatggtgacaccattcaggcaacaaaagcggctgcggcggtccgtaaaatcacgattgaagcgaaccagacc

SEQ ID NO: 651780 - DNA, 75 bp, synthetic construct
  source 1..75: mol_type = other DNA
tggatgtacgcgtggttccttccggtggcggtaaaacagcagatggcgatgatcctcggcggtatttgcggggtg

SEQ ID NO: 651781 - DNA, 75 bp, synthetic construct
  source 1..75: mol_type = other DNA
ttcacccgcctggtgcatgtgtggagtgcgccgtttgaatatttcacccgcaggtatcagattgtgcgctcacgg

SEQ ID NO: 651782 - DNA, 75 bp, synthetic construct
  source 1..75: mol_type = other DNA
tagaatatatttcctggggagttccgggtaaaagccggctcatgtttgactcacgggaacaggcacaggaagtgc

SEQ ID NO: 651783 - DNA, 75 bp, synthetic construct
  source 1..75: mol_type = other DNA
gtcttatatttctatttcgacgctacttagctttttcttcgtctatgttttttatgttggattcgttaagtttta

SEQ ID NO: 651784 - DNA, 75 bp, synthetic construct
  source 1..75: mol_type = other DNA
tgatcaaagaaggttatgaaaaaaaattcagaatagacgataaattattaaacatcaggacaggtcttcatgatg

SEQ ID NO: 651785 - DNA, 75 bp, synthetic construct
  source 1..75: mol_type = other DNA
tttttaaatatttgaagctggacaatagcccatcagagcctatcagtgttacgagcgacacgtttgcgttacctg

SEQ ID NO: 651786 - DNA, 75 bp, synthetic construct
  source 1..75: mol_type = other DNA
tggtggacgttgcgcgtctccagcgggtctttgcccggcttcagtttgtgggtggtggaaaagacctggcccgca

SEQ ID NO: 651787 - DNA, 75 bp, synthetic construct
  source 1..75: mol_type = other DNA
ggattatggcgatacctgggcgctgattggatcaaatgagccttatgcggccattcatcagtggggtggcctgcc

SEQ ID NO: 651788 - DNA, 75 bp, synthetic construct
  source 1..75: mol_type = other DNA
gtggcgtacccgtaagggatacatgcccggcaaaatcctgacgctgaacggcgatctggcccgacgcctgaccac

SEQ ID NO: 651789 - DNA, 75 bp, synthetic construct
  source 1..75: mol_type = other DNA
ctaaaaaagcgttactggcttccttcgtggcgtcaatcatggcattaccggcgaaagccggtatccctgtcatcg

SEQ ID NO: 651790 - DNA, 75 bp, synthetic construct
  source 1..75: mol_type = other DNA
gctttaacagcaatgttgaatgtaccgcgtctgaaattagtgcactgcgtgaagctgaacagaacagctcagagg

SEQ ID NO: 651791 - DNA, 75 bp, synthetic construct
  source 1..75: mol_type = other DNA
cactggcgtcgttcggccagcagatatgtgtgggataacagggatgttatgtgaactgaactgtgttttgttaac

SEQ ID NO: 651792 - DNA, 75 bp, synthetic construct
  source 1..75: mol_type = other DNA
tggatgcgtttaatcatgaactgacaccggtgaaggccagcagtatccacccggatttgacgttatcccgggccg

SEQ ID NO: 651793 - DNA, 75 bp, synthetic construct
  source 1..75: mol_type = other DNA
gctttaacagtaatgttgaatgtactgcggatgaaattagcgcactgcgcaaagctgaacagaacagctctgagg

SEQ ID NO: 651794 - DNA, 75 bp, synthetic construct
  source 1..75: mol_type = other DNA
aacatgctcaaaaatacagtcgcacctgcggcctatatctgggatcaggccaattcgaccatcaacaaattgttg

SEQ ID NO: 651795 - DNA, 75 bp, synthetic construct
  source 1..75: mol_type = other DNA
agaaaatgccggatttaacggtgctgtggaactggaaattttctcaccgtactggtggcagcaagatattaacag

SEQ ID NO: 651796 - DNA, 75 bp, synthetic construct
  source 1..75: mol_type = other DNA
ctggtgtgatgaactcgatcccgatggtgagtttggtctcggcgtggcggtggatgtctaccacgtctggtggga

SEQ ID NO: 651797 - DNA, 75 bp, synthetic construct
  source 1..75: mol_type = other DNA
aggcggcgaatttaattgatgaagtggtagaaaaagaacaggtggaaagctggatggcgaaccagttagcgcagc

SEQ ID NO: 651798 - DNA, 75 bp, synthetic construct
  source 1..75: mol_type = other DNA
aaacaagggattcgccagttactgccacattcgaaagaggtcggcgtgccgattgcgctggagccgctacacccg

SEQ ID NO: 651799 - DNA, 75 bp, synthetic construct
  source 1..75: mol_type = other DNA
tgaaaacgccggatttaatggcgctattgaactggaaatattctcgccgtactggtggcagaaagatattaacag

SEQ ID NO: 651800 - DNA, 75 bp, synthetic construct
  source 1..75: mol_type = other DNA
atgagcgtttccggtttgtgccgtagcacttactacaccgcgccgacactggcggaacgcaaactggcgattgat

SEQ ID NO: 651801 - DNA, 75 bp, synthetic construct
  source 1..75: mol_type = other DNA
gcctgctgcaaaaaagctatcgtttcggcagcgattctggcattggtcagttagctgcggcgatcaaccgtggtg

SEQ ID NO: 651802 - DNA, 75 bp, synthetic construct
  source 1..75: mol_type = other DNA
ttgcccgcaatgacagcgcgcttgggttgttcaatggtgatatcgggattgcgctggatcgcgggcagggaacgc

SEQ ID NO: 651803 - DNA, 75 bp, synthetic construct
  source 1..75: mol_type = other DNA
caacgcagggtttaccgcagagcgtgccgggcaattaagtcgtctgacaggaagtcacgttccagcgggaagtgg

SEQ ID NO: 651804 - DNA, 75 bp, synthetic construct
  source 1..75: mol_type = other DNA
attagaccgcgatgcggcggcatatattgtggaaccgatgttgtacaacccgcgtgtgggtgccgtaaccggtaa

SEQ ID NO: 651805 - DNA, 75 bp, synthetic construct
  source 1..75: mol_type = other DNA
tattgtgtacgttatgtttactgcaatttattgtcagcctgatgatcgagaatcgctatgagcataatctgactt

SEQ ID NO: 651806 - DNA, 75 bp, synthetic construct
  source 1..75: mol_type = other DNA
aatgagactgggaaggatgcagaagcatctgtttgttcagggaaaaagaaccggtgacaaggaatacgcagaagt

SEQ ID NO: 651807 - DNA, 75 bp, synthetic construct
  source 1..75: mol_type = other DNA
acgaaaatacgctacagttggcgataatcagtcgcattaaactgtattatcgtccggcgaaattagcattgccgc

SEQ ID NO: 651808 - DNA, 75 bp, synthetic construct
  source 1..75: mol_type = other DNA
gcgtttgtcgcaattattgcgctgatcaacggcattatcggcggaattggcggctggtttggtttcgccaatgcc

SEQ ID NO: 651809 - DNA, 75 bp, synthetic construct
  source 1..75: mol_type = other DNA
acagcgtgacctgattgatatggcagcgaatctggtcgcaaaatcgcgcactgattttatgctggatgccgcatg

SEQ ID NO: 651810 - DNA, 75 bp, synthetic construct
  source 1..75: mol_type = other DNA
atgtttcgaaaaataaaaattcgcaaaatgactctcaaccgggcgctggacaaatacctgaaaaccgtttccgtc

SEQ ID NO: 651811 - DNA, 75 bp, synthetic construct
  source 1..75: mol_type = other DNA
cctggatattgcggaacatcgcctgccgcaggacgggcaattcactgtcgaactggcaggaaacgccgtctcatt

SEQ ID NO: 651812 - DNA, 75 bp, synthetic construct
  source 1..75: mol_type = other DNA
gtacgcaaactttgcccgcattgtcgccgacagcaaggggagccaatccatattccagacaatgtatggccgtcg

SEQ ID NO: 651813 - DNA, 75 bp, synthetic construct
  source 1..75: mol_type = other DNA
cttaatttctcgccatatctgcaaacgggtggcactctggatgctaaaaccgtggcgattatttctttcgcgttg

SEQ ID NO: 651814 - DNA, 75 bp, synthetic construct
  source 1..75: mol_type = other DNA
ccacttaccgggatcagcgtttggctcaaattaacccacgaacagggcgtcaaatcaccggaaacaccgtccgtc

SEQ ID NO: 651815 - DNA, 75 bp, synthetic construct
  source 1..75: mol_type = other DNA
ttatcgtgacgcctcctctgtttgcgatgaagggaaaaaaagagaataccttgcgtattcttgatgcaacaaata

SEQ ID NO: 651816 - DNA, 75 bp, synthetic construct
  source 1..75: mol_type = other DNA
caaataatgatgaaaatagcacctatttaattcaatcatgggtggaaaatgccgatggtgtaaaggatggtcgtt

SEQ ID NO: 651817 - DNA, 75 bp, synthetic construct
  source 1..75: mol_type = other DNA
tcgatgccaggcgtaaacagaccagcaaaatttccccttattttgttccctaccctgcaactgtcgggtgcagaa

SEQ ID NO: 651818 - DNA, 75 bp, synthetic construct
  source 1..75: mol_type = other DNA
atgtttcgaaaaataaaaattcgcaaaatgactctcaaccgggcgctggacaaatatctgaaaactgtttccgtc

SEQ ID NO: 651819 - DNA, 75 bp, synthetic construct
  source 1..75: mol_type = other DNA
gttctaaatatctgcgcgcggttgttaatgaagagctgatttcgacggcgaaagtaacaaataaaaaatcgctgg

SEQ ID NO: 651820 - DNA, 75 bp, synthetic construct
  source 1..75: mol_type = other DNA
cacagaggcggcatctttgcgcgatagtctctgccttttgcaaaaaagttaccgtttcggcagcgattctggcat

SEQ ID NO: 651821 - DNA, 75 bp, synthetic construct
  source 1..75: mol_type = other DNA
ggatgttgccggccttctcgcataccttggtttgggagaagcggcaaaacgggatgtagggacaggggaaaatca

SEQ ID NO: 651822 - DNA, 75 bp, synthetic construct
  source 1..75: mol_type = other DNA
attcagcaccaccattaacaatgcgctggaaggtaaacaaccgctggacaatacgctgactaatttgagtggaaa

SEQ ID NO: 651823 - DNA, 75 bp, synthetic construct
  source 1..75: mol_type = other DNA
agaaggtttgataaagagaactatatgcctccagctctaagtggtgattcatattactatgatggtaagtcttta

SEQ ID NO: 651824 - DNA, 75 bp, synthetic construct
  source 1..75: mol_type = other DNA
aagccttgttggcgcaaaccctggataaactctttccgactggtgatgaaattaactggcaaaaagtggcggcag

SEQ ID NO: 651825 - DNA, 75 bp, synthetic construct
  source 1..75: mol_type = other DNA
atcagtcatcagattgatttgctggagttgctcagtgaactaaaccgcgagaaaggctatacgctggctgcggta

SEQ ID NO: 651826 - DNA, 75 bp, synthetic construct
  source 1..75: mol_type = other DNA
caataccattccctggtggttgtttatttgtgggtaaaaatacttatagtccagtggctgcaacaaccgctgtgt

SEQ ID NO: 651827 - DNA, 75 bp, synthetic construct
  source 1..75: mol_type = other DNA
ccaaaccgggcgctgggctttttgtccttttcccgttgcagcgcgcgcgaaatacccattcttagtgatgaactg

SEQ ID NO: 651828 - DNA, 75 bp, synthetic construct
  source 1..75: mol_type = other DNA
cggtgtcactcagtatttaatgctgccaaatcgggcgctgggctttttgtccttttcccgttgcagcacgcgcga

SEQ ID NO: 651829 - DNA, 75 bp, synthetic construct
  source 1..75: mol_type = other DNA
cttggtttgggagaagcggcaaaacggaatgtgggcacaggagataatcagataccggatatgggagcattcgct

SEQ ID NO: 651830 - DNA, 75 bp, synthetic construct
  source 1..75: mol_type = other DNA
atgagagatctgttacaacgcccggatttattcagtatcaataccgcgacactgggctataaaacgccgctgccc

SEQ ID NO: 651831 - DNA, 75 bp, synthetic construct
  source 1..75: mol_type = other DNA
gcgatgatcctgtcaatctctgagaatactgtcaattttcatcagaaaaatatgcagaaaaaaatcaatgcaccg

SEQ ID NO: 651832 - DNA, 75 bp, synthetic construct
  source 1..75: mol_type = other DNA
atgatactcactctcaggggcgttgcggtttactatgcagatacggattttttcagctggcgtcgcacgatgctg

SEQ ID NO: 651833 - DNA, 75 bp, synthetic construct
  source 1..75: mol_type = other DNA
cgccctgcgggaagggccatttggtgttgccgggctgaatgagcgaattgaacagtttatgcaacagaagcgcaa

SEQ ID NO: 651834 - DNA, 75 bp, synthetic construct
  source 1..75: mol_type = other DNA
attttacgtagccaagagtttttgactctcaaagatcttaagaatgcacttttacgggaaaatataaacaaaact

SEQ ID NO: 651835 - DNA, 75 bp, synthetic construct
  source 1..75: mol_type = other DNA
gcgacaaaccatgaacatattctagatagtgctatttggaggcgttttgacgatgctatcgaatttccattaccc

SEQ ID NO: 651836 - DNA, 75 bp, synthetic construct
  source 1..75: mol_type = other DNA
cgctggccctgcttatctctggatgtgctcaacagacgtttactgttgaaaaccaaccgacaacagtaacaccga

SEQ ID NO: 651837 - DNA, 75 bp, synthetic construct
  source 1..75: mol_type = other DNA
gtgaatcatgccattgaggttgatgaagctctactggcgcaaaccctggacaaactttttccagtaagcgatgaa

SEQ ID NO: 651838 - DNA, 75 bp, synthetic construct
  source 1..75: mol_type = other DNA
ggaaggccgcacgctcttttcccagcttttgcatttgatgaaccgctactgccgcggcgtgattgtcgaaggtgt

SEQ ID NO: 651839 - DNA, 75 bp, synthetic construct
  source 1..75: mol_type = other DNA
ctcttgctgcagaagtagtggcttgtgaattggatatgccgttggccatcgtcaggcttgatactctggtttctt

SEQ ID NO: 651840 - DNA, 75 bp, synthetic construct
  source 1..75: mol_type = other DNA
acatgtcagtaattcagagtggcgcgcgggaatcagtgattcctctcaacaattcagattcggttatatttcaat

SEQ ID NO: 651841 - DNA, 75 bp, synthetic construct
  source 1..75: mol_type = other DNA
tgtcggtttcatgtctgattccgctcagtcaacaccgtctcatcctacaaagccggttttatctgtaaattttga

SEQ ID NO: 651842 - DNA, 75 bp, synthetic construct
  source 1..75: mol_type = other DNA
gatcttgcagcaggtaaagcatccgccagtcacacacacccgtggagccagataacggatgtgcctgcagcttca

SEQ ID NO: 651843 - DNA, 75 bp, synthetic construct
  source 1..75: mol_type = other DNA
ggcgatcacattgttcaggcttcgcgttcacctacgttgcctccggcaccggtagacaaagaaagggggctgcca

SEQ ID NO: 651844 - DNA, 75 bp, synthetic construct
  source 1..75: mol_type = other DNA
acctgctgacgaattgtgaaattgtcgtggattcatcgcagttgcctcagcttgaagagggtgactactactgga

SEQ ID NO: 651845 - DNA, 75 bp, synthetic construct
  source 1..75: mol_type = other DNA
gcaggtaaacaaccgctggacaatacgctgactcatttgagtggaaaggatgttgccggtcttctcgcatacctt

SEQ ID NO: 651846 - DNA, 75 bp, synthetic construct
  source 1..75: mol_type = other DNA
gaagccgaaacctaagccgaaaccgaagccggtgaaaaaggtgcaggaacagccaaaacgcgatgttaaaccggt

SEQ ID NO: 651847 - DNA, 75 bp, synthetic construct
  source 1..75: mol_type = other DNA
cgatgcagaaagcgacctgtatgaagtcgaaatgcgcggacgcgtgacggaaattgatatgggggaagccaaaca

SEQ ID NO: 651848 - DNA, 75 bp, synthetic construct
  source 1..75: mol_type = other DNA
cgaagaagggattgagtacgtcgatattgaagcccgtggtcgcattgtcgaaatcgacaagggcgaggccaaaca

SEQ ID NO: 651849 - DNA, 75 bp, synthetic construct
  source 1..75: mol_type = other DNA
ggcgaagtcgaactggtgatcatgctgacgctgggtgctaacgaagggatgaatcatgtgaaagtcttctcgcag

SEQ ID NO: 651850 - DNA, 75 bp, synthetic construct
  source 1..75: mol_type = other DNA
gcctttacgccggaagaagacgttcgcccactgctggcgctggagaatatctttgttgatcaggactttagtaat

SEQ ID NO: 651851 - DNA, 75 bp, synthetic construct
  source 1..75: mol_type = other DNA
gtgttagcgacattcgcgatatcagcgaacagttgctgcatatcacctggccggaactgaagccgcgcaacaatc

SEQ ID NO: 651852 - DNA, 75 bp, synthetic construct
  source 1..75: mol_type = other DNA
cggttacgtcgcgaataaaatttttcctgatgagcagagacgtgatcgttttgaaactattctgacaaaagttgg

SEQ ID NO: 651853 - DNA, 75 bp, synthetic construct
  source 1..75: mol_type = other DNA
taggcttttcaactttcaatggtgttgggtttggtggaactatctttactttcagaaactgccccaataataccc

SEQ ID NO: 651854 - DNA, 75 bp, synthetic construct
  source 1..75: mol_type = other DNA
ctggccaaggaaatatagtgtagatactcccgagaaattcgaggagtgtgagctttacaaaggcgtattcagaga

SEQ ID NO: 651855 - DNA, 75 bp, synthetic construct
  source 1..75: mol_type = other DNA
caacagactgggggatgtcgattgaggaggttgaggttattatagggcgagagaaaggcattgtggaaccctcct

SEQ ID NO: 651856 - DNA, 75 bp, synthetic construct
  source 1..75: mol_type = other DNA
tactacgggaaatccataaagcttcctgtacttggcgaagggacttttgctcttaaatctgaaaccctcgacaat

SEQ ID NO: 651857 - DNA, 75 bp, synthetic construct
  source 1..75: mol_type = other DNA
tcaaacgccttaaatcggactcaacaaattttaacgggactgattttggctggatcgatcagattactaattctg

SEQ ID NO: 651858 - DNA, 75 bp, synthetic construct
  source 1..75: mol_type = other DNA
ggaaaacgcgacaaaaatagtcgctgtccggaaaaccgcaacgctgtgccacttcatgaattgacagatgatatt

SEQ ID NO: 651859 - DNA, 75 bp, synthetic construct
  source 1..75: mol_type = other DNA
gacgttcttttcaaaggcggagtagggcgcagtgacttcccacgaggtgatcacaatcaactaattgcctctatc

SEQ ID NO: 651860 - DNA, 75 bp, synthetic construct
  source 1..75: mol_type = other DNA
ccgctcaccagtagcgtagccggtttccttaacctgagcgggaaaggcgaaattctgccaggcaatgacgcagac

SEQ ID NO: 651861 - DNA, 75 bp, synthetic construct
  source 1..75: mol_type = other DNA
atgttatcgattcaatttctctgtcctttgcctaacggacttcatgcccgtccggcgtgggaacttaaagaacag

SEQ ID NO: 651862 - DNA, 75 bp, synthetic construct
  source 1..75: mol_type = other DNA
attttcaacactaaacaattatctgtctcgtggcactgagccatccttaagtgtcgcccttcagattgcgtctat

SEQ ID NO: 651863 - DNA, 75 bp, synthetic construct
  source 1..75: mol_type = other DNA
cagcatagggaatgtgactttacaggtgttacattgccccgggcatacgccgggtcatgtcgtgttttttgatga

SEQ ID NO: 651864 - DNA, 75 bp, synthetic construct
  source 1..75: mol_type = other DNA
atgacgtgacttttattccaggacatggaccattatccactctcggttacgagcggttgcataatcccttcctgc

SEQ ID NO: 651865 - DNA, 75 bp, synthetic construct
  source 1..75: mol_type = other DNA
gcagctggcctattcccgtgataacaagcgtattgatatcgcggcgaatattggcaccgctctggaagcgcctgg

SEQ ID NO: 651866 - DNA, 75 bp, synthetic construct
  source 1..75: mol_type = other DNA
ggcgatcgttgagcttaagcgcgatggtttgcgtcacgcagaaacgatccctctggggatcatggtggaagtacc

SEQ ID NO: 651867 - DNA, 75 bp, synthetic construct
  source 1..75: mol_type = other DNA
gcgctgattggcaccggcaccttatttaatgacagttgcagcctgaacattagcggcagcgatgaagagcaggcg

SEQ ID NO: 651868 - DNA, 75 bp, synthetic construct
  source 1..75: mol_type = other DNA
aatgggtaggcatttgcggtgaactgggcggtgaaagccgttatctgccgctactgcttgggctgggcctggatg

SEQ ID NO: 651869 - DNA, 75 bp, synthetic construct
  source 1..75: mol_type = other DNA
gtctggcagcgggaagagattgtcaccactggcgttggttttggcgtggcgatcccgcacaccaaatctcagtgg

SEQ ID NO: 651870 - DNA, 75 bp, synthetic construct
  source 1..75: mol_type = other DNA
cagcctcgacagttatcgggcaatccccgccagtgcgcaagattccacccggctggagcacagcctggcaacgct

SEQ ID NO: 651871 - DNA, 75 bp, synthetic construct
  source 1..75: mol_type = other DNA
gttgcggaaagtcctccctgcgtccgctgatggccggcagcagcccgtcgttgcctgatggatccaacccctccg

SEQ ID NO: 651872 - DNA, 75 bp, synthetic construct
  source 1..75: mol_type = other DNA
gttgcgcgcacaaaatttaaatgtgcatctgattggtcgggcaacgaaaaccaaaatcgcgctggatcaagatta

SEQ ID NO: 651873 - DNA, 75 bp, synthetic construct
  source 1..75: mol_type = other DNA
tcaacatcccctaccagaaggtagttggcatacctggtatgttattgatatcggtaatggcttcactgactataa

SEQ ID NO: 651874 - DNA, 75 bp, synthetic construct
  source 1..75: mol_type = other DNA
aaactatttaatggttattaatgaatatccttaccgtaatactcatttttttattgctgataacaatgagtatca

SEQ ID NO: 651875 - DNA, 75 bp, synthetic construct
  source 1..75: mol_type = other DNA
aattcgagatatagttgctccaaaagttgataattttagccatgcttatacagcattagttgataaaaaatctga

SEQ ID NO: 651876 - DNA, 75 bp, synthetic construct
  source 1..75: mol_type = other DNA
atgtttgatttaaccatattttttataaccatccttggaggcgtgcattcgtttctgaatggggttcgtgaaaaa

SEQ ID NO: 651877 - DNA, 75 bp, synthetic construct
  source 1..75: mol_type = other DNA
agcggttgtttccttgctgtaccataaaaagctggatgatgagtggcgtcagcaggcggaagccctgcgcgatgc

SEQ ID NO: 651878 - DNA, 75 bp, synthetic construct
  source 1..75: mol_type = other DNA
accagtctcaacggcgtaagatttagttttaattgctctttgaaagggttctggtgggtggtaatgactccaact

SEQ ID NO: 651879 - DNA, 75 bp, synthetic construct
  source 1..75: mol_type = other DNA
ttgaaaacggctgcctggccgtggagcaaggcttaaccacctttgaagagttaatccgcgtattggggatgccgc

SEQ ID NO: 651880 - DNA, 75 bp, synthetic construct
  source 1..75: mol_type = other DNA
gccgacagcaaggggagccaatccatattccagacaatgtatggccgtcgccgctgccccgctggcaagcccctg

SEQ ID NO: 651881 - DNA, 75 bp, synthetic construct
  source 1..75: mol_type = other DNA
tattatgtttatttcttctatgctgcatctataatttatggacattgcgtcctgtacagattttgtatacatact

SEQ ID NO: 651882 - DNA, 75 bp, synthetic construct
  source 1..75: mol_type = other DNA
attcggggaatggtccaggcagaatcaatcagcttttttactggtctgacaatgcgttggttccgtgatgccttt

SEQ ID NO: 651883 - DNA, 75 bp, synthetic construct
  source 1..75: mol_type = other DNA
cacgctactggaagagatggcttcacgggtccccgcaggtgcctggggagtgatgccgatcttttctgaccggat

SEQ ID NO: 651884 - DNA, 75 bp, synthetic construct
  source 1..75: mol_type = other DNA
tgaagtgattcttggagtgtacacccgggacgaactggacgaaccacaggaaaaaatcattaatccggttcagga

SEQ ID NO: 651885 - DNA, 75 bp, synthetic construct
  source 1..75: mol_type = other DNA
attcacctgaacgaggccgtacatctggacgcagccgaagcagcactggagaaactcaaaataacgccggaagaa

SEQ ID NO: 651886 - DNA, 75 bp, synthetic construct
  source 1..75: mol_type = other DNA
atgtgatgccagtggctgggccgcctttcaactgaatgcccctgtaatcctaggtgatgctgccaacttactgat

SEQ ID NO: 651887 - DNA, 75 bp, synthetic construct
  source 1..75: mol_type = other DNA
atgcgctatatttttgaaaaagcatttgatggcgaaaagggattaggctatccagcagaacgtcgtgaatcacaa

SEQ ID NO: 651888 - DNA, 75 bp, synthetic construct
  source 1..75: mol_type = other DNA
tggtagccgagggtgtggaaacacccgactgccttgcgtggttgcggcaggcgggttgcgacacggtgcagggtt

SEQ ID NO: 651889 - DNA, 75 bp, synthetic construct
  source 1..75: mol_type = other DNA
gcccaggaacgctattcgcgttatctgctggcgaatggtgtcgatcctttccagattgctttcggtaccatcggt

SEQ ID NO: 651890 - DNA, 75 bp, synthetic construct
  source 1..75: mol_type = other DNA
ccaggttgcgttcggcatcatcggcatggataaccctgcgcaggttatcaggaacgcccgggagaacatcaaaaa

SEQ ID NO: 651891 - DNA, 75 bp, synthetic construct
  source 1..75: mol_type = other DNA
aatattgctgctaaccatatagataacgtacaaattattcgtatggcggcagaagagtttactcaggcgatgaat

SEQ ID NO: 651892 - DNA, 75 bp, synthetic construct
  source 1..75: mol_type = other DNA
cgcggcgatgaatattcagatgctggaatgggcgctggacgtaaccaaaggctcaaaaggcgatttactggagct

SEQ ID NO: 651893 - DNA, 75 bp, synthetic construct
  source 1..75: mol_type = other DNA
caggcacaaagcaccggggaaacaacagcacttcgccaggaagtggaagagcataaaaatacacttggcgctctc

SEQ ID NO: 651894 - DNA, 75 bp, synthetic construct
  source 1..75: mol_type = other DNA
ttagccaggcatctaaaaacgcaataatttttaatgagttagttgcagcaaccacacatcaaggccatactattt

SEQ ID NO: 651895 - DNA, 75 bp, synthetic construct
  source 1..75: mol_type = other DNA
ggggtatggctgctgcagtggcaggattatgcctttggcctcatgctgattgtcctgcctgccgcaatgttcctg

SEQ ID NO: 651896 - DNA, 75 bp, synthetic construct
  source 1..75: mol_type = other DNA
gtaaccaaaggctcaaaaggcgatttactggagctgtactgcggcaacggtaacttttcattagcgctggcgcgc

SEQ ID NO: 651897 - DNA, 75 bp, synthetic construct
  source 1..75: mol_type = other DNA
gttagcgatatggttcttcatattataaaaaaacaagagttaacacatcagtttgataatatgatgaaaagcttt

SEQ ID NO: 651898 - DNA, 75 bp, synthetic construct
  source 1..75: mol_type = other DNA
tccctctcacgatgttctggatgctcagtcgcaacatcgaccgtctacgtgcggaagaggatgtccgcaacctgc

SEQ ID NO: 651899 - DNA, 75 bp, synthetic construct
  source 1..75: mol_type = other DNA
gcgcctgcgctgggctcagggcggtgcagaagtattcctcaaaaatatgacaaggttgtggcgcaaagaaaactt

SEQ ID NO: 651900 - DNA, 75 bp, synthetic construct
  source 1..75: mol_type = other DNA
atcgctttccgtagaatgggaaactgcagacgccaccgctgataaatcagcagactataccaaagaatcaatggt

SEQ ID NO: 651901 - DNA, 75 bp, synthetic construct
  source 1..75: mol_type = other DNA
ttatttcccgtgtatacagactttgctaccccagccagtggttgagagttagcaatcgccgtgtggtgttgtttt

SEQ ID NO: 651902 - DNA, 75 bp, synthetic construct
  source 1..75: mol_type = other DNA
agattctgttagttcgcagaaacgctcctggcgtctggcagtgggtgagactcagcaaccgacgggtggggttaa

SEQ ID NO: 651903 - DNA, 75 bp, synthetic construct
  source 1..75: mol_type = other DNA
agttacgctcacctcatcgtggacgaataccaggactgcaacctggtgcaacatgcactggtaaccgcgctatca

SEQ ID NO: 651904 - DNA, 75 bp, synthetic construct
  source 1..75: mol_type = other DNA
cggcgcggagtgggctcaatgttgaggtccttcaactacgcaatcgcagaactgactatcccgctatacggcagg

SEQ ID NO: 651905 - DNA, 75 bp, synthetic construct
  source 1..75: mol_type = other DNA
ttccactgattggtgagctcaatcatccatggcgctgggctaactcaggggcgccggaacttggtcgctggcttc

SEQ ID NO: 651906 - DNA, 75 bp, synthetic construct
  source 1..75: mol_type = other DNA
cgttatgagaacattgaagttattgccgtaaatgatggttcaacagacaaaacccgtgccatcctggatcgcatg

SEQ ID NO: 651907 - DNA, 75 bp, synthetic construct
  source 1..75: mol_type = other DNA
gttttgtcgatcgttgtctgacggaaaaacgcatccttgccttacttgaagccattaccagcattgggcaaagcc

SEQ ID NO: 651908 - DNA, 75 bp, synthetic construct
  source 1..75: mol_type = other DNA
gcatttgcagagagacccggttttacgctggccgctgaggcactgcgccttctgacccgccaggataatgcgcgg

SEQ ID NO: 651909 - DNA, 75 bp, synthetic construct
  source 1..75: mol_type = other DNA
acctcctttaaagaagaagatccgcacgacgatgtgtccacctggtccattgagtgcgaaagcgctggcaaggtc

SEQ ID NO: 651910 - DNA, 75 bp, synthetic construct
  source 1..75: mol_type = other DNA
tggcgaagcgtggcaatggcaaggattgcgtttcagcgtgcactggcctttacaagctagcaacgataaaggaaa

SEQ ID NO: 651911 - DNA, 75 bp, synthetic construct
  source 1..75: mol_type = other DNA
catggcattagtctgacctcgtttattgcaaatctatttgcaattcccttggtgacatttatcacggttccgttg

SEQ ID NO: 651912 - DNA, 75 bp, synthetic construct
  source 1..75: mol_type = other DNA
ctggcaacgtcaccgacaaaacgctgcgcgaatttgccgaaactggtgtggattttatctccgtcggcgcgctga

SEQ ID NO: 651913 - DNA, 75 bp, synthetic construct
  source 1..75: mol_type = other DNA
gtggtttccctgtcctgagtggcaactgccgccggtattgcgtgcagttgtttccctcatccatctgcaactggg

SEQ ID NO: 651914 - DNA, 75 bp, synthetic construct
  source 1..75: mol_type = other DNA
ctaaagaaattaaaaatataatgcgtgataccggcacggcgcatttaatggcgatatcgggattgcacatcgctt

SEQ ID NO: 651915 - DNA, 75 bp, synthetic construct
  source 1..75: mol_type = other DNA
ctgcgagcgcaatatctggcgtcgttacaaatggctctgcaaccctatccgtggaacgcggtcattcttggttta

SEQ ID NO: 651916 - DNA, 75 bp, synthetic construct
  source 1..75: mol_type = other DNA
ctggttggcggcatcatcggtgacaaaaccggtcgcagaaatgcgttcatcctctatgaggccattcatattgcc

SEQ ID NO: 651917 - DNA, 75 bp, synthetic construct
  source 1..75: mol_type = other DNA
gtaaacctttgccgcctgtggttattgctgatgacggtaaagcgccacaagcggtgccgtattcagcggctttgt

SEQ ID NO: 651918 - DNA, 75 bp, synthetic construct
  source 1..75: mol_type = other DNA
aagcggtgccgtattcagccttactgacaggagtattactgaaacgcgtgatattaggctcttgtgtgctgattg

SEQ ID NO: 651919 - DNA, 75 bp, synthetic construct
  source 1..75: mol_type = other DNA
acacccgacgtgacgagctgctggaacgcattaatctcgatatccccggcgcggtggcccaggcgctgcgggaag

SEQ ID NO: 651920 - DNA, 75 bp, synthetic construct
  source 1..75: mol_type = other DNA
gggtccgccactatgtcgaattgttggaaggcaccgatacacagttgctggatacgcgcaaaaccttgcccggcc

SEQ ID NO: 651921 - DNA, 75 bp, synthetic construct
  source 1..75: mol_type = other DNA
aagctttatatattcatggtactgccatggcttcactcattgcctcacgtcatggggtttatggtgtttatcctc

SEQ ID NO: 651922 - DNA, 75 bp, synthetic construct
  source 1..75: mol_type = other DNA
tatgctttatcagatagttcttgtatttcagtgaatgctttaactggttcatgctcttgccaaacaggaacaaaa

SEQ ID NO: 651923 - DNA, 75 bp, synthetic construct
  source 1..75: mol_type = other DNA
ccggttcagcgccttgagccgggtgcgaaaagcatggtcaggctgagtaccacaccggatatcagtaaacttcct

SEQ ID NO: 651924 - DNA, 75 bp, synthetic construct
  source 1..75: mol_type = other DNA
atgattcgaaaaaagattctgatggctgccatccccctgtttgttatatccggggcagacgctgctgtttcgctg

SEQ ID NO: 651925 - DNA, 75 bp, synthetic construct
  source 1..75: mol_type = other DNA
ccagttttagttgaccacaacagactacctgaagggagccgcggtcgcctggcagttgcagtagcaggagatcat

SEQ ID NO: 651926 - DNA, 75 bp, synthetic construct
  source 1..75: mol_type = other DNA
ttgtctgctggagtaatgccgttggtggcttgatcctcgcgcagctgaaagagttgggctggacagataattcca

SEQ ID NO: 651927 - DNA, 75 bp, synthetic construct
  source 1..75: mol_type = other DNA
ggtctgggaggaagtgaaaagcaggcagaggaaggtgagtttgaaactgtgatgctgtctccccgttcagagcag

SEQ ID NO: 651928 - DNA, 75 bp, synthetic construct
  source 1..75: mol_type = other DNA
acagtaaaatcggcaaattataataccccttatctgtcttatattaacgactatggtggtcgcccggtactgtcg

SEQ ID NO: 651929 - DNA, 75 bp, synthetic construct
  source 1..75: mol_type = other DNA
atcatgatgcattacatgatgcccgatatcaggctgaactattccggttgatcgataaattgagcgagaagaaaa

SEQ ID NO: 651930 - DNA, 75 bp, synthetic construct
  source 1..75: mol_type = other DNA
gactgtagtttttgttggtttcaatgcttcatttgactggagctttattaattattatttccatgtatatttagg

SEQ ID NO: 651931 - DNA, 75 bp, synthetic construct
  source 1..75: mol_type = other DNA
tttcagttgatgtggaaacatcaggtcctattccgggaaaatacagtatgttatcgataggtgcttgtgtggcat

SEQ ID NO: 651932 - DNA, 75 bp, synthetic construct
  source 1..75: mol_type = other DNA
atcgatgacgctgaatgtggccaatgacaacaaacagcttccgtacctggcgcaggcatggatagagaatgagaa

SEQ ID NO: 651933 - DNA, 75 bp, synthetic construct
  source 1..75: mol_type = other DNA
atcagcaaactgccacaggaccgggaatccctgttctacttcaaccttcgtgaaattcctccgaagagtgataag

SEQ ID NO: 651934 - DNA, 75 bp, synthetic construct
  source 1..75: mol_type = other DNA
gtcttgagccgggggcgaaaagtatggtccgtctggccagcaccccggatatcagcaaactgccacaggaccggg

SEQ ID NO: 651935 - DNA, 75 bp, synthetic construct
  source 1..75: mol_type = other DNA
gaccgccggaatgtttctcggtgcgctggtgggcggcatcatcggtgacaaaaccggtcgcagaaatgcgtttat

SEQ ID NO: 651936 - DNA, 75 bp, synthetic construct
  source 1..75: mol_type = other DNA
gtgattatcccgaccgggatgttgctgactcccctgctgctggtctggttcggtggcgtctggatcagccggctg

SEQ ID NO: 651937 - DNA, 75 bp, synthetic construct
  source 1..75: mol_type = other DNA
aagcccggaagtggtcgatcaggcccatgcccgtggcgcgcagttaattgtcacggtggataacggtatttcctc

SEQ ID NO: 651938 - DNA, 75 bp, synthetic construct
  source 1..75: mol_type = other DNA
cactgaggaccagaatcaatccaaagtggaacaaaacagcccggatacgcaacaaaacggaccagaagagcaaca

SEQ ID NO: 651939 - DNA, 75 bp, synthetic construct
  source 1..75: mol_type = other DNA
tgtatcgtccatgtctgcccgccagaccagcaaaaaaagcacgccgatgttcgcgcgtcttcgcacataccgctg

SEQ ID NO: 651940 - DNA, 75 bp, synthetic construct
  source 1..75: mol_type = other DNA
aatctttccgcaaggtgacgaacaggagccgaatgaagagggtttacaattttatgatgatctgttcgatgaatg

SEQ ID NO: 651941 - DNA, 75 bp, synthetic construct
  source 1..75: mol_type = other DNA
gccgtttatcccgcttgccggctgggttgtcgttcccaccggcctgcttgtcatgccgctgctgcttgtctggtt

SEQ ID NO: 651942 - DNA, 75 bp, synthetic construct
  source 1..75: mol_type = other DNA
tatcgtgaagatgcccggtaaaagcgatgagaacgcacaaccttttttacatgcgctaattgcgcagacggataa

SEQ ID NO: 651943 - DNA, 75 bp, synthetic construct
  source 1..75: mol_type = other DNA
cgaatatggatttccttattgcctgccgttttgtgatgggcgttgggctgggagctttactggttacactgtttg

SEQ ID NO: 651944 - DNA, 75 bp, synthetic construct
  source 1..75: mol_type = other DNA
ggcccactgccacaccgccagcaggctggttaaagtgcgacgggcgcgcctttacaaaagaacaatatcctgttc

SEQ ID NO: 651945 - DNA, 75 bp, synthetic construct
  source 1..75: mol_type = other DNA
gctggaagtggcaaaccgtgatgcacaaaaactcgccgccagcgatttaggttttgcgctggggccacgtctcaa

SEQ ID NO: 651946 - DNA, 75 bp, synthetic construct
  source 1..75: mol_type = other DNA
tttctgcacttcatcaaatttttagtgatgaagaacatttgagtgagcaacaaaaagacattattctgatgtacg

SEQ ID NO: 651947 - DNA, 75 bp, synthetic construct
  source 1..75: mol_type = other DNA
aggccaatttattacaaacgggctgggcggagactctacccaactggcattacgtcgatacgcaactgccggtac

SEQ ID NO: 651948 - DNA, 75 bp, synthetic construct
  source 1..75: mol_type = other DNA
cggatggatgctctgctgaaagccggcacattgcgcctgtcgctgacctttaatcctgctcatgcgcagcaaaaa

SEQ ID NO: 651949 - DNA, 75 bp, synthetic construct
  source 1..75: mol_type = other DNA
atgattcagaagaataaaatcaaagatttagttgtttttaccgatgaaaataactcaaagtatctcaatgtatta

SEQ ID NO: 651950 - DNA, 75 bp, synthetic construct
  source 1..75: mol_type = other DNA
cggcacggcgtttcttgaacagttgctgattatgctgacgcccgatcccgccgcattaaaagaagcgccgaacga

SEQ ID NO: 651951 - DNA, 75 bp, synthetic construct
  source 1..75: mol_type = other DNA
gtactggcggaaccgcatgctggctgggtaaatgcgctggaacaagaatggctacgccgttacggtacgcattaa

SEQ ID NO: 651952 - DNA, 75 bp, synthetic construct
  source 1..75: mol_type = other DNA
ccgcagccgggcgcaaaacgggcggctcggtggatctgctctgggtgaacggcgaaaacttccgcaccttaaaag

SEQ ID NO: 651953 - DNA, 75 bp, synthetic construct
  source 1..75: mol_type = other DNA
gtctcagccagactggtgcaggacggaccaatgggcagacctttaatctacgcggctatgacaaaagcggggtac

SEQ ID NO: 651954 - DNA, 75 bp, synthetic construct
  source 1..75: mol_type = other DNA
ttcgctttatcgtcattatctgcgtatttctcctcggcgttgataacctgagcgatatgttcgtcgatatctccc

SEQ ID NO: 651955 - DNA, 75 bp, synthetic construct
  source 1..75: mol_type = other DNA
tgacgtttattgggacggttctcctgccttttgtaagtagttttcaaaagatgatgattatatccggttcagatg

SEQ ID NO: 651956 - DNA, 75 bp, synthetic construct
  source 1..75: mol_type = other DNA
ccgatattgataatgcattaaaaaataaaatccaacaatcaattaattccttgcatcaacatggtatggtatctg

SEQ ID NO: 651957 - DNA, 75 bp, synthetic construct
  source 1..75: mol_type = other DNA
gcctttttgagcaaacccaaaaagtaagaaatgaagggttaaatacactcaatgatttttatttattagctgaac

SEQ ID NO: 651958 - DNA, 75 bp, synthetic construct
  source 1..75: mol_type = other DNA
tgtgaaaaaaggcgacagccatcaggctggctatgccatacattccttttccctgtcttataaacctgcaatggt

SEQ ID NO: 651959 - DNA, 75 bp, synthetic construct
  source 1..75: mol_type = other DNA
tgggattgttatcgctgttttctctggcaacacatgccagtgactggcaagaaattaaaaatgaggccaaagggc

SEQ ID NO: 651960 - DNA, 75 bp, synthetic construct
  source 1..75: mol_type = other DNA
attaatttctattttgatgaaagctgggtaaatagtggcactgatattatcaaaagaggaaacacaaacgatgcc

SEQ ID NO: 651961 - DNA, 75 bp, synthetic construct
  source 1..75: mol_type = other DNA
agacgctgactcatttgagtggaaaggatgttgccggtcttctcgcataccttgatttgggagaaggctcagcat

SEQ ID NO: 651962 - DNA, 75 bp, synthetic construct
  source 1..75: mol_type = other DNA
gtttatttggtcgccaattaatgaatgagaaaatattttttgtccatttctggcatccacataatatatcaccat

SEQ ID NO: 651963 - DNA, 75 bp, synthetic construct
  source 1..75: mol_type = other DNA
gacaccagacccggcacagacaaaactgattaaccagaaacgcattgcgccgctgaatcttctgagtgttgaccc

SEQ ID NO: 651964 - DNA, 75 bp, synthetic construct
  source 1..75: mol_type = other DNA
gtccgcagcaatgccagataccgtaatcgatagctggtccagcatggtgtttttgaagttcaacggcgcgaaatt

SEQ ID NO: 651965 - DNA, 75 bp, synthetic construct
  source 1..75: mol_type = other DNA
tcagctttttaaagatttagttaccagtggtccatttcgtcataacggtaataactatctgactactggattaac

SEQ ID NO: 651966 - DNA, 75 bp, synthetic construct
  source 1..75: mol_type = other DNA
gaaggagagcatacaatttctctggggtatgcgcactttcagtttccgggactgaaggattttgtaaaggatgcg

SEQ ID NO: 651967 - DNA, 75 bp, synthetic construct
  source 1..75: mol_type = other DNA
cgtgtgcagttctggtgatgagttgcttaactgcacaggtaaatgcagcatcaggcgatagtacggtatctctcg

SEQ ID NO: 651968 - DNA, 75 bp, synthetic construct
  source 1..75: mol_type = other DNA
aaaatcgccagcggcgatttgcctgcaagcagttacagttttggctttcgcgaggggatgattggcaacgtgcat

SEQ ID NO: 651969 - DNA, 75 bp, synthetic construct
  source 1..75: mol_type = other DNA
ttgccagatttacgtggtgagtttattcgtggctgggatgacgggcgtggtattgatgctggacgtgctttattg

SEQ ID NO: 651970 - DNA, 75 bp, synthetic construct
  source 1..75: mol_type = other DNA
caaccgctggacaatacgctgactcatttgagtggaaaggatgttgccggtcttctcgcataccttggtttggga

SEQ ID NO: 651971 - DNA, 75 bp, synthetic construct
  source 1..75: mol_type = other DNA
atgatatataataaaacgataaatgggttgaaagttttcataaaagataatgatcccttttatgagcaagttcta

SEQ ID NO: 651972 - DNA, 75 bp, synthetic construct
  source 1..75: mol_type = other DNA
cagaaaaacagatgcgctcctttctgtcataatgcgtaaaagaggtaatatctatcagagtgatggtgagcgtgc

SEQ ID NO: 651973 - DNA, 75 bp, synthetic construct
  source 1..75: mol_type = other DNA
cttcaacgctgatgctgctgttaacgctctcctacattttactggcaggtacggcactggttggcggcgtacagc

SEQ ID NO: 651974 - DNA, 75 bp, synthetic construct
  source 1..75: mol_type = other DNA
tgctgcttcaaccggtctggtaccccggcagtacagcacaggtggtaaaaatacacttttagggataagtaaacg

SEQ ID NO: 651975 - DNA, 75 bp, synthetic construct
  source 1..75: mol_type = other DNA
gacaggagtcgcagtggtaaaacgactttcaacagtacttgcagagaacgaacttcctccctatctggcgcagtt

SEQ ID NO: 651976 - DNA, 75 bp, synthetic construct
  source 1..75: mol_type = other DNA
aatgaaacgcgagggagtctccggatttgaggtttcggttggtcgctatgataataacggtgctgaacactatta

SEQ ID NO: 651977 - DNA, 75 bp, synthetic construct
  source 1..75: mol_type = other DNA
tagttgccgcaactctatttatggggatagggttgcagattgcgtggttctttttttctagttttattaaacgca

SEQ ID NO: 651978 - DNA, 75 bp, synthetic construct
  source 1..75: mol_type = other DNA
acctgaatttacgcgccaaattagatcacctccacgcgatttccgtatgggctcccgccgcaccggtattatcgt

SEQ ID NO: 651979 - DNA, 75 bp, synthetic construct
  source 1..75: mol_type = other DNA
gcgcaaggctggcggattagcagcctcagggagcaaattttacctcgttggtatcatcagtggtttggcgtgcca

SEQ ID NO: 651980 - DNA, 75 bp, synthetic construct
  source 1..75: mol_type = other DNA
gtatgcataatttgcggaatttttccgttgctgattttgccccaattgcctgggacattaacccttgcgtttctg

SEQ ID NO: 651981 - DNA, 75 bp, synthetic construct
  source 1..75: mol_type = other DNA
gcattatttgcggaatttttccgctgctgattttgccacaattgcctgggacattaacccttgcgagtctgaccg

SEQ ID NO: 651982 - DNA, 75 bp, synthetic construct
  source 1..75: mol_type = other DNA
agttgtggcagtggaagggcaatgggtaattctttctattcgctcattaacgccgcttgaggctctctcctatgt

SEQ ID NO: 651983 - DNA, 75 bp, synthetic construct
  source 1..75: mol_type = other DNA
ctcgatattacgtacctggccgacgttatgggtcagaagccctttaaatggggagcatcatcagccctgtgtgcg

SEQ ID NO: 651984 - DNA, 75 bp, synthetic construct
  source 1..75: mol_type = other DNA
ccattcctgtgtggttaaggttgatgacgggacgaatagcattcttctaaccggtgatattgaagccccagctga

SEQ ID NO: 651985 - DNA, 75 bp, synthetic construct
  source 1..75: mol_type = other DNA
cgctgggatatacccgtgtagggaaatatcgaaccctggattacagtatgtctggcgcagcggtgatgtatccat

SEQ ID NO: 651986 - DNA, 75 bp, synthetic construct
  source 1..75: mol_type = other DNA
ttagaatgcaacatgcagcaagattgataactaccactgaaaaacatattaatagtatatctgatgaggttgggt

SEQ ID NO: 651987 - DNA, 75 bp, synthetic construct
  source 1..75: mol_type = other DNA
agcctttaatgaactaagtgaaaatggctcccacatcattaccaccatcacaggggttgccaaccattggcttgt

SEQ ID NO: 651988 - DNA, 75 bp, synthetic construct
  source 1..75: mol_type = other DNA
caagaaaacctagttatttccataagacacatcgattcttcaatactgatccagagttggagtcaaatatcatga

SEQ ID NO: 651989 - DNA, 75 bp, synthetic construct
  source 1..75: mol_type = other DNA
cagcttgcgtctctaccagaataacaccactgaaccgggcaatcccactctgacacatggtgacaacggcctgcg

SEQ ID NO: 651990 - DNA, 75 bp, synthetic construct
  source 1..75: mol_type = other DNA
tctatcagagtgatggtgagcgtgcacctaacaaggaaaaacctgcagccctgtttgcgaaaggctctgtcagta

SEQ ID NO: 651991 - DNA, 75 bp, synthetic construct
  source 1..75: mol_type = other DNA
gctccggcaatcctgacacacttatcagtgacatcagcatacctgttggtcatagaggcgtttatgcaggatggc

SEQ ID NO: 651992 - DNA, 75 bp, synthetic construct
  source 1..75: mol_type = other DNA
gcaggcatcggcagcaccctttcgctggggcgcgtgggggctgtctctgccgacgtttctgtatcacgtgccgaa

SEQ ID NO: 651993 - DNA, 75 bp, synthetic construct
  source 1..75: mol_type = other DNA
tctggccggtgttccggagaaaggtcggctgacggtgagcagtggaggaaaacagtgccatgtcgattttagcct

SEQ ID NO: 651994 - DNA, 75 bp, synthetic construct
  source 1..75: mol_type = other DNA
acctggaacagtgatttcagcacagcatctctggggtacacccacagtggcgggtacagaacaacggatttcagt

SEQ ID NO: 651995 - DNA, 75 bp, synthetic construct
  source 1..75: mol_type = other DNA
tgccacctacacacaggcggatcttgaagctgctgaacgtctccaggcagtgcaagccaatatgaatgtggcctg

SEQ ID NO: 651996 - DNA, 75 bp, synthetic construct
  source 1..75: mol_type = other DNA
gcggtaacggtgccgttgataacatccttaataaatatggttggagtcctgaacaggttaaaggtttccaaactg

SEQ ID NO: 651997 - DNA, 75 bp, synthetic construct
  source 1..75: mol_type = other DNA
gatgcaggtaagaaatttcagaaagaaatggaaaacctaaccaatccaacattgaaagggaagaaggctaaacga

SEQ ID NO: 651998 - DNA, 75 bp, synthetic construct
  source 1..75: mol_type = other DNA
taaatggagctaagtatttgtcacggttacttgaaccagagaatcaagaactaatccaacttgaaggacgaaaac

SEQ ID NO: 651999 - DNA, 75 bp, synthetic construct
  source 1..75: mol_type = other DNA
cgaacggctctcacgtcttgactggagcgccgcgcaaagggcttcgctggtcactgcgatgatcgaaacgggtgt

SEQ ID NO: 652000 - DNA, 75 bp, synthetic construct
  source 1..75: mol_type = other DNA
aaaaagccaatgagccggtgctggaaattattcaggcgcggcgctggattgaagcacgtatgcaggaggccggat

SEQ ID NO: 652001 - DNA, 75 bp, synthetic construct
  source 1..75: mol_type = other DNA
ccctcgaccactcatcacttgaagacgcacagcgcgacgtgacgctgttaaaagacagcgtcgatatcgtcgaag

SEQ ID NO: 652002 - DNA, 75 bp, synthetic construct
  source 1..75: mol_type = other DNA
cggatctggtgcgtccgattgcgtctatcagcaaattaatgaccgcgatggttgtgctggatgcacgactgccgc

SEQ ID NO: 652003 - DNA, 75 bp, synthetic construct
  source 1..75: mol_type = other DNA
ctgtgccggcagcagcgttgagctataaaaaacaaaaagccgcccaaatggcggcggcggggcagacggcacaga

SEQ ID NO: 652004 - DNA, 75 bp, synthetic construct
  source 1..75: mol_type = other DNA
ttcgctggttgccgcgatgatcgaaacgggtgttgggatcccgtcgatgtgcctgtccgcacatcgtcgctttcc

SEQ ID NO: 652005 - DNA, 75 bp, synthetic construct
  source 1..75: mol_type = other DNA
gaagccttattacagcgctgggagcaagccgccgataaatctcactggccacctgactgggaagccagcgcaaac

SEQ ID NO: 652006 - DNA, 75 bp, synthetic construct
  source 1..75: mol_type = other DNA
agtctgggttaccgaggtatcgcttgcccttgcacgtttcggtttctacatggacagaaaaaatggcccagattg

SEQ ID NO: 652007 - DNA, 75 bp, synthetic construct
  source 1..75: mol_type = other DNA
ttatctccggcaaactggcgaaagatgacgccgaagcgcgcgcgaaattgcaggcagtgctggacaacggtaaag

SEQ ID NO: 652008 - DNA, 75 bp, synthetic construct
  source 1..75: mol_type = other DNA
tatacatttcctttcccctcagggtatatccaccgaatcagaggcctctgccgctgacgttgccggcatacttaa

SEQ ID NO: 652009 - DNA, 75 bp, synthetic construct
  source 1..75: mol_type = other DNA
gaagcagtaaggtctggtgctggcagcgtgccggaggccgggctgttattctggaggtcagtggccgcgggatag

SEQ ID NO: 652010 - DNA, 75 bp, synthetic construct
  source 1..75: mol_type = other DNA
atccgcgaagtgcatcttgattactaccgggcgggggcgcaatgcgcgatcactgccagctatcaggcgacgccg

SEQ ID NO: 652011 - DNA, 75 bp, synthetic construct
  source 1..75: mol_type = other DNA
gctaaaacacttgataactttccgttaataccgcaaaagtcaaaaaatcgattggacgtcagcagcgagctacat

SEQ ID NO: 652012 - DNA, 75 bp, synthetic construct
  source 1..75: mol_type = other DNA
atgcatcttccactgtccttttaccaatatcggggagaagacaggaccgaagaactgagacaggctcttcagtcc

SEQ ID NO: 652013 - DNA, 75 bp, synthetic construct
  source 1..75: mol_type = other DNA
tgattgttcttgcctgtttgtatctgaggccgcttctggccccatttggcaagaagtattttaagggaattgaaa

SEQ ID NO: 652014 - DNA, 75 bp, synthetic construct
  source 1..75: mol_type = other DNA
caattccgtattgaatcaatactaagtgacgaaccggaatctctttggaaaaagacggaaaaacacgcaggtatt

SEQ ID NO: 652015 - DNA, 75 bp, synthetic construct
  source 1..75: mol_type = other DNA
ggtattgtatttccattagttgtcggtctgatcagcgtcctttttcagaaaaaatcgacccgtgagcatatccag

SEQ ID NO: 652016 - DNA, 75 bp, synthetic construct
  source 1..75: mol_type = other DNA
ttgattctctgggttggtgcaataatgattgtacttgctggtttgtatctgaggccggtcctggctccatttggc

SEQ ID NO: 652017 - DNA, 75 bp, synthetic construct
  source 1..75: mol_type = other DNA
tgtcagcttatatggtgaggtatctgggacaacaaaaaaatgtcaatttgctcactgtcatcaaacggttactgt

SEQ ID NO: 652018 - DNA, 75 bp, synthetic construct
  source 1..75: mol_type = other DNA
acaacaaacatggggggggaatggcatcgtcctttgatatgggggtttttcgctttttatggtgtctgggcagcg

SEQ ID NO: 652019 - DNA, 75 bp, synthetic construct
  source 1..75: mol_type = other DNA
ctatgctgacctgtaaacatcaggtccgacaacttgtcgccatgaaaacccggggacagttgacctataaagaac

SEQ ID NO: 652020 - DNA, 75 bp, synthetic construct
  source 1..75: mol_type = other DNA
ccctgacgccgctattgaagaatgagcagattaacgaatggccgggttcgattacgctgtatgctcattttctgc

SEQ ID NO: 652021 - DNA, 75 bp, synthetic construct
  source 1..75: mol_type = other DNA
ctgatgatgaggaacttcagtgcttaattgatgaggtgcgaccgctagttgactttatcgctgatgaagaagggg

SEQ ID NO: 652022 - DNA, 75 bp, synthetic construct
  source 1..75: mol_type = other DNA
acagtgtacaacgttcaatggtgcaaaccgaaggggccgttgggcagctagcgctcgtcagaaaagtgtcgaaga

SEQ ID NO: 652023 - DNA, 75 bp, synthetic construct
  source 1..75: mol_type = other DNA
tgatgcttcatatagtatatatttgacgcatggtttgattacagcttgggtatcatatatgtttgtgtctttcgg

SEQ ID NO: 652024 - DNA, 75 bp, synthetic construct
  source 1..75: mol_type = other DNA
gtaaaaaacgtgatggtcatgcgctgagtgatgaagaaattcgtttctttatcaacggtattcgcgacaacacta

SEQ ID NO: 652025 - DNA, 75 bp, synthetic construct
  source 1..75: mol_type = other DNA
accaaagaacctggtgcccaggcagaaccgctctatctggatgtgatgaccgcactggcagaagcctttaataat

SEQ ID NO: 652026 - DNA, 75 bp, synthetic construct
  source 1..75: mol_type = other DNA
cttataccactgatgccaatggtcgcggtccggcctgggcaaactcgctgtttgaagacaatgctgaattcggtc

SEQ ID NO: 652027 - DNA, 75 bp, synthetic construct
  source 1..75: mol_type = other DNA
tcctgacacttatttccagtctcgcgaagccaccaacccatggtacaacgcggtctatgaccatgttgaacaggc

SEQ ID NO: 652028 - DNA, 75 bp, synthetic construct
  source 1..75: mol_type = other DNA
tatggcggtaacctgccatccacaccgtataccactgatgcaaacggtcgtggtccggcctgggcgaactcactg

SEQ ID NO: 652029 - DNA, 75 bp, synthetic construct
  source 1..75: mol_type = other DNA
gacagcgccctggccgaattgcagggcgcgattgccaaaagctacagcagcaaaggccaggatctggtggaacgc

SEQ ID NO: 652030 - DNA, 75 bp, synthetic construct
  source 1..75: mol_type = other DNA
gaagcaactaacccatggtacaacgcagtttacgaccatgttgaacaggcaatgaatgatttcgccgccgctacg

SEQ ID NO: 652031 - DNA, 75 bp, synthetic construct
  source 1..75: mol_type = other DNA
gtacagtgtgggtaaattcaacgccacggcagcggttggtggttacagcgaccagcaggcactggcggtgggtgt

SEQ ID NO: 652032 - DNA, 75 bp, synthetic construct
  source 1..75: mol_type = other DNA
cgcagacggctcaacaacatttactgtttatgataaagaagttcatgatttcatgaaggctgcggcatcaaagaa

SEQ ID NO: 652033 - DNA, 75 bp, synthetic construct
  source 1..75: mol_type = other DNA
gaaggtgcaaagaacaccatttctgttaacgatggtctggtggccctgtctggtcgtactgaccgtattgatgca

SEQ ID NO: 652034 - DNA, 75 bp, synthetic construct
  source 1..75: mol_type = other DNA
attacggacatccacaggcagaacgggtaattatcctgatgggatctgctatcggcacctgtgaagaagtggtag

SEQ ID NO: 652035 - DNA, 75 bp, synthetic construct
  source 1..75: mol_type = other DNA
gtttccgcctgacggtcgatcaacaccgtgtccgcgtgctgcgtctgctggatcaatttgccgataaaatcccgg

SEQ ID NO: 652036 - DNA, 75 bp, synthetic construct
  source 1..75: mol_type = other DNA
tatctgcctacggctctggaagcccgttctaaatatctgcgcgcggttgttaatgaagagctgatttcgacagcg

SEQ ID NO: 652037 - DNA, 75 bp, synthetic construct
  source 1..75: mol_type = other DNA
cgcccttatctggtgcgtattgatcgtgtgtatcacactcttgatattcacaggtctgacccggaatcgcttatg

SEQ ID NO: 652038 - DNA, 75 bp, synthetic construct
  source 1..75: mol_type = other DNA
agcgatgctggcgcatgcgtcatcttcattgagtgatgtaaaaggaagtgttctgttactatttactacccgcga

SEQ ID NO: 652039 - DNA, 75 bp, synthetic construct
  source 1..75: mol_type = other DNA
atgaaaaaaatcataatattgctcagtttactgatactcctgcctctgacggcaaccagtaagcccttaattcca

SEQ ID NO: 652040 - DNA, 75 bp, synthetic construct
  source 1..75: mol_type = other DNA
atgaaaaaaatcataatactgctcagtttactgatacttctgcctctgacggcagccagtacgccattgattcca

SEQ ID NO: 652041 - DNA, 75 bp, synthetic construct
  source 1..75: mol_type = other DNA
gtaaaaaacgtgatggtcatgcgctgagtgatgaagaaattcgtttctttatcaacggcattcgcgacaatacta

SEQ ID NO: 652042 - DNA, 75 bp, synthetic construct
  source 1..75: mol_type = other DNA
gcaccaccgcgctgctgaccgacatgaaccaggtgctggcatccagcgctggtaacgcggtcgaagtgcgtgaag

SEQ ID NO: 652043 - DNA, 75 bp, synthetic construct
  source 1..75: mol_type = other DNA
atggacgtgaaagtcggtagcggtgcatttatgccgacctacgaactctctgaagcccttgccgaagcgattgtt

SEQ ID NO: 652044 - DNA, 75 bp, synthetic construct
  source 1..75: mol_type = other DNA
gcggttctcgaagaacgtgcagacgacatgaaattcttcgctgaacgcgtagataaagatgctgtcagccgtctg

SEQ ID NO: 652045 - DNA, 75 bp, synthetic construct
  source 1..75: mol_type = other DNA
acccgatggcagcaaaacgccacagcattgagtatctgcgtgaagtcgctcacctgcgtccacgtaccaacctga

SEQ ID NO: 652046 - DNA, 75 bp, synthetic construct
  source 1..75: mol_type = other DNA
cgcaggtggattacaccgacgcagtgaccattctcgaaaactgcggcaggaagtttgaaaacccagtttactggg

SEQ ID NO: 652047 - DNA, 75 bp, synthetic construct
  source 1..75: mol_type = other DNA
ctgatagaaaatcacacactggcttatttacatgctggcctctggtatcagggaatcaataatgcattggctgtt

SEQ ID NO: 652048 - DNA, 75 bp, synthetic construct
  source 1..75: mol_type = other DNA
gtacaggctgtcatcaataattctctgcccaattacaatgaagacgtcctgcgtctgaccaccggctgctcggtc

SEQ ID NO: 652049 - DNA, 75 bp, synthetic construct
  source 1..75: mol_type = other DNA
ggacaaagatgctgttagccgcctggaacgcttcattgaagcagatttcgcccaggttgattacaccgaagcggt

SEQ ID NO: 652050 - DNA, 75 bp, synthetic construct
  source 1..75: mol_type = other DNA
ggttccattttcgatcacacggcggttggcctggcgctgacaggttattcaatgcctatcttctggtggggcatg

SEQ ID NO: 652051 - DNA, 75 bp, synthetic construct
  source 1..75: mol_type = other DNA
attatcgtccatgcgctgcgtaacgcgatgctgccggtggtgaccgttatcggcctgcaggtgggaacattgctg

SEQ ID NO: 652052 - DNA, 75 bp, synthetic construct
  source 1..75: mol_type = other DNA
aaagtcagcatccctgtgatttccggtaatggtcagtttgctgcggtggctgaaattaccgttaataatgtgccg

SEQ ID NO: 652053 - DNA, 75 bp, synthetic construct
  source 1..75: mol_type = other DNA
ggttccattttcgatcacacggcggttggtctggcgctgaccggctactcgatgccgatcttctggtggggcatg

SEQ ID NO: 652054 - DNA, 75 bp, synthetic construct
  source 1..75: mol_type = other DNA
actatctggatgatgaggatgctgactgggtatccaccgggcaggggcagaaatctgcaggtgacaccagtttta

SEQ ID NO: 652055 - DNA, 75 bp, synthetic construct
  source 1..75: mol_type = other DNA
actaccgccgggatgatgagtttatgatgtggggatcggcagatctcctgtggaaaaattacctacgagatgtga

SEQ ID NO: 652056 - DNA, 75 bp, synthetic construct
  source 1..75: mol_type = other DNA
actctggatgatttggtttcaagcgaactagtagattgcgtaattgttgctactccaaactatttacataaagag

SEQ ID NO: 652057 - DNA, 75 bp, synthetic construct
  source 1..75: mol_type = other DNA
aacattgccgagtatgaacaaaatctgatgcattacgcattgtcgcagttggcagcggtgccggatcttacgctc

SEQ ID NO: 652058 - DNA, 75 bp, synthetic construct
  source 1..75: mol_type = other DNA
agatattgttctgcaattatcaccaatgaacaaagtaacggcaaaagttttaccattgattctctggcgcgatta

SEQ ID NO: 652059 - DNA, 75 bp, synthetic construct
  source 1..75: mol_type = other DNA
tggccgttcagccggaaggcgcaacggataaaacgttccgcgccacgtcagcgaatcagaatttcgcgaccatta

SEQ ID NO: 652060 - DNA, 75 bp, synthetic construct
  source 1..75: mol_type = other DNA
cggtgaaaggtgccgggaccacactgtgggtttataaggggaacagtgacccttatgcgaacccgctttcagacg

SEQ ID NO: 652061 - DNA, 75 bp, synthetic construct
  source 1..75: mol_type = other DNA
aaattacgccggtcagtgcgattaaggtgacgccgacatccggtacggtggcaaaagggaaaacaaccaccctga

SEQ ID NO: 652062 - DNA, 75 bp, synthetic construct
  source 1..75: mol_type = other DNA
ttacgccggtcactgcgattaaggtgacgccgacatccggtacggtggcaaaagggaaaacaaccaccctgacgg

SEQ ID NO: 652063 - DNA, 75 bp, synthetic construct
  source 1..75: mol_type = other DNA
agtatcggtaaggccgtaacggcgaaggaagtgatcacccgtacggtgaaagtgaccaacgtgggcaaaccttct

SEQ ID NO: 652064 - DNA, 75 bp, synthetic construct
  source 1..75: mol_type = other DNA
ggatgtgttccgtggctgggtgagtgctattggtaaagcggtgaccgccaaagaggtgatcacccgtaccgtgaa

SEQ ID NO: 652065 - DNA, 75 bp, synthetic construct
  source 1..75: mol_type = other DNA
aggaagtgatcacccgcacggtgaaggtcaccaatgtgggccgtccgtcgatggcagaagatcacagcacggtca

SEQ ID NO: 652066 - DNA, 75 bp, synthetic construct
  source 1..75: mol_type = other DNA
gtaccggacatcactgcgcaatgccattaattaatggcctattacaacgtccctgcgatgtgtcgggcatcgctg

SEQ ID NO: 652067 - DNA, 75 bp, synthetic construct
  source 1..75: mol_type = other DNA
gctatgtgtcgggcgtcgttggctatgtataacacccatgaagaagtggatcgtctggtgacaggattgcaacgc

SEQ ID NO: 652068 - DNA, 75 bp, synthetic construct
  source 1..75: mol_type = other DNA
tcggcgggtgataccagttttaccctggcctggaagcccggtgaggccggccagcaggcgctgttgcggtggttt

SEQ ID NO: 652069 - DNA, 75 bp, synthetic construct
  source 1..75: mol_type = other DNA
tgaacgggcttgtggccacggtgaaaggcgtgaagcagggcagtgtcagcattgtgggcatgaccgctgacggga

SEQ ID NO: 652070 - DNA, 75 bp, synthetic construct
  source 1..75: mol_type = other DNA
cgcggcgctggagtatgtttcggcgctggggcttaatagcatagccgagtatgaacagaatctgatgcattatgc

SEQ ID NO: 652071 - DNA, 75 bp, synthetic construct
  source 1..75: mol_type = other DNA
tgaaggggaacacgatcacggtgaaaggtgttgcggcagggaaagcacagatccctgtggttaccggcaatggtg

SEQ ID NO: 652072 - DNA, 75 bp, synthetic construct
  source 1..75: mol_type = other DNA
aaagctgaaaatgatgctctgcagcgcaagcttgataatggtggtcgggtgctcgtcaaaggcaagtgtccagtg

SEQ ID NO: 652073 - DNA, 75 bp, synthetic construct
  source 1..75: mol_type = other DNA
atgcagaacttaaagatgcaggactggttcgttacggaacaacttttatgccggagggcagggtgttactgcgat

SEQ ID NO: 652074 - DNA, 75 bp, synthetic construct
  source 1..75: mol_type = other DNA
ggttcgttacggaacaacatttataccggagggcagggtgttgttgcgccatctgaaacagcagcgctacgtgca

SEQ ID NO: 652075 - DNA, 75 bp, synthetic construct
  source 1..75: mol_type = other DNA
atgacaaccattttgcagggcatgccggggacggtgcatcaactgatgcgcgtgctttcagatgttctgctgaag

SEQ ID NO: 652076 - DNA, 75 bp, synthetic construct
  source 1..75: mol_type = other DNA
ggcacgagaaaacaatgttgttgaatatgaaatacattggcgaaaacgtattcataaccaacataatatatggtc

SEQ ID NO: 652077 - DNA, 75 bp, synthetic construct
  source 1..75: mol_type = other DNA
tcagcctggtgagttgcattatgtcattgatgcagaacttaaagatgccgggctggttcgttacggaacaacttt

SEQ ID NO: 652078 - DNA, 75 bp, synthetic construct
  source 1..75: mol_type = other DNA
gtgatactccatgaacataacacaccttccttttatgaaattctctatggcaatttcgctggtgggctggagtta

SEQ ID NO: 652079 - DNA, 75 bp, synthetic construct
  source 1..75: mol_type = other DNA
tcattcgtgcggatatcgcctcctttgccaatttctggtcagactacaaaattcttctgaaaggaatacgcggta

SEQ ID NO: 652080 - DNA, 75 bp, synthetic construct
  source 1..75: mol_type = other DNA
atgaaccgaaaacccccatcattatatgaaattctctatggtaatttcactggcgggctggagctgaatcaggtt

SEQ ID NO: 652081 - DNA, 75 bp, synthetic construct
  source 1..75: mol_type = other DNA
cctggcgattatattaacaagaaagggcggctgcattttccagttgatgtttataattctccggaaaaagaaaaa

SEQ ID NO: 652082 - DNA, 75 bp, synthetic construct
  source 1..75: mol_type = other DNA
atgccgcgtccttccctttatgaaattctctatggcaatttcgctggcggactggagttaaatcaggtcggtgag

SEQ ID NO: 652083 - DNA, 75 bp, synthetic construct
  source 1..75: mol_type = other DNA
tagtcagactatttctccgggcgctgactcagtgccaatgggggcttatgctgaaagataaaaaagttattcctg

SEQ ID NO: 652084 - DNA, 75 bp, synthetic construct
  source 1..75: mol_type = other DNA
agataaacatgagcggtccactgtcttcccgcttccagtcgctgtgcgatattgttgatccgggttcatcaatgt

SEQ ID NO: 652085 - DNA, 75 bp, synthetic construct
  source 1..75: mol_type = other DNA
cattattgtaaacggtgaagtttacctcaatgaaaacgcctttctcgactttgtactgagtgattttgcagccca

SEQ ID NO: 652086 - DNA, 75 bp, synthetic construct
  source 1..75: mol_type = other DNA
gcaagccccggtacgctcgacattctcgcatcaacgaacagcgcaggagattacacgctgaccaatgcgctcaaa

SEQ ID NO: 652087 - DNA, 75 bp, synthetic construct
  source 1..75: mol_type = other DNA
gccatacggtgttcaatgcagggaatacttatagcggtaaaacgctggtcaatgacggcctcctgactattgcgt

SEQ ID NO: 652088 - DNA, 75 bp, synthetic construct
  source 1..75: mol_type = other DNA
attactgacatgcagcagcgccagcgtgctgctgatgcactcgatgctaaatacacgaaggagttagccaatgcg

SEQ ID NO: 652089 - DNA, 75 bp, synthetic construct
  source 1..75: mol_type = other DNA
ggacgcggacatcgcgatcgggcgctggcgcagctgctgtgccgtattacggggcggaagatgcctgtatcgtta

SEQ ID NO: 652090 - DNA, 75 bp, synthetic construct
  source 1..75: mol_type = other DNA
gatcatccaaatccagaagtcctgaaattcatcgagtatccaactcgtccgacgggcatacagacatttaatgaa

SEQ ID NO: 652091 - DNA, 75 bp, synthetic construct
  source 1..75: mol_type = other DNA
tattgattccgtaccttacctggatctcgatgctgcgattgcgttaatcccgggtatagatgaggcggaattttg

SEQ ID NO: 652092 - DNA, 75 bp, synthetic construct
  source 1..75: mol_type = other DNA
tgccggaattttttcatcaatggcagaaaccggagaacgcctggttcgctgggaacggacgcacacaccagaccc

SEQ ID NO: 652093 - DNA, 75 bp, synthetic construct
  source 1..75: mol_type = other DNA
agcattaccgtgtggggggtcattattccggtggtaggcctgtgcattatcggctggttctggtttagcccgacg

SEQ ID NO: 652094 - DNA, 75 bp, synthetic construct
  source 1..75: mol_type = other DNA
aagtggccgaagacgcagacatcagcaaagcacaggccgaagctgcggtgaatgcgctgatcaactctgtgactg

SEQ ID NO: 652095 - DNA, 75 bp, synthetic construct
  source 1..75: mol_type = other DNA
aaagtggtgcgctgggaaggtgatgcggagcgcaacccgttcgggctggcgctggactgttatgccggtgtgccc

SEQ ID NO: 652096 - DNA, 75 bp, synthetic construct
  source 1..75: mol_type = other DNA
agcccggccaggccatctgcagaaatggctgaaaggccgaatccagccacttgaggacgcggctggcacaaacct

SEQ ID NO: 652097 - DNA, 75 bp, synthetic construct
  source 1..75: mol_type = other DNA
cgcgtgaatgaactccgtctgcccggtcgtctgctggaagcagcccaggacagcctgttcagggcactggattca

SEQ ID NO: 652098 - DNA, 75 bp, synthetic construct
  source 1..75: mol_type = other DNA
ccgcgcgggatgcgcatatccgcactctgcatattgcgctggtcgcgttattcctgctggcatcaggcatgggat

SEQ ID NO: 652099 - DNA, 75 bp, synthetic construct
  source 1..75: mol_type = other DNA
cttcgggctggcgcttgactgctacagcagcacaccacaacggctggaagccgcgccgactgccggagggacaca

SEQ ID NO: 652100 - DNA, 75 bp, synthetic construct
  source 1..75: mol_type = other DNA
cgttatccgataaaggtggtgcgcatggagggggatcctgaacgtaatccgttcggactggcgctggactgctac

SEQ ID NO: 652101 - DNA, 75 bp, synthetic construct
  source 1..75: mol_type = other DNA
agtatccggggcgctccaacagaggttcctgttactaatctcgatgcaccaagtgtggtggccacaacgctcata

SEQ ID NO: 652102 - DNA, 75 bp, synthetic construct
  source 1..75: mol_type = other DNA
gcgagctggtggagaagatgaaagatctaatcccacgccagcagtttgatatcgctattcaggcagcgattggta

SEQ ID NO: 652103 - DNA, 75 bp, synthetic construct
  source 1..75: mol_type = other DNA
attcaggaacgtctggaacgcgagtacgaccttgacctgattactaccgctccgacagtagtgtatgaagtagaa

SEQ ID NO: 652104 - DNA, 75 bp, synthetic construct
  source 1..75: mol_type = other DNA
atcaggaagaatttgaggcggtcacgctggcgctgaaagccaatctggaagaagtttggggcagcagcctgaaaa

SEQ ID NO: 652105 - DNA, 75 bp, synthetic construct
  source 1..75: mol_type = other DNA
atggacgtggcatcgctggataaagcccgccagttgatgcgtgttcagaaagaaggtgagcgtcacctgaatatt

SEQ ID NO: 652106 - DNA, 75 bp, synthetic construct
  source 1..75: mol_type = other DNA
accaccggagataaacaggccactattgcactggcgacctatggcgagctgttcagtatcacccgtcaggccatt

SEQ ID NO: 652107 - DNA, 75 bp, synthetic construct
  source 1..75: mol_type = other DNA
cctcagtgcgctacgggcatatcttacccccggctgctatagccagattgaccatgagtttcgccagcgactgca

SEQ ID NO: 652108 - DNA, 75 bp, synthetic construct
  source 1..75: mol_type = other DNA
atcgccattaaagccgcgcaaacgggtcatctggtattgtctacgctacacactaattccacctgcgaaacgctg

SEQ ID NO: 652109 - DNA, 75 bp, synthetic construct
  source 1..75: mol_type = other DNA
gctggaacaacgcgcgtctgatattcatatcgaaccagcagacaatggataccgtatccgcctgcgtatcgacgg

SEQ ID NO: 652110 - DNA, 75 bp, synthetic construct
  source 1..75: mol_type = other DNA
gggggcgaaaaggtagtattacgcttgttacaacaggtaaaccagaggctggatatcaacgcgttaggaatgcag

SEQ ID NO: 652111 - DNA, 75 bp, synthetic construct
  source 1..75: mol_type = other DNA
cattccagacaatgtatggccatcgccgctgcccccactggcaggcacccggttgtgtacattgctaccacggtt

SEQ ID NO: 652112 - DNA, 75 bp, synthetic construct
  source 1..75: mol_type = other DNA
ccgctgccccactggcaggcacccggttgtgtacattgctaccacggtttttatggtcgcacggccttatttgaa

SEQ ID NO: 652113 - DNA, 75 bp, synthetic construct
  source 1..75: mol_type = other DNA
ggtggtgaaaaggtggtattaaggttgttacagcaggtgagccaggcactggatgtcaacacgcttggaatgcag

SEQ ID NO: 652114 - DNA, 75 bp, synthetic construct
  source 1..75: mol_type = other DNA
gattgcgcagctcagtgcttatctgacgccgtcctgccgggcgtattttgagaaagaggccgcttaccgcaccac

SEQ ID NO: 652115 - DNA, 75 bp, synthetic construct
  source 1..75: mol_type = other DNA
aaaaccgggaccagcatattctgaccctgcgggtgatctgcggggtgctggtgctctgtctgttagtggcgttta

SEQ ID NO: 652116 - DNA, 75 bp, synthetic construct
  source 1..75: mol_type = other DNA
aaagtactgcgctacaacatcgaccagcagaaaaacccgtgggggctggcgctggactgtttctcatcgccgccg

SEQ ID NO: 652117 - DNA, 75 bp, synthetic construct
  source 1..75: mol_type = other DNA
ctgcaggataaatcatctaactttgccgatggcattgaagatgataactgggaagagcaggcggcaaaccgcctg

SEQ ID NO: 652118 - DNA, 75 bp, synthetic construct
  source 1..75: mol_type = other DNA
ctgcaggataaatcatctaactttgccgacggcattgaagatgataactgggaagagcaggcagcaaaccgtctg

SEQ ID NO: 652119 - DNA, 75 bp, synthetic construct
  source 1..75: mol_type = other DNA
ctggtctccttcgccgttcactggatcaaagcagagatccacgaatacgttctgcgtaactggcgtatcgtcaaa

SEQ ID NO: 652120 - DNA, 75 bp, synthetic construct
  source 1..75: mol_type = other DNA
aagcgcaaaccctggcaaactgctacaccgcaatggaaatggatcttgaagtggtgccggtactgaataagattg

SEQ ID NO: 652121 - DNA, 75 bp, synthetic construct
  source 1..75: mol_type = other DNA
tcaccggggtgaccatgacctataccgacagccatgcaggcagtgatgccttcagtggtgaaacgaagtctgtgg

SEQ ID NO: 652122 - DNA, 75 bp, synthetic construct
  source 1..75: mol_type = other DNA
ggcgtaccggtgttgatgtgggtaaatccttctcgggtaaggactggaaagtcacagcccgcgccggccttggct

SEQ ID NO: 652123 - DNA, 75 bp, synthetic construct
  source 1..75: mol_type = other DNA
ggagaaactgttttacaggatgcttctggtaaaaaacacttcaaaggggaaaaagacagcaggatgctaatgaac

SEQ ID NO: 652124 - DNA, 75 bp, synthetic construct
  source 1..75: mol_type = other DNA
tcggatattcatgtaggaaccacggcggcaaccattaatctgggagacagtgatgctgttgtcgggaaggcggat

SEQ ID NO: 652125 - DNA, 75 bp, synthetic construct
  source 1..75: mol_type = other DNA
attgccatataaccaaaagcctgattgccgtctccgaactggcccgcaggggcaggggtatctgtaaaagccatc

SEQ ID NO: 652126 - DNA, 75 bp, synthetic construct
  source 1..75: mol_type = other DNA
ttgccactttacaagtaaaagagctttctgcagataataccacgttcctgatgcataccaacaacagctgggctg

SEQ ID NO: 652127 - DNA, 75 bp, synthetic construct
  source 1..75: mol_type = other DNA
cgcaaaatgactttgacaaaaccatagcctacacctctggtaagggggcactgcagtggaaatatgatgcggcta

SEQ ID NO: 652128 - DNA, 75 bp, synthetic construct
  source 1..75: mol_type = other DNA
gctggcaaatttcaagatgaaagaataacagtaattaaaaacagaaataacaaaggcgtcgcggaatcaagaaat

SEQ ID NO: 652129 - DNA, 75 bp, synthetic construct
  source 1..75: mol_type = other DNA
ctattagatgatttacctgatgagcgtatcagagagattttggaagaaattgagagcagcaaactctcaagtagt

SEQ ID NO: 652130 - DNA, 75 bp, synthetic construct
  source 1..75: mol_type = other DNA
tcacgccggtaatcaacacggaaaaaactgatgacgccacaaaatgggtcctgaaagggtatcagacagtctctg

SEQ ID NO: 652131 - DNA, 75 bp, synthetic construct
  source 1..75: mol_type = other DNA
attgccatataaccaaaagcctgattgctgtctccgaactggcccgcagggtcacctgtaagagtcatcgtagac

SEQ ID NO: 652132 - DNA, 75 bp, synthetic construct
  source 1..75: mol_type = other DNA
cgcaaaatgattttgacaaaactataacctatatctctggtgggggggcactgcagtggaaatatgatgcggcta

SEQ ID NO: 652133 - DNA, 75 bp, synthetic construct
  source 1..75: mol_type = other DNA
tcatgaacggtaccggttcggcagatggtggttacagcgataactacactcacgttcagattggtgccgacagaa

SEQ ID NO: 652134 - DNA, 75 bp, synthetic construct
  source 1..75: mol_type = other DNA
aggcgaaagccgggcgcagcttgcctcgctgaaactgttacaggtcggcggcgcacgtctttctgccacgcttgc

SEQ ID NO: 652135 - DNA, 75 bp, synthetic construct
  source 1..75: mol_type = other DNA
tggcctatttccagctttccggcggcaccaccggcacaccgaagctgatcccgcgcactcataacgactactact

SEQ ID NO: 652136 - DNA, 75 bp, synthetic construct
  source 1..75: mol_type = other DNA
cgtatcagtctcggcatacttatgcttgctgggctttaactgccggagcaaatccaaacttcatagccaaccaga

SEQ ID NO: 652137 - DNA, 75 bp, synthetic construct
  source 1..75: mol_type = other DNA
tgttgcagagcattcttccattcgcgtggtgcagctgctcaacgacagcggtgagcataacttgcaggatgcgat

SEQ ID NO: 652138 - DNA, 75 bp, synthetic construct
  source 1..75: mol_type = other DNA
acacggtgttggtgaagtggcgctacagcgcgtttcatcgttctccgctggaacaaatgctcaaagagagtggcc

SEQ ID NO: 652139 - DNA, 75 bp, synthetic construct
  source 1..75: mol_type = other DNA
tggcggaagggctggtgaattacacccgtctcgatgatagcgcggagaaaattattcatacccagggctacccga

SEQ ID NO: 652140 - DNA, 75 bp, synthetic construct
  source 1..75: mol_type = other DNA
aggcgctgatggcgcgcgccgggtttgaaaaaactgaacgtgataatgtctacaacgggatgaccctgcgtgaat

SEQ ID NO: 652141 - DNA, 75 bp, synthetic construct
  source 1..75: mol_type = other DNA
caacctctgctggtaacatcgaactggagctggatagccagaaagcaccggtgtcagtgcaaaactttgtcgatt

SEQ ID NO: 652142 - DNA, 75 bp, synthetic construct
  source 1..75: mol_type = other DNA
aaaaaagcaatagttattaactttgatagaaacttgggtttgggcgaggcgattaatagaattgctgaaatcatt

SEQ ID NO: 652143 - DNA, 75 bp, synthetic construct
  source 1..75: mol_type = other DNA
gcgcgtgaaaatgcggttaacaaaatttggatgctggaaggttacttgctgaagcagaacccgactattccagtt

SEQ ID NO: 652144 - DNA, 75 bp, synthetic construct
  source 1..75: mol_type = other DNA
aggaaccaatcgggtcattcatcttattaagccagcaatcgacgctctccggagtcagatgacattaacgagact

SEQ ID NO: 652145 - DNA, 75 bp, synthetic construct
  source 1..75: mol_type = other DNA
aggcgctgatggcgcgtgccggatttgaaaaaaccgaacgtgataatgtctacaacgggatgaccctgcgtgaat

SEQ ID NO: 652146 - DNA, 75 bp, synthetic construct
  source 1..75: mol_type = other DNA
tagtgtccacgggcaaggaacatttacattacctgctcgcagtcgggaaaatcatttattacatagttttactga

SEQ ID NO: 652147 - DNA, 75 bp, synthetic construct
  source 1..75: mol_type = other DNA
tgccggcgctgctgccggcatccttactggccggcacggtcgtcttcactgacagtcagcatctgccggccaacc

SEQ ID NO: 652148 - DNA, 75 bp, synthetic construct
  source 1..75: mol_type = other DNA
tgtttttcctgccgacggcggtatcagccggcatagccctttataccgattctcaacatcctcctgtaaacccgc

SEQ ID NO: 652149 - DNA, 75 bp, synthetic construct
  source 1..75: mol_type = other DNA
gttaaaaaggctctagtgaaataccacgaaatgcagcatggtaatgggaatctgtcaagcgatgagtgggaatta

SEQ ID NO: 652150 - DNA, 75 bp, synthetic construct
  source 1..75: mol_type = other DNA
cgaaggcattcccggcgacaagccgctgtatgcccacggttacctgctgcgctcaattaactacgtcgtgaggaa

SEQ ID NO: 652151 - DNA, 75 bp, synthetic construct
  source 1..75: mol_type = other DNA
cagaaaaaatctcgacctggatatccatgtccaaaccgtattctgtataaaacgcgttcgctatatgggaagtac

SEQ ID NO: 652152 - DNA, 75 bp, synthetic construct
  source 1..75: mol_type = other DNA
atgattaaagtcttaattgtcgatgatgaaccgttagcacgggagaacctgcgtgtatttttgcaggagcagagc

SEQ ID NO: 652153 - DNA, 75 bp, synthetic construct
  source 1..75: mol_type = other DNA
tggcgacggcccgtgacccggaagccgtcagtatgcgcacccgtcgtcacgtgacgatagtggagagcacgctga

SEQ ID NO: 652154 - DNA, 75 bp, synthetic construct
  source 1..75: mol_type = other DNA
tcgcagcaaatcatcgaccgcatctgccggtatgaggggctgctgtattacgacctgccggatggcagcctgttc

SEQ ID NO: 652155 - DNA, 75 bp, synthetic construct
  source 1..75: mol_type = other DNA
gcatgcccgggaacttggtatccgcaagttgcccgctgtcgtttttgacgaccgggaagtggtttatggcacaac

SEQ ID NO: 652156 - DNA, 75 bp, synthetic construct
  source 1..75: mol_type = other DNA
tatcccgccgtggtgtttgacgaccgctacgtggtttacggcacggcagatgttgcggtagctgaagctcgtctt

SEQ ID NO: 652157 - DNA, 75 bp, synthetic construct
  source 1..75: mol_type = other DNA
ttatgcctgtatatcgataatagctttgcaattaccagaatatcgccgctctgggcagggctgattggtgtctgt

SEQ ID NO: 652158 - DNA, 75 bp, synthetic construct
  source 1..75: mol_type = other DNA
aacaatccgtggttccagctctacccggatatcggcaacctgtcggcgtgggacaacgacgtgcagatggagttg

SEQ ID NO: 652159 - DNA, 75 bp, synthetic construct
  source 1..75: mol_type = other DNA
taatgagccatgcagaaaacgcactgactaacagtgaatgcttgcggcaaatattgcttatctggcttgatggtt

SEQ ID NO: 652160 - DNA, 75 bp, synthetic construct
  source 1..75: mol_type = other DNA
gcgtcgggcagattgatattgatccgatggtcgcaggtattatcactctcggttttatctacggtgcttacttta

SEQ ID NO: 652161 - DNA, 75 bp, synthetic construct
  source 1..75: mol_type = other DNA
gttacgaggatggtccgggggagcattcacaaagctggctgagtgccgatgaaattctcaatgctccagaccagg

SEQ ID NO: 652162 - DNA, 75 bp, synthetic construct
  source 1..75: mol_type = other DNA
acgataaaatttataacatgtctaacactgttgtaaatcctgcattgaaaaatcaagttggtgagctttctggtc

SEQ ID NO: 652163 - DNA, 75 bp, synthetic construct
  source 1..75: mol_type = other DNA
tcataacaataaaggaaaaatggcaattgacggtattgatgctgatggctctgttcgggttgtgagtgcagatgg

SEQ ID NO: 652164 - DNA, 75 bp, synthetic construct
  source 1..75: mol_type = other DNA
caatgagccatgcagaaaacgcactgactaacagtgaatgtttgcggcaaatattgcttatctggcttgatggtt

SEQ ID NO: 652165 - DNA, 75 bp, synthetic construct
  source 1..75: mol_type = other DNA
gaagttcaggtagcactgctgactgcacagatcaaccacctgcagggtcactttgcagagcacaaaaaagatcac

SEQ ID NO: 652166 - DNA, 75 bp, synthetic construct
  source 1..75: mol_type = other DNA
gaaggtaagattaataaaaagggaaaatacaagtctatagatgatattactgatatcgttggtatcaggatcatc

SEQ ID NO: 652167 - DNA, 75 bp, synthetic construct
  source 1..75: mol_type = other DNA
cgctggtgaacgcgattgttgaaaccggcgtacgcgtaccgtcaatgtgcctttctgctcatcgtcgtttcccgc

SEQ ID NO: 652168 - DNA, 75 bp, synthetic construct
  source 1..75: mol_type = other DNA
actatgccaatttactgttaaatgatcccaatctctcttttgcctatttcccccggtctgcggtatctcccacct

SEQ ID NO: 652169 - DNA, 75 bp, synthetic construct
  source 1..75: mol_type = other DNA
ccgagcagcaaatgatgaaatggcaactctggtttctgaataaccagcgcctggcgataaaaaaactggaagagc

SEQ ID NO: 652170 - DNA, 75 bp, synthetic construct
  source 1..75: mol_type = other DNA
gaacagggcaatgtgactgaatttgtttcggtagggcatcgtgtcagcttgcaggtcaacgttgaggtcaaggac

SEQ ID NO: 652171 - DNA, 75 bp, synthetic construct
  source 1..75: mol_type = other DNA
atgtggtgctgaaagcaaccaaagttgacggtgtgtttaccgctgacccggcgaaagatccaactgcaactatgt

SEQ ID NO: 652172 - DNA, 75 bp, synthetic construct
  source 1..75: mol_type = other DNA
aaggtacgactgcggacatgatccataaaatcgttccgctgatcgcttatatgagcaagttttttaccctcaagg

SEQ ID NO: 652173 - DNA, 75 bp, synthetic construct
  source 1..75: mol_type = other DNA
gtgggaaaaggctaaagcgtttgataactcttgtccgctttccgggtttattcccgcggcggaatttaccggcga

SEQ ID NO: 652174 - DNA, 75 bp, synthetic construct
  source 1..75: mol_type = other DNA
tcgcaaacagtaagaaccagtgcttttggcatatggcaagggcgtgaggaagatggtgtcgaataccagcgtaag

SEQ ID NO: 652175 - DNA, 75 bp, synthetic construct
  source 1..75: mol_type = other DNA
gttcgccggttcactgatggccagaaaccgcgcagcacagataatgagccttctggaaacggcaaaacgtaatgg

SEQ ID NO: 652176 - DNA, 75 bp, synthetic construct
  source 1..75: mol_type = other DNA
cgctcctctggcgatcccgccgatcaaaaatatgttgagctaaaggcgcgtgcagaaaaggcgctggatgatgtg

SEQ ID NO: 652177 - DNA, 75 bp, synthetic construct
  source 1..75: mol_type = other DNA
ggtctttgcccgttcagatgtcgggcttcccgtcagttcgatggctgacatggttggcgcggcgggtgccgcatt

SEQ ID NO: 652178 - DNA, 75 bp, synthetic construct
  source 1..75: mol_type = other DNA
gaggagttggatccagactatggcctctttctcgtcaatcacgaccaaagcagtttttagcgttgggacaaaaca

SEQ ID NO: 652179 - DNA, 75 bp, synthetic construct
  source 1..75: mol_type = other DNA
accatttacctgcccaaaggcatggtcttcatgacatcggcgcgggactataaaatctggcaggagtgtgatgga

SEQ ID NO: 652180 - DNA, 75 bp, synthetic construct
  source 1..75: mol_type = other DNA
cgttctgaaagcgcccgccgacagctcccattattctctatcattgatgaacctgaagcagtaaaatcaccccgg

SEQ ID NO: 652181 - DNA, 75 bp, synthetic construct
  source 1..75: mol_type = other DNA
gctggcggcgctagcaacacaatggcataaaccagatagtgatccgttactgttggtgctggcagcggatcatgt

SEQ ID NO: 652182 - DNA, 75 bp, synthetic construct
  source 1..75: mol_type = other DNA
gagtcggtagattacgcggtcatggaacgcacggcagatgccgttgtggtgccaatggatgcgggctggagcgat

SEQ ID NO: 652183 - DNA, 75 bp, synthetic construct
  source 1..75: mol_type = other DNA
acgaattacggtaaggccaggagagaaaatatcaactcaaatgcataattatcgttcagaacattggatagttgt

SEQ ID NO: 652184 - DNA, 75 bp, synthetic construct
  source 1..75: mol_type = other DNA
tcgcgttcggcacatacattttgtcggcatcggtggtgccggtatgggcggtattgccgaagttctggccaatga

SEQ ID NO: 652185 - DNA, 75 bp, synthetic construct
  source 1..75: mol_type = other DNA
agagaaagtggagacctcgatttatgtcgtgaagcgatgaatgcgataaagaatgctgatataccagcgccgccg

SEQ ID NO: 652186 - DNA, 75 bp, synthetic construct
  source 1..75: mol_type = other DNA
agaaaacgctggcgcgtttgcgtcaggagcgcagcaagcaggatgtttcgctgttaccggaaaatcaacaggcgc

SEQ ID NO: 652187 - DNA, 75 bp, synthetic construct
  source 1..75: mol_type = other DNA
cagccgcaacaacgtgaacactgatgcgggagctggctttgagcaaacattgacgggcctgacgctcggtatcga

SEQ ID NO: 652188 - DNA, 75 bp, synthetic construct
  source 1..75: mol_type = other DNA
gcgaaagatccaactgcaactatgtacgagcagttgacctacagcgaagtgctggaaaaagagctgaaagtgatg

SEQ ID NO: 652189 - DNA, 75 bp, synthetic construct
  source 1..75: mol_type = other DNA
aaaagagctgaaagtcatggacctggcggccttcacgctggctcgtgaccataaattaccgattcgtgttttcaa

SEQ ID NO: 652190 - DNA, 75 bp, synthetic construct
  source 1..75: mol_type = other DNA
ataaacgcattctgcttaagttgagtggcgaagctctgcagggcactgaaggcttcggtattgatgcaagcatac

SEQ ID NO: 652191 - DNA, 75 bp, synthetic construct
  source 1..75: mol_type = other DNA
ccgggagagggaaaacgcggctcatgatgttcgtgaggatacatccggtgcgttaacgcgcatcagagttctgac

SEQ ID NO: 652192 - DNA, 75 bp, synthetic construct
  source 1..75: mol_type = other DNA
atgaatcaggcgaaccagcttacagtgcgttgccatacggttctgaaattgaacttgatagcggcgaagcctttg

SEQ ID NO: 652193 - DNA, 75 bp, synthetic construct
  source 1..75: mol_type = other DNA
ccgaaatgctggctgagttaatgcgttttcgtcatggcatcgccattgccggaacgcacggcaaaacgacaacca

SEQ ID NO: 652194 - DNA, 75 bp, synthetic construct
  source 1..75: mol_type = other DNA
gttctaaatatctgcgcgcggttgttaatgaagagctgatttcgacagcgaaagtaacaaacaaaaaatcgttgg

SEQ ID NO: 652195 - DNA, 75 bp, synthetic construct
  source 1..75: mol_type = other DNA
aaacattgacggggctgacgctcggtatcgatagtcgtttctcccgtgaagaaagcagcacaactcaggcgggtg

SEQ ID NO: 652196 - DNA, 75 bp, synthetic construct
  source 1..75: mol_type = other DNA
aacggcttgatgaactggcccggattctggggcgtgagccggatatatccgggagtgccgcagagatagcgcagc

SEQ ID NO: 652197 - DNA, 75 bp, synthetic construct
  source 1..75: mol_type = other DNA
gacgctggatgagttaatcgctaaggcggctgaatatggcgataagttgatgacagaggagtctgtcaggaagta

SEQ ID NO: 652198 - DNA, 75 bp, synthetic construct
  source 1..75: mol_type = other DNA
accagcacggcgaatgaagcagcccgccctgaagcgccatcgcttttcagccgtctgcgccgttttctgaccggt

SEQ ID NO: 652199 - DNA, 75 bp, synthetic construct
  source 1..75: mol_type = other DNA
ttcaccttcggaaccccggaaaatggccgtcccctgttatttgcggaaggttacgcaactgcagcctccctgcac

SEQ ID NO: 652200 - DNA, 75 bp, synthetic construct
  source 1..75: mol_type = other DNA
ttcaccttcggaaccccggaaaatgggcgacccctgttatttgcggaaggttacgctactgccgcctccctgcac

SEQ ID NO: 652201 - DNA, 75 bp, synthetic construct
  source 1..75: mol_type = other DNA
ggaactgaaagcacagtacaaccgacaggctgcctatgcccgccgctatgtcagcaaatggccgcaggccacggc

SEQ ID NO: 652202 - DNA, 75 bp, synthetic construct
  source 1..75: mol_type = other DNA
tgcaacgcagggaggacgcggagcgggaactgaaagcacagtacaaccgacaggccgcgtatgcccgccgctata

SEQ ID NO: 652203 - DNA, 75 bp, synthetic construct
  source 1..75: mol_type = other DNA
ccagcccggaagacacatcgtcagcagaaccggacacgattatctttgcgccccgccggcccaacagtccgcagc

SEQ ID NO: 652204 - DNA, 75 bp, synthetic construct
  source 1..75: mol_type = other DNA
gctgaagcaggaacggagacagaacagacaacggacgtgccccttcagcagccccaacaaccccgtacagaaccg

SEQ ID NO: 652205 - DNA, 75 bp, synthetic construct
  source 1..75: mol_type = other DNA
cgtttgcgcactggagcacgatgggtttgtttcatatgaagaggtcactgactggtcccatccatatcttttgat

SEQ ID NO: 652206 - DNA, 75 bp, synthetic construct
  source 1..75: mol_type = other DNA
aaatattcgtcttgatgataatcaacccttgccggggcagtatgacatcgatatggctttgttgaataaatcaga

SEQ ID NO: 652207 - DNA, 75 bp, synthetic construct
  source 1..75: mol_type = other DNA
gcaacccgacacaccggaggaagagccccccggcaaactcagacccggtgaaagtgtgactgccgtcctgacaaa

SEQ ID NO: 652208 - DNA, 75 bp, synthetic construct
  source 1..75: mol_type = other DNA
acaacacgatcctctggccagactgcatctgcgggcattcgctcagcaacagcgcgatgataacgcacgtaaact

SEQ ID NO: 652209 - DNA, 75 bp, synthetic construct
  source 1..75: mol_type = other DNA
gctgaagacacgctcacagaccgtcactttctggggggatgccttcggcaaactgacccgggattacaaagccgg

SEQ ID NO: 652210 - DNA, 75 bp, synthetic construct
  source 1..75: mol_type = other DNA
gtcacgccactgaaaataacggcaaagatgagcggcaccctgataacgttcaggcgcaaacggaaagctctgtag

SEQ ID NO: 652211 - DNA, 75 bp, synthetic construct
  source 1..75: mol_type = other DNA
gcggcgggctcgccggattactctgcggcctgcaactgcaaaaacacggactgcgctgtgccattgttacgcgtg

SEQ ID NO: 652212 - DNA, 75 bp, synthetic construct
  source 1..75: mol_type = other DNA
tcacagcggctgtcagatgtgcagcaaacggaattatggtatcgctggaaagaggagggcatgccggagccggat

SEQ ID NO: 652213 - DNA, 75 bp, synthetic construct
  source 1..75: mol_type = other DNA
tttttatctcagagtccggtatcgattattacctgccagattcaccgggagaatcttcggttattactgacccgg

SEQ ID NO: 652214 - DNA, 75 bp, synthetic construct
  source 1..75: mol_type = other DNA
gctgttcgcacccgcattaaactgttttatcgcccggcagggctacagggtgatgtaaaaactgcgccaaatgaa

SEQ ID NO: 652215 - DNA, 75 bp, synthetic construct
  source 1..75: mol_type = other DNA
acattcacagtggactggaatctttgcgtcagcaggctccagcccatccttacactcttctcgggccacaacgcg

SEQ ID NO: 652216 - DNA, 75 bp, synthetic construct
  source 1..75: mol_type = other DNA
tactcgatctcgcttgccaggcgcaggcattaatcgctgaaagcggtgcgcaattacagggcagcgtagaactgg

SEQ ID NO: 652217 - DNA, 75 bp, synthetic construct
  source 1..75: mol_type = other DNA
atggcaattgatatctttcagtcacttaaaaattgcgtattcgaccttcagcgcgctgacgttcagaactatcag

SEQ ID NO: 652218 - DNA, 75 bp, synthetic construct
  source 1..75: mol_type = other DNA
accgcgtggtcatcaagcgcatggaagaagagaagctgtccgccggcgggatcgtgatcccggattcggccaccg

SEQ ID NO: 652219 - DNA, 75 bp, synthetic construct
  source 1..75: mol_type = other DNA
tgataatgaaattgtcattgttggattttcaagagaacacatacctttcctttcatcagatggaaataacaatcc

SEQ ID NO: 652220 - DNA, 75 bp, synthetic construct
  source 1..75: mol_type = other DNA
gcaacgctccagtttatcgccaccacctttagtttgccggttaaaacgacgattgccaccgcgctgtttatgatg

SEQ ID NO: 652221 - DNA, 75 bp, synthetic construct
  source 1..75: mol_type = other DNA
actaaccgtaaaatattttggcaaaaaacaggtttatttagccggcatggtactgtgggccgtgggtgatattct

SEQ ID NO: 652222 - DNA, 75 bp, synthetic construct
  source 1..75: mol_type = other DNA
tgatgacgcctgacgatagcgggaatgccttggcatctgaaagcacgcgactgcgtgcacgtcaaaatgtcttgt

SEQ ID NO: 652223 - DNA, 75 bp, synthetic construct
  source 1..75: mol_type = other DNA
gacaacccgcaagaaacatgtttatcaagagaagttatcaagcggttaggcattaatagcgataactcgccagcg

SEQ ID NO: 652224 - DNA, 75 bp, synthetic construct
  source 1..75: mol_type = other DNA
tagctggttccgcggtaaagatctggataaagatgaagagttccagaaattcatctccgttccagaaaaccgcga

SEQ ID NO: 652225 - DNA, 75 bp, synthetic construct
  source 1..75: mol_type = other DNA
tggcggtgtacggtatcgcatggatggcagaaaccatgttcggtgcgcatatgtctgaaattcagggcgtactgg

SEQ ID NO: 652226 - DNA, 75 bp, synthetic construct
  source 1..75: mol_type = other DNA
taaaattggccccggcttatatcagtacacatctgttgatgattgcactcgctatagagtcctgaggctctactc

SEQ ID NO: 652227 - DNA, 75 bp, synthetic construct
  source 1..75: mol_type = other DNA
taggtaaactccctgttgagatgaaggtagcccagtggcgctggttgtacgtgacgacattcatcaacgaagaag

SEQ ID NO: 652228 - DNA, 75 bp, synthetic construct
  source 1..75: mol_type = other DNA
cggcttaagaatcatgcaatgtattgctgaagccgatgatgccggattcctgggaagattttcagtcgatatgaa

SEQ ID NO: 652229 - DNA, 75 bp, synthetic construct
  source 1..75: mol_type = other DNA
gccgtttgtgacctgtacactgaccattctttgcggtacgggtcatgtggtttacaccattctgccgatcatcta

SEQ ID NO: 652230 - DNA, 75 bp, synthetic construct
  source 1..75: mol_type = other DNA
cgatacaaaaacattactgggacataaagtccaagcaaccaccgatcgttataacgatactcgtggtcaggaatg

SEQ ID NO: 652231 - DNA, 75 bp, synthetic construct
  source 1..75: mol_type = other DNA
atcagcgtatgtgcatacaagcgagcaaaccctggcatgaaagcagtgtcatggtgggaggctgatagctttggt

SEQ ID NO: 652232 - DNA, 75 bp, synthetic construct
  source 1..75: mol_type = other DNA
gcatggcgatgaatgcctgggcgcgtcctgatggcgaaaaagttccagcagctggatgtagtggtcaagtaatat

SEQ ID NO: 652233 - DNA, 75 bp, synthetic construct
  source 1..75: mol_type = other DNA
aacctgagcgattacttcgccaaagcgcgagatctggctggaataattccaccagcaggaaaaacaccgccaaca

SEQ ID NO: 652234 - DNA, 75 bp, synthetic construct
  source 1..75: mol_type = other DNA
tgactggaaaatttcacggactcggaacagacaaaggtaaggcagaaaaaatcgcttccacagccaatcagcgaa

SEQ ID NO: 652235 - DNA, 75 bp, synthetic construct
  source 1..75: mol_type = other DNA
gactggcaaaaaatttacaatgcaacgcctgaaaaacactttatccgtaacgcaatgcttcttgcgattgttact

SEQ ID NO: 652236 - DNA, 75 bp, synthetic construct
  source 1..75: mol_type = other DNA
aagtcggttttatccggtaaaacccgcgatatgttgcgggcatataaaacagcgcagggagaggtcgggcgtgag

SEQ ID NO: 652237 - DNA, 75 bp, synthetic construct
  source 1..75: mol_type = other DNA
actcaccagttgatgaacttaagaaagggctggatgcactccgggatgatcctgtacacaaattgcgttttcaac

SEQ ID NO: 652238 - DNA, 75 bp, synthetic construct
  source 1..75: mol_type = other DNA
ggactggtcgatagctggcgttattcacccaatatgctccacgcgctggccagcagtattcagactatgaagtta

SEQ ID NO: 652239 - DNA, 75 bp, synthetic construct
  source 1..75: mol_type = other DNA
tgttactcatcatcggtacgggataaaggcgtgcgcagcaagagaatgccgctgccgattgagaaatgggattta

SEQ ID NO: 652240 - DNA, 75 bp, synthetic construct
  source 1..75: mol_type = other DNA
cccgtatcgcccgggaacacgatatcaatgttaacctcctgttcaaatggctcaggctctggcagaacgaagggc

SEQ ID NO: 652241 - DNA, 75 bp, synthetic construct
  source 1..75: mol_type = other DNA
atcgtggccgcagcgatcacaacggactagccagcctggcggactgggtgacacgccttgttacccgcagtccgt

SEQ ID NO: 652242 - DNA, 75 bp, synthetic construct
  source 1..75: mol_type = other DNA
gcgatattcgccggggcagttatacgcgctggttacgagcgaacgggagcgggggtacacatggcgtggagtaac

SEQ ID NO: 652243 - DNA, 75 bp, synthetic construct
  source 1..75: mol_type = other DNA
atgaagaaagtacccagggtcctcggggatgcagctgcaaaattttttgcaactgatacctatatcaacggaaca

SEQ ID NO: 652244 - DNA, 75 bp, synthetic construct
  source 1..75: mol_type = other DNA
atggcgctgacgaaaaaacaacgcgcagagctacgcatgaagtttggcggtcgctgtgcttattgcgggtgcgag

SEQ ID NO: 652245 - DNA, 75 bp, synthetic construct
  source 1..75: mol_type = other DNA
catgccacccatgcaatctgcacaagcattgcagtagtctggaagattatcggcgaattatcagtgatggtcgtc

SEQ ID NO: 652246 - DNA, 75 bp, synthetic construct
  source 1..75: mol_type = other DNA
ttaggtgttgatttccttaataacaatccaaatatatgtgagcatctttcaaagttgattggtaatatttacttg

SEQ ID NO: 652247 - DNA, 75 bp, synthetic construct
  source 1..75: mol_type = other DNA
atcaatcatcttatgataaaggaaatgattatgctcaagatattgcaaacagattaatgtatgttgctttctcta

SEQ ID NO: 652248 - DNA, 75 bp, synthetic construct
  source 1..75: mol_type = other DNA
gggggcgataaagaaaatgataaacaaagataaaaatgttgtatctgtgtcaacaatacatggttcaaagggtga

SEQ ID NO: 652249 - DNA, 75 bp, synthetic construct
  source 1..75: mol_type = other DNA
gatttggctcggttctccttgagtgggatatgcccaattatcgaggtcattcactgactgaagtctggcggggta

SEQ ID NO: 652250 - DNA, 75 bp, synthetic construct
  source 1..75: mol_type = other DNA
ggtccatggaatgctgaaaaaggcactcaggcacaaacacagatcggcgtgaaggccatcattgaccagatccgc

SEQ ID NO: 652251 - DNA, 75 bp, synthetic construct
  source 1..75: mol_type = other DNA
ttattcagaacgggaactttcaggttgattctcagggtaacctgaatattggtggcctttttagtgttacgtcgc

SEQ ID NO: 652252 - DNA, 75 bp, synthetic construct
  source 1..75: mol_type = other DNA
ttactctaatcagaatgtggggctggtgatccgcaatgataaaattgaagtttatgaccagaacggacgcctggc

SEQ ID NO: 652253 - DNA, 75 bp, synthetic construct
  source 1..75: mol_type = other DNA
gaatatggaaattggcaccgggcagcgtggtgacggacgtcacgcatttgtgacccgtgaggaactggttggtct

SEQ ID NO: 652254 - DNA, 75 bp, synthetic construct
  source 1..75: mol_type = other DNA
gtttacggcgatccggttgacccgggatggtcgggattttactggatcaggtttgtgaatgctgctggcgttaaa

SEQ ID NO: 652255 - DNA, 75 bp, synthetic construct
  source 1..75: mol_type = other DNA
atgtcaaacctggtgaccagcgtggtcaaacatgacgaagaacgtcgtgttaacccggacgacagcaaggaggac

SEQ ID NO: 652256 - DNA, 75 bp, synthetic construct
  source 1..75: mol_type = other DNA
agctgaatcccgaagccacggtggctgaacggatttactgggcagaagatgaatctgttgcccgtattcacctcc

SEQ ID NO: 652257 - DNA, 75 bp, synthetic construct
  source 1..75: mol_type = other DNA
ctttcattcgcgaaatcgaaatggaactgtgcgatgttcaggttgatgatccgaaagccggatatctggcgattg

SEQ ID NO: 652258 - DNA, 75 bp, synthetic construct
  source 1..75: mol_type = other DNA
taacccgtgaagagctggtcggtctgaagcttgcccgtcgccgggcttcaggaggtgccgcatacgccctgaatc

SEQ ID NO: 652259 - DNA, 75 bp, synthetic construct
  source 1..75: mol_type = other DNA
gagtatcagtctgtcgccattcgctacaacaacaccgtcaactatgacggcagctataaccacgggagcagttaa

SEQ ID NO: 652260 - DNA, 75 bp, synthetic construct
  source 1..75: mol_type = other DNA
agcgcgtagcgcaggaaatgcaaaaagagatcgctctcatcctgcaacgcgaaattaaagatcctcgtctgggca

SEQ ID NO: 652261 - DNA, 75 bp, synthetic construct
  source 1..75: mol_type = other DNA
cgggtgttgatattgacagtaccttaatggttgttgattttcccacaaaaccgctgaattttaaggtgactggag

SEQ ID NO: 652262 - DNA, 75 bp, synthetic construct
  source 1..75: mol_type = other DNA
ctcacaaacttgggctgcacgcgctgttctggatgatcgctattctggcaacaaccggcattgcgttgaccattt

SEQ ID NO: 652263 - DNA, 75 bp, synthetic construct
  source 1..75: mol_type = other DNA
cgtacttaatcgtgagtccggaatggtgaaaggcagtttcagtaaagtgctggcggaaccgcggctgctgaaact

SEQ ID NO: 652264 - DNA, 75 bp, synthetic construct
  source 1..75: mol_type = other DNA
ggtcgcaaaccattaattgtcggtgggctggcggtgtttgccgccggtagcgttatcgctgcgctttccgactcc

SEQ ID NO: 652265 - DNA, 75 bp, synthetic construct
  source 1..75: mol_type = other DNA
atcttatggtttgaatttctctgttattacatacccacggaaaacaagtctgtatgaaaaattatcaattccttt

SEQ ID NO: 652266 - DNA, 75 bp, synthetic construct
  source 1..75: mol_type = other DNA
atctctggttgctttggtgtacgctttgtctgtacatcactaccccatggcaatacttacgttatccatacactg

SEQ ID NO: 652267 - DNA, 75 bp, synthetic construct
  source 1..75: mol_type = other DNA
aagtgttgattgcagaagaagaacattcagcttatgtgaaaatcgacagcaaagtgacgaatcgctttgaggttg

SEQ ID NO: 652268 - DNA, 75 bp, synthetic construct
  source 1..75: mol_type = other DNA
attgtatatggggagttcttctattagatcaaagagataactttatttatacatcgcatgaagaattacacactt

SEQ ID NO: 652269 - DNA, 75 bp, synthetic construct
  source 1..75: mol_type = other DNA
gtgacggacgtcacgcctttgtgacccgtgaagaactggttggtctgaagctggctcgtcgtcgtgcttctggtg

SEQ ID NO: 652270 - DNA, 75 bp, synthetic construct
  source 1..75: mol_type = other DNA
acagaatgtcgtggaacaccctgcaaaaccacagaatgttaaggcgacgggaggatttggctcagtccttctgga

SEQ ID NO: 652271 - DNA, 75 bp, synthetic construct
  source 1..75: mol_type = other DNA
gggtaacgattgggagggggaatttgatatttttaaagaattgtgtagtgtgatttacttgccaaggacacaggg

SEQ ID NO: 652272 - DNA, 75 bp, synthetic construct
  source 1..75: mol_type = other DNA
tggctgatcaactgtggctgaccattgaagagcgtctggacgactgggatggcgacagcgatatcgactgcgaaa

SEQ ID NO: 652273 - DNA, 75 bp, synthetic construct
  source 1..75: mol_type = other DNA
gatatgtttaaaaagttatgcgaggttatttatttaccaaggacggaaggcatttctactacaaaacttattacg

SEQ ID NO: 652274 - DNA, 75 bp, synthetic construct
  source 1..75: mol_type = other DNA
gcagggaaaattttcctgaaccaggttactgaggatgtcatcagacaggtcatcaccaatctgtttgaatttgaa

SEQ ID NO: 652275 - DNA, 75 bp, synthetic construct
  source 1..75: mol_type = other DNA
accgtaatgaatatgttgaagaagctgtttatcagtttctgctacacgtgcaaaatttacaggatagaacaacgg

SEQ ID NO: 652276 - DNA, 75 bp, synthetic construct
  source 1..75: mol_type = other DNA
tgaattcgatcgcatggaaaaacagctatgggaacagaaacaactggccctgtcttctcctgcgatgaatatcaa

SEQ ID NO: 652277 - DNA, 75 bp, synthetic construct
  source 1..75: mol_type = other DNA
aacctgaaatcaccattaccaatggtcgcgttgtcacaacgtctattgctattgctgaattttttgacaagcggc

SEQ ID NO: 652278 - DNA, 75 bp, synthetic construct
  source 1..75: mol_type = other DNA
atatgaagatgactatgccgcctatgcatccctgcaatcagtaactgcggagacgttatccccggataaaccact

SEQ ID NO: 652279 - DNA, 75 bp, synthetic construct
  source 1..75: mol_type = other DNA
ataaaaatgagctggttattcccttcagcaacggccggggagaaatacgttcgtaccagcgtattccggtcaccg

SEQ ID NO: 652280 - DNA, 75 bp, synthetic construct
  source 1..75: mol_type = other DNA
ttcagggattgccacagatggacggagccatacacagagtggccacccgggatgacaaaaaaggggccaaaagtg

SEQ ID NO: 652281 - DNA, 75 bp, synthetic construct
  source 1..75: mol_type = other DNA
gtgtaaccactgatgaggcactacgcccgtcgcaggcagggcaaaccattgagaacctgtttgccatcggttcgg

SEQ ID NO: 652282 - DNA, 75 bp, synthetic construct
  source 1..75: mol_type = other DNA
tgctcgatctcgcttgccaggcgcaggcattaatcgctgaaagcggtgcgcaattgcagggcagcgtagaactgg

SEQ ID NO: 652283 - DNA, 75 bp, synthetic construct
  source 1..75: mol_type = other DNA
tcgccagaagtccctgtctggccgctgcccgcgaagaaaatatgtgtagtgggaattagcggcctgatggatttt

SEQ ID NO: 652284 - DNA, 75 bp, synthetic construct
  source 1..75: mol_type = other DNA
ggtgttatgtatcatctgaatttggtaaaaagagctgtaggtagtgcaactctggcaggagtccgcacaattgcg

SEQ ID NO: 652285 - DNA, 75 bp, synthetic construct
  source 1..75: mol_type = other DNA
atgggcaaaggctgggacgcctcactgaaagccgggcggcgtgaccgcctgcgccaggaggttttacaccgcatg

SEQ ID NO: 652286 - DNA, 75 bp, synthetic construct
  source 1..75: mol_type = other DNA
atgaccatagcaatgttgctatggtttttaagtacgctaagacgtaaaccctgtcaaaagaaaggctgtattgac

SEQ ID NO: 652287 - DNA, 75 bp, synthetic construct
  source 1..75: mol_type = other DNA
gatgccattgtcacccacagacccacgccggaactcaaccgccagtcaccggaagagacaacaatggcccaaccg

SEQ ID NO: 652288 - DNA, 75 bp, synthetic construct
  source 1..75: mol_type = other DNA
caaagaagcctacattgctgaattcgatcgcatggaaaaacaactatgggaacagaaacaactggccctgtcttc

SEQ ID NO: 652289 - DNA, 75 bp, synthetic construct
  source 1..75: mol_type = other DNA
aaccgatcaggcgtgggaagtgttcgaaaaactggaagactgctatttcagtcaaaaaatcccagaacaacttca

SEQ ID NO: 652290 - DNA, 75 bp, synthetic construct
  source 1..75: mol_type = other DNA
tcgcttttcagccgcctgcgccgttttctgaccggtggaaaatcacgtaccgccgaacctcccgttattcaggag

SEQ ID NO: 652291 - DNA, 75 bp, synthetic construct
  source 1..75: mol_type = other DNA
aagagtccctctgtatcggatgcggcgaatgtgttctggcatgccccaccctcgcctggcagcgtcagccgcagg

SEQ ID NO: 652292 - DNA, 75 bp, synthetic construct
  source 1..75: mol_type = other DNA
agctaaaccctgaagccatggtcgccgaacgtatttactgggcagaagatgaatccgtcgcacgaatccacctta

SEQ ID NO: 652293 - DNA, 75 bp, synthetic construct
  source 1..75: mol_type = other DNA
tcaagcatctgacggaagaaatgcgccgtaaattgctggatatttcccgcacatcggaaaaatcttcccgctttg

SEQ ID NO: 652294 - DNA, 75 bp, synthetic construct
  source 1..75: mol_type = other DNA
gcaaccgggacacagcacaccgccacaacgcaacctgaagaacaacagcaggtctccatgggcagcgctgacgac

SEQ ID NO: 652295 - DNA, 75 bp, synthetic construct
  source 1..75: mol_type = other DNA
acgacaccggcacagcagaaacagattcaccttctgaacctgcagagattcagccagtgcagcaggccagtcctg

SEQ ID NO: 652296 - DNA, 75 bp, synthetic construct
  source 1..75: mol_type = other DNA
tgacgtggcagaaaatgcccgccaaatctggactgacagcccctttgtcttctgtgccgacaacgaccatcaacg

SEQ ID NO: 652297 - DNA, 75 bp, synthetic construct
  source 1..75: mol_type = other DNA
cgctgcaggcgagagaaacattccggctgtccggtgaaacacgggatcgtatccgtaatatctgggccatgactc

SEQ ID NO: 652298 - DNA, 75 bp, synthetic construct
  source 1..75: mol_type = other DNA
gcacagttagaatatatcggtatccccacgcccaacaatgacactactgaccgccgtgaagctatcgtgatcggc

SEQ ID NO: 652299 - DNA, 75 bp, synthetic construct
  source 1..75: mol_type = other DNA
gagatggcgcatgatgccattgtcacccacagacccacgccggaactcaaccgcctgtcaccggaagagacaaca

SEQ ID NO: 652300 - DNA, 75 bp, synthetic construct
  source 1..75: mol_type = other DNA
tttaaagctaacgccagaaatgttagtgaaactatactccagaaaaacgaccagagaatttactattgttggtat

SEQ ID NO: 652301 - DNA, 75 bp, synthetic construct
  source 1..75: mol_type = other DNA
gtaatgtacagatagagctattccgccatggtcgggtgttgctggggtcgcggctgatcgcattttttcgcgtag

SEQ ID NO: 652302 - DNA, 75 bp, synthetic construct
  source 1..75: mol_type = other DNA
gaggcttcgaagaccatcctctgccacgaggagattctactggccctttgtcgtcgggttctgatgatagaaaca

SEQ ID NO: 652303 - DNA, 75 bp, synthetic construct
  source 1..75: mol_type = other DNA
agtaatatgtgtaaatcccaggcatgggataaggcccattttgaatatgaagatgaatttagaggcgaagataaa

SEQ ID NO: 652304 - DNA, 75 bp, synthetic construct
  source 1..75: mol_type = other DNA
acacatcggcattgatgtgacgggcgggaacggggaggctgtttatcagatagtgaaacggtttttccctgctgc

SEQ ID NO: 652305 - DNA, 75 bp, synthetic construct
  source 1..75: mol_type = other DNA
acagaaaaataaggcatgattgggttgatgctttaaaatttctcggtatttttgctatatatttaggtcaccttg

SEQ ID NO: 652306 - DNA, 75 bp, synthetic construct
  source 1..75: mol_type = other DNA
cggtaaactgcgtttgctgtatgaatgcaacccgatggcgttcctggcggaacaagcaggcggtaaagcgagtga

SEQ ID NO: 652307 - DNA, 75 bp, synthetic construct
  source 1..75: mol_type = other DNA
cacccctgatactgaaaaaggtccgccgtacggataaagtctgtggttaccgtcgtcatatacacgccgtgtttc

SEQ ID NO: 652308 - DNA, 75 bp, synthetic construct
  source 1..75: mol_type = other DNA
ccggttactttttcctgaaagcagaccccgaacgccacagcttcactcaccttcgccgtcacagtgcctttctgg

SEQ ID NO: 652309 - DNA, 75 bp, synthetic construct
  source 1..75: mol_type = other DNA
atactcggcgagaggtattcagactgtttgttttgcagggacgacatctgacaggaattgcacaagagcgtctgg

SEQ ID NO: 652310 - DNA, 75 bp, synthetic construct
  source 1..75: mol_type = other DNA
catcaacgacccggtactgcgctacatgatggatgcgcttgcagcagatcggaggctcggtgaagtcacaccaca

SEQ ID NO: 652311 - DNA, 75 bp, synthetic construct
  source 1..75: mol_type = other DNA
aacggcaattagtgctcttccacaagaaggtctggaggtagccgcgcaggcgttataccaggcacttgaaggtgc

SEQ ID NO: 652312 - DNA, 75 bp, synthetic construct
  source 1..75: mol_type = other DNA
tggcatggagttcaagacttcagaaaccaaagtctcactggatggcgcgaaagaatgccctgaatggatggaatg

SEQ ID NO: 652313 - DNA, 75 bp, synthetic construct
  source 1..75: mol_type = other DNA
cacaagttgcaccagactatttgagtcgatcgttttcagcaacgcgagacaagctaggtttatgcgacaatctac

SEQ ID NO: 652314 - DNA, 75 bp, synthetic construct
  source 1..75: mol_type = other DNA
aggcgttaattatcgccgctgttgtttgcatcattgccagccttacagccgtaacatgccattaccagagtgagg

SEQ ID NO: 652315 - DNA, 75 bp, synthetic construct
  source 1..75: mol_type = other DNA
atggggggaaacgtggacaaggtgaaggcgttaattatcgccgctgttgtttgcatcattgccagccttacagcc

SEQ ID NO: 652316 - DNA, 75 bp, synthetic construct
  source 1..75: mol_type = other DNA
tcaacaaatatcatgacaattcatccgcaaatgtgcagaacagaaaagttggcttccttaaaaagttgttctcat

SEQ ID NO: 652317 - DNA, 75 bp, synthetic construct
  source 1..75: mol_type = other DNA
aaaaaaaggaggcatcacatgttgcaataccaattggtgaagaattgaaacggataattgacaatagccgtgaca

SEQ ID NO: 652318 - DNA, 75 bp, synthetic construct
  source 1..75: mol_type = other DNA
cttttcgatcagcagggtatcgatccccaaggacgaatggcacatagcgacgctcagtcgactaagatttacact

SEQ ID NO: 652319 - DNA, 75 bp, synthetic construct
  source 1..75: mol_type = other DNA
cgatgtttatctggtacagcccaatgctcggtgagaacgttgatcgttcgacagtaactgatattttttccactg

SEQ ID NO: 652320 - DNA, 75 bp, synthetic construct
  source 1..75: mol_type = other DNA
attttccttgccctgttcgcactctttttatcctcggtaataaaatatgatgtttcgctaccgggaaaaaaaatc

SEQ ID NO: 652321 - DNA, 75 bp, synthetic construct
  source 1..75: mol_type = other DNA
ccgccgcgaccgccagccgcattgatggagccacctgcgagcttgatgccactgctagacaatcttatctatccc

SEQ ID NO: 652322 - DNA, 75 bp, synthetic construct
  source 1..75: mol_type = other DNA
tgagtctcctgtatttgctcaaattagggaaacaaaagcagaggagtctcgccctctaattgaagttatacgtga

SEQ ID NO: 652323 - DNA, 75 bp, synthetic construct
  source 1..75: mol_type = other DNA
gccggagctttttgcccaaattatgcgggcctatcgggccggcgacctcaatgaagtcgccggattacacaaaga

SEQ ID NO: 652324 - DNA, 75 bp, synthetic construct
  source 1..75: mol_type = other DNA
atgatggcagcatcacctactattcgtaatctcgaatcatggggaattaataccacttatgttgagaaagtcccc

SEQ ID NO: 652325 - DNA, 75 bp, synthetic construct
  source 1..75: mol_type = other DNA
gtctgccgaagaatctcgaaccggttttttataatgccgcacaaactttattaatgccgaagctggacgctttat

SEQ ID NO: 652326 - DNA, 75 bp, synthetic construct
  source 1..75: mol_type = other DNA
taaagatgaccaacaggataccgaagccacggcgatcgcaagtgatttgttgagtggtaaaaaacgctgggaaac

SEQ ID NO: 652327 - DNA, 75 bp, synthetic construct
  source 1..75: mol_type = other DNA
aagagatgctttcccacatcagccaggaaaacgacaagctcaacggggcgttagacggtgctgcggggctgtgct

SEQ ID NO: 652328 - DNA, 75 bp, synthetic construct
  source 1..75: mol_type = other DNA
acgtcacaggcagccagcattgcgacagatggcatttatatcgtcaaagctatcgactatactggcgacaccaga

SEQ ID NO: 652329 - DNA, 75 bp, synthetic construct
  source 1..75: mol_type = other DNA
tatgtatgcggcgtgacggtttatgacctttgccatcttgggcacgccagaacctttgtagcttttgatatgatt

SEQ ID NO: 652330 - DNA, 75 bp, synthetic construct
  source 1..75: mol_type = other DNA
ggcacgataaacaaggccatctttctcattatatggtgctgatccagcgcagtggtttaagcaaactgctggagc

SEQ ID NO: 652331 - DNA, 75 bp, synthetic construct
  source 1..75: mol_type = other DNA
cgcaatgaaaaagcgatgcgcctgaaagaggacctgccctataccaacagcttattaatcatcagcttaatattg

SEQ ID NO: 652332 - DNA, 75 bp, synthetic construct
  source 1..75: mol_type = other DNA
atgaaatcacatgaatctcatctggtacttcgtgccgctctgtatcgccgcgcagtcgcatgtgcctggctgact

SEQ ID NO: 652333 - DNA, 75 bp, synthetic construct
  source 1..75: mol_type = other DNA
tgcagctcactctggatgaaattgaaaccgctattgcccgtgagcttgaaggattttatctgcgacagcacgggc

SEQ ID NO: 652334 - DNA, 75 bp, synthetic construct
  source 1..75: mol_type = other DNA
gcgtcgggaagtcagttctcgttacggccagtacccagccgcacaggcagcacaacctgaacaacttatgtcagc

SEQ ID NO: 652335 - DNA, 75 bp, synthetic construct
  source 1..75: mol_type = other DNA
aaacgacaagctgaatggggcgttagacggtgccgcggggctgtgctggtatgaagactcaaaattgcaaacccc

SEQ ID NO: 652336 - DNA, 75 bp, synthetic construct
  source 1..75: mol_type = other DNA
tcgctggcgatgcagaacaagacgctgattttctcccttgacgacacgctggttaataacgcgctgcaaacgctg

SEQ ID NO: 652337 - DNA, 75 bp, synthetic construct
  source 1..75: mol_type = other DNA
tttgtcctcattcaggcggctgattctgaccgggcattcgctacctcgatcactgcgcagacgctggcggctggc

SEQ ID NO: 652338 - DNA, 75 bp, synthetic construct
  source 1..75: mol_type = other DNA
aagaagatttaccctacaccaacagcttattaatcattagcttaatattgatgattgtggcggtgatcgttatgg

SEQ ID NO: 652339 - DNA, 75 bp, synthetic construct
  source 1..75: mol_type = other DNA
cgcaatgaaaaagcgatgcgtctgaaagaggacctgccctataccaacagcttattaatcatcagtttaatattg

SEQ ID NO: 652340 - DNA, 75 bp, synthetic construct
  source 1..75: mol_type = other DNA
gaaatgctggaatatcacatacgccacgttcacgtaaacatcggaaactatactgacaagtttggtgagagcggt

SEQ ID NO: 652341 - DNA, 75 bp, synthetic construct
  source 1..75: mol_type = other DNA
ttattcattctgagaatgcattaatcagggcgcttgaattaaaaacggtactggatgaattaaccgaaaataaca

SEQ ID NO: 652342 - DNA, 75 bp, synthetic construct
  source 1..75: mol_type = other DNA
aactcgagcaatagtattttaataattaagggggcgaataaatttctttccccggaagatatcgatcgagctgca

SEQ ID NO: 652343 - DNA, 75 bp, synthetic construct
  source 1..75: mol_type = other DNA
ccgctttcagcgtcacagggaaaggtacgcaatcatcttatccgagtattgaacaatttaatgaatttttaacct

SEQ ID NO: 652344 - DNA, 75 bp, synthetic construct
  source 1..75: mol_type = other DNA
tggcgatacaaggggccaggcgtggtacatggatatgatgtgcgaagcgcgcggtgcgcaggatatgccatccag

SEQ ID NO: 652345 - DNA, 75 bp, synthetic construct
  source 1..75: mol_type = other DNA
tggtgggcagttactgacgatggggaagaaccggcatcgaaagtaacccactggatgccgctaccagaaccgccg

SEQ ID NO: 652346 - DNA, 75 bp, synthetic construct
  source 1..75: mol_type = other DNA
cggggccacggaagggaatacccctaccatgcctgcaacggtgtttcctcgcggcagggtgctttttggtatgac

SEQ ID NO: 652347 - DNA, 75 bp, synthetic construct
  source 1..75: mol_type = other DNA
ctctcggcagatactgtgaaccgaattaccgggcaagagttttcgaaagtgcgtctgattgccggttacgacggt

SEQ ID NO: 652348 - DNA, 75 bp, synthetic construct
  source 1..75: mol_type = other DNA
ccgtctatcgtaccgcgttgtcgaacaacgatattgcgatggctggtggtcagatcaccgaccagaacacggacg

SEQ ID NO: 652349 - DNA, 75 bp, synthetic construct
  source 1..75: mol_type = other DNA
ggcttattggcatgccgcagcagactatcggtaacggcgtaaacgtccgcgcgctgattaatccgaacatccggg

SEQ ID NO: 652350 - DNA, 75 bp, synthetic construct
  source 1..75: mol_type = other DNA
ccgttgtcactgttgtggcattgggtgaaggagccaggcaagaaacactggaagagattaaaagtctggggacaa

SEQ ID NO: 652351 - DNA, 75 bp, synthetic construct
  source 1..75: mol_type = other DNA
gtgaaaaaacttattgagttaaaaggggttagccgaacttatggcaacggagatcaaacgcggaccgtcctgaaa

SEQ ID NO: 652352 - DNA, 75 bp, synthetic construct
  source 1..75: mol_type = other DNA
agccaggctcaccctggaagactggcaaaaaatttacaacgcaacgcctgaaaaacactttatccgtaacgcaat

SEQ ID NO: 652353 - DNA, 75 bp, synthetic construct
  source 1..75: mol_type = other DNA
gaagcgcttagctatacgccgggtgtctctgttggtacgcgtggcgcatccaacacctatgaccacctgatcatt

SEQ ID NO: 652354 - DNA, 75 bp, synthetic construct
  source 1..75: mol_type = other DNA
gcggtcagtgaaaaggaaactcagccatcaggacgtgagttaaatatttctggtggtaataaccgtatcgctggt

SEQ ID NO: 652355 - DNA, 75 bp, synthetic construct
  source 1..75: mol_type = other DNA
gtttactaccagtataaaaatcctgtgactggaaaatttcacggactcggaacagacaaaggtaaggcagaaaaa

SEQ ID NO: 652356 - DNA, 75 bp, synthetic construct
  source 1..75: mol_type = other DNA
gtttgtttaatgtgaaccgccccggttttcctggagagtgttttatctgtgaactcaggctgccagatcatcgtt

SEQ ID NO: 652357 - DNA, 75 bp, synthetic construct
  source 1..75: mol_type = other DNA
cgggtattacgttgactcagggttatgagtgggaagatattgacgacaacactgtcagcactggcgtaaacagca

SEQ ID NO: 652358 - DNA, 75 bp, synthetic construct
  source 1..75: mol_type = other DNA
tactggccggacaggtggacccgtttatggccaatgacatcgtgccgtttgaggatgcaaatgcacaggaggcag

SEQ ID NO: 652359 - DNA, 75 bp, synthetic construct
  source 1..75: mol_type = other DNA
cagtgttcgctgaccgaagccaaagacgcctttagggaaggtgcgaataagcaggtcatgtcttcccaagctgac

SEQ ID NO: 652360 - DNA, 75 bp, synthetic construct
  source 1..75: mol_type = other DNA
gagcatatcaaacccgattacatgccttcatttatgactgaaatcagacaacaacaagtgattacttttctcacg

SEQ ID NO: 652361 - DNA, 75 bp, synthetic construct
  source 1..75: mol_type = other DNA
tcaacgtattaccattgtcagcagcagcggcatcatcctgataaacgcagtgcccgtgcgcagcgcgatgactgg

SEQ ID NO: 652362 - DNA, 75 bp, synthetic construct
  source 1..75: mol_type = other DNA
tactcagttgcaaagcaaattcgcaaccggttctgtggatcacactctgctgactggcgttgactttatgcgtat

SEQ ID NO: 652363 - DNA, 75 bp, synthetic construct
  source 1..75: mol_type = other DNA
aacccgccctctggatcaagtcaagacgcgccgatctgtcttgccgatcttcgcgagtccggctttttgggttta

SEQ ID NO: 652364 - DNA, 75 bp, synthetic construct
  source 1..75: mol_type = other DNA
ttattgtatttatagttgttatgctaatggctaatatttgtataataggatttcattggccttttggttatttct

SEQ ID NO: 652365 - DNA, 75 bp, synthetic construct
  source 1..75: mol_type = other DNA
ttgaaagggaaatattatgttccatttattgtatttatagttgttatgctaatggctaatatttgtataatagga

SEQ ID NO: 652366 - DNA, 75 bp, synthetic construct
  source 1..75: mol_type = other DNA
tctctgagcagaacaagcaggttcagcacacctggcagattgagtttgagcaaccattgtcgtctgtcgaacaaa

SEQ ID NO: 652367 - DNA, 75 bp, synthetic construct
  source 1..75: mol_type = other DNA
gacgttcacggcgctgaaaatggcgcttgatatgcataatcagtatggcggttgttacaccgttctgactccgtc

SEQ ID NO: 652368 - DNA, 75 bp, synthetic construct
  source 1..75: mol_type = other DNA
ccttatggcgaagcgaatggcatagcgatagaggaattaaggaaggtgcgaataagcggggaaattcttctcggc

SEQ ID NO: 652369 - DNA, 75 bp, synthetic construct
  source 1..75: mol_type = other DNA
aaaccaatttcaccttcctttcttacttccagaacgagccggaaaccggttattacggctggttgccgaaagagg

SEQ ID NO: 652370 - DNA, 75 bp, synthetic construct
  source 1..75: mol_type = other DNA
cgtggcccggtttccgtgctgtatgggaaaagcagcccaggcggcctgttgaacatggtcagcaagcgcccgacc

SEQ ID NO: 652371 - DNA, 75 bp, synthetic construct
  source 1..75: mol_type = other DNA
ggatatgccggttcagttgcaccatctgatatctataatttagaccgtagtgactttgattttggcgctcacccg

SEQ ID NO: 652372 - DNA, 75 bp, synthetic construct
  source 1..75: mol_type = other DNA
cgaacatcatatggatagcattagaaaatttgggaggcttgcagagtataaagacgtattttattatatcgattt

SEQ ID NO: 652373 - DNA, 75 bp, synthetic construct
  source 1..75: mol_type = other DNA
tgttgcctcttatcttgaattacgcgagcgttataattatttctctcttcaggatgattatactcgtgttcaggc

SEQ ID NO: 652374 - DNA, 75 bp, synthetic construct
  source 1..75: mol_type = other DNA
ttcagcagaaataccagtgcctaaagaagatgaagttttgattaaagtagaatatgtcggtatttgtggttcaga

SEQ ID NO: 652375 - DNA, 75 bp, synthetic construct
  source 1..75: mol_type = other DNA
cggaaaccaacaatccggagatacagacattcatcaccggcctgttgcgcaccaccggccagcccgtcatcgctg

SEQ ID NO: 652376 - DNA, 75 bp, synthetic construct
  source 1..75: mol_type = other DNA
tgttgcacggcaatccttcctgctgatgaacctgtgtgcccgcgctgtagtaccaaagggtatgttcgtcgtaga

SEQ ID NO: 652377 - DNA, 75 bp, synthetic construct
  source 1..75: mol_type = other DNA
gaaaccgtcgcctacgcccatgcgcatgatgtgaaagttgtcatgtccaaccatgacttccataaaacaccggag

SEQ ID NO: 652378 - DNA, 75 bp, synthetic construct
  source 1..75: mol_type = other DNA
ggtgcggtaaaaaaagcctctgcaccagggcaaatctcggtaaatgatttacgcacggtattaactattttacac

SEQ ID NO: 652379 - DNA, 75 bp, synthetic construct
  source 1..75: mol_type = other DNA
tactgcgactaaaacggatacaccaattgaaaaaacgccgcagtctatttcggttgtgacccgagaagagatgga

SEQ ID NO: 652380 - DNA, 75 bp, synthetic construct
  source 1..75: mol_type = other DNA
gcgcagctcgagaaagccgatccggactttatggcggagcgcgaggatgttgtcagcgacgaagggcgatttgac

SEQ ID NO: 652381 - DNA, 75 bp, synthetic construct
  source 1..75: mol_type = other DNA
tcgtcgctggttatgggacgatatcgccccgatgccagaactgcgccagccgctaaaaccaggcgtcacggggat

SEQ ID NO: 652382 - DNA, 75 bp, synthetic construct
  source 1..75: mol_type = other DNA
aatcatcgtctcgctgatggcgaaagatatcgccagcgtgaaatccgaagctctcgcctatcgtgaagcggactt

SEQ ID NO: 652383 - DNA, 75 bp, synthetic construct
  source 1..75: mol_type = other DNA
tattatggttggttaccgcgccagggaactgttgttccctatcaggatgcaaatggtagctggcacaaattgcca

SEQ ID NO: 652384 - DNA, 75 bp, synthetic construct
  source 1..75: mol_type = other DNA
tcgatcaaggaacctaaagaaggggtttgcggatgtgtatggttcgatcaggaagaggctggcatattcggaacg

SEQ ID NO: 652385 - DNA, 75 bp, synthetic construct
  source 1..75: mol_type = other DNA
gcaaaatgcagtccttcgacgccgatattcctaagattgcgctgatgccgcaaagtaccagcgatgtgctgacgt

SEQ ID NO: 652386 - DNA, 75 bp, synthetic construct
  source 1..75: mol_type = other DNA
aaaaaagcctctgcgccagggcaaatctcggtaaatgatttgcgcacagtattaactattttacatcaggcataa

SEQ ID NO: 652387 - DNA, 75 bp, synthetic construct
  source 1..75: mol_type = other DNA
atgatgtgaaagttgtcatgtccaaccatgacttccataaaacgccggaagccgaagaaatcattgcccgtctgc

SEQ ID NO: 652388 - DNA, 75 bp, synthetic construct
  source 1..75: mol_type = other DNA
cggttgtgacccgagaagagatggatatcaaacaacccgcaacggtaaaagaagctctggattatacgccaagtg

SEQ ID NO: 652389 - DNA, 75 bp, synthetic construct
  source 1..75: mol_type = other DNA
ctggagtacgaaaaagccgatccagattttatggcggagcgcgaggatgttgtcagcgacgaagggcgatttaac

SEQ ID NO: 652390 - DNA, 75 bp, synthetic construct
  source 1..75: mol_type = other DNA
ctagagctagaaaaggccgatccggactttatggcagagcgtgaggtgattgttagcgacgaaggacgcgttgaa

SEQ ID NO: 652391 - DNA, 75 bp, synthetic construct
  source 1..75: mol_type = other DNA
tgtgaacgtcaacaatttgctcgatcgtgagtatgttgccagttgcttccagacctatggctgcttctggggcgc

SEQ ID NO: 652392 - DNA, 75 bp, synthetic construct
  source 1..75: mol_type = other DNA
cgcccttggcttcaccaataacgatggcgtttctgcgctggccgcggttgttgcttatggcatcatggtgaaaac

SEQ ID NO: 652393 - DNA, 75 bp, synthetic construct
  source 1..75: mol_type = other DNA
acgtcaggggctgcgttcgtgctcctgttgtacggcaatccttcctgctgatgaacccgtgtgcccgcgttgtag

SEQ ID NO: 652394 - DNA, 75 bp, synthetic construct
  source 1..75: mol_type = other DNA
aaggggacagcatcatcctgcgccccgtccggccaacctggggatcattcctagagtacgaaaaagccgatccag

SEQ ID NO: 652395 - DNA, 75 bp, synthetic construct
  source 1..75: mol_type = other DNA
gcgaaacagctcttagtggtctgagttttggtgcaggggcacgttattttggcgacacttcaagtttctacacaa

SEQ ID NO: 652396 - DNA, 75 bp, synthetic construct
  source 1..75: mol_type = other DNA
tggtcagcaaacgtccttcaacggatccgattaaagagatccagttcaaaatgggaacggataatctttggcaga

SEQ ID NO: 652397 - DNA, 75 bp, synthetic construct
  source 1..75: mol_type = other DNA
gttgtaaaatatgatctggcacgctttggtatggcgggatccagccttgctgtgaacgtcaacaatttgctcgat

SEQ ID NO: 652398 - DNA, 75 bp, synthetic construct
  source 1..75: mol_type = other DNA
gtgacgtcgagcatactttgctgacaggggtagacttcatgcggatgcgtaatgatatcaatgccagctttggat

SEQ ID NO: 652399 - DNA, 75 bp, synthetic construct
  source 1..75: mol_type = other DNA
gccccgcgatctggattttgagggggtgagcgagctcgagatcgtccgggaaggggacagcatcatcctgcgccc

SEQ ID NO: 652400 - DNA, 75 bp, synthetic construct
  source 1..75: mol_type = other DNA
atggataaagggatggaatcaagcgtactggataacgccattgccagcttactgagggcaaaaatacagaacccg

SEQ ID NO: 652401 - DNA, 75 bp, synthetic construct
  source 1..75: mol_type = other DNA
tggcgatgaacggcggcatctatgatgaaagctatgcgccgctcggtttgtacatcgaaaacggtcagcagaagg

SEQ ID NO: 652402 - DNA, 75 bp, synthetic construct
  source 1..75: mol_type = other DNA
aaagtcggcatcgttcgtctggatgcctttaaagccagtaaagagattcagtttgcggtgcagtcagggccaatg

SEQ ID NO: 652403 - DNA, 75 bp, synthetic construct
  source 1..75: mol_type = other DNA
gggcttctgtcttttcagacctgtcatttgtctgttactgatgatgttgttgttcctgctactgctactgttctt

SEQ ID NO: 652404 - DNA, 75 bp, synthetic construct
  source 1..75: mol_type = other DNA
cccttatcgcggcggataatcgcttttgaagccattgtgcaaaaaaatgaagatagcccatcagctatagcggtt

SEQ ID NO: 652405 - DNA, 75 bp, synthetic construct
  source 1..75: mol_type = other DNA
tgagcgacgagctgaaacagcgccacattgagcgcgtggcacgccgggagctggtacaggaatatgacaatctgg

SEQ ID NO: 652406 - DNA, 75 bp, synthetic construct
  source 1..75: mol_type = other DNA
ccgtcacggccattgaacgggcagagcaggaaaaaaatgcgctgacgcaggccgacggaaacgacgctgacgact

SEQ ID NO: 652407 - DNA, 75 bp, synthetic construct
  source 1..75: mol_type = other DNA
cttcctccgcacgtttttacgcgctgcgcctgctccccgggcaggaagttctctcccaattacgcgccttcgcgc

SEQ ID NO: 652408 - DNA, 75 bp, synthetic construct
  source 1..75: mol_type = other DNA
cgggtgaaagtgaatagtgacggtaattttgtcaatgatttgtcgggcagacgtggaatataccaggcaggtatt

SEQ ID NO: 652409 - DNA, 75 bp, synthetic construct
  source 1..75: mol_type = other DNA
tcgatacccgcagtatatatcgtgaactgggtgcaacgctgagttacaacatgcgtctggggaacggtatggaaa

SEQ ID NO: 652410 - DNA, 75 bp, synthetic construct
  source 1..75: mol_type = other DNA
tcggggtggggtatagccatggtgctggtgtggaatccccgtggaatgcggtagctggtgtgaactggtcgttct

SEQ ID NO: 652411 - DNA, 75 bp, synthetic construct
  source 1..75: mol_type = other DNA
atgcgtctggggaacggcatggaaattgaaccctggctgaaggcggctgtgcgcaaagaatttgtcgatgataat

SEQ ID NO: 652412 - DNA, 75 bp, synthetic construct
  source 1..75: mol_type = other DNA
aaagcctcattcagcagttcgttaagcgggcatctcggggtggggtatagccatggtgccggtgtggaatccccg

SEQ ID NO: 652413 - DNA, 75 bp, synthetic construct
  source 1..75: mol_type = other DNA
gaaggcacatcatcaccttctgagtctgtatgcagagcatgagctggaacacgccctgaatgaaacctgtgaggc

SEQ ID NO: 652414 - DNA, 75 bp, synthetic construct
  source 1..75: mol_type = other DNA
gagtatcgtcatcgcatacaactatcatggtacgcgcgtaatactgccggcagtacaaacgcgtataactatttc

SEQ ID NO: 652415 - DNA, 75 bp, synthetic construct
  source 1..75: mol_type = other DNA
atataccagggaacctgccaaaaatattacagctaatcgccttgaagaataatattgattacattctttatgatc

SEQ ID NO: 652416 - DNA, 75 bp, synthetic construct
  source 1..75: mol_type = other DNA
cgtaccgctgcccggacattgtctggaacccgtaccgccgtaaattcagtatccttgtgcgtatcctcgctgacg

SEQ ID NO: 652417 - DNA, 75 bp, synthetic construct
  source 1..75: mol_type = other DNA
cctacattatcgctgggctgaaaaaacgtggcacttcgctgtcagcgctttcgcgtcaggctgggctggcgtcat

SEQ ID NO: 652418 - DNA, 75 bp, synthetic construct
  source 1..75: mol_type = other DNA
ctcggtttcctcatcatcaaaatcgccatgctgtggctgattgcccgaccgttgcaggtgccaaataaacagcgt

SEQ ID NO: 652419 - DNA, 75 bp, synthetic construct
  source 1..75: mol_type = other DNA
cgtgtgattctgatatcgccgacagaggacgtcattgcaggtgtcggacaggcaccatattgcaccgaaattaaa

SEQ ID NO: 652420 - DNA, 75 bp, synthetic construct
  source 1..75: mol_type = other DNA
gaacccgtaccgccgtaaattcagtatccttgtacgtatcctcgctgacgggcgcaccacagacatcccgctggg

SEQ ID NO: 652421 - DNA, 75 bp, synthetic construct
  source 1..75: mol_type = other DNA
aaacatatcgctgtacaggatttcctgatgtggtggtgtcgggcgtgctggccgacggtattccgtgggatatgc

SEQ ID NO: 652422 - DNA, 75 bp, synthetic construct
  source 1..75: mol_type = other DNA
ttacagcaataccgggcgcggaatatcgataactatcctgatgatattcccccggttaaacgtccggcgccggtg

SEQ ID NO: 652423 - DNA, 75 bp, synthetic construct
  source 1..75: mol_type = other DNA
gtctttgtatggatatacacgctctacgacaccgcaagtcgaagcacaaagaaaacagatcaaactgtttaatca

SEQ ID NO: 652424 - DNA, 75 bp, synthetic construct
  source 1..75: mol_type = other DNA
ctacgaagaagaacgtctattttcatggaggcagggaggctagccagcaggctatcatgtcccgatgtttatctg

SEQ ID NO: 652425 - DNA, 75 bp, synthetic construct
  source 1..75: mol_type = other DNA
agaggataatcaaggtaaccccaccctgaagggcagggttgatgtcgaattactggcctttattttccagattct

SEQ ID NO: 652426 - DNA, 75 bp, synthetic construct
  source 1..75: mol_type = other DNA
tacattattttttgaagtagaaagaattataaagaaaaacaagcctaaattgtgtcttttggagaatgtacgtgg

SEQ ID NO: 652427 - DNA, 75 bp, synthetic construct
  source 1..75: mol_type = other DNA
cgggcacgccatcgccgccggggcgatactggtaacgaataatacaagagaatttgagcgagtgcctgacctggt

SEQ ID NO: 652428 - DNA, 75 bp, synthetic construct
  source 1..75: mol_type = other DNA
tgtatatctgcgacgaatgtgttgatttatgtaatgacatcattcgcgaagagattaaagaagttgcaccgcatc

SEQ ID NO: 652429 - DNA, 75 bp, synthetic construct
  source 1..75: mol_type = other DNA
aattcttgcaggtagatacctctaagatcctgtttatttgtggtggtgcgttcgctggtctggataaagtcattt

SEQ ID NO: 652430 - DNA, 75 bp, synthetic construct
  source 1..75: mol_type = other DNA
gccggtactgacagcctgttccagactggttttgatttcagtgatgcgctggatgatgacggcgtttactcttat

SEQ ID NO: 652431 - DNA, 75 bp, synthetic construct
  source 1..75: mol_type = other DNA
tgatgggaagaacaggggttgaactgggcaagaccttcagtggtaaggactggagtgtgacggcccgtgccggaa

SEQ ID NO: 652432 - DNA, 75 bp, synthetic construct
  source 1..75: mol_type = other DNA
ataacgtccgctttggactggagtttgagaaatccgcctttggtaagtacaacgttgataatgcagtcaacgcta

SEQ ID NO: 652433 - DNA, 75 bp, synthetic construct
  source 1..75: mol_type = other DNA
aagacagcaaaatagccaatcttaccgccgaacgcgatgctcttcgtgaaggtgagatgggcgacgctaggcata

SEQ ID NO: 652434 - DNA, 75 bp, synthetic construct
  source 1..75: mol_type = other DNA
agttgagctggaagccgcagagaagcgcaacgctgaattacaaagcgagaatgcatacatccgcaaccggttcaa

SEQ ID NO: 652435 - DNA, 75 bp, synthetic construct
  source 1..75: mol_type = other DNA
ttaaggctgccagtttattcccactagcactgatgctttcgggctgtatctcgtatgccctggtttcccataccg

SEQ ID NO: 652436 - DNA, 75 bp, synthetic construct
  source 1..75: mol_type = other DNA
aagcatggaatgcccttactctatctccacataccgataccgaatacgccatgttacattttggactcaaaggtt

SEQ ID NO: 652437 - DNA, 75 bp, synthetic construct
  source 1..75: mol_type = other DNA
cgggacttgtgacactttcacctgaaacatttcgtgagcagatgaaatggctcgcagaaaacaactggcggacgg

SEQ ID NO: 652438 - DNA, 75 bp, synthetic construct
  source 1..75: mol_type = other DNA
gtcaccgtatcgtggtctcggccatcacctactccgagatgcgcttcgatgccacaggtccgaaggcctcgccac

SEQ ID NO: 652439 - DNA, 75 bp, synthetic construct
  source 1..75: mol_type = other DNA
cgcctgaccggtcttgcgcgttctgccaatgcccagcagaaagggtcagaagagcagcgttatgctattgcaccg

SEQ ID NO: 652440 - DNA, 75 bp, synthetic construct
  source 1..75: mol_type = other DNA
ggcaactgcaccactattgcgacgaataataaatttgtggtgctgaaagcagtgaagctggggcgtcgtcgataa

SEQ ID NO: 652441 - DNA, 75 bp, synthetic construct
  source 1..75: mol_type = other DNA
ctgaatgatgccttcggcgcgttaagctgtgcgttggcagaacataagccgtacagcattggcgactcgtatatc

SEQ ID NO: 652442 - DNA, 75 bp, synthetic construct
  source 1..75: mol_type = other DNA
tggcctgacattgctcgataaaaacccgcaggcgaaagtggtgtttgtcgatgaatcaccgatggcggttgcttc

SEQ ID NO: 652443 - DNA, 75 bp, synthetic construct
  source 1..75: mol_type = other DNA
attataaagaaaaacaagcctaaattgtgtcttttggagaatgtacgtggattaacttcacatgataaaggaagg

SEQ ID NO: 652444 - DNA, 75 bp, synthetic construct
  source 1..75: mol_type = other DNA
cacattattttttgaagtagaaagaatcataaagaaaaacaagcctaagttatgtcttttggagaatgtgcgtgg

SEQ ID NO: 652445 - DNA, 75 bp, synthetic construct
  source 1..75: mol_type = other DNA
agtagatatactcatctataaggttttttatcagaaaatccttggaatgaaagtacatcatccattgaatttagt

SEQ ID NO: 652446 - DNA, 75 bp, synthetic construct
  source 1..75: mol_type = other DNA
ggcgctatgactgggcagaccaggagtcgctcaaccgtgttgccggaacgacggacaaacgtgatgacagacaat

SEQ ID NO: 652447 - DNA, 75 bp, synthetic construct
  source 1..75: mol_type = other DNA
gcgttctgctgaaacagaaacaaaccggtctgtatgttcaggatcaggcgcagtgggataaagtgctggttacgc

SEQ ID NO: 652448 - DNA, 75 bp, synthetic construct
  source 1..75: mol_type = other DNA
tactggctccagctatggtgatccggctaactcctttaaagtgggaagttatacggtcgttgatgcgttagtgcg

SEQ ID NO: 652449 - DNA, 75 bp, synthetic construct
  source 1..75: mol_type = other DNA
acttgggctgtggtaacggcgtgattggcctgacgctgcttgataaaaatccgcaggcgaaagtggtgtttgttg

SEQ ID NO: 652450 - DNA, 75 bp, synthetic construct
  source 1..75: mol_type = other DNA
ccaactacaaaggcaatacgcctgcacaggtgccaaaacacatggcttcgctgtgggctgactataccttctttg

SEQ ID NO: 652451 - DNA, 75 bp, synthetic construct
  source 1..75: mol_type = other DNA
taccggcaccaaaacagatacgccgattcaaaaagtgccacagtctatttctgttgtgaccgccgaagagatggc

SEQ ID NO: 652452 - DNA, 75 bp, synthetic construct
  source 1..75: mol_type = other DNA
taacaattacggcaagaaaggaacgatcacgccgtttgatctcgaagtacgccccggcgagatcgtcggcctggc

SEQ ID NO: 652453 - DNA, 75 bp, synthetic construct
  source 1..75: mol_type = other DNA
gctgccgcctcggtgcgggaaaatatcatcctcgctctccaggcccagcgcggctggctacgtcccatttcccgc

SEQ ID NO: 652454 - DNA, 75 bp, synthetic construct
  source 1..75: mol_type = other DNA
ggcattcgcacaccttcaactgaacaaccgattgaatttctctccggcggcaatcagcaaaaagtgttgctttca

SEQ ID NO: 652455 - DNA, 75 bp, synthetic construct
  source 1..75: mol_type = other DNA
gagtttctctctggtggcaatcagcaaaaagtgttgctctcacgctggctgctgactcgtccgcaatttctgatc

SEQ ID NO: 652456 - DNA, 75 bp, synthetic construct
  source 1..75: mol_type = other DNA
agacagaaaaaccgatggcatcattgccgccgcctcggtgcgggaaaatatcatccttgccttacaagcccagcg

SEQ ID NO: 652457 - DNA, 75 bp, synthetic construct
  source 1..75: mol_type = other DNA
cctccgaactggaagagctggtgggctatgccgatcgggtgatcatcatgcgcgatcgcaaacaggtggcggaga

SEQ ID NO: 652458 - DNA, 75 bp, synthetic construct
  source 1..75: mol_type = other DNA
ctgattaaagcattaaccggcgtttaccatgccgatcgcggcacaatctggctggaaggccaggccatctcaccg

SEQ ID NO: 652459 - DNA, 75 bp, synthetic construct
  source 1..75: mol_type = other DNA
cagggcgtggatgatgcacggagcatagcccgtaaacaggtgatgtccttatcatggttcctgggggggcggcag

SEQ ID NO: 652460 - DNA, 75 bp, synthetic construct
  source 1..75: mol_type = other DNA
tatggcggacatggcacgtaccacgctggagaacagcatcaatattcccccgacgctctataagaatcagggcga

SEQ ID NO: 652461 - DNA, 75 bp, synthetic construct
  source 1..75: mol_type = other DNA
gtcactcactttctcgatcaggtataccaggtcagtgatcggatcaccgtcttacgcaacggcagctttgttggc

SEQ ID NO: 652462 - DNA, 75 bp, synthetic construct
  source 1..75: mol_type = other DNA
ggggcgcgaactggatacccacgcgctacagcgtgccgggcgaacattgctgagcgacaaacccgttgccgcgtt

SEQ ID NO: 652463 - DNA, 75 bp, synthetic construct
  source 1..75: mol_type = other DNA
tgaaaacggggcgggaaaatcaacgctaatcaaagcattaactggtgtataccacgccgatcgcggcaccatctg

SEQ ID NO: 652464 - DNA, 75 bp, synthetic construct
  source 1..75: mol_type = other DNA
gccctggcgagatcgtcggcctggcaggcctgctgggatccgggcgtaccgaaaccgctgaagttatctttggca

SEQ ID NO: 652465 - DNA, 75 bp, synthetic construct
  source 1..75: mol_type = other DNA
ttatatcgcctggaacttattgatccaaataacccggatgtcgttgccgcccgtttccgttctctgttacgtcag

SEQ ID NO: 652466 - DNA, 75 bp, synthetic construct
  source 1..75: mol_type = other DNA
tactccgatctgaaagcgcacaccactatgttgcaggtggacgcgccgtattctgacgggcggatgttctttcgc

SEQ ID NO: 652467 - DNA, 75 bp, synthetic construct
  source 1..75: mol_type = other DNA
cagcattctcggtgtcgccatcgccatttttcttggttttcgtaataatgccgggtacgcccgttacgttgaagc

SEQ ID NO: 652468 - DNA, 75 bp, synthetic construct
  source 1..75: mol_type = other DNA
ggtttcactggcaaacttaaaagcgatgtacagcatcgcgaagaaatacgatattccggtggtaatggactccgc

SEQ ID NO: 652469 - DNA, 75 bp, synthetic construct
  source 1..75: mol_type = other DNA
ttgataccggcgtacgttacgactttaaaggcaactttgacctcgaaggattagaacgcggcattgaagaagttg

SEQ ID NO: 652470 - DNA, 75 bp, synthetic construct
  source 1..75: mol_type = other DNA
cagctaacgctgatgccattcttggccagacggaagtggatattgctgccggtgacaaagtggcggcacgtagcc

SEQ ID NO: 652471 - DNA, 75 bp, synthetic construct
  source 1..75: mol_type = other DNA
ttggaaatatacaagcatttttgaatgtatataagcgactaggcattaatgcgggtgttgctcgttctgttgatg

SEQ ID NO: 652472 - DNA, 75 bp, synthetic construct
  source 1..75: mol_type = other DNA
cgctttatccgccagcttggcattcgcacaccttccagcgaacagccgattgagtttctctccggtggcaatcag

SEQ ID NO: 652473 - DNA, 75 bp, synthetic construct
  source 1..75: mol_type = other DNA
gctaatcaaagcattaaccggtgtctaccacgccgatcgtggcaccatctggctggaaggccagactatctcacc

SEQ ID NO: 652474 - DNA, 75 bp, synthetic construct
  source 1..75: mol_type = other DNA
gctgatataccagttaataaaataataatagaaaatgaatacatcagaataacattagacccgctagaacaaata

SEQ ID NO: 652475 - DNA, 75 bp, synthetic construct
  source 1..75: mol_type = other DNA
tacttaatgaaatggtaagtgaaacgctttctcataacaatattgcgggcaccattaagattactaaaaaccctg

SEQ ID NO: 652476 - DNA, 75 bp, synthetic construct
  source 1..75: mol_type = other DNA
cgaaaaaataataaaataaaattagataaagaggttaaccaatcgataaaatgggttaaagatatccaggctatc

SEQ ID NO: 652477 - DNA, 75 bp, synthetic construct
  source 1..75: mol_type = other DNA
gcaatacagactatacagagaacagccgccaggctatggcggatatggctcgaaccacgctggaaaacagcatta

SEQ ID NO: 652478 - DNA, 75 bp, synthetic construct
  source 1..75: mol_type = other DNA
ggcggcggagcagtgatgattaatggtgtcgcgacattatccagtgcttcatcaacaacgcgtggaagtgctgca

SEQ ID NO: 652479 - DNA, 75 bp, synthetic construct
  source 1..75: mol_type = other DNA
tgtcattaattcaacgacatggctggcagggaaccgaagaagggaaacataccggcaacatggcggatgaaccgg

SEQ ID NO: 652480 - DNA, 75 bp, synthetic construct
  source 1..75: mol_type = other DNA
tctgctggtgatcctcaatcgccttgagcaatcttctactgaagaggcgcgtgaagccgatgagatcgacgaaga

SEQ ID NO: 652481 - DNA, 75 bp, synthetic construct
  source 1..75: mol_type = other DNA
tattcacaatgatggttatccctgggagctatgcggcatgttatggagagttatcagcgcagcataatctggttg

SEQ ID NO: 652482 - DNA, 75 bp, synthetic construct
  source 1..75: mol_type = other DNA
gcaggtgtatttatcaagttctgacttgttaaccaacagcaacacaatactgaaaggtgcggaagataatggcgt

SEQ ID NO: 652483 - DNA, 75 bp, synthetic construct
  source 1..75: mol_type = other DNA
atctggcattgtcatacaacccgataacaacgacctgcaaacctgatgatttattaattactttagagagtattc

SEQ ID NO: 652484 - DNA, 75 bp, synthetic construct
  source 1..75: mol_type = other DNA
tcactactgccggagccgcaaagctggctgccgccactgtccccggcgggaaaaaagtaaacttgtctgcaatgg

SEQ ID NO: 652485 - DNA, 75 bp, synthetic construct
  source 1..75: mol_type = other DNA
aaactatccagtctggactggcagacctacgattttgtgccgggcagtctgataaccgttcggcttgataatatg

SEQ ID NO: 652486 - DNA, 75 bp, synthetic construct
  source 1..75: mol_type = other DNA
agaaagaccagaacggtgacgatattccagataagggcgcttttctggacaatgttggcgttaccagcctgacgt

SEQ ID NO: 652487 - DNA, 75 bp, synthetic construct
  source 1..75: mol_type = other DNA
gtgccggataatattccgctgactttataccttgcggaagcctatcgccattttggtcatgatgaccgggcgcgg

SEQ ID NO: 652488 - DNA, 75 bp, synthetic construct
  source 1..75: mol_type = other DNA
ccacaggaaaacgtgtaagcgcagctataaccataaatgattcaaacgaaattttagacccgatttcggacacag

SEQ ID NO: 652489 - DNA, 75 bp, synthetic construct
  source 1..75: mol_type = other DNA
gctgagtttgcagagggaataaatcaggggcaaataatattatttgtttcaagaaaagattttcctgttctccct

SEQ ID NO: 652490 - DNA, 75 bp, synthetic construct
  source 1..75: mol_type = other DNA
aaatgcaggtgtatttatcaagttctgacttgttaaccaacagcaacacgatcctgaaaggtgcggaagataatg

SEQ ID NO: 652491 - DNA, 75 bp, synthetic construct
  source 1..75: mol_type = other DNA
ttccctgatgtttacccgccgcgagacgcgtacacgaagaaaacttgtatttggtgcggtaacggatttaaacag

SEQ ID NO: 652492 - DNA, 75 bp, synthetic construct
  source 1..75: mol_type = other DNA
gttctcccctgaattgtctgtatatccagatcctgacattatcctgggctttcctccatgcgacaatctcgccgt

SEQ ID NO: 652493 - DNA, 75 bp, synthetic construct
  source 1..75: mol_type = other DNA
gccagggaaaagctatcgtagctacgggcaactggaagccgagtaccgcatcggacgcaatatgctgctggaagg

SEQ ID NO: 652494 - DNA, 75 bp, synthetic construct
  source 1..75: mol_type = other DNA
ctaccattgctaacgaaatacccaaactagcaatcaaaggtaaaaaaggccttaaagcaaaaactaatttaatgg

SEQ ID NO: 652495 - DNA, 75 bp, synthetic construct
  source 1..75: mol_type = other DNA
atgtcaggtttgacaaaaaatgaacatttagcattatatgcttatatgcttatatgcttatatgcttatatgctt

SEQ ID NO: 652496 - DNA, 75 bp, synthetic construct
  source 1..75: mol_type = other DNA
gttctcccctgaattgtctgtttatccagatcctgacattatcctgggctttcctccgtgcgacgatcttgcggt

SEQ ID NO: 652497 - DNA, 75 bp, synthetic construct
  source 1..75: mol_type = other DNA
aacgaaccaggaatagtttggttgccattttccattgctgatgcagcaaagcgccggacgttcaatatcaataac

SEQ ID NO: 652498 - DNA, 75 bp, synthetic construct
  source 1..75: mol_type = other DNA
aagtcgcgaagcgggaaggtgcgttggaattgtccgcattgcggaaaaataacctggcagtacagcccatatgat

SEQ ID NO: 652499 - DNA, 75 bp, synthetic construct
  source 1..75: mol_type = other DNA
gcagtaacacgatcctgaaaggtgcagaagataatggagtcggatttatgcttgaaagcaatggttcgccagtca

SEQ ID NO: 652500 - DNA, 75 bp, synthetic construct
  source 1..75: mol_type = other DNA
tactccaacccgtcagttctccagttgtgtgctgattgagtctggcgatagtctgaaagggattagtgcagcttc

SEQ ID NO: 652501 - DNA, 75 bp, synthetic construct
  source 1..75: mol_type = other DNA
aatgctcgaaccggcgcataaagggcttccggacgatccggcactgatccgacaactggcctacgtgaaccagcg

SEQ ID NO: 652502 - DNA, 75 bp, synthetic construct
  source 1..75: mol_type = other DNA
aaaaggaagctggaacggcaacgatgtgtactggctgcaacatggcggacttccaacagatgacttcagtaaggc

SEQ ID NO: 652503 - DNA, 75 bp, synthetic construct
  source 1..75: mol_type = other DNA
cgccttaaaaaacggctccaccacattaacgtcattaacagcggtgaccgatcaaaacggaatcgcgacaacaag

SEQ ID NO: 652504 - DNA, 75 bp, synthetic construct
  source 1..75: mol_type = other DNA
gtgcaatcaggtactaacgtgccctatataaaaattagcgcaattgattacagtctaaatatcaacggtgattac

SEQ ID NO: 652505 - DNA, 75 bp, synthetic construct
  source 1..75: mol_type = other DNA
ctcctgggtcgatgttgatgctaccggtaaagtgacatttaaaaatgtcggcagcaattgggaaaggattacggc

SEQ ID NO: 652506 - DNA, 75 bp, synthetic construct
  source 1..75: mol_type = other DNA
gtatcaaaaatctatctcgctatcatcgaactctataaagatcccgaagatattcaggacgaaatcgaaaaaaaa

SEQ ID NO: 652507 - DNA, 75 bp, synthetic construct
  source 1..75: mol_type = other DNA
tgaaaatggctggctggaaatcccgatagaccagctggtgcccggcgatattataaaactggcggcaggggatat

SEQ ID NO: 652508 - DNA, 75 bp, synthetic construct
  source 1..75: mol_type = other DNA
aatttatttcgatattagaagcaggaatcgccaaaattgaatccggtgatttcccggtaaacgagtatcggcgtc

SEQ ID NO: 652509 - DNA, 75 bp, synthetic construct
  source 1..75: mol_type = other DNA
taactatacgttacggccacgccttagccctatcagcagtctgaactttgccgaaatggaaagcttccacaactt

SEQ ID NO: 652510 - DNA, 75 bp, synthetic construct
  source 1..75: mol_type = other DNA
tcgccgcccagcagttcggaacgccggagtcttttccacctgagaggaaattaaagaagttaactacagtatttt

SEQ ID NO: 652511 - DNA, 75 bp, synthetic construct
  source 1..75: mol_type = other DNA
gcagattgagcacctatctctcccggtttcattcccgtcgtcttgggttatatgaagaaaataatatagtttatt

SEQ ID NO: 652512 - DNA, 75 bp, synthetic construct
  source 1..75: mol_type = other DNA
cctggccatccgctcggatgaccaattggaaaaccgcttcgagcccatgatgctgccggtgtgggaggccaacga

SEQ ID NO: 652513 - DNA, 75 bp, synthetic construct
  source 1..75: mol_type = other DNA
atgatcgtcgagaagttccgccgcacccacccggccagctccgacgccgaccaggagcacatcccggtgttggtc

SEQ ID NO: 652514 - DNA, 75 bp, synthetic construct
  source 1..75: mol_type = other DNA
ctggttgttaagaacccacagaggaaaggtgaaagtgatgattttgctgcttttgccagactggagctgggaaaa

SEQ ID NO: 652515 - DNA, 75 bp, synthetic construct
  source 1..75: mol_type = other DNA
atgactcaagcaaaagctaatctgagaaaacttcgccgtgcacgttatgttcccactcggacagtaaagaaaagc

SEQ ID NO: 652516 - DNA, 75 bp, synthetic construct
  source 1..75: mol_type = other DNA
gatgccagcataaccgcaaaacccttttttgaacgttatggttttcaggtagttaagcagcagcgcgttgaatgc

SEQ ID NO: 652517 - DNA, 75 bp, synthetic construct
  source 1..75: mol_type = other DNA
agccatagagatggccgtcgatttaaccccagtgtttttaaagatacttatcaatatggttatacaagctcaggt

SEQ ID NO: 652518 - DNA, 75 bp, synthetic construct
  source 1..75: mol_type = other DNA
agagttttatccagtcggtgcaccaatcccgtggccatcagataccgttccgtctggctatgccctgatgcaggg

SEQ ID NO: 652519 - DNA, 75 bp, synthetic construct
  source 1..75: mol_type = other DNA
gtggtgctggttggttcaaattagcaacggtaaccatgccacaggcgagttctgttgtttcaattacgttgattg

SEQ ID NO: 652520 - DNA, 75 bp, synthetic construct
  source 1..75: mol_type = other DNA
accagacaagcgtcagcagcgaagggcagcgccacgacggcatccacgaaggcaacagaggctgctggcagtgcg

SEQ ID NO: 652521 - DNA, 75 bp, synthetic construct
  source 1..75: mol_type = other DNA
aaaaaagtgctgccgctgcagagtcctcaaaaagcgcggcagctaccagtgccagtgccgcgaaaacgtcagaaa

SEQ ID NO: 652522 - DNA, 75 bp, synthetic construct
  source 1..75: mol_type = other DNA
aggccgcgtatgacctggctaacgggaaatacaccgcacaggacgctacgacagcacaaaaaggaattgtccagc

SEQ ID NO: 652523 - DNA, 75 bp, synthetic construct
  source 1..75: mol_type = other DNA
accagacaggcatcagcagcgaaaggcagcgccacgacggcatccacgaaggcgacagaggcagctggtagtgcg

SEQ ID NO: 652524 - DNA, 75 bp, synthetic construct
  source 1..75: mol_type = other DNA
accacatcgtcgtttgattacggtactaaaacgaccagttcatttgattacggcacaaaaaccacaaatagcgca

SEQ ID NO: 652525 - DNA, 75 bp, synthetic construct
  source 1..75: mol_type = other DNA
gcgaataccagtacagatggtaatcatagccattcactgtccggcacagcagcatccgcaggtgcacacgcacat

SEQ ID NO: 652526 - DNA, 75 bp, synthetic construct
  source 1..75: mol_type = other DNA
cgggatgcggcggcttcaaaagaggcggcaaaatcatcagaaacgaacgcatcctcgagcgccagtagcgcagct

SEQ ID NO: 652527 - DNA, 75 bp, synthetic construct
  source 1..75: mol_type = other DNA
ggctcagtaggtatgtctacggggtggttagcgaataccagtacagatggtaatcatagccattcactgtccggc

SEQ ID NO: 652528 - DNA, 75 bp, synthetic construct
  source 1..75: mol_type = other DNA
tgtctatgccaacgaagccggacatcttgaactgcaatataccgcccgcgccagctatgcactggaaaaagcgtt

SEQ ID NO: 652529 - DNA, 75 bp, synthetic construct
  source 1..75: mol_type = other DNA
aacctgtcattagttcttgaattaacggagcagtattttttaccatggatagtaaaaccatatccacctttcatt

SEQ ID NO: 652530 - DNA, 75 bp, synthetic construct
  source 1..75: mol_type = other DNA
ccagcgccgcttcattctatctcatctaccgtgtcaccatgctggctgatggccgccgactccttatctacatgg

SEQ ID NO: 652531 - DNA, 75 bp, synthetic construct
  source 1..75: mol_type = other DNA
aacggtaaatggttttccgatgatcatgattagcggctccagcgaccgcgcgatcgtcgatctccagcaaggtga

SEQ ID NO: 652532 - DNA, 75 bp, synthetic construct
  source 1..75: mol_type = other DNA
taataaaaatatcttcgaagaacccattaatgatatgaatgaaatttgcggacgactaagtacctatctgtcccg

SEQ ID NO: 652533 - DNA, 75 bp, synthetic construct
  source 1..75: mol_type = other DNA
tatgatcatcgtataagagggaagaagtctgttcagcctacttttaaaagtaaaatcccatttgttaacagggtg

SEQ ID NO: 652534 - DNA, 75 bp, synthetic construct
  source 1..75: mol_type = other DNA
gcgcagtccattacgcggggagccagtacaacgaagttgatatttcaaaagtggataactttatgaagctgaaag

SEQ ID NO: 652535 - DNA, 75 bp, synthetic construct
  source 1..75: mol_type = other DNA
gatggcaataaaacggcaacatgcaccgtaacggttaatgaagccacaaagaaggtaagcgccgtcagcgttgaa

SEQ ID NO: 652536 - DNA, 75 bp, synthetic construct
  source 1..75: mol_type = other DNA
caagaacaggaaaacatcttatataattatcaggtatcaagataaaatatacgccgcccataggataatatggga

SEQ ID NO: 652537 - DNA, 75 bp, synthetic construct
  source 1..75: mol_type = other DNA
ggaatgcaaattgaccataaagatggtaatgggttaaataattcaatagacaacctgcgtctagttagtctcggt

SEQ ID NO: 652538 - DNA, 75 bp, synthetic construct
  source 1..75: mol_type = other DNA
taaaagacgatggactcctgtactggagtgaccaatatctttcaagacccaaaatgttcaatatctctaaagaaa

SEQ ID NO: 652539 - DNA, 75 bp, synthetic construct
  source 1..75: mol_type = other DNA
actttcgttgcatcgagatcaaggactactttcaggaaacggatgccggaatttttgatgcactgatgtatctcc

SEQ ID NO: 652540 - DNA, 75 bp, synthetic construct
  source 1..75: mol_type = other DNA
ggcgatgaagtgaaaaaagtgacctgtaaaaatggcgtagtgaatgaaatctggacccgcaatcacgccgatatt

SEQ ID NO: 652541 - DNA, 75 bp, synthetic construct
  source 1..75: mol_type = other DNA
tactctcttctcgggccacaacgcgtgctcgatctcgcttgccaagcgcaggcattgatagcggaaagcggcgcg

SEQ ID NO: 652542 - DNA, 75 bp, synthetic construct
  source 1..75: mol_type = other DNA
gcggcggcctcgccggattactctgtggcctgcaactgcaaaaacacggcctgcgctgtgccattgtcacgcgtg

SEQ ID NO: 652543 - DNA, 75 bp, synthetic construct
  source 1..75: mol_type = other DNA
acaaaaatggcgtagtcagtgaaatatggacacgtaatcacgccgatattccgctacgtccgcgctttgcggtac

SEQ ID NO: 652544 - DNA, 75 bp, synthetic construct
  source 1..75: mol_type = other DNA
aaaaccagcttcaacgtcaattcgtacgtcagggaggcgtatggatgccgggtgatgaagtgaaaaaagtgacct

SEQ ID NO: 652545 - DNA, 75 bp, synthetic construct
  source 1..75: mol_type = other DNA
ctgcctgacggtcaaacggtgacagacattcacgacggcctggaatctttgtgccatcaagctcctgcccatcct

SEQ ID NO: 652546 - DNA, 75 bp, synthetic construct
  source 1..75: mol_type = other DNA
aagcgagtggaattaccgtaaaaatccttactggcgacagtgagttagttgcagcgaaagtgtgccatgaagtgg

SEQ ID NO: 652547 - DNA, 75 bp, synthetic construct
  source 1..75: mol_type = other DNA
tcgtcgctggttgtgggatgatatcgcgccgatgccagagctacttaagccgttaaaaccgggcattacgggtat

SEQ ID NO: 652548 - DNA, 75 bp, synthetic construct
  source 1..75: mol_type = other DNA
cggcttattttgctcagctacctggtaactatacgttacggccacgccttagccctatcagcagtctgaactttg

SEQ ID NO: 652549 - DNA, 75 bp, synthetic construct
  source 1..75: mol_type = other DNA
gtgcttcagcagaacaacttgagttgttcgacgaaatctggtctgaaggtatggcacctgaagagtggatagata

SEQ ID NO: 652550 - DNA, 75 bp, synthetic construct
  source 1..75: mol_type = other DNA
gtacgatgaagttgatatatctaaagtggacaattttatgaagctgaaagaccaggcgtctattgaagctcttat

SEQ ID NO: 652551 - DNA, 75 bp, synthetic construct
  source 1..75: mol_type = other DNA
gacgatgaactggcaaatctcgcacagcgcaccacgctgtttgcccgcctgacgccgatgcataaagaacgcatt

SEQ ID NO: 652552 - DNA, 75 bp, synthetic construct
  source 1..75: mol_type = other DNA
agcgattcagaaacgctcgccgcaacaccaaaagcggtaaaggccgcgtatgaccttgctaacgggaaatacact

SEQ ID NO: 652553 - DNA, 75 bp, synthetic construct
  source 1..75: mol_type = other DNA
ctaacgggaaatataccgctcaggacgctacgacagcacaaaaaggaattgtccagctcagtagtgcaaccaaca

SEQ ID NO: 652554 - DNA, 75 bp, synthetic construct
  source 1..75: mol_type = other DNA
gtttgattacggcactaaatccacgaataacaccggggcgcatacgcacagtgtgagcggtacagccgcaagtgc

SEQ ID NO: 652555 - DNA, 75 bp, synthetic construct
  source 1..75: mol_type = other DNA
ccagctaaatataaattcggtgatgtggctacgttcaaatatatgaagtgtgaccgtatcattgaagctgacatt

SEQ ID NO: 652556 - DNA, 75 bp, synthetic construct
  source 1..75: mol_type = other DNA
accagacaggcgtcagcagcgaagggcagcgccacgacggcatccacgaaggcgacagaggctgctggcagtgcg

SEQ ID NO: 652557 - DNA, 75 bp, synthetic construct
  source 1..75: mol_type = other DNA
gggacttcttcccgtagatcgtattatcaacgtattcagacacagtcagcaggtgctcatacccactcgctgtct

SEQ ID NO: 652558 - DNA, 75 bp, synthetic construct
  source 1..75: mol_type = other DNA
gttcggcggcgtcatcggcatcatctgcgtctgcttcaaaagatgaggcgaccagacaggcatcagcagcgaaag

SEQ ID NO: 652559 - DNA, 75 bp, synthetic construct
  source 1..75: mol_type = other DNA
ccggcacatcagcccgtgaggcggcaacccgtgcgactgatgctgcaggctcagcacgtgcagccagcacgtcag

SEQ ID NO: 652560 - DNA, 75 bp, synthetic construct
  source 1..75: mol_type = other DNA
gtcagcgtcttccagcgcaggaacggcatcgacaaaggcccgtgaagcagcaaaaagtgctgctgctgcagagtc

SEQ ID NO: 652561 - DNA, 75 bp, synthetic construct
  source 1..75: mol_type = other DNA
atctgcccgtgaggcggcaacccatgcgactgatgctgcaggctcagcacgcgcagccagcacgtcagccggaca

SEQ ID NO: 652562 - DNA, 75 bp, synthetic construct
  source 1..75: mol_type = other DNA
cgacgaaaaaggggatagtccagctaagcagtgcgactaacagcacttccgagtcactggcggcaacgccaaaag

SEQ ID NO: 652563 - DNA, 75 bp, synthetic construct
  source 1..75: mol_type = other DNA
aaaagatgaggcgaccagacaggcgtcagcagcgaagagcagcgccacgacggcatccacgaaggcgacagaggc

SEQ ID NO: 652564 - DNA, 75 bp, synthetic construct
  source 1..75: mol_type = other DNA
atgaaaccaatcattatatctgtattgtttgtatctttatttgcattccaccctgcttatgctgtcggggcctat

SEQ ID NO: 652565 - DNA, 75 bp, synthetic construct
  source 1..75: mol_type = other DNA
gaaattcctgctggcggttctctggtcgagtacgttgacgatatgcgcgagaagctggaagccgcagagaagcgc

SEQ ID NO: 652566 - DNA, 75 bp, synthetic construct
  source 1..75: mol_type = other DNA
tggcaatccagtctgcgtcccggaaatggacgatgccgttgaaggactggcgaatggcaatgagccgctttatta

SEQ ID NO: 652567 - DNA, 75 bp, synthetic construct
  source 1..75: mol_type = other DNA
gtcccggaaatggacgatgccgttgaaggactggcgaatggcaatgagccgctttattatcgagttcagtgaccg

SEQ ID NO: 652568 - DNA, 75 bp, synthetic construct
  source 1..75: mol_type = other DNA
ttattcccactggcgctgatgctttcaggctgtatctcgtatgctctggtttcccataccgcaaagggtagttca

SEQ ID NO: 652569 - DNA, 75 bp, synthetic construct
  source 1..75: mol_type = other DNA
tcctcttcatcccggcgctgtttattctcttttcgctcggtggcgcagtattcggtatgggggaagaggctgtcg

SEQ ID NO: 652570 - DNA, 75 bp, synthetic construct
  source 1..75: mol_type = other DNA
tttatgctggtgattggcggcgcgtttggtatcgtgatgcgcacaggaaccattgataacgggattctcgcgctt

SEQ ID NO: 652571 - DNA, 75 bp, synthetic construct
  source 1..75: mol_type = other DNA
agactatcacttatttaagtgatactggttgtctggagattcagggggccagtctagtcatctacacaaccaacg

SEQ ID NO: 652572 - DNA, 75 bp, synthetic construct
  source 1..75: mol_type = other DNA
acctggcgggaaatctctgtcgctgcaccggttatcagatgattgtgaatacagtactggactgcgaagaaacga

SEQ ID NO: 652573 - DNA, 75 bp, synthetic construct
  source 1..75: mol_type = other DNA
gtaccattaaggtttccagaagcctccttcagaatggcattaatagcgttggtagccagcaggctaataaacctg

SEQ ID NO: 652574 - DNA, 75 bp, synthetic construct
  source 1..75: mol_type = other DNA
atgtctgaccctgtacgtattacaaatcccggtgcagaatcgctggggtatgattcagatggacatgaaattatg

SEQ ID NO: 652575 - DNA, 75 bp, synthetic construct
  source 1..75: mol_type = other DNA
ccgttgaaggactggcgaatggcaatgagccgctttattatcgagttcggtgaccgcctggacggtcacttctga

SEQ ID NO: 652576 - DNA, 75 bp, synthetic construct
  source 1..75: mol_type = other DNA
aaaaggtcgtgtggctggcaatccaggcggcttcacagaaatggacgatgccactgcgggactggcgtatggcaa

SEQ ID NO: 652577 - DNA, 75 bp, synthetic construct
  source 1..75: mol_type = other DNA
cagtacggatttggggacgaaaaacacatcgtcgtttgattacggaaccaaatccacgaataacaccggggcgca

SEQ ID NO: 652578 - DNA, 75 bp, synthetic construct
  source 1..75: mol_type = other DNA
gataaggcactggcaacacaatatggtttaatttgtgatacccgggcgttgtacatggatgctggacggtttgaa

SEQ ID NO: 652579 - DNA, 75 bp, synthetic construct
  source 1..75: mol_type = other DNA
ggcgacagaggcagctggtagtgcgacggcagcagctcagagcaaaagtacggcggaatctgcagcaacgcgcgc

SEQ ID NO: 652580 - DNA, 75 bp, synthetic construct
  source 1..75: mol_type = other DNA
aaaacggctgccgcatcgtcagccagttcggcggcgtcatcggcatcatctgcgtctgcttcaaaagatgaggcg

SEQ ID NO: 652581 - DNA, 75 bp, synthetic construct
  source 1..75: mol_type = other DNA
ctggcggcaacgccaaagtcggtaaaggcagcctatgaccttgctaacgggaaatatactgctcaggacgctacg

SEQ ID NO: 652582 - DNA, 75 bp, synthetic construct
  source 1..75: mol_type = other DNA
gtgccgcttcctcggcaacggcggcagcaaattctgcgaaggcggcaaaaacgtccgagacgaacgccaggtctt

SEQ ID NO: 652583 - DNA, 75 bp, synthetic construct
  source 1..75: mol_type = other DNA
atcagcctggcgattttcagcaactatgcgctattttcattagagcggttacgatgaccgccagtcagcattatt

SEQ ID NO: 652584 - DNA, 75 bp, synthetic construct
  source 1..75: mol_type = other DNA
ggcgacacaatgggagggcagttaaaaatcagcacgataaatgctcttcgaatattcaaccaagcctttggcctt

SEQ ID NO: 652585 - DNA, 75 bp, synthetic construct
  source 1..75: mol_type = other DNA
gcaggcttttgacaaatctgcatacccgaaacttgcagcggcttatccgtcaggcgtgatccctgatatgcgtgg

SEQ ID NO: 652586 - DNA, 75 bp, synthetic construct
  source 1..75: mol_type = other DNA
tttatcgttcagcccgtgatggttatggttttgaagccgactggtccgaattttacaccaccaccagaaaacctt

SEQ ID NO: 652587 - DNA, 75 bp, synthetic construct
  source 1..75: mol_type = other DNA
gtgcaacttcctcggcaacggcggcaggaaattccgcgaaggcggcaaaaacgtccgagacgaacgctaagtctt

SEQ ID NO: 652588 - DNA, 75 bp, synthetic construct
  source 1..75: mol_type = other DNA
cagatactgcgaccaagatcaagacagcacgtaagattgggggcgtggcatttgatggatcggcagatatcaact

SEQ ID NO: 652589 - DNA, 75 bp, synthetic construct
  source 1..75: mol_type = other DNA
tccggatgaagccgggcgttacagtatggacgttgagtacggtcagtacagcgttattctgttggtggagggatt

SEQ ID NO: 652590 - DNA, 75 bp, synthetic construct
  source 1..75: mol_type = other DNA
ggagcacatacacacaactttgcttacaacaatacttcagcatacgcagaaactcccggtaccggtggtggaatg

SEQ ID NO: 652591 - DNA, 75 bp, synthetic construct
  source 1..75: mol_type = other DNA
atgagtaccacaacacgtaaatttaaaaccgttaccaccgatacgggtgccaaaaaattagctcaggcagccgcg

SEQ ID NO: 652592 - DNA, 75 bp, synthetic construct
  source 1..75: mol_type = other DNA
cgtaacgattcatacttcaccagcatattctgctaataagccggaaggattaacggacggttctgtttattcgct

SEQ ID NO: 652593 - DNA, 75 bp, synthetic construct
  source 1..75: mol_type = other DNA
ggcggcaaaaacgtccgagacgaacgccaggtcttctgagacggcagcgggacagagcgcctcagctgcggcagg

SEQ ID NO: 652594 - DNA, 75 bp, synthetic construct
  source 1..75: mol_type = other DNA
acaggctgcaacgccgaaagcagtaaaggccgcatatgaccttgctaacgggaaatatactgcgcaggatgccag

SEQ ID NO: 652595 - DNA, 75 bp, synthetic construct
  source 1..75: mol_type = other DNA
gctcaggacgctacgacagcacaaaaagggattgtccagctaagcagcgcgactaacagcacatctgaaacgctt

SEQ ID NO: 652596 - DNA, 75 bp, synthetic construct
  source 1..75: mol_type = other DNA
ccgggaaattggtgtgtttgatgagcacggcgatttaatcgcggtgggcaatactgccgaaagttacaagccagc

SEQ ID NO: 652597 - DNA, 75 bp, synthetic construct
  source 1..75: mol_type = other DNA
agcacttccgagtcactggcggcaacgccaaaagccgttaaggccgcgtatgagctggctaacgggaaatacacc

SEQ ID NO: 652598 - DNA, 75 bp, synthetic construct
  source 1..75: mol_type = other DNA
accacgaaagcgtcagaagcagccacttcagcccgggatgcgtcggcttcaaaagaggcggcaaaatcatcagaa

SEQ ID NO: 652599 - DNA, 75 bp, synthetic construct
  source 1..75: mol_type = other DNA
gcaacaccaatggcggtaaaggcagcatatgaccttgctaacgggaaatatactgcgcaggatgccaccacagcg

SEQ ID NO: 652600 - DNA, 75 bp, synthetic construct
  source 1..75: mol_type = other DNA
tatccagcactgccactgtggcgcttaccgtggataacaccatggtgatggccacagtggattacgtggataaca

SEQ ID NO: 652601 - DNA, 75 bp, synthetic construct
  source 1..75: mol_type = other DNA
cagagtattaatattggtgcaaaccagaatctggataattacaaaacgccggggctgtaccatcaacccctgaat

SEQ ID NO: 652602 - DNA, 75 bp, synthetic construct
  source 1..75: mol_type = other DNA
tgtttgaccggatagaggagaagcctgatgccatgcagtcgctggtcctgacgccaccggcacgccaggcgctgg

SEQ ID NO: 652603 - DNA, 75 bp, synthetic construct
  source 1..75: mol_type = other DNA
tgtggccagtctctggggaaagtgcgtgttccacaccggggaaatgtagtggagaaagttatcgaaggggcttac

SEQ ID NO: 652604 - DNA, 75 bp, synthetic construct
  source 1..75: mol_type = other DNA
atgcgattaactagtcgttttggttatgtaaaccagatacgccgtgaccgtccgctgacacacgaagaactgatg

SEQ ID NO: 652605 - DNA, 75 bp, synthetic construct
  source 1..75: mol_type = other DNA
aaacaacacctggcaccagtggtctttagacgctattttgcaacgctttgctgattgctgtcggcaaatcaatag

SEQ ID NO: 652606 - DNA, 75 bp, synthetic construct
  source 1..75: mol_type = other DNA
ggtattccacgccgactcttccctcgtctggtggaagcgggtgaacagattggtacgctacagaacagcgccgca

SEQ ID NO: 652607 - DNA, 75 bp, synthetic construct
  source 1..75: mol_type = other DNA
acgtatccatacccgggccattcacagcattgataccgacattaagctcaaccgtgcattgtgggtgatggcaga

SEQ ID NO: 652608 - DNA, 75 bp, synthetic construct
  source 1..75: mol_type = other DNA
gagaagtgcgggtaccgcataaagggaatgttgtcgagaaggtgattgaaggggcttacgaagtgctcggtgtgt

SEQ ID NO: 652609 - DNA, 75 bp, synthetic construct
  source 1..75: mol_type = other DNA
atcaccgtactagaaagcctgcagcgggagggctttcagcccttcttcgcctgccagacccgcgtgcgcgacccg

SEQ ID NO: 652610 - DNA, 75 bp, synthetic construct
  source 1..75: mol_type = other DNA
cgaagaactgatgcactatgtacccggtatttttggggaagaccggcatacctcccgcagtgaacgctatacgta

SEQ ID NO: 652611 - DNA, 75 bp, synthetic construct
  source 1..75: mol_type = other DNA
cctccagctaccagatgctgccgggttacttcaggttcgtctgccagaacgggtgcgtctgtggccagtctctgg

SEQ ID NO: 652612 - DNA, 75 bp, synthetic construct
  source 1..75: mol_type = other DNA
atgaaaaaaatcgcgcttattatcggcagcatgatcgcgggcggtattatttctgcggcaggttttacctgggtt

SEQ ID NO: 652613 - DNA, 75 bp, synthetic construct
  source 1..75: mol_type = other DNA
gggaagtgcgtgttccgcaccggggaaatgtagtggagaaagttatcgaaggggcttacgaggtggtgggggttt

SEQ ID NO: 652614 - DNA, 75 bp, synthetic construct
  source 1..75: mol_type = other DNA
tggacggcgctctggttgataagcaaggaaatctgctctatccggtcattagctggaaatgtccgcgaacggcgg

SEQ ID NO: 652615 - DNA, 75 bp, synthetic construct
  source 1..75: mol_type = other DNA
tacttcaggttcgtctgccagaacggatgcgtctgtggtcagtctctgggggaagtgcgtgttccacaccgggga

SEQ ID NO: 652616 - DNA, 75 bp, synthetic construct
  source 1..75: mol_type = other DNA
aaacggacaacatgtccctgaaatcatcctgctgaactcccatgacggtacctccagctaccagatgctgcgggt

SEQ ID NO: 652617 - DNA, 75 bp, synthetic construct
  source 1..75: mol_type = other DNA
acattctgacaccacgacgccgggaggattacggtaaggacctgtggagtgcttatcagaccattcaggagaata

SEQ ID NO: 652618 - DNA, 75 bp, synthetic construct
  source 1..75: mol_type = other DNA
atcatcctgctgaactcccatgacggtacctccagctaccagatgatgccgggttacttcaggttcgtctgccag

SEQ ID NO: 652619 - DNA, 75 bp, synthetic construct
  source 1..75: mol_type = other DNA
gcgtacattcccaccatcaccgtactggaaagcctgcagcgggaaggctttcagccattcttcgcctgccagacc

SEQ ID NO: 652620 - DNA, 75 bp, synthetic construct
  source 1..75: mol_type = other DNA
gtatccacacccgtgccattcacagcatcgacaccgatattaagctcaaccgcgcattgtgggtaatggcagaaa

SEQ ID NO: 652621 - DNA, 75 bp, synthetic construct
  source 1..75: mol_type = other DNA
gtgccagaacgctggctggcaaggagtgacgcttaataccacgcgggggcatttctatcgcgcggcgctggaagg

SEQ ID NO: 652622 - DNA, 75 bp, synthetic construct
  source 1..75: mol_type = other DNA
ggcgtgctggaatgggtgagaaaactgttctggacggctgaaactccctggcaaatgttgattgaagaagctcgc

SEQ ID NO: 652623 - DNA, 75 bp, synthetic construct
  source 1..75: mol_type = other DNA
ggtgccgaacaaaatgaacccgtgctctcttccggtacctgggaaattttaatggtccgcagtacgcaggttgat

SEQ ID NO: 652624 - DNA, 75 bp, synthetic construct
  source 1..75: mol_type = other DNA
tggaaaatctgcagcgggaaggctttcagccgttcttcgcctgccagacccgtgtgcgcgaccagagccgccggg

SEQ ID NO: 652625 - DNA, 75 bp, synthetic construct
  source 1..75: mol_type = other DNA
aagagaaacacacatccagaagcgagaactatacctggatccccaccatcaccgtgctggaaagcctgcagcggg

SEQ ID NO: 652626 - DNA, 75 bp, synthetic construct
  source 1..75: mol_type = other DNA
gtcgcagtgcaaaaggaaaacgtatccatacccgggccattcacagcattgacaccgacattaagctcaatcgcg

SEQ ID NO: 652627 - DNA, 75 bp, synthetic construct
  source 1..75: mol_type = other DNA
gcgataagcatgaatctcgttcagaccgttacacctacatcccgaccatcaccatcctcgaaagcctgcagcgtg

SEQ ID NO: 652628 - DNA, 75 bp, synthetic construct
  source 1..75: mol_type = other DNA
ctgccagaacgggtgcgtctgtggccagtctctgggggaagtgcgtgttccacaccggggaaatgtagtggagaa

SEQ ID NO: 652629 - DNA, 75 bp, synthetic construct
  source 1..75: mol_type = other DNA
aacttacatgcattgaaggcttctgtggtgctggaggaatgtcccttgggcttaagcaagcggggttcgatatca

SEQ ID NO: 652630 - DNA, 75 bp, synthetic construct
  source 1..75: mol_type = other DNA
ataattctgcttaacagccatgacggctccagttcatatcagatgctaccggggttattcagagcagtttgccaa

SEQ ID NO: 652631 - DNA, 75 bp, synthetic construct
  source 1..75: mol_type = other DNA
cgaacatcagccagtcaccaccgctgacattctgacaccacgacgccgggaggattacggtaaagacctgtggag

SEQ ID NO: 652632 - DNA, 75 bp, synthetic construct
  source 1..75: mol_type = other DNA
gtatccatacccgtaccattcacagcatcgacaccgacattaagctcaaccgggcgttgtgggtgatggcagaaa

SEQ ID NO: 652633 - DNA, 75 bp, synthetic construct
  source 1..75: mol_type = other DNA
agaatatgctgaaaggcgggatttccggtcgcagtgcaaaaggaaaacgtatccacacccgtgccattcacagca

SEQ ID NO: 652634 - DNA, 75 bp, synthetic construct
  source 1..75: mol_type = other DNA
ccgccggcacaacaggcgtttgccagagccgccctgacgtaccgctttggggaagagcaccagccggtgacggaa

SEQ ID NO: 652635 - DNA, 75 bp, synthetic construct
  source 1..75: mol_type = other DNA
tcacacccgtgccgttaacgggatagacagtgacatcagactcaaccgggcgctctgggtcatggccgagaacat

SEQ ID NO: 652636 - DNA, 75 bp, synthetic construct
  source 1..75: mol_type = other DNA
accctcctagagaacctgcagcgcgaagggtttcagccgttttttgcctgtcagtcgcgagcccgcgatccgggt

SEQ ID NO: 652637 - DNA, 75 bp, synthetic construct
  source 1..75: mol_type = other DNA
gattactggcaaacaggttcccgaaattattctgctgaacagccacgacggctccagctcatatcagatgctacc

SEQ ID NO: 652638 - DNA, 75 bp, synthetic construct
  source 1..75: mol_type = other DNA
ccagctcttaccagatgttgcctggcctgttcagggctgtgtgccaaaacggtcttgtctgcggtgagtcgtttg

SEQ ID NO: 652639 - DNA, 75 bp, synthetic construct
  source 1..75: mol_type = other DNA
tgtcatgcagtcgttgctgttgccgccaccggcgcagcaggcactggcaaaagccgcgctgacgtaccgctttgg

SEQ ID NO: 652640 - DNA, 75 bp, synthetic construct
  source 1..75: mol_type = other DNA
atgcgaacactcactcatattcttaataagatccttgccggatgttgctgcattattctcgccattatggtgttc

SEQ ID NO: 652641 - DNA, 75 bp, synthetic construct
  source 1..75: mol_type = other DNA
ccaccggcacgccaggcgctgacacaggcggcactgacttaccgttattgtgacgaacatcagcccgtcaccacc

SEQ ID NO: 652642 - DNA, 75 bp, synthetic construct
  source 1..75: mol_type = other DNA
acccgtgccattcacagcatcgacaccgatattaagctcaaccgcgcattgtgggtgatggcagaaacgctgctg

SEQ ID NO: 652643 - DNA, 75 bp, synthetic construct
  source 1..75: mol_type = other DNA
tatgaaaaagcccgcgatggtcgcgcgctgccgctgctagtcttcgttcccagcaaattaaaactgcgcggcacg

SEQ ID NO: 652644 - DNA, 75 bp, synthetic construct
  source 1..75: mol_type = other DNA
aaagcagccgcacccgtgctgttaccggcattgacggcgatgtgaaactcaatcgcgccctgtgggttatggcag

SEQ ID NO: 652645 - DNA, 75 bp, synthetic construct
  source 1..75: mol_type = other DNA
tgcgtctgcggcgggccggacagataaacggacaacatgtccctgaaattattctgctcaactcccatgacggtt

SEQ ID NO: 652646 - DNA, 75 bp, synthetic construct
  source 1..75: mol_type = other DNA
gggaaggctttcagccattcttcgcctgccagacccgtgtgcgcgacccgggccgccggggatacaccaaacaca

SEQ ID NO: 652647 - DNA, 75 bp, synthetic construct
  source 1..75: mol_type = other DNA
cacccgtgccattcacagcatcgacaccgatattaagctcaaccgcgcattgtgggtaatggcagaaacgctgct

SEQ ID NO: 652648 - DNA, 75 bp, synthetic construct
  source 1..75: mol_type = other DNA
atttttatgatatatggcggtaatattgttgtcgaaaaagctcaacatgttggacaaatatcccccgtattaaaa

SEQ ID NO: 652649 - DNA, 75 bp, synthetic construct
  source 1..75: mol_type = other DNA
gcggcgtctatactgccgggttaaaaaaacatctggcgattgagctgttagcacaaaaaattcccgtagcttctg

SEQ ID NO: 652650 - DNA, 75 bp, synthetic construct
  source 1..75: mol_type = other DNA
gattgaggaaaagcgtgatgccatgcagtcgctgattctgccgccaccagcacgccaggcgctagcacaggcggc

SEQ ID NO: 652651 - DNA, 75 bp, synthetic construct
  source 1..75: mol_type = other DNA
acgaggtggtgggggtttttgaccggattgaggaaaagcgtgatgccatgcagtcgctgattctgccgccaccag

SEQ ID NO: 652652 - DNA, 75 bp, synthetic construct
  source 1..75: mol_type = other DNA
acattctgacgccacgacgctgggaggattacggtaaggacctgtggagtacttatcagaccatccaggagaata

SEQ ID NO: 652653 - DNA, 75 bp, synthetic construct
  source 1..75: mol_type = other DNA
tggcacaggcggcactgacttaccgttatggtgacgaacatcagcccgtcaccaccgccgacattctgacgccac

SEQ ID NO: 652654 - DNA, 75 bp, synthetic construct
  source 1..75: mol_type = other DNA
catcagcccgtcaccaccgccgacatcctgacgccacgacgcagggaggattacggtaaggacctgtggagtgct

SEQ ID NO: 652655 - DNA, 75 bp, synthetic construct
  source 1..75: mol_type = other DNA
cacccgtgccattcacagcatcgataccgacattaagctcaaccgggcattgtgggtgatggcagaaacgctgct

SEQ ID NO: 652656 - DNA, 75 bp, synthetic construct
  source 1..75: mol_type = other DNA
aacggctgcgtctgtggccagtctctgggggaagtgcgtgttccgcaccggggaaatgtcgtggacacagtgatt

SEQ ID NO: 652657 - DNA, 75 bp, synthetic construct
  source 1..75: mol_type = other DNA
aacggctgcgtctgtggtcagtctctgggggaagtgcgtgttccgcaccggggaaatgtcgtggagacagttatt

SEQ ID NO: 652658 - DNA, 75 bp, synthetic construct
  source 1..75: mol_type = other DNA
aacggctgcgtctgtggacagtctctgggggaagtgcgtgttccgcaccggggaaatgtcgtggaaacagtcatt

SEQ ID NO: 652659 - DNA, 75 bp, synthetic construct
  source 1..75: mol_type = other DNA
cgtgttccgcaccggggaaatgtggtggacagagtcattgaaggggcttacgaggtggtgggcgtgtttgaccgg

SEQ ID NO: 652660 - DNA, 75 bp, synthetic construct
  source 1..75: mol_type = other DNA
gataaccggtaagcaggtgccggaaattatcctgctcaactcccatgacggaaccagctcatatcagatgctgcc

SEQ ID NO: 652661 - DNA, 75 bp, synthetic construct
  source 1..75: mol_type = other DNA
gctggcaggatgagagtagcgacctgtggaccacgtaccagcgtattcaggagaacctgattaagggcgggctca

SEQ ID NO: 652662 - DNA, 75 bp, synthetic construct
  source 1..75: mol_type = other DNA
tagcgcgtttacgtttgcatttgcgtcagaatgagcaagccacagtgaccaaaggtcttcaggaaacgtctctga

SEQ ID NO: 652663 - DNA, 75 bp, synthetic construct
  source 1..75: mol_type = other DNA
agctgatttcgaattattgtgggaattagctacccatgccgggcaaatcatggaccgcgatgcattgctgaaaaa

SEQ ID NO: 652664 - DNA, 75 bp, synthetic construct
  source 1..75: mol_type = other DNA
ttgaccggattgaagaaaagcgtgacgccatgcagtctctggtcctgccgccaccgtcacgccaggcgctggcac

SEQ ID NO: 652665 - DNA, 75 bp, synthetic construct
  source 1..75: mol_type = other DNA
aacggctgcgtctgtgggcagtctctgggggaagtgcgtgttccgcaccggggaaatgtcgtggatacagttatt

SEQ ID NO: 652666 - DNA, 75 bp, synthetic construct
  source 1..75: mol_type = other DNA
gttaggtgaaaatggcatctatctgcacggtctgccttatgccatcgccccggatagccaaaaacaggtgccgat

SEQ ID NO: 652667 - DNA, 75 bp, synthetic construct
  source 1..75: mol_type = other DNA
atctgcctgaatattgccttttttaaacaggtgttgcaggcgctgccgctggattcgctgcataacgtactggtt

SEQ ID NO: 652668 - DNA, 75 bp, synthetic construct
  source 1..75: mol_type = other DNA
tgatgaacatcagccggtcaccaccgctgacattctgacaccacgacgcagggaggattacggtaaggacctgtg

SEQ ID NO: 652669 - DNA, 75 bp, synthetic construct
  source 1..75: mol_type = other DNA
cctgatagccaaaaacaagtaccgatgctgctgtggttgtcggaggattatcaaaagcggtatcagattgaccag

SEQ ID NO: 652670 - DNA, 75 bp, synthetic construct
  source 1..75: mol_type = other DNA
atcaacggcgaatgctatgacgaagtgctgttccacgggctggaagagtacatcaataacctgcaaggtgatggc

SEQ ID NO: 652671 - DNA, 75 bp, synthetic construct
  source 1..75: mol_type = other DNA
catcaacgtgctgtggaatgacaacgatggcggctgcaaaggtgcctgcgatcgcgtgcctcaccagaacgtcac

SEQ ID NO: 652672 - DNA, 75 bp, synthetic construct
  source 1..75: mol_type = other DNA
gaaggggcttacgaggtggtgggggtttttgaccggatcgaggacaagcgtgatgccatgcagtcgctgctactg

SEQ ID NO: 652673 - DNA, 75 bp, synthetic construct
  source 1..75: mol_type = other DNA
gaaggggcttacgaggtggtgggtgtctttgaccggatagaggacaagcgtgatgccatgcagtcgctgctactg

SEQ ID NO: 652674 - DNA, 75 bp, synthetic construct
  source 1..75: mol_type = other DNA
gaaggggcttacgaggtggtgggtgtatttgaccggatcgaggacaagcgtgatgccatgcagtcgctgctactg

SEQ ID NO: 652675 - DNA, 75 bp, synthetic construct
  source 1..75: mol_type = other DNA
cgtggtggagaaagttattgaaggggcttacgaggtggtgggcgtttttgaccggattgaggaaaagcgtgatgc

SEQ ID NO: 652676 - DNA, 75 bp, synthetic construct
  source 1..75: mol_type = other DNA
gctttcagccattcttcgcctgccagacccgcgtacgtgacccgggccgccggggatacacaaaacacatgctgc

SEQ ID NO: 652677 - DNA, 75 bp, synthetic construct
  source 1..75: mol_type = other DNA
gaaggggcttacgaggtggtgggggtctttgaccggattgaggacaagcgtgatgccatgcagtcgctgctactg

SEQ ID NO: 652678 - DNA, 75 bp, synthetic construct
  source 1..75: mol_type = other DNA
ggcattgacggggacgtgaagcttaaccgggcactgtgggtgatggcggaaacgctgctcacgcagctgcagtag

SEQ ID NO: 652679 - DNA, 75 bp, synthetic construct
  source 1..75: mol_type = other DNA
gtgcttatcagaccatccaggaaaatatgctgaaaggcgggatttccggtcgcagcgctaaaggaaaacgtatcc

SEQ ID NO: 652680 - DNA, 75 bp, synthetic construct
  source 1..75: mol_type = other DNA
ccgcccgctgacacatgaagaactgatgcactatgtgcccagtatttttggggaagaccggcatacctcccgcag

SEQ ID NO: 652681 - DNA, 75 bp, synthetic construct
  source 1..75: mol_type = other DNA
aactctcatgacggtacctccagctaccagatgctgccggggtacttcaggttcgtctgccagaacggctgcgtc

SEQ ID NO: 652682 - DNA, 75 bp, synthetic construct
  source 1..75: mol_type = other DNA
gccattcacagcattgacactgacattaagctcaaccgcgcattgtgggtgatggcggaaacgctgctggagagc

SEQ ID NO: 652683 - DNA, 75 bp, synthetic construct
  source 1..75: mol_type = other DNA
ccagacccgtgtgcgcgacccgggccgccggggatacaccaaacatatgctgcgtctgcggcgggccggagagat

SEQ ID NO: 652684 - DNA, 75 bp, synthetic construct
  source 1..75: mol_type = other DNA
gggaaggcttccagccattcttcgcctgccagacctgtgtgcgcgacccgggccgccggggatacacaaaacaca

SEQ ID NO: 652685 - DNA, 75 bp, synthetic construct
  source 1..75: mol_type = other DNA
ccatacccgtgccattcacagcattgacactgacattaagctcaaccgtgcattgtgggtgatggcagaaacact

SEQ ID NO: 652686 - DNA, 75 bp, synthetic construct
  source 1..75: mol_type = other DNA
ggatgcgtctgtggtcagtctctgggggaagtgcgtgttccacaccggggagacgtagtggagaaagttatcgaa

SEQ ID NO: 652687 - DNA, 75 bp, synthetic construct
  source 1..75: mol_type = other DNA
accgccgacattctgacaccacgacgccgggaggattacggtaaggacctgtggagtgcttatcagaccatacag

SEQ ID NO: 652688 - DNA, 75 bp, synthetic construct
  source 1..75: mol_type = other DNA
tgcgtctgcgccgtgacggggagataaacggacaacatgtccctgaaatcatcctactgaactcccatgacggta

SEQ ID NO: 652689 - DNA, 75 bp, synthetic construct
  source 1..75: mol_type = other DNA
gaactatacctggatccccaccatcaccgtgctggaaagcctgcagcgggaaggctttcagcccttctttgcctg

SEQ ID NO: 652690 - DNA, 75 bp, synthetic construct
  source 1..75: mol_type = other DNA
gagtgcttatcagaccatccaggagaacatgctgaaaggcgggatttccggccgcagcgctaaaggaaaacgtat

SEQ ID NO: 652691 - DNA, 75 bp, synthetic construct
  source 1..75: mol_type = other DNA
acagcgacagcgcagcgtatcgctcagtttgagcagcaaatggaagtcgttaaagccactgaagccatgcagcgt

SEQ ID NO: 652692 - DNA, 75 bp, synthetic construct
  source 1..75: mol_type = other DNA
cccccgcctacacaacaagctctggcacaggctgcactgacgtaccgtttcggtgaggaccaccagccggtgaca

SEQ ID NO: 652693 - DNA, 75 bp, synthetic construct
  source 1..75: mol_type = other DNA
caacctcggcaacagcctggcggcggtgaaaaaactggtatttgaacagggtgcgattggtcagcaacaactggc

SEQ ID NO: 652694 - DNA, 75 bp, synthetic construct
  source 1..75: mol_type = other DNA
gatacgctgctggctcgcgcttatcagacctatatcgacgaactgaagcagtaccataatccgcgctacggtcgt

SEQ ID NO: 652695 - DNA, 75 bp, synthetic construct
  source 1..75: mol_type = other DNA
ggtatcgacggggacgtgaaacttaaccgggcactgtgggtgatggcggaagcgatgctcacgcaactgcagtga

SEQ ID NO: 652696 - DNA, 75 bp, synthetic construct
  source 1..75: mol_type = other DNA
atgacccgtctggcttcgcgctttggcgctgcaaatcttattcgtcgtgaccgtccgttaacccgtgaagagctg

SEQ ID NO: 652697 - DNA, 75 bp, synthetic construct
  source 1..75: mol_type = other DNA
gggaaggcttccagccattctttgcctgtcagacccgggtacgtgatcctggccgtcgtgaacatacgaagcata

SEQ ID NO: 652698 - DNA, 75 bp, synthetic construct
  source 1..75: mol_type = other DNA
aatcgtcatcccggaatttattaaactcggtattgaaccgcaggacgcttacgactacgcagcgattggttgtat

SEQ ID NO: 652699 - DNA, 75 bp, synthetic construct
  source 1..75: mol_type = other DNA
gtgaagaaactggtgtttgaacagggcgcgattggtcagcaacagctggctgccgcactggcggatgacttcgac

SEQ ID NO: 652700 - DNA, 75 bp, synthetic construct
  source 1..75: mol_type = other DNA
tatcgtttggtcgtatggaccagtatctctacccatactatcgccgtgacgttgaactgaaccagacactggatc

SEQ ID NO: 652701 - DNA, 75 bp, synthetic construct
  source 1..75: mol_type = other DNA
aatcgaatatgtcgttgacaccatgctggaagagaacgtgcacgatattctctgctcggcgctggtggatgactg

SEQ ID NO: 652702 - DNA, 75 bp, synthetic construct
  source 1..75: mol_type = other DNA
tcagcgaccgcattaaagcgcacaaaaatgcgctggtgcatattgtgaaaccgccagtctgtaccgagcgcgcgc

SEQ ID NO: 652703 - DNA, 75 bp, synthetic construct
  source 1..75: mol_type = other DNA
ggatgccggcatttaacaacgatgaaatcgtgatcccggaatttattaaactcggtattgaaccgaaggacgctt

SEQ ID NO: 652704 - DNA, 75 bp, synthetic construct
  source 1..75: mol_type = other DNA
caccatccagaaagcgcggggcataccgtcgcagtgggtggaaatgctgaccaaacgtttcaatatctggtgtca

SEQ ID NO: 652705 - DNA, 75 bp, synthetic construct
  source 1..75: mol_type = other DNA
acgcgagatcaggcttcttactcggcactatctgcccgaagcgcagctacttaacgttgctaacaaaaaccgcgc

SEQ ID NO: 652706 - DNA, 75 bp, synthetic construct
  source 1..75: mol_type = other DNA
ttgtcagattctggccggggaagagagcaacgattcgctgtttgtcctgatctacgagctggacgacgaaagcga

SEQ ID NO: 652707 - DNA, 75 bp, synthetic construct
  source 1..75: mol_type = other DNA
tggtgacgaacatcagcctgtcaccaccgctgacattctgacccctcgacgctgggaggattacggtgaggacct

SEQ ID NO: 652708 - DNA, 75 bp, synthetic construct
  source 1..75: mol_type = other DNA
tggtgacgaacatcagcctgtcaccaccgctgacattctgaccccacgacgcagggaggattacggtgaggacct

SEQ ID NO: 652709 - DNA, 75 bp, synthetic construct
  source 1..75: mol_type = other DNA
aagacgtaaaaacgggcaaaattccggcctgtaaacggctgaaacaggccgttaaacggtacttttcggaccttg

SEQ ID NO: 652710 - DNA, 75 bp, synthetic construct
  source 1..75: mol_type = other DNA
agagagccatcgccgagctgcatgctctgggcatcaacaccgtgatgttgaccggcgataacccccacacggcac

SEQ ID NO: 652711 - DNA, 75 bp, synthetic construct
  source 1..75: mol_type = other DNA
aggtggggattggcccctcatcttcccatactgtagggcctatgaaggcaggtaaacagttcgtcgatgatctgg

SEQ ID NO: 652712 - DNA, 75 bp, synthetic construct
  source 1..75: mol_type = other DNA
ccgctggcggcgaaagcgtccaccattgaagggactaaccccagcctagcgattgtcgatgagtaccaccttcac

SEQ ID NO: 652713 - DNA, 75 bp, synthetic construct
  source 1..75: mol_type = other DNA
acgcgataaaaacgggcgaaattccggcctgtaagcgcgtaaaacaggccgtggaaaggtacttttcagacctga

SEQ ID NO: 652714 - DNA, 75 bp, synthetic construct
  source 1..75: mol_type = other DNA
tcccgcgcattaagaagattatccgtaacacgaacttcgaagatgcgaaggtgttagcagagcaggctcttgctc

SEQ ID NO: 652715 - DNA, 75 bp, synthetic construct
  source 1..75: mol_type = other DNA
tggtgacgaacatcagcctgtcaccaccgctgacattctgaccccccgacgccgggaggattacggtgaggacct

SEQ ID NO: 652716 - DNA, 75 bp, synthetic construct
  source 1..75: mol_type = other DNA
catcgtggacgaataccacctacaccccgataacggcgtttattccgcgcttgagctggggatgggcgcacgtcc

SEQ ID NO: 652717 - DNA, 75 bp, synthetic construct
  source 1..75: mol_type = other DNA
atattcaggcccacaaggtgatgcacccgaaaagcaacagcctgttaaagccgctggcagcaaaagcggcaacca

SEQ ID NO: 652718 - DNA, 75 bp, synthetic construct
  source 1..75: mol_type = other DNA
actgcattgattatgaccgtatccgtgatgacatcatggcggatgcagagaatttcaatatcaggctggtgggct

SEQ ID NO: 652719 - DNA, 75 bp, synthetic construct
  source 1..75: mol_type = other DNA
ggcacattccaggctgagcatgaggaatttgcatttgatatgagcgacagccagaaagagcgacttgcggcattt

SEQ ID NO: 652720 - DNA, 75 bp, synthetic construct
  source 1..75: mol_type = other DNA
taaaaatatcatgctggtttcccgtcattatctgccggagttccagttacagaacccagccaataaaaatcgcgc

SEQ ID NO: 652721 - DNA, 75 bp, synthetic construct
  source 1..75: mol_type = other DNA
tgattacgaccgtatcagggatgacatcatgaaggacgcggaaaattttaatatccggctggtgggcttcgatac

SEQ ID NO: 652722 - DNA, 75 bp, synthetic construct
  source 1..75: mol_type = other DNA
gggcctgaagattattgacctgagcgccattcaggatgaagttattctggttgccgctgacctgacaccatccga

SEQ ID NO: 652723 - DNA, 75 bp, synthetic construct
  source 1..75: mol_type = other DNA
atcggcgtaatggtggaaacaccggctgccgcaacaattgcacgtcatttagccaaagaagttgacttctttagt

SEQ ID NO: 652724 - DNA, 75 bp, synthetic construct
  source 1..75: mol_type = other DNA
tggtgacgaacatcagcctgtcaccaccgctgacattctgaccccgcgacgcggggaggattacggtgaggacct

SEQ ID NO: 652725 - DNA, 75 bp, synthetic construct
  source 1..75: mol_type = other DNA
ctgctgactcgctcattgatatgaaattcattacatctgattgtctgtttactgataaatggatttataaactga

SEQ ID NO: 652726 - DNA, 75 bp, synthetic construct
  source 1..75: mol_type = other DNA
cctctcaggtgaaaaatgacgactatctgattctggatgccgtaaataatcaggtttacgtcaatccaaccaacg

SEQ ID NO: 652727 - DNA, 75 bp, synthetic construct
  source 1..75: mol_type = other DNA
gctatcctgcgtgcctcggctttcggtaaattgcgcatcatgttcccgatgatcatctctgtcgaagaagttcgc

SEQ ID NO: 652728 - DNA, 75 bp, synthetic construct
  source 1..75: mol_type = other DNA
ggtaaacagttcgtcgatgatctggtcgaaaaaggcttactggatagcgttacccgcgttgccgtggacgtttat

SEQ ID NO: 652729 - DNA, 75 bp, synthetic construct
  source 1..75: mol_type = other DNA
gaacggggcgggctttccattcgcgcctggctgccagtgccggtaacgcgggcgcagggcacgacaaaagaaggg

SEQ ID NO: 652730 - DNA, 75 bp, synthetic construct
  source 1..75: mol_type = other DNA
gggatggaggcgtgctccggggcttattactgggcaagattgtttctgcaatatggtcatgagccgcgtctgatg

SEQ ID NO: 652731 - DNA, 75 bp, synthetic construct
  source 1..75: mol_type = other DNA
gccaagtgcgtgaaaagagcaaacacactgtagacaatagctctttgaaagaactggatgatgcgattctgaccc

SEQ ID NO: 652732 - DNA, 75 bp, synthetic construct
  source 1..75: mol_type = other DNA
gtgcacgaaaagccctcaacaccgcctggcaatattactgcgctggttatctatctgctttcctgctggcgggcg

SEQ ID NO: 652733 - DNA, 75 bp, synthetic construct
  source 1..75: mol_type = other DNA
atgtcaataattaattccacgccagtgcgcgttattgccattgtgggatgtgatggttcgggtaaatcgaccctc

SEQ ID NO: 652734 - DNA, 75 bp, synthetic construct
  source 1..75: mol_type = other DNA
ccacgggcggtaacggttggataaaaatgttaaggcagcgcgagctgaagctgtaccaatggatggcgtcttatt

SEQ ID NO: 652735 - DNA, 75 bp, synthetic construct
  source 1..75: mol_type = other DNA
catctgtttgtggagggaaaacgcactggtgataaggagtatgcagaggttcttgttgccattactgaatatgtc

SEQ ID NO: 652736 - DNA, 75 bp, synthetic construct
  source 1..75: mol_type = other DNA
ttcaacatttatacgaagctcttcactggataaggtggttaactgccgtactgacgaccgtatgattgatgagat

SEQ ID NO: 652737 - DNA, 75 bp, synthetic construct
  source 1..75: mol_type = other DNA
ctggtcagggctttgccccgacaccccggtaaggagcagaccatgagtgagaagaaaacccgaacgggcagtgag

SEQ ID NO: 652738 - DNA, 75 bp, synthetic construct
  source 1..75: mol_type = other DNA
ggcaattgaagcgctgaaaaatcagaaaattggttcgttgggtatggacgtgtatgagaacgaacgcgatctgtt

SEQ ID NO: 652739 - DNA, 75 bp, synthetic construct
  source 1..75: mol_type = other DNA
gaaagtagtccgtgttccagcctatgatccagaggccgttgctgaacacgccatcggtatgatgatgacgctgaa

SEQ ID NO: 652740 - DNA, 75 bp, synthetic construct
  source 1..75: mol_type = other DNA
aaagtgaggtacgacaaaagacagttgtcagaacactcagattctctcctgttgaggatgaaaccatcaggaaaa

SEQ ID NO: 652741 - DNA, 75 bp, synthetic construct
  source 1..75: mol_type = other DNA
aatgccaacagaacacatttatctcgggcaatcgtccgggcgaattggcgaatggatttcacagctccctgttat

SEQ ID NO: 652742 - DNA, 75 bp, synthetic construct
  source 1..75: mol_type = other DNA
accgcatctactggtcgtccggaagaagctgcctggctttataaaacggtcggtgtagaggagattattaatcgc

SEQ ID NO: 652743 - DNA, 75 bp, synthetic construct
  source 1..75: mol_type = other DNA
gcatttgctaataaaaaagcagaggttaccgagctggttaatgaaaacgccaaatttgcgacgctcaagaaggaa

SEQ ID NO: 652744 - DNA, 75 bp, synthetic construct
  source 1..75: mol_type = other DNA
gggatggaggcatgctccggggctcactactgggcaaggttgtttcggcaatatggtcatgaaccacggctgatg

SEQ ID NO: 652745 - DNA, 75 bp, synthetic construct
  source 1..75: mol_type = other DNA
aacctcggtctgacctgcgacccggttgcagggcaggttcaggtgccgtgcattgagcgtaatgctattgcctct

SEQ ID NO: 652746 - DNA, 75 bp, synthetic construct
  source 1..75: mol_type = other DNA
gctgcgggccttgccgagctgttgggcggtagccggaacaggtttgtgtggcagcggaaattggcatggaacaca

SEQ ID NO: 652747 - DNA, 75 bp, synthetic construct
  source 1..75: mol_type = other DNA
tatgcagaacgaactggcgctgcacagcaagaaagagatcgacgagtatttcgcgcatgtctggcaaaccatgca

SEQ ID NO: 652748 - DNA, 75 bp, synthetic construct
  source 1..75: mol_type = other DNA
acgccatcgcagtacagcagtggtgggaaatcaaagcttggcaggataactaaagctggcgattcgtatctgcga

SEQ ID NO: 652749 - DNA, 75 bp, synthetic construct
  source 1..75: mol_type = other DNA
atcttgctaaaaatgtgtttgctgttcacggtgttgatcaaaatggtagaactgttctggttaagcctaaagtat

SEQ ID NO: 652750 - DNA, 75 bp, synthetic construct
  source 1..75: mol_type = other DNA
aacggacccgtttagccgttgggtctgctcgttgattggtaggcggggatactggcgtgctgtcgttgcaatcgc

SEQ ID NO: 652751 - DNA, 75 bp, synthetic construct
  source 1..75: mol_type = other DNA
atcttgctaaaaatgtgttcgctgttcattgcgttgaccagaatggcaaaaccgttctggttaaatccagagtaa

SEQ ID NO: 652752 - DNA, 75 bp, synthetic construct
  source 1..75: mol_type = other DNA
actggcgcgctgttgtggccatcgccgccaaaaatgcaagactgtgctgggcatcattgcattacggtgatgatt

SEQ ID NO: 652753 - DNA, 75 bp, synthetic construct
  source 1..75: mol_type = other DNA
acacttctggttcagggtgcccgctcggtactgatcggggcggaaaaaaggactgattcattcagtcgttgggtc

SEQ ID NO: 652754 - DNA, 75 bp, synthetic construct
  source 1..75: mol_type = other DNA
tcagacccgcgtacgtgacccgggccgccgggaatacaccaaacacatgctgcgtctgcggcgggccggagagat

SEQ ID NO: 652755 - DNA, 75 bp, synthetic construct
  source 1..75: mol_type = other DNA
acaggcaatggcatttggccatccgtctgtgaccggaacggttacgcgtacggctgtccggaatttcagccgaat

SEQ ID NO: 652756 - DNA, 75 bp, synthetic construct
  source 1..75: mol_type = other DNA
ggtcacctacagccaggcatatttctcttcaggtatgggttgatgggaagatcgtcaaagatacctttaaggggt

SEQ ID NO: 652757 - DNA, 75 bp, synthetic construct
  source 1..75: mol_type = other DNA
aaatgtggtggagaaagttatagaaggggcttacgaggtggtgggtgtgtttgaccggatggaggaaaagcgtga

SEQ ID NO: 652758 - DNA, 75 bp, synthetic construct
  source 1..75: mol_type = other DNA
tccccaccatcaccgtactggaaagtctgcagcgggaaggcttccagccattcttcgcctgccagacccgtgtgc

SEQ ID NO: 652759 - DNA, 75 bp, synthetic construct
  source 1..75: mol_type = other DNA
cggtgaagaccggcatacctcccgcagtgaacgctatacgcatatccccaccatcaccgtgctggaaagtctgca

SEQ ID NO: 652760 - DNA, 75 bp, synthetic construct
  source 1..75: mol_type = other DNA
aaaaaaacggttttagctgtcagatagaaaccagcggcactcacgaagtacgttgcacaccgaatacctgggtta

SEQ ID NO: 652761 - DNA, 75 bp, synthetic construct
  source 1..75: mol_type = other DNA
gttatgaatcaggtgactctccagaatggaaagacacctccagcggaccaaatgatagtggccctaagggtaaat

SEQ ID NO: 652762 - DNA, 75 bp, synthetic construct
  source 1..75: mol_type = other DNA
tgaaggacgtgcagatgtgcatatcaaaatggttccccttgaaaaggtgaggatacacacttactacggactaca

SEQ ID NO: 652763 - DNA, 75 bp, synthetic construct
  source 1..75: mol_type = other DNA
ggccactccttagtcagccattactatggccggaatactataaaaattcagcagatgtgcgcttttataacaata

SEQ ID NO: 652764 - DNA, 75 bp, synthetic construct
  source 1..75: mol_type = other DNA
ccgtgtcgccaaagctaaatatgcgtggtggttatgaagtattgtcgcaagccctggagcgagctaacgaaatca

SEQ ID NO: 652765 - DNA, 75 bp, synthetic construct
  source 1..75: mol_type = other DNA
aaatgtggtggagaaagttatcgaaggggcttacgaggtggtgggtgtgtttgaccggattgaggataagcgtga

SEQ ID NO: 652766 - DNA, 75 bp, synthetic construct
  source 1..75: mol_type = other DNA
ccacccccggcacagcaggcactggcaaaagccgccctcacataccgctttggtgaagaccaccagccggtgact

SEQ ID NO: 652767 - DNA, 75 bp, synthetic construct
  source 1..75: mol_type = other DNA
gaatcgcagatactctccccacgccgctggcaggatgagaacaatgacctgtggaccacctatcagcgtgtgcag

SEQ ID NO: 652768 - DNA, 75 bp, synthetic construct
  source 1..75: mol_type = other DNA
atcaccctgctggataagcttcgagaagaagggtttgaacctttttttgcgtgccagacacgagtgcgtaatttt

SEQ ID NO: 652769 - DNA, 75 bp, synthetic construct
  source 1..75: mol_type = other DNA
caacgtggtggagaaagtcattgaaggggcttacgaagtgctcgggatttttgaccgggtagaagagaagcgcga

SEQ ID NO: 652770 - DNA, 75 bp, synthetic construct
  source 1..75: mol_type = other DNA
attctgctcaacagccatgacggctccagctcataccagatgttgccggggctatttcgtgcagtctgccagaat

SEQ ID NO: 652771 - DNA, 75 bp, synthetic construct
  source 1..75: mol_type = other DNA
gatcggccagaacgatacggcgattgccgggcctgaagctggaaaactgggtaaattaacatcgcccacactctg

SEQ ID NO: 652772 - DNA, 75 bp, synthetic construct
  source 1..75: mol_type = other DNA
tgctgcgtctgcgccgtgacggggagataaacggacaacatgtccctgaaatcatcctgctgaactcccatgacg

SEQ ID NO: 652773 - DNA, 75 bp, synthetic construct
  source 1..75: mol_type = other DNA
gttttgttcctggttttactgataactttgtttccaatgaaatgattatctctggtcttaatgttaaagatatct

SEQ ID NO: 652774 - DNA, 75 bp, synthetic construct
  source 1..75: mol_type = other DNA
aaatgtggtggagaaagttatggaaggggcttacgaggtggtgggtgtgtttgaccggatcgaggagaagcgtga

SEQ ID NO: 652775 - DNA, 75 bp, synthetic construct
  source 1..75: mol_type = other DNA
ggtgcttacgaagtggtgggcgtgtttgacctgattgaggaaaagcgtgatgccatgcagtcgctggtgctgccg

SEQ ID NO: 652776 - DNA, 75 bp, synthetic construct
  source 1..75: mol_type = other DNA
ggtgcttacgaagtggtgggcgtgtttgacctgattgaggaaaagcgtgatgccatgcagtcgctgctcctgccg

SEQ ID NO: 652777 - DNA, 75 bp, synthetic construct
  source 1..75: mol_type = other DNA
ggtgcttacgaagtggtgggcgtgtttgacctgattgaggaaaagcgtgatgccatgcagtcgctgatactgccg

SEQ ID NO: 652778 - DNA, 75 bp, synthetic construct
  source 1..75: mol_type = other DNA
tttttagtgaagatggcctctatgctgtgcgcgttgagaatgggggtattacctacacagcgttaattcctgatg

SEQ ID NO: 652779 - DNA, 75 bp, synthetic construct
  source 1..75: mol_type = other DNA
gtatgcagacagacaaatggaacgaaaagctgaagttcagaaacaactggttgcggcgggtaatgttcgccagcg

SEQ ID NO: 652780 - DNA, 75 bp, synthetic construct
  source 1..75: mol_type = other DNA
acgataatcctgctgctgtttatagccgactttcatcacttatcaaagaatcgaaggtaggtacaacacttgatt

SEQ ID NO: 652781 - DNA, 75 bp, synthetic construct
  source 1..75: mol_type = other DNA
atgaaaaattgtctactgttgggcgcgcttttaatgggctttactggtgtggcgatggcgcaaagtgtcaccgtc

SEQ ID NO: 652782 - DNA, 75 bp, synthetic construct
  source 1..75: mol_type = other DNA
ggactggtctgcggtcagtctctgggagaattgcgtgttccacaccggggaaatgtggtggagaaagttattgaa

SEQ ID NO: 652783 - DNA, 75 bp, synthetic construct
  source 1..75: mol_type = other DNA
tcaggtcgcagcgctaaaggaaaacgtatccatacccgtgccattcacagcattgacactgacattaagctcaac

SEQ ID NO: 652784 - DNA, 75 bp, synthetic construct
  source 1..75: mol_type = other DNA
ttgaacggattgaggaaaagagtgatgccatgcagtctctggttctgccgccaccggcacgtcaggcgctggcac

SEQ ID NO: 652785 - DNA, 75 bp, synthetic construct
  source 1..75: mol_type = other DNA
ggggcgtgggctgagtgtgccggaacgttcacggaggaggatttacacggccaggaatgttacgcggggcttgat

SEQ ID NO: 652786 - DNA, 75 bp, synthetic construct
  source 1..75: mol_type = other DNA
ccgtcgcagtgggtggagatgatgacaaagcgatttaatatctggtgtcaggggactaccccgtggatgggtaac

SEQ ID NO: 652787 - DNA, 75 bp, synthetic construct
  source 1..75: mol_type = other DNA
acatcgggaagtaacgtcgtttcagcctgtaagcagcactatgattattgctgccagatcctggacggcgaagag

SEQ ID NO: 652788 - DNA, 75 bp, synthetic construct
  source 1..75: mol_type = other DNA
ccacacccgtgccattcacagcatcgacaccgacattaagctcaatcgcgcattgtgggttgcgtattaccgtga

SEQ ID NO: 652789 - DNA, 75 bp, synthetic construct
  source 1..75: mol_type = other DNA
gacaccacgacgccgggaggattacggtaaagacctgtggagcgcatatcagaccatccaggagaatatgctgaa

SEQ ID NO: 652790 - DNA, 75 bp, synthetic construct
  source 1..75: mol_type = other DNA
tgaaatgagcccggaagccgccggcattgccgcctgtctgatggcgtacagccatcacgcctgtcgtacagagaa

SEQ ID NO: 652791 - DNA, 75 bp, synthetic construct
  source 1..75: mol_type = other DNA
atattttcgtgccatctgcaccaatggcctggtctgcggtcagtcgctgggagaagtccgggtgccacaccgggg

SEQ ID NO: 652792 - DNA, 75 bp, synthetic construct
  source 1..75: mol_type = other DNA
ggcacgggattagggctggcgattgtgcagcgtatcgtggataaccataacggcatgctggagcttggcaccagc

SEQ ID NO: 652793 - DNA, 75 bp, synthetic construct
  source 1..75: mol_type = other DNA
aagcaactggcggatgaccgcacgctgctgatggcgggggtaagccatgatctgcgcacgccgctgacgcgtatt

SEQ ID NO: 652794 - DNA, 75 bp, synthetic construct
  source 1..75: mol_type = other DNA
gagcgaggcgggctttccattcgcgcctggttgcctgtaccggtcacgcgagcgcagggcacgacaaaagaaggg

SEQ ID NO: 652795 - DNA, 75 bp, synthetic construct
  source 1..75: mol_type = other DNA
cagcattgacactgacattaagctcaaccgcgcattgtgggtgatggcggaaaccctgctggagagcctgcgctg

SEQ ID NO: 652796 - DNA, 75 bp, synthetic construct
  source 1..75: mol_type = other DNA
tggctgtttattcgtattcagaaccgcccgctggtcgatctcgaacatgctgctttgcaggtcggtaaagggatt

SEQ ID NO: 652797 - DNA, 75 bp, synthetic construct
  source 1..75: mol_type = other DNA
gcacgctgctgatggcgggggtaagtcacgacttgcgcacgccgctgacgcgtattcgcctggcgaccgagatga

SEQ ID NO: 652798 - DNA, 75 bp, synthetic construct
  source 1..75: mol_type = other DNA
ccgggaggattacggtaaggacctgtggagtgcttatcagaccattcaggagaatatgctgaaaggcggaatttc

SEQ ID NO: 652799 - DNA, 75 bp, synthetic construct
  source 1..75: mol_type = other DNA
tacccgggccattcacagcattgataccgacattaagctcaatcgcgcattgtgggtgatggcagaaacgctgct

SEQ ID NO: 652800 - DNA, 75 bp, synthetic construct
  source 1..75: mol_type = other DNA
aagacaaacacacgtcccgaagcaaaaaatatacgtacatccccaccatcaccgtactggaaagcctgcagcagg

SEQ ID NO: 652801 - DNA, 75 bp, synthetic construct
  source 1..75: mol_type = other DNA
aaccggtcagcatgtacctgaaattattctgctcaactcccatgacggttcatccagctaccagatgttacccgg

SEQ ID NO: 652802 - DNA, 75 bp, synthetic construct
  source 1..75: mol_type = other DNA
gtcaccaccgccgacattctgacaccacgacgccgggaggattacggtaaggacctgtggagcgcatatcagacc

SEQ ID NO: 652803 - DNA, 75 bp, synthetic construct
  source 1..75: mol_type = other DNA
gcgcagcaaatattattcgtcgtgaccgcccgttaacccgtgaagagttgtttcgcgtggtgcccagcgtgttta

SEQ ID NO: 652804 - DNA, 75 bp, synthetic construct
  source 1..75: mol_type = other DNA
cggcgaaacctcgcgggcggagaacttctccctcaacggctacccgcgtgaaactaacccgcggctggcaaaaga

SEQ ID NO: 652805 - DNA, 75 bp, synthetic construct
  source 1..75: mol_type = other DNA
ataacgcgcctatgctatcgtgcaaagagctaatgagtattaacgatgtatccggttacgctccagctatcagaa

SEQ ID NO: 652806 - DNA, 75 bp, synthetic construct
  source 1..75: mol_type = other DNA
ctctgtaattacccaattcaaagcttctaaagaacacacaatttcaaatggtcttcgtattcagatgaccttcca

SEQ ID NO: 652807 - DNA, 75 bp, synthetic construct
  source 1..75: mol_type = other DNA
taaagagcataccattgctaacggtcttcgtattcagatgaccttccaaggtgtagagtttcgttcaatcgtagg

SEQ ID NO: 652808 - DNA, 75 bp, synthetic construct
  source 1..75: mol_type = other DNA
acagcctcagctaatgagcaagcttcaaaggtgcttaagtcgggtaatgctttacggaagtttagcgtgaatccg

SEQ ID NO: 652809 - DNA, 75 bp, synthetic construct
  source 1..75: mol_type = other DNA
ttccattatcacaagttttaaagcctctaaagatgttggaatttcaaacggattaagaatccaactaacttttca

SEQ ID NO: 652810 - DNA, 75 bp, synthetic construct
  source 1..75: mol_type = other DNA
aaaccaacgtcaccaatgctaacagtaacgctggtcgggtagcttcaaagcttaaaaagtactcagtgaacccta

SEQ ID NO: 652811 - DNA, 75 bp, synthetic construct
  source 1..75: mol_type = other DNA
aaaaggcgctaattcgcgggacattcatcgcagctattggttttgaagtgattaaaattgtgatgacctacaccc

SEQ ID NO: 652812 - DNA, 75 bp, synthetic construct
  source 1..75: mol_type = other DNA
gcgatttccatcttcgccaactatctgcttttcttctggatcttctggcggttgccgcgccaccgtccgcgcaaa

SEQ ID NO: 652813 - DNA, 75 bp, synthetic construct
  source 1..75: mol_type = other DNA
attcgtgcgacagagcgctttaatgatcggctgggcaaccagtttggcgcggctatcacctatttttcgtttttg

SEQ ID NO: 652814 - DNA, 75 bp, synthetic construct
  source 1..75: mol_type = other DNA
tcagatgccgctaatgagcaagcttcaaaggtgcttaaaggtagtgctttgaagaagtattctgtgaatcctaac

SEQ ID NO: 652815 - DNA, 75 bp, synthetic construct
  source 1..75: mol_type = other DNA
gggcgagggcttgcggcattaaatagcaaaagccgctcagatggatttttattctacgtgatgaagtatttcaaa

SEQ ID NO: 652816 - DNA, 75 bp, synthetic construct
  source 1..75: mol_type = other DNA
tcgcccgtctgacgctgttttgcgcggcgtggattgccaccgccgagtacaaagatgacccgcgaatgccgggta

SEQ ID NO: 652817 - DNA, 75 bp, synthetic construct
  source 1..75: mol_type = other DNA
gctttttagctattcggcaagcgagctatcagatgaagcgttaaaagcccgtgtagcatgttctaagaacgttag

SEQ ID NO: 652818 - DNA, 75 bp, synthetic construct
  source 1..75: mol_type = other DNA
cttttgaaaagaataggtacaaaaattttgataagtttgtgcaattaaataacttaagcaaaaacgttgattatc

SEQ ID NO: 652819 - DNA, 75 bp, synthetic construct
  source 1..75: mol_type = other DNA
cagcgatttcctggatccacgtttcttctctgttcctgcaagcaatgcgtgtggctattccggccgtcatcgttg

SEQ ID NO: 652820 - DNA, 75 bp, synthetic construct
  source 1..75: mol_type = other DNA
agaagcgttgctggtggtgaaagcatggggattcaggcttatgaccatgaagggcttcacatggaacaaatgtgg

SEQ ID NO: 652821 - DNA, 75 bp, synthetic construct
  source 1..75: mol_type = other DNA
tctcgataaaatcgtagttaatacccccgacacgtccgtaaatttactggttaatggctggctgttgtatcagac

SEQ ID NO: 652822 - DNA, 75 bp, synthetic construct
  source 1..75: mol_type = other DNA
cgatgacatggttgttgctccttacgccacgctgctggcgctgatggtttccccacagagagcctgtgagaacct

SEQ ID NO: 652823 - DNA, 75 bp, synthetic construct
  source 1..75: mol_type = other DNA
tgaaaaaaggagtgttggatcaatgtgataagattagttccgaaagggtccttgttataaaacctgatatcaaaa

SEQ ID NO: 652824 - DNA, 75 bp, synthetic construct
  source 1..75: mol_type = other DNA
agaatatcggcaatgtaaccacctcacgcaatgaaacacctatgctgacctgcaaagagctatttagctattcgg

SEQ ID NO: 652825 - DNA, 75 bp, synthetic construct
  source 1..75: mol_type = other DNA
ataataagctggtagaaaacttcatcgacactctggaaaactggcgtgaccagaagcagattatttcggtcatct

SEQ ID NO: 652826 - DNA, 75 bp, synthetic construct
  source 1..75: mol_type = other DNA
tccgtagcaattgctctaaaaatgtcacggtgaaagatggtgtaagcaccttcacagcctcagctaatgagcagg

SEQ ID NO: 652827 - DNA, 75 bp, synthetic construct
  source 1..75: mol_type = other DNA
gcaggtaacgtgaccactgaacgcaataacgcgcctatgctatcgtgcaaagaattaatgaatattagcgatgta

SEQ ID NO: 652828 - DNA, 75 bp, synthetic construct
  source 1..75: mol_type = other DNA
ttcttgtcactatcagctactgagaatatggaatttgatagccctatgatggtgaccactcaaaatatgcaatca

SEQ ID NO: 652829 - DNA, 75 bp, synthetic construct
  source 1..75: mol_type = other DNA
agttaagaacggaaaaagcaccttctcagatgccgctaatgagcaagcttcaaaggtgcttagtaatgctggtac

SEQ ID NO: 652830 - DNA, 75 bp, synthetic construct
  source 1..75: mol_type = other DNA
actacaacctgtcgataaggtgatgttgaataatctgaaaatcaatgccacaaaatcaacgcaggcagcaactaa

SEQ ID NO: 652831 - DNA, 75 bp, synthetic construct
  source 1..75: mol_type = other DNA
gggggattgttgaagcgtcgttgccaactttcttaatgaaagatggcaaattgtgtgacgggagtaattttgacg

SEQ ID NO: 652832 - DNA, 75 bp, synthetic construct
  source 1..75: mol_type = other DNA
cgataagcaactgcatgatatgcaaatacggatcgacaccagcagtcagcagccaatcgatgccacctgtcgttt

SEQ ID NO: 652833 - DNA, 75 bp, synthetic construct
  source 1..75: mol_type = other DNA
gtatatgatcacattcagcacgtcggggtgtgacgacagcaaagtcacagtaacgccggtagcacatccaattac

SEQ ID NO: 652834 - DNA, 75 bp, synthetic construct
  source 1..75: mol_type = other DNA
tccacctacctgatgaaagacggcaaactgtgtgacggcagcaaatttggtgatactgacgatcgtggtgcttat

SEQ ID NO: 652835 - DNA, 75 bp, synthetic construct
  source 1..75: mol_type = other DNA
ccgggaacctattccggacgcacagtcagtaactcttcttgtccacctataccgttagggccttatgatgtctcc

SEQ ID NO: 652836 - DNA, 75 bp, synthetic construct
  source 1..75: mol_type = other DNA
cccgatagcgtcaatcacggtgtttatgagacaccaaataacaccggtttaatcactggatggatacctttgaaa

SEQ ID NO: 652837 - DNA, 75 bp, synthetic construct
  source 1..75: mol_type = other DNA
agcggtcgatgcgttagcagggcagagcgcgaaattgctcaacggtattccgattgatgaagaagatttctttgg

SEQ ID NO: 652838 - DNA, 75 bp, synthetic construct
  source 1..75: mol_type = other DNA
gcgtgcgtgaagaacgtcgtatcgttgacgaagtacgcaaaatcctgcaggacgaagggctgatgatttcggcaa

SEQ ID NO: 652839 - DNA, 75 bp, synthetic construct
  source 1..75: mol_type = other DNA
tttatctccggcagtggtgtccgttctgtctggttacgccataaccttgagaatttcaaaaaacgtctgaaagca

SEQ ID NO: 652840 - DNA, 75 bp, synthetic construct
  source 1..75: mol_type = other DNA
atgctaacgctgcaatcgacggggggagtcataacacaaacgctctcgacttacctgatgcgcgacgggcgggtg

SEQ ID NO: 652841 - DNA, 75 bp, synthetic construct
  source 1..75: mol_type = other DNA
tgcgtaatttaatggaagagtctggcgaaacagtaaacatggcggttcttgatcagagcgattacgaagccatta

SEQ ID NO: 652842 - DNA, 75 bp, synthetic construct
  source 1..75: mol_type = other DNA
cgcaccagcgactggacaggttcagtctttaacgcgtggcctgaaattactggagtggattgccgaatccaatgg

SEQ ID NO: 652843 - DNA, 75 bp, synthetic construct
  source 1..75: mol_type = other DNA
cgtggctggtttcgacacatgctgatagccgtctacctttagaccctggtccaggaacctattccggacctacag

SEQ ID NO: 652844 - DNA, 75 bp, synthetic construct
  source 1..75: mol_type = other DNA
cgatggttgaagtggtgtatggtcgctcgctgtatgccggcgcggcgcacggcccgtcaccgactgccggtgaag

SEQ ID NO: 652845 - DNA, 75 bp, synthetic construct
  source 1..75: mol_type = other DNA
atctgccgacgtacagctggtgacctatgtcccgccaccgtctgaaaccaactactcggcagcatttttaaccgg

SEQ ID NO: 652846 - DNA, 75 bp, synthetic construct
  source 1..75: mol_type = other DNA
cctataacggacaaacagttacacgatatggtcgtgcgtgttgataccagcagtatgcagccaatcgattctact

SEQ ID NO: 652847 - DNA, 75 bp, synthetic construct
  source 1..75: mol_type = other DNA
ttcgtagccttgggctgatttctgccgactccgatgacgtaacctacattgcggctgacgaagcgaccaagcagg

SEQ ID NO: 652848 - DNA, 75 bp, synthetic construct
  source 1..75: mol_type = other DNA
cgatggtggaagtggtgtatggtcgctcgctgtatgcgggcgctgcacacggaccgtcaccgactgccggtgaag

SEQ ID NO: 652849 - DNA, 75 bp, synthetic construct
  source 1..75: mol_type = other DNA
cttatctctcttccactgcgggcattacgctcggtgatccgatggcgtatctggtggcaccgccgctggaagcga

SEQ ID NO: 652850 - DNA, 75 bp, synthetic construct
  source 1..75: mol_type = other DNA
cggcaagttgtgtgatggtggtcaggctagtgatgaaggcgcatattgccgctttgtcacccagatgctgacctt

SEQ ID NO: 652851 - DNA, 75 bp, synthetic construct
  source 1..75: mol_type = other DNA
acggcagaggatgggattgttatgctgctgacttaaaagtcactgtcacgggggaggtccaggggtgtccgtggc

SEQ ID NO: 652852 - DNA, 75 bp, synthetic construct
  source 1..75: mol_type = other DNA
actcgagctgcccggtctcagtagccacctatgatatttcgtggagtgaggattacatttcgtatacgaaggtgc

SEQ ID NO: 652853 - DNA, 75 bp, synthetic construct
  source 1..75: mol_type = other DNA
gacagtacgcagatgaatgaaacaggtggttactgccgctgggttgcacagatgataacttttaccgcgtcggga

SEQ ID NO: 652854 - DNA, 75 bp, synthetic construct
  source 1..75: mol_type = other DNA
taacagaggtgggtgcaatactataggtcagtatcctgataaagataagtcggcatcaagcctaattacaccacc

SEQ ID NO: 652855 - DNA, 75 bp, synthetic construct
  source 1..75: mol_type = other DNA
cccggataatccttcagagtgggaaatgttaagatatgagatctattcacgctatgcagatacaacaggtgctga

SEQ ID NO: 652856 - DNA, 75 bp, synthetic construct
  source 1..75: mol_type = other DNA
ccagtgcaagtgtcagtgaactgaaaaaaaatcctatggctacagtcagttccggagatggttaccctgtcgcca

SEQ ID NO: 652857 - DNA, 75 bp, synthetic construct
  source 1..75: mol_type = other DNA
atgatcccgtgtgtccgcgctgtggcaccacaggatatgttcgacgcaaaaacagtctgcaatggacgctggcac

SEQ ID NO: 652858 - DNA, 75 bp, synthetic construct
  source 1..75: mol_type = other DNA
atgcggcattgccgaaatgatcatcgccagacccagcgcgaaggattaagcgaggaagcggcgcggcagaaagtc

SEQ ID NO: 652859 - DNA, 75 bp, synthetic construct
  source 1..75: mol_type = other DNA
gggaactcgctgaagatgctgagttaaacgctgttgctgatgagcgcatgaaaaacccggaaattgtgaaggtta

SEQ ID NO: 652860 - DNA, 75 bp, synthetic construct
  source 1..75: mol_type = other DNA
tggccctgctctacatccagttaaatccacagtggcgtaaagctgaaccctcccctcaggctatctcctccaccg

SEQ ID NO: 652861 - DNA, 75 bp, synthetic construct
  source 1..75: mol_type = other DNA
tggccctggtctacatccagctaaatccgcagtggcgtaaagccgaaccgcaaacacaagccgcttcccccaccg

SEQ ID NO: 652862 - DNA, 75 bp, synthetic construct
  source 1..75: mol_type = other DNA
tatgatgcgctggttgttctgctgccccgcgttaccgccccggcgctgaccgctgacgaaatcgcccgcatggat

SEQ ID NO: 652863 - DNA, 75 bp, synthetic construct
  source 1..75: mol_type = other DNA
gagcgctgtctggtactggtcgccgggcgcgcctccatcagcacgccctccgcgcagtttaacgatattggcgag

SEQ ID NO: 652864 - DNA, 75 bp, synthetic construct
  source 1..75: mol_type = other DNA
gcgatcacttccgtgcttaaacaggctggatcactgcgtggtttaaaagcctatgacgtgttgacgtccaactat

SEQ ID NO: 652865 - DNA, 75 bp, synthetic construct
  source 1..75: mol_type = other DNA
tatcatttgggctaaacccagtggtatgtggcgcggttgtcataaagaaagtttaagggcttattttcctgctac

SEQ ID NO: 652866 - DNA, 75 bp, synthetic construct
  source 1..75: mol_type = other DNA
caggcaataggtattgagattgagggcgaacgttatcttcagacagttgatgaagtgaaaaagttatttgagtaa

SEQ ID NO: 652867 - DNA, 75 bp, synthetic construct
  source 1..75: mol_type = other DNA
aagagataagcgaaaaagaatcaaaactcactcaggcaatatcagaaaaagaacagattttaaaacaattgcata

SEQ ID NO: 652868 - DNA, 75 bp, synthetic construct
  source 1..75: mol_type = other DNA
accaggagctggtaaaactggttactgaacgcagcagtcagcctctgcatgatgtggacctggacagttatttat

SEQ ID NO: 652869 - DNA, 75 bp, synthetic construct
  source 1..75: mol_type = other DNA
ccattatttgttgatcttatcaaatctggcaagccactaacaattactgaccctaacatgacccgttttatgatg

SEQ ID NO: 652870 - DNA, 75 bp, synthetic construct
  source 1..75: mol_type = other DNA
atccttggtacggaaaatgttcttgaagcagctatagcgaatgaagtgaagagggttgtatgcctaagtactgat

SEQ ID NO: 652871 - DNA, 75 bp, synthetic construct
  source 1..75: mol_type = other DNA
tatttgaggtactctgcagtcgggaagaaatgttggttgcagaagatcaaggtaattactatcgtatacctagtg

SEQ ID NO: 652872 - DNA, 75 bp, synthetic construct
  source 1..75: mol_type = other DNA
tcctctggaagcagtgaaaactaacgtattaggtacagagaatgtgcttgaagcagcaattgcaaaccaggttaa

SEQ ID NO: 652873 - DNA, 75 bp, synthetic construct
  source 1..75: mol_type = other DNA
ttacaggcggtactggttcgtttggaaatgctgttttacgtcgatttttagacactgacattgctgagatccgta

SEQ ID NO: 652874 - DNA, 75 bp, synthetic construct
  source 1..75: mol_type = other DNA
ttttttctcgagatgagaaaaagcaggacgatatgaggaaaaagtataataatcagaaaattaagttctatatag

SEQ ID NO: 652875 - DNA, 75 bp, synthetic construct
  source 1..75: mol_type = other DNA
agatgccatcgacgattctcgctggggtcatcctgttatggagcgaaggctcttatcccgtcgctgcggtgatct

SEQ ID NO: 652876 - DNA, 75 bp, synthetic construct
  source 1..75: mol_type = other DNA
ctttctgcgttggtcggcgggatggtggcttgtggtggtgtgttgttgcgtcatgcgatggcatccagaaaacag

SEQ ID NO: 652877 - DNA, 75 bp, synthetic construct
  source 1..75: mol_type = other DNA
caaatcagagccatacccgacaaatacactgaaatccctagctttcgtacttcgccagtggcgggatgctagaaa

SEQ ID NO: 652878 - DNA, 75 bp, synthetic construct
  source 1..75: mol_type = other DNA
tccatgggaagcagttaaaacgaatataattggtacagaaaatttattaaatgctgcaaaacaaaataaagttaa

SEQ ID NO: 652879 - DNA, 75 bp, synthetic construct
  source 1..75: mol_type = other DNA
taatcttcctggcaagagagataagagacgagcaaaaatattagcatcaaaaaattatattctctggaggatggt

SEQ ID NO: 652880 - DNA, 75 bp, synthetic construct
  source 1..75: mol_type = other DNA
cttatcataaaactcgttatttatggaatgttctacttaatggtgattttgaactattaaatcaattagttgaaa

SEQ ID NO: 652881 - DNA, 75 bp, synthetic construct
  source 1..75: mol_type = other DNA
aaaatggcatgggggttggctaatggaatggtaacagccatccgtcgtggtgtcttaactcctgttgaatgtacc

SEQ ID NO: 652882 - DNA, 75 bp, synthetic construct
  source 1..75: mol_type = other DNA
atgtctcaccgcgacacgctattttctgcccctatcgccagactgggcgactggacctttgatgaacgggtagct

SEQ ID NO: 652883 - DNA, 75 bp, synthetic construct
  source 1..75: mol_type = other DNA
tgatttcgctgtttattgtgctggcctggggaaccggctggctgatgctgtggacgctcagcttttatctgacca

SEQ ID NO: 652884 - DNA, 75 bp, synthetic construct
  source 1..75: mol_type = other DNA
acgtctgtaaacacgccggagccagcgaagtgacgattattctgcgccagcagggagagatattgcacctggagg

SEQ ID NO: 652885 - DNA, 75 bp, synthetic construct
  source 1..75: mol_type = other DNA
ttgccaaactccagtgccgcaataatgtcggatgcgatgcttgcgcatcttatccgaccgacagtgactcaaacg

SEQ ID NO: 652886 - DNA, 75 bp, synthetic construct
  source 1..75: mol_type = other DNA
tgttctatctgatcccaatctgagtattgttgagcagcagcgttatcgggatgctcttgagaaaaaagaaagaga

SEQ ID NO: 652887 - DNA, 75 bp, synthetic construct
  source 1..75: mol_type = other DNA
ctctccgaatatcaggagccgcataccgtctcccagcttaaggggtctcctccgggctacgttggctacggtcag

SEQ ID NO: 652888 - DNA, 75 bp, synthetic construct
  source 1..75: mol_type = other DNA
ggcactgagccatgctgatccgaaccggttgcgtgaacagataatactctgtgcctcccggcagtttatcgaggg

SEQ ID NO: 652889 - DNA, 75 bp, synthetic construct
  source 1..75: mol_type = other DNA
acggtgtgcgtacccgctgttccgatgactatctttggctgccgcttgctgtttgccactatgttgaaacgacgg

SEQ ID NO: 652890 - DNA, 75 bp, synthetic construct
  source 1..75: mol_type = other DNA
atgaaaatgaaccccagagcgtggtttaaccgctcccgtatcccaatgaatgcttccgaatacgtaacgttttcg

SEQ ID NO: 652891 - DNA, 75 bp, synthetic construct
  source 1..75: mol_type = other DNA
atggtgaccgattttttaggttctaagatgccgtcgaccattctcgccggggtcatcttattatggagcgaaggc

SEQ ID NO: 652892 - DNA, 75 bp, synthetic construct
  source 1..75: mol_type = other DNA
ctaccggggccatctctacaactggtatgacacccgtacgctggtccccctgagtccacgctatatctccagcgt

SEQ ID NO: 652893 - DNA, 75 bp, synthetic construct
  source 1..75: mol_type = other DNA
ggggcgcccgcttccgcctggtgaagagtctgtctatgacacgccggtcatcagcggcatcggagagactctctg

SEQ ID NO: 652894 - DNA, 75 bp, synthetic construct
  source 1..75: mol_type = other DNA
gcaataagtttaatatgctggccagttgcgggcagggcgctggcggcttactgttggcaggccataccgataccg

SEQ ID NO: 652895 - DNA, 75 bp, synthetic construct
  source 1..75: mol_type = other DNA
gcgtggccgcccgctggttgtcctgattgacggtgtgcgcctcaactcttcacgttccgacagccgacaactgga

SEQ ID NO: 652896 - DNA, 75 bp, synthetic construct
  source 1..75: mol_type = other DNA
gtcaaccagtgaaggccgttgcggtgaaagaaaccgcccgcaccaccaaaaattttggttatgaagagatgttaa

SEQ ID NO: 652897 - DNA, 75 bp, synthetic construct
  source 1..75: mol_type = other DNA
gctggcgaatatcttgctgacccagcgaagcagtaaagcgaaacgcgaaaccttaacgcccctggcgcgggtgcg

SEQ ID NO: 652898 - DNA, 75 bp, synthetic construct
  source 1..75: mol_type = other DNA
tacaggaatgggtaaaaaatgagaaagttgattatgtaagaccctctcgctctatatcggataaggagattaagc

SEQ ID NO: 652899 - DNA, 75 bp, synthetic construct
  source 1..75: mol_type = other DNA
ctccggacgtctttccgtggcatatcagaaatttggcggctggtttgacggtaacggcgatgccaccttgcttga

SEQ ID NO: 652900 - DNA, 75 bp, synthetic construct
  source 1..75: mol_type = other DNA
ccggcggaaatgaccatatctccggacgtctttccgtggcatatcagaaatttggcggctggtttgacggtaacg

SEQ ID NO: 652901 - DNA, 75 bp, synthetic construct
  source 1..75: mol_type = other DNA
gtaacggcgatgccaccctgcttgataacacccagaccggcctgcagtactccgatcggctggacatcatgggaa

SEQ ID NO: 652902 - DNA, 75 bp, synthetic construct
  source 1..75: mol_type = other DNA
ctgtctccggcggaaatgagcatatctccggacgtctttccgtggcatatcagaaatttggcggctggtttgacg

SEQ ID NO: 652903 - DNA, 75 bp, synthetic construct
  source 1..75: mol_type = other DNA
tctggcaagtatttagccgctacgtacttaaccagccaagtacattaaccgatgagctggcacgctttttgatga

SEQ ID NO: 652904 - DNA, 75 bp, synthetic construct
  source 1..75: mol_type = other DNA
attgccaaataactcgttgcctttgactgatgttcagttctcgcaattacttattaaggctgttacatcacctca

SEQ ID NO: 652905 - DNA, 75 bp, synthetic construct
  source 1..75: mol_type = other DNA
taatccaaaatgaaaattcatttctttctttgctgagcaaccaaataatcagcattaaacctagtggatataaca

SEQ ID NO: 652906 - DNA, 75 bp, synthetic construct
  source 1..75: mol_type = other DNA
ctgacatcactactttatgcacttatttgtgcccgtcctgtattattgagtgataattacgagcttgttttattt

SEQ ID NO: 652907 - DNA, 75 bp, synthetic construct
  source 1..75: mol_type = other DNA
agatgtacaaaccaactgtgcgcatcgtggaagttaatgtgccacgcgccgctggcattcgcatcaaagaaggtg

SEQ ID NO: 652908 - DNA, 75 bp, synthetic construct
  source 1..75: mol_type = other DNA
cagatgcgagccaaagatgcagaagccaagctggaagccgcagagaagcgcatagcagaactggaagcacgggaa

SEQ ID NO: 652909 - DNA, 75 bp, synthetic construct
  source 1..75: mol_type = other DNA
ggattagttgaggttcatgcctcaagcgatttaccacttcaaagggttgaatcatatgattctgacgtaacatca

SEQ ID NO: 652910 - DNA, 75 bp, synthetic construct
  source 1..75: mol_type = other DNA
ccattaattatcttagaatccccaacaacaaacgatttatctattgctctagaaaaactgggcatggttaagaaa

SEQ ID NO: 652911 - DNA, 75 bp, synthetic construct
  source 1..75: mol_type = other DNA
ggaagctccgactactcttcggaacacgctcagctatcgttttttgctggtaacgactatgtcaccagacgcacc

SEQ ID NO: 652912 - DNA, 75 bp, synthetic construct
  source 1..75: mol_type = other DNA
atgcctttcgatcagcgaattaatgcgcttaacgattttatgaagcacttttcgccagatatcgcgttggcatta

SEQ ID NO: 652913 - DNA, 75 bp, synthetic construct
  source 1..75: mol_type = other DNA
gctgcagacaggctaatgggccaagttagaacaaataatatatttattaacgaggaatgtttgaatgccggaaat

SEQ ID NO: 652914 - DNA, 75 bp, synthetic construct
  source 1..75: mol_type = other DNA
gataagctgaatatctggatccttgatgacggcggcagggaagagtttcgccagtttgcgcaaaacgtggggtga

SEQ ID NO: 652915 - DNA, 75 bp, synthetic construct
  source 1..75: mol_type = other DNA
tcgactgcgaccacgtaccaacgcgatcgttcttgcaaatgaccatgggctggttcctgaaagaaaaacagctgg

SEQ ID NO: 652916 - DNA, 75 bp, synthetic construct
  source 1..75: mol_type = other DNA
tgtgtgcttcagtgtgttgcctgttttttcctgccattatactggccgcaggaaataattatcagggaaccgaca

SEQ ID NO: 652917 - DNA, 75 bp, synthetic construct
  source 1..75: mol_type = other DNA
tcagggatgagcgaaataggaaaagaactggaatcatattgggaaaatgatcgttatgttcgctcaatcccagaa

SEQ ID NO: 652918 - DNA, 75 bp, synthetic construct
  source 1..75: mol_type = other DNA
atagtgccaaaaacaatcgtatgtatttaagtgatataatctctttattagaagctgagaatgaaggtcatacgg

SEQ ID NO: 652919 - DNA, 75 bp, synthetic construct
  source 1..75: mol_type = other DNA
tgttcctcgacatcagccataagcccgccgattttattcgccagcatttcccgatgatttatgaaaaattgctcg

SEQ ID NO: 652920 - DNA, 75 bp, synthetic construct
  source 1..75: mol_type = other DNA
atcgccactccccctcccgcattatggtttgtgcaacgacgcagatatttccgcatctccgccccacttcatccg

SEQ ID NO: 652921 - DNA, 75 bp, synthetic construct
  source 1..75: mol_type = other DNA
ccgaagacaacatcgccgtgctaaaggcacagcacattaccattaccgccgaaactcagggtgcgaaagtcgagt

SEQ ID NO: 652922 - DNA, 75 bp, synthetic construct
  source 1..75: mol_type = other DNA
tggctgaacacggcgcgaccgaacaccatcggcgcagctttgggcctgtcaaacgcgcactgggacttgcgtcct

SEQ ID NO: 652923 - DNA, 75 bp, synthetic construct
  source 1..75: mol_type = other DNA
taccttcagtaagggcgcatcgtttggcccatcgcccaggccaagtgtggttgggcgtttgcctgacaattgttg

SEQ ID NO: 652924 - DNA, 75 bp, synthetic construct
  source 1..75: mol_type = other DNA
ctcgttgcagtggcaggcgtggcacgacaccttaacccgtttatataatcgtggcgcactgttcgaaaaagcccg

SEQ ID NO: 652925 - DNA, 75 bp, synthetic construct
  source 1..75: mol_type = other DNA
agcgcagcacattactattaccgccgaaactcagggggcgaaagtcgagtttactgttgaacaattacagcaaag

SEQ ID NO: 652926 - DNA, 75 bp, synthetic construct
  source 1..75: mol_type = other DNA
ctggattatccggaactgctcacgcattccggtccatcgatcctttcccccggcaatcattacataaacagataa

SEQ ID NO: 652927 - DNA, 75 bp, synthetic construct
  source 1..75: mol_type = other DNA
aatttgtcgccagcaatgcacgatcctgtgtgcaatggctaatcgaccagggggtgttgtttgatacccacattc

SEQ ID NO: 652928 - DNA, 75 bp, synthetic construct
  source 1..75: mol_type = other DNA
agccgaatggcgaagaaagctaccatctgacccgtgaaggtggacatagtcaccgtcgtattcttcatgccgccg

SEQ ID NO: 652929 - DNA, 75 bp, synthetic construct
  source 1..75: mol_type = other DNA
gctgaatgattccaaaaagctgagcgaaaaacgccgtctggcgctctatgaagagatcaaagagaaagcgttgag

SEQ ID NO: 652930 - DNA, 75 bp, synthetic construct
  source 1..75: mol_type = other DNA
tcggcggcggaagatattaccaggcgtatgccttatgcccacggcgtcagtacgttaccgccgtgggatgaaagc

SEQ ID NO: 652931 - DNA, 75 bp, synthetic construct
  source 1..75: mol_type = other DNA
aaggtttatcagtacaccaccaatccggatatttcttctggcgatggcattgctatggcgtggcgcgcaggctgt

SEQ ID NO: 652932 - DNA, 75 bp, synthetic construct
  source 1..75: mol_type = other DNA
atacaattgcaacgagaattgttagagtcgaacttgatgcaacagcaagtacttctgttacggccattttccaac

SEQ ID NO: 652933 - DNA, 75 bp, synthetic construct
  source 1..75: mol_type = other DNA
ccgtacaccaataaaccgtttgtcggtttttataccaccaaacgcaccggcggcatgctggtcgattcgcaggcc

SEQ ID NO: 652934 - DNA, 75 bp, synthetic construct
  source 1..75: mol_type = other DNA
gcctttaccagcgggaacgggacgaagaagccgaaaggttttctggcatacgcctccacgcttgatccggacaag

SEQ ID NO: 652935 - DNA, 75 bp, synthetic construct
  source 1..75: mol_type = other DNA
tataccaccaagcgcaccggcgggatgctggtcgattcgcaggccatcaaactgctgaagattgcagcggcgtaa

SEQ ID NO: 652936 - DNA, 75 bp, synthetic construct
  source 1..75: mol_type = other DNA
ggggcgtgaagacggcctgcgtgagcttgagcgtaaggcgatgcaggtgggcaatgatgaagatggtggttatgc

SEQ ID NO: 652937 - DNA, 75 bp, synthetic construct
  source 1..75: mol_type = other DNA
aacattcttaacctgctgaaagatgaagtggtgatgcgtcaggaagccacggtgatcaccgttggcggttccgac

SEQ ID NO: 652938 - DNA, 75 bp, synthetic construct
  source 1..75: mol_type = other DNA
gaaactcagggtgcgaaagtcgagtttactgttgaacaactacagcagagtgaatacttgcagcttccggcattt

SEQ ID NO: 652939 - DNA, 75 bp, synthetic construct
  source 1..75: mol_type = other DNA
acctcaaaactggggttgattgaaccctttatgggggaaatctacggcaacccgcaggctacccagaaaatgctc

SEQ ID NO: 652940 - DNA, 75 bp, synthetic construct
  source 1..75: mol_type = other DNA
ttgctgcgctgattgcctgctggataaaaatcaaacctgctgcctcgcgcctgcgcagtgttctttttcgtggag

SEQ ID NO: 652941 - DNA, 75 bp, synthetic construct
  source 1..75: mol_type = other DNA
cgcgtgagcattacaaagaagagctggcacagcaccaggaaggcgtgctggatatcattcagcgagcgggcatca

SEQ ID NO: 652942 - DNA, 75 bp, synthetic construct
  source 1..75: mol_type = other DNA
ttatcaaactgatttacacgctgcgtaaggcacaccgcaccggcgcgaagttcatgatgaacaacaacagcctgt

SEQ ID NO: 652943 - DNA, 75 bp, synthetic construct
  source 1..75: mol_type = other DNA
agcatatcttgtgctcgcagtgtgacatgctggtggcattaccccaccttgagcatggtcagaaagcggcatgtc

SEQ ID NO: 652944 - DNA, 75 bp, synthetic construct
  source 1..75: mol_type = other DNA
agatgccggatattgccgctgatgcgaaagccattgcatttggtaacttcaaacggggttacaccatcgttgacc

SEQ ID NO: 652945 - DNA, 75 bp, synthetic construct
  source 1..75: mol_type = other DNA
taaaggccgtgaagatggtctgcgcgatctggagcgtaaggcattacaggtgggcaccgatgaagacggcggcta

SEQ ID NO: 652946 - DNA, 75 bp, synthetic construct
  source 1..75: mol_type = other DNA
ctactaatgtcaaactggcctggtttgaggacggtgaactaaaaacatttatttcacccaacgcattccggccgg

SEQ ID NO: 652947 - DNA, 75 bp, synthetic construct
  source 1..75: mol_type = other DNA
ccgcagctctcttactgaccggttgcgccagtcagtcacaagttgaccagttaaccaagcaggtgaatacgctta

SEQ ID NO: 652948 - DNA, 75 bp, synthetic construct
  source 1..75: mol_type = other DNA
ttgcttacgacgacgatccaaacgtcaaaaggtattcacctgactttcaaacgcaggatgagtttgctaaagggt

SEQ ID NO: 652949 - DNA, 75 bp, synthetic construct
  source 1..75: mol_type = other DNA
agcttactctttatacacacacaaacgccccggaaacggaataatccgtttcatagttcggttttgtgcactcag

SEQ ID NO: 652950 - DNA, 75 bp, synthetic construct
  source 1..75: mol_type = other DNA
gttcctcacgccacggcgctgatgttttttatcctttgggttcaataccgcgttgctgtaattcttttcggagta

SEQ ID NO: 652951 - DNA, 75 bp, synthetic construct
  source 1..75: mol_type = other DNA
attagcctttccattgttaggtggtcaccttaacacaagagcacttaaaaaagcaaagccccgcaagtgtcatta

SEQ ID NO: 652952 - DNA, 75 bp, synthetic construct
  source 1..75: mol_type = other DNA
atcagtgtagcagaagcctcacagttggccgtattattccagacagatgaagatttctggattaacctgcaggcc

SEQ ID NO: 652953 - DNA, 75 bp, synthetic construct
  source 1..75: mol_type = other DNA
aatctattaacaatgtaagtgacattgagatgaattgcgcacccagaaaagaagatagcgatgaacgccaaccta

SEQ ID NO: 652954 - DNA, 75 bp, synthetic construct
  source 1..75: mol_type = other DNA
aacgtaatactgatcgggctgaatgagcaggaatttcctggcggcaaacccgatgatgtttacagcgttcgcaca

SEQ ID NO: 652955 - DNA, 75 bp, synthetic construct
  source 1..75: mol_type = other DNA
aaaccactgaagtttctaccgatgcgtaactttggcggtttgcctcttaccttctttaactccgacgggcactgg

SEQ ID NO: 652956 - DNA, 75 bp, synthetic construct
  source 1..75: mol_type = other DNA
gtgtggatcactattgcaccgttcgtgacagttgtttctggtgatcgcgtgatcacaacctcccgcaaggtagca

SEQ ID NO: 652957 - DNA, 75 bp, synthetic construct
  source 1..75: mol_type = other DNA
tatcaatttgtttcctcattcagggatgcataagtacacaagtatctgaaggaactttatataaatataagaata

SEQ ID NO: 652958 - DNA, 75 bp, synthetic construct
  source 1..75: mol_type = other DNA
tatagggccactacgcccctttacgcttaatctcagaactggtcggataagcatggggcatggtcttgatgttac

SEQ ID NO: 652959 - DNA, 75 bp, synthetic construct
  source 1..75: mol_type = other DNA
cagcagtacaggcatgtggattcatatgcgtgaccagaacgttatttttggacgtaatgcggtatccactgatgg

SEQ ID NO: 652960 - DNA, 75 bp, synthetic construct
  source 1..75: mol_type = other DNA
tgtaaaagatgttcgcctgggtacgcgtgttgttcaattgatggcgcgtggtggtcgttatgaaaaagccggaca

SEQ ID NO: 652961 - DNA, 75 bp, synthetic construct
  source 1..75: mol_type = other DNA
tttggtttttacatgattaataactcaaggacagccaatggcaccgatggtcaggcgtacatggataataacggt

SEQ ID NO: 652962 - DNA, 75 bp, synthetic construct
  source 1..75: mol_type = other DNA
tttgactcacgctatgtgagagatgtccgacttggcacacgtgttgttcaattgatggcgcgtggagggcgttat

SEQ ID NO: 652963 - DNA, 75 bp, synthetic construct
  source 1..75: mol_type = other DNA
tttctcagactgacttaacgtcagtcggtcgcgatattctggccaaaacaagcgttcttgctgttatccaatacc

SEQ ID NO: 652964 - DNA, 75 bp, synthetic construct
  source 1..75: mol_type = other DNA
ggcggtctgggaaataagcaatttggcatctacatgattaataattcaaggacagccaatggcaccgatggtcag

SEQ ID NO: 652965 - DNA, 75 bp, synthetic construct
  source 1..75: mol_type = other DNA
atatttgcaaaccgttttttaattaacagcagtacaggcatgtggattcatatgcgtgaccagaacgttattatg

SEQ ID NO: 652966 - DNA, 75 bp, synthetic construct
  source 1..75: mol_type = other DNA
acgtcagcgccgactggtcagaagtcatcatcaaagccgtgttcctggctgcgctcatcaagacaaaagggaacg

SEQ ID NO: 652967 - DNA, 75 bp, synthetic construct
  source 1..75: mol_type = other DNA
atgttggatctgtttaccgatgctgaaccgtggcaagaatcgctggcgcccggtgcggtgattttgcaccgtttt

SEQ ID NO: 652968 - DNA, 75 bp, synthetic construct
  source 1..75: mol_type = other DNA
tgttttatcatggcattcaaccgttgaaagtggggggggcatccactcaccaccgactgccgctacaacctgaca

SEQ ID NO: 652969 - DNA, 75 bp, synthetic construct
  source 1..75: mol_type = other DNA
gaaagcggggtttcatccactcaccaccgactgccgctacaacctgacattccgtcaggcaggtaaaaaagaata

SEQ ID NO: 652970 - DNA, 75 bp, synthetic construct
  source 1..75: mol_type = other DNA
atgtcattgctgcggtcgtggtcggcggtacggcactttctggcggtcgtggctcgctgttcggtacgctacttg

SEQ ID NO: 652971 - DNA, 75 bp, synthetic construct
  source 1..75: mol_type = other DNA
aggccgccatgtgtgagaaactgcacgaactcgcagaagaactccagaacagcatacagacacgctttgaatcgg

SEQ ID NO: 652972 - DNA, 75 bp, synthetic construct
  source 1..75: mol_type = other DNA
atgaacaagcagcagcaagccgtactcaacatggcaggattcataaaaagccagagtctgacgctgctcgaaaaa

SEQ ID NO: 652973 - DNA, 75 bp, synthetic construct
  source 1..75: mol_type = other DNA
ttaacatggcccgcttcatcagaggccagacattaacgctactggagaagctcaacgaactggacgcggatgaac

SEQ ID NO: 652974 - DNA, 75 bp, synthetic construct
  source 1..75: mol_type = other DNA
actggctaaacagcgtggccttcaattcaccagtcaggggatcaagttaccgcttccactcaatatcgatgttgg

SEQ ID NO: 652975 - DNA, 75 bp, synthetic construct
  source 1..75: mol_type = other DNA
gctttggcgcttccagcctgctggcaagcctgttgaaagcgctgggccacggcgacggtaagagcgccagcagct

SEQ ID NO: 652976 - DNA, 75 bp, synthetic construct
  source 1..75: mol_type = other DNA
ggcaatcgcctacggtgctgatgaagttgacgttgtgttcccgtaccgcgcgctgatggcaggtaacgagcaggt

SEQ ID NO: 652977 - DNA, 75 bp, synthetic construct
  source 1..75: mol_type = other DNA
tgaagaatgcctgcatatcatccctacacgagagaatgagggagaaaatggtgatatagggccactacgcccctt

SEQ ID NO: 652978 - DNA, 75 bp, synthetic construct
  source 1..75: mol_type = other DNA
atccgggattcagctgtatgaggcatacaacaatggctacccttccccctatggcaatgtgcttcaccttaaagg

SEQ ID NO: 652979 - DNA, 75 bp, synthetic construct
  source 1..75: mol_type = other DNA
ttggcggtaatgccactgcagcgcagttgtgcggtattaacgttcgtcgggtacgcattcttatttttacccttt

SEQ ID NO: 652980 - DNA, 75 bp, synthetic construct
  source 1..75: mol_type = other DNA
ttaacatggctaaattcatccaggatcagtccctgcttcttctggacaggcttaatgacctggatctggatcatg

SEQ ID NO: 652981 - DNA, 75 bp, synthetic construct
  source 1..75: mol_type = other DNA
ggcagcgtcagtgtcgtaacgcaaaactccgctgtgactaaaaacctgacgcccgtccctatgcaaattgccaat

SEQ ID NO: 652982 - DNA, 75 bp, synthetic construct
  source 1..75: mol_type = other DNA
gctgtcatgcttgctgcggttattaaaacgcgcggtaacgtcgttcaaattttcaaagtatcgaggtctaaacat

SEQ ID NO: 652983 - DNA, 75 bp, synthetic construct
  source 1..75: mol_type = other DNA
gcgctggcggtggatcgcaccgatggcatcagtatgacctttgccgactggcgctttaacctgcgctcctccaac

SEQ ID NO: 652984 - DNA, 75 bp, synthetic construct
  source 1..75: mol_type = other DNA
attttaagggtgaagtggttaatgctgcatgtgctgtaaatatgaactcagtagatcagacggttttgcttggcc

SEQ ID NO: 652985 - DNA, 75 bp, synthetic construct
  source 1..75: mol_type = other DNA
gcgtgctctggatgttgccgggcgggtcggtggcgaggaattttgtgtgattctgccaggggcgaatctggcgca

SEQ ID NO: 652986 - DNA, 75 bp, synthetic construct
  source 1..75: mol_type = other DNA
actttcctcccgtcgatgaaaccaaacgcggtcgctatcagcaaatcaacctgcgtgacgcttacgttgatcacc

SEQ ID NO: 652987 - DNA, 75 bp, synthetic construct
  source 1..75: mol_type = other DNA
gtccagcgtctggcagaagccaacgacttccctcccgtcgatgaaaccaaacgcggtcgctatcagcaaatcaat

SEQ ID NO: 652988 - DNA, 75 bp, synthetic construct
  source 1..75: mol_type = other DNA
agcgaaaccttaaaactggcgctggcaaaaggtttacgggatgcgggcgtcgatgtgctggatattggcatgtcc

SEQ ID NO: 652989 - DNA, 75 bp, synthetic construct
  source 1..75: mol_type = other DNA
tttttgacctcttccaatcctgaccatccaacagggaatatttttgatcctcgtgaactggccttgctggcgtag

SEQ ID NO: 652990 - DNA, 75 bp, synthetic construct
  source 1..75: mol_type = other DNA
actggatttcacttcactgcgtaatgctgtaaccgagttcgaacagcatcgcgacgagcacgcctggcaaattga

SEQ ID NO: 652991 - DNA, 75 bp, synthetic construct
  source 1..75: mol_type = other DNA
cacgcggggcggcattcgtatgaacagtcgctatgttagctgggaacgtctggaccatttcgacggtgtgctggt

SEQ ID NO: 652992 - DNA, 75 bp, synthetic construct
  source 1..75: mol_type = other DNA
gttggcggcgaggagttttgtgtgattctgccgggcgctaacctggagcaggcaaaagaagttgccgaacgcatt

SEQ ID NO: 652993 - DNA, 75 bp, synthetic construct
  source 1..75: mol_type = other DNA
tcctggtatgtgattcgccagatggtaagcaatatgtttgtcctgcaaagttcgctgcaatggcaagcgtggcac

SEQ ID NO: 652994 - DNA, 75 bp, synthetic construct
  source 1..75: mol_type = other DNA
gcttttcaccaccatgctacttatctcctggtatgtgattcgccagatggtaagcaatatgtttgtcctgcaaag

SEQ ID NO: 652995 - DNA, 75 bp, synthetic construct
  source 1..75: mol_type = other DNA
cattaaacacggcgcggatatgggcattgcttttgatggcgattttgaccgctgtttcctgtttgacgaaaaagg

SEQ ID NO: 652996 - DNA, 75 bp, synthetic construct
  source 1..75: mol_type = other DNA
gctgtcatgcttgctgcagtcattaaaacgcgcggtaacgtagttcagattttcaaaataacgaggtctaaacat

SEQ ID NO: 652997 - DNA, 75 bp, synthetic construct
  source 1..75: mol_type = other DNA
atgacaactcatgagctgcttttactgattgccaatgcggttatctgttcagctatagcaatccgcgtcggtaca

SEQ ID NO: 652998 - DNA, 75 bp, synthetic construct
  source 1..75: mol_type = other DNA
gttaagctcgatcaggaaaacagccgtatttttctgccgaaacttggttggatgcgctaccggaatagccgtcag

SEQ ID NO: 652999 - DNA, 75 bp, synthetic construct
  source 1..75: mol_type = other DNA
ttatcaccaatgcagttatttgtactggcattgcagttcgcgttgttacattccggcgtaacggctcccaacacc

SEQ ID NO: 653000 - DNA, 75 bp, synthetic construct
  source 1..75: mol_type = other DNA
gtgtgtggacgttgttcccgcgagtttgtctattccaacctgcgtgagctaactgtgcaccatattgatcacgac

SEQ ID NO: 653001 - DNA, 75 bp, synthetic construct
  source 1..75: mol_type = other DNA
attccagttcgtgtcgcttatgcaatctggttacgcacgccaatggctgtggatttatctgaggtcattatcaac

SEQ ID NO: 653002 - DNA, 75 bp, synthetic construct
  source 1..75: mol_type = other DNA
gaccggatggcggcgtttccggcaagcggtgagatcaacagcaaactggcgcaacccgttgaggcgattaaccgc

SEQ ID NO: 653003 - DNA, 75 bp, synthetic construct
  source 1..75: mol_type = other DNA
ctttaaagccctcggcgcacctgtggaattaatcaaagtgcacaacacgccggacggcaatttccccaacggtat

SEQ ID NO: 653004 - DNA, 75 bp, synthetic construct
  source 1..75: mol_type = other DNA
cagcggcatgatcccgtggctgctggtcgccgaactggtgtgcctgaaagagaaaacgctgggcgaactggtacg

SEQ ID NO: 653005 - DNA, 75 bp, synthetic construct
  source 1..75: mol_type = other DNA
aaaacagaagacgaatacgttgatttcttcctgtcagggctacgcgggcgattactgaaaaatccccgcctgtac

SEQ ID NO: 653006 - DNA, 75 bp, synthetic construct
  source 1..75: mol_type = other DNA
gttgtataccatgcgcgcgacgccgggctggaacttccgcccggaggggatcaccctgttgtctgccaaatacgc

SEQ ID NO: 653007 - DNA, 75 bp, synthetic construct
  source 1..75: mol_type = other DNA
cgattaaccgcgtcgaacagcactttagccgcgaggcgctggcggtggatcgcaccgatggcatcagcatgacct

SEQ ID NO: 653008 - DNA, 75 bp, synthetic construct
  source 1..75: mol_type = other DNA
ctctggtggtgctctcagccgtgcatctatctttgctctggggatcatgccgtatatttcggcgtcgatcattat

SEQ ID NO: 653009 - DNA, 75 bp, synthetic construct
  source 1..75: mol_type = other DNA
ttcaaagtgccaaaggtggcttaggcgagctgaaacgcagactgttgtttgttatcggtgcgctgattgtgttcc

SEQ ID NO: 653010 - DNA, 75 bp, synthetic construct
  source 1..75: mol_type = other DNA
ttgtatttgttgagcgtggccaacgccgcattgtggtaaactacgcgaaacgtcagcagggtcgtcgtgtctatg

SEQ ID NO: 653011 - DNA, 75 bp, synthetic construct
  source 1..75: mol_type = other DNA
gcccttgaactgccgcagaccgttgatctggaaatcattgaaaccgcgccaggcatcaaaggtgcatctgccagt

SEQ ID NO: 653012 - DNA, 75 bp, synthetic construct
  source 1..75: mol_type = other DNA
ttatggataaagaagactataccccatataccttcacgaaagatcagattgaagaagaactgctgtttatgccgg

SEQ ID NO: 653013 - DNA, 75 bp, synthetic construct
  source 1..75: mol_type = other DNA
cgtacatttcggcatcaattattatccagttgctgacggtggtccatccaacgctggcagaaattaagaaagaag

SEQ ID NO: 653014 - DNA, 75 bp, synthetic construct
  source 1..75: mol_type = other DNA
gcatggttaatgactctgctgtggctaaactttggcttgatgattaaccgcatcgtgcagcgggtgatttcgtta

SEQ ID NO: 653015 - DNA, 75 bp, synthetic construct
  source 1..75: mol_type = other DNA
gcattatgcggtactgccgctgcgtctggacaatgatgagttaattgtcggcagtgaagatggtattgacccggt

SEQ ID NO: 653016 - DNA, 75 bp, synthetic construct
  source 1..75: mol_type = other DNA
ttacgacattggcttccgcctgaaagagaaaggtatgacggaaatttttgtccgttttccggtggtggacgaagc

SEQ ID NO: 653017 - DNA, 75 bp, synthetic construct
  source 1..75: mol_type = other DNA
ctgttcagcttcgccgaaagcgccgaagagaacggttatcaggtgattattgcgggcgcaggcggcgcggcgcac

SEQ ID NO: 653018 - DNA, 75 bp, synthetic construct
  source 1..75: mol_type = other DNA
cagcgtctgaatgactggcgcaaagcccagactgacgaagtgctggaaaacccggacccgcgaggtgcggcatga

SEQ ID NO: 653019 - DNA, 75 bp, synthetic construct
  source 1..75: mol_type = other DNA
aagagaacggttatcaggtgattattgcgggcgcaggcggcgcagcgcatctgccaggcatgattgccgccaaaa

SEQ ID NO: 653020 - DNA, 75 bp, synthetic construct
  source 1..75: mol_type = other DNA
atcgttgacaccgtgacgctgacccgccgttacgttgacttctcctatgtcgatggcaacgaatatgtctttatg

SEQ ID NO: 653021 - DNA, 75 bp, synthetic construct
  source 1..75: mol_type = other DNA
ttgtcagaacgcctgatgaggtaactccggcactggttctggcagcaacctggttcgataacgctgcgcgggagt

SEQ ID NO: 653022 - DNA, 75 bp, synthetic construct
  source 1..75: mol_type = other DNA
tcaagacctaaattttctgggtatgtcatcggcgatgactgctatgagcaacgtgacagactaattgaggctctc

SEQ ID NO: 653023 - DNA, 75 bp, synthetic construct
  source 1..75: mol_type = other DNA
gaacaaagccagcagtccactggctggccttctgttactcatcctgagctgaacaatgctcctgatgaagtgacc

SEQ ID NO: 653024 - DNA, 75 bp, synthetic construct
  source 1..75: mol_type = other DNA
cccgcgcgtggaaatttacagcatagacgaagccttttgcgacctgaccggcgtaagaaactgccgggacctgac

SEQ ID NO: 653025 - DNA, 75 bp, synthetic construct
  source 1..75: mol_type = other DNA
ggtgagccttatttcaagcaaaaggacgtgtttcgccggcacggtattatcgcgtttagcagcaactatgagctt

SEQ ID NO: 653026 - DNA, 75 bp, synthetic construct
  source 1..75: mol_type = other DNA
tcatccggaaaaacttcagcgtcattcttgagcgtacggtacgcgaactcaacggcgagtcctgcatatccctgg

SEQ ID NO: 653027 - DNA, 75 bp, synthetic construct
  source 1..75: mol_type = other DNA
gataacatcgatcgtgggccggagagtcttaacgtactacgcctgttaaaccagccctggtttacatcggttaaa

SEQ ID NO: 653028 - DNA, 75 bp, synthetic construct
  source 1..75: mol_type = other DNA
ggcaaagaaatagcggagagcgaattactctggcctgttgatcgtgtgcagaaatcacttaatagcgaattacaa

SEQ ID NO: 653029 - DNA, 75 bp, synthetic construct
  source 1..75: mol_type = other DNA
aattacgaagtatcacatgcacataacgatttagtagaaagccttgaccgtattaacaagaggcttgacgagaca

SEQ ID NO: 653030 - DNA, 75 bp, synthetic construct
  source 1..75: mol_type = other DNA
aggcccacaccgtcagccggaaaagaatgttttcaccgatgagcagattgagaagctggaagaaatcttccattc

SEQ ID NO: 653031 - DNA, 75 bp, synthetic construct
  source 1..75: mol_type = other DNA
aaatcagtagcacttgatgaaagttggcaggagtacgcagcagaagctggagtagccaaggattcaaccatccag

SEQ ID NO: 653032 - DNA, 75 bp, synthetic construct
  source 1..75: mol_type = other DNA
cgcccacttaccgaatgggaggccgagcaggaacgcatcaaggctgaagaagccatgaatgtgctgcacgccgaa

SEQ ID NO: 653033 - DNA, 75 bp, synthetic construct
  source 1..75: mol_type = other DNA
gttttatctttactaaagataaaaaataataattatgctgcagcgcttaattttgacaacaaaatatatgaacca

SEQ ID NO: 653034 - DNA, 75 bp, synthetic construct
  source 1..75: mol_type = other DNA
ttttctggggcaacctgattaacttcatggccaactggcgcgcgctaaaacaggtacttcaacacggcgatccac

SEQ ID NO: 653035 - DNA, 75 bp, synthetic construct
  source 1..75: mol_type = other DNA
aacgtgctggacgccatcacccaatttgagcgtagcgccaatttcgcttttgctggttttattctgcatgacgcc

SEQ ID NO: 653036 - DNA, 75 bp, synthetic construct
  source 1..75: mol_type = other DNA
cggaagatgaacgcgacagacaccccgatgaatccctgctgaaaaccacgtaccgttataacgccgccggagaac

SEQ ID NO: 653037 - DNA, 75 bp, synthetic construct
  source 1..75: mol_type = other DNA
gctgaagtgattggtgaagcgtgggaaagccgcgaatttggtaaagcgatccgcgaaatcatggcgctggcagat

SEQ ID NO: 653038 - DNA, 75 bp, synthetic construct
  source 1..75: mol_type = other DNA
cattgatgatatcgatctcaacctggaagatttcgttcagcgtgtgaatgccgatatcgtgaataaagtggttaa

SEQ ID NO: 653039 - DNA, 75 bp, synthetic construct
  source 1..75: mol_type = other DNA
gcactgcgtaatcgcgtcgaaggtctacgcctgggcggttcaatgctgatgcaggggctgattagcgccgagcag

SEQ ID NO: 653040 - DNA, 75 bp, synthetic construct
  source 1..75: mol_type = other DNA
taacggtgagcgctggctgatacaggcaaagcgctacggacggaccatccgcccggcacatattgatgccttcgg

SEQ ID NO: 653041 - DNA, 75 bp, synthetic construct
  source 1..75: mol_type = other DNA
tcgtggattttttgttcacaccgggcgtacgggaccggccagccgggcacggcttgtgctgtggccggatattga

SEQ ID NO: 653042 - DNA, 75 bp, synthetic construct
  source 1..75: mol_type = other DNA
tggcggcaaaactgctgaaacagggcttcgagctggatgcgacccacggcacggcgattgtgctgggcgaagcgg

SEQ ID NO: 653043 - DNA, 75 bp, synthetic construct
  source 1..75: mol_type = other DNA
cacacgatcagttaagccgttacacggcggcagacggcgcggagtggcagtaccgctatgatgagcgcggcctgc

SEQ ID NO: 653044 - DNA, 75 bp, synthetic construct
  source 1..75: mol_type = other DNA
ccctgctggtcagcccggtgctgatggcctgtctgatgctctgcctgctgaccgtgttgctgatgctcattctgc

SEQ ID NO: 653045 - DNA, 75 bp, synthetic construct
  source 1..75: mol_type = other DNA
cttgtcagcggtcagcgtctgctgaaactgctgaacggaacattactgacagatgaacttaccaggggggagcgg

SEQ ID NO: 653046 - DNA, 75 bp, synthetic construct
  source 1..75: mol_type = other DNA
tcactcgacgcacagcgaagagaaccgccagttgtcagaacttatctactctcgcctgaaagagaacggttttat

SEQ ID NO: 653047 - DNA, 75 bp, synthetic construct
  source 1..75: mol_type = other DNA
atcaacaaacgttttgacggcgtgctggcaagcgagctggcagaccctgaactgtacaaaacctttaccgatgcc

SEQ ID NO: 653048 - DNA, 75 bp, synthetic construct
  source 1..75: mol_type = other DNA
cattgatgatatcgatctcaacctggaagatttcgttcagcgcgtgaatgccgatatcgtgaacaaagtggttaa

SEQ ID NO: 653049 - DNA, 75 bp, synthetic construct
  source 1..75: mol_type = other DNA
cggttttattaaaaaccgcactatctctcagttgtacgacccggaaaaaggcatgttcctgccggatcgttttgt

SEQ ID NO: 653050 - DNA, 75 bp, synthetic construct
  source 1..75: mol_type = other DNA
tgaagggggcgacgatatgcataaattcgacataatgatcttaattaatgctatcaaacaagatttgacaaacga

SEQ ID NO: 653051 - DNA, 75 bp, synthetic construct
  source 1..75: mol_type = other DNA
tccatggtcataatattggcgttgtcggtcagggaagccagttatttattcgcaccaatgaagtaccgccatcgg

SEQ ID NO: 653052 - DNA, 75 bp, synthetic construct
  source 1..75: mol_type = other DNA
gtgatggccgcaggtccgggcgggaaagatatcttcctgttaagcccggatgccggtgctaaaccgggtcatcaa

SEQ ID NO: 653053 - DNA, 75 bp, synthetic construct
  source 1..75: mol_type = other DNA
gttgtacaaaaccttcacggatgccgctgaagtgattggcgaagcgtgggaaagccgtgaatttggtaaagcagt

SEQ ID NO: 653054 - DNA, 75 bp, synthetic construct
  source 1..75: mol_type = other DNA
atgttgcaggcatggacccgcagcggcgcgttgcaggagcaggtggcaaacaaaatgcaggagtggtttgaatcc

SEQ ID NO: 653055 - DNA, 75 bp, synthetic construct
  source 1..75: mol_type = other DNA
gaagcattcctgaatacggaactgacctgggatggcatccagcaaccgctgctgggccataaagtgaatccgttc

SEQ ID NO: 653056 - DNA, 75 bp, synthetic construct
  source 1..75: mol_type = other DNA
taaaatgcaggagtggtttgaatccggcctgcaacagtgggatatctcccgcgacgcgccgtacttcggttttga

SEQ ID NO: 653057 - DNA, 75 bp, synthetic construct
  source 1..75: mol_type = other DNA
gtgatggctgctggtcctggcgggaaagatatcttcctgctaagcccggatgccggtgctaaaccgggtcatcag

SEQ ID NO: 653058 - DNA, 75 bp, synthetic construct
  source 1..75: mol_type = other DNA
ctgcaggcgatttgctctatgggcattaacctgttccgcgtgctgatgacgtacctgaagccggtactgccgaaa

SEQ ID NO: 653059 - DNA, 75 bp, synthetic construct
  source 1..75: mol_type = other DNA
tgattcttatttatcgaaaaacaagcagaacgcgaaaaaagaagttaaattagattctttgaaagaatatttgtc

SEQ ID NO: 653060 - DNA, 75 bp, synthetic construct
  source 1..75: mol_type = other DNA
aaaaacaaatgggagtcgctcaaatccagtgtaaccggaatgggtgacagcatcagtggctggttcagcgaaaag

SEQ ID NO: 653061 - DNA, 75 bp, synthetic construct
  source 1..75: mol_type = other DNA
cgttacaagagtatccggtgaaagcgtgctggttaatgaccaacagccagaacccgctcggttttaccttaacgc

SEQ ID NO: 653062 - DNA, 75 bp, synthetic construct
  source 1..75: mol_type = other DNA
attggacgtgcgctgatgatgaatcccatcggtctcgttatcacagctgtcgcggcagcagcttaccttatctac

SEQ ID NO: 653063 - DNA, 75 bp, synthetic construct
  source 1..75: mol_type = other DNA
cgtctgtcgctcgcactggggcaaggcggtaagctccgctggctggttcgcggaattatgctcgccggacgtgct

SEQ ID NO: 653064 - DNA, 75 bp, synthetic construct
  source 1..75: mol_type = other DNA
cctttccgccagcaaggcacaggcccacgtctttaagcagtacatcatcgactccgccaaagaagtgggggtgga

SEQ ID NO: 653065 - DNA, 75 bp, synthetic construct
  source 1..75: mol_type = other DNA
cgccgggggcgcatacctgatataccgcaactggggggcaataagtcgatggttctcacagcgatgggaggaagt

SEQ ID NO: 653066 - DNA, 75 bp, synthetic construct
  source 1..75: mol_type = other DNA
caggtgggctgttcaggggcgtcatggtcgttgcaaaagcatttctctggtttggccgggcgctgatgatgaatc

SEQ ID NO: 653067 - DNA, 75 bp, synthetic construct
  source 1..75: mol_type = other DNA
tgcggtagcagagattggagccagtttgcaggttgctatgattggttcaggctcgccggatgagactgctaacaa

SEQ ID NO: 653068 - DNA, 75 bp, synthetic construct
  source 1..75: mol_type = other DNA
aacaattacgcgagcagattgcgtcgggcatctggcaacccggcgatcgtttgccttcgttgcgtgaacaggtgg

SEQ ID NO: 653069 - DNA, 75 bp, synthetic construct
  source 1..75: mol_type = other DNA
ctctggttggagctccccggagccgttagatgccggcgaattaagcctggcggcactgacgcatcatatcagtat

SEQ ID NO: 653070 - DNA, 75 bp, synthetic construct
  source 1..75: mol_type = other DNA
tgtcagccatgcctatcagttgctcgaaagtcagggatatattatcgcacgaccgcagtcgggttattacgttgc

SEQ ID NO: 653071 - DNA, 75 bp, synthetic construct
  source 1..75: mol_type = other DNA
aatgttttcaccgatgagcagattgagaagctggtagaaatcttccattcctctatgttcaactaccagcgccac

SEQ ID NO: 653072 - DNA, 75 bp, synthetic construct
  source 1..75: mol_type = other DNA
ctgtcaaactcacagaatgcacaaaatgttgcaaatggtgctgcttctacagcccaaaatgcgcagtctgtcgcg

SEQ ID NO: 653073 - DNA, 75 bp, synthetic construct
  source 1..75: mol_type = other DNA
cgcaggtaaaggcgcggcagtgatgcgtggcttacaggcagcggcagacgcagggttcagccatgcggtgcaggt

SEQ ID NO: 653074 - DNA, 75 bp, synthetic construct
  source 1..75: mol_type = other DNA
gactggctcgcccgtgtacgacagcatcaaccacaggcggcaaaactcaacagctatcagcactttctgcgtttc

SEQ ID NO: 653075 - DNA, 75 bp, synthetic construct
  source 1..75: mol_type = other DNA
tgactgacattcgcgacacactgaatacggcaattgataaggagttgtcccgtacaaccagtgatgcgctgtttc

SEQ ID NO: 653076 - DNA, 75 bp, synthetic construct
  source 1..75: mol_type = other DNA
tgaataccaatatcaacaatgcaaaaaatgaggcaatcagcacatcaaacaactatacggataagaaatatcaac

SEQ ID NO: 653077 - DNA, 75 bp, synthetic construct
  source 1..75: mol_type = other DNA
aatactgctgcgtctactgcgcaaaacgcgcaaacagccgcgaataaagctcagacaacagcaaatgaggctaat

SEQ ID NO: 653078 - DNA, 75 bp, synthetic construct
  source 1..75: mol_type = other DNA
ccgcaacgcggcggcgactggcgcgtctgctggagtccgtttatgggccagcctgcgcctttcccacaggggccg

SEQ ID NO: 653079 - DNA, 75 bp, synthetic construct
  source 1..75: mol_type = other DNA
caggctcgttatattgctctcgggcagtccgtagctggtactgcaaacgctgatgcgaccttcaaagttcaatat

SEQ ID NO: 653080 - DNA, 75 bp, synthetic construct
  source 1..75: mol_type = other DNA
tgggcgagcgctgatgatgaatcccatcggtctcgttatcaccgctgtcgcgacagcagcttaccttatctaccg

SEQ ID NO: 653081 - DNA, 75 bp, synthetic construct
  source 1..75: mol_type = other DNA
gccggtaacagatatcggcccggaaaccgccatcctgctgaaagagaagctggataacggcgaatgggtggcgat

SEQ ID NO: 653082 - DNA, 75 bp, synthetic construct
  source 1..75: mol_type = other DNA
gccggtgacggatatcggcccggaaaccgccatcctgctcaaagagaagctggataacggcgaatgggtggcgat

SEQ ID NO: 653083 - DNA, 75 bp, synthetic construct
  source 1..75: mol_type = other DNA
tatggggaatgcgcctgatgctgctggtctggcgcctgctgggaagaacggcgtttaccgcgctgctttatccgg

SEQ ID NO: 653084 - DNA, 75 bp, synthetic construct
  source 1..75: mol_type = other DNA
ctggcgctctatggtcagggtgcagaaacctatgctattggcagaacgctgggcgcaccggtcatggcctcggtt

SEQ ID NO: 653085 - DNA, 75 bp, synthetic construct
  source 1..75: mol_type = other DNA
caatacgttgagacttattgaagcccagacagcctggagagcaacaatccatcaatatccgggcttgttacaggt

SEQ ID NO: 653086 - DNA, 75 bp, synthetic construct
  source 1..75: mol_type = other DNA
tgcaggtcaacactttgcgctcggtttattcctgtttgctctcttgatctgcggtattccttgtatggcagtgaa

SEQ ID NO: 653087 - DNA, 75 bp, synthetic construct
  source 1..75: mol_type = other DNA
gagaaggcggaatatctgcgcctggactgcaccatcaaggaagtccagttcaccgccggtcagaaacaggatatt

SEQ ID NO: 653088 - DNA, 75 bp, synthetic construct
  source 1..75: mol_type = other DNA
atgcgttcgcgaccggcgatggcaatatgtggcttgccagcggtggtgactggtttttcgatttaaatgattcag

SEQ ID NO: 653089 - DNA, 75 bp, synthetic construct
  source 1..75: mol_type = other DNA
ccaaccctggtttacgtcggttaaaggcaaccacgaagcgatggcgttggatgcattcgaaactggcgatggcaa

SEQ ID NO: 653090 - DNA, 75 bp, synthetic construct
  source 1..75: mol_type = other DNA
tccaacaagtacgaatgcgaccagattaacttcgatttttatatccgctacaaaacgctggacctgtgggcgcgt

SEQ ID NO: 653091 - DNA, 75 bp, synthetic construct
  source 1..75: mol_type = other DNA
cggagtgatgctgggagatttttacagccagggtgtcgcgcaacttaatctatttgacgaaaatgcacctcggga

SEQ ID NO: 653092 - DNA, 75 bp, synthetic construct
  source 1..75: mol_type = other DNA
gatgaagggcaggtggaaaaattaatgcagtggttaaagagcggcggtccgcgttcagcccgcgtggaacgggtg

SEQ ID NO: 653093 - DNA, 75 bp, synthetic construct
  source 1..75: mol_type = other DNA
tatcgttatttgatgaagggcggtcgtatgcaaacagtgacgcgctcatgaacgtactggataccataaacaact

SEQ ID NO: 653094 - DNA, 75 bp, synthetic construct
  source 1..75: mol_type = other DNA
gtcagtcagtgtcaacgggggaacgccgccgtataaatacgcctggaagaaggacggtcagccggttgaggggca

SEQ ID NO: 653095 - DNA, 75 bp, synthetic construct
  source 1..75: mol_type = other DNA
aggatggtcagccggttgacgggcagacgacagacaccttcagtaagccagtgcgcagtccgctgatgcggggaa

SEQ ID NO: 653096 - DNA, 75 bp, synthetic construct
  source 1..75: mol_type = other DNA
tattcctggtttatgcttattcaggctttgaagaaagcatttatttattcagggcatacaaatatgactcaagca

SEQ ID NO: 653097 - DNA, 75 bp, synthetic construct
  source 1..75: mol_type = other DNA
tatgtggcttgccagcggtggtgactggtttttcgatttaaatgattcagagcaaaaagaagctataagtctgtt

SEQ ID NO: 653098 - DNA, 75 bp, synthetic construct
  source 1..75: mol_type = other DNA
cgccttacgctcgctctgggtgaaggcggcaaacttcgctggctggtgaccggcttcagcgccgtcgccagaggt

SEQ ID NO: 653099 - DNA, 75 bp, synthetic construct
  source 1..75: mol_type = other DNA
tggcttatgccggtgaccaggggtcatttgaaatcccggatcaggtcaaatggatgcagtccctggccccaatga

SEQ ID NO: 653100 - DNA, 75 bp, synthetic construct
  source 1..75: mol_type = other DNA
taaagaacgatacggcgagggatgaggctcttcaggcactggcaaaaaatttcggcctgggcgagatgttcgctg

SEQ ID NO: 653101 - DNA, 75 bp, synthetic construct
  source 1..75: mol_type = other DNA
agacctggatgcaacacaggaacgtgcaattggcctggctatcagacaggcctcgctgaaggttaaccaactgca

SEQ ID NO: 653102 - DNA, 75 bp, synthetic construct
  source 1..75: mol_type = other DNA
tcattattggcggcattgtcgggagcagcttccgctcagccgtcagtggcacccgacgcgcccttgattcccttg

SEQ ID NO: 653103 - DNA, 75 bp, synthetic construct
  source 1..75: mol_type = other DNA
cactggcagcaaaagccagccagcagctggcaaatcagatggtgccctcattaccgatgattcacactgatagcc

SEQ ID NO: 653104 - DNA, 75 bp, synthetic construct
  source 1..75: mol_type = other DNA
tatgtggttagccagcggcggcggctggttttttgatttaaatgattcagagcaaaaagaagcaatagatctgtt

SEQ ID NO: 653105 - DNA, 75 bp, synthetic construct
  source 1..75: mol_type = other DNA
aaccgacttacttatttctgtcggcgataatattgatcgtgggccggagagtcttaacgtactacgcctgttaaa

SEQ ID NO: 653106 - DNA, 75 bp, synthetic construct
  source 1..75: mol_type = other DNA
agtggcggtgactggttctttgagttaaatgattcagaacaaaaagaagcaatagacctgttgcttcgctttcat

SEQ ID NO: 653107 - DNA, 75 bp, synthetic construct
  source 1..75: mol_type = other DNA
aaatcccctcttgaagccaccaaagcgctggcagtcaacagtcgggatctggcaattacgctgggcgatcaatta

SEQ ID NO: 653108 - DNA, 75 bp, synthetic construct
  source 1..75: mol_type = other DNA
cctccccgtcaccggtgcactgcatcttgatgaggtcacgttcagttatcccgccagtcacgagccagctctgaa

SEQ ID NO: 653109 - DNA, 75 bp, synthetic construct
  source 1..75: mol_type = other DNA
aacagacttacttatttccacaggcgataatattgatcgtgggtcggagagtcttaatgtgctacgcctgttaaa

SEQ ID NO: 653110 - DNA, 75 bp, synthetic construct
  source 1..75: mol_type = other DNA
gacgggatattgcttgggggacttggcatcagcggtggtagcgttgaacaagatatggatattgcacaagccgca

SEQ ID NO: 653111 - DNA, 75 bp, synthetic construct
  source 1..75: mol_type = other DNA
cgcttgcagatgcgcgcaaagtgccggaagtcgaatcctatttccaggcgacggccagtaacagggcgaaacagc

SEQ ID NO: 653112 - DNA, 75 bp, synthetic construct
  source 1..75: mol_type = other DNA
cagaggcggaagcactcggcgtgccgccagatctgattgaagatgttctgcgtcgggtaatgcgtgagtcctact

SEQ ID NO: 653113 - DNA, 75 bp, synthetic construct
  source 1..75: mol_type = other DNA
gcacagtatgaacaaacctttggggtaacggtatcaagaaaaagaatcgacgtaatggatttaggttccgctgtt

SEQ ID NO: 653114 - DNA, 75 bp, synthetic construct
  source 1..75: mol_type = other DNA
cttatcaggcctggaaagatgcacaatcgagtaggacggataaggcgtttacgccgcatccggcatggatgacat

SEQ ID NO: 653115 - DNA, 75 bp, synthetic construct
  source 1..75: mol_type = other DNA
tggcaataaaaacggcaacacacaagcttgctgataccgtgcaaccgggtgcgccgctttacgggctcgaaagtc

SEQ ID NO: 653116 - DNA, 75 bp, synthetic construct
  source 1..75: mol_type = other DNA
aatggcggcggcgttgttattaacgccccgcaaaagaaagtaaaaaatcctgattacagtaaactcattttttat

SEQ ID NO: 653117 - DNA, 75 bp, synthetic construct
  source 1..75: mol_type = other DNA
tcattaaccgctgatgctgagttggtgtgtagggctttgcgtaatgcactggaaacacgaccgcgtgatggccgc

SEQ ID NO: 653118 - DNA, 75 bp, synthetic construct
  source 1..75: mol_type = other DNA
gtcgcattaacaaacgggatggttcttgataagaattttgtcttaaccgctccagtatttatgaacaatggcgag

SEQ ID NO: 653119 - DNA, 75 bp, synthetic construct
  source 1..75: mol_type = other DNA
cggattctggagcaacatgactgggatcgagcggctgatattgttgccgatgccggaatggtgattgttagtgtg

SEQ ID NO: 653120 - DNA, 75 bp, synthetic construct
  source 1..75: mol_type = other DNA
cgcgggcaacagagattgtggcagatgctggaatggtgattgtcagcgtaccgattcatgttactgaacaggtta

SEQ ID NO: 653121 - DNA, 75 bp, synthetic construct
  source 1..75: mol_type = other DNA
cgtactcgccaaagttgaagaagattatcggggtttttgcttttctggctcctgtaaatccacatcagaaccagt

SEQ ID NO: 653122 - DNA, 75 bp, synthetic construct
  source 1..75: mol_type = other DNA
caggctgttgccgtcaaaacagcttaccgcaatgtgtttactgaagatgaccagggaacatattcccggctggtt

SEQ ID NO: 653123 - DNA, 75 bp, synthetic construct
  source 1..75: mol_type = other DNA
atgctggaagcacgcgcacgtcagcgttcttctaaggcgctggagaaattactcgatttaaccccaccgacggcg

SEQ ID NO: 653124 - DNA, 75 bp, synthetic construct
  source 1..75: mol_type = other DNA
gcggccatttttaccgcagtgcatggaaaagcctgctgaacggtgcagcgacgatggatacgctggtggcgctgg

SEQ ID NO: 653125 - DNA, 75 bp, synthetic construct
  source 1..75: mol_type = other DNA
gcaccgtttacgccactcgctcagcagtacgtatcagagttgcaaaatctttcctctcttcaggggcaaggtcag

SEQ ID NO: 653126 - DNA, 75 bp, synthetic construct
  source 1..75: mol_type = other DNA
agcgaccgccgaagacgatagtcagcagttgctgctgagcggcatgagctgcgccagttgtgtcacccgggtgca

SEQ ID NO: 653127 - DNA, 75 bp, synthetic construct
  source 1..75: mol_type = other DNA
catggtgcgccaggcccagagcagcaagccagaaatcggtcagctggcggataaaatctcagccgtatttgtgcc

SEQ ID NO: 653128 - DNA, 75 bp, synthetic construct
  source 1..75: mol_type = other DNA
aaaaccgggacgctgaccgaagggaagccgcaggttgtcgcagtgaaaacgtttgctgatgttgatgaagcgcag

SEQ ID NO: 653129 - DNA, 75 bp, synthetic construct
  source 1..75: mol_type = other DNA
atggatggtcctgatggtagtgcgtatcctgtaaacattaacggaacgacctgggtagaaggtggcggttgtaag

SEQ ID NO: 653130 - DNA, 75 bp, synthetic construct
  source 1..75: mol_type = other DNA
cgcccgtttggctggcgagaggtgtggatcggttatgacccagcaaaaggtacgcagaacggtgacagtgccggg

SEQ ID NO: 653131 - DNA, 75 bp, synthetic construct
  source 1..75: mol_type = other DNA
catccgatgatcgtccttatgcaagctatgcagctgaaagtcataactccagagcagtacgctagcttaatgagt

SEQ ID NO: 653132 - DNA, 75 bp, synthetic construct
  source 1..75: mol_type = other DNA
agggcaggcgcgttaccagagtctggcagcagcagaggcaacgggtggattaggctctacagcaacaggaaacca

SEQ ID NO: 653133 - DNA, 75 bp, synthetic construct
  source 1..75: mol_type = other DNA
cgttgttccgggtataggtaatgtcgccggggctattggtggtgggcttattggtcttgttggggggcttggatt

SEQ ID NO: 653134 - DNA, 75 bp, synthetic construct
  source 1..75: mol_type = other DNA
gctgaaaggcgatccgatggtgcttcctaacggggccacactttacttcctcggcaccaatgcccgcactgccca

SEQ ID NO: 653135 - DNA, 75 bp, synthetic construct
  source 1..75: mol_type = other DNA
aaaatctggcaacagcaggcacccggatcagcactctggaaaatcaggtaagcgaactggttgcacttgtcgggc

SEQ ID NO: 653136 - DNA, 75 bp, synthetic construct
  source 1..75: mol_type = other DNA
gcggcccactattggatcgtaaaggcccacgcctgatgctgggactggggatgttcttctggtcactgttccagg

SEQ ID NO: 653137 - DNA, 75 bp, synthetic construct
  source 1..75: mol_type = other DNA
ctggatcgcaaaggttcacgtctgatgttggggctagggatgctagtctggtcgctgttccaggcaatgtctggc

SEQ ID NO: 653138 - DNA, 75 bp, synthetic construct
  source 1..75: mol_type = other DNA
gaaaaatggacccgtctcgttgatgagctcaaccctgtccttacagacgccagtattgcgcctgagaggttaggc

SEQ ID NO: 653139 - DNA, 75 bp, synthetic construct
  source 1..75: mol_type = other DNA
tcgacagtaacgataatctcattgtcgcgttgaaagacctgcacgctggagaatcgtactcgtgggatgacgaca

SEQ ID NO: 653140 - DNA, 75 bp, synthetic construct
  source 1..75: mol_type = other DNA
atcattggtgttgccataagcccgccgattctggcagcgataatgctggccatcggctggcgtgggatgtttata

SEQ ID NO: 653141 - DNA, 75 bp, synthetic construct
  source 1..75: mol_type = other DNA
accattggtgttgccgttagtccaccaattctggcagcaatgatgctggtaatgggctggcgcgggatgtttatt

SEQ ID NO: 653142 - DNA, 75 bp, synthetic construct
  source 1..75: mol_type = other DNA
gtatctcacacacttttacctgtatacgattatgccggttcatggaacctgaagggagacgatgcccgcctgaac

SEQ ID NO: 653143 - DNA, 75 bp, synthetic construct
  source 1..75: mol_type = other DNA
tgagtcaggacctgacactgcaggaccgcatgttctacagtgtgtttaacgggtacaggaatgtctggggaggaa

SEQ ID NO: 653144 - DNA, 75 bp, synthetic construct
  source 1..75: mol_type = other DNA
agtcagagttttgtttctgacggtccggtgaatatttctgatgccaccctgagtctgaacagccgtcctgatgag

SEQ ID NO: 653145 - DNA, 75 bp, synthetic construct
  source 1..75: mol_type = other DNA
tcgcagacccctcgtttagcagccgcatcagcgtgggtaaatggaatgatgtatctcacttgatcctcatgacag

SEQ ID NO: 653146 - DNA, 75 bp, synthetic construct
  source 1..75: mol_type = other DNA
aaaagccatgcttcatcattttaaacaggcagctacgctcgcggtcaacagtatccagaacgaagccatttgtgc

SEQ ID NO: 653147 - DNA, 75 bp, synthetic construct
  source 1..75: mol_type = other DNA
agaagattatccgcttagttctgtctgagctgggccaccctgtagaaggtgagcggctttttcttctatcggagg

SEQ ID NO: 653148 - DNA, 75 bp, synthetic construct
  source 1..75: mol_type = other DNA
gagacgtaatcctgaatttgataaacctgcgctctactttctccaacaggagtgggacagcgaagagcggatgat

SEQ ID NO: 653149 - DNA, 75 bp, synthetic construct
  source 1..75: mol_type = other DNA
aacccatgcaaccgatgctgcaggctcagcacgtgccgccagcacgtcagccggacaggctgcatcatctgctca

SEQ ID NO: 653150 - DNA, 75 bp, synthetic construct
  source 1..75: mol_type = other DNA
ttgcatccggtgaaagcagtcttacggggtttattagtcaggtagatggaactccagcgtatacaggtgtatttc

SEQ ID NO: 653151 - DNA, 75 bp, synthetic construct
  source 1..75: mol_type = other DNA
ttaatacaaaggatatttaataatgttgagtcactatttaataaagcacctgtcagcattttagttaatgatatt

SEQ ID NO: 653152 - DNA, 75 bp, synthetic construct
  source 1..75: mol_type = other DNA
atctgaatgttgactacgccgccgtgacgggcttacttgttcaggtcgcccgtgaaacagatgatcgcgttaccg

SEQ ID NO: 653153 - DNA, 75 bp, synthetic construct
  source 1..75: mol_type = other DNA
gaagaggaaaacacaacgctacgtcaaaatctggcaacagcaggcacccggatcagcactctggaaaatcaggta

SEQ ID NO: 653154 - DNA, 75 bp, synthetic construct
  source 1..75: mol_type = other DNA
ggaggcgacagcgcccgatggttattccggcgcgattcagttgctggtcggggccgattttaacggcacggtact

SEQ ID NO: 653155 - DNA, 75 bp, synthetic construct
  source 1..75: mol_type = other DNA
atgctgaaaactatccgaaaacacggcattacgttggcgctatttgcagcgggttcaacagggttaactgcggcc

SEQ ID NO: 653156 - DNA, 75 bp, synthetic construct
  source 1..75: mol_type = other DNA
tccggtgcgattcagctgctggtgggagccgattttaacggcacggtacttggcacgcgcgtgacagagcaccac

SEQ ID NO: 653157 - DNA, 75 bp, synthetic construct
  source 1..75: mol_type = other DNA
aaaaccgactcggcggtacgcgccacgcatttggcatccggtattagcgtgaaggttcagtcagagcgtagtcag

SEQ ID NO: 653158 - DNA, 75 bp, synthetic construct
  source 1..75: mol_type = other DNA
cataccaaacaggggatacagaccaacctgacgctgaaagaggaaagctacggcgactggctgccaaaatgtgac

SEQ ID NO: 653159 - DNA, 75 bp, synthetic construct
  source 1..75: mol_type = other DNA
tgcagaaaaaagggaaacctgttccagaatacacgccaaaaccagcgtccgttgcaacgaaggctacgcatcttt

SEQ ID NO: 653160 - DNA, 75 bp, synthetic construct
  source 1..75: mol_type = other DNA
tggtccggatcgtcatttcgaagaatcctgggaagttcctgcggtatctgcagtcagacgcgaggacccgtactt

SEQ ID NO: 653161 - DNA, 75 bp, synthetic construct
  source 1..75: mol_type = other DNA
aagcgtctgcgcgatgcagggtttattactctggatttacgcacggtggaaatgctcgatggggtgaaatgcagc

SEQ ID NO: 653162 - DNA, 75 bp, synthetic construct
  source 1..75: mol_type = other DNA
aataccagaacctgctgatgtgtgagtttgtggacgatctcgcatccgtgttcccgctcagcgagctgcaggcgt

SEQ ID NO: 653163 - DNA, 75 bp, synthetic construct
  source 1..75: mol_type = other DNA
atgttcatcagcgggctggacgatttttttattgatgtcgtctactgggtacgccgcattaaacgcaagttgagt

SEQ ID NO: 653164 - DNA, 75 bp, synthetic construct
  source 1..75: mol_type = other DNA
aagttcctggcggaagtgcgtcagcacacctggtcatccggtaccaacggcgtggtggctgcaacgttttcactg

SEQ ID NO: 653165 - DNA, 75 bp, synthetic construct
  source 1..75: mol_type = other DNA
taattaatagtatttctgttactgacttattaggcattgtgcccaccgaactgtacgatttacatcgtgattttt

SEQ ID NO: 653166 - DNA, 75 bp, synthetic construct
  source 1..75: mol_type = other DNA
acaccagaaaccatgctcaacggtgtgaaacgctatgccgcctgggtgcgtgtctcaggaaatatcggcacccag

SEQ ID NO: 653167 - DNA, 75 bp, synthetic construct
  source 1..75: mol_type = other DNA
cagctattacgttaaaacggaacaccccccgacgtcataacggaacaggggatacgccgaatgttgatacaaata

SEQ ID NO: 653168 - DNA, 75 bp, synthetic construct
  source 1..75: mol_type = other DNA
gggatatcgcaagcgttttcagggtgacaagctgcaaagaagctatcaggcgtttgctgagcagtttggttttgg

SEQ ID NO: 653169 - DNA, 75 bp, synthetic construct
  source 1..75: mol_type = other DNA
tcggcaacaggtcatgacaacagcatctgggttaacttcctgaaaaaaccctctgacaaggacacgcttgatatt

SEQ ID NO: 653170 - DNA, 75 bp, synthetic construct
  source 1..75: mol_type = other DNA
gggctggaagttgaacgctctgcattcggtaaatacaacacagatgatgcgataaacgctaacattcgttattca

SEQ ID NO: 653171 - DNA, 75 bp, synthetic construct
  source 1..75: mol_type = other DNA
cagtatattcaggatagtcagggtaagcgacattgggtaacaggtgggtatggttatctgacaggaggaatactc

SEQ ID NO: 653172 - DNA, 75 bp, synthetic construct
  source 1..75: mol_type = other DNA
ttcccgctcagcgagctgcaagcgtgcatggtggacagttgggaaatctggaccgactttcatgcactggccctg

SEQ ID NO: 653173 - DNA, 75 bp, synthetic construct
  source 1..75: mol_type = other DNA
cgggcgtgcactccggtgactccgcatgttctctgccagcctacactttaagtcaggaaattcaggatgtgatgc

SEQ ID NO: 653174 - DNA, 75 bp, synthetic construct
  source 1..75: mol_type = other DNA
aggcgggcgtgcactccggcgactccgcatgttcgctgccggcgtacaccttaagtcaggaaattcaggatgtaa

SEQ ID NO: 653175 - DNA, 75 bp, synthetic construct
  source 1..75: mol_type = other DNA
aacccggaaaccgtctccaccgactacgacacttccgaccgcctctacttcgagccggtaaccctggaagatgtg

SEQ ID NO: 653176 - DNA, 75 bp, synthetic construct
  source 1..75: mol_type = other DNA
ttcctcgcttcaacttcgagaaatttgccggggctaatgaccgtctgaccacccagatgaaatcggttggtgaag

SEQ ID NO: 653177 - DNA, 75 bp, synthetic construct
  source 1..75: mol_type = other DNA
aagattattgaaaaagagcgcccggacgcggtgctgccaaccatgggggggcagacggcgctgaactgtgcgctg

SEQ ID NO: 653178 - DNA, 75 bp, synthetic construct
  source 1..75: mol_type = other DNA
caccctgaacggcggttttgctactgcgatggcactgaatgccgatgcgaccgaaaaagttatttcggtacagga

SEQ ID NO: 653179 - DNA, 75 bp, synthetic construct
  source 1..75: mol_type = other DNA
caccctgaacggtggtttcgctaccgcgatggcgctgaatgccgatgcgaccgagaaggtcatttcggtgcagga

SEQ ID NO: 653180 - DNA, 75 bp, synthetic construct
  source 1..75: mol_type = other DNA
gcctgaaactgaaacaaccggcgaacgccaccgttaccgctattgaaatggcggtagagaaggcgaaagagattg

SEQ ID NO: 653181 - DNA, 75 bp, synthetic construct
  source 1..75: mol_type = other DNA
cgcgaatggacgcacttcaccagcatgacttacattgatgagttttcagagctgcatggcaaagatgttccggtg

SEQ ID NO: 653182 - DNA, 75 bp, synthetic construct
  source 1..75: mol_type = other DNA
caccctgaacggcggtttcgctaccgcgatggcgttgaatgccgatgcgaccgaaaaagtaatttcggtgcagga

SEQ ID NO: 653183 - DNA, 75 bp, synthetic construct
  source 1..75: mol_type = other DNA
cccggaagcgctgactaaaatccgccgcgagctgaaagacgctggcgcagagcgtatctggtacatcgccgatgc

SEQ ID NO: 653184 - DNA, 75 bp, synthetic construct
  source 1..75: mol_type = other DNA
cccgattgctaaagtggcggcgaaactggcggtgggttacaccctagacgaactgatgaacgacatcactggcgg

SEQ ID NO: 653185 - DNA, 75 bp, synthetic construct
  source 1..75: mol_type = other DNA
cagagattactacagagattacaacggagactaaaaacactattggcgcatccgctgacgcgtctgcaccagcgc

SEQ ID NO: 653186 - DNA, 75 bp, synthetic construct
  source 1..75: mol_type = other DNA
tgttctgcatccatgtttagacatgctgacagataaagactggaaaccagaagaggaaataccaggtccattaca

SEQ ID NO: 653187 - DNA, 75 bp, synthetic construct
  source 1..75: mol_type = other DNA
atggacgttcaaccgccgaaatactggatcaccttaacgagacttatacaccgccaccagcggttagcaacaaga

SEQ ID NO: 653188 - DNA, 75 bp, synthetic construct
  source 1..75: mol_type = other DNA
catgtttagacatgctgacagataagaactggaaaccagaagaggaaataccaggtccattacaggaatttggaa

SEQ ID NO: 653189 - DNA, 75 bp, synthetic construct
  source 1..75: mol_type = other DNA
caatttaatgaccccttatttattcgctccggtaaaggaattgcaccaacaacgacaggattaaatctgcatcat

SEQ ID NO: 653190 - DNA, 75 bp, synthetic construct
  source 1..75: mol_type = other DNA
cggcagaaacgtcagtgctgggttcaatgactgggattactctgtcagagtttatatggtcgatttaactgctgc

SEQ ID NO: 653191 - DNA, 75 bp, synthetic construct
  source 1..75: mol_type = other DNA
atggcagcgaaaatccgtcgtgatgacgaagttatcgtgttaaccggtaaagataaaggtaaacgcggtaaagtt

SEQ ID NO: 653192 - DNA, 75 bp, synthetic construct
  source 1..75: mol_type = other DNA
atgcgcgctaaccacccgaccttcggctatattccgcagggtgcgttaagtatggtgaaagagtttggtttgatg

SEQ ID NO: 653193 - DNA, 75 bp, synthetic construct
  source 1..75: mol_type = other DNA
cattggcctgacggccggtatgttggctggctccatgacatcgacgccggttctggtcggtgcgggcgatacgtt

SEQ ID NO: 653194 - DNA, 75 bp, synthetic construct
  source 1..75: mol_type = other DNA
tttcgatcgtgaccttctcgacatgcgtatcgtcactgaagaagtggtcgttaaaaaccataacgctgtaggtaa

SEQ ID NO: 653195 - DNA, 75 bp, synthetic construct
  source 1..75: mol_type = other DNA
gattaagcaagctctaaaacggatcgggtgtagcaggattgacaagtacaaaaacttgtttgtactggaatacat

SEQ ID NO: 653196 - DNA, 75 bp, synthetic construct
  source 1..75: mol_type = other DNA
caggagattgtggaattacggaagaatggacgttcaaccgccgaaatactggatcaccttaacgagacatataca

SEQ ID NO: 653197 - DNA, 75 bp, synthetic construct
  source 1..75: mol_type = other DNA
atgaccatcgttcgcttcggtgagcagatgatcgttaaagcgatgagcatcctggtattcccgttcgttgcagtt

SEQ ID NO: 653198 - DNA, 75 bp, synthetic construct
  source 1..75: mol_type = other DNA
tatatttcctataataaatcatcattaaacaatctggcgttctctcgatttattgatcgcttaaatgacagctta

SEQ ID NO: 653199 - DNA, 75 bp, synthetic construct
  source 1..75: mol_type = other DNA
cttcaatttgtgggtaacacgccgtgtgcaaacggtggatgaggatgggatcggcagcgacagcgaagttaaaaa

SEQ ID NO: 653200 - DNA, 75 bp, synthetic construct
  source 1..75: mol_type = other DNA
tgcagtccgggcaagttatcagtggcgcgattcttatcgtgacaactgagcggctgacacaggggcagactggcc

SEQ ID NO: 653201 - DNA, 75 bp, synthetic construct
  source 1..75: mol_type = other DNA
gaccgttctctggaagccaggcgaatggaagctggccagaacatcagcggggcgatcctcatcgtgacgcagttc

SEQ ID NO: 653202 - DNA, 75 bp, synthetic construct
  source 1..75: mol_type = other DNA
cccccgacgtcataacggaacaggggatacgccgaatgttgatacaaatacagagattacaacggagactaaaaa

SEQ ID NO: 653203 - DNA, 75 bp, synthetic construct
  source 1..75: mol_type = other DNA
gcagccagacgcgaggacccgtacttcaaagccagttacgacaacgtggactacagccagattccggcaggattc

SEQ ID NO: 653204 - DNA, 75 bp, synthetic construct
  source 1..75: mol_type = other DNA
aagcgccttcgtgatgccgggtttatttccctggatttacgcactgtggaaatgctcgacggtgtgaaatgcagc

SEQ ID NO: 653205 - DNA, 75 bp, synthetic construct
  source 1..75: mol_type = other DNA
tatatctcttataataaatcatctttaaataaccttggattctctcgttttattgatcgcttgaatgacagttta

SEQ ID NO: 653206 - DNA, 75 bp, synthetic construct
  source 1..75: mol_type = other DNA
tgatgtcagcagaaagcgccgaaaatttattggcttatcgcaaagcagatctggttattacattaataccagtca

SEQ ID NO: 653207 - DNA, 75 bp, synthetic construct
  source 1..75: mol_type = other DNA
taaagcagaactgaagaaaaaatttattatttatggcccgcaactcatctcttcaactaacagtagccttttgat

SEQ ID NO: 653208 - DNA, 75 bp, synthetic construct
  source 1..75: mol_type = other DNA
atgcctcttctcgatgtgagcgatgttcttctcgatcccgacttcatggacaccagcctggtgtgtcaccggcag

SEQ ID NO: 653209 - DNA, 75 bp, synthetic construct
  source 1..75: mol_type = other DNA
tgcaattgaaacaaataaaactcgaacaaactttaccatcaaacacactttatatctcttataataaatcatctt

SEQ ID NO: 653210 - DNA, 75 bp, synthetic construct
  source 1..75: mol_type = other DNA
atttgtagcaataatcacccaagaataactgatcacagttcccatgcacaaattcttgatgaagaatttactttc

SEQ ID NO: 653211 - DNA, 75 bp, synthetic construct
  source 1..75: mol_type = other DNA
atgacgtggaaagacaggcttcaggacgcgtcatttcgcggcgtgccgtttaaggttgaagaagaaagtgcggga

SEQ ID NO: 653212 - DNA, 75 bp, synthetic construct
  source 1..75: mol_type = other DNA
atggggatcaaaaccgttctcgatttggcggattcagatatccggtttatccgtaaacattttaatgtcgtgctc

SEQ ID NO: 653213 - DNA, 75 bp, synthetic construct
  source 1..75: mol_type = other DNA
gtgcgtgaactgcgcggcgaaccctgtttgcaactggaagagtttgcaccgacgaagcaggaaattatctgttcc

SEQ ID NO: 653214 - DNA, 75 bp, synthetic construct
  source 1..75: mol_type = other DNA
tgaggcaaaggcgctgggtgttaaaatgggcgatccctggttcaaacaaaaagatctgtttcgtcgctgtggcgt

SEQ ID NO: 653215 - DNA, 75 bp, synthetic construct
  source 1..75: mol_type = other DNA
attcttgaccctatagcaatggaaaacgcgattaacgctattcctggtgttgttactgttggtctgtttgctaac

SEQ ID NO: 653216 - DNA, 75 bp, synthetic construct
  source 1..75: mol_type = other DNA
acccgtgaaaaaatcattgcttcggttgcggaaaaatttatctgtattgcagacgcttccaagcaggttgatatt

SEQ ID NO: 653217 - DNA, 75 bp, synthetic construct
  source 1..75: mol_type = other DNA
ttgaaatccgtgagctcaggaaaaagctacaacaaacgtggtggtcatgaacatgttgctatccctaactacctt

SEQ ID NO: 653218 - DNA, 75 bp, synthetic construct
  source 1..75: mol_type = other DNA
gcctgatgggcggcggcttcctttataccaatgaaaacaccctgtcgctggggctggtttgtggtctgcatcatc

SEQ ID NO: 653219 - DNA, 75 bp, synthetic construct
  source 1..75: mol_type = other DNA
cgttcttactccgttttgcgcagtaaatttgatgcctggctgatggagcaggccgaagaagcgggcgcgcagtta

SEQ ID NO: 653220 - DNA, 75 bp, synthetic construct
  source 1..75: mol_type = other DNA
ctgctgggataacagccccatggaacgcttcttccgcagtctgaaaacagaatgggtgccaacgaatggttacgc

SEQ ID NO: 653221 - DNA, 75 bp, synthetic construct
  source 1..75: mol_type = other DNA
ggcgttccttgataacccacgcatgtttagcggctacccggaactggcggtgggcgtggcgcgtgacctgttcac

SEQ ID NO: 653222 - DNA, 75 bp, synthetic construct
  source 1..75: mol_type = other DNA
atgcgcaagaaaatcctccgccacggcaagaaagtgggcttcatcaatctgatcaaggatggcatgaaaggagtg

SEQ ID NO: 653223 - DNA, 75 bp, synthetic construct
  source 1..75: mol_type = other DNA
tttagcggctacccggaactggcggtgggcgtggcgcgtgacctgttcaccattgacggcagtgcgccggaactg

SEQ ID NO: 653224 - DNA, 75 bp, synthetic construct
  source 1..75: mol_type = other DNA
caggtgtggtgcggtgatgtgacctatagtgtgcccggagttcagggcgggcatggatgcttaaatgaaccgcga

SEQ ID NO: 653225 - DNA, 75 bp, synthetic construct
  source 1..75: mol_type = other DNA
gccttcgcgacctcccgctgggagacaggttcgccgcgtctggaacgttataacggctattccgcagtggaaatt

SEQ ID NO: 653226 - DNA, 75 bp, synthetic construct
  source 1..75: mol_type = other DNA
cagattgatatcgaccagcgtaaagctcaggcgctgggcgttgctatcgacgatattaacgacacactgcaaacc

SEQ ID NO: 653227 - DNA, 75 bp, synthetic construct
  source 1..75: mol_type = other DNA
gcgatcggtctgctggtggatgacgccatcgtggtggtggaaaacgtcgaacgtattatgagtgaggaaggactc

SEQ ID NO: 653228 - DNA, 75 bp, synthetic construct
  source 1..75: mol_type = other DNA
gccatttccttgctggtggtattcctgtgtctggctgcattgtatgaaagctggtcggtaccgttctcggtaatg

SEQ ID NO: 653229 - DNA, 75 bp, synthetic construct
  source 1..75: mol_type = other DNA
tcggcggcaccaccggtgccatctatcgccagttctctattaccattgttgcagcgatggtgctgtcagtactgg

SEQ ID NO: 653230 - DNA, 75 bp, synthetic construct
  source 1..75: mol_type = other DNA
ggtactggcgtaatgggcgggatgatttcggccactattctggctatttacttcgtgccgctgttctttgtgctg

SEQ ID NO: 653231 - DNA, 75 bp, synthetic construct
  source 1..75: mol_type = other DNA
cagcccgatggaacgtttttttagaagcctgaaaacggagtgggtaccagataatggatacgctaattttagcga

SEQ ID NO: 653232 - DNA, 75 bp, synthetic construct
  source 1..75: mol_type = other DNA
gatattacaacgcactaagaccgcacgaatataacggtgggttacccccaaacgaatcggaaaatcgatactgga

SEQ ID NO: 653233 - DNA, 75 bp, synthetic construct
  source 1..75: mol_type = other DNA
gccatttcattgctggtggtattcctgtgtctggcggcgctgtatgaaagctggtcggtgccgttctcggtaatg

SEQ ID NO: 653234 - DNA, 75 bp, synthetic construct
  source 1..75: mol_type = other DNA
ggcgtgacggtgcgtaaaaccggcgataccaatattctgaccattgctttcgtctctaccgatggttcgatggat

SEQ ID NO: 653235 - DNA, 75 bp, synthetic construct
  source 1..75: mol_type = other DNA
agaacgaatgggtgccggcgacgggctatgtaagcttcagcgatgcagctcacgcaataacggactatatcgttg

SEQ ID NO: 653236 - DNA, 75 bp, synthetic construct
  source 1..75: mol_type = other DNA
ataaatactggcggcagccaaagaagcctgatgtcgcgcgcgtgtcattactcagtcttgttcgtgaaagctatc

SEQ ID NO: 653237 - DNA, 75 bp, synthetic construct
  source 1..75: mol_type = other DNA
gcctctgaacttgctgccgccatgaagcagattaaagaactccagcgcctgctcggcaagaaaacgatggaaaat

SEQ ID NO: 653238 - DNA, 75 bp, synthetic construct
  source 1..75: mol_type = other DNA
agcgtctgctcggcaaaaaaacgatggaaaatgaactccttaaagaagccgttgaatatgggcgagcaaaaaagt

SEQ ID NO: 653239 - DNA, 75 bp, synthetic construct
  source 1..75: mol_type = other DNA
ctgctgtagccgccggagaacaggttgttcctgcctctgaacttgctgccgccatgaagcagattaaagaactcc

SEQ ID NO: 653240 - DNA, 75 bp, synthetic construct
  source 1..75: mol_type = other DNA
ggataacagtccaatggaacgcttcttccgcagtctgaaaacagaatgggtgccaaccgatggctacacaggcaa

SEQ ID NO: 653241 - DNA, 75 bp, synthetic construct
  source 1..75: mol_type = other DNA
gggtgatgttccaggcgatcaaggcagtcattatacgagcaggcagttccggcagttactgtggcgataccagat

SEQ ID NO: 653242 - DNA, 75 bp, synthetic construct
  source 1..75: mol_type = other DNA
gaagggaaagatttcaaagagattgacctgctggcgcgccagtctgaacgccacgcgcggatcggcaagtttaac

SEQ ID NO: 653243 - DNA, 75 bp, synthetic construct
  source 1..75: mol_type = other DNA
tggcagaagtggaggaaatgcgcacccgtattctggcgatgcgtcaggaactggtgaacgtactggcagcgacca

SEQ ID NO: 653244 - DNA, 75 bp, synthetic construct
  source 1..75: mol_type = other DNA
tgccggagcgcaattttgattacctgcttaagcaacgcggcatgttcagctataccggtttaagcgccgctcagg

SEQ ID NO: 653245 - DNA, 75 bp, synthetic construct
  source 1..75: mol_type = other DNA
ggtcgcatgtgtgtcgccgggttaaatacggcaaatgtacaacgtgtggcaaaggcgtttgctgcggtgatgtaa

SEQ ID NO: 653246 - DNA, 75 bp, synthetic construct
  source 1..75: mol_type = other DNA
ggaaaatgaactcattaaagaagccgttgaatatgggcgtgcaaaaaagtggatagcgcacgcgcccttattacc

SEQ ID NO: 653247 - DNA, 75 bp, synthetic construct
  source 1..75: mol_type = other DNA
atgacggtgtcccacgtggcgcgtttgcatggaattcagcccagtctgttgtttaagtggaagaaacaataccag

SEQ ID NO: 653248 - DNA, 75 bp, synthetic construct
  source 1..75: mol_type = other DNA
tcgttgcccggcaacatggtgtagcagccagccagttatttctctggtgtaagcaataccaggaaggaagtctta

SEQ ID NO: 653249 - DNA, 75 bp, synthetic construct
  source 1..75: mol_type = other DNA
cgtggtcagccgcgggacgtcatgttccatagcgaccagggaagtcaatatacaggactgaaatatcaacaactt

SEQ ID NO: 653250 - DNA, 75 bp, synthetic construct
  source 1..75: mol_type = other DNA
cacttcctcggtgggatccacgaactgtatttcccgtatgtgctgatgaagccgctgaccattattgccatgatt

SEQ ID NO: 653251 - DNA, 75 bp, synthetic construct
  source 1..75: mol_type = other DNA
tgttctgggtagtttgtatgcgttgcgtacaagagccaatgtggcaactgaaaccgcaaatatacaaacaattat

SEQ ID NO: 653252 - DNA, 75 bp, synthetic construct
  source 1..75: mol_type = other DNA
acagtgatggaaaagtcactactgaagaagccagtacgcaatgcaaggcagataatggcagcactggtacaaaca

SEQ ID NO: 653253 - DNA, 75 bp, synthetic construct
  source 1..75: mol_type = other DNA
gcttcttccgaagtctgaagaatgactgggtgccagtaacggattacgtaagcttcagctatgcagcccacgcaa

SEQ ID NO: 653254 - DNA, 75 bp, synthetic construct
  source 1..75: mol_type = other DNA
atgaaaattacattactggttaccttgcttttcggtctggtttttttaaccaccgtcggcgctgccgagagaacc

SEQ ID NO: 653255 - DNA, 75 bp, synthetic construct
  source 1..75: mol_type = other DNA
ccgcacgaatataatggtgggttacccccaaacgaatcggaaaatcgatactggaaaaactctaacgcggtggcc

SEQ ID NO: 653256 - DNA, 75 bp, synthetic construct
  source 1..75: mol_type = other DNA
ggtccatcgcagcagctacaaatactggaaaaaccgtcctgaaaagccagacggcagacgggctgtattacgcag

SEQ ID NO: 653257 - DNA, 75 bp, synthetic construct
  source 1..75: mol_type = other DNA
atcacttaggtgatgttgatttgtattatcccggtgccagtcttggcatagtagaagtcgatcctgaaacaaccg

SEQ ID NO: 653258 - DNA, 75 bp, synthetic construct
  source 1..75: mol_type = other DNA
cgatatcgcgatgtatcaggagaaaaaacacaaacagaaaacaccttttgtcgcgcatccagcgctacattcatg

SEQ ID NO: 653259 - DNA, 75 bp, synthetic construct
  source 1..75: mol_type = other DNA
gttccacagcgatagtaataatgccggtatcagtttttatcatcactctgtttgctgtttaaccagactggtgtg

SEQ ID NO: 653260 - DNA, 75 bp, synthetic construct
  source 1..75: mol_type = other DNA
tccaggagctgcgcaaagtggcttccgggatggctattcacaaaaaatggcgacaaacctatttttccacgccat

SEQ ID NO: 653261 - DNA, 75 bp, synthetic construct
  source 1..75: mol_type = other DNA
gagtggggaccggttatcccggaagggaaggtcgagatcactatcagtaagtacgagaaaacggcgggtgcagcc

SEQ ID NO: 653262 - DNA, 75 bp, synthetic construct
  source 1..75: mol_type = other DNA
aaatgtacgcgcttggagtattaagttcttattttcgtccccaggttagcaatgataacccttattccgaatcgc

SEQ ID NO: 653263 - DNA, 75 bp, synthetic construct
  source 1..75: mol_type = other DNA
tgatgccagagtatgggtaaaccgttttgtaaactggtacaactttgaacataaacacagcgggatcaaatacgt

SEQ ID NO: 653264 - DNA, 75 bp, synthetic construct
  source 1..75: mol_type = other DNA
aggttggtgagcgcctcaataagctgcatcaaaatggcgagattattggtcgtctcggcggcgatgaatttttag

SEQ ID NO: 653265 - DNA, 75 bp, synthetic construct
  source 1..75: mol_type = other DNA
gaccagttatagtggattggactcaacgattttacttaacacatctgcaattccggataattacaaagatacaac

SEQ ID NO: 653266 - DNA, 75 bp, synthetic construct
  source 1..75: mol_type = other DNA
ctatgctgtatggtttaaagagatcgatggcgaaggacagggggtcgcgcagggcactacggtgaccaacaagtt

SEQ ID NO: 653267 - DNA, 75 bp, synthetic construct
  source 1..75: mol_type = other DNA
acgtcgccgattttcactaaacaatgtgcgagtaatccctggtctttctggtacagatgccagcattcgcctggg

SEQ ID NO: 653268 - DNA, 75 bp, synthetic construct
  source 1..75: mol_type = other DNA
caaagcgacatcagcaacagactggggttgacgcggcttaaggtatcgcgcctgctggaaaaggggcatcagtct

SEQ ID NO: 653269 - DNA, 75 bp, synthetic construct
  source 1..75: mol_type = other DNA
atgaagaaattacaggtaaccgtaaagcctcttcagggaacaattctgttccgtattttgcagcgtggtcgtgtt

SEQ ID NO: 653270 - DNA, 75 bp, synthetic construct
  source 1..75: mol_type = other DNA
gtcggtactggagaaaggccgtgtgttttccgctatctcgccgatggatgaaccgccccgggaatcctggagact

SEQ ID NO: 653271 - DNA, 75 bp, synthetic construct
  source 1..75: mol_type = other DNA
tgaaagaagaaaacgcccgtaagcaacgtgacatggcacagcgtgaaattgatgacattcgctttgtcatgagca

SEQ ID NO: 653272 - DNA, 75 bp, synthetic construct
  source 1..75: mol_type = other DNA
ggaactgcatcgaagcgttatttttcaagtcctgaaagcgcagcttacaaaggaatttggatcaaaccagaaacc

SEQ ID NO: 653273 - DNA, 75 bp, synthetic construct
  source 1..75: mol_type = other DNA
ctgaaacgaccgatgcagacagtgccctgcatgctgccgatatcgcgatgtatcaggagaaaaaacacaaacaga

SEQ ID NO: 653274 - DNA, 75 bp, synthetic construct
  source 1..75: mol_type = other DNA
atgtggggtagtgatcaattctgggcggagttcgtgcagcctggtagaacctgcaagccttgtgtggcgcggggt

SEQ ID NO: 653275 - DNA, 75 bp, synthetic construct
  source 1..75: mol_type = other DNA
ttaccttcccggagccaattgatgaagcattattgacgctggaacgcgatcgcgttgaacagcagtcgctgctat

SEQ ID NO: 653276 - DNA, 75 bp, synthetic construct
  source 1..75: mol_type = other DNA
ggcgtctgcgacgtcgcaggatgttctggcggacaggattctggctgatgatgataccggtacttctgctgtgtg

SEQ ID NO: 653277 - DNA, 75 bp, synthetic construct
  source 1..75: mol_type = other DNA
aggcattttcaaagacctaaccaaacatactgatgtgatcctgaaaaaatcgtatgaagtgatgcatggggaatt

SEQ ID NO: 653278 - DNA, 75 bp, synthetic construct
  source 1..75: mol_type = other DNA
cctttgcgcctaacatcactttttcggtgctgtatacccgtaatggtcagtacagttttcagaacgccgggggct

SEQ ID NO: 653279 - DNA, 75 bp, synthetic construct
  source 1..75: mol_type = other DNA
gtcaatttcgctaaacctggcaactacaatctgacattacgcgataaagacggcttaattctcgccgggttaagc

SEQ ID NO: 653280 - DNA, 75 bp, synthetic construct
  source 1..75: mol_type = other DNA
cgtggagcgaacgggcagagcaagttttgcagctattcgccggactgattgcgcaatacattcaaaaagaggctc

SEQ ID NO: 653281 - DNA, 75 bp, synthetic construct
  source 1..75: mol_type = other DNA
ttatgcaaacgcgccattgatgaaaactgctttttcagcgatgaagtccctgaccgttggggcgactgtattgcg

SEQ ID NO: 653282 - DNA, 75 bp, synthetic construct
  source 1..75: mol_type = other DNA
ggatatttcgtcgctgcgagaacgtattcaacagcaaatacgtggagaatatcacttaggtgatgttgatttgta

SEQ ID NO: 653283 - DNA, 75 bp, synthetic construct
  source 1..75: mol_type = other DNA
atacctaaatttaaagaattagcccctttatctcagactaaagaaaaacgagatgaacggttagaatttacatta

SEQ ID NO: 653284 - DNA, 75 bp, synthetic construct
  source 1..75: mol_type = other DNA
ggattttctaaatgactatatgttagaaaatcgagatatagacgaaactaaacaaaactcaatgaaacaagagtt

SEQ ID NO: 653285 - DNA, 75 bp, synthetic construct
  source 1..75: mol_type = other DNA
gcacaatatattcaaaaagaggcgctggttgagcaattacgtgaagccaatgccgctttgattgcgcagtcgtat

SEQ ID NO: 653286 - DNA, 75 bp, synthetic construct
  source 1..75: mol_type = other DNA
atatgaagtggatgccacggatgaagaaatctctgttgaatgtgatctgaatgcaaatatggcggggattgtatc

SEQ ID NO: 653287 - DNA, 75 bp, synthetic construct
  source 1..75: mol_type = other DNA
gacagcagcgggcagcatcaggatgagggtagcacattgactaaaacgggggcgggtacgctggagctgaccgcc

SEQ ID NO: 653288 - DNA, 75 bp, synthetic construct
  source 1..75: mol_type = other DNA
ggtcatgggcgtgatatcgaaatgcgcgctgatggcgaaattgtggttgatgatggtgctgtgacgcagtggggc

SEQ ID NO: 653289 - DNA, 75 bp, synthetic construct
  source 1..75: mol_type = other DNA
tgtcgatactcgctctgcgatggctggtcatgggcgtgatatcgaaatgcgcgctgatggcgaaattgtggttga

SEQ ID NO: 653290 - DNA, 75 bp, synthetic construct
  source 1..75: mol_type = other DNA
tcagctcaccattgcgcaaaacggcagctacgtgctggcaggggcgcagtcgatggcgctaaccggcgatatagt

SEQ ID NO: 653291 - DNA, 75 bp, synthetic construct
  source 1..75: mol_type = other DNA
ccattaccggcattggtgaaccgacttctacaggtattaaagtggttgatttcactgctgatcccacgcaatttc

SEQ ID NO: 653292 - DNA, 75 bp, synthetic construct
  source 1..75: mol_type = other DNA
gttaactccattacagggattggtgagccgacatcgacaggcattaaagtggttgatttcgcagctgatcccacg

SEQ ID NO: 653293 - DNA, 75 bp, synthetic construct
  source 1..75: mol_type = other DNA
ttgctggcactggcagcggaaaacccggatttaacccgcgtgcgccataacggtctggatgatagcccgcagttg

SEQ ID NO: 653294 - DNA, 75 bp, synthetic construct
  source 1..75: mol_type = other DNA
cgaacgctacgaaaaaggggtggcgaaaattctccaccgtagcctgcgctggattgtgatttatgtcctgctgct

SEQ ID NO: 653295 - DNA, 75 bp, synthetic construct
  source 1..75: mol_type = other DNA
gttttcctcgtgatgtatctgttcctgcaaaacttccgcgcaacgctgattcccactatcgccgtgccggtggtg

SEQ ID NO: 653296 - DNA, 75 bp, synthetic construct
  source 1..75: mol_type = other DNA
gtgtcgaagaaggcaccctgaaaggtgatgttgcggatatccttccttatgcttcgtcactgtgggttggtgatg

SEQ ID NO: 653297 - DNA, 75 bp, synthetic construct
  source 1..75: mol_type = other DNA
gagcggaattttcactattaccagaaaatgaaactggaatgactctgtttgccaataacaccgttacaggagaat

SEQ ID NO: 653298 - DNA, 75 bp, synthetic construct
  source 1..75: mol_type = other DNA
tcaatctctggtatgtgcgtaacaaagacggcggcatggtgcccttctctgctttcgcgacctcacactgggaaa

SEQ ID NO: 653299 - DNA, 75 bp, synthetic construct
  source 1..75: mol_type = other DNA
caatgatggtaaaggtggcgctatttattctatcaataatgatatttatttaagtgatgtcatttttgataataa

SEQ ID NO: 653300 - DNA, 75 bp, synthetic construct
  source 1..75: mol_type = other DNA
gataacagcccgatggagcgcttcttcaggagtctgaaaaacgagtggataccggtgacgggttacatgaactga

SEQ ID NO: 653301 - DNA, 75 bp, synthetic construct
  source 1..75: mol_type = other DNA
ttttgcccgcagggttatcggctggagcctgtcagcgaatgccgatactgcactgataagcagtgccttgcggat

SEQ ID NO: 653302 - DNA, 75 bp, synthetic construct
  source 1..75: mol_type = other DNA
agactaaattcgctatcgccacttttattggcgatgaaaagatgtttcgtgaggctgtcgaagcctacaggaaat

SEQ ID NO: 653303 - DNA, 75 bp, synthetic construct
  source 1..75: mol_type = other DNA
tataacggtggcttaacgccaaatgaatcagagcggctgttccacgaacagtcaggtcgtgtggccaaaattagt

SEQ ID NO: 653304 - DNA, 75 bp, synthetic construct
  source 1..75: mol_type = other DNA
aacagcttcaacgaggctcagagcgcgataatccgctacatcacaggctattacagtgccatccggccccactgg

SEQ ID NO: 653305 - DNA, 75 bp, synthetic construct
  source 1..75: mol_type = other DNA
atggatgccggtggtgggttacgtaagcttcagcgaggcagctcacgcataacggactatatcgttggatattac

SEQ ID NO: 653306 - DNA, 75 bp, synthetic construct
  source 1..75: mol_type = other DNA
gataccggtgccgccgatttacgtgtcactaacgccgtatttcacaataacatcgctaatgacggcaaaggcggt

SEQ ID NO: 653307 - DNA, 75 bp, synthetic construct
  source 1..75: mol_type = other DNA
tcaggcagagtatgagtcggcgtggcaactgctgggataacagcccaatggagcgcttcttcaggagtctgaaga

SEQ ID NO: 653308 - DNA, 75 bp, synthetic construct
  source 1..75: mol_type = other DNA
tggtgcggtgatgtgacctatatctggacgggtaagcgctgggcgtacctcgccgttgttctctacctgtttgca

SEQ ID NO: 653309 - DNA, 75 bp, synthetic construct
  source 1..75: mol_type = other DNA
tggtgcgcaaaacgagaatgcgccaaaggcaagcgacgttaacgcaacgcttggtctgatccgcgaaaacaatga

SEQ ID NO: 653310 - DNA, 75 bp, synthetic construct
  source 1..75: mol_type = other DNA
ctccatgttcaactaccagcgtcactggtgggaagccggaaaaactaaccgcatccgcaacctgctgaagtcacg

SEQ ID NO: 653311 - DNA, 75 bp, synthetic construct
  source 1..75: mol_type = other DNA
actggctcgatcaggtgcaaataacgttggtctgaccgcgttacgtggtctggctggagttgctgatatttataa

SEQ ID NO: 653312 - DNA, 75 bp, synthetic construct
  source 1..75: mol_type = other DNA
gatggagcgacgcgatcacgctggtggcgatggtcagacgctgaatttacgtgttatcggcggagattatcatta

SEQ ID NO: 653313 - DNA, 75 bp, synthetic construct
  source 1..75: mol_type = other DNA
tcaggatattcagtcaattgatgctacttccagcggcactatcgacatcagcgatggtacggttttgcgcctgac

SEQ ID NO: 653314 - DNA, 75 bp, synthetic construct
  source 1..75: mol_type = other DNA
gatgggattgaagctaatggagctggggcaaaaaggtaagccgtcagcagacttaattaagggattaaattctga

SEQ ID NO: 653315 - DNA, 75 bp, synthetic construct
  source 1..75: mol_type = other DNA
gaggatgcacaacaagatatcccaatggctgagggtccatatgccactttgctaaaaaaaatagccaagcttcag

SEQ ID NO: 653316 - DNA, 75 bp, synthetic construct
  source 1..75: mol_type = other DNA
tacttgacaagggcgagagggttatagatcaacgcaccaacggtgatttaaaagatttccttgctaataataaag

SEQ ID NO: 653317 - DNA, 75 bp, synthetic construct
  source 1..75: mol_type = other DNA
atctggtctgactggatctcttcgtgggatcgctggctctgctggtttggctgctggtggtatcggcttagttgc

SEQ ID NO: 653318 - DNA, 75 bp, synthetic construct
  source 1..75: mol_type = other DNA
caggttatcccttagtcaaagctcttctgggtctgaatcagtatcgtcaaccggatgatcaatcccccttggttg

SEQ ID NO: 653319 - DNA, 75 bp, synthetic construct
  source 1..75: mol_type = other DNA
atatcacgcgctctgcctttacagcaggcgaaactgttgctgattaccttgatgcctttgatgtggatctgtttt

SEQ ID NO: 653320 - DNA, 75 bp, synthetic construct
  source 1..75: mol_type = other DNA
tagtgattggcatcagcgcgactgcgctttttgatatgagtgaatccgatcgcatgttttgcgaaacctatgcga

SEQ ID NO: 653321 - DNA, 75 bp, synthetic construct
  source 1..75: mol_type = other DNA
ccaggcatatacatcaacaagttacagtgatggcgatggcggggcaatcgatgttaccgataataatagcgacag

SEQ ID NO: 653322 - DNA, 75 bp, synthetic construct
  source 1..75: mol_type = other DNA
gttatgaaaagccggatgttatcaacattgcgcatttgcttgctcatgtcattgagggactggagcagggattct

SEQ ID NO: 653323 - DNA, 75 bp, synthetic construct
  source 1..75: mol_type = other DNA
gcaactggagctgggggatacataccggggccagtttttcacgccctggagtgtggccagcatgatggcacagat

SEQ ID NO: 653324 - DNA, 75 bp, synthetic construct
  source 1..75: mol_type = other DNA
gcaactggaactgggggataaataccggagtcagtttttcacgccctggagtgttgccagcatgatggcacagat

SEQ ID NO: 653325 - DNA, 75 bp, synthetic construct
  source 1..75: mol_type = other DNA
gagcattaccggttacggaagagcaaacgccgcatagcggaagagctctatgaaaagcatcctgactggtgcttt

SEQ ID NO: 653326 - DNA, 75 bp, synthetic construct
  source 1..75: mol_type = other DNA
atgattaatccttctgaagttggcaaatcaggtgaaatggttcgccttcgtactctggaaagtatctggatacaa

SEQ ID NO: 653327 - DNA, 75 bp, synthetic construct
  source 1..75: mol_type = other DNA
attgagggactggagcagggattctgtgattttctggggagtgtgttcatgcaactggaactgggggataaatac

SEQ ID NO: 653328 - DNA, 75 bp, synthetic construct
  source 1..75: mol_type = other DNA
tcaagaagcttcaatccatcttgctgcaacgccccggcggtgaccgtgacatggtggaaattctggcccttgtat

SEQ ID NO: 653329 - DNA, 75 bp, synthetic construct
  source 1..75: mol_type = other DNA
gcccgtgaagccctgattgacgccctactgacaggacgcaaccagattttcctttctgccagtaaggcacaggcc

SEQ ID NO: 653330 - DNA, 75 bp, synthetic construct
  source 1..75: mol_type = other DNA
tggtcgatgcgagcgacgggcaggtaagtctggcaaacaataatagttatttgggcacaacacaaatcgcctccg

SEQ ID NO: 653331 - DNA, 75 bp, synthetic construct
  source 1..75: mol_type = other DNA
ctgagggactggagcagggattctgtgattttctgggcagcgtgttcatgcaactggagctgggggataagtacc

SEQ ID NO: 653332 - DNA, 75 bp, synthetic construct
  source 1..75: mol_type = other DNA
atggcgtatatacaactgtcgctgtgtggtgtggccggagaagtggtgattggtaactcgctgtgtaatgagcga

SEQ ID NO: 653333 - DNA, 75 bp, synthetic construct
  source 1..75: mol_type = other DNA
ttacagacagccctgatgccgtcagggcatcaattgaacacatgcttcaggagctgaacaatgagatcgaacatc

SEQ ID NO: 653334 - DNA, 75 bp, synthetic construct
  source 1..75: mol_type = other DNA
ctagtggttatgattatcaggattcaaatagcccgtttgaaccgccccggttttcctggagagtgttttatctgt

SEQ ID NO: 653335 - DNA, 75 bp, synthetic construct
  source 1..75: mol_type = other DNA
tttggcttcccggtgaagctggattatcaattgccgcctcgcctggtgccttcgcatcaggcaatccacttgttg

SEQ ID NO: 653336 - DNA, 75 bp, synthetic construct
  source 1..75: mol_type = other DNA
acgaactgaaaaatacgattattcttgcggccagaggtatgaaccttctcgacgaagcgacattccagaacacgc

SEQ ID NO: 653337 - DNA, 75 bp, synthetic construct
  source 1..75: mol_type = other DNA
tctgccacgaagaaagtcaaactctccagtttatgcagaattactattctgtcgaaattcttcctgtcagcatgg

SEQ ID NO: 653338 - DNA, 75 bp, synthetic construct
  source 1..75: mol_type = other DNA
tcctgttcggtatttatcttctattaatggcaggcaaagtttttgccttcagttgtaatgtcgatggcgggtcaa

SEQ ID NO: 653339 - DNA, 75 bp, synthetic construct
  source 1..75: mol_type = other DNA
gagttgcgaagagtacagcgccaaatttggcttcccggtgaagctggattatcaattgccgcctcgtctggtgcc

SEQ ID NO: 653340 - DNA, 75 bp, synthetic construct
  source 1..75: mol_type = other DNA
ccgcgtccgccgtcgtgaatcaggtggcaccgaagtggtggtcacctttattcccgaaaaaactttcacagacgt

SEQ ID NO: 653341 - DNA, 75 bp, synthetic construct
  source 1..75: mol_type = other DNA
ccaccccccctagcaacgaggtcgagatattacacaatgccttcattgaactggcccgtaaaatatcctgtcagt

SEQ ID NO: 653342 - DNA, 75 bp, synthetic construct
  source 1..75: mol_type = other DNA
ccgaaaagtcagtcaactcgactggaaattcaataacgctgcaattattaaaggtgcaattaattgggatttgat

SEQ ID NO: 653343 - DNA, 75 bp, synthetic construct
  source 1..75: mol_type = other DNA
tcgacgtgcagagtcttactgaagattacgacattggtttccgcctgaaagaaaaaggtatgacggaaatttttg

SEQ ID NO: 653344 - DNA, 75 bp, synthetic construct
  source 1..75: mol_type = other DNA
agctggaaaaagcgtgataagtggggcgagtatggcccactcgatcagatgcagctcaccactgcagcccgctat

SEQ ID NO: 653345 - DNA, 75 bp, synthetic construct
  source 1..75: mol_type = other DNA
aatatcagttcgttattcatgacgccacgcattggatgagaaaagtatatccagcagcaccgcagcaggatggtg

SEQ ID NO: 653346 - DNA, 75 bp, synthetic construct
  source 1..75: mol_type = other DNA
cagctttttgagctggcacgtcttgagcatggtgctataaaacctcaactggagcaattttctgtctgtgaactt

SEQ ID NO: 653347 - DNA, 75 bp, synthetic construct
  source 1..75: mol_type = other DNA
agcatcgggagtgggtgtctctctgatgcgtaatggaaaaatactggctacgggagaaaatgtctccctggggac

SEQ ID NO: 653348 - DNA, 75 bp, synthetic construct
  source 1..75: mol_type = other DNA
tgctgcattggctgtttctcagaacatggggaacattgcaaacatcaagtctactaacgttagcggtatggctca

SEQ ID NO: 653349 - DNA, 75 bp, synthetic construct
  source 1..75: mol_type = other DNA
accggatttaccccaacgggtcaaggtggaggcgtcaccggaccatcgaaaaaagaacaagaagaagccaagaag

SEQ ID NO: 653350 - DNA, 75 bp, synthetic construct
  source 1..75: mol_type = other DNA
taaatttaatgcaatcgataaagagaaatcggacgctgaacaagattataaaaccgataaactcaagattgatgg

SEQ ID NO: 653351 - DNA, 75 bp, synthetic construct
  source 1..75: mol_type = other DNA
aggaagccgcagaaaaagcacagaaagcacgcgaggatgcaatcaagcgactgaatgcacttgatgttaaattgc

SEQ ID NO: 653352 - DNA, 75 bp, synthetic construct
  source 1..75: mol_type = other DNA
attattgacaagtacaataaagaaaagcgttggaataatctggcagattgggaaaaggccgcgatccgtggtgct

SEQ ID NO: 653353 - DNA, 75 bp, synthetic construct
  source 1..75: mol_type = other DNA
ctgaacaagattatgtgaaccgccccgggtttcctggagagtgttttatctgtgaactcaggctgccagatcatc

SEQ ID NO: 653354 - DNA, 75 bp, synthetic construct
  source 1..75: mol_type = other DNA
atgaggctattgtttctattgcgctggaaaaatatggcgcatcgacggcccttattatggcatttggtatggtgg

SEQ ID NO: 653355 - DNA, 75 bp, synthetic construct
  source 1..75: mol_type = other DNA
ggcttaagtgcaacttatggacagacaggaagcaaggtcgcagctggagcagtacagtcagtcattggcgttaca

SEQ ID NO: 653356 - DNA, 75 bp, synthetic construct
  source 1..75: mol_type = other DNA
tatattgctcaagtgagcaaaagctctcattttatctttcgggcgctaccactgacagtgcccgacaagtgtttg

SEQ ID NO: 653357 - DNA, 75 bp, synthetic construct
  source 1..75: mol_type = other DNA
cgctgtttgtattgctggtcgcctggaatatttttgccaaaaataaagtcgctactaaggcgcaagagacgagtg

SEQ ID NO: 653358 - DNA, 75 bp, synthetic construct
  source 1..75: mol_type = other DNA
ccttcttgcctgtgttgctactgcctgttctcggggcgattgggtttgccaataccacgttttctgatgctgatt

SEQ ID NO: 653359 - DNA, 75 bp, synthetic construct
  source 1..75: mol_type = other DNA
attgtactgggtggcggcgcaacggtcctggtcgggtcgttaaatccactgggaagtatgtttgaacatgctttt

SEQ ID NO: 653360 - DNA, 75 bp, synthetic construct
  source 1..75: mol_type = other DNA
cggccacgaggtcaacttcatctgcgccgacgatgcccacggcacgccgatcatgcttaaagctcagcagcttgg

SEQ ID NO: 653361 - DNA, 75 bp, synthetic construct
  source 1..75: mol_type = other DNA
gctgaagtgattggtgaagcgtgggaaagccgcgaatttggtaaagcagtgcgcgaaatcatggcgctggctgac

SEQ ID NO: 653362 - DNA, 75 bp, synthetic construct
  source 1..75: mol_type = other DNA
agaaggttctgacaaactgctgcgcctgacgctggatctcggcggtgaaaaacgcaatgtcttctccggcattcg

SEQ ID NO: 653363 - DNA, 75 bp, synthetic construct
  source 1..75: mol_type = other DNA
ttgttgcccggcaacacggtatggcagccagccagttatttctctggcgcaagcaataccaggagggaagtctta

SEQ ID NO: 653364 - DNA, 75 bp, synthetic construct
  source 1..75: mol_type = other DNA
cctgcctctgaacttgctgccgccatgaagcagattaaagaactccagcgcctgctcggcaagaaaacgatggaa

SEQ ID NO: 653365 - DNA, 75 bp, synthetic construct
  source 1..75: mol_type = other DNA
ggaaggccgcgatgccgacctgcaggcaatttgctcgatgggcataaacctgttccgcgtgctgatgacttacct

SEQ ID NO: 653366 - DNA, 75 bp, synthetic construct
  source 1..75: mol_type = other DNA
tctgggttcgttaccagcgaatgcgcggccacgaggttaatttcatctgtgccgacgatgcccacggtacgccga

SEQ ID NO: 653367 - DNA, 75 bp, synthetic construct
  source 1..75: mol_type = other DNA
gcgcttcggtatctccgaaggcatggtgatggctgctggccccggcgggaaggatatcttcctgttaagcccgga

SEQ ID NO: 653368 - DNA, 75 bp, synthetic construct
  source 1..75: mol_type = other DNA
aggagcaggtggcgaacaaaatgcaggaatggtttgaatccggcctgcaacagtgggatatctcccgagatgcgc

SEQ ID NO: 653369 - DNA, 75 bp, synthetic construct
  source 1..75: mol_type = other DNA
cgctgattgaaaatgcagagtttgttgaaggttctgacaaactgctgcgactgacactggatctcggcggtgaaa

SEQ ID NO: 653370 - DNA, 75 bp, synthetic construct
  source 1..75: mol_type = other DNA
gccggtcctggcgggaaagatattttcctgctaagcccggatgctggtgctaaaccgggtcatcaggtgaaataa

SEQ ID NO: 653371 - DNA, 75 bp, synthetic construct
  source 1..75: mol_type = other DNA
ctgacgctggatctcggcggtgaaaaacgcaatgtcttctccggtattcgttctgcttacccggatccgcaggca

SEQ ID NO: 653372 - DNA, 75 bp, synthetic construct
  source 1..75: mol_type = other DNA
aataagcaggtcatttcttcccaagctgactcgctgattaaaatttcgcggatctgggccgatttttttcccgta

SEQ ID NO: 653373 - DNA, 75 bp, synthetic construct
  source 1..75: mol_type = other DNA
tgacgcgccattactggaagtgatggattacgcggtcattgtgaaagggctaaaccgggaaggcattcatctgca

SEQ ID NO: 653374 - DNA, 75 bp, synthetic construct
  source 1..75: mol_type = other DNA
gccgtttacgcgaagcgaatgttcccgtcattctctgtagcagtaaaacatcagcggaaatgctgtacttgcaaa

SEQ ID NO: 653375 - DNA, 75 bp, synthetic construct
  source 1..75: mol_type = other DNA
tggcagcctgccgctccctggttaaaccgtttacgggaagcaggtgtgcctgtgattctctgtagcagtaaaacg

SEQ ID NO: 653376 - DNA, 75 bp, synthetic construct
  source 1..75: mol_type = other DNA
tggcagaagtggaggaaatgcgcacccgtattctggcgatgcgccagcaactggtgaaggtattaagcgcagaaa

SEQ ID NO: 653377 - DNA, 75 bp, synthetic construct
  source 1..75: mol_type = other DNA
agcctcatggcgcttcgctttatttaccgatggaagggcttaacagctatcgccatgccattgcgccgctgctgt

SEQ ID NO: 653378 - DNA, 75 bp, synthetic construct
  source 1..75: mol_type = other DNA
ctggcgacccgattcttacgcttatggagcgttttaaagaagaccctcgcagcgacaaagtgaatttaagtatcg

SEQ ID NO: 653379 - DNA, 75 bp, synthetic construct
  source 1..75: mol_type = other DNA
gtcttactgctgtcgccgccggagaacaggttgttcctgcctctgaacttgctgccgccatgaagcagattaaag

SEQ ID NO: 653380 - DNA, 75 bp, synthetic construct
  source 1..75: mol_type = other DNA
agacaaaactatctggcttatcgctttcaacgtcttcttcgtttacgcggtttactgtggcctgacattacattc

SEQ ID NO: 653381 - DNA, 75 bp, synthetic construct
  source 1..75: mol_type = other DNA
tccattcctgaaaaacatctatctattgcccgttgcgctggtggggcttacggcatcattaaccaatactgtctg

SEQ ID NO: 653382 - DNA, 75 bp, synthetic construct
  source 1..75: mol_type = other DNA
aagcaataccaggaaggaagtctcactgctgtagccgccggagaacaggttattccgacctctgaacttgctgca

SEQ ID NO: 653383 - DNA, 75 bp, synthetic construct
  source 1..75: mol_type = other DNA
ctgaacttgctgctgccatgaagcagattaaagaactccagcgcctgctcggcaaaaaaacgatggaaaatgaac

SEQ ID NO: 653384 - DNA, 75 bp, synthetic construct
  source 1..75: mol_type = other DNA
aagcaataccaggaaggaagtcttactgctgtggccgccggagaacaggttgttcctgcctctgaacttactgcc

SEQ ID NO: 653385 - DNA, 75 bp, synthetic construct
  source 1..75: mol_type = other DNA
ggagaacaggtcgttcctgcctctgaacttgctgccgccatgaagcagattaaagaactccagcgcctgctcggc

SEQ ID NO: 653386 - DNA, 75 bp, synthetic construct
  source 1..75: mol_type = other DNA
tcaaaaaactgaccgaacagtacaacgtgacctacatcggcatcgactcgacaggtgtcggccacggggtttacg

SEQ ID NO: 653387 - DNA, 75 bp, synthetic construct
  source 1..75: mol_type = other DNA
ggggcagtatcagtttattttccctggtcgaatccagcacagtaagccgatgagtgaaatggcgatgaacgtgct

SEQ ID NO: 653388 - DNA, 75 bp, synthetic construct
  source 1..75: mol_type = other DNA
cgcgttactggtcatgggttccggcataccatgagtacaattttgcatgagcagggttataactccgcgtggata

SEQ ID NO: 653389 - DNA, 75 bp, synthetic construct
  source 1..75: mol_type = other DNA
gcccgcagcttcccttgcatcaggatgaagctccccctgcattccaggtcacttacagtatagagaaaaaggaaa

SEQ ID NO: 653390 - DNA, 75 bp, synthetic construct
  source 1..75: mol_type = other DNA
cgtgttgcaggcgtacacgggaaatatactcgttaagctggctatgaggcttctgatactgacggggactcgtcc

SEQ ID NO: 653391 - DNA, 75 bp, synthetic construct
  source 1..75: mol_type = other DNA
ttttgaagtcagtacttacccctggtatgacgaagctactaacggcgtacgcttcaatgagttactggcaacact

SEQ ID NO: 653392 - DNA, 75 bp, synthetic construct
  source 1..75: mol_type = other DNA
gcgggcagcagaaatgttggagtgcatgatgctgtcgtactgggaaaggcactgggcatatctcctcctgaactc

SEQ ID NO: 653393 - DNA, 75 bp, synthetic construct
  source 1..75: mol_type = other DNA
tgattgagctatttgaagtccggctaaaagaaatcgacgagtatgtagaaaaatatttgaggggcaggcttaaag

SEQ ID NO: 653394 - DNA, 75 bp, synthetic construct
  source 1..75: mol_type = other DNA
tctggctttttgtactgacgaggaagggttgataattgattctgtgcttagtgctcaacttgtgcgttccgggaa

SEQ ID NO: 653395 - DNA, 75 bp, synthetic construct
  source 1..75: mol_type = other DNA
caggagattgattttgataatcgtctgtgggaagtgccgaaagaacgaatgaaaatgcgccgtcctcattgcgtg

SEQ ID NO: 653396 - DNA, 75 bp, synthetic construct
  source 1..75: mol_type = other DNA
ggtcgtattcaccacagtaagccaatgagtgaaatggcgatgaatgtgctcattcgtcgtatcggctatgccggg

SEQ ID NO: 653397 - DNA, 75 bp, synthetic construct
  source 1..75: mol_type = other DNA
tcctgtcagtatcaggattcagaaaatgaaaccaaaacgatggtggcatttatcagaaaagaggatcttcccaca

SEQ ID NO: 653398 - DNA, 75 bp, synthetic construct
  source 1..75: mol_type = other DNA
agaagtcttatcgtgcatcctggatatcattggcgatatgccagcatacgggtatcgccgtgtctgggcgatact

SEQ ID NO: 653399 - DNA, 75 bp, synthetic construct
  source 1..75: mol_type = other DNA
aatctgctgacgagttgttggcgctgttaacatcagtacgtcagggaatgacggcaggagaagtggctgcccact

SEQ ID NO: 653400 - DNA, 75 bp, synthetic construct
  source 1..75: mol_type = other DNA
agccagccagttatttctctggcgcaagcaataccagaagggaagtcttactgctgtggccgcaggagaacaggt

SEQ ID NO: 653401 - DNA, 75 bp, synthetic construct
  source 1..75: mol_type = other DNA
attaaagaactccagcgcctgctcggcaaaaaaacgatggaaaatgaactccttaaagaagccgttgaatacggg

SEQ ID NO: 653402 - DNA, 75 bp, synthetic construct
  source 1..75: mol_type = other DNA
acttcgccaaagaagtggaggtggagctgaaaggcgatccgatggtgcttcctaacggggccacgctgtacttcc

SEQ ID NO: 653403 - DNA, 75 bp, synthetic construct
  source 1..75: mol_type = other DNA
atggtcgccgcgatagatgcagcggatgccatgctcaaagcagctaacgttcgtctgctcagtcacgaagtgctt

SEQ ID NO: 653404 - DNA, 75 bp, synthetic construct
  source 1..75: mol_type = other DNA
atgatcaatgcactgggattgctggaagtggacggcatggtcgccgcgatagatgcggcggatgccatgctgaaa

SEQ ID NO: 653405 - DNA, 75 bp, synthetic construct
  source 1..75: mol_type = other DNA
atactcagacggcagtcccgaaatgaaggcttgccgttcgtgaatgcaaagcgcgtttaccgaataatgagcgaa

SEQ ID NO: 653406 - DNA, 75 bp, synthetic construct
  source 1..75: mol_type = other DNA
ccagctcattatgaaggagcacaaagaagggaaagactttaaagaaattgacctgctggcgcgccagtctgagcg

SEQ ID NO: 653407 - DNA, 75 bp, synthetic construct
  source 1..75: mol_type = other DNA
taacgaatggcatccgcatagtgcactgggttatcgctcgccacgggaatatcgacgtcagcgggtaacgtcaac

SEQ ID NO: 653408 - DNA, 75 bp, synthetic construct
  source 1..75: mol_type = other DNA
ccttaaagaagccgttgaatacgggcgtgcaaaaaagtggatagcgcacgcgcccttattgcccggggatgggga

SEQ ID NO: 653409 - DNA, 75 bp, synthetic construct
  source 1..75: mol_type = other DNA
aagcaataccaggaaggaagtcttactgctgtgaccgccggagaacaggttgttcctgcctctgaacttgctgcc

SEQ ID NO: 653410 - DNA, 75 bp, synthetic construct
  source 1..75: mol_type = other DNA
cagaacggttcgtgaaaacgatgaaggaagactacatcgcgttcatgccgaaaccgaatgtaagaacggcattgc

SEQ ID NO: 653411 - DNA, 75 bp, synthetic construct
  source 1..75: mol_type = other DNA
caggcgttgtttgtgcaggcggaaaactgtaccgcgtgtgatgcccgtctggccagcctgctggccggcaaacag

SEQ ID NO: 653412 - DNA, 75 bp, synthetic construct
  source 1..75: mol_type = other DNA
ctggacccgctgacagcactgggtattgaggcccggacaccggctgagcgccgggcgtatgccgaaaagtgggtg

SEQ ID NO: 653413 - DNA, 75 bp, synthetic construct
  source 1..75: mol_type = other DNA
cggtgagctgttgattcgccagtatgaatttatccagtcgtttttaggcagcgaagcggattttctttaccagga

SEQ ID NO: 653414 - DNA, 75 bp, synthetic construct
  source 1..75: mol_type = other DNA
ggttctgataatcaaaagcaggaaagcgatgttaataaacagggtaatttctgtttgcgtgaatggccatgttct

SEQ ID NO: 653415 - DNA, 75 bp, synthetic construct
  source 1..75: mol_type = other DNA
ggaacgcctccggcgtggcgcacgacagtggtggccggctggcgctgttcgtcaggtcaaaagactgcgctacct

SEQ ID NO: 653416 - DNA, 75 bp, synthetic construct
  source 1..75: mol_type = other DNA
cctctcgcttcagtacggactgaccaccacaccggtggtgatgcaacagttaccggatgggcggtggcgtccggt

SEQ ID NO: 653417 - DNA, 75 bp, synthetic construct
  source 1..75: mol_type = other DNA
cggcgagctgttgattcgccagtatgaatttattcagtcttttttaggcggcgaagcggattttttatatcagga

SEQ ID NO: 653418 - DNA, 75 bp, synthetic construct
  source 1..75: mol_type = other DNA
tctgcatgattcgccgcgccagcgaggagttgctggcggtaaacgatgagattacgcatcactatgagcagttac

SEQ ID NO: 653419 - DNA, 75 bp, synthetic construct
  source 1..75: mol_type = other DNA
gctggctgcgctttggcgacggaatgatgccggtgttgctgcaacagggagaaaaaggatggcatatcgccgcat

SEQ ID NO: 653420 - DNA, 75 bp, synthetic construct
  source 1..75: mol_type = other DNA
cggcgagctgttgattcgccagtatgaatttattcagtcttttttaggcagcgaagcggattttctgtaccagga

SEQ ID NO: 653421 - DNA, 75 bp, synthetic construct
  source 1..75: mol_type = other DNA
cggtgagctgttgattcgccagtatgaatttatccagtcgtttttaggcaacgaagcagattttctgtatcagga

SEQ ID NO: 653422 - DNA, 75 bp, synthetic construct
  source 1..75: mol_type = other DNA
atgggcatagccatcagcgacacagcctgctgaaaatgctcaatgtcagtgtaaatcgtgacggtctggcgcagg

SEQ ID NO: 653423 - DNA, 75 bp, synthetic construct
  source 1..75: mol_type = other DNA
taacatgacgctggaaaatccttcaccagagctgctcacgctgttgatccgtgaactgaccgggaggggacgatg

SEQ ID NO: 653424 - DNA, 75 bp, synthetic construct
  source 1..75: mol_type = other DNA
ctggcagcctgagttcacagataaaacactctccaggaaaaccggggcggttcaaacctcttctgacactggcgt

SEQ ID NO: 653425 - DNA, 75 bp, synthetic construct
  source 1..75: mol_type = other DNA
gcacaatcaagcttttaccgggcgtactggccgatgaagttaactacattggtaagggagttgagaagcgtttac

SEQ ID NO: 653426 - DNA, 75 bp, synthetic construct
  source 1..75: mol_type = other DNA
aattgggaatttcctgcggaatgggagttcctgctaattcttggctttgcgcagcctctgcccgcaggcacgtca

SEQ ID NO: 653427 - DNA, 75 bp, synthetic construct
  source 1..75: mol_type = other DNA
caggactggcgaaaagaacctcgtaaaaagtattcgaatgaattcaaacttcgtatggttgaactggcatcacaa

SEQ ID NO: 653428 - DNA, 75 bp, synthetic construct
  source 1..75: mol_type = other DNA
taacatgacgctggaaaatccatcgccagagctgctcacggtgttaatccgcgaactgagcgggaggggaagatg

SEQ ID NO: 653429 - DNA, 75 bp, synthetic construct
  source 1..75: mol_type = other DNA
taagaatgaatatgtttccgtgttaggaaactataaagtaagtccgtttaaagaaactcatagcgacactgcatg

SEQ ID NO: 653430 - DNA, 75 bp, synthetic construct
  source 1..75: mol_type = other DNA
gcaacaaattggtgcccgactgctggcacgaaccaatcgcagtgtattgctgacggcagcaggaaaacagtttct

SEQ ID NO: 653431 - DNA, 75 bp, synthetic construct
  source 1..75: mol_type = other DNA
aacgctggatatgggattgctgcgtaacacagcgttaccggagacgcttgaacacgcagtcatcgtccatgaacc

SEQ ID NO: 653432 - DNA, 75 bp, synthetic construct
  source 1..75: mol_type = other DNA
gcttaacgaaccattgaatcctgagactggcttttggcaaaatccgcaggcgatgtcaaataagcccctacgctg

SEQ ID NO: 653433 - DNA, 75 bp, synthetic construct
  source 1..75: mol_type = other DNA
gttccgtcacggtaaaatgacgctggaaaatccttcgccagagctgctcacggtgttgctccgtgaactgaccgg

SEQ ID NO: 653434 - DNA, 75 bp, synthetic construct
  source 1..75: mol_type = other DNA
tctgactcccgtcatcactcaggaaatgggagaggcgatgaccatcattggccttgtttctgccggtcttggcgt

SEQ ID NO: 653435 - DNA, 75 bp, synthetic construct
  source 1..75: mol_type = other DNA
aacaaattgcgccgcttgtcgaagggacgctggatatgggactactgcgtaatacgccgttaccggagacgctcg

SEQ ID NO: 653436 - DNA, 75 bp, synthetic construct
  source 1..75: mol_type = other DNA
acgtgtctgggccgaaaagtgggtcagggctgaatatgaacgaacggagaaggagctggcgtttcagcaggaggt

SEQ ID NO: 653437 - DNA, 75 bp, synthetic construct
  source 1..75: mol_type = other DNA
ctggcctttctgattttccgttttctgcgacgtctgggggaaaaacaggctcaggatgaacgtattggtggacgt

SEQ ID NO: 653438 - DNA, 75 bp, synthetic construct
  source 1..75: mol_type = other DNA
acgtttcccggtgattatccggctgttcgtatgagtatgcgttacgaaaagataaaggactgtgcagaggatctg

SEQ ID NO: 653439 - DNA, 75 bp, synthetic construct
  source 1..75: mol_type = other DNA
tgattaccgagctggagaaagacaaaaacctcgccatgcttggcgcatgctcctccggtacggcttacatcagcg

SEQ ID NO: 653440 - DNA, 75 bp, synthetic construct
  source 1..75: mol_type = other DNA
gtcgggatccttaaaaagattaagtggcctgataaggttaaaaaccttgagttgcttgggcgtcatgtttctgtt

SEQ ID NO: 653441 - DNA, 75 bp, synthetic construct
  source 1..75: mol_type = other DNA
attcggcggcgtgcgggtgacgttgatcaacttcatttttatggcgattttcagcgccctgctgttccttacctt

SEQ ID NO: 653442 - DNA, 75 bp, synthetic construct
  source 1..75: mol_type = other DNA
aagtggttctactttccagatgatcgccgtcatctttcgccagataaccatttatcgggtgaagatgaaaggcgg

SEQ ID NO: 653443 - DNA, 75 bp, synthetic construct
  source 1..75: mol_type = other DNA
ctgccggacgggatggatgatcgcgcagtgaactatctgttcaaaacgccgggcggttccctgtatcacagcggc

SEQ ID NO: 653444 - DNA, 75 bp, synthetic construct
  source 1..75: mol_type = other DNA
ttgttatagaagtaaagccagaggtaaagcgcagactttactctgcattggcaagcgaaggtatatcacttaaag

SEQ ID NO: 653445 - DNA, 75 bp, synthetic construct
  source 1..75: mol_type = other DNA
atcaagattattcaggtcgatggtctgaatcgtggcggcgctgcgggtgatgcaaacacgggtaatgtggggggc

SEQ ID NO: 653446 - DNA, 75 bp, synthetic construct
  source 1..75: mol_type = other DNA
tacgtgcctttctgttgcgtatacggtcgctggaaatgagcggggaaacctcgccgcgtgcgaccgtgacccgtg

SEQ ID NO: 653447 - DNA, 75 bp, synthetic construct
  source 1..75: mol_type = other DNA
atgagtaaagtgaaaagtatcacccgtgaatcctggatcctgagcactttcccggagtggggtagctggttgaat

SEQ ID NO: 653448 - DNA, 75 bp, synthetic construct
  source 1..75: mol_type = other DNA
accgtactgcactgatcaccctacctgccgatcaaaaagcggctggcgtactgccagatggcatggacgatcgcg

SEQ ID NO: 653449 - DNA, 75 bp, synthetic construct
  source 1..75: mol_type = other DNA
agatttaaacgccactcaggcagctatcagggcgggttacagcgagaaaactgctcgctccactggtagcgagaa

SEQ ID NO: 653450 - DNA, 75 bp, synthetic construct
  source 1..75: mol_type = other DNA
gattgtgcctttataatgattctgatcgccgtgttacagctaagtttttgaactcagttgataacacccttgcga

SEQ ID NO: 653451 - DNA, 75 bp, synthetic construct
  source 1..75: mol_type = other DNA
gtctggcatccggcgttgttcaacaccgcgctctattgctgcttgttttatttgatatcgcgactgttcgtttga

SEQ ID NO: 653452 - DNA, 75 bp, synthetic construct
  source 1..75: mol_type = other DNA
agtgagctgttcatgactcacccgccgctggataaacgtattgaagctctgcgcaccggtgaatacctgaagtaa

SEQ ID NO: 653453 - DNA, 75 bp, synthetic construct
  source 1..75: mol_type = other DNA
gctgcaaagcctacaacgacaaaaacggcgagctgttgattcgccagtatgaatttattcagtcttttttaggcg

SEQ ID NO: 653454 - DNA, 75 bp, synthetic construct
  source 1..75: mol_type = other DNA
cctgctgaaaatgcttaatgtcagtgtaaatcgtgacggtctggcgcaggtttttgcctggcttccggctgtgca

SEQ ID NO: 653455 - DNA, 75 bp, synthetic construct
  source 1..75: mol_type = other DNA
gctgcagctagcgtaaggttgtttgctatcatcagtagggcttattttatggcattcggcacaagtagtcttcga

SEQ ID NO: 653456 - DNA, 75 bp, synthetic construct
  source 1..75: mol_type = other DNA
atcgaccagatggatgtgctcgacattctcctgcaaaacggtgatctaaaacccattaaagactggcctaaggta

SEQ ID NO: 653457 - DNA, 75 bp, synthetic construct
  source 1..75: mol_type = other DNA
tcataagatcgctgccatttcgcagggaaaagcgcacccaatgtacgtgccgatgtgggtcgatgacgaagagct

SEQ ID NO: 653458 - DNA, 75 bp, synthetic construct
  source 1..75: mol_type = other DNA
ggaccagtcagaacagaaattaccaacttaacgccggagcaggctgcagaagcgtataaaaaaatgatgggctaa

SEQ ID NO: 653459 - DNA, 75 bp, synthetic construct
  source 1..75: mol_type = other DNA
accttgagctgctaggtaagcacgtagacgtgcaggcgtttaaagaaaacataaagaccgagcagacgggaacaa

SEQ ID NO: 653460 - DNA, 75 bp, synthetic construct
  source 1..75: mol_type = other DNA
tctcacgagctaaccggcaaagacggcggcgcaatccagatagaaacatcaccgatgagcactctattcggaaaa

SEQ ID NO: 653461 - DNA, 75 bp, synthetic construct
  source 1..75: mol_type = other DNA
acccattaaagactggcctaaggtatggcgcacaacgctatcaggaatggatgtcgtggagatggtatccgcaga

SEQ ID NO: 653462 - DNA, 75 bp, synthetic construct
  source 1..75: mol_type = other DNA
gcgaaccggatctgctgctgctctcttatcatggcattccccagcgttatgcagatgaaggcgatgattacccgc

SEQ ID NO: 653463 - DNA, 75 bp, synthetic construct
  source 1..75: mol_type = other DNA
aatgttatcccccttcctgttcttgatgaacatcactacagtgcaacagaggttggtaaacagtttggcgtcact

SEQ ID NO: 653464 - DNA, 75 bp, synthetic construct
  source 1..75: mol_type = other DNA
cgacctcgatcaccaatggctgcccgatgtttttactcagggcgtattgtggacaggactgattgcggcatgggc

SEQ ID NO: 653465 - DNA, 75 bp, synthetic construct
  source 1..75: mol_type = other DNA
caggagccacggtattgccgaaatatataaaatacatggttgctgcactgagcctaactcattgattttaacatc

SEQ ID NO: 653466 - DNA, 75 bp, synthetic construct
  source 1..75: mol_type = other DNA
gaaccgttactggtggtgagtatggctggtgtcgtgctgttcatcgtactggctattctgcagccgatcctgcaa

SEQ ID NO: 653467 - DNA, 75 bp, synthetic construct
  source 1..75: mol_type = other DNA
cgggaaaaaatacgaatatattccggcgcttaatgctacaccggagcatatcgaaatgatggctaatcttgttgc

SEQ ID NO: 653468 - DNA, 75 bp, synthetic construct
  source 1..75: mol_type = other DNA
ctcccttctcgggttgggcgtgccggaaatggcgcagcttatcctgccattaagcctgttcctcgggctgctgat

SEQ ID NO: 653469 - DNA, 75 bp, synthetic construct
  source 1..75: mol_type = other DNA
gattgttctgaacctttgggatacggtgccggtccgccgtctgcgcgccagtttttcgcgtaaaggagcggtgtg

SEQ ID NO: 653470 - DNA, 75 bp, synthetic construct
  source 1..75: mol_type = other DNA
ctgcgagtttcatcgacattgagcatcaatggttacccgacgtatttactcagggcatattgtggacaggcctga

SEQ ID NO: 653471 - DNA, 75 bp, synthetic construct
  source 1..75: mol_type = other DNA
aatgttgctttaatcgcatcatgctgcggcctgatatatgccgttattacaaaaagaggatcaaccacactgcct

SEQ ID NO: 653472 - DNA, 75 bp, synthetic construct
  source 1..75: mol_type = other DNA
ggctgatgctcaaagggcgctgccgtgactgtcaggcgaaaatcagcaagcgttatccgctggtggagttattga

SEQ ID NO: 653473 - DNA, 75 bp, synthetic construct
  source 1..75: mol_type = other DNA
taccgctgagcgtggttaacccgcgtcaggacgcgtactatcgatgctgccagccatgctgctgtatctactttt

SEQ ID NO: 653474 - DNA, 75 bp, synthetic construct
  source 1..75: mol_type = other DNA
aaggtatttttgattttctatatcgcctgcgtagtgattacctgggcggtatatggtcggcattctaaaaaataa

SEQ ID NO: 653475 - DNA, 75 bp, synthetic construct
  source 1..75: mol_type = other DNA
cagtgctgacctgattgccggcagggacatggcactcagtggtaaggaggtcagcattagcgccgtcacagaccg

SEQ ID NO: 653476 - DNA, 75 bp, synthetic construct
  source 1..75: mol_type = other DNA
tggcgtggcggcgacactggccgggcgtgagcgtgtggacttaggggtacagaccctgaataaccggacgcacag

SEQ ID NO: 653477 - DNA, 75 bp, synthetic construct
  source 1..75: mol_type = other DNA
cccggcagcactgaatcaggcccgtgcagagcttgaggcagcaggaaaaccgttcacggaacaggatgtggcaca

SEQ ID NO: 653478 - DNA, 75 bp, synthetic construct
  source 1..75: mol_type = other DNA
ggcgctgactgctgagcagatggcgttactgaccggggatattgtctggctggttaacaccacggtgacactgcc

SEQ ID NO: 653479 - DNA, 75 bp, synthetic construct
  source 1..75: mol_type = other DNA
gtgaaccggtcattctgttgccggggcagcagtttgaagtcagcacacctcagggcagtatccatgttgccgggc

SEQ ID NO: 653480 - DNA, 75 bp, synthetic construct
  source 1..75: mol_type = other DNA
ggactcaggaacatccacgtattattaccgcatcaggaaaaaaggaaaggataagcagggggagaaaacctctca

SEQ ID NO: 653481 - DNA, 75 bp, synthetic construct
  source 1..75: mol_type = other DNA
agttcccggatgtgcagattctgcactacgccttcttcggaccgtttattggcgcactggcacgttctgcgggag

SEQ ID NO: 653482 - DNA, 75 bp, synthetic construct
  source 1..75: mol_type = other DNA
accgataccgcagcggcactgggctttatctctgcgattggcgctattggcggcttcttcatcccgaaagctttc

SEQ ID NO: 653483 - DNA, 75 bp, synthetic construct
  source 1..75: mol_type = other DNA
ggtgtgggtgccgttccttgccatcttcaccattgccgcatggtttggcatgaacgaccttgctacctcgaaagc

SEQ ID NO: 653484 - DNA, 75 bp, synthetic construct
  source 1..75: mol_type = other DNA
ttgaaaatggacattatgattggggatgtgttgttaatgatgttctgccaaatatatgcaaaggcaatgcgcgca

SEQ ID NO: 653485 - DNA, 75 bp, synthetic construct
  source 1..75: mol_type = other DNA
aatggcgctattctgcgtgcatttcgctggaacgtctgcatgggggctggtgcaggtgatggtgtcagaaacaaa

SEQ ID NO: 653486 - DNA, 75 bp, synthetic construct
  source 1..75: mol_type = other DNA
gttgctgaaccgtgttgatacatcaactgtgccagataatgagcggcctgatataccacaaaagtatgtgtcttg

SEQ ID NO: 653487 - DNA, 75 bp, synthetic construct
  source 1..75: mol_type = other DNA
atatgcattggcgctcaattgtgaacaagtccatgtgatggcaggcgtcgtgcccgctggcgaagatgctgaacg

SEQ ID NO: 653488 - DNA, 75 bp, synthetic construct
  source 1..75: mol_type = other DNA
caggattatggtcgtaaaggcagctccttcgcgccgttctttgcggtggaaaatgtcgccacaaccaatggcacg

SEQ ID NO: 653489 - DNA, 75 bp, synthetic construct
  source 1..75: mol_type = other DNA
gtattgttggtgctttgaaaaaaggtgaagccgtatggttcgctcccgaccaggattatggtcgtaaaggaagct

SEQ ID NO: 653490 - DNA, 75 bp, synthetic construct
  source 1..75: mol_type = other DNA
gagaagatgattgccgaaaactttcgttcactcggcatggcgctggtagaaaccggcatggcatggttctggccc

SEQ ID NO: 653491 - DNA, 75 bp, synthetic construct
  source 1..75: mol_type = other DNA
tcgtaaccactttggaagaagaactggtatcaatgcaggaattaactgttttgccagtattcgccaaaatctcca

SEQ ID NO: 653492 - DNA, 75 bp, synthetic construct
  source 1..75: mol_type = other DNA
caatgaaaaaatacaaaagccaaaaaaaatagcaaagaaaaaaactccagcacctgtaattgagctagataaata

SEQ ID NO: 653493 - DNA, 75 bp, synthetic construct
  source 1..75: mol_type = other DNA
agttgatggaatgggtgcagacccgtggtcgcatgcgctctaacaaagcgatgatcggcagaaataatctgcgcg

SEQ ID NO: 653494 - DNA, 75 bp, synthetic construct
  source 1..75: mol_type = other DNA
aacatgacgctggaaaatccgtcaccagagctgctcacggtgttgatccgtgaactgaccgggagaggacgatga

SEQ ID NO: 653495 - DNA, 75 bp, synthetic construct
  source 1..75: mol_type = other DNA
gcatcacaacccggagcttgtgttgcacagattgcacgtgaaaatggcgtcaatgataatgttattttcaaatgg

SEQ ID NO: 653496 - DNA, 75 bp, synthetic construct
  source 1..75: mol_type = other DNA
gttccgtcacggtaaaatgacgctggaaaatccttcaccagagctgctcacggtgttgatccgtgaactgagcgg

SEQ ID NO: 653497 - DNA, 75 bp, synthetic construct
  source 1..75: mol_type = other DNA
aatttggccacctgaacagaggtgatatgctcacctcagaacaacacaggtgctctaatgaaaaaaagaaatttt

SEQ ID NO: 653498 - DNA, 75 bp, synthetic construct
  source 1..75: mol_type = other DNA
cccagattgcacgagaaaatggcgtcaatgatgatgttattttcaaatggctcagactctggcaaaacgaagggc

SEQ ID NO: 653499 - DNA, 75 bp, synthetic construct
  source 1..75: mol_type = other DNA
aacatgacgctggaaaatccttcaccagatctgctcacagtgttgctccgtgaactgagcgggaggggacaatga

SEQ ID NO: 653500 - DNA, 75 bp, synthetic construct
  source 1..75: mol_type = other DNA
gaatactttcgcctatgagtcattggctgttctccagactctaaaagtcgattatgaacgtcagttatcaaaatt

SEQ ID NO: 653501 - DNA, 75 bp, synthetic construct
  source 1..75: mol_type = other DNA
atgatctactttatccaagaaaaagtggatatagagcatatcttgaggctaaacaagcaggaaagaagataattt

SEQ ID NO: 653502 - DNA, 75 bp, synthetic construct
  source 1..75: mol_type = other DNA
gcggcgatattcctttcatcatgaacctggtgcgcgatgggataacatctggcgcatttttctatgccgagggca

SEQ ID NO: 653503 - DNA, 75 bp, synthetic construct
  source 1..75: mol_type = other DNA
tgttgcaggtaagctgcaggaaaacggtcattggattgttgatgctaacctcttttctactgaggcgacgcaccc

SEQ ID NO: 653504 - DNA, 75 bp, synthetic construct
  source 1..75: mol_type = other DNA
gaagtagagacacgggaagttgcacaaacgcaacacaatatcagcaatgcagagataaccgaagctatccaagac

SEQ ID NO: 653505 - DNA, 75 bp, synthetic construct
  source 1..75: mol_type = other DNA
cctgtacccggagcagcgttagccacatggtccttgagcccggcagaaactccgttatgggcggctcagacggca

SEQ ID NO: 653506 - DNA, 75 bp, synthetic construct
  source 1..75: mol_type = other DNA
cattggtgataatgtcgaagctgatgtgaaaaaagcaaaatcaaggaatattaaaccgtttcatttaaagaaagc

SEQ ID NO: 653507 - DNA, 75 bp, synthetic construct
  source 1..75: mol_type = other DNA
tacgttgccgtaaataatattgctgcagatggttgttctttacctcataagttctatggattccgctctctttct

SEQ ID NO: 653508 - DNA, 75 bp, synthetic construct
  source 1..75: mol_type = other DNA
caatgttaaggacaattgagcctgagcgagatcagcaaaagattttcgtcgacttccacaccacaggcatgaagc

SEQ ID NO: 653509 - DNA, 75 bp, synthetic construct
  source 1..75: mol_type = other DNA
attttcgtaaaaaacacaaccggaagtgctatttcagaatttgacgtcagaggaataaattattacggtaaatac

SEQ ID NO: 653510 - DNA, 75 bp, synthetic construct
  source 1..75: mol_type = other DNA
tcacttaacgccttaacagtaagaaaatgtcgtcttgaagctggtgagttaaaagatattgggcgttggactcca

SEQ ID NO: 653511 - DNA, 75 bp, synthetic construct
  source 1..75: mol_type = other DNA
tgttgatagttctaactcgaagataggaaatggtcgctggcttattggtattgatggcgcactcgatgtttttga

SEQ ID NO: 653512 - DNA, 75 bp, synthetic construct
  source 1..75: mol_type = other DNA
gtcctgtgaactttcgtttcgaaagtgggtacgttaaagcctataagggaatttcctttcttaaaaacattgccg

SEQ ID NO: 653513 - DNA, 75 bp, synthetic construct
  source 1..75: mol_type = other DNA
gatcggatcattgggggactggatgagcatagtacaacttcagcaattgaattatacaaacttttcgttaaaaaa

SEQ ID NO: 653514 - DNA, 75 bp, synthetic construct
  source 1..75: mol_type = other DNA
cgggatggccattcacaaaaaatggcgacaaacctacttttccacgccgtccagcctgactcacagtgcctatcc

SEQ ID NO: 653515 - DNA, 75 bp, synthetic construct
  source 1..75: mol_type = other DNA
cggtaacatgacgctggaaaatccatcgccagagctgctcacggtgttgatccgtgaactgaccgggaggggaag

SEQ ID NO: 653516 - DNA, 75 bp, synthetic construct
  source 1..75: mol_type = other DNA
caaagccagacttttggcgtcgcctgggacgacccagccaccaccgcaccggaagcgtttcgctttgatatctgc

SEQ ID NO: 653517 - DNA, 75 bp, synthetic construct
  source 1..75: mol_type = other DNA
tggattttattggtgccatggatatatcaacaccaacccccagctctatgaatgaaagtacggcgaagggaatat

SEQ ID NO: 653518 - DNA, 75 bp, synthetic construct
  source 1..75: mol_type = other DNA
actcgatgaaaatacttctcttgttgggatcgagccgtcggtatatcaacagatagaagcagcaatcaactctgg

SEQ ID NO: 653519 - DNA, 75 bp, synthetic construct
  source 1..75: mol_type = other DNA
atccacaggatttcgcctggcagggcttaacgctgacacccgctgccgtggtccacatccgtgagctggtggcaa

SEQ ID NO: 653520 - DNA, 75 bp, synthetic construct
  source 1..75: mol_type = other DNA
ttctggttatcaagagaaaaagaccagtttgttttctctgacagatttgacgcagtgaaaagaattatcgaacta

SEQ ID NO: 653521 - DNA, 75 bp, synthetic construct
  source 1..75: mol_type = other DNA
tggctagaacgaaaacagaataagtatatttttagtaatagactcgctacagtaaaaagaatcatcgagttacga

SEQ ID NO: 653522 - DNA, 75 bp, synthetic construct
  source 1..75: mol_type = other DNA
tatcacaggtacgctaatgaagtcggattaatactggatctggatagtgaggtgtatcagcgtgaaaagactcac

SEQ ID NO: 653523 - DNA, 75 bp, synthetic construct
  source 1..75: mol_type = other DNA
tgaagatccctaagtgggtttatgaccgtattactgaaataacggattatgtcgtgggggatacgcaatgggctg

SEQ ID NO: 653524 - DNA, 75 bp, synthetic construct
  source 1..75: mol_type = other DNA
atccagaggatttcgcctggcaaggcttaacgctaacaccggcagcggcagcacacatccgtgagttggtggcga

SEQ ID NO: 653525 - DNA, 75 bp, synthetic construct
  source 1..75: mol_type = other DNA
gtggcccgccatgttggcgagctggacgatatttcacacacgatatggggcatcattcgccactggctacctgca

SEQ ID NO: 653526 - DNA, 75 bp, synthetic construct
  source 1..75: mol_type = other DNA
aactcgcccggctggttggcgttcaggggacgccggcaaccatcattggcgacgagatgatccccggcgcggtat

SEQ ID NO: 653527 - DNA, 75 bp, synthetic construct
  source 1..75: mol_type = other DNA
agtaccgtatcgctaagttaagcgttttcgaacagctgaaggtatcccgcaagctgctgccggttctggcgggtc

SEQ ID NO: 653528 - DNA, 75 bp, synthetic construct
  source 1..75: mol_type = other DNA
tgggttccggtatttacccggggcgaactgatgtttgatgatattgacttgctaaccatgctgcagctggtggcg

SEQ ID NO: 653529 - DNA, 75 bp, synthetic construct
  source 1..75: mol_type = other DNA
ggctggcggcggcgggatcgccagtacagtcaacgccacgcgacaggccagcgaaagccagttgctggagagcgc

SEQ ID NO: 653530 - DNA, 75 bp, synthetic construct
  source 1..75: mol_type = other DNA
tgccagcaaagtagcatcgacttccgtctgcgtacccgttatgtcgataaacaagcgaaagatctcgatgatgca

SEQ ID NO: 653531 - DNA, 75 bp, synthetic construct
  source 1..75: mol_type = other DNA
gcgaagtcaccagcggtacgccaggctgctatcgtcaggctgtatgtatcggctctgcgcttaacattacggcga

SEQ ID NO: 653532 - DNA, 75 bp, synthetic construct
  source 1..75: mol_type = other DNA
ccggatgagcagaaagaacctgtggcggccattgcgccgtctttatccacttccactcagaccagagtcagtgcc

SEQ ID NO: 653533 - DNA, 75 bp, synthetic construct
  source 1..75: mol_type = other DNA
tctggcgctgagttattacctgtggagataacgcccgatgagcagaaagaatcaatagctgctcttactctatct

SEQ ID NO: 653534 - DNA, 75 bp, synthetic construct
  source 1..75: mol_type = other DNA
caaagccagacttttggcgtcgcctgggacgatcctgccaccactgcgccagacgcgtttcgctttgatatttgc

SEQ ID NO: 653535 - DNA, 75 bp, synthetic construct
  source 1..75: mol_type = other DNA
tgatgtcagatttcgggagcattcgctcccgtttgcctgctgacggcaaaatcgacaccgtgaaattcgagcagt

SEQ ID NO: 653536 - DNA, 75 bp, synthetic construct
  source 1..75: mol_type = other DNA
aaacttctgccggtactggcgggaatgatgtcagatttcgggagcattcgctcccgtttgcctgctgacggcaaa

SEQ ID NO: 653537 - DNA, 75 bp, synthetic construct
  source 1..75: mol_type = other DNA
aacatgacgctggaaaatccttcaccagagctgctcactgtgttgatcagtgaactgaccgggaggggacgatga

SEQ ID NO: 653538 - DNA, 75 bp, synthetic construct
  source 1..75: mol_type = other DNA
ttatgaagtcgcacgcgttcagccggtaaaactggccgcaatggaaggggagtggcaaaccgaacccgcacctgc

SEQ ID NO: 653539 - DNA, 75 bp, synthetic construct
  source 1..75: mol_type = other DNA
aagcggctgcattcaaagaggcatacattgcgcagtttaaccgcatggctaactggatagcagagagatgtgagg

SEQ ID NO: 653540 - DNA, 75 bp, synthetic construct
  source 1..75: mol_type = other DNA
atgacggttctggcgctggttccgcctgaatcactggatatgccggaaatgaaagcgaagacgaagaaaacaaag

SEQ ID NO: 653541 - DNA, 75 bp, synthetic construct
  source 1..75: mol_type = other DNA
ttcgcggggaatggtacaaagcccggatgctgggagaggcccgcacgacggaaatcacggtggcaggctggcgcg

SEQ ID NO: 653542 - DNA, 75 bp, synthetic construct
  source 1..75: mol_type = other DNA
tttcgtcactcgtttgctacgcatctattacaagcggggcgtgatattcgcactgtgcaagaactcttagggcat

SEQ ID NO: 653543 - DNA, 75 bp, synthetic construct
  source 1..75: mol_type = other DNA
gcgactggcattactacgcgttcgctattggtctcattttcattcttaatggtgtggtgggattgttgggattcg

SEQ ID NO: 653544 - DNA, 75 bp, synthetic construct
  source 1..75: mol_type = other DNA
ctttcattgcgcgccttgtattagggatgcacccgcctgtatgggccaaaaaaacggcatcccatcaaaaaaagt

SEQ ID NO: 653545 - DNA, 75 bp, synthetic construct
  source 1..75: mol_type = other DNA
ttcgctgtggttcggtaagaacggtatacatgactatactcgcgtcaataatgatgtggcggcacagcaagctac

SEQ ID NO: 653546 - DNA, 75 bp, synthetic construct
  source 1..75: mol_type = other DNA
ttgtagaaccaggatccgggatagagatcaacacactgggacgactggtcttcgacattaaaaccgcacaggccg

SEQ ID NO: 653547 - DNA, 75 bp, synthetic construct
  source 1..75: mol_type = other DNA
gaacgtaaaactaacgcccaactgtctgaaataccttattttgaatgctacacagatattccggcgatggtgcaa

SEQ ID NO: 653548 - DNA, 75 bp, synthetic construct
  source 1..75: mol_type = other DNA
tcatggggcgcgacaaaaccggcgacctggttgactgctctgtggtgcattcgtccgggaaatggaaaggcgtgc

SEQ ID NO: 653549 - DNA, 75 bp, synthetic construct
  source 1..75: mol_type = other DNA
tcggcctgctactggttggcgtggcgactatgccgtggatggcgaaaatcggcgtcttactggcgggggccgggt

SEQ ID NO: 653550 - DNA, 75 bp, synthetic construct
  source 1..75: mol_type = other DNA
aatcagggggcggcgctggcaacttacaccgtatttatggatttatcgcttggcgtgactggaccactggctggg

SEQ ID NO: 653551 - DNA, 75 bp, synthetic construct
  source 1..75: mol_type = other DNA
tatgacgcttcagtggggatcccgctgtcaaaaccggccggatttaaaacagaccctgtggtcaccacgttcagt

SEQ ID NO: 653552 - DNA, 75 bp, synthetic construct
  source 1..75: mol_type = other DNA
tttaaccccgtcagccaggtgaagtttgtgcacacggtgatggcgggctacgtgacaggagcgatgttcattatg

SEQ ID NO: 653553 - DNA, 75 bp, synthetic construct
  source 1..75: mol_type = other DNA
ttgccatcaaaatccctgcgctgttagggatcctcgccactcactcattagataagcctgtaccagggttgaaaa

SEQ ID NO: 653554 - DNA, 75 bp, synthetic construct
  source 1..75: mol_type = other DNA
agggatcctcgccactcactcattagataagcccgttccggggctgaaaaatttgatggctgaaacctatccacg

SEQ ID NO: 653555 - DNA, 75 bp, synthetic construct
  source 1..75: mol_type = other DNA
tatgatagcttgcggttcgctgctgttactggtgatgctaattgcgctcgtccagacgctacgcggcaaaatcga

SEQ ID NO: 653556 - DNA, 75 bp, synthetic construct
  source 1..75: mol_type = other DNA
cctttgtcggtctgttcttcttcggctggcaacggctgaataaataccagcatctgctggtgacctggctggtgg

SEQ ID NO: 653557 - DNA, 75 bp, synthetic construct
  source 1..75: mol_type = other DNA
gctggcagtttgcactgaccgcgctgtaccactttttattcgtgccccttaccctggggctgatttttttgctgg

SEQ ID NO: 653558 - DNA, 75 bp, synthetic construct
  source 1..75: mol_type = other DNA
gaaaaagtggcgatcaaatcccgcgcgccgattcgcttaacggtccaaccggcgcgggcaagtcatttctggcgc

SEQ ID NO: 653559 - DNA, 75 bp, synthetic construct
  source 1..75: mol_type = other DNA
ctgagtccgattatgcaacatgccgaaacaataggcatggggatgagcggtcagaaatacacagaaagcttcttc

SEQ ID NO: 653560 - DNA, 75 bp, synthetic construct
  source 1..75: mol_type = other DNA
atgcctcactgaccgcaccgttttctctgggggaacagtctttcagctggaataccacctggcgcaggcaaatga

SEQ ID NO: 653561 - DNA, 75 bp, synthetic construct
  source 1..75: mol_type = other DNA
caagctgaaccggtcgatgattgccgggatttttaatgtcccggcgcacatgattaatgacctggaaaaagccac

SEQ ID NO: 653562 - DNA, 75 bp, synthetic construct
  source 1..75: mol_type = other DNA
gcgtcatacctacggtgtgtataacgaagagggtgcatttgcggtaagtccggacgacatgatccatatcagggc

SEQ ID NO: 653563 - DNA, 75 bp, synthetic construct
  source 1..75: mol_type = other DNA
catgctgctgccagccgatctggattacaaggcactgactgtgtcgccagttgacgctcaaatcattgacatgat

SEQ ID NO: 653564 - DNA, 75 bp, synthetic construct
  source 1..75: mol_type = other DNA
aatcgctctgagtcaggatcgaacgcagaaggaacttgaggatgtcctctattccagccttgaagagtataaccg

SEQ ID NO: 653565 - DNA, 75 bp, synthetic construct
  source 1..75: mol_type = other DNA
gaagcctgggccgaagaacgcaatatcacgctcaaatttaacgggatgccctgcctggttgagggagatccacaa

SEQ ID NO: 653566 - DNA, 75 bp, synthetic construct
  source 1..75: mol_type = other DNA
ccgtaacttcgcgccgatttttgaagatgttgcgcaagagcgtagcggtaaagtgcgttttgtaaaagtgaatac

SEQ ID NO: 653567 - DNA, 75 bp, synthetic construct
  source 1..75: mol_type = other DNA
tgatgccaggccacggtcacgggcatatggaacacagcaactggcggatgattaacttgccggttggcccgttgg

SEQ ID NO: 653568 - DNA, 75 bp, synthetic construct
  source 1..75: mol_type = other DNA
gctacgtggcactggcggcggtgctgctgatgccccacgcgcaggcggctgacaacctgcatttctacggcaatt

SEQ ID NO: 653569 - DNA, 75 bp, synthetic construct
  source 1..75: mol_type = other DNA
gaatgttcagtcgttattccggatggctggaaactgacgtcgcaacagcaagcgtttatagagatgtttgctgaa

SEQ ID NO: 653570 - DNA, 75 bp, synthetic construct
  source 1..75: mol_type = other DNA
gcagctatgcactgctggcggggctgatactgacaggcggtagtacgtcatttgctgcggataacaatctgcatt

SEQ ID NO: 653571 - DNA, 75 bp, synthetic construct
  source 1..75: mol_type = other DNA
aaccaatggtaataacaatattaatttcagagcctggctacaggcgaaaagtggtcgtgatgtaacaatcggcga

SEQ ID NO: 653572 - DNA, 75 bp, synthetic construct
  source 1..75: mol_type = other DNA
ttcagagcctggatccaggcgaaaagcggtcgcgatgtgacgatcggtgagtttaccgcctctttaactgcgaca

SEQ ID NO: 653573 - DNA, 75 bp, synthetic construct
  source 1..75: mol_type = other DNA
cgctttggtattcgtagcattccgacaatcatgattttcaaaaacggtcaggttgtcgacatgcttaatggcgca

SEQ ID NO: 653574 - DNA, 75 bp, synthetic construct
  source 1..75: mol_type = other DNA
atgaaaacagcacgcacttatttgcccggttacgcgctgttagcaggcctgctgctgaccgccagcacgggtgca

SEQ ID NO: 653575 - DNA, 75 bp, synthetic construct
  source 1..75: mol_type = other DNA
atgaatataaaaagccttcattcgatgaaatacgcgctgccggtagcattgatgtttgcaataagcgggccgtca

SEQ ID NO: 653576 - DNA, 75 bp, synthetic construct
  source 1..75: mol_type = other DNA
ttacccgccagtccaatttctcagcggatatcgctcacgaaattcgcacgccgattaccaatctcatcacgcaaa

SEQ ID NO: 653577 - DNA, 75 bp, synthetic construct
  source 1..75: mol_type = other DNA
atggcgactcactttgcccgagggattttaacggaaggacatttgatatctgttcgtctcccctcccggtgtcat

SEQ ID NO: 653578 - DNA, 75 bp, synthetic construct
  source 1..75: mol_type = other DNA
gctcgcaacagagggggaatgtggcctcgatatggagttacagcgagcgacccgcagttttcatagtcctcacgc

SEQ ID NO: 653579 - DNA, 75 bp, synthetic construct
  source 1..75: mol_type = other DNA
gaaaagcctgcccgatattcacagccgcgccaacaatcctaccagccggatgatgcgttttgcccagctctctac

SEQ ID NO: 653580 - DNA, 75 bp, synthetic construct
  source 1..75: mol_type = other DNA
gcggtaatagagaaatccgttgagccgatgaagtcaatcgacggtatcaagattattcaggtcgatggtctgaat

SEQ ID NO: 653581 - DNA, 75 bp, synthetic construct
  source 1..75: mol_type = other DNA
cgcgccaacaacccgaccagccggatgatgcgttttgcccagctctctaccgtgaaggctttttcgccaaattga

SEQ ID NO: 653582 - DNA, 75 bp, synthetic construct
  source 1..75: mol_type = other DNA
ctcgatatggaactccagcgcgcgacacgcgggtttcatagcccccatgcacccgataaccctattttttccagc

SEQ ID NO: 653583 - DNA, 75 bp, synthetic construct
  source 1..75: mol_type = other DNA
ttgccagccatcaggtagtgctgctatctactgatacggaagtggatgagcgttattttgttgatcaattgcgtg

SEQ ID NO: 653584 - DNA, 75 bp, synthetic construct
  source 1..75: mol_type = other DNA
gccaacatggtttgagcagcgcatttaaaaatgcgcaggaaaccattaacctgctcgattactacagcgatgtac

SEQ ID NO: 653585 - DNA, 75 bp, synthetic construct
  source 1..75: mol_type = other DNA
tccgagaatcttgatgcgcggctggaaccgacacgcgttcccattgagctggagcaactggttatctcgttcaat

SEQ ID NO: 653586 - DNA, 75 bp, synthetic construct
  source 1..75: mol_type = other DNA
agatggctggcgttttgttaggaaaagagctgcgtaaacgtaaaacacctcaggaaaaaatcgcaattattcaac

SEQ ID NO: 653587 - DNA, 75 bp, synthetic construct
  source 1..75: mol_type = other DNA
tgtgtttaatgcgcatactaaatcgtcaacgctgaaaccaggttatttctgggaattaactaaggaggctatctg

SEQ ID NO: 653588 - DNA, 75 bp, synthetic construct
  source 1..75: mol_type = other DNA
atggacgactggcgtttgggctagcgactcaacagcaagagtatatcgaacaactcagtgcattgattcataacg

SEQ ID NO: 653589 - DNA, 75 bp, synthetic construct
  source 1..75: mol_type = other DNA
ttcaggcaaaaagtgggcgagatgtgacgctcggtaatttcactgctacagcgacggcaacttttgagtatttat

SEQ ID NO: 653590 - DNA, 75 bp, synthetic construct
  source 1..75: mol_type = other DNA
taaaccgaggtggtgctgcgggggatgcggcatcaggcagcgttagtggcggaaacctggcagaacaggcattgt

SEQ ID NO: 653591 - DNA, 75 bp, synthetic construct
  source 1..75: mol_type = other DNA
cgctgaacgacgctatcaacgtactttctgacgagcaaaccagccttaaattcaagctggccttgttgcaggcgc

SEQ ID NO: 653592 - DNA, 75 bp, synthetic construct
  source 1..75: mol_type = other DNA
atggcactgctgaatatttttgatatcgccgggtcggcgttaactgcccagtcccagcgtctgaacgtggcggcc

SEQ ID NO: 653593 - DNA, 75 bp, synthetic construct
  source 1..75: mol_type = other DNA
aatgaaattggcgtttcaggcggctcctcactggcggcattgacttcatccttaagctcaacaactcccgtcgaa

SEQ ID NO: 653594 - DNA, 75 bp, synthetic construct
  source 1..75: mol_type = other DNA
cgctgaacgatgctatcaacgtactttctgatgaacaaaccagccttaaattcaaactggccttgttgcaggcgc

SEQ ID NO: 653595 - DNA, 75 bp, synthetic construct
  source 1..75: mol_type = other DNA
atcaaaattattcaggtcgatgggctgaatcgtggtggcgctacgggtgatgcaaacacgggtaatgtggggggc

SEQ ID NO: 653596 - DNA, 75 bp, synthetic construct
  source 1..75: mol_type = other DNA
aggccttaatcagtttttacttgatgttcgtgatgaaggtgttttccttttatcttcggttgaattttggattga

SEQ ID NO: 653597 - DNA, 75 bp, synthetic construct
  source 1..75: mol_type = other DNA
ataccacgctggcgacgctttccgctaacgattggggagtgattgaaaagggggcattaatcagccgtggtgact

SEQ ID NO: 653598 - DNA, 75 bp, synthetic construct
  source 1..75: mol_type = other DNA
ggcgcagtgatgattacattacggcgctttgcgactggatgggcgtcttacatgaacaggggctgattgatgcgg

SEQ ID NO: 653599 - DNA, 75 bp, synthetic construct
  source 1..75: mol_type = other DNA
gctggcgttgaattattacctgttgagataacgcctgatgagcagaaagagcctatggcggctcttactccgctt

SEQ ID NO: 653600 - DNA, 75 bp, synthetic construct
  source 1..75: mol_type = other DNA
tttaccagagctgatgtataccagcagctaaaagaaaacaaacttcatgcaatcactctggtatggcatgggaaa

SEQ ID NO: 653601 - DNA, 75 bp, synthetic construct
  source 1..75: mol_type = other DNA
tcatcgatatagcggggtgttgcttcatcattggtgacattgaccagaccttgcccttgtctgatgtaccagaaa

SEQ ID NO: 653602 - DNA, 75 bp, synthetic construct
  source 1..75: mol_type = other DNA
tcgtgatgccgatctttcatgaaataatccccatcaatatgaatactctgaagctggaagtcagccgctcaacca

SEQ ID NO: 653603 - DNA, 75 bp, synthetic construct
  source 1..75: mol_type = other DNA
agttacgctgaccggcacggaagacagtgagctaccggggtttctcgcgctggacagttcctcaggagcgcaggg

SEQ ID NO: 653604 - DNA, 75 bp, synthetic construct
  source 1..75: mol_type = other DNA
cagcgaaaccacgctggcggcggataatctgcatttttacggcaacttgttaagtaagtcctgcacgctggtggt

SEQ ID NO: 653605 - DNA, 75 bp, synthetic construct
  source 1..75: mol_type = other DNA
atgaaaacaaagaccgaaagtatgctcctggcaagcctgctgctcgccgccagcggaaccacgctggcggcggac

SEQ ID NO: 653606 - DNA, 75 bp, synthetic construct
  source 1..75: mol_type = other DNA
caggcgaagagcgggcgaaatgtaacgtccggtgactttaacgccactgtgacggcaacctttgagtatttataa

SEQ ID NO: 653607 - DNA, 75 bp, synthetic construct
  source 1..75: mol_type = other DNA
ttcagggcctggctgcaggcgaaaagcggtcgcgatgtcacgctcggtgattttaccgccaacctgacggcaact

SEQ ID NO: 653608 - DNA, 75 bp, synthetic construct
  source 1..75: mol_type = other DNA
atgaagaataaccgtgcgtgggcgcttatcagtggtctgatattgttcagcggaacggccccagctgccgataac

SEQ ID NO: 653609 - DNA, 75 bp, synthetic construct
  source 1..75: mol_type = other DNA
cgtcatggatgtttatggcgattgttaccgtatgcgttctgtttattatcggtattattttcgcgcggctttatc

SEQ ID NO: 653610 - DNA, 75 bp, synthetic construct
  source 1..75: mol_type = other DNA
agaaaccaaagcggttgaactgaccgtgcgggcgaaagcagaaaaagaagccgcagagatgcaggcggcggctat

SEQ ID NO: 653611 - DNA, 75 bp, synthetic construct
  source 1..75: mol_type = other DNA
gctgaacgtcgtcgtgaagcagagcagacgcgaattctggctgaacgacaaattcaggaaacggagatcgagcgc

SEQ ID NO: 653612 - DNA, 75 bp, synthetic construct
  source 1..75: mol_type = other DNA
cttaatttcagagcatggttacaggtaaaagagggtcgtgaagtaacgcccggtgattttaccgcccagttaacc

SEQ ID NO: 653613 - DNA, 75 bp, synthetic construct
  source 1..75: mol_type = other DNA
taccgaagatagcgatttgccagggtttctggctttggatgcatcatcgggtgcgcaaggtgtgagcattggcat

SEQ ID NO: 653614 - DNA, 75 bp, synthetic construct
  source 1..75: mol_type = other DNA
cgtgctaaacaagttgccctaatcgctgccgcgcaggatgcagaaaccaaagcggttgaaccgccccgggtttcc

SEQ ID NO: 653615 - DNA, 75 bp, synthetic construct
  source 1..75: mol_type = other DNA
ccggcagtgacatgacgctggatgtacagaacgggctactcagtaatcgcaacacgaagacacggggcggtataa

SEQ ID NO: 653616 - DNA, 75 bp, synthetic construct
  source 1..75: mol_type = other DNA
acgatgcggaaatgaaaaatgccgccagtgttgcagacctgaaaacggcaattgatggtgtgtccaccagtatgc

SEQ ID NO: 653617 - DNA, 75 bp, synthetic construct
  source 1..75: mol_type = other DNA
ggctaatgccagtaatgcgctggctgttggtagtcaggcctctgccggcggagaggattccctggctatagggag

SEQ ID NO: 653618 - DNA, 75 bp, synthetic construct
  source 1..75: mol_type = other DNA
ggtggtcaggggaatacggtttcccttaccgactccggcctgaataacggtggaaatcagataacaaatgttgcc

SEQ ID NO: 653619 - DNA, 75 bp, synthetic construct
  source 1..75: mol_type = other DNA
atgaataacagcttatctcaggcaaccaacggtctgctgatgcaactggtgatggacctcaagagcggctatctg

SEQ ID NO: 653620 - DNA, 75 bp, synthetic construct
  source 1..75: mol_type = other DNA
cgatttattcaacaaagccccggaatggttcctccggtagcccacgggacccgttcaattgccattggaaataac

SEQ ID NO: 653621 - DNA, 75 bp, synthetic construct
  source 1..75: mol_type = other DNA
aacactgtcagtgacggggggagccggcgcagatgctgaaatgaccgacaacaacattcgtgttgacaaccggga

SEQ ID NO: 653622 - DNA, 75 bp, synthetic construct
  source 1..75: mol_type = other DNA
tcgaatacgaaattgaatattatagcttatatcattattttcttcttcagtgtaactcctgtaaagggtatatgt

SEQ ID NO: 653623 - DNA, 75 bp, synthetic construct
  source 1..75: mol_type = other DNA
caaagaattaaagcaatttctctatctcgaacgcgcaatgaattattgaaagactctataaaattagaattatta

SEQ ID NO: 653624 - DNA, 75 bp, synthetic construct
  source 1..75: mol_type = other DNA
aaagccgaagcgatcaaacgtctgcaaagtgaaggacgtcaggtggcaatggtgggcgacggcattaacgatgcg

SEQ ID NO: 653625 - DNA, 75 bp, synthetic construct
  source 1..75: mol_type = other DNA
ggaagcatatcacggttggtggtgacgggcagaatatcagcacgactgttcagaacgggagcctgacggtcagac

SEQ ID NO: 653626 - DNA, 75 bp, synthetic construct
  source 1..75: mol_type = other DNA
aaaggggaacgtgtccatcggcgctgactccagggataagcaggcacaaaaagtaacagaggctaaggtcagaac

SEQ ID NO: 653627 - DNA, 75 bp, synthetic construct
  source 1..75: mol_type = other DNA
gtatagccatatcacttgttcttaatccggcatccatatcacaggtcagtgctcaggcagatacaaataagttaa

SEQ ID NO: 653628 - DNA, 75 bp, synthetic construct
  source 1..75: mol_type = other DNA
ctcgctgacgtcggtctggcatgccgtccgcagctggcacaagccccggcagccttctccggccagaacgctggt

SEQ ID NO: 653629 - DNA, 75 bp, synthetic construct
  source 1..75: mol_type = other DNA
gtgttgttatcagtggtgtggcaagtggattgaataataaggacctggcaggcctgaaagcagacgatgcggaaa

SEQ ID NO: 653630 - DNA, 75 bp, synthetic construct
  source 1..75: mol_type = other DNA
gagaggattccctggctatagggagtcagagtacgacgggcaaaaagtccacggttgctctggggcagggagcta

SEQ ID NO: 653631 - DNA, 75 bp, synthetic construct
  source 1..75: mol_type = other DNA
gaatacaaactataaaaaaggggatgtatacaggtttcagaccttctactcctaatcatgttaagtcagggttgc

SEQ ID NO: 653632 - DNA, 75 bp, synthetic construct
  source 1..75: mol_type = other DNA
aatacagataaaaagtctgcgatagctatcgggcaaaacgcaaaggttacattaggtgatggtagtgttgctata

SEQ ID NO: 653633 - DNA, 75 bp, synthetic construct
  source 1..75: mol_type = other DNA
tttgagggaggtcaggaagagttaattaatcccggagagaccgttactttgaaagctggtaaaaatctcagcgtg

SEQ ID NO: 653634 - DNA, 75 bp, synthetic construct
  source 1..75: mol_type = other DNA
aagtatcaatagataagaataatgttgctttggggagcttatctaatgataagaaagctcaacacataaactctg

SEQ ID NO: 653635 - DNA, 75 bp, synthetic construct
  source 1..75: mol_type = other DNA
atcgagcggctgatattgtttccgatgccggaatggtgattgttagtgtgcccatccacgttactgagcaagtta

SEQ ID NO: 653636 - DNA, 75 bp, synthetic construct
  source 1..75: mol_type = other DNA
tatttctctaatactcgagtaccaccaattaaagcaaaaagcgggacaacttttcgtaccatttgtcacaattgt

SEQ ID NO: 653637 - DNA, 75 bp, synthetic construct
  source 1..75: mol_type = other DNA
gggataaagtgaaacagcgcgattttgtttatcacaatgaagtcattaaacctgcgctggtggggctgctgggac

SEQ ID NO: 653638 - DNA, 75 bp, synthetic construct
  source 1..75: mol_type = other DNA
cttgtggctggaagctgcttatcagcgcaggcgttgtgacaggattgaagaacgtctcaaatatcttgaggggga

SEQ ID NO: 653639 - DNA, 75 bp, synthetic construct
  source 1..75: mol_type = other DNA
cgaccttcaaaagtgcaactggaattactgatgaagaactacaggatattgcaaaccgcatagtggatatcatgg

SEQ ID NO: 653640 - DNA, 75 bp, synthetic construct
  source 1..75: mol_type = other DNA
tcaaattagtgaaactttgttgaaagcgttaattaaaacagagtctggatttaatccaaacgctgtcagcagaaa

SEQ ID NO: 653641 - DNA, 75 bp, synthetic construct
  source 1..75: mol_type = other DNA
acaaaatgcgttgcaaagcgtaccgggcgtcactcaggcacgggtaaacctggcggagcgtactgcgctggtgat

SEQ ID NO: 653642 - DNA, 75 bp, synthetic construct
  source 1..75: mol_type = other DNA
taccacacgttactactagcgttatttgttcagatgatagttattggctggtagctaaaggcgaatcaatgaacg

SEQ ID NO: 653643 - DNA, 75 bp, synthetic construct
  source 1..75: mol_type = other DNA
gatcctcgataaagcaggcgatatgcaactgccgcaggtcaacagcttccgtacattgcgtgggctgggcgtgag

SEQ ID NO: 653644 - DNA, 75 bp, synthetic construct
  source 1..75: mol_type = other DNA
actcgatttaaccccgccgacggcgcgcctggtcactgacgaaggtgaaaaaagcgtgccgctggcagatgttca

SEQ ID NO: 653645 - DNA, 75 bp, synthetic construct
  source 1..75: mol_type = other DNA
taagcccatcggggtgatgttccacagcgatagtaataatgccgatgtcagtctttaccaccacttagtttgccg

SEQ ID NO: 653646 - DNA, 75 bp, synthetic construct
  source 1..75: mol_type = other DNA
tttgccatgactcagtggctaagttagtaacagatcctgaagtccgtgatgcccttgtgaatgtagttcgtgcac

SEQ ID NO: 653647 - DNA, 75 bp, synthetic construct
  source 1..75: mol_type = other DNA
tttgtcatgaggctgttgcaaagttagtgactgatcccgaaatacgacaagccttagttaacgtagttagagcac

SEQ ID NO: 653648 - DNA, 75 bp, synthetic construct
  source 1..75: mol_type = other DNA
ggaaatcagtgtcatttggggactgggggtggcaatggccatctacctgaccgcaggggtttccggcgcgcatct

SEQ ID NO: 653649 - DNA, 75 bp, synthetic construct
  source 1..75: mol_type = other DNA
atgtcgggtaaattcagatttagtcgtcgcagcgaaaagaatctggagggcgtcaaaccacagctggttgccgtg

SEQ ID NO: 653650 - DNA, 75 bp, synthetic construct
  source 1..75: mol_type = other DNA
gaactgggaaccgccatcgaatggggcggcgactggaccagcctgaaagacggacctcacttccagctgaaacga

SEQ ID NO: 653651 - DNA, 75 bp, synthetic construct
  source 1..75: mol_type = other DNA
attttcttaggctactctttaacagatgaacatatagctgaaatcctggaagatatagttagttgttttcctgat

SEQ ID NO: 653652 - DNA, 75 bp, synthetic construct
  source 1..75: mol_type = other DNA
aaaacgtgccgctggcagatgttcagccaggtatgttactgcgcctgacgaccggcgaccgtgtgccggtagatg

SEQ ID NO: 653653 - DNA, 75 bp, synthetic construct
  source 1..75: mol_type = other DNA
gggctggggcaatgtcgcctttaccggcggcagagacattccttacttcctggtgccgcttttcggccctatcgt

SEQ ID NO: 653654 - DNA, 75 bp, synthetic construct
  source 1..75: mol_type = other DNA
aaaaagaggatcaaccacactgccttttggaccgtgtttaagtctgggcggtatagcaacaatttatctacaggc

SEQ ID NO: 653655 - DNA, 75 bp, synthetic construct
  source 1..75: mol_type = other DNA
ttagcttacaagacgccagagaaaaacgagacaacgccaaaaagttgttagtcaaggggatagatcccaaagcag

SEQ ID NO: 653656 - DNA, 75 bp, synthetic construct
  source 1..75: mol_type = other DNA
ttgtatcttgaggtctcccctaaaggttctaagtactggcgcatgaaatatcgccgcccctctgacaaaaaggaa

SEQ ID NO: 653657 - DNA, 75 bp, synthetic construct
  source 1..75: mol_type = other DNA
gcagcgtgtcacggctatcatgcgttatgcagtacagaacgattacatcgactcaaatccagccagtgatatggc

SEQ ID NO: 653658 - DNA, 75 bp, synthetic construct
  source 1..75: mol_type = other DNA
tggttcccgatggaagcgcgacatctttattacgaagccagcgcgatgattattggtctgatcaatctcggccat

SEQ ID NO: 653659 - DNA, 75 bp, synthetic construct
  source 1..75: mol_type = other DNA
tagtgagaggaatagctacataattaatttgttctcggaaatcattaactataagataaaaaaatctcacctaat

SEQ ID NO: 653660 - DNA, 75 bp, synthetic construct
  source 1..75: mol_type = other DNA
aaaacacgtacttagaagccttgaaatgtatattttccctcacattggcacttcggatattcgcaaactggaggc

SEQ ID NO: 653661 - DNA, 75 bp, synthetic construct
  source 1..75: mol_type = other DNA
gagtagttctgcgtaaagaagcattaggcatgggcgatgtattattgttcgctgcgttaggtagttgggtggggc

SEQ ID NO: 653662 - DNA, 75 bp, synthetic construct
  source 1..75: mol_type = other DNA
accaatggctgcccgatgtttttactcagggcgtattgtggacgggactgattgcggcatgggcgcagcagagcc

SEQ ID NO: 653663 - DNA, 75 bp, synthetic construct
  source 1..75: mol_type = other DNA
gcattgccagcagactatccgcgttcgtgacaatattccgctgctctcatggttgatgctcaaagggcgctgccg

SEQ ID NO: 653664 - DNA, 75 bp, synthetic construct
  source 1..75: mol_type = other DNA
ccgagcatttggatgagcggcgtttaatgatgcagtggtgggctgattatttggatatgaaccgtaataaatata

SEQ ID NO: 653665 - DNA, 75 bp, synthetic construct
  source 1..75: mol_type = other DNA
atgaatcatgtaatgttagatatagaaacattggatgttgaaaaaacagcttatatcctttcagttggtgcggct

SEQ ID NO: 653666 - DNA, 75 bp, synthetic construct
  source 1..75: mol_type = other DNA
gttattggttttatatcaaccaatagtatttttggtgttttgtttgccctgccaacattatttactttcttcata

SEQ ID NO: 653667 - DNA, 75 bp, synthetic construct
  source 1..75: mol_type = other DNA
tggcctgttaacctggatggggggcatggtgggggctgttgtttctggcgtggcttcaaaaatcactggtgctgt

SEQ ID NO: 653668 - DNA, 75 bp, synthetic construct
  source 1..75: mol_type = other DNA
ggtgctctatgaggtcgatgttatcaatatggtcgaaatttgtgatggtgtggacctgctggaagaacaccgcaa

SEQ ID NO: 653669 - DNA, 75 bp, synthetic construct
  source 1..75: mol_type = other DNA
ctggggcttgatgacagtgcgctggatacagaattttccattggtggtactgaactgctgctgtttaaacagatg

SEQ ID NO: 653670 - DNA, 75 bp, synthetic construct
  source 1..75: mol_type = other DNA
agggtgataaagccaaaatcacgctgcgtttccgtggtcgtgagatggcgcaccagcaaatcggtatggaagtgc

SEQ ID NO: 653671 - DNA, 75 bp, synthetic construct
  source 1..75: mol_type = other DNA
aacggcaagccaatcgatgatacgcacactcatggtggtgttcagcgcggtggaagcaataccgatggggtaaac

SEQ ID NO: 653672 - DNA, 75 bp, synthetic construct
  source 1..75: mol_type = other DNA
cccattgttggtggatgttccagtggtattcccacgtggcggaggatgtacgctaacgtttccgattaaagccgg

SEQ ID NO: 653673 - DNA, 75 bp, synthetic construct
  source 1..75: mol_type = other DNA
cccaccgtatacatttatatggggctatgaagagccagaaaataaccttgagttaacgtcatcaatcaagcttgc

SEQ ID NO: 653674 - DNA, 75 bp, synthetic construct
  source 1..75: mol_type = other DNA
ggaatcgacgaacttttgctggaagcattcagtcgttttacgcagaccatgtccctgcaatatcagacttttttt

SEQ ID NO: 653675 - DNA, 75 bp, synthetic construct
  source 1..75: mol_type = other DNA
cgaagcagattcgggacggacagctaccgtcgccttatcagttttccaacatgtggctggttaacctgcgtatca

SEQ ID NO: 653676 - DNA, 75 bp, synthetic construct
  source 1..75: mol_type = other DNA
ctggggctggatgacggcgcactggatactgaattttccattggcggtactgagctgctgctgtttaagcagatg

SEQ ID NO: 653677 - DNA, 75 bp, synthetic construct
  source 1..75: mol_type = other DNA
acctgaacctgtttaacgacgggaacaactggcaggggatcgttgaatcgctgacgctgccgaaatttacccgca

SEQ ID NO: 653678 - DNA, 75 bp, synthetic construct
  source 1..75: mol_type = other DNA
atggctttaccacgcaaattaaaacacctgaacctgtttaacgacgggaacaactggcaggggagcgttgagtcg

SEQ ID NO: 653679 - DNA, 75 bp, synthetic construct
  source 1..75: mol_type = other DNA
cacggttaaaacccccggcgcgctgacggcgacagcagaaggaggaaccacgatcacatcacccaccatcacgct

SEQ ID NO: 653680 - DNA, 75 bp, synthetic construct
  source 1..75: mol_type = other DNA
aacgcttttttttaaaagtgaccatcaaggtggctaccaagctcgattataaagtagcattgtccatttctgtga

SEQ ID NO: 653681 - DNA, 75 bp, synthetic construct
  source 1..75: mol_type = other DNA
ttaaccccattacgggtattggtgagccgacatctacaggtattaaagtggttgatttcgcagctgatcccacgc

SEQ ID NO: 653682 - DNA, 75 bp, synthetic construct
  source 1..75: mol_type = other DNA
tttattctatcaataatgatatttatttaagtgatgtcatttttgataataatcaggcatatacatcaaccagct

SEQ ID NO: 653683 - DNA, 75 bp, synthetic construct
  source 1..75: mol_type = other DNA
ttcataatgggtttatcaaaaaaaatatgttttatgataatctttatgatatatgccagaagaatttttttgtgt

SEQ ID NO: 653684 - DNA, 75 bp, synthetic construct
  source 1..75: mol_type = other DNA
tggtgatggccggtctggatgttactcacaaagcgcaaatttatgttgaagataccgagcgtttccgcgccattg

SEQ ID NO: 653685 - DNA, 75 bp, synthetic construct
  source 1..75: mol_type = other DNA
ccgcaaactaacgttgccttgctgctcaatagccatccggaactgcatagcaaaattgcccgtatcgtgattatg

SEQ ID NO: 653686 - DNA, 75 bp, synthetic construct
  source 1..75: mol_type = other DNA
gatcagggcaggaatattgaaatgcgcgctgatggtgaaatccgtgtggaggatggcgtcgatacgcaatggggc

SEQ ID NO: 653687 - DNA, 75 bp, synthetic construct
  source 1..75: mol_type = other DNA
gatgcgttctgtatcgtcggaccgcagtcgcaggcgcagaaaatcagcggcatcagcggcagcgcggttgagctg

SEQ ID NO: 653688 - DNA, 75 bp, synthetic construct
  source 1..75: mol_type = other DNA
atatttccgcgcggcggcggctgcacgttaactttcccggtgaaagccggcgatgaatgtctggtgatttttgcc

SEQ ID NO: 653689 - DNA, 75 bp, synthetic construct
  source 1..75: mol_type = other DNA
atgccgacaataatgcgtttaccggcgagatgagtatccagaatggcgaggtgacgttggggcgcagcgatgagt

SEQ ID NO: 653690 - DNA, 75 bp, synthetic construct
  source 1..75: mol_type = other DNA
cgatatgttggtgcttaatggcaatacttccggtagcactacggtggaggttaaccccattaccggtattggcga

SEQ ID NO: 653691 - DNA, 75 bp, synthetic construct
  source 1..75: mol_type = other DNA
cagctgatcccgcgcagtttcaaaacaatgcgcagttcagtctggcaggaagcggctacgtcaatatgggggcgt

SEQ ID NO: 653692 - DNA, 75 bp, synthetic construct
  source 1..75: mol_type = other DNA
ccgcaaggcaaaggcgcctctttgtcaaaagcgatcaatattattgagaacggcctgcgagtgagtcttgatgaa

SEQ ID NO: 653693 - DNA, 75 bp, synthetic construct
  source 1..75: mol_type = other DNA
ataaggggttaaaaatatccctgaataatgacctgagtgtggggagtaataatactcctggcagcatcaaagtta

SEQ ID NO: 653694 - DNA, 75 bp, synthetic construct
  source 1..75: mol_type = other DNA
aaaacattgctgatgccataaaccagtctggctggaaaattaaagcggataaagataccgatggtgttatcgagg

SEQ ID NO: 653695 - DNA, 75 bp, synthetic construct
  source 1..75: mol_type = other DNA
atggaatttaaatactctaaggtttgtcttgcagttttattatcattaagtccggcgctgattcaattttccagt

SEQ ID NO: 653696 - DNA, 75 bp, synthetic construct
  source 1..75: mol_type = other DNA
cagtggtctgaacggcactgcgcttgctgacgccggcgcagatgttctgaataatgcggcaaatatcggtgacct

SEQ ID NO: 653697 - DNA, 75 bp, synthetic construct
  source 1..75: mol_type = other DNA
gtaattactctaatgcaattggtttaaatgcacagacgcaggctgaaagtagtattgcgctagggtcttacagca

SEQ ID NO: 653698 - DNA, 75 bp, synthetic construct
  source 1..75: mol_type = other DNA
ggtgataccctcgctactgggtggggggcaattgctattgggggagacgatctgacaccgttacaaggacagaaa

SEQ ID NO: 653699 - DNA, 75 bp, synthetic construct
  source 1..75: mol_type = other DNA
tgcagaaaatggcattgctttggggagttatactaagattgaggggacagcggctactaattctatagcaattgg

SEQ ID NO: 653700 - DNA, 75 bp, synthetic construct
  source 1..75: mol_type = other DNA
gttaacgtgggggcgggggatatttctgaggcaagtactgatgccattaacggtagccagttatatgcgatagcg

SEQ ID NO: 653701 - DNA, 75 bp, synthetic construct
  source 1..75: mol_type = other DNA
caactgctgtatccaaggcgactattaacttgaaaaatggtaactctgttgagtattctggttttgctggagata

SEQ ID NO: 653702 - DNA, 75 bp, synthetic construct
  source 1..75: mol_type = other DNA
ggctgaaaacagtattgctttaggggcgtacagccatgttaagggtataaattctgtcaattctgtagctatagg

SEQ ID NO: 653703 - DNA, 75 bp, synthetic construct
  source 1..75: mol_type = other DNA
gatgaaatcgaaattacaggtaaaggcccggtaaaaacaagtgttaacggagataaactggagatttcggctgag

SEQ ID NO: 653704 - DNA, 75 bp, synthetic construct
  source 1..75: mol_type = other DNA
gggactactagtgaagttccagaagatccagataagggtatttatttcaaacatacgtctccaattgctagtggg

SEQ ID NO: 653705 - DNA, 75 bp, synthetic construct
  source 1..75: mol_type = other DNA
attaatccgacgtggaagttaaaagacagcacaggaaacgaaaaagaggtcagcagtaaaaatagcggtgctaca

SEQ ID NO: 653706 - DNA, 75 bp, synthetic construct
  source 1..75: mol_type = other DNA
ggggggcaattggaaaatcctaccatagactttatgagcaagttatacctatgaaggatgaattggattacttga

SEQ ID NO: 653707 - DNA, 75 bp, synthetic construct
  source 1..75: mol_type = other DNA
aaatccatatgaggcaaaattttttaaggatagatattctgcatttcatttaatgtcaataaatgccccagatga

SEQ ID NO: 653708 - DNA, 75 bp, synthetic construct
  source 1..75: mol_type = other DNA
caaacaaatattaggaaagataaaatatcatacttcacatctattaatatttccaggtgtatagaagtatcagat

SEQ ID NO: 653709 - DNA, 75 bp, synthetic construct
  source 1..75: mol_type = other DNA
accgggacggccagcagttattcctcccttatgacaaaacgcagtggcctgctgaacagtatgtcggctggcacc

SEQ ID NO: 653710 - DNA, 75 bp, synthetic construct
  source 1..75: mol_type = other DNA
gcgattaatctggcgaaatacaaagcggcggcggggaagcaaaccatactgctggattattcacgcgcagaagtg

SEQ ID NO: 653711 - DNA, 75 bp, synthetic construct
  source 1..75: mol_type = other DNA
ttcatgatgttattgggcctgacgaatataccgaacatgtcaataataacgccttcaccagctatatggcgtatt

SEQ ID NO: 653712 - DNA, 75 bp, synthetic construct
  source 1..75: mol_type = other DNA
ggtttcttgccaccctgttgctttgtggcctgacaggctgggaagcataccgcaaagggaaggaaagtctcggac

SEQ ID NO: 653713 - DNA, 75 bp, synthetic construct
  source 1..75: mol_type = other DNA
ttattggtggtgatgatcttacaccattaaaaggaagaaaatatggagaggttataatccctgatgattatgaac

SEQ ID NO: 653714 - DNA, 75 bp, synthetic construct
  source 1..75: mol_type = other DNA
ggattctttcggtaataattggaagagtattgaaattggtacgactcaagaggtaactgttgaccaagcaaatgg

SEQ ID NO: 653715 - DNA, 75 bp, synthetic construct
  source 1..75: mol_type = other DNA
atttcatttgcctgaaactattaatagggtcattaagctaattagaaaaagccaaggtggtaaggcattagtagt

SEQ ID NO: 653716 - DNA, 75 bp, synthetic construct
  source 1..75: mol_type = other DNA
caataaaatcagttggttggaatgatgttgccaacggtcagattccttgctctatgagatctctagatggcctaa

SEQ ID NO: 653717 - DNA, 75 bp, synthetic construct
  source 1..75: mol_type = other DNA
ggctggttgtgacgcttctgttatgtgggctggtcggctgggaagcataccgcaaggggcaggaaagtctgggga

SEQ ID NO: 653718 - DNA, 75 bp, synthetic construct
  source 1..75: mol_type = other DNA
tcagcgatcgctttgtccagacgaccgacacgcaataccagtacagcgatgtgaatgtaattgccattcatcacg

SEQ ID NO: 653719 - DNA, 75 bp, synthetic construct
  source 1..75: mol_type = other DNA
gcatcccgcgaactacatgcttgatggcgtgcgctatggctttgatccagtcagcgatcgctttgtccagacgac

SEQ ID NO: 653720 - DNA, 75 bp, synthetic construct
  source 1..75: mol_type = other DNA
atgcgtaccagtcaccacatcgccaataccattattgagcaccgtcacgatgaagcctggctgcgccagcacatt

SEQ ID NO: 653721 - DNA, 75 bp, synthetic construct
  source 1..75: mol_type = other DNA
ataaagaacgtataactaaattcaggcactggttgcatgatgcccgcgagggcatagaaggcgacaatcagccgg

SEQ ID NO: 653722 - DNA, 75 bp, synthetic construct
  source 1..75: mol_type = other DNA
atggccgatgcagtactgtcggtgatggccactaacggtatgcgtaccagtcaccacatcgccaataccattatc

SEQ ID NO: 653723 - DNA, 75 bp, synthetic construct
  source 1..75: mol_type = other DNA
cgacacgcaataccagtacagcgatgtgaatgtaattgccattcatcacgcgctggtcaaatcaggcatcacacc

SEQ ID NO: 653724 - DNA, 75 bp, synthetic construct
  source 1..75: mol_type = other DNA
ctaacccacccgcgcacggagcttcggttgttgccactatcctgagtaatgatgcgttacgtgctatctgggaac

SEQ ID NO: 653725 - DNA, 75 bp, synthetic construct
  source 1..75: mol_type = other DNA
gtatgctgttgcttctggtcgtgtgaacgtagccgggatgacaccagataacatggctccgctgtgcgaagcgat

SEQ ID NO: 653726 - DNA, 75 bp, synthetic construct
  source 1..75: mol_type = other DNA
tgcgtctgcgcgaagagtttggcgtatatgctgttgcttctggtcgcgtaaacgtagctgggatgacaccagata

SEQ ID NO: 653727 - DNA, 75 bp, synthetic construct
  source 1..75: mol_type = other DNA
gcattacgccagcctgatggcggttattcgtgaaaaggaagaaacactgaaacaacgcgtgatccgcgcgcgtgg

SEQ ID NO: 653728 - DNA, 75 bp, synthetic construct
  source 1..75: mol_type = other DNA
aagggtgaaattattgcggggcacgggcgtgttatggcggctgaggcgctcaaaatggattcggttccggtcatt

SEQ ID NO: 653729 - DNA, 75 bp, synthetic construct
  source 1..75: mol_type = other DNA
gttctgtctggtctgacggatgatcagaaaaaggcgtaccgcctggcagataatcgcctgccgatgaatgctggc

SEQ ID NO: 653730 - DNA, 75 bp, synthetic construct
  source 1..75: mol_type = other DNA
caagtattacccaagcacatcaatcattaagcgattcttggcgttttttaagcccattaaaattatcaggagata

SEQ ID NO: 653731 - DNA, 75 bp, synthetic construct
  source 1..75: mol_type = other DNA
gtttatacggtttctctgaatcatgtcactacaacagatgtaacagttacagttacattgggtagcggagctggg

SEQ ID NO: 653732 - DNA, 75 bp, synthetic construct
  source 1..75: mol_type = other DNA
actgcggaaatcacagacccggcaggtaacaccagtggccaggggcagccggcagacttcgcagtggatacagtg

SEQ ID NO: 653733 - DNA, 75 bp, synthetic construct
  source 1..75: mol_type = other DNA
ggaataatcttttatggagcattgcttcaattctgcttctctggactgcgattaatcgttgtcggagtgtgcttc

SEQ ID NO: 653734 - DNA, 75 bp, synthetic construct
  source 1..75: mol_type = other DNA
aactgccagggtcggaaaaacgttatcgtgactggaaaaaatggggccacgggcgtctgaatgtcacaagatcgc

SEQ ID NO: 653735 - DNA, 75 bp, synthetic construct
  source 1..75: mol_type = other DNA
aattattgtttgttgaatggaaacctgaacttgaagaggctgacattagtgattctgtgattcataaaaaaatcc

SEQ ID NO: 653736 - DNA, 75 bp, synthetic construct
  source 1..75: mol_type = other DNA
gcaactattgaagataaggatgattccactggactggtttatacggtttctctgaatcatgtcactacaacagat

SEQ ID NO: 653737 - DNA, 75 bp, synthetic construct
  source 1..75: mol_type = other DNA
atgactttattaatgctcttcttgaggcctttcgagaattattagatataaagtcggttaaggttctgatatcaa

SEQ ID NO: 653738 - DNA, 75 bp, synthetic construct
  source 1..75: mol_type = other DNA
gtggccatagtattttctacgaaacaagaacagagaaaaaaatactaaatggtgctaattttgtaattaatttca

SEQ ID NO: 653739 - DNA, 75 bp, synthetic construct
  source 1..75: mol_type = other DNA
acgatattgggttaaagaaactaaagaagagcgtcgaattattaggttagatgtacttgatggtttgatatatgt

SEQ ID NO: 653740 - DNA, 75 bp, synthetic construct
  source 1..75: mol_type = other DNA
atattgaccgagttttgcggtttactcgcgcagacgattaacggtgttcgcagttatgccggtccatttggcaaa

SEQ ID NO: 653741 - DNA, 75 bp, synthetic construct
  source 1..75: mol_type = other DNA
gcgcgtgagtgcaatcagcaaacacggcttggggcaattttgaatgagactggtgatgttatttccgatattgcg

SEQ ID NO: 653742 - DNA, 75 bp, synthetic construct
  source 1..75: mol_type = other DNA
cggaaatataaccatggaaaggttacccgattttctgtccgtcccccggaaaatcaggatgcggactggcgacgg

SEQ ID NO: 653743 - DNA, 75 bp, synthetic construct
  source 1..75: mol_type = other DNA
cgctgcactcaggaactgctgtttggtaaaggtagcgccctgatcaatgacaaacgtgctcgcacggcacagact

SEQ ID NO: 653744 - DNA, 75 bp, synthetic construct
  source 1..75: mol_type = other DNA
gggacccggcagcactgaatcaggcccgtgcggagcttgaggcagcaggaaaaccgttcacggaacaggatgtgg

SEQ ID NO: 653745 - DNA, 75 bp, synthetic construct
  source 1..75: mol_type = other DNA
aaataccagcaggcgatacaggccgcaacggcagcggtacagggactggccggcggtaatctgagtgcagccctg

SEQ ID NO: 653746 - DNA, 75 bp, synthetic construct
  source 1..75: mol_type = other DNA
gtggccggctggtcagtgaaggtgaactccgtctgcatacgggaggtctgcagaacagccacggacagatacagt

SEQ ID NO: 653747 - DNA, 75 bp, synthetic construct
  source 1..75: mol_type = other DNA
ggagagcgccatgttacggactcaggaacatccacgtattattaccgtatcaggaaaaaaggaaaggataagcag

SEQ ID NO: 653748 - DNA, 75 bp, synthetic construct
  source 1..75: mol_type = other DNA
aagggctgcttgcggcaaatggcacggtgcatctggatgcccggagccttgataatcgcaaggggaaagtacagg

SEQ ID NO: 653749 - DNA, 75 bp, synthetic construct
  source 1..75: mol_type = other DNA
gtgccactattgaagccgccggatatctggtactgagtgccggacaaatcaataacgtcaatgaccatttcacca

SEQ ID NO: 653750 - DNA, 75 bp, synthetic construct
  source 1..75: mol_type = other DNA
agctgtcggacctaatcaatgctgattttgatgtctccctgacaggcttcggcccgacagaaattgatgaactgt

SEQ ID NO: 653751 - DNA, 75 bp, synthetic construct
  source 1..75: mol_type = other DNA
accgaaataccggccttggcatcagcgataccgagcatatcagccagagcatgcgcgatattctgctgacgccgg

SEQ ID NO: 653752 - DNA, 75 bp, synthetic construct
  source 1..75: mol_type = other DNA
tcgctgggcgatatgacgctgaaaagtaacacaacgttcagcaacagtggtcagactattgcgaacggaaacctt

SEQ ID NO: 653753 - DNA, 75 bp, synthetic construct
  source 1..75: mol_type = other DNA
cgctggctcctgggcgtaatgtatggcaaaacgcgggcattgtagcaggaggaacgttatttaccgatggtcttg

SEQ ID NO: 653754 - DNA, 75 bp, synthetic construct
  source 1..75: mol_type = other DNA
ggcctccggttttggaacgggaggcaaataccagcaggcgatacaggccgcaacggcagcagtacaggggctggc

SEQ ID NO: 653755 - DNA, 75 bp, synthetic construct
  source 1..75: mol_type = other DNA
gatgtacggtaaaccagtgagtgaactgagtgagacagagaagcagacggtctccacactggcaacggttgctgc

SEQ ID NO: 653756 - DNA, 75 bp, synthetic construct
  source 1..75: mol_type = other DNA
cacgcagaaaggcagcacggtggggagtgttcacggtgatgtttcccttcaggcaggtaaccggttgaccgtcaa

SEQ ID NO: 653757 - DNA, 75 bp, synthetic construct
  source 1..75: mol_type = other DNA
ggcggcagcatcggtggccagttcgcgggaaatatggccaacaatctgctggttggtgcaaatcatgaaggccat

SEQ ID NO: 653758 - DNA, 75 bp, synthetic construct
  source 1..75: mol_type = other DNA
ccggataccgcttcgcccggtggtgtcagccggtgaaccggtcattctgttgccggggcagcagtttgaagtcag

SEQ ID NO: 653759 - DNA, 75 bp, synthetic construct
  source 1..75: mol_type = other DNA
tctccacagtgaccacatccgcgcaggacaatattatctgggataaaaataatcgtctgtcgcagggcgccacgc

SEQ ID NO: 653760 - DNA, 75 bp, synthetic construct
  source 1..75: mol_type = other DNA
aaccattttgaacgcaccagcatcgacagtgtggcgggcgtgtatgtacagaatgaccagggaagactggtgctg

SEQ ID NO: 653761 - DNA, 75 bp, synthetic construct
  source 1..75: mol_type = other DNA
gacacgttgatgaaccagaaagggactctgaaggccgggacggatatgtggctgagtggcggcgatgtcaggaat

SEQ ID NO: 653762 - DNA, 75 bp, synthetic construct
  source 1..75: mol_type = other DNA
gggatttatggcgggtcagaaggatatgaccctgaacgccggaacgctcgataaccgtcagggcgtgctggggag

SEQ ID NO: 653763 - DNA, 75 bp, synthetic construct
  source 1..75: mol_type = other DNA
atcagtgtttcagccagcgcaaaccagggtaagggcagtgaaaaaggcaacggtaccacccatacagaaaccacg

SEQ ID NO: 653764 - DNA, 75 bp, synthetic construct
  source 1..75: mol_type = other DNA
tgccaccattgaagctgccggaaacctggcgctgagtgccgggcacattaataacgtgaatgaccatttcaccac

SEQ ID NO: 653765 - DNA, 75 bp, synthetic construct
  source 1..75: mol_type = other DNA
gatgtcactaataccggcagcctgctggcgggcgggcggcttgacctgaacagcacccgccttgaaaacacagag

SEQ ID NO: 653766 - DNA, 75 bp, synthetic construct
  source 1..75: mol_type = other DNA
acaacgcaggaccttgataaccagacgggcagtattgtggcagacagggtgcttacggttatggcagacaggacg

SEQ ID NO: 653767 - DNA, 75 bp, synthetic construct
  source 1..75: mol_type = other DNA
catctttgacagggaaaaagagcaacagcgactgcagcaggcgcaactcattggtgagattggtaaccaggtggc

SEQ ID NO: 653768 - DNA, 75 bp, synthetic construct
  source 1..75: mol_type = other DNA
ggtggcagtgttgccggaaatttcctggggaacatggcaaacaatctgctggtcggtgcaaatcatgaaggccat

SEQ ID NO: 653769 - DNA, 75 bp, synthetic construct
  source 1..75: mol_type = other DNA
aactgctttcgccgggcgatatgacgctgaaaagtaacacaacgttcagcaacagtggtcagactattgcgaacg

SEQ ID NO: 653770 - DNA, 75 bp, synthetic construct
  source 1..75: mol_type = other DNA
ggcgaagggagaggccagaatcattcttaatgaagtgaacagtcgcaatcccagccagttgaacggttttgttga

SEQ ID NO: 653771 - DNA, 75 bp, synthetic construct
  source 1..75: mol_type = other DNA
agaatttccagatgagctatatgaggagtggtatcgactgtacggcctgaacaggccagagaagggacgtccaat

SEQ ID NO: 653772 - DNA, 75 bp, synthetic construct
  source 1..75: mol_type = other DNA
agaccaccccggacggtgcgggacgtgtggcagctcatgcagtagtgaatgcagccctgtctctggcacagggta

SEQ ID NO: 653773 - DNA, 75 bp, synthetic construct
  source 1..75: mol_type = other DNA
aaatagttaccccaaatcaagaacgtactataattaaaggtatagtcgagagatcaaatggggttattgctccaa

SEQ ID NO: 653774 - DNA, 75 bp, synthetic construct
  source 1..75: mol_type = other DNA
taaccaggagggcagtattctggcagacagggcgcttacggttatggcagacaggacgctcagtaataatgatgg

SEQ ID NO: 653775 - DNA, 75 bp, synthetic construct
  source 1..75: mol_type = other DNA
gcaatggtttctgatactcgagaagagtatgagaaatacatagatgaaaaggttattgggcaaagaaccatagac

SEQ ID NO: 653776 - DNA, 75 bp, synthetic construct
  source 1..75: mol_type = other DNA
ccagcttccgtaacggcaaagaagttttcgatcgtgaccttctcgacatgcgtatcgtcactgaagaagtggtcg

SEQ ID NO: 653777 - DNA, 75 bp, synthetic construct
  source 1..75: mol_type = other DNA
ggccaacaacatttcagcattaacaccgacgcgcttaatcttggctttatgctgtttattttctgcgtcggggtc

SEQ ID NO: 653778 - DNA, 75 bp, synthetic construct
  source 1..75: mol_type = other DNA
ccgttttctaaatacgaattatatggctgattttgtcgatccatttttgctagaaaaattcaaaaaacctcttat

SEQ ID NO: 653779 - DNA, 75 bp, synthetic construct
  source 1..75: mol_type = other DNA
accaccggtgctaaaaaagctaaccgtgtgaccaagcctgaagctggccacttcgctaaagctggcgtagaagct

SEQ ID NO: 653780 - DNA, 75 bp, synthetic construct
  source 1..75: mol_type = other DNA
tgggtatgacccgtatcttcacagaagacggcgtttctatcccagtcaccgtaatcgaagttgaagcaaaccgcg

SEQ ID NO: 653781 - DNA, 75 bp, synthetic construct
  source 1..75: mol_type = other DNA
gtatccatgttgccgggccggatacccgtctgccggacagcagcctgtttaaaacgaatccggcagcgaatgtgc

SEQ ID NO: 653782 - DNA, 75 bp, synthetic construct
  source 1..75: mol_type = other DNA
ggctttgtttctgagttaataaactacggtattaaaaattatcctactcctactaataaggagccagaacatgag

SEQ ID NO: 653783 - DNA, 75 bp, synthetic construct
  source 1..75: mol_type = other DNA
acagcgggcctacaataacggtatggcggcctcaggttttggaacgggaggcaaataccagcaggcgatacaggc

SEQ ID NO: 653784 - DNA, 75 bp, synthetic construct
  source 1..75: mol_type = other DNA
gcatgtgcagacgcatacggtggagcagaaaacctccggtctgacgcttgccctgtccggcacagcgggcagcgc

SEQ ID NO: 653785 - DNA, 75 bp, synthetic construct
  source 1..75: mol_type = other DNA
gagctgggtactgccatcgaatggggcggggattggcggacgcttaaagacggcccacattttcaattgaagcga

SEQ ID NO: 653786 - DNA, 75 bp, synthetic construct
  source 1..75: mol_type = other DNA
tcagggatagtgagcagtactgactttgcccaacggctggaaaaacagtatggtcttgacagtcagagagccgaa

SEQ ID NO: 653787 - DNA, 75 bp, synthetic construct
  source 1..75: mol_type = other DNA
tgaaggggcaggggctggatttaagcaacagccggatacagggacaacataccgggctggatgcaggcagcggaa

SEQ ID NO: 653788 - DNA, 75 bp, synthetic construct
  source 1..75: mol_type = other DNA
gggagagctcaccagccacggacagattcagggcagccaggtcacgctttctcccctgaagccacagggaacgga

SEQ ID NO: 653789 - DNA, 75 bp, synthetic construct
  source 1..75: mol_type = other DNA
gaacacgaaaacacggggtggtatcagcagcgccggtaccctgacagtacgggctggtatgctgaataaccagca

SEQ ID NO: 653790 - DNA, 75 bp, synthetic construct
  source 1..75: mol_type = other DNA
cttcactggcgtttgatcccagtcagcaaggaaagagcgcagaagagatcagtgatgcaattggtgcttcgcata

SEQ ID NO: 653791 - DNA, 75 bp, synthetic construct
  source 1..75: mol_type = other DNA
gtacggtaagccggtgagtgaactgagcgagacagagaagcagactgtttcgacactggcaacggttgctgccgg

SEQ ID NO: 653792 - DNA, 75 bp, synthetic construct
  source 1..75: mol_type = other DNA
tgtctgccgggaatatcaccatccgggatacgcagagccagaaacaggatgtggcagacctgaaccgtgacgcag

SEQ ID NO: 653793 - DNA, 75 bp, synthetic construct
  source 1..75: mol_type = other DNA
agacctgaatgcgcacctgaatgtgctggaaaatcagcaggggacggtggtcagcaacggtaacagcaggctgga

SEQ ID NO: 653794 - DNA, 75 bp, synthetic construct
  source 1..75: mol_type = other DNA
cattccggcatggaaagcaggcagctctcactggcactggataatctgagcctcgggtatgccttaacctattta

SEQ ID NO: 653795 - DNA, 75 bp, synthetic construct
  source 1..75: mol_type = other DNA
cgcgatatggagcagcagaaaaatgttgcttatctgcgtccggtaattgcctggtcgccgacggaagaattcacc

SEQ ID NO: 653796 - DNA, 75 bp, synthetic construct
  source 1..75: mol_type = other DNA
tgtagtttgtgataacgactgctggattgatgatgaagggacgtacaccattcacaccattcatgcgtcttatca

SEQ ID NO: 653797 - DNA, 75 bp, synthetic construct
  source 1..75: mol_type = other DNA
taatcttttgctttcaggttatggcgatttgaaaatctacggcgacgtagaatttaatatggacgcggaaagcaa

SEQ ID NO: 653798 - DNA, 75 bp, synthetic construct
  source 1..75: mol_type = other DNA
ttgagttttgattttggtccccggcagtttaccgttcgcttcgatgaaaacctcaacccggttatctttgatcag

SEQ ID NO: 653799 - DNA, 75 bp, synthetic construct
  source 1..75: mol_type = other DNA
atgacgaccattcatgcctatactggcacccagtcactggtggatggcccgcgtggtaaagatttacgtgcttca

SEQ ID NO: 653800 - DNA, 75 bp, synthetic construct
  source 1..75: mol_type = other DNA
acgtattactccattctggatagcgacaagatgtatattaatgatagcagtactgaaagtcgttacggtgttcgg

SEQ ID NO: 653801 - DNA, 75 bp, synthetic construct
  source 1..75: mol_type = other DNA
ataaggatgattccactggactggtttatacggtttctctgaatcatgtcactacaacagatgtaacagttacag

SEQ ID NO: 653802 - DNA, 75 bp, synthetic construct
  source 1..75: mol_type = other DNA
tcaaggttccattaacggtggagaaggtagcgatactctggttctggcaggtaatatttctgtcaatctggctac

SEQ ID NO: 653803 - DNA, 75 bp, synthetic construct
  source 1..75: mol_type = other DNA
ttgccagcgcaccgtacaaaattgcagcgaagtccggtactgctcaggttttcggcctgaaagcgaacgaaacct

SEQ ID NO: 653804 - DNA, 75 bp, synthetic construct
  source 1..75: mol_type = other DNA
tccagcattggcgcgaaacatacggaccgggtagcaacgttgtgcttccagcagaagaagcggaagagctggcac

SEQ ID NO: 653805 - DNA, 75 bp, synthetic construct
  source 1..75: mol_type = other DNA
cccgatgccggtgccttatggtgagatgcttgtggggtcgcggcggatatcccaggacatcagcacccgcgatga

SEQ ID NO: 653806 - DNA, 75 bp, synthetic construct
  source 1..75: mol_type = other DNA
agcgatctgaaagctgacaatgcagctcagttagtcaagttaacggcatcggatgtattgggtataaatgacaat

SEQ ID NO: 653807 - DNA, 75 bp, synthetic construct
  source 1..75: mol_type = other DNA
taaatcccgccccttacgtgataacgcggcggaatttcttcaggtggtcgcagaaaatcgcgggctaagccagga

SEQ ID NO: 653808 - DNA, 75 bp, synthetic construct
  source 1..75: mol_type = other DNA
atggcgttgcatgtgcaatgagattatccagattactcgggttaagaacagaagaaacagtacagtctgctaaat

SEQ ID NO: 653809 - DNA, 75 bp, synthetic construct
  source 1..75: mol_type = other DNA
gctgatgacgatcaactgaaagcgcccgaggcactggcccgactaaaagggctaaaaaaagatgctactcaggtg

SEQ ID NO: 653810 - DNA, 75 bp, synthetic construct
  source 1..75: mol_type = other DNA
tggaaattatcggcgaaatgctgcgctttacccagggcggacgtttttatagcggtctggaacaactgaaaacgt

SEQ ID NO: 653811 - DNA, 75 bp, synthetic construct
  source 1..75: mol_type = other DNA
gcaacctgctgctggttaaaggtgctgtcccgggtgcaaccggtagcgacttgatcgttaaaccagctgtgaagg

SEQ ID NO: 653812 - DNA, 75 bp, synthetic construct
  source 1..75: mol_type = other DNA
agcgttacagcggggagatgaaaaaataagagtgatttttggtacgaaagggggacgggaaagaatgacaacggt

SEQ ID NO: 653813 - DNA, 75 bp, synthetic construct
  source 1..75: mol_type = other DNA
aaagaaaagatgaaggtgttgctcttgctgtgcaactttcccgatatcttggattgagaacagaagaaaccgtgc

SEQ ID NO: 653814 - DNA, 75 bp, synthetic construct
  source 1..75: mol_type = other DNA
catccctttacccgcctggttactcagcgattaatatggggcgtgtatccggcaaatgaaccgcgtcgtttactc

SEQ ID NO: 653815 - DNA, 75 bp, synthetic construct
  source 1..75: mol_type = other DNA
ttaatatggggggtttatccggcaaatgaaccgcgtcgtttacttaacgcctttcgtgtggccgctgagggggag

SEQ ID NO: 653816 - DNA, 75 bp, synthetic construct
  source 1..75: mol_type = other DNA
cccgcgtcttgaagctgccctacgtaccacccgacgctggtcgctggcagattttcattctctgtttgttaatca

SEQ ID NO: 653817 - DNA, 75 bp, synthetic construct
  source 1..75: mol_type = other DNA
cacggtgctgctcacacctgatgagtcaaccagtaacagcctgactcgctgggaaggtaaatccgctaccgttgg

SEQ ID NO: 653818 - DNA, 75 bp, synthetic construct
  source 1..75: mol_type = other DNA
atatcatgctcaagacagttgcttacgtgataacgcggcggaatttcttcaggtggtcgcagaaaatcgcgggct

SEQ ID NO: 653819 - DNA, 75 bp, synthetic construct
  source 1..75: mol_type = other DNA
ggcaaatgaaccgcgttgtttactcaacgcctttcgtgtggccgcagagggggagttctgcaatgcgcaagatga

SEQ ID NO: 653820 - DNA, 75 bp, synthetic construct
  source 1..75: mol_type = other DNA
atggatcatctacccatgccgaaattcgggccgctggccggattgcgcgttgtcttctccggtatcgaaatcgcc

SEQ ID NO: 653821 - DNA, 75 bp, synthetic construct
  source 1..75: mol_type = other DNA
gttttctgggcaggggaaaacccacgtcgattcttcatctgttagcccataaagatcccaacgaaaaatgggcgg

SEQ ID NO: 653822 - DNA, 75 bp, synthetic construct
  source 1..75: mol_type = other DNA
cgtattgagctgatttccagcagcgaagctgactggaatgctttgcagagcgcgctgttgaagcttcgtttagcg

SEQ ID NO: 653823 - DNA, 75 bp, synthetic construct
  source 1..75: mol_type = other DNA
ttcgacaccattggcattctggaatgggcgcgacttgcaccggtggaacgcgtcaaaggcgtgctgcgtattccc

SEQ ID NO: 653824 - DNA, 75 bp, synthetic construct
  source 1..75: mol_type = other DNA
ctgccatcctgttgtttctggtagtggcagtggatttcactaggcggttgatgtcggtactggctgatggtgtgt

SEQ ID NO: 653825 - DNA, 75 bp, synthetic construct
  source 1..75: mol_type = other DNA
cggtcattgtgcatcatggttatttctggaaaggggaatcgccagtaattcgcggtatgaagcgtaaccgcttaa

SEQ ID NO: 653826 - DNA, 75 bp, synthetic construct
  source 1..75: mol_type = other DNA
actggcctcctggattgaagcgcggctggggcgtaagccgctgtggtgcggcgacaccggaccggaattggtaca

SEQ ID NO: 653827 - DNA, 75 bp, synthetic construct
  source 1..75: mol_type = other DNA
aatggaaggcactgaacatctgcacaaggagaacactggcagcgatcagtatcacgccagcgataataaaactgg

SEQ ID NO: 653828 - DNA, 75 bp, synthetic construct
  source 1..75: mol_type = other DNA
cagaaaagaaacagcctgaaccagtcgtgcaacaggaagtagaaaaagtttgcaccgcctgcggtcagaccggcg

SEQ ID NO: 653829 - DNA, 75 bp, synthetic construct
  source 1..75: mol_type = other DNA
cacaaactgatgcagtggaaactgaagtatctgatacccaaaaaaatgaaagcacgctggaaactgaaccatctg

SEQ ID NO: 653830 - DNA, 75 bp, synthetic construct
  source 1..75: mol_type = other DNA
ttgatagagccgaccgggctgggccatccgaaacagatcctcgatctgttaaccgcaccagtctatgaaccgtgg

SEQ ID NO: 653831 - DNA, 75 bp, synthetic construct
  source 1..75: mol_type = other DNA
taatggtttacccatgcaggtagggttgaataccttactgcgtcagggaaaaccagaccgcttgttgatagagcc

SEQ ID NO: 653832 - DNA, 75 bp, synthetic construct
  source 1..75: mol_type = other DNA
gctgtggccggtgataaaaagaaacagcctgcataatgcttggtttttttgtttgctgtttattaaaaacacttc

SEQ ID NO: 653833 - DNA, 75 bp, synthetic construct
  source 1..75: mol_type = other DNA
gttatgcacgcagcactgaaaaaattcgcgtactgctgaattttctcaaggaggaaacctacagcgattttcaaa

SEQ ID NO: 653834 - DNA, 75 bp, synthetic construct
  source 1..75: mol_type = other DNA
ccagctgcgttttcgcgtttcactgggcaactattttaccggtcctggcagtattgcccgatcctatcgtacggc

SEQ ID NO: 653835 - DNA, 75 bp, synthetic construct
  source 1..75: mol_type = other DNA
tggcgcaagtatggcgagctggtctgtatgacagcggaaatgatgctggagcagtcgcgactgatgcaccttctc

SEQ ID NO: 653836 - DNA, 75 bp, synthetic construct
  source 1..75: mol_type = other DNA
atagcgcaaccgaacggtaacgccttccggttaaatggcggcaagaggcaacggcataccaccagcgggggcgat

SEQ ID NO: 653837 - DNA, 75 bp, synthetic construct
  source 1..75: mol_type = other DNA
accgggctggatttgggcaattttgatgacaggttgctgctgtatgtcgcgttgcaactggatgaagagcggtag

SEQ ID NO: 653838 - DNA, 75 bp, synthetic construct
  source 1..75: mol_type = other DNA
gacagcgcaatggcggagttacagcaactgcaaaacgcgctgactacgcccgagcgtaataatctggtggcgatt

SEQ ID NO: 653839 - DNA, 75 bp, synthetic construct
  source 1..75: mol_type = other DNA
acgctggcagcgtggtttcgccataatgtgcaaccgctggcaacgtcaaaggcgctgtttatccatcgaaatacg

SEQ ID NO: 653840 - DNA, 75 bp, synthetic construct
  source 1..75: mol_type = other DNA
gcttattctggagaaaaaaggcgcgtcgggatggattaacggcgaccggaccacttttatcagccagtatcaggt

SEQ ID NO: 653841 - DNA, 75 bp, synthetic construct
  source 1..75: mol_type = other DNA
gaagaaacctacagcgatttcaaaacgctgatgctgctatttggtttccgggatcataaatcgctttattcgctg

SEQ ID NO: 653842 - DNA, 75 bp, synthetic construct
  source 1..75: mol_type = other DNA
aacccgagcccgctaccagtcgattattgccagccacctgctggcccgtacccgcaagcagtggatttacgtttt

SEQ ID NO: 653843 - DNA, 75 bp, synthetic construct
  source 1..75: mol_type = other DNA
agcgatcaggcggggttatgggagtttgccggtggcaaagtcgaggcggatgaaagtcagccacaggcgctggta

SEQ ID NO: 653844 - DNA, 75 bp, synthetic construct
  source 1..75: mol_type = other DNA
atgaatatgattgaagttgttgccgccatcatcgaacgtgatggcaaaattttactcgcgcaacgccccgcccat

SEQ ID NO: 653845 - DNA, 75 bp, synthetic construct
  source 1..75: mol_type = other DNA
tggtgttaactccggatgataaaatctttcccgcgaggtttgaaccgtccagaattaccggctggacgctggagc

SEQ ID NO: 653846 - DNA, 75 bp, synthetic construct
  source 1..75: mol_type = other DNA
aatgaagaaacagacctgggcactgttgatgttctccagtcatcagaaacacaaactgatgcagtggaaactgag

SEQ ID NO: 653847 - DNA, 75 bp, synthetic construct
  source 1..75: mol_type = other DNA
aatctccggcatctcatcaaggacgctggccaacaccatgcacaccatggctgcacgtggatatgagtacaagga

SEQ ID NO: 653848 - DNA, 75 bp, synthetic construct
  source 1..75: mol_type = other DNA
gagaaagccaactatctaactacataccgggccttgctctattgaccaatagcagcacagcacacattaaatcac

SEQ ID NO: 653849 - DNA, 75 bp, synthetic construct
  source 1..75: mol_type = other DNA
gagcaactgtcattctcgaagagttgctatttcgggatcgacattaaaaacggcaccatgctgtatgtgcgcatt

SEQ ID NO: 653850 - DNA, 75 bp, synthetic construct
  source 1..75: mol_type = other DNA
gattatttcaccctcagagagagaattgaaatcagttataaacagataagagcattgcaggactatatctctagt

SEQ ID NO: 653851 - DNA, 75 bp, synthetic construct
  source 1..75: mol_type = other DNA
acagaaacggcgcgccaggatgcgcgggcgctgaagaaaaccgttctggcattaccgatgccggaggttgacgtg

SEQ ID NO: 653852 - DNA, 75 bp, synthetic construct
  source 1..75: mol_type = other DNA
gctgaagtgtggcgttgcattgacgaggaacttagctcgcattttacgctgcatcttgttgacctgcccggcttc

SEQ ID NO: 653853 - DNA, 75 bp, synthetic construct
  source 1..75: mol_type = other DNA
cacgtaagcgctttactggcgcagaatttatcgtttatttcctggaacaacagggcattaaggttgtgacgggga

SEQ ID NO: 653854 - DNA, 75 bp, synthetic construct
  source 1..75: mol_type = other DNA
acgcgattattaccaccgatgttggtcaacatcagatgtggacggcgcaggcctatccgctcaatcgtccacgtc

SEQ ID NO: 653855 - DNA, 75 bp, synthetic construct
  source 1..75: mol_type = other DNA
acggcggtttttgagattgaagctcagcccgcggtggcagaaaaagccgctgcacccgcctttagcgaagaaagc

SEQ ID NO: 653856 - DNA, 75 bp, synthetic construct
  source 1..75: mol_type = other DNA
ctggaaatccacaccacctatgtgagtctgccgatgatccctcttgaaatctccggcatctcagcaaggacgctg

SEQ ID NO: 653857 - DNA, 75 bp, synthetic construct
  source 1..75: mol_type = other DNA
ggaaaacgaccagagcgagcaatgggaaattgtccggatacccaaaaactccagtctacgacaggtgcttttacg

SEQ ID NO: 653858 - DNA, 75 bp, synthetic construct
  source 1..75: mol_type = other DNA
tgccaagtagcgttgcgagtacctttggcctcgatgagctagccgcacaactgaatggcaaaggtcccacgatga

SEQ ID NO: 653859 - DNA, 75 bp, synthetic construct
  source 1..75: mol_type = other DNA
ctccggcatctcagcaaggacgctggccaacaccatgcacaccatggctgcacgtggatatgagtacaaggaacg

SEQ ID NO: 653860 - DNA, 75 bp, synthetic construct
  source 1..75: mol_type = other DNA
ccgcctgcggtcagagcggtggcggcaactgccctgattgtggtgcggtgatgggtgacgcaacataccaggaaa

SEQ ID NO: 653861 - DNA, 75 bp, synthetic construct
  source 1..75: mol_type = other DNA
ttttgttcaggtctggggtaacggtgcaactttcgacaacgtgattttacgccgttcatatgaacggcaggggat

SEQ ID NO: 653862 - DNA, 75 bp, synthetic construct
  source 1..75: mol_type = other DNA
acaaggagaacactggcggcaatcagcatcacgatagcgataatgaaactggcgagacggcagatcactcaatta

SEQ ID NO: 653863 - DNA, 75 bp, synthetic construct
  source 1..75: mol_type = other DNA
acgccataacgcgctgcacgatgcgcgttaccaagcaaaatacgtttcagccatctggcaaaaactgatcccgag

SEQ ID NO: 653864 - DNA, 75 bp, synthetic construct
  source 1..75: mol_type = other DNA
acaacgatcgcgatgtacgcacaatcgttgagctggggaaagccatagacttcgatgccagaacggctattccat

SEQ ID NO: 653865 - DNA, 75 bp, synthetic construct
  source 1..75: mol_type = other DNA
atgatctggcagcctgagttcacagataaaatactctccaggaaacccggggcggttcaaactgatactctctcg

SEQ ID NO: 653866 - DNA, 75 bp, synthetic construct
  source 1..75: mol_type = other DNA
acggtaatccatgggaagagatgttttatctggatattcaggccaatcttgaatcagcggaaatgcaaaaagcat

SEQ ID NO: 653867 - DNA, 75 bp, synthetic construct
  source 1..75: mol_type = other DNA
ttactctggctatatctgagaaccagagcgaaaaaaagaaagtccagcaggttgttcagcagataaaagaaagct

SEQ ID NO: 653868 - DNA, 75 bp, synthetic construct
  source 1..75: mol_type = other DNA
gaacagatattcaagcatatctatatacttgtggcagttggtttctattaataattccttcactatggctatatc

SEQ ID NO: 653869 - DNA, 75 bp, synthetic construct
  source 1..75: mol_type = other DNA
cttctccggcgacatcgccaaagctatcgccgctggcgcaagcgcggtgatggtaggttccatgctggcgggtac

SEQ ID NO: 653870 - DNA, 75 bp, synthetic construct
  source 1..75: mol_type = other DNA
tgcgcgaccggaatgtggggcgcttaaaaccgggatgtctttgacgttacttaaacaaggcgtttattttccggg

SEQ ID NO: 653871 - DNA, 75 bp, synthetic construct
  source 1..75: mol_type = other DNA
ttctctgccgcaagtaaaagcatactacccgcaggacgaattcgtggagtggcataggagggaggtgttcaggag

SEQ ID NO: 653872 - DNA, 75 bp, synthetic construct
  source 1..75: mol_type = other DNA
gattatttcaccctcagagcgcgactgataataatgcaaaaacaagaggctgatcactatgcaaaaacaactgga

SEQ ID NO: 653873 - DNA, 75 bp, synthetic construct
  source 1..75: mol_type = other DNA
caacgccacctgctccggtaccgagcgtgaagccaccggcacctccggcgtggataatgcaaccggcccccgact

SEQ ID NO: 653874 - DNA, 75 bp, synthetic construct
  source 1..75: mol_type = other DNA
gcactggaactggttgatccctccagtgctccagatattgaatggcctacgcctccggcagttcaggccagatga

SEQ ID NO: 653875 - DNA, 75 bp, synthetic construct
  source 1..75: mol_type = other DNA
gcagcgcgataaaaaagccagtgagctggagctggcgaacgcgacaattactgatatgcagatacgccagcgtga

SEQ ID NO: 653876 - DNA, 75 bp, synthetic construct
  source 1..75: mol_type = other DNA
ataaaccgttataccagggctttatcaacggtcatgagccgtgcgggcaaattgtggcgatggggcaaggctgtc

SEQ ID NO: 653877 - DNA, 75 bp, synthetic construct
  source 1..75: mol_type = other DNA
aggatcatcggcgttgatatgctgccggaacgtctggcgatggcgaaacagttaggggtgatggatcacggctat

SEQ ID NO: 653878 - DNA, 75 bp, synthetic construct
  source 1..75: mol_type = other DNA
gccattttaaagagggcgaccgcgtgctggtgtatcacatttctggctgtggtttttgcccgaactgccgccgcg

SEQ ID NO: 653879 - DNA, 75 bp, synthetic construct
  source 1..75: mol_type = other DNA
ggattgatattccaccgccaactcatgaggaacaaattgccgcagccgaactggaaaagcagcaattgattaatc

SEQ ID NO: 653880 - DNA, 75 bp, synthetic construct
  source 1..75: mol_type = other DNA
cagttgtcctcctggtggcctgcggtgcgctgtggctggcaacagaccactaccgggataacgccatcacctaca

SEQ ID NO: 653881 - DNA, 75 bp, synthetic construct
  source 1..75: mol_type = other DNA
gcctccggcgtggatgatggcaccagccccagacttactgacaccgctcaacgggattatttcacccttagaaag

SEQ ID NO: 653882 - DNA, 75 bp, synthetic construct
  source 1..75: mol_type = other DNA
ggtcccgtgcgtgaagccaccggcaccgcccgcgtggataatgcaaccggcccccaactggcagacaccgttaca

SEQ ID NO: 653883 - DNA, 75 bp, synthetic construct
  source 1..75: mol_type = other DNA
tgatttttggtcctccgggtctgggtaaaaccacacttgccaacatcgtcgccaatgaaatgggcgtcaatttac

SEQ ID NO: 653884 - DNA, 75 bp, synthetic construct
  source 1..75: mol_type = other DNA
atgattgaagcagaccgtctgatttctgccggtaccactttgccggaagatgtggcagatcgcgccattcgccct

SEQ ID NO: 653885 - DNA, 75 bp, synthetic construct
  source 1..75: mol_type = other DNA
cgaggtggaatcgacaagataaccgcgcaggttaactacctgcaggaatacatcaggacgcagtgcttaaaataa

SEQ ID NO: 653886 - DNA, 75 bp, synthetic construct
  source 1..75: mol_type = other DNA
cctggcgcggcgaacgcaactggctggagaatatgcacgagcatgatcatgagcatcatcaccacgatcacgaag

SEQ ID NO: 653887 - DNA, 75 bp, synthetic construct
  source 1..75: mol_type = other DNA
tttcgatggtagagaggccaccaactggcaaatattgctatttggcttaacaggtggccttatcccctgccctgc

SEQ ID NO: 653888 - DNA, 75 bp, synthetic construct
  source 1..75: mol_type = other DNA
ccagatatacaaaggagcttgctgatgctaacgcgactatcgaaagcctccgtgctgatgtttctgctgggcgta

SEQ ID NO: 653889 - DNA, 75 bp, synthetic construct
  source 1..75: mol_type = other DNA
tcattgccctgctggtggcctgtggtgcgcttagcctggggttgaatcattaccgtgataacgccatcacctaca

SEQ ID NO: 653890 - DNA, 75 bp, synthetic construct
  source 1..75: mol_type = other DNA
gcctgtcgtgggcggtcaatcattaccgtgataacgccatcgcctacaaagaacagcgtgataaaaaagtcagtg

SEQ ID NO: 653891 - DNA, 75 bp, synthetic construct
  source 1..75: mol_type = other DNA
ttcatcctcagagaacggttgatgacaatgcagaagcagctggaaggggcgaaggaatatatccgcactcagtgt

SEQ ID NO: 653892 - DNA, 75 bp, synthetic construct
  source 1..75: mol_type = other DNA
gattatttcaccctcagagcgcgactgacaataatgcaaaaacaactggaaggggcacagctatacattcgtgaa

SEQ ID NO: 653893 - DNA, 75 bp, synthetic construct
  source 1..75: mol_type = other DNA
tccggtaatgccgcaggtcgcttgctggcactgcaatccactgctgactgggggcgggtggtttacattggtgaa

SEQ ID NO: 653894 - DNA, 75 bp, synthetic construct
  source 1..75: mol_type = other DNA
caatgcagaagcagctggaaggggcgcaggaatatatccgcactcagtgcactaagctggctttttattatccgg

SEQ ID NO: 653895 - DNA, 75 bp, synthetic construct
  source 1..75: mol_type = other DNA
ggcccggacaggccgaacctgccgcgcagaaaggcgctcaggcgttagagcgaggaatcgcaattttgcagtatc

SEQ ID NO: 653896 - DNA, 75 bp, synthetic construct
  source 1..75: mol_type = other DNA
tactaattaaccaggctaacgaatacatgaacagtaagcaatggcctggcaaatcagctattggtcgtctgaaag

SEQ ID NO: 653897 - DNA, 75 bp, synthetic construct
  source 1..75: mol_type = other DNA
cctccggcatgggcaatgattccaccgtcgaactctctccagttgctggacgaaacgttctcggtgtccgggacg

SEQ ID NO: 653898 - DNA, 75 bp, synthetic construct
  source 1..75: mol_type = other DNA
cgatgcagaagcaactggaaggggcgcaggaatatatccgtactcagtgcattaagttgtctttttattatccgg

SEQ ID NO: 653899 - DNA, 75 bp, synthetic construct
  source 1..75: mol_type = other DNA
gcgggcgatttgccagatttgaaactgcctttgatggattacgggctcttgctcgtcagttaatgctgtacgccg

SEQ ID NO: 653900 - DNA, 75 bp, synthetic construct
  source 1..75: mol_type = other DNA
ggttctgtcctcgccggtacaactgcaaatgtcatcaaaatggggctggccgtcgaaggagctgcgctgtccgtg

SEQ ID NO: 653901 - DNA, 75 bp, synthetic construct
  source 1..75: mol_type = other DNA
gagagctgccgcacgatggatggaagtcatgctgttatgcaccgaggacgatgatcgggaatggataaagcgccg

SEQ ID NO: 653902 - DNA, 75 bp, synthetic construct
  source 1..75: mol_type = other DNA
caacgtaatgtagctgaactcgatgccagatatacaaaggagcttgctgatgctaatgcgactatcgaaagtctt

SEQ ID NO: 653903 - DNA, 75 bp, synthetic construct
  source 1..75: mol_type = other DNA
gttcaacatcaatcgtttcagtcggaggacgctgcgcaaggggaaaccgatgacggaaaatcaggtgagttattt

SEQ ID NO: 653904 - DNA, 75 bp, synthetic construct
  source 1..75: mol_type = other DNA
aagctaagaaatattaaggcatttaatacacgttttcaaaatgttactttcgaaaactgcagttttgaagggggg

SEQ ID NO: 653905 - DNA, 75 bp, synthetic construct
  source 1..75: mol_type = other DNA
gtgctgctgatgtactcgatgctaaatacacgaaggagttggctgatgcgaaagctgaaaatgatgctcttcggc

SEQ ID NO: 653906 - DNA, 75 bp, synthetic construct
  source 1..75: mol_type = other DNA
acaaaaagcagcgtgatgagaatgctatggcattagattcggctatggcgaccatctctgatatgcagaagcgtc

SEQ ID NO: 653907 - DNA, 75 bp, synthetic construct
  source 1..75: mol_type = other DNA
gaatgacgaaccaattaaattactcatcggactctctgctgccgatgccgattcgcacattggggtaatgactcc

SEQ ID NO: 653908 - DNA, 75 bp, synthetic construct
  source 1..75: mol_type = other DNA
tgcacgaccggaatgtggggcgcttaaaaccgggatgtcactgacattactcgaacagccagtttgtttccccgg

SEQ ID NO: 653909 - DNA, 75 bp, synthetic construct
  source 1..75: mol_type = other DNA
ttattaccgtctccgaagtggaatcgacaagataaccgcgcaggttaactacatgcaggaatacatcaggacgca

SEQ ID NO: 653910 - DNA, 75 bp, synthetic construct
  source 1..75: mol_type = other DNA
aagagcagcgcgataaggccgcatccacaatcgctgacatgcagaagcgtcaacgtgatgtagcagaacttgacg

SEQ ID NO: 653911 - DNA, 75 bp, synthetic construct
  source 1..75: mol_type = other DNA
gcatgggcgatggagaaagcccaggacttacagcagatgctgaactcaattattaccgtctccgaagtggaatcg

SEQ ID NO: 653912 - DNA, 75 bp, synthetic construct
  source 1..75: mol_type = other DNA
tggaaaaaagtgggggaagttcgtcggttagcgatatttctctcaatctggatttgccgctctccacgacctttc

SEQ ID NO: 653913 - DNA, 75 bp, synthetic construct
  source 1..75: mol_type = other DNA
ggataatgcaaccggcccccgactggcagacaccgttacacgggattatttcaccctcagagagcggctgatgac

SEQ ID NO: 653914 - DNA, 75 bp, synthetic construct
  source 1..75: mol_type = other DNA
gtgtctttaacgtcggtgcggcgtacatccataaccgcgatgtcctctccgtcgccgggccgtttatgcgccgcc

SEQ ID NO: 653915 - DNA, 75 bp, synthetic construct
  source 1..75: mol_type = other DNA
taccgtctccgaagtggaatcgacaaaataaccgctcaggtgaattacctgcaggaatacataaaaactcagtgc

SEQ ID NO: 653916 - DNA, 75 bp, synthetic construct
  source 1..75: mol_type = other DNA
ttactgtactgctggcgtcctgtggtgctctgtggctggcaacagaccattaccgtgataacgccattacctaca

SEQ ID NO: 653917 - DNA, 75 bp, synthetic construct
  source 1..75: mol_type = other DNA
aacgctggcgaagatcctctgtgtaattgtcggcatttcattttcactaatgctggttgctctttttctttccat

SEQ ID NO: 653918 - DNA, 75 bp, synthetic construct
  source 1..75: mol_type = other DNA
acttcccgtatgtgctgatgaatccgcgtctgatcctcgcagtcatcctcggcggtatgactggcgtgttcacgc

SEQ ID NO: 653919 - DNA, 75 bp, synthetic construct
  source 1..75: mol_type = other DNA
ctatcaacctggcggagccgaaagttagaaggctgacgcccgaggaggtgggtgaattgcgccaagatatggctg

SEQ ID NO: 653920 - DNA, 75 bp, synthetic construct
  source 1..75: mol_type = other DNA
caatggctatggcgactctgtttgccaccatggctgcctctgcagtcgaaaaaaatattactgtgagggcaagtg

SEQ ID NO: 653921 - DNA, 75 bp, synthetic construct
  source 1..75: mol_type = other DNA
ctttgaaattattctggcggccaaaagccattgagttagaagacgatggggtaatgacttacgaaaaagttgaaa

SEQ ID NO: 653922 - DNA, 75 bp, synthetic construct
  source 1..75: mol_type = other DNA
ctacagcagaaaaccttttgaaagcacttcctcgtgaggagcaaatacctgtaatggaaggtttaattaaccagt

SEQ ID NO: 653923 - DNA, 75 bp, synthetic construct
  source 1..75: mol_type = other DNA
ccgcagcagaagctcttttggaaacgcttcctcgtgaggaacaagtgcctgtaatggaaggtttaattagccagt

SEQ ID NO: 653924 - DNA, 75 bp, synthetic construct
  source 1..75: mol_type = other DNA
gggtgcacctggtgaagacggtaatacaacacaggttgttatcccgccgaacagccgtgactggcataccaatat

SEQ ID NO: 653925 - DNA, 75 bp, synthetic construct
  source 1..75: mol_type = other DNA
ggctttggaaaagtacacgcggctgataattcaaccgtatctgacaaggtggagcgcgttgaaaaaacagataac

SEQ ID NO: 653926 - DNA, 75 bp, synthetic construct
  source 1..75: mol_type = other DNA
atgggaacaaaagcaggaacaagcccagattcagaaagcactgagaaccgcacaaaccccgcgtaactgggacta

SEQ ID NO: 653927 - DNA, 75 bp, synthetic construct
  source 1..75: mol_type = other DNA
gctatttcacttacttattctcctgcagcaaaagggttcgaaccttatacactaccaacggcagtacatacaaat

SEQ ID NO: 653928 - DNA, 75 bp, synthetic construct
  source 1..75: mol_type = other DNA
cacggcttgtactacgttccggtgatgccgtagtagggctgaaaaataacggctttggaaaagtacacgcggctg

SEQ ID NO: 653929 - DNA, 75 bp, synthetic construct
  source 1..75: mol_type = other DNA
cggattctcacccaacaaatcagttccatcagttaccaaagaacaaaacggccaggaatacgtggttaacagcag

SEQ ID NO: 653930 - DNA, 75 bp, synthetic construct
  source 1..75: mol_type = other DNA
tgattacggtgggctggaaatgttcaaaattgactgtaattccgttcagtcactctgccaagctacacctgcgaa

SEQ ID NO: 653931 - DNA, 75 bp, synthetic construct
  source 1..75: mol_type = other DNA
ttatctgctggaagatcgtgaactttacccgacggatggcaacgggcatttcttttgggcggcaacggaccatag

SEQ ID NO: 653932 - DNA, 75 bp, synthetic construct
  source 1..75: mol_type = other DNA
tcatgcggcgtctatcgttgggatgacggtgatcggcgcactggtagcgacctatgtccgtttaagcaccacgct

SEQ ID NO: 653933 - DNA, 75 bp, synthetic construct
  source 1..75: mol_type = other DNA
gccgttgccgcctgcgtggatgacaacgcgattattaccactgatgttggtcagcatcagatgtggacggcgcaa

SEQ ID NO: 653934 - DNA, 75 bp, synthetic construct
  source 1..75: mol_type = other DNA
gtgcagcgattatcaacgcgcttcatctcactgaagacgatattttgcaaggcttgccaatccaggtggctacca

SEQ ID NO: 653935 - DNA, 75 bp, synthetic construct
  source 1..75: mol_type = other DNA
caaacgtcactggcaggaaaacaccgcgtgactatcgaaaagcataacgatgattatcgtatttcgctggaacaa

SEQ ID NO: 653936 - DNA, 75 bp, synthetic construct
  source 1..75: mol_type = other DNA
ccgcaagcagatgccttttttctggattttgccatcaacgatgacggcgaacgtccggagttgacgaaaataatg

SEQ ID NO: 653937 - DNA, 75 bp, synthetic construct
  source 1..75: mol_type = other DNA
atgaaaatatcaggttttattgccgggttttattttactggtatgagtttctttcccgtgatgtcgtgggctgca

SEQ ID NO: 653938 - DNA, 75 bp, synthetic construct
  source 1..75: mol_type = other DNA
atgcgattatcaccaccgacgtgggtcagcatcagatgtggaccgcgcaagcctatccgctcactcgcccgcgcc

SEQ ID NO: 653939 - DNA, 75 bp, synthetic construct
  source 1..75: mol_type = other DNA
aatcaggccgccctggcccggtgtggatagacattcctaaggatgtgcaaacggcagtttttgagattgaagcac

SEQ ID NO: 653940 - DNA, 75 bp, synthetic construct
  source 1..75: mol_type = other DNA
gatagacattcctaaggatgtgcaaacggccgtttttgagattgaagcacagcccgcggtggcagaaaaagccat

SEQ ID NO: 653941 - DNA, 75 bp, synthetic construct
  source 1..75: mol_type = other DNA
acgccgccaaacgcccggtgctttatctgggcggcggtgtgatcaatgcgcccgcacgggtgcgtgaactggcag

SEQ ID NO: 653942 - DNA, 75 bp, synthetic construct
  source 1..75: mol_type = other DNA
acgccgccaaacgcccggtgctttatctgggtggtggtgtgatcaacgcgcctgcgcgagtgcgtgaactggcgg

SEQ ID NO: 653943 - DNA, 75 bp, synthetic construct
  source 1..75: mol_type = other DNA
acagccgggactggcataccaacatgctggttgtcacgaataagcgcctgtacaacgtcgagctgaatgtcatcg

SEQ ID NO: 653944 - DNA, 75 bp, synthetic construct
  source 1..75: mol_type = other DNA
atgggaaagaatagtcaacgtaggcgagataataaaattaagcgagaaaatgagaaaaaaagaaacttagcggca

SEQ ID NO: 653945 - DNA, 75 bp, synthetic construct
  source 1..75: mol_type = other DNA
tgccacaacaaatcgtactggcgaaagaaaatatcgcgaatgcaggtttttctgatcgcatagatttccatgcgg

SEQ ID NO: 653946 - DNA, 75 bp, synthetic construct
  source 1..75: mol_type = other DNA
aacatcgccgttacgttattagatctgccacaacaaatcgtactggcgaaagaaaatatcgcgaatgcaggtttt

SEQ ID NO: 653947 - DNA, 75 bp, synthetic construct
  source 1..75: mol_type = other DNA
atccttatggcgtgagctggcaaaatctggtggatagccagcagattatggatatcaccctcgaccagtttaacg

SEQ ID NO: 653948 - DNA, 75 bp, synthetic construct
  source 1..75: mol_type = other DNA
aatttttccgtgcgccaccgccacaaaatggtcgctcttttctttcctccctccggtttgcaggagacaccctat

SEQ ID NO: 653949 - DNA, 75 bp, synthetic construct
  source 1..75: mol_type = other DNA
tgacagcggtttccaggttgtacatatgggctacggtgtcgatgaaaaagtgcaggtgccgcaacaactgcatca

SEQ ID NO: 653950 - DNA, 75 bp, synthetic construct
  source 1..75: mol_type = other DNA
atcaggtgatgaaccacctcttcgctaccaccgatctggaaaagagctatcgcattaaccttaatatgatcggtc

SEQ ID NO: 653951 - DNA, 75 bp, synthetic construct
  source 1..75: mol_type = other DNA
cgaagcggaaatcatcacctcccgcgccgagatccgtaaaatctacgagaacggtcgtggttctgtgcgtatgcg

SEQ ID NO: 653952 - DNA, 75 bp, synthetic construct
  source 1..75: mol_type = other DNA
atggcgaccgatattccaccgcataacctgcgtgaagtagctcaggcggcaatcgcattaatcgaccagccgaaa

SEQ ID NO: 653953 - DNA, 75 bp, synthetic construct
  source 1..75: mol_type = other DNA
cgtcagattggcattcttttccaggatgcactgttatttgaccagttcagcgtcgggcaaaatttactgctggct

SEQ ID NO: 653954 - DNA, 75 bp, synthetic construct
  source 1..75: mol_type = other DNA
taggcggcaatacgggtaagtgggctttgcgttgctgcaaatacaatgaaaacatcgccgtgacgttattagatc

SEQ ID NO: 653955 - DNA, 75 bp, synthetic construct
  source 1..75: mol_type = other DNA
tcctgaatgaatatgccgtgggtgtgttactggatatgggcttaagcgggcgaattattacctgtaaagagggaa

SEQ ID NO: 653956 - DNA, 75 bp, synthetic construct
  source 1..75: mol_type = other DNA
agcaggcgtgccaaccgtgctggtgggtaaggtggcagatatcgtcagcaatccttatggcgtgagctggcaaaa

SEQ ID NO: 653957 - DNA, 75 bp, synthetic construct
  source 1..75: mol_type = other DNA
ttgcaggagccgaaaatgctacctgcccgtctgccaaacattttgcttaacggcaccaccggtattgccgtcggc

SEQ ID NO: 653958 - DNA, 75 bp, synthetic construct
  source 1..75: mol_type = other DNA
ggtattcagaaatgtgataccgggtatcagaaaaacgggggcttatggtatcccgtggggcgcattacaggattt

SEQ ID NO: 653959 - DNA, 75 bp, synthetic construct
  source 1..75: mol_type = other DNA
tcccatggggtgcattacaggtttttccccgccgtaaagagcaatatcaaataagtgccagcgagaaggggaggg

SEQ ID NO: 653960 - DNA, 75 bp, synthetic construct
  source 1..75: mol_type = other DNA
caaacgctctacgaactgcggttccgggacggtgataaggaaggttgctgcgctcatggcctgcacgtccaggta

SEQ ID NO: 653961 - DNA, 75 bp, synthetic construct
  source 1..75: mol_type = other DNA
acggtcgcggttctgtgcgtatgcgcgcggtgtggaagaaagaagatggcgcggtggttatcagcgcactaccgc

SEQ ID NO: 653962 - DNA, 75 bp, synthetic construct
  source 1..75: mol_type = other DNA
gggtacgcagcgctaaaggccatgatatcgacgcgccgggcctgaattataaagcgggtgatagcttcaaagcgg

SEQ ID NO: 653963 - DNA, 75 bp, synthetic construct
  source 1..75: mol_type = other DNA
atgtcacgctggtgcgtccgcaagatgcggggagcgaatacctgtggtcacatcctgagccagttgccgcatttg

SEQ ID NO: 653964 - DNA, 75 bp, synthetic construct
  source 1..75: mol_type = other DNA
tcgtgatggcggatcacggtaacgatccgaccattggtcacagccaccatacccgtgaagtagtgccagtgctgg

SEQ ID NO: 653965 - DNA, 75 bp, synthetic construct
  source 1..75: mol_type = other DNA
gtcacatcctgagccagctgccgcatttgcagctaccaatgctggagaaaatggggctaatcaacgcattaggtt

SEQ ID NO: 653966 - DNA, 75 bp, synthetic construct
  source 1..75: mol_type = other DNA
aaaattctgcgatattcgtgatctggtcgttctgcgctttgatggcgtggatgttcgtgtggtgtatctgaacgg

SEQ ID NO: 653967 - DNA, 75 bp, synthetic construct
  source 1..75: mol_type = other DNA
agaaacgcgcaggggaattcagaacctatctggatgcgtgagactagcgggatggcaaactcctttagcgaacga

SEQ ID NO: 653968 - DNA, 75 bp, synthetic construct
  source 1..75: mol_type = other DNA
ctcgaggcggatttaggccaggtctataacattaccgccaatctctctgtgatctcttttgacgacgcaatcaaa

SEQ ID NO: 653969 - DNA, 75 bp, synthetic construct
  source 1..75: mol_type = other DNA
aaagtgatgatcccgttgaaaccagaagtggatatcgacgccctttcgcctgatcttgctgcgctgagcgctatc

SEQ ID NO: 653970 - DNA, 75 bp, synthetic construct
  source 1..75: mol_type = other DNA
agcaccacgatggttatcgtatttcgctggaacaaggtacgccaggctttgagccaccgctggaaggtgaaacac

SEQ ID NO: 653971 - DNA, 75 bp, synthetic construct
  source 1..75: mol_type = other DNA
gtaaattgttagaaattccatttaatccggtgtatcggaattttgacaaagcactccaggaaattactaactggc

SEQ ID NO: 653972 - DNA, 75 bp, synthetic construct
  source 1..75: mol_type = other DNA
tcttaccgaagacgatattttgcccggtttgccgatccaggtagccacgaccgggcattcaaaagtgttgatccc

SEQ ID NO: 653973 - DNA, 75 bp, synthetic construct
  source 1..75: mol_type = other DNA
atgcttttacctctcaaccgtttcgcggcaattctgccggtgttgttttccctgccgataatcttagcgaagcgc

SEQ ID NO: 653974 - DNA, 75 bp, synthetic construct
  source 1..75: mol_type = other DNA
gtattgtggaagatccggtgactggcaatgccaatggcccgatgggtgcatggttggtacatcacaacgtattgc

SEQ ID NO: 653975 - DNA, 75 bp, synthetic construct
  source 1..75: mol_type = other DNA
gtaaattattagagatcccatttaacccggtgtatcggaattttgacaaaggtcttcaggaaatcacagactgga

SEQ ID NO: 653976 - DNA, 75 bp, synthetic construct
  source 1..75: mol_type = other DNA
cacgtcttaaaggcgctgcctaacgtcccgtgggtggatcacacccgtgtcgcggcctttggtttccgttttggc

SEQ ID NO: 653977 - DNA, 75 bp, synthetic construct
  source 1..75: mol_type = other DNA
cagctgggccaggttctggggccgcgcggcctgatgccaaacccgaaagtgggtactgtaacgccgaacgttgct

SEQ ID NO: 653978 - DNA, 75 bp, synthetic construct
  source 1..75: mol_type = other DNA
ccctgttcaaaccccgctttaaacatcctgaaacgtcgacgctagtccgccgcttttatcacggcgcgcaatcgc

SEQ ID NO: 653979 - DNA, 75 bp, synthetic construct
  source 1..75: mol_type = other DNA
gtaaattgttagagattccgttcaatccggtgtatcggaattttgacaaagcgcttcaggaaatcaccaactgga

SEQ ID NO: 653980 - DNA, 75 bp, synthetic construct
  source 1..75: mol_type = other DNA
gtaaattgttagagattccatttaatccggtgtatcggaattttgacaaaggtcttcaggaaatcacgagctgga

SEQ ID NO: 653981 - DNA, 75 bp, synthetic construct
  source 1..75: mol_type = other DNA
cggttatcgctgacggtggtattcgtttctccggcgacatcgccaaagctatcgccgctggcgcaagcgcggtaa

SEQ ID NO: 653982 - DNA, 75 bp, synthetic construct
  source 1..75: mol_type = other DNA
atttatgaacgagcagaaagtgctttcgatgatgatatagatttttaccttaagaacggttatgtgtcttctgaa

SEQ ID NO: 653983 - DNA, 75 bp, synthetic construct
  source 1..75: mol_type = other DNA
acggcccttcctcgggaggggctttcccgtttcagcgtcccgctgaaatcgtcggcttacctcctttcgccctgt

SEQ ID NO: 653984 - DNA, 75 bp, synthetic construct
  source 1..75: mol_type = other DNA
cgtcgcctggtgcacggggggcgggcaaagttttatcgatagcgccgcgcgttttggcgtggatgcttttattac

SEQ ID NO: 653985 - DNA, 75 bp, synthetic construct
  source 1..75: mol_type = other DNA
cacgtaagcgctttaccggcgcagagtttatcgttcacttcctggaacaacagggtattaagattgtgacgggga

SEQ ID NO: 653986 - DNA, 75 bp, synthetic construct
  source 1..75: mol_type = other DNA
catttaactggcgaagcgatgccggaaacgcgcaatgtgctgattgaagcggcacgaataacgcgcggtgaaatc

SEQ ID NO: 653987 - DNA, 75 bp, synthetic construct
  source 1..75: mol_type = other DNA
ggcacgaataacgcgcggtgaaatccgtcctctggcccaggccgatgccgctgaactggatgcgttgattgtgcc

SEQ ID NO: 653988 - DNA, 75 bp, synthetic construct
  source 1..75: mol_type = other DNA
tcgttactggcgtaggtgttccgcagatcactgccgttgctgacgcagttgaagccctggaaggcaccggtattc

SEQ ID NO: 653989 - DNA, 75 bp, synthetic construct
  source 1..75: mol_type = other DNA
ctctaccagggccgttcttacaagtcttaccgtgggatgggctctctgggcgcgatgtccaaaggttcttctgac

SEQ ID NO: 653990 - DNA, 75 bp, synthetic construct
  source 1..75: mol_type = other DNA
attgaacgccaggcagaagaagttcgccgtgtgaaaaaacacgaatctggcgtggtaactgatccgcagactgtt

SEQ ID NO: 653991 - DNA, 75 bp, synthetic construct
  source 1..75: mol_type = other DNA
cgtggtaaccgatccgcagaccgtactgccaaccacgacgctgcgcgaagtgaaagagctgaccgagcgtaacgg

SEQ ID NO: 653992 - DNA, 75 bp, synthetic construct
  source 1..75: mol_type = other DNA
accgtaacggaagcgcgcctggctatcgccctggctcaggaaggcggtataggctttatccacaaaaacatgtct

SEQ ID NO: 653993 - DNA, 75 bp, synthetic construct
  source 1..75: mol_type = other DNA
ttccagaaagcagaacgtaaaccgaacgcctgtaaagacgaacaaggtcgtctgcgtgttggtgcagcggttggt

SEQ ID NO: 653994 - DNA, 75 bp, synthetic construct
  source 1..75: mol_type = other DNA
gacgaactgcgtactaaagcggagtttgtacgtatcagcggtgctggcattcaggaaagccacgttcatgacgtg

SEQ ID NO: 653995 - DNA, 75 bp, synthetic construct
  source 1..75: mol_type = other DNA
atggacagactattgaagcaacgttcgatagtgaggtgactgcaagcactgagtggcacgcgccactaaatgtgg

SEQ ID NO: 653996 - DNA, 75 bp, synthetic construct
  source 1..75: mol_type = other DNA
agaatgcggcagggagtgctattggcacagcaaaggttaacattacttttgcgggtattgcgggggttggtggag

SEQ ID NO: 653997 - DNA, 75 bp, synthetic construct
  source 1..75: mol_type = other DNA
aaagtacctgattgatcgaggcattctggcaaaaccgtacttcctttatcataaagttgcctacaagccagacga

SEQ ID NO: 653998 - DNA, 75 bp, synthetic construct
  source 1..75: mol_type = other DNA
tctgcgcgatagttttcgccagtgggtgttcagcgaagttcgcgaactggcgatccccgtcgttcaggtaacgca

SEQ ID NO: 653999 - DNA, 75 bp, synthetic construct
  source 1..75: mol_type = other DNA
ctccaggatgttcctgctgatagttctgttctggatatggcgcagtggtcagaaaattacaacaaactgcgataa

SEQ ID NO: 654000 - DNA, 75 bp, synthetic construct
  source 1..75: mol_type = other DNA
tggcatcgtcgccatgccgctgtatccagtagcagagcgcctcgctatggcaaacaacattgagggcgcaatgat

SEQ ID NO: 654001 - DNA, 75 bp, synthetic construct
  source 1..75: mol_type = other DNA
tgaagtgccgatttgcggacacgcgactgtggcagcgcactatgtacgatcgaaggtgttaggtttgggggattg

SEQ ID NO: 654002 - DNA, 75 bp, synthetic construct
  source 1..75: mol_type = other DNA
gcatccgctactttacgccaacggttgaagtgccgatttgtggtcacgcgacagtagctgcgcactatgtacgtg

SEQ ID NO: 654003 - DNA, 75 bp, synthetic construct
  source 1..75: mol_type = other DNA
ctgcaatggtttcttcccgttccagatccgcccaggcaaaaatgaaaccgatggtcgcatgttctcgcctgcgat

SEQ ID NO: 654004 - DNA, 75 bp, synthetic construct
  source 1..75: mol_type = other DNA
ctatcagttaggcatcgtctataatctgggccgcaacgaagctattgtgcgtgaagcgctaatgtacaagagtca

SEQ ID NO: 654005 - DNA, 75 bp, synthetic construct
  source 1..75: mol_type = other DNA
ttagcgaaaccatactttttatatcataaaatcgcgtacactccagatgaggcgcggattagagtcgaacttgct

SEQ ID NO: 654006 - DNA, 75 bp, synthetic construct
  source 1..75: mol_type = other DNA
ggcttgccaattcaggtggcaacaacaggacactcaaaagtgatgatcccactgaagccggaagtggatatcgac

SEQ ID NO: 654007 - DNA, 75 bp, synthetic construct
  source 1..75: mol_type = other DNA
ctggccggacagttttcttgtacaggtgagctatggctcaatgagcaacggattgacatgctacccaccgcacag

SEQ ID NO: 654008 - DNA, 75 bp, synthetic construct
  source 1..75: mol_type = other DNA
cgatatgccattgctaccggaagagcagagtttaatcctgcggcagatctgtccagtgcccttgaaattcataaa

SEQ ID NO: 654009 - DNA, 75 bp, synthetic construct
  source 1..75: mol_type = other DNA
gcaaatgagtttgaaaaatacgttcgaagcaattgctcgcgaatggcatcattcaaaagccgatcggtggtcatt

SEQ ID NO: 654010 - DNA, 75 bp, synthetic construct
  source 1..75: mol_type = other DNA
taagtaaggagagcataaaccaagtgattgagttattgggatttaaggggagaatcactggccatggtttcagac

SEQ ID NO: 654011 - DNA, 75 bp, synthetic construct
  source 1..75: mol_type = other DNA
attgaacgccaggcggaagaagttcgccgcgtgaaaaaacacgagtctggcgtggtgactgacccgcagactgtt

SEQ ID NO: 654012 - DNA, 75 bp, synthetic construct
  source 1..75: mol_type = other DNA
acaaggttttgatagtgcatggattgaaatgcaactagctcatgttgataaaaatagcattaggggaacatataa

SEQ ID NO: 654013 - DNA, 75 bp, synthetic construct
  source 1..75: mol_type = other DNA
atgtcatttggcagctatgatttagtaagcctcgcagaagcacgtgagaaacgcgatacggcacgtaaacaggtt

SEQ ID NO: 654014 - DNA, 75 bp, synthetic construct
  source 1..75: mol_type = other DNA
atgatcttcaatattcaacgctactcgacccacgacggtcccggtatccgcaccgtagtttttcttaaaggctgc

SEQ ID NO: 654015 - DNA, 75 bp, synthetic construct
  source 1..75: mol_type = other DNA
ggatctgctgtatgacgcgcgtctgtgcctggagggctgcgagctgtgtgctaaggccgccccggaagtgattga

SEQ ID NO: 654016 - DNA, 75 bp, synthetic construct
  source 1..75: mol_type = other DNA
gcaatccacggcggcactgttagcagaaaaccgcctcgatcagaaaaagatggatgagtttgcccagcgcgccgc

SEQ ID NO: 654017 - DNA, 75 bp, synthetic construct
  source 1..75: mol_type = other DNA
aaaataatatccgaggcacttataatcatgcactatatctagataaaagaagagatatgctacagtggtatgcag

SEQ ID NO: 654018 - DNA, 75 bp, synthetic construct
  source 1..75: mol_type = other DNA
acgaataatagacggagaacttgctgtatcattcgtccgtggaataatcccatatttttataagtgggattttcg

SEQ ID NO: 654019 - DNA, 75 bp, synthetic construct
  source 1..75: mol_type = other DNA
tagactcgtatgctcatgctgatttcatggagtccgtcttcagcaacctcagggctttctgtgatgcggaatgcc

SEQ ID NO: 654020 - DNA, 75 bp, synthetic construct
  source 1..75: mol_type = other DNA
ccctatttttccagcttgttaattggcttagtcggagtgtatatgggcgtgcatggctttatgggcataatgcga

SEQ ID NO: 654021 - DNA, 75 bp, synthetic construct
  source 1..75: mol_type = other DNA
tctccggtaactccggatggttggataagctgtagtgagcgaatgccggacgacaggcaggaggtgaatcaatga

SEQ ID NO: 654022 - DNA, 75 bp, synthetic construct
  source 1..75: mol_type = other DNA
tgatgacacgctatatgttcgagctgaccttgtgaatggcaactctccggtaactccggatggttggataagctg

SEQ ID NO: 654023 - DNA, 75 bp, synthetic construct
  source 1..75: mol_type = other DNA
ggctaaagctatcagaaaaggtcctgacatgcccgaattcgatggaccaactccggcaactccggatggttggat

SEQ ID NO: 654024 - DNA, 75 bp, synthetic construct
  source 1..75: mol_type = other DNA
gaaaaactcagaattgcaggccgtgctcggagtggcaaaagactccgccgaaatgaccgcactacgcaaacaggc

SEQ ID NO: 654025 - DNA, 75 bp, synthetic construct
  source 1..75: mol_type = other DNA
gcctcggcggatgatgcagccggtgcacagattatcattgcgaaagccggtggagatgctgcggctattcaggcg

SEQ ID NO: 654026 - DNA, 75 bp, synthetic construct
  source 1..75: mol_type = other DNA
ctctccggtaactccggatggttggataagctgtagtgagcgaatgccccctcaagatgattggattttaattta

SEQ ID NO: 654027 - DNA, 75 bp, synthetic construct
  source 1..75: mol_type = other DNA
tggctgaacatattcctccggcacctaactggcctgcgccaccaccgccagtacaaaatgaacaatcaagacctc

SEQ ID NO: 654028 - DNA, 75 bp, synthetic construct
  source 1..75: mol_type = other DNA
caaaatgaacaatcaagacctctgcctgatgtggctcagcgtctggtgcagcatcttgcagagcatggcattcaa

SEQ ID NO: 654029 - DNA, 75 bp, synthetic construct
  source 1..75: mol_type = other DNA
attccggatagttcggtgccagcgccaggaaagggcgtcaccggtgaacgtatccgcattaagccgcatgtttat

SEQ ID NO: 654030 - DNA, 75 bp, synthetic construct
  source 1..75: mol_type = other DNA
aagtcgtgagtgctacgaagacgatttgcgctttacagacacgcctgaccatgccggttggataaacaaatgtcg

SEQ ID NO: 654031 - DNA, 75 bp, synthetic construct
  source 1..75: mol_type = other DNA
agacagccattccgcaagttccggtaactccggatggttggataagctgtagtgagcgaatgccgaataccaaaa

SEQ ID NO: 654032 - DNA, 75 bp, synthetic construct
  source 1..75: mol_type = other DNA
tggatggtatagagcggagcgacgccatgcttcatggtgccgaacctgtaagccaaacttacaagttgaacgagc

SEQ ID NO: 654033 - DNA, 75 bp, synthetic construct
  source 1..75: mol_type = other DNA
ggctggatccagaaaaacaaatcactggcgtcaaccatggcctattgcggtggcgcgctggcgcttatggcatca

SEQ ID NO: 654034 - DNA, 75 bp, synthetic construct
  source 1..75: mol_type = other DNA
agccgtctgcgtgagatgactgccgctgctcgcgatctcgttgatgttcagaatcgtatggcgcaatctgggcgc

SEQ ID NO: 654035 - DNA, 75 bp, synthetic construct
  source 1..75: mol_type = other DNA
cgactcgtctgcgtgatataacgtccgctgtccgcgatctccttgaggtccagaatcgtatggggcaatcgggtc

SEQ ID NO: 654036 - DNA, 75 bp, synthetic construct
  source 1..75: mol_type = other DNA
gtgccagagctttttgctgtcaggtctggcggggaggagccggatgcgcgtgactggatgccggagccgccagat

SEQ ID NO: 654037 - DNA, 75 bp, synthetic construct
  source 1..75: mol_type = other DNA
agagcggaacgtctggcgctgttggcctgcctgctggcggttattccggctcttaaccttgccaccagtgatgca

SEQ ID NO: 654038 - DNA, 75 bp, synthetic construct
  source 1..75: mol_type = other DNA
agagcggaacgtctggcgctgttggcctgcctgctggctgttattccggcgcttaaccttgccaccagtgatgca

SEQ ID NO: 654039 - DNA, 75 bp, synthetic construct
  source 1..75: mol_type = other DNA
tcagttcatctttacttactgatggcagagtggatatttctaagcttctgctggaggttcaaaaactgttgcgtg

SEQ ID NO: 654040 - DNA, 75 bp, synthetic construct
  source 1..75: mol_type = other DNA
atgtccaattacactggagcagcctgaaaatgatgttttcattaagaattcaggaaattctgcggtttgcaccct

SEQ ID NO: 654041 - DNA, 75 bp, synthetic construct
  source 1..75: mol_type = other DNA
tgcttcagggtagccaacctgtaagccaaacttacaagtttccagttaatacaccttgccaggatgcgccagccc

SEQ ID NO: 654042 - DNA, 75 bp, synthetic construct
  source 1..75: mol_type = other DNA
atgcgtgatgacgcagatggtcgtgagtataacgctcacaatgaattttcttgtggagggagagggatcccactc

SEQ ID NO: 654043 - DNA, 75 bp, synthetic construct
  source 1..75: mol_type = other DNA
atgctttcagactcaggtgaagcacaatcgcaagagagtattcaggacaaaatatctcaatgtaagtttcctgtt

SEQ ID NO: 654044 - DNA, 75 bp, synthetic construct
  source 1..75: mol_type = other DNA
atgtccaattacactggagcagcctgaaaaaggtatttttgtgaagaattcagatggttcagatgtatgtacttt

SEQ ID NO: 654045 - DNA, 75 bp, synthetic construct
  source 1..75: mol_type = other DNA
gagcagcctgaaaaaggtatttttgtgaagaattcagatggttcagatgtatgtactttattgatgccgctgcat

SEQ ID NO: 654046 - DNA, 75 bp, synthetic construct
  source 1..75: mol_type = other DNA
gcaatcctgatattgataacgccatcatcatgctcgatcgcatagatacgctggaaagttgcgatgatgaccgta

SEQ ID NO: 654047 - DNA, 75 bp, synthetic construct
  source 1..75: mol_type = other DNA
actatcaatataagttggccaatcatacaaaactgcaagccaattatttctgaaaaagatgctaatggacatctt

SEQ ID NO: 654048 - DNA, 75 bp, synthetic construct
  source 1..75: mol_type = other DNA
gtgggatgcattatcaaacacaaaatactcaaggaaaactggttcgggtaatttctggttcagtatatgatgttg

SEQ ID NO: 654049 - DNA, 75 bp, synthetic construct
  source 1..75: mol_type = other DNA
gcgggctgcattatcagttagaaccgtatgcgcaagggaaattggtacgttgcgctgttggtgaggtttttgatg

SEQ ID NO: 654050 - DNA, 75 bp, synthetic construct
  source 1..75: mol_type = other DNA
ctgatgtattaattttcgaaccgaaagtttttggcgatgagcgtggtttctttatggaaagctttaatcagaaag

SEQ ID NO: 654051 - DNA, 75 bp, synthetic construct
  source 1..75: mol_type = other DNA
acctacatttgggaaatgggttggggtgaatttgtctgctgagaataagcgtcagttgtggatccctgaggggtt

SEQ ID NO: 654052 - DNA, 75 bp, synthetic construct
  source 1..75: mol_type = other DNA
tttgaagataacgccgaatttggccttggtttccgcctgacggtcgatcaacaccgtgtccgcgtgctgcgtctg

SEQ ID NO: 654053 - DNA, 75 bp, synthetic construct
  source 1..75: mol_type = other DNA
gagacggcggagtttttgtataagacgacaaattattatcatcctgaggccgaaggctcattactctggaatgat

SEQ ID NO: 654054 - DNA, 75 bp, synthetic construct
  source 1..75: mol_type = other DNA
ataataaatgtgaaatggccaattaatgaagagcctattttatcaccgaaagatagaaaagggataagatttgag

SEQ ID NO: 654055 - DNA, 75 bp, synthetic construct
  source 1..75: mol_type = other DNA
aattctcttatacctttgaaccgcactatttttacaacctgaatgatttcaacagtagcaatggtacgaagcacc

SEQ ID NO: 654056 - DNA, 75 bp, synthetic construct
  source 1..75: mol_type = other DNA
acggtattagagggtaaaaggcattatgctttcgaaagtctggatacatccaatactacatcccttgcattacag

SEQ ID NO: 654057 - DNA, 75 bp, synthetic construct
  source 1..75: mol_type = other DNA
agcagcagataaatggggcatctatgatgaatgggacatctgtgagtcgattgcggattattttgacgtggtggg

SEQ ID NO: 654058 - DNA, 75 bp, synthetic construct
  source 1..75: mol_type = other DNA
gatgccctttctgctgagttgcttaatagtatcaatgcccatgaggtaaattatatttactcaagaattttttgc

SEQ ID NO: 654059 - DNA, 75 bp, synthetic construct
  source 1..75: mol_type = other DNA
taccgcattgcgttacgtaagtatcagcattaccagcgtcaaacgagcgctggccttgcgcagaaattcgccagt

SEQ ID NO: 654060 - DNA, 75 bp, synthetic construct
  source 1..75: mol_type = other DNA
tggcatcgctggaagcagaggcagttatgttctgtatatcaggacaaaatgtagattcagaagaacatgtatcaa

SEQ ID NO: 654061 - DNA, 75 bp, synthetic construct
  source 1..75: mol_type = other DNA
taacggaactggcacattagaaacgatgagtatctccctgaagactcagtatattatgttggcctcccagcaatc

SEQ ID NO: 654062 - DNA, 75 bp, synthetic construct
  source 1..75: mol_type = other DNA
cactgcaatggaggctgctgaagaagatcttaaccatctcatcgttcagggggaaagccgtaaagctgagctgga

SEQ ID NO: 654063 - DNA, 75 bp, synthetic construct
  source 1..75: mol_type = other DNA
cgtggagttgagcgatggcactttatcgtggttagggaacgccttgtactggatgccgctaccagaaccgccgca

SEQ ID NO: 654064 - DNA, 75 bp, synthetic construct
  source 1..75: mol_type = other DNA
tgaaggttgccaagattcgtgccgatttcgatgattttgacggtgacaggcgaggtatcggtgattgtctggatg

SEQ ID NO: 654065 - DNA, 75 bp, synthetic construct
  source 1..75: mol_type = other DNA
tatggctgaacatattcctccggcacctaactggcctgcgccaccaccgccagtacaaaatgaacaatcaagacc

SEQ ID NO: 654066 - DNA, 75 bp, synthetic construct
  source 1..75: mol_type = other DNA
tatcgcatcgcattacgtaagtaccagtgctaccagatgcaaacccgtggtgaccttacgcagaaatcccccagc

SEQ ID NO: 654067 - DNA, 75 bp, synthetic construct
  source 1..75: mol_type = other DNA
tatcgcatcgcattacgtaagtaccagtgttaccagatgcaaacccgcggcgaccttgcgcagaaatcccccagt

SEQ ID NO: 654068 - DNA, 75 bp, synthetic construct
  source 1..75: mol_type = other DNA
atgagccccggtacagtgcgcgaatatgtggttcgtctacgtcgtttgggtaattatttaagcgaacacgatatt

SEQ ID NO: 654069 - DNA, 75 bp, synthetic construct
  source 1..75: mol_type = other DNA
gtcatgaggcgctataaagaactagccggcacgcattacgtatcagatatcgaataccagcagaaacaaatagag

SEQ ID NO: 654070 - DNA, 75 bp, synthetic construct
  source 1..75: mol_type = other DNA
ctacaaattattatcatccggaaagtgatagagggatccgatgggatgatgaggaattatctattacgtggccta

SEQ ID NO: 654071 - DNA, 75 bp, synthetic construct
  source 1..75: mol_type = other DNA
cattgagtcgctatcttaaagactttaaacacagccagactcattgcgcatattgccgtaaattactcgatcgca

SEQ ID NO: 654072 - DNA, 75 bp, synthetic construct
  source 1..75: mol_type = other DNA
ataaatgacgaactactgaatgaatacacagtcagagttgaaaaaataaaagctgtgttatcttcaggatattat

SEQ ID NO: 654073 - DNA, 75 bp, synthetic construct
  source 1..75: mol_type = other DNA
attggttttcaggactttatttacaacctcagcattttcaatcaactgatttacatcacagttttatgcttgctc

SEQ ID NO: 654074 - DNA, 75 bp, synthetic construct
  source 1..75: mol_type = other DNA
ttcagcatgctcttcctggtattgattttacagtggttgatgtagttacatctgaattgcaggtgagggaagata

SEQ ID NO: 654075 - DNA, 75 bp, synthetic construct
  source 1..75: mol_type = other DNA
atttcctgctatgagattatcagcgaatagaatacttagagataagatcgcggagatttatgctgatattaaatt

SEQ ID NO: 654076 - DNA, 75 bp, synthetic construct
  source 1..75: mol_type = other DNA
tgagtacggtgccggaagtaattcagattactatattaagttaacctcagataccttcagaaagaataagctgat

SEQ ID NO: 654077 - DNA, 75 bp, synthetic construct
  source 1..75: mol_type = other DNA
acaaggatcatatatggaaataattcattgtgtattgatgatgagtgttcatttcccgtgatgaggttatctgcg

SEQ ID NO: 654078 - DNA, 75 bp, synthetic construct
  source 1..75: mol_type = other DNA
gtagtgccacgacagcaacaacgaaagcatcagaggcggcaggcagtgcgacggctgcatctcagagcaaagttg

SEQ ID NO: 654079 - DNA, 75 bp, synthetic construct
  source 1..75: mol_type = other DNA
ccaggaggcggcggttctgcgttagcattttatgatggcggtgggttcacttatgtccagaattcactgaaccgc

SEQ ID NO: 654080 - DNA, 75 bp, synthetic construct
  source 1..75: mol_type = other DNA
ggggcgcatacgcacagtctgagtggctctacggggtctgccggtgttcatactcatggtaatggtattcgttgg

SEQ ID NO: 654081 - DNA, 75 bp, synthetic construct
  source 1..75: mol_type = other DNA
atgcagggaagacatcatcagatggtgctcatacccactcgctgtccggcactgctgcaagcgcaggcgcacatg

SEQ ID NO: 654082 - DNA, 75 bp, synthetic construct
  source 1..75: mol_type = other DNA
ggcggttctgcgttagcattttatgatggcggtgggttcacttatgtcaaggattcacagtatcaagtaagcccg

SEQ ID NO: 654083 - DNA, 75 bp, synthetic construct
  source 1..75: mol_type = other DNA
aattaaacgcgagtggtggtatcactggatctttatcgggtaatgcaagcacagcaaccaaattgcaaactgcaa

SEQ ID NO: 654084 - DNA, 75 bp, synthetic construct
  source 1..75: mol_type = other DNA
ataaatgataatcttctgaaagaagatacaatcaggattgaaaaaataaaggctgtgttaccttctgggtattat

SEQ ID NO: 654085 - DNA, 75 bp, synthetic construct
  source 1..75: mol_type = other DNA
gcaaacatccggtcacccagtttgataaaagcgacgttgaatacgccggactggtgaagttcgacttccttggtt

SEQ ID NO: 654086 - DNA, 75 bp, synthetic construct
  source 1..75: mol_type = other DNA
agcgggctatgaaattgcgctgcccaatgaaaaagcggccgatttctggcgtgcgctggtggaagcgggcgttaa

SEQ ID NO: 654087 - DNA, 75 bp, synthetic construct
  source 1..75: mol_type = other DNA
ccgaatgctcgtgcaggagacaaactggttttcattcctgagttcaatcgtggtgtgcgtgaggcattctacaac

SEQ ID NO: 654088 - DNA, 75 bp, synthetic construct
  source 1..75: mol_type = other DNA
ggtatactgcaggttgtctcgttactaactgcaattcataatgacgaaataggtgcattgattatcgatgagcca

SEQ ID NO: 654089 - DNA, 75 bp, synthetic construct
  source 1..75: mol_type = other DNA
gaacaagtctcgctgatcttgacagagatttgcgtgcagaaattacaaccttcatgactgactttaaggaagagg

SEQ ID NO: 654090 - DNA, 75 bp, synthetic construct
  source 1..75: mol_type = other DNA
tcattgccctgctggtggcctgtggtgcgcttagtctggggctgaatcattaccgtgaaacgccattacctacaa

SEQ ID NO: 654091 - DNA, 75 bp, synthetic construct
  source 1..75: mol_type = other DNA
ttttacagtgatggatgtcgttacatctgagttacaggtaagagaaaatataatctggttaaagatcgataaaca

SEQ ID NO: 654092 - DNA, 75 bp, synthetic construct
  source 1..75: mol_type = other DNA
accagatgggtaagttcagatgatgaaagtaacatgcgtaatgtttatcatgacagccaggatactgatatcaca

SEQ ID NO: 654093 - DNA, 75 bp, synthetic construct
  source 1..75: mol_type = other DNA
agaataaaatatgatattcagataattacagatgaagaaaaagagaatgccacagactttgaatacttacctcta

SEQ ID NO: 654094 - DNA, 75 bp, synthetic construct
  source 1..75: mol_type = other DNA
atggagggagtggttagccacgaacaagccggacaccgcgccagcaaaaaccacagattcgtgcttttcttcagc

SEQ ID NO: 654095 - DNA, 75 bp, synthetic construct
  source 1..75: mol_type = other DNA
agtgttgaatttaaaaagataacaacagataccctggtctgtaattttgatgagtacagttccagaaataattca

SEQ ID NO: 654096 - DNA, 75 bp, synthetic construct
  source 1..75: mol_type = other DNA
ctgtgttttcagaggcaagaattgttgatttaacatacaatcattatgagcaggtttcctgtttcagtaatcttc

SEQ ID NO: 654097 - DNA, 75 bp, synthetic construct
  source 1..75: mol_type = other DNA
tggtcgctctcttccttaacgagcctgcttggcagcggcaatcaagcattaagcgcagacaacatgaacaatgct

SEQ ID NO: 654098 - DNA, 75 bp, synthetic construct
  source 1..75: mol_type = other DNA
cgcattctgcatctggaacagacgtggatgtttctggccgggcggggcgcgtttccgctgtttgcgctggtctgg

SEQ ID NO: 654099 - DNA, 75 bp, synthetic construct
  source 1..75: mol_type = other DNA
cggtgctgaccgttggtctggtgtcgtgtgcaggaaaatcattaccccgtttctggcccggggattttttcccgg

SEQ ID NO: 654100 - DNA, 75 bp, synthetic construct
  source 1..75: mol_type = other DNA
gtgtgcagggaaatcattaccccgtttctggcccggggattttttcccgacgttctatggctgtcatctggctgt

SEQ ID NO: 654101 - DNA, 75 bp, synthetic construct
  source 1..75: mol_type = other DNA
ccgaaacgattgagtctctgaatacccgcgaaaaacgcgacaacaaaccccgctttagtatcagttttatccgta

SEQ ID NO: 654102 - DNA, 75 bp, synthetic construct
  source 1..75: mol_type = other DNA
cagttctcgtattatctggccggctttccctggtatgaggggaatatcctgtttgcctttgcagttgcggcacag

SEQ ID NO: 654103 - DNA, 75 bp, synthetic construct
  source 1..75: mol_type = other DNA
tacctggttgcagtcgttgctggtctggtcacccggacagcgggatatcatcaaaacggtggcactggtgctgat

SEQ ID NO: 654104 - DNA, 75 bp, synthetic construct
  source 1..75: mol_type = other DNA
cagttacggcattgccgggctgctgatgctggcagtcagccaccggctgtaccgggcggaagacagaacggaacg

SEQ ID NO: 654105 - DNA, 75 bp, synthetic construct
  source 1..75: mol_type = other DNA
aaccctaacttgcgcgactgcgattttccgtcgaaatctctggcaggcgtgggtgtagcgttttatctgatgctg

SEQ ID NO: 654106 - DNA, 75 bp, synthetic construct
  source 1..75: mol_type = other DNA
agagcggaacgtctggcgctgttggcctgcctgctggcggttattccggcgcttaaccttgcctccagtgatgca

SEQ ID NO: 654107 - DNA, 75 bp, synthetic construct
  source 1..75: mol_type = other DNA
tgtgaaacgcgcagtgggtggcgtacagcagcggccattcttctgatggccctgtgggggcctttgtccggcacc

SEQ ID NO: 654108 - DNA, 75 bp, synthetic construct
  source 1..75: mol_type = other DNA
atgacaacggataacacgaacacgacacgtaacgattcactggctgcccggaccggtacctggctgcagtcgttg

SEQ ID NO: 654109 - DNA, 75 bp, synthetic construct
  source 1..75: mol_type = other DNA
gtgttgtgaccatgaaaccccgggaatggctggagcgccttcttgtctggtcccccggacagcgggatatcatca

SEQ ID NO: 654110 - DNA, 75 bp, synthetic construct
  source 1..75: mol_type = other DNA
ccgcgaaaaacgcgacaacaaaccccgctttagtatcagttttatccgtaaacatccggggctgtttatcggtat

SEQ ID NO: 654111 - DNA, 75 bp, synthetic construct
  source 1..75: mol_type = other DNA
aatgcctgactgaactggcttatgaactgggaatgaatgacgcaccacgccgtaaggggccactctcccgcgctt

SEQ ID NO: 654112 - DNA, 75 bp, synthetic construct
  source 1..75: mol_type = other DNA
atttgcccgcctgttttcccgtattgcaaaacggacggcaatcaataaaaccaaaattgatgatgtaaaggccat

SEQ ID NO: 654113 - DNA, 75 bp, synthetic construct
  source 1..75: mol_type = other DNA
tcgtattctgaatcattcacttcgccttgccgccatgacggctcacggtaaaggtgagcgtgttaacgaagatta

SEQ ID NO: 654114 - DNA, 75 bp, synthetic construct
  source 1..75: mol_type = other DNA
tttcaggagtggaggctctaccctgaatgggggagaatttcatgctacagccaatataagcattatatacatata

SEQ ID NO: 654115 - DNA, 75 bp, synthetic construct
  source 1..75: mol_type = other DNA
cgtttatcattatttatatcgttgcttctgacatcggtcgctgtactggctgatgtgcagattaacatcagggga

SEQ ID NO: 654116 - DNA, 75 bp, synthetic construct
  source 1..75: mol_type = other DNA
gactgcgcacgcttgtagaaaatggagaaaccacgctgacacgcatcgccagtgaatcaggcgtggccctgagca

SEQ ID NO: 654117 - DNA, 75 bp, synthetic construct
  source 1..75: mol_type = other DNA
gttctggaccatgcaaaccgcattctgcatctggaccagtcgtggatgtttctggtcgggcgtggggcctttccg

SEQ ID NO: 654118 - DNA, 75 bp, synthetic construct
  source 1..75: mol_type = other DNA
aaactgtggctctggtactgatggtgctggaccatgcaaaccgcattctgcatctggatcagacgtggatgtttc

SEQ ID NO: 654119 - DNA, 75 bp, synthetic construct
  source 1..75: mol_type = other DNA
tacctgccgcgctggttgaagccatcttgaactctccgcgtgtcgcggatgttcataaagaacaactgcaaaaaa

SEQ ID NO: 654120 - DNA, 75 bp, synthetic construct
  source 1..75: mol_type = other DNA
tcacagttgataacggcatttcctctcatgcgggtgttgaacatgcccgcgcgttgggtattgcggttattgtta

SEQ ID NO: 654121 - DNA, 75 bp, synthetic construct
  source 1..75: mol_type = other DNA
cggtgctgaccgttggtctggtgtcgtgtgcagggaaatcattaccccgtttctggcccggggattttttcccga

SEQ ID NO: 654122 - DNA, 75 bp, synthetic construct
  source 1..75: mol_type = other DNA
ctttccgctgtttgctctggtgtgggggctgaatctgtcccgccatgcgcatatcaggcagtcggccattaaccg

SEQ ID NO: 654123 - DNA, 75 bp, synthetic construct
  source 1..75: mol_type = other DNA
atttcaaaaaaaagcggctagtagctgaggcactgggaatttcacacgtggctgttgttcggtggaaatctgtta

SEQ ID NO: 654124 - DNA, 75 bp, synthetic construct
  source 1..75: mol_type = other DNA
tctctggtcttatgctggcaatggttgcaggtagtgcttctgcagatatggacggtggtcagttaaatatcagtg

SEQ ID NO: 654125 - DNA, 75 bp, synthetic construct
  source 1..75: mol_type = other DNA
gtttacagcaaaactctggattcaacgtctaaatctgcaacctacgattttaaagcatcctatgttcgtgcggat

SEQ ID NO: 654126 - DNA, 75 bp, synthetic construct
  source 1..75: mol_type = other DNA
cgcagattatcgtagccaaatctggcgcagataaagacggcatagtggcgcaaacaccggccattctgaatatgt

SEQ ID NO: 654127 - DNA, 75 bp, synthetic construct
  source 1..75: mol_type = other DNA
atgaaacgcctgattctcctgttactgttcaccgccagcacgtgggcgcaaccgcttcaggtgcagaccagccag

SEQ ID NO: 654128 - DNA, 75 bp, synthetic construct
  source 1..75: mol_type = other DNA
acgcctcggtggcggaaagctgccgctattgctcgaacaacagggggagcaatggcatcccgtctctgcgccctg

SEQ ID NO: 654129 - DNA, 75 bp, synthetic construct
  source 1..75: mol_type = other DNA
cggcattagtgatgttcaccacttctgctttcgcgctggatggcggtcaattagatttcgcgggtttggtgagtg

SEQ ID NO: 654130 - DNA, 75 bp, synthetic construct
  source 1..75: mol_type = other DNA
gccatcggtattaatccggttacgggatatggcagtggacttatgcaggtagactcccagcattttaatgaactg

SEQ ID NO: 654131 - DNA, 75 bp, synthetic construct
  source 1..75: mol_type = other DNA
cgaactctttcagcaacgctttggcgaactggtgactgagtggctggacccttcactattgcaaggcgaagtggt

SEQ ID NO: 654132 - DNA, 75 bp, synthetic construct
  source 1..75: mol_type = other DNA
gtcagacggtccgttaagtccggccgaaatgaccatggaagtggcgcagctgctgcgcgatgctggcccgtgggg

SEQ ID NO: 654133 - DNA, 75 bp, synthetic construct
  source 1..75: mol_type = other DNA
aagttgaaggcgctggcgtagtcaatgcagccgctgtcggcgcgaaagctgaaccgttctcaattacagtggatt

SEQ ID NO: 654134 - DNA, 75 bp, synthetic construct
  source 1..75: mol_type = other DNA
tgtctggtcttatgctggcaatggttgcaggtactgcttctgctgatatggacggtggtcagattaacatcagtg

SEQ ID NO: 654135 - DNA, 75 bp, synthetic construct
  source 1..75: mol_type = other DNA
caatgtatcaccccgaatggcatcagggcgttgtcggtattctggcttcgcgtatcaaagagcgttttcaccgtc

SEQ ID NO: 654136 - DNA, 75 bp, synthetic construct
  source 1..75: mol_type = other DNA
gcgacgcgctgacctatgccgcgccagtggcgaaaaatgccggggtgagcatcgagcaaaccgccgcaatggtcg

SEQ ID NO: 654137 - DNA, 75 bp, synthetic construct
  source 1..75: mol_type = other DNA
gtcggtgcggcgattgtggccggggcgctgcttatccgcaaatattgggagcccatcagcgcatttttctcaggg

SEQ ID NO: 654138 - DNA, 75 bp, synthetic construct
  source 1..75: mol_type = other DNA
aaaaacctccatcagcgaaacgacggcgcagcttaaccgccagcgcgaggcactggcacgcgtcagtgcgcagca

SEQ ID NO: 654139 - DNA, 75 bp, synthetic construct
  source 1..75: mol_type = other DNA
cgatataaatcaggcaaggagcttgccggtaacatggccgctgcaggtgccgccggtgtcggtatctctacagcg

SEQ ID NO: 654140 - DNA, 75 bp, synthetic construct
  source 1..75: mol_type = other DNA
ggcatcagcttgaccgacaactacgtgacacgcttgaacagattgagcgtgataaacgtgcgcgccagcgtgcca

SEQ ID NO: 654141 - DNA, 75 bp, synthetic construct
  source 1..75: mol_type = other DNA
tcatttttggtcaggcactggcctcagcgttgatggcaccgcttaacgtctttaacaagctgcgaagcggtgtcg

SEQ ID NO: 654142 - DNA, 75 bp, synthetic construct
  source 1..75: mol_type = other DNA
gaggaggccagctcagccgccgccgtgctgatgactgccgcctcaaccggaaagctggacaaactgaccgctgcg

SEQ ID NO: 654143 - DNA, 75 bp, synthetic construct
  source 1..75: mol_type = other DNA
ttatgttcggtcagacgctggccgatgcgctgctgatgccgcttaacgcctttaacaagctgcgaagcgggattg

SEQ ID NO: 654144 - DNA, 75 bp, synthetic construct
  source 1..75: mol_type = other DNA
ttgaccagctaacctccaccctgaaagcctcagacggaaaaaccgcagagcttgttaaaattatgcaggataact

SEQ ID NO: 654145 - DNA, 75 bp, synthetic construct
  source 1..75: mol_type = other DNA
gtgatgcgctggagcggttagacacgctctaccctggcatgatgctcaagtttggcggtcatgcgatggcggcag

SEQ ID NO: 654146 - DNA, 75 bp, synthetic construct
  source 1..75: mol_type = other DNA
ctggtaaatatcatgcaggacaacctcggcggtgactttaaggagtttcagtccgcttatgaggcggtggggact

SEQ ID NO: 654147 - DNA, 75 bp, synthetic construct
  source 1..75: mol_type = other DNA
caacctcggcggtgactttaaggagtttcagtccgcttatgaggcggtggggacagacctgtttgaccagcagga

SEQ ID NO: 654148 - DNA, 75 bp, synthetic construct
  source 1..75: mol_type = other DNA
actgcagcgttgaaagtttcgttttttggccccttctatggtggctataatgtaatcaagctggatgatgagtat

SEQ ID NO: 654149 - DNA, 75 bp, synthetic construct
  source 1..75: mol_type = other DNA
cctgcggatcaacgccacctgtccaggctccgtgcgtgaagcccccaccacctccggcgtggataatgcaaccgg

SEQ ID NO: 654150 - DNA, 75 bp, synthetic construct
  source 1..75: mol_type = other DNA
gatgttgccgctggtcgtaagcgcctgcggatcaacgccacctgctccggtaccgtgcgtgaagccaccggcacc

SEQ ID NO: 654151 - DNA, 75 bp, synthetic construct
  source 1..75: mol_type = other DNA
ggtatctctgcattgcagatggatatcaaaattgaaggcatcaccaaagagatcatgcaggttgcgctgaaccag

SEQ ID NO: 654152 - DNA, 75 bp, synthetic construct
  source 1..75: mol_type = other DNA
gtgagaagagtaaccgcgattatttacgctctggttatctgcatcatcgtctgtctgttatgggctgttaatcat

SEQ ID NO: 654153 - DNA, 75 bp, synthetic construct
  source 1..75: mol_type = other DNA
ctgcctgtcatggggtgttaatcattaccgtgataacgccatcgcctacaaagaacagcgcgacaaaaatgccag

SEQ ID NO: 654154 - DNA, 75 bp, synthetic construct
  source 1..75: mol_type = other DNA
ctgccgtgctgatggttgaatctgaagctgaactgttgagcgaagaccagatgctgggcgcagtggtgttcggtc

SEQ ID NO: 654155 - DNA, 75 bp, synthetic construct
  source 1..75: mol_type = other DNA
aaagccctgacactgggcgcaacactggtcgtcagtttcagcattggcctggcgggtaatgctgccaacttactg

SEQ ID NO: 654156 - DNA, 75 bp, synthetic construct
  source 1..75: mol_type = other DNA
gatcatgagcatcatcaccacgatcacgaagatcaccacgaccatggacatcatcaccatcacgaacatggcgag

SEQ ID NO: 654157 - DNA, 75 bp, synthetic construct
  source 1..75: mol_type = other DNA
tgggcgtcatggagcaggcgatcaacgcgccgcgtggtgatatctctgagtttgcaccgcgtatccataccatca

SEQ ID NO: 654158 - DNA, 75 bp, synthetic construct
  source 1..75: mol_type = other DNA
gatcatgcaggttgcactgaaccaggctaaaggtgcgcgtctgcatatcctgggcgtaatggaacaggcgatcaa

SEQ ID NO: 654159 - DNA, 75 bp, synthetic construct
  source 1..75: mol_type = other DNA
cacgtgacgcgcaggttcttgatgaactgatgggcgaacgtactgacaccttcctgttccactacaacttccctc

SEQ ID NO: 654160 - DNA, 75 bp, synthetic construct
  source 1..75: mol_type = other DNA
ttattgccctggcggcaggctgtggtgtgctgtggctggcaacaaaccattaccgcgataatgcgatcatctaca

SEQ ID NO: 654161 - DNA, 75 bp, synthetic construct
  source 1..75: mol_type = other DNA
tagatgggactattgaaaatttgcttgaagaccatatggaatcagagaaaaacataaattcacttaaatcttgca

SEQ ID NO: 654162 - DNA, 75 bp, synthetic construct
  source 1..75: mol_type = other DNA
tattaccgtctccgaagtggaatcgacaagataacctcacaggtgaattacttgcaggagtatatcaggacgcaa

SEQ ID NO: 654163 - DNA, 75 bp, synthetic construct
  source 1..75: mol_type = other DNA
accactaccgcggcaacgccatcacctacaaagaccagcgcgataaagccattaagaatcttaaccaggcgaacg

SEQ ID NO: 654164 - DNA, 75 bp, synthetic construct
  source 1..75: mol_type = other DNA
aacgaatacccacgaaacgaaaaatctgcaagttacgatgctgccagcagttaccagcagatttgggctggacga

SEQ ID NO: 654165 - DNA, 75 bp, synthetic construct
  source 1..75: mol_type = other DNA
cagtattactcttaatgagcgatttgcccctaaaagtgatgaagaacttaaaaaattcacaaatgtttatactga

SEQ ID NO: 654166 - DNA, 75 bp, synthetic construct
  source 1..75: mol_type = other DNA
aaactgaaaaatctcattattgagcaagaacccgaatctaaagttgtttatattgatgcctttaaaggggatcat

SEQ ID NO: 654167 - DNA, 75 bp, synthetic construct
  source 1..75: mol_type = other DNA
gattattttaccctcagagaacgagtgatggtgatgcagaaacaactggaaggagcgcaggaatatatccgtact

SEQ ID NO: 654168 - DNA, 75 bp, synthetic construct
  source 1..75: mol_type = other DNA
agggctggtttgatgagcgcggcatcgcaattcctaacctggcagaactgctggatctggtcgcgttggggacag

SEQ ID NO: 654169 - DNA, 75 bp, synthetic construct
  source 1..75: mol_type = other DNA
gtcagtgagctgaaactggcgaatgccactattactgatatgcagcagcgccagggtgatgttgctgcgcttgat

SEQ ID NO: 654170 - DNA, 75 bp, synthetic construct
  source 1..75: mol_type = other DNA
aagcgcagcgcgataaaaaagccagcgagctggagctggcaaacgcaaccattactgacatgcagcagcgccagc

SEQ ID NO: 654171 - DNA, 75 bp, synthetic construct
  source 1..75: mol_type = other DNA
ggaattagccgatgcgagagctgaaaatgaaactctgcgtgctgatattgccgctggtcgtaagcgcctgcggat

SEQ ID NO: 654172 - DNA, 75 bp, synthetic construct
  source 1..75: mol_type = other DNA
aagctacggacttgatgaactgatccccaaaatgcgtatcaccctgccactacggctatggcgatactcattatt

SEQ ID NO: 654173 - DNA, 75 bp, synthetic construct
  source 1..75: mol_type = other DNA
tgattgatgaactgaatttgctgcgggaatctgccaacgccattcagcttcggcgcaattttgaagacagcccga

SEQ ID NO: 654174 - DNA, 75 bp, synthetic construct
  source 1..75: mol_type = other DNA
gcagctttatccgcagcttgatttatggaaaactgcaaaacctttccttgagtcgtggattaaagagcaggtcgg

SEQ ID NO: 654175 - DNA, 75 bp, synthetic construct
  source 1..75: mol_type = other DNA
atgccatagaaggcgccacaccgctatttagcgatgtggatgagttatacagtttgttggaagaggcggcgcaag

SEQ ID NO: 654176 - DNA, 75 bp, synthetic construct
  source 1..75: mol_type = other DNA
gaggtttcatcaggtcggttggacgcgcaatctgcacctaaaatcagtaaaagcattgatgttccccaaaaagcg

SEQ ID NO: 654177 - DNA, 75 bp, synthetic construct
  source 1..75: mol_type = other DNA
actgagaacagaggagcgttacagctttctggctgatgttgtaacgatccttgagtcacaggggatgcatgtggc

SEQ ID NO: 654178 - DNA, 75 bp, synthetic construct
  source 1..75: mol_type = other DNA
gaaggtgattgggaacgcaaggatgacatctggaagctgaaaaaattgaaaatttcttcatatgaaaagatcaag

SEQ ID NO: 654179 - DNA, 75 bp, synthetic construct
  source 1..75: mol_type = other DNA
attcccatctgtggttactgagacatcttatctgccagtaaacaacattccgcaagctatcatcttcggatctgc

SEQ ID NO: 654180 - DNA, 75 bp, synthetic construct
  source 1..75: mol_type = other DNA
agctttatgcagattgcacaggaaaaagcgccttacgctcaatctgagtgggactcaagcaagcgcggcaccttc

SEQ ID NO: 654181 - DNA, 75 bp, synthetic construct
  source 1..75: mol_type = other DNA
tatatttcatcattcgcacttttttaagctacggacttgatgaattgatccccaaaatgcgtatcaccctgccgc

SEQ ID NO: 654182 - DNA, 75 bp, synthetic construct
  source 1..75: mol_type = other DNA
tgggggctgatgcccggctggttaatggcaggtggtctgatcgcctggtttgtcggttggcgcaaaacacgctga

SEQ ID NO: 654183 - DNA, 75 bp, synthetic construct
  source 1..75: mol_type = other DNA
ctggatgccgaatcggcataaagacaaaccattaggtgaacgactgcgactggcgctgcaagaactgggtccggt

SEQ ID NO: 654184 - DNA, 75 bp, synthetic construct
  source 1..75: mol_type = other DNA
gggcagttaaaacaactgtagaacatacttccctatctgatattggtcgcgtactaattcctcgactggataaaa

SEQ ID NO: 654185 - DNA, 75 bp, synthetic construct
  source 1..75: mol_type = other DNA
ccgataaattaaccatccagcccggtggcttaattaatgataagagtatcggttcgggtggtgctgtttatctgg

SEQ ID NO: 654186 - DNA, 75 bp, synthetic construct
  source 1..75: mol_type = other DNA
caactaactactatgctcctggtcatcagcaagcaattatttacaatgatcctattttaaacatcgattggcctt

SEQ ID NO: 654187 - DNA, 75 bp, synthetic construct
  source 1..75: mol_type = other DNA
atgtcgaaagaacacactacggaacatttgcgtgcagagttgaaatccctgtctgatacgctggaagaagtacta

SEQ ID NO: 654188 - DNA, 75 bp, synthetic construct
  source 1..75: mol_type = other DNA
aaaacatggatataacgaaattgaaggctggtatccgttatttaaaccaaccgataaattaaccatccagcccgg

SEQ ID NO: 654189 - DNA, 75 bp, synthetic construct
  source 1..75: mol_type = other DNA
acggcgaattggataataacgacacctatgaagttggcacctactggaattttaaaatcaccgagaaattctcct

SEQ ID NO: 654190 - DNA, 75 bp, synthetic construct
  source 1..75: mol_type = other DNA
aattttcctatacatttgagccacattacttcatgcgagtgaatgactttaatagtagcaacgggaaagatcatc

SEQ ID NO: 654191 - DNA, 75 bp, synthetic construct
  source 1..75: mol_type = other DNA
gagactgcggaatttttatataaaacgacgaactattatcatcctgatagtgatagagggattgtatggaatgat

SEQ ID NO: 654192 - DNA, 75 bp, synthetic construct
  source 1..75: mol_type = other DNA
cattagcactttggttgaattggcatctggttgcccagtatccagtaacgactttttggaaaactcaggcatacc

SEQ ID NO: 654193 - DNA, 75 bp, synthetic construct
  source 1..75: mol_type = other DNA
tcaaatatggattcgagacaacgatatagtctttgctgccgttggaaatacaattggtaaggtagcgttgaagac

SEQ ID NO: 654194 - DNA, 75 bp, synthetic construct
  source 1..75: mol_type = other DNA
agcggagcaggcactgaaacagagccgttaccgtctgggtgaaaccggtgatgcaattgccaaacagacccgtga

SEQ ID NO: 654195 - DNA, 75 bp, synthetic construct
  source 1..75: mol_type = other DNA
ctgacgtgctgatttttgaaccgcgcgtgtttggtgatgcgcgaggcttcttctttgagagcttcagcagcaagg

SEQ ID NO: 654196 - DNA, 75 bp, synthetic construct
  source 1..75: mol_type = other DNA
gtgaatttatctgctgagaataagcgccagttgtggatccctgaaggatttgcgcatgggtttttggtgctgagt

SEQ ID NO: 654197 - DNA, 75 bp, synthetic construct
  source 1..75: mol_type = other DNA
tattcttctgactactgcgatcgaaagctttatgcagatcgcacaggaaaaagcgccttatgctcaatctgaatg

SEQ ID NO: 654198 - DNA, 75 bp, synthetic construct
  source 1..75: mol_type = other DNA
ctggcagcggcagcaagcggaaaactggataagctgaccgccacgctgaaagcctcggacggtaaaacggaagag

SEQ ID NO: 654199 - DNA, 75 bp, synthetic construct
  source 1..75: mol_type = other DNA
ggggtcaatggcggggacggggagcagtgccgttgtcacccgattacaggcaccgactggaaaagcatgggatgc

SEQ ID NO: 654200 - DNA, 75 bp, synthetic construct
  source 1..75: mol_type = other DNA
gggaattaatacccgcaatcttgcacatgatgagcagggactgaaaaaccgtatcagtgaaaccaccgcacagct

SEQ ID NO: 654201 - DNA, 75 bp, synthetic construct
  source 1..75: mol_type = other DNA
tcatgttcgggcaggcactggctgacgcgctgatgctgccgcttaatgcgttcaacaaactgcgcagcggcattg

SEQ ID NO: 654202 - DNA, 75 bp, synthetic construct
  source 1..75: mol_type = other DNA
ggcaaaacttaacgcagtcaaacagcgttatcaggccggaaaggaactggccggaaatatggcctcagtgggcgc

SEQ ID NO: 654203 - DNA, 75 bp, synthetic construct
  source 1..75: mol_type = other DNA
gaccagaccgccgccagaactcaagccgccacgtatggcagcggtggttatattccggcgaccagctcttatgca

SEQ ID NO: 654204 - DNA, 75 bp, synthetic construct
  source 1..75: mol_type = other DNA
tgcgtaagctgacgcagacggccacgcagtatgtgctcaggcttgacggctggctccagaaaaataaggggctgg

SEQ ID NO: 654205 - DNA, 75 bp, synthetic construct
  source 1..75: mol_type = other DNA
gcgacgccggtgacgctgaatatggcgctgtccaacaggcgcacgatggaagagaacgccgcgctgctgaccggg

SEQ ID NO: 654206 - DNA, 75 bp, synthetic construct
  source 1..75: mol_type = other DNA
cggcgatgcggcggctattcaggcggcgacgccggtcacgctgaatatggcgctgtcgaacaagcgcacgatgga

SEQ ID NO: 654207 - DNA, 75 bp, synthetic construct
  source 1..75: mol_type = other DNA
ctcggaacgggtcagaaatccgaatacatgaaaaccattttcggtgaagaggccagctcggcggccgccgtgctg

SEQ ID NO: 654208 - DNA, 75 bp, synthetic construct
  source 1..75: mol_type = other DNA
acatgaaaacgatattcggtgaggaggcaagctctgctgccagcatattaatggcagcggcggccagtgggaaac

SEQ ID NO: 654209 - DNA, 75 bp, synthetic construct
  source 1..75: mol_type = other DNA
ccctgtctgccgatgagcgtcggctcaaaacctctatcagcgaaacgacggcgcagcttaaccgacagcgcgagg

SEQ ID NO: 654210 - DNA, 75 bp, synthetic construct
  source 1..75: mol_type = other DNA
cactatcaataagttggagtcattacctggttgttgataacacctgtgaaacccgcgttgacggcggtaacaagg

SEQ ID NO: 654211 - DNA, 75 bp, synthetic construct
  source 1..75: mol_type = other DNA
ttcccggaaaagcaaaagaaggtgttgtcgttgcttcttgccggacacagctgggaatacagtgcgcaatttctc

SEQ ID NO: 654212 - DNA, 75 bp, synthetic construct
  source 1..75: mol_type = other DNA
atgccggaagggtatctggatgcggaatacgcagaacaaccgggggtttctccaccacatgcagggttaacgtct

SEQ ID NO: 654213 - DNA, 75 bp, synthetic construct
  source 1..75: mol_type = other DNA
tgaacagcaggagatcataaaagaactaagaaataaaaaagaggcaatggaagatcttgttgcacgttggttggc

SEQ ID NO: 654214 - DNA, 75 bp, synthetic construct
  source 1..75: mol_type = other DNA
cgttttcagagaatattttggtataacacctcatcagatgatgattaatcagtccggatttattgagagcagaat

SEQ ID NO: 654215 - DNA, 75 bp, synthetic construct
  source 1..75: mol_type = other DNA
gtgattcacttacctatgtcgggccagtggcaaaagatgcaggtgtcagcttggaagaaacagcagcaatgttag

SEQ ID NO: 654216 - DNA, 75 bp, synthetic construct
  source 1..75: mol_type = other DNA
gcaactggggtgactcctcatgaattgcgaccagatttatatccgaatccaaccgacggtttacctgttggatgt

SEQ ID NO: 654217 - DNA, 75 bp, synthetic construct
  source 1..75: mol_type = other DNA
aattgttggggctttttctttgcgtagttctgatacggtttatcctgtggagcattatggccaccagccagctgg

SEQ ID NO: 654218 - DNA, 75 bp, synthetic construct
  source 1..75: mol_type = other DNA
tcttgagcaccctatttcaatcgaagatatcgcacagaaatctggctacagcagacgcaacatccagcttctgtt

SEQ ID NO: 654219 - DNA, 75 bp, synthetic construct
  source 1..75: mol_type = other DNA
caggcggcaactgctggttatgtaaaaaccaataccgcatataccgttacttatcagcaatattttaccgaatta

SEQ ID NO: 654220 - DNA, 75 bp, synthetic construct
  source 1..75: mol_type = other DNA
tttgaagcctgcaagcgtgctgaccgtgacggcgaggatttagagcgctggttgcagggagaaatatataatggc

SEQ ID NO: 654221 - DNA, 75 bp, synthetic construct
  source 1..75: mol_type = other DNA
ggtatgccaacgccagcgcgaagaatacgaagcctgcaaacgggctgcatctgacagtggagactttgaatcatg

SEQ ID NO: 654222 - DNA, 75 bp, synthetic construct
  source 1..75: mol_type = other DNA
ggtacgccaacgccagcgcgaagaatacgaagcctgcaagcgggcttcgtctgacaatggagactttgaatcatg

SEQ ID NO: 654223 - DNA, 75 bp, synthetic construct
  source 1..75: mol_type = other DNA
acagttcagcttattttcgggagctggtggagacgcgggagcgactggtgagagacgctgatgattttgtcgcag

SEQ ID NO: 654224 - DNA, 75 bp, synthetic construct
  source 1..75: mol_type = other DNA
tcaggcagcaaaagagatatctttggcagaggcgccgaagtttgccgaggctatcattaataaccagatccaggg

SEQ ID NO: 654225 - DNA, 75 bp, synthetic construct
  source 1..75: mol_type = other DNA
aaagtgctggcacaaatgaactacggcggctgcgtggcggcttgtggtctggcgggtggctttgctctgccaacc

SEQ ID NO: 654226 - DNA, 75 bp, synthetic construct
  source 1..75: mol_type = other DNA
cggtttatctgtgaagcggaatgtctggcacctgttgcatttaatgatgctgcggcaggccgtgaatatcgccgc

SEQ ID NO: 654227 - DNA, 75 bp, synthetic construct
  source 1..75: mol_type = other DNA
ttgttaccagcgatcgaaaaggcaatgccgcctccgctggtggcccgaatgcgcagccacagttcagtttatttt

SEQ ID NO: 654228 - DNA, 75 bp, synthetic construct
  source 1..75: mol_type = other DNA
agagacgctgatgattttgtcgcagtggcaatcgccggtttcaatcagatgaaccgtggtggcccggcaggaaat

SEQ ID NO: 654229 - DNA, 75 bp, synthetic construct
  source 1..75: mol_type = other DNA
tggtcttgccctgcgctctgaccgctgggcgggggcggatttctgggaagagcagggccgttgtatcagcctgga

SEQ ID NO: 654230 - DNA, 75 bp, synthetic construct
  source 1..75: mol_type = other DNA
ccgacggaattgtggtggggataagccagggctggaagctgggcggggccatcaaaaccaccgagcgcaaactgg

SEQ ID NO: 654231 - DNA, 75 bp, synthetic construct
  source 1..75: mol_type = other DNA
ggtggcagccgatccgaatacggtgtccggtatcaagtccgtgggtacgctgattgatgagttgtggctgtttgg

SEQ ID NO: 654232 - DNA, 75 bp, synthetic construct
  source 1..75: mol_type = other DNA
tcacatcgtagaacaaggcgacgcgagctgctttaccgagccgcaaaccgaagcatttaaaaactatctctctca

SEQ ID NO: 654233 - DNA, 75 bp, synthetic construct
  source 1..75: mol_type = other DNA
atgatagtagcattggcatcaactagtttgatatgggtgctgataacaaatacggacaaattgattctgtctaca

SEQ ID NO: 654234 - DNA, 75 bp, synthetic construct
  source 1..75: mol_type = other DNA
tccggtatcaagtccgtggggacgctgattgatgaactgtggctgtttggcaagcagtacaaagcggaggacatg

SEQ ID NO: 654235 - DNA, 75 bp, synthetic construct
  source 1..75: mol_type = other DNA
ctagctcgcaatactcagaaaattttccgctgggtagagaaagacactcctgatgcggttaaaaaaattcaggca

SEQ ID NO: 654236 - DNA, 75 bp, synthetic construct
  source 1..75: mol_type = other DNA
atatgatcccacacggcgagcatcgaatggcggtgaaactggggctggaaaaacgttttcagttgcgcgatgacg

SEQ ID NO: 654237 - DNA, 75 bp, synthetic construct
  source 1..75: mol_type = other DNA
cgactggggctgggggattgatccactcggtctgcgtatcaccatgaacatgatgtatgaccgctatcagaagcc

SEQ ID NO: 654238 - DNA, 75 bp, synthetic construct
  source 1..75: mol_type = other DNA
agcgactggggctggggtattgatccactcggtctgcgtatcaccatgaatatgatgtacgaccgttatcagaag

SEQ ID NO: 654239 - DNA, 75 bp, synthetic construct
  source 1..75: mol_type = other DNA
acttcgatgtgccaatgcatctggtggtggagtacggctcgtggcgcaaccgcaaaatggtcgagttcttcactc

SEQ ID NO: 654240 - DNA, 75 bp, synthetic construct
  source 1..75: mol_type = other DNA
attatgttgcatagcccgttctccggcgcgggtctggtgtttgaagaaggtgaaaatcaggatcaggtgaaatat

SEQ ID NO: 654241 - DNA, 75 bp, synthetic construct
  source 1..75: mol_type = other DNA
caccgaatatggctcctggcgtaaccgcaagctggtggagtttttcagccgctacgcccggacctgctttgaagc

SEQ ID NO: 654242 - DNA, 75 bp, synthetic construct
  source 1..75: mol_type = other DNA
ggcgcagaagcaaatggacgcgctggaagttgctgaactgctgccgcagatagccgaaccagcagcgccagaatc

SEQ ID NO: 654243 - DNA, 75 bp, synthetic construct
  source 1..75: mol_type = other DNA
ttgttaccagcgatcgaaaaggcaatgccacctccgctggtggcctggatgcgcagccacagttccgcttatttt

SEQ ID NO: 654244 - DNA, 75 bp, synthetic construct
  source 1..75: mol_type = other DNA
aaaattttccgctgggtagagaaagacacccctgatgcagttgaaaaaattcaggcgttgttaccagcgatcgaa

SEQ ID NO: 654245 - DNA, 75 bp, synthetic construct
  source 1..75: mol_type = other DNA
agctgggaatgacgttcccggaactgtacgacgacagccatccggaagccctggcccgtaatacccagaaaattt

SEQ ID NO: 654246 - DNA, 75 bp, synthetic construct
  source 1..75: mol_type = other DNA
gtatggcgatgaatgcctgggcatatcctgatggtgagaaagttcccgcagctgaaatagcccggacttatttcg

SEQ ID NO: 654247 - DNA, 75 bp, synthetic construct
  source 1..75: mol_type = other DNA
tccgctggatagagaaagacacccctgatgcagttgaaaaaattcaggcgttgttaccagctatcgaaaaagcaa

SEQ ID NO: 654248 - DNA, 75 bp, synthetic construct
  source 1..75: mol_type = other DNA
tttcaggattttgtggcctgtggagatatgaccattgtccgtcgggtcggggatgacacggcggaagtggcggag

SEQ ID NO: 654249 - DNA, 75 bp, synthetic construct
  source 1..75: mol_type = other DNA
ctgccaggaagggctgaacaacattgtgaaacatgctgatgccagcgcggtcaccctgcaaggctggcagcagga

SEQ ID NO: 654250 - DNA, 75 bp, synthetic construct
  source 1..75: mol_type = other DNA
actgccgggtttactgccatgctgtgcgtgatggcgctggaagatgccggtgttcgtccgcaggatggcgagatt

SEQ ID NO: 654251 - DNA, 75 bp, synthetic construct
  source 1..75: mol_type = other DNA
aaaccactggggcgggctggcacaacaggcgcgcgtaaaaggtgactggctggttgcgatgccgcaaggtctgga

SEQ ID NO: 654252 - DNA, 75 bp, synthetic construct
  source 1..75: mol_type = other DNA
ctggtttctcagccgataaactggcgcgggcggcatctgatttggtacttgctgctgtttgttatcagcctctgg

SEQ ID NO: 654253 - DNA, 75 bp, synthetic construct
  source 1..75: mol_type = other DNA
gtgaaacatgccgatgccagtgcggtcacgttgcaaggttggcagcagggtgaacggttaatgctggtgattgaa

SEQ ID NO: 654254 - DNA, 75 bp, synthetic construct
  source 1..75: mol_type = other DNA
tcccagccgatcaactggcgcggtcggcatctgatctggtatttgctgctgtttgtcatcagtctgtggctccaa

SEQ ID NO: 654255 - DNA, 75 bp, synthetic construct
  source 1..75: mol_type = other DNA
ttaaggagcgggtgatccgtaacagtctgcggccccctgccgtgcccggtatcggacgcactgagaaatacggga

SEQ ID NO: 654256 - DNA, 75 bp, synthetic construct
  source 1..75: mol_type = other DNA
tccgagctggcaccagcgccagagaacgcggccaacacccggttcaaagcaaagctgagaggaggtttggcctcc

SEQ ID NO: 654257 - DNA, 75 bp, synthetic construct
  source 1..75: mol_type = other DNA
atgtgctgatgaatctgctctggcgaaggttatgcagccaggatgccggattgaaggggaagacctgcgaaagtt

SEQ ID NO: 654258 - DNA, 75 bp, synthetic construct
  source 1..75: mol_type = other DNA
ttaaggagcgggtgatccggaacagtctgcggccccctgccgtgcccggtatcggacgcaccgagaaatacggca

SEQ ID NO: 654259 - DNA, 75 bp, synthetic construct
  source 1..75: mol_type = other DNA
ttaaggagcgggtgatccgcaacagtctgcggccccctgccgtgcccggtatcggacgcacagagaaatacggaa

SEQ ID NO: 654260 - DNA, 75 bp, synthetic construct
  source 1..75: mol_type = other DNA
ttaaggagcgggtgatccgtaacagtctgcggccccctgccgtgcccggtatcggacgcacggagaaatacggta

SEQ ID NO: 654261 - DNA, 75 bp, synthetic construct
  source 1..75: mol_type = other DNA
cagtcgctgccctggctttggcacggcaaagagtcgtggaatgcgctgctgctgactttaactggcggcctgacg

SEQ ID NO: 654262 - DNA, 75 bp, synthetic construct
  source 1..75: mol_type = other DNA
atgcgattaattgataatgaccaactcgacgaattatatgatcaagccgggcaatcggaacgtttacgttcccac

SEQ ID NO: 654263 - DNA, 75 bp, synthetic construct
  source 1..75: mol_type = other DNA
atgacttggtgagttcttttaataacaagattgatgtatggagagatagtataaagaaaagaatagtcgaggaaa

SEQ ID NO: 654264 - DNA, 75 bp, synthetic construct
  source 1..75: mol_type = other DNA
cacctcggtttcccacatgggcttcgtgctgattgcaatctacaccggcagccagttggcctaccagggcgcggt

SEQ ID NO: 654265 - DNA, 75 bp, synthetic construct
  source 1..75: mol_type = other DNA
tttctgccggtgatatttgagcatcctcctgaaatggtggaaagcggggctcacctgctgatggaaaacctcgcc

SEQ ID NO: 654266 - DNA, 75 bp, synthetic construct
  source 1..75: mol_type = other DNA
gattcactggcggaagccgggatccccgacgggattgtggtgggggtaaggcagggctggaaactgggcggggcc

SEQ ID NO: 654267 - DNA, 75 bp, synthetic construct
  source 1..75: mol_type = other DNA
atgaaagttattgatgatgtagttgttgacgaattggtaaataatgcacacctttcagaaagaaaaagagcacat

SEQ ID NO: 654268 - DNA, 75 bp, synthetic construct
  source 1..75: mol_type = other DNA
gtatacgaccacccagtcgaatgaaccgcccgccggggtgttcagacagaaactgcagtacgcccgggatgtccg

SEQ ID NO: 654269 - DNA, 75 bp, synthetic construct
  source 1..75: mol_type = other DNA
atgaaataccgggggctgattgccctgctggtatgggggcagagtgtggccgcagccgatcttggcacctgggga

SEQ ID NO: 654270 - DNA, 75 bp, synthetic construct
  source 1..75: mol_type = other DNA
acggtcatgccatttattctgcgtaatgtccgtttgcaaggggtggattcagtaatgacgccaccagcacgccgc

SEQ ID NO: 654271 - DNA, 75 bp, synthetic construct
  source 1..75: mol_type = other DNA
ggtttttgttcactacaatgcgaccggtgtctggaccttcaactatgaagagctgctgaatacgccaatgtccag

SEQ ID NO: 654272 - DNA, 75 bp, synthetic construct
  source 1..75: mol_type = other DNA
ttcatcaacggcgatgatccggcgcaggtggcctggatgaaacgtcagacacctcccacactggagagcaaaatt

SEQ ID NO: 654273 - DNA, 75 bp, synthetic construct
  source 1..75: mol_type = other DNA
cgcatgaaaccgcggtggtccgacggaagagcgaggcgtcccggtttcaggatcttgttgcctgtggagacatga

SEQ ID NO: 654274 - DNA, 75 bp, synthetic construct
  source 1..75: mol_type = other DNA
ctcgtatgggtttcaaaggtgaaactcagattaatgaccagttaaccggttttggtcagtgggagtacgaattta

SEQ ID NO: 654275 - DNA, 75 bp, synthetic construct
  source 1..75: mol_type = other DNA
ccggagaaagaacttttttggcgttccattcgttcaggtaataatgcctggtattctgtcgcatcagaaatgcca

SEQ ID NO: 654276 - DNA, 75 bp, synthetic construct
  source 1..75: mol_type = other DNA
ctaaatgctctgtttatttcgctaccgaaaaatagccatttagatattagtggagaaggtgagtttgatatccca

SEQ ID NO: 654277 - DNA, 75 bp, synthetic construct
  source 1..75: mol_type = other DNA
cgttctgccagaattcggtggtgatacctggacccaaacagatgtgttcatgactggtcgcactactggtgttgc

SEQ ID NO: 654278 - DNA, 75 bp, synthetic construct
  source 1..75: mol_type = other DNA
gattacggccgtaactacggtgtagcatacgacatcggtgcgtggactgacgttctgccagaattcggtggtgat

SEQ ID NO: 654279 - DNA, 75 bp, synthetic construct
  source 1..75: mol_type = other DNA
tgaatctaatggtgatggctttggtctgtctgctacttacgattatgaaggatttggcgttggtgcaacctatgc

SEQ ID NO: 654280 - DNA, 75 bp, synthetic construct
  source 1..75: mol_type = other DNA
cctcatggtcgctggtccggtgcgatggtggaagaaactggattttgttgcaactgataaccattatcatttttc

SEQ ID NO: 654281 - DNA, 75 bp, synthetic construct
  source 1..75: mol_type = other DNA
cgaacaattaagaaaaggaattgcgatttatcgcaatagtaacagtaaccatacgaataattcagttcatgaata

SEQ ID NO: 654282 - DNA, 75 bp, synthetic construct
  source 1..75: mol_type = other DNA
gaaacaagttggtcgaaactggaaagagaatttctcgaatttcgtgccgagcttccgctgcattatgtccgcaga

SEQ ID NO: 654283 - DNA, 75 bp, synthetic construct
  source 1..75: mol_type = other DNA
agctggaagcgcaggaatcccgttttacctacagctaccagtttggtctgttcgataaagcaggcgactggaaga

SEQ ID NO: 654284 - DNA, 75 bp, synthetic construct
  source 1..75: mol_type = other DNA
ataattattatcatttattgggtcctttccggcgatccggcaggctacggggcggcgacctcgcgggttttcgct

SEQ ID NO: 654285 - DNA, 75 bp, synthetic construct
  source 1..75: mol_type = other DNA
ctgataaccattatcattttgcgggtcctttccggcgatccgggccgttacggggcggcgacctcgcgcgttttc

SEQ ID NO: 654286 - DNA, 75 bp, synthetic construct
  source 1..75: mol_type = other DNA
attgaactgaaacgcctgacggtcaaagacctgaagcaggtgcgcaaaatcagcaaaaacccggcagactgggac

SEQ ID NO: 654287 - DNA, 75 bp, synthetic construct
  source 1..75: mol_type = other DNA
tttgatgcgcgtgccaccagaacaagcaatcaaaggatatgaaagcgattgtcgaaaccgactgatgcatcaaat

SEQ ID NO: 654288 - DNA, 75 bp, synthetic construct
  source 1..75: mol_type = other DNA
aaccatggacgaaatcatacttaagctttgctcaggccattatatgccgcttagtgttattgcaaagttaatggc

SEQ ID NO: 654289 - DNA, 75 bp, synthetic construct
  source 1..75: mol_type = other DNA
tgttgcaacttatcgtaacaacgacttctttggtctggttgatggtctgaactttgctgctcagtatcagggtaa

SEQ ID NO: 654290 - DNA, 75 bp, synthetic construct
  source 1..75: mol_type = other DNA
atggtgacaacagcggcggtctgctcagtttcacgttggcacataccgacgcctggcgtcagcagggctatgaag

SEQ ID NO: 654291 - DNA, 75 bp, synthetic construct
  source 1..75: mol_type = other DNA
gctggcgctgctgggctggattttcagtaagtctctgggggttgatgaatccaccgtggcaatcgttgttatggc

SEQ ID NO: 654292 - DNA, 75 bp, synthetic construct
  source 1..75: mol_type = other DNA
ctagaaagcttgttggcttacagaaatctactatctgcttcaaacccgacacatccagctctcgaactagataac

SEQ ID NO: 654293 - DNA, 75 bp, synthetic construct
  source 1..75: mol_type = other DNA
caccacctttggcggcaacccgctggcctgtgcggcggcgctggcgaccatcaatgtgttgctggagcagaactt

SEQ ID NO: 654294 - DNA, 75 bp, synthetic construct
  source 1..75: mol_type = other DNA
gcatattttgaacaggttaccttcgagcgcatcggctttagcgtgcagcgcccacgccctgaatctcattgaaaa

SEQ ID NO: 654295 - DNA, 75 bp, synthetic construct
  source 1..75: mol_type = other DNA
tgaaagaagatattttattactgattgaacctatcaaccattttgatattcctggtttccatctcaccggaactc

SEQ ID NO: 654296 - DNA, 75 bp, synthetic construct
  source 1..75: mol_type = other DNA
cgccgtgcgtaagctgtgcgatgagttcggcgcactgatgatcctcgatgaagtgcaaaccggtatggggcgcac

SEQ ID NO: 654297 - DNA, 75 bp, synthetic construct
  source 1..75: mol_type = other DNA
actgacactgaccattgaacaatgtgaactggtgatcaaagcggcgcgtaaggcgctggcggccatgcgagtaag

SEQ ID NO: 654298 - DNA, 75 bp, synthetic construct
  source 1..75: mol_type = other DNA
ataacgaaatcggctataactttgccagcgagatgttccgccagcgcgtactggtggccggaacgctcaataacg

SEQ ID NO: 654299 - DNA, 75 bp, synthetic construct
  source 1..75: mol_type = other DNA
atgtctttaaaactccccgataaaggccagtgggcttttatcggtctggttatgtgtctcgtgacatattatact

SEQ ID NO: 654300 - DNA, 75 bp, synthetic construct
  source 1..75: mol_type = other DNA
ctgtctcgtaatacccagaaaattttccgctgggtagaaaaagacacccctgatgcggttaaaaaaattcaggcg

SEQ ID NO: 654301 - DNA, 75 bp, synthetic construct
  source 1..75: mol_type = other DNA
gaaactgatcgtgatgaatatctgaatcattcgctggatattctggaacagaacagacgtaaaaaagccatttaa

SEQ ID NO: 654302 - DNA, 75 bp, synthetic construct
  source 1..75: mol_type = other DNA
caggctctgttaccggcgatcgaaaaggcaatgccgcctctgctggtggcccgtatgcgcagtcacagctctgaa

SEQ ID NO: 654303 - DNA, 75 bp, synthetic construct
  source 1..75: mol_type = other DNA
acggagggatcggctggtgaaggatgtcgatgattttgttgcgtcagcggttgttttgtatgaccagatgaatcg

SEQ ID NO: 654304 - DNA, 75 bp, synthetic construct
  source 1..75: mol_type = other DNA
tccgctgggtggagaaagacacccctgatgcggttaaaaaaattcaggcgttgttaccagctatcgaaaaagcaa

SEQ ID NO: 654305 - DNA, 75 bp, synthetic construct
  source 1..75: mol_type = other DNA
tgatgctgttgaaaaaattcaggcgctgttaccggcgatcgaaaaggcgatgccgcctttgctggtggcccgtat

SEQ ID NO: 654306 - DNA, 75 bp, synthetic construct
  source 1..75: mol_type = other DNA
agaaaccggcattgattatgaaatccgcagtatggaaaaaccgtcagatcacgctcctgtgtgggcagctttccg

SEQ ID NO: 654307 - DNA, 75 bp, synthetic construct
  source 1..75: mol_type = other DNA
ggcaatgtcaccgtgatcaacggttacttcccgcagggtgaaagccgcgaccatccgataaaattcccggcaaag

SEQ ID NO: 654308 - DNA, 75 bp, synthetic construct
  source 1..75: mol_type = other DNA
acggcctgcgcgccagacctcaccagcttgaagccatcgtcgaaaagcaccaaccggatgtgattggcctgcagg

SEQ ID NO: 654309 - DNA, 75 bp, synthetic construct
  source 1..75: mol_type = other DNA
gctggtgaaagatgtggatgattttgtcgctgtagcgatcgcctggggcaccctgactaacagtggtggtcagcc

SEQ ID NO: 654310 - DNA, 75 bp, synthetic construct
  source 1..75: mol_type = other DNA
gctgaaataacccaggcttattttgagctgggtatgacgttcccggagctatatgacgacaggcatccggaagcg

SEQ ID NO: 654311 - DNA, 75 bp, synthetic construct
  source 1..75: mol_type = other DNA
ctgggggttggtcgataccttccgccatgcgaatccgcaaacagcagatcgtttctcatggtttgattaccgctc

SEQ ID NO: 654312 - DNA, 75 bp, synthetic construct
  source 1..75: mol_type = other DNA
gcatggcgatgaatgcctgggctcattcggacggtgaaaaagttccggcagctgaaataacccagtcttattttg

SEQ ID NO: 654313 - DNA, 75 bp, synthetic construct
  source 1..75: mol_type = other DNA
atttctttattaactatgagccgtcctggcttaatgagttcgggcttaaacccgttttctcaatcggttctgtcg

SEQ ID NO: 654314 - DNA, 75 bp, synthetic construct
  source 1..75: mol_type = other DNA
ttttctatattgatttaaaagcggagagtggggctaaggatctgcttaaactgattgaaattctgtttccgtctt

SEQ ID NO: 654315 - DNA, 75 bp, synthetic construct
  source 1..75: mol_type = other DNA
ggactcaggtatccaccaaaggaaatcatgttgtcttatggcgaacttgaagcagatttagatctggcagcataa

SEQ ID NO: 654316 - DNA, 75 bp, synthetic construct
  source 1..75: mol_type = other DNA
tatgtgtctcgtgacctattatgctggttctgttgctgtttatttcctgaacggaaaaacaccactgtatatatg

SEQ ID NO: 654317 - DNA, 75 bp, synthetic construct
  source 1..75: mol_type = other DNA
gcatgcccctgggcattgccgggggcgttacccgtcctcgtgatctcaccatcgagccggttagcctggaccaca

SEQ ID NO: 654318 - DNA, 75 bp, synthetic construct
  source 1..75: mol_type = other DNA
gaagaaaatgagcctcttctacttaccgactgtacgcaaatgcactgacggtaacgacttcgatttacgtcaaat

SEQ ID NO: 654319 - DNA, 75 bp, synthetic construct
  source 1..75: mol_type = other DNA
tgagagacgctgatgattttgtcgcagtggcgatcgctggtttcaaccagatgaatcgtggtggccctgcaggaa

SEQ ID NO: 654320 - DNA, 75 bp, synthetic construct
  source 1..75: mol_type = other DNA
gtacgacgattcacacccagaagccctggctcgcaatactcagaagattttccgctgggtggagaaagatactcc

SEQ ID NO: 654321 - DNA, 75 bp, synthetic construct
  source 1..75: mol_type = other DNA
cgggagcttgtcgagcgacgggagcgcctggtgaaagatatcgatgagtttgttgcggcagcgatcgtgttgttc

SEQ ID NO: 654322 - DNA, 75 bp, synthetic construct
  source 1..75: mol_type = other DNA
gcggggttgcttggcagcttgtgcggtgtcgttatcggcgtgatggtttcgcttaaacttacctcgattattgat

SEQ ID NO: 654323 - DNA, 75 bp, synthetic construct
  source 1..75: mol_type = other DNA
gctatatgtatcgcgatatccagatgatccgcgccattatgtatctggcgatggtactggtgattggcgtggcct

SEQ ID NO: 654324 - DNA, 75 bp, synthetic construct
  source 1..75: mol_type = other DNA
agctggtacgcgatgcgggtgaagtgaccaacagctatgtttatattaaagttggattggtacttacggctatat

SEQ ID NO: 654325 - DNA, 75 bp, synthetic construct
  source 1..75: mol_type = other DNA
aaatgcacatattctggatcatggctggaatgcaactgagttctcatggttccgatacggacagtataacgaaac

SEQ ID NO: 654326 - DNA, 75 bp, synthetic construct
  source 1..75: mol_type = other DNA
tgaccttacgactgcgcctgcaggatcagcaggaagaaacatccgtgacattatttcagggaaaaatgagtaccg

SEQ ID NO: 654327 - DNA, 75 bp, synthetic construct
  source 1..75: mol_type = other DNA
tcccgattagacgtgttgatcacaccgctggtcgcctttgatgagtacggtcagcgcctgggaatgggcggtggt

SEQ ID NO: 654328 - DNA, 75 bp, synthetic construct
  source 1..75: mol_type = other DNA
ctacatacaactctgaaaaatatatcttagagctatatgaatcaatcaaaaaacaaaagcatgaaaactgggaat

SEQ ID NO: 654329 - DNA, 75 bp, synthetic construct
  source 1..75: mol_type = other DNA
agatgaaatgcagcgttgcgaacaactgggtctctctttgctcaacttccaccccggtagtcacctgatgcaaat

SEQ ID NO: 654330 - DNA, 75 bp, synthetic construct
  source 1..75: mol_type = other DNA
tatagagaaatagaagctcttagtctgaccgagtctttagagtgtttttgtttttatgcatatagagctgtgttt

SEQ ID NO: 654331 - DNA, 75 bp, synthetic construct
  source 1..75: mol_type = other DNA
agaaacactggattttcaaaagcaaaaaacgacgaataataaagaaaagtccgttcctccgttgattgaattatt

SEQ ID NO: 654332 - DNA, 75 bp, synthetic construct
  source 1..75: mol_type = other DNA
tcattatggctgaggcgctgtatctggtgatgcaactggtggatggccctgcgacggcggcccaggtgatcggtt

SEQ ID NO: 654333 - DNA, 75 bp, synthetic construct
  source 1..75: mol_type = other DNA
gtcagctggatctcaccgttcctgaaatgacggcattactgggtggtctgcgggtaatggatattaatacaaata

SEQ ID NO: 654334 - DNA, 75 bp, synthetic construct
  source 1..75: mol_type = other DNA
taagttcctgtctacgccagaaggaaaagcctggctagagcgtaaacagcgagagaacgaagaaagaaaactcct

SEQ ID NO: 654335 - DNA, 75 bp, synthetic construct
  source 1..75: mol_type = other DNA
ttttgcgattactaaaatcgcactgaagagcgaagttgcggtgccgggtattgatgcctccacctttgacggcat

SEQ ID NO: 654336 - DNA, 75 bp, synthetic construct
  source 1..75: mol_type = other DNA
ggggaggaaaaccgtggtatgtcgctctgtttttatttgctgtctcagttctttcctttgtttgcgtctggctga

SEQ ID NO: 654337 - DNA, 75 bp, synthetic construct
  source 1..75: mol_type = other DNA
atgacaatccataagaaaggtcaggcacactgggaaggcgatatcaaacgcgggaagggaacagtatccaccgag

SEQ ID NO: 654338 - DNA, 75 bp, synthetic construct
  source 1..75: mol_type = other DNA
tttatctgtgaactcaggctgccagatcatcgttgccgatggaagcataataagctttttctgcttctgccggtg

SEQ ID NO: 654339 - DNA, 75 bp, synthetic construct
  source 1..75: mol_type = other DNA
aagaactgttccaaaaaacgatggaagaatacgagcaacgttcaagcacgctggcgcagttagccgatgaagcga

SEQ ID NO: 654340 - DNA, 75 bp, synthetic construct
  source 1..75: mol_type = other DNA
gcccttactgtcaccagtttgacccggtactgaagcagctggcacagcagtacggcttttccgtttttccctaca

SEQ ID NO: 654341 - DNA, 75 bp, synthetic construct
  source 1..75: mol_type = other DNA
acagctggcacagcagtacggcttttccgttttttcctacaccctggatggtcagggggatacggcctttcctga

SEQ ID NO: 654342 - DNA, 75 bp, synthetic construct
  source 1..75: mol_type = other DNA
gtcaccagtttgacccggtactgaaacagctggcacagcagtatggcttttccgtttttccctacaccctggatg

SEQ ID NO: 654343 - DNA, 75 bp, synthetic construct
  source 1..75: mol_type = other DNA
cattgatgttcccggtgaaaaactgaactctctggaagaactgttccaaaaaacgatggaagaatacgagcaacg

SEQ ID NO: 654344 - DNA, 75 bp, synthetic construct
  source 1..75: mol_type = other DNA
ttgatgcctctacctttgacggcatcatccagaaagcaaaagcaggatgcccggtttctcaggtactgaaagcgg

SEQ ID NO: 654345 - DNA, 75 bp, synthetic construct
  source 1..75: mol_type = other DNA
aagagcgaagttgcggtgccgggtattgatgcctctacttttgacggcattatccagaaagcaaaagcaggatgc

SEQ ID NO: 654346 - DNA, 75 bp, synthetic construct
  source 1..75: mol_type = other DNA
cgggaagggaacagtatccaccgagagcggcgtgctgaaccaacagccgtatggatttaacacgcgttttgaagg

SEQ ID NO: 654347 - DNA, 75 bp, synthetic construct
  source 1..75: mol_type = other DNA
catgtttcccgttagatcgctgtccgttgtcctgctttttctggccagctgtacacaggcatccacacgtgcgga

SEQ ID NO: 654348 - DNA, 75 bp, synthetic construct
  source 1..75: mol_type = other DNA
tttttattgcaatattttcaatttctggctgttcaacatcagggaaccaaaaaattaaaaatgaaactgctcaaa

SEQ ID NO: 654349 - DNA, 75 bp, synthetic construct
  source 1..75: mol_type = other DNA
tattcagaaagcaaaagccggatgcccggtttctcaggtactgaaagcggaaattacgctggattaccagttgaa

SEQ ID NO: 654350 - DNA, 75 bp, synthetic construct
  source 1..75: mol_type = other DNA
acgacgtgctgaaaaaactgttcgatgatgctggtctgattctggtcgacttcaagctggagtttggtctgtaca

SEQ ID NO: 654351 - DNA, 75 bp, synthetic construct
  source 1..75: mol_type = other DNA
ctcttgcaccaggccgtaatgaaaagaaaaaactgtatctcctgacggatttgataacttcgttgctggaaaaac

SEQ ID NO: 654352 - DNA, 75 bp, synthetic construct
  source 1..75: mol_type = other DNA
gagtattaacgatcgccatccgggaatgattcgcgtgaatgaaggaggaacacacgtcgacgtagaaatttggca

SEQ ID NO: 654353 - DNA, 75 bp, synthetic construct
  source 1..75: mol_type = other DNA
aaaaaatcgtatgaagtgatgcatggggaattggggaatgtggattcgatccagagtgatcttacccagcagagc

SEQ ID NO: 654354 - DNA, 75 bp, synthetic construct
  source 1..75: mol_type = other DNA
gggggagcggggtaaaaccgacaccgtgatgccatcagacttgtgcgttcactgcgtgcaggagatctttctgct

SEQ ID NO: 654355 - DNA, 75 bp, synthetic construct
  source 1..75: mol_type = other DNA
ctgtcagatatgaagcgccttaaactttctgaagcgatggtgcagcaggaactgtataaagtctcaaccaacgca

SEQ ID NO: 654356 - DNA, 75 bp, synthetic construct
  source 1..75: mol_type = other DNA
tcgttttctgtcgtggtgaaagcgatagttcaggtactggaaacctggcctgaccggctggagagggacaggggg

SEQ ID NO: 654357 - DNA, 75 bp, synthetic construct
  source 1..75: mol_type = other DNA
ccggttgcggtctgtataaatgcgccgacggctacatcgtgatggaactggtgggtattactcagatcgcagagt

SEQ ID NO: 654358 - DNA, 75 bp, synthetic construct
  source 1..75: mol_type = other DNA
gaaggcactcagcttatccaccgtatcgaatgcccttacggcccactggtagaagagaaactcgatgcctggctg

SEQ ID NO: 654359 - DNA, 75 bp, synthetic construct
  source 1..75: mol_type = other DNA
cgacggctacatcgtgatggaactggtgggcattactcaaattgaagagtgctttaaagatattggcctcgcaca

SEQ ID NO: 654360 - DNA, 75 bp, synthetic construct
  source 1..75: mol_type = other DNA
ctgggactatacccggattacgcaacggctgtcgacaaaatggttcgcgtgaaagatatctttataccgattgag

SEQ ID NO: 654361 - DNA, 75 bp, synthetic construct
  source 1..75: mol_type = other DNA
aaatcgtatgaagtgatgcatggggaatgcggattcgatccagagctggtcgaatgcgtaagtgaggaaggccgg

SEQ ID NO: 654362 - DNA, 75 bp, synthetic construct
  source 1..75: mol_type = other DNA
ttcagtccattattgatgatctgcgcgatcagatagccctgcgggtgaccgaagcaggtgcggatgatgaggagg

SEQ ID NO: 654363 - DNA, 75 bp, synthetic construct
  source 1..75: mol_type = other DNA
cggaaacatcgctgcacgtgctgtcgaaccttcaaaagctgaagtcgggcactgttgcaaagttagcgatgaggc

SEQ ID NO: 654364 - DNA, 75 bp, synthetic construct
  source 1..75: mol_type = other DNA
attcctctttaggcgtgtttacggaaacgccaggggttctgaataatcagttttttgtgaacctcctggatatgt

SEQ ID NO: 654365 - DNA, 75 bp, synthetic construct
  source 1..75: mol_type = other DNA
aggtgctggcatccctgacttcattgcagtcggagttcaacaacaagcagtctgacggtaagaaagtttctctgg

SEQ ID NO: 654366 - DNA, 75 bp, synthetic construct
  source 1..75: mol_type = other DNA
cggcttttatggaggcacggcaccgcccggtgtcgcggaatatgtgaataacggaggaaaacatcatgcagtatg

SEQ ID NO: 654367 - DNA, 75 bp, synthetic construct
  source 1..75: mol_type = other DNA
caggggatggcgcgcgcattgagcagtttgatcgcaaaggtatggtgaacaacaagttcaattacttcattatga

SEQ ID NO: 654368 - DNA, 75 bp, synthetic construct
  source 1..75: mol_type = other DNA
tgaacggttgatgctggtgattgaagacgatggcagcggtttgccgccgggttccgggcaacaaggttttggcct

SEQ ID NO: 654369 - DNA, 75 bp, synthetic construct
  source 1..75: mol_type = other DNA
ttaccgttattgcctgcttttttatcttctctgccgcgtggttttgcctgtggagtatcagcctgcacctggttg

SEQ ID NO: 654370 - DNA, 75 bp, synthetic construct
  source 1..75: mol_type = other DNA
attaaaaccggtggtcgaacactttggcatcgatccggtgcattttggcatcatcatgatcttcaacctgtcgat

SEQ ID NO: 654371 - DNA, 75 bp, synthetic construct
  source 1..75: mol_type = other DNA
gctctggaagaaatcaggcaaaagtcgaaagctgtttacctcgaggccgaagatattttcctgaacgggaaaatt

SEQ ID NO: 654372 - DNA, 75 bp, synthetic construct
  source 1..75: mol_type = other DNA
cagtgcgcagcttcatgcgggcgagacagtgacgttgcaaaaactggtgtggatcgactggcgggatgacaggca

SEQ ID NO: 654373 - DNA, 75 bp, synthetic construct
  source 1..75: mol_type = other DNA
cgctgtccgttgtcctgctttttctggccggctgtacacaggcatccacacgtgcggaaatcgagcgactctggc

SEQ ID NO: 654374 - DNA, 75 bp, synthetic construct
  source 1..75: mol_type = other DNA
ttcattgaaaaaaataaggatgtcatcgctggagttgtggttattcaggacagaaaaagcgatgcctttgcttct

SEQ ID NO: 654375 - DNA, 75 bp, synthetic construct
  source 1..75: mol_type = other DNA
gtaaaacttattgtctggataaatgaatttcagggtattccagcacttgaaaatatcccattaatagaaactaaa

SEQ ID NO: 654376 - DNA, 75 bp, synthetic construct
  source 1..75: mol_type = other DNA
tccgcgcagcaaatgggcgttacggcaggcctgacgctacccattttcgatagtggtcgtcttaacgccaacctc

SEQ ID NO: 654377 - DNA, 75 bp, synthetic construct
  source 1..75: mol_type = other DNA
tggcaagtcagcttcctgatgaactggggtattcattgctggcacggcgggcagatttgcaggcagcgcattggt

SEQ ID NO: 654378 - DNA, 75 bp, synthetic construct
  source 1..75: mol_type = other DNA
aaatgtcggcagaaggcttaatggggccgtttgctctgaacgatccggccgcaggtacgaccggtccgtggtaca

SEQ ID NO: 654379 - DNA, 75 bp, synthetic construct
  source 1..75: mol_type = other DNA
tgctctcgttacaacctgcgggtaagaaagcgatgagcgcgcaagacctcctgaactctcgtcgggaatggtttg

SEQ ID NO: 654380 - DNA, 75 bp, synthetic construct
  source 1..75: mol_type = other DNA
atgttagcgctttgattgagaaaataaaagaaagtgattatgaaataccaaaaaattctgatgtgatgagaatca

SEQ ID NO: 654381 - DNA, 75 bp, synthetic construct
  source 1..75: mol_type = other DNA
cgagccaatggcctgttattgcaagggcagtggctggatgcctccattcaactcaccggcgcgctgggtgggggc

SEQ ID NO: 654382 - DNA, 75 bp, synthetic construct
  source 1..75: mol_type = other DNA
aaagtgctgcgctacaccgatccgcgccgctttggtgcctggctgtggaccaaagagctggaagggcacaacgtg

SEQ ID NO: 654383 - DNA, 75 bp, synthetic construct
  source 1..75: mol_type = other DNA
tgctgctggagctgcctgagggctggattatcattcatctggggatgtctggcagtctgcgcatacttacggaag

SEQ ID NO: 654384 - DNA, 75 bp, synthetic construct
  source 1..75: mol_type = other DNA
gtgtgcggtacgccgattgtggcgactaaacatgcgcagcgggcaacgttttattgtcggcagtgccagaagtaa

SEQ ID NO: 654385 - DNA, 75 bp, synthetic construct
  source 1..75: mol_type = other DNA
gttccgtcattccgcgcagcaaatgggcgttacggcaggcctgacgctacctattttcgatagtggtcgtcttaa

SEQ ID NO: 654386 - DNA, 75 bp, synthetic construct
  source 1..75: mol_type = other DNA
cgatgccttgcgtgtggtaggtcttgcgcaggcgcgctttaacgcgggcatcattgctggttcccgcgtcagcga

SEQ ID NO: 654387 - DNA, 75 bp, synthetic construct
  source 1..75: mol_type = other DNA
ccatcgctatccgttcgccacgctggcagaaacctacgagcgcgatgtgattaacaatcgtgagttgattaaggg

SEQ ID NO: 654388 - DNA, 75 bp, synthetic construct
  source 1..75: mol_type = other DNA
tctggacataacgttgttggcgtgtttacccaacctgaccgaccagcaggacgcggcaaaaagctgatgcccagt

SEQ ID NO: 654389 - DNA, 75 bp, synthetic construct
  source 1..75: mol_type = other DNA
ggtgaggaagcatttcgtggcttcatgtcaaaacatgccaatgtggaaattggtcttgccctgcgttctgaccgc

SEQ ID NO: 654390 - DNA, 75 bp, synthetic construct
  source 1..75: mol_type = other DNA
gtcaaaacaccgccaatgtgggaaatcgtcttgccgctgccgttctgggaccgcctgggcgggccccgcggattt

SEQ ID NO: 654391 - DNA, 75 bp, synthetic construct
  source 1..75: mol_type = other DNA
ctattagcaatgtctatccagttgagtggaatacaccaagggaatattatttaagtaaactcacaggatatgcgg

SEQ ID NO: 654392 - DNA, 75 bp, synthetic construct
  source 1..75: mol_type = other DNA
tttcaggatcttgttgcctgtggagatatgaccattggtaagcgtaaactgaccgccgtatgtagccatcagacg

SEQ ID NO: 654393 - DNA, 75 bp, synthetic construct
  source 1..75: mol_type = other DNA
agtgggtgtttgacctggtggcggctctgtttggctcctacgatgcgcagaccggtgtccgccatatcaaggaag

SEQ ID NO: 654394 - DNA, 75 bp, synthetic construct
  source 1..75: mol_type = other DNA
tgattgatgaactgtggctgtttggcaagcagtacaaagcggaagacatgctacgtgaagccatcggcgggcttg

SEQ ID NO: 654395 - DNA, 75 bp, synthetic construct
  source 1..75: mol_type = other DNA
cgcattggtttaccaatattctttatgttaagtggatactacctactcaacagacaaaatagcactccacttttg

SEQ ID NO: 654396 - DNA, 75 bp, synthetic construct
  source 1..75: mol_type = other DNA
gctgtacgacaagctggcagagcttggcccacaagggcttattactacgttgaaacaactggcagacggcacggc

SEQ ID NO: 654397 - DNA, 75 bp, synthetic construct
  source 1..75: mol_type = other DNA
gcgtcatctggacgcgctgctgtcttctggacataacgtcgttggtgtgttaacccaaccggatcgacctgcagg

SEQ ID NO: 654398 - DNA, 75 bp, synthetic construct
  source 1..75: mol_type = other DNA
tgggcaggggcggatttctgggagcagcagggcaggcgcgtcagcctggacgatatcctgcagcgcgctgatgtg

SEQ ID NO: 654399 - DNA, 75 bp, synthetic construct
  source 1..75: mol_type = other DNA
atggttaacccgaatctcggttattcggtggatgaggcctttctgtaccgggagtatcgtaaagcccgggaagcc

SEQ ID NO: 654400 - DNA, 75 bp, synthetic construct
  source 1..75: mol_type = other DNA
cctgactacgcaaagtgatgaaccgcctgctggtgtattcaaagaacgccttgattactggcgagctgtgcgaga

SEQ ID NO: 654401 - DNA, 75 bp, synthetic construct
  source 1..75: mol_type = other DNA
gccgtgtcgggtgtgcggtacgccgattgtggcgactaaacatgcgcagcgggcgacgttttattgcaggcggtg

SEQ ID NO: 654402 - DNA, 75 bp, synthetic construct
  source 1..75: mol_type = other DNA
gacgatttgcccggctatccggccacgatcacgtcagtggtggcagttattcaggatggtgtcccagtggcatgt

SEQ ID NO: 654403 - DNA, 75 bp, synthetic construct
  source 1..75: mol_type = other DNA
tatcgatgctgtttgttttatccaggtcattgatgcagcgaaggcagcttatgaagtcgataatcttgcatcagc

SEQ ID NO: 654404 - DNA, 75 bp, synthetic construct
  source 1..75: mol_type = other DNA
gaaaaactgccggttgaagagtgggatatcccattgcctgcggtggttacaccatcgaaagtctgggagtggtga

SEQ ID NO: 654405 - DNA, 75 bp, synthetic construct
  source 1..75: mol_type = other DNA
tgcacactgccaccggcgctgccggggaaaggtgtaacgaaaaaagcagccttcattactccaggagtcagaagg

SEQ ID NO: 654406 - DNA, 75 bp, synthetic construct
  source 1..75: mol_type = other DNA
cataccacaatacagcaccaaagaacgcgccctgaaggcattacgctgttcgcttgaaatcaagtttgccatgca

SEQ ID NO: 654407 - DNA, 75 bp, synthetic construct
  source 1..75: mol_type = other DNA
acactgccaccggcgctgccggggaagggggtaacgaaaaaagcagccttcattactccagggattcagaaggct

SEQ ID NO: 654408 - DNA, 75 bp, synthetic construct
  source 1..75: mol_type = other DNA
tacggattttccgtatttccctataccctggatggtcagggtgatacggccttccctataccctggatggtcagg

SEQ ID NO: 654409 - DNA, 75 bp, synthetic construct
  source 1..75: mol_type = other DNA
ccggatgtactgaaaacattcttcccgaatatcccggtggccacaccgaccaccttcctggttaacgtcaatacg

SEQ ID NO: 654410 - DNA, 75 bp, synthetic construct
  source 1..75: mol_type = other DNA
gtcaccagtttgacccggtactgaaacagttggcgcagcagtacggcttttccgtttttccctacaccctggatg

SEQ ID NO: 654411 - DNA, 75 bp, synthetic construct
  source 1..75: mol_type = other DNA
acttactgttcctgaattaccatccgcaaagtgagctggtggtgaacagattaaaaatccacgagccgaaactgg

SEQ ID NO: 654412 - DNA, 75 bp, synthetic construct
  source 1..75: mol_type = other DNA
aaatgggtcaacaagccgctacccggatgatgacttatcccccggtggtgatggcgcatacggtcgctgtattcc

SEQ ID NO: 654413 - DNA, 75 bp, synthetic construct
  source 1..75: mol_type = other DNA
gaaaagccagccccccgctggttccgcctcagcaacggcaggcaggttaacctggccgactggaaggtggtgctg

SEQ ID NO: 654414 - DNA, 75 bp, synthetic construct
  source 1..75: mol_type = other DNA
ataaagactgggccagcgcccgtttagcagaaatgatcgatgccgatatgctgatcattctgactgcggtagaaa

SEQ ID NO: 654415 - DNA, 75 bp, synthetic construct
  source 1..75: mol_type = other DNA
gttggggctggcgtaccggacatctgtgcgaatgatgcaggcatcgacaaaatacttatccccgacgctgaaacc

SEQ ID NO: 654416 - DNA, 75 bp, synthetic construct
  source 1..75: mol_type = other DNA
aatatttatcaccacaacttgagtcaaaagcgcagacgtttgcgcttttaggaaaagccaaacttttcgaattaa

SEQ ID NO: 654417 - DNA, 75 bp, synthetic construct
  source 1..75: mol_type = other DNA
cgctggatcagctggatcgtgcgtcgattaccgcgcaacgtaagctgaccattccgtttgtgaaagaaattctga

SEQ ID NO: 654418 - DNA, 75 bp, synthetic construct
  source 1..75: mol_type = other DNA
ctgtttgctgcggggatccatccggatcggctggcgtcatcgctgtcgctggcggagtgcgaactgctggcacgg

SEQ ID NO: 654419 - DNA, 75 bp, synthetic construct
  source 1..75: mol_type = other DNA
cggaagatgacgaagacctcgtcgaattagccgatggcggcacgattgctggtatgagcctcgatgatattgatc

SEQ ID NO: 654420 - DNA, 75 bp, synthetic construct
  source 1..75: mol_type = other DNA
aaatcgcgcctgcaacctccgccgccagacgaagaactgaaaaaattgcgggcggaagtgacggcattagcggtt

SEQ ID NO: 654421 - DNA, 75 bp, synthetic construct
  source 1..75: mol_type = other DNA
attatcgccatgctgactagccagctatctctttgtgtcatcgccgttgactggagtggatatccatctcaggag

SEQ ID NO: 654422 - DNA, 75 bp, synthetic construct
  source 1..75: mol_type = other DNA
agtacgtggcgctgcaattcttaagaaactccgaaatcgccgccaaaggcgtgctgccgacctgccaggataccg

SEQ ID NO: 654423 - DNA, 75 bp, synthetic construct
  source 1..75: mol_type = other DNA
ataagttgcaggcgctacagttacgcgcgcgtttgcgtggttttgaactaccggaagatgtgggacgcttcttgc

SEQ ID NO: 654424 - DNA, 75 bp, synthetic construct
  source 1..75: mol_type = other DNA
cacgcggcttgcgcggaattgtcgcagcgtggcgatgcggtgggctatgtcccgctggataaacgcacctggttt

SEQ ID NO: 654425 - DNA, 75 bp, synthetic construct
  source 1..75: mol_type = other DNA
cagaggatgacgaagaccttacagcattagccgaaggcggcaccgtcgctggcctgacactggacgacgtagatc

SEQ ID NO: 654426 - DNA, 75 bp, synthetic construct
  source 1..75: mol_type = other DNA
acaccggcactaacctgcctgcgcaaatcgacctgtacgcggtagatggcgatgagtacaaattcctctgtgttg

SEQ ID NO: 654427 - DNA, 75 bp, synthetic construct
  source 1..75: mol_type = other DNA
tacgcgaaagacatttggcgttcactagaaaaagatgtattccctgccatcggtgagatccctgttcagcaaatc

SEQ ID NO: 654428 - DNA, 75 bp, synthetic construct
  source 1..75: mol_type = other DNA
agaattgccgaaactaatgcattcattgactatgtcaaacttgtctattccgactcgctgtttgattgagtggca

SEQ ID NO: 654429 - DNA, 75 bp, synthetic construct
  source 1..75: mol_type = other DNA
caatgatgcagtggtgggctgattttgtgatagcagcagataataaagctaccataaatagggaaaacagagggt

SEQ ID NO: 654430 - DNA, 75 bp, synthetic construct
  source 1..75: mol_type = other DNA
gaaatatgccgacgctgcggccagaggaattgccaaagctgatgcgttctctagtcatgtcgaatctatctgttt

SEQ ID NO: 654431 - DNA, 75 bp, synthetic construct
  source 1..75: mol_type = other DNA
gcttgagactgttcgtcgacttgtgcagcgcataaacgagataatgatttatgccgtaaacacgggtctgattga

SEQ ID NO: 654432 - DNA, 75 bp, synthetic construct
  source 1..75: mol_type = other DNA
aagagaattgggtatgaaggtaggttagtagctcatgggttgcgttcgattgcgagcacttacctgaatgaatca

SEQ ID NO: 654433 - DNA, 75 bp, synthetic construct
  source 1..75: mol_type = other DNA
aaacgtgcaggttttggtggtgtgctcgtttcacatggtttgcggtctatcgccagcacggtaatgactccaact

SEQ ID NO: 654434 - DNA, 75 bp, synthetic construct
  source 1..75: mol_type = other DNA
tggcgacgttagcgttacagatattaaagctcacacactggttcaggccgtccaaccggttcaggccagaggagc

SEQ ID NO: 654435 - DNA, 75 bp, synthetic construct
  source 1..75: mol_type = other DNA
tgaagtacgtcgcgcttacaatcgcagtgactatcttgagcaacgtcgcccaatgatgcagtggtgggctgactt

SEQ ID NO: 654436 - DNA, 75 bp, synthetic construct
  source 1..75: mol_type = other DNA
acagattatcttgagcagagacgaccaatgatgcagtggtgggctgattttgtgatagcagcagataataaagct

SEQ ID NO: 654437 - DNA, 75 bp, synthetic construct
  source 1..75: mol_type = other DNA
gtatcaagccaaaccagccaatgaacagtcagaccgtcaacgcatcgctaaaacgcgcaggttttggtggggtgc

SEQ ID NO: 654438 - DNA, 75 bp, synthetic construct
  source 1..75: mol_type = other DNA
gcatcggcccctatccgtcagtcacacttgccgatgctcgaagctaccgggcagaggctcgcgttctcctcgcaa

SEQ ID NO: 654439 - DNA, 75 bp, synthetic construct
  source 1..75: mol_type = other DNA
tgaagttcgtaaagcctataatcgttcaacctacctggttcaaagaaaagatttaatgaactggtggggattatt

SEQ ID NO: 654440 - DNA, 75 bp, synthetic construct
  source 1..75: mol_type = other DNA
gcttcggtgcctatcctgccgtctcgctttctgatgcacgtaaactcagagccgaatctaaagttttattggcga

SEQ ID NO: 654441 - DNA, 75 bp, synthetic construct
  source 1..75: mol_type = other DNA
agcaagcactgcattaaatgaatcaggctttaattctgacgttattgaatctgctctggcacattgtgataaaaa

SEQ ID NO: 654442 - DNA, 75 bp, synthetic construct
  source 1..75: mol_type = other DNA
catcgtgaacatatttttccaagtagaaatgaccctaaacagccaatgaatagccaaactgctaatgcagcttta

SEQ ID NO: 654443 - DNA, 75 bp, synthetic construct
  source 1..75: mol_type = other DNA
attagagactgttcgccgcctttgtcagcgtattaacgaagtcatgatttatgcgcagaacacgggcctgattga

SEQ ID NO: 654444 - DNA, 75 bp, synthetic construct
  source 1..75: mol_type = other DNA
gaagctgctgaggctcgatgggatgagatcgatttcaatgcccgcgaatggaaaattcctgctgctcgaatgaaa

SEQ ID NO: 654445 - DNA, 75 bp, synthetic construct
  source 1..75: mol_type = other DNA
ggaaatgatgaagcctctcagtggtggccgagaatttatctttcctagccgtatcaagcccaaccaaccaatgaa

SEQ ID NO: 654446 - DNA, 75 bp, synthetic construct
  source 1..75: mol_type = other DNA
ccaataccgaagttctgcgcgctaaagcgttagaaaaggatctgacgctgcatgatggcgcaggactctttctga

SEQ ID NO: 654447 - DNA, 75 bp, synthetic construct
  source 1..75: mol_type = other DNA
tgaggtcagaagggcttacaaccgaaccacctatttaaataaaagaattgagcttatgcaatggtggggagacta

SEQ ID NO: 654448 - DNA, 75 bp, synthetic construct
  source 1..75: mol_type = other DNA
gcagattaccttgccctattagccaacggaatcgacccgcaaattcaagctgaagttgcagaggaacagcagcaa

SEQ ID NO: 654449 - DNA, 75 bp, synthetic construct
  source 1..75: mol_type = other DNA
tggagcgcgatgtgttcccggccattgggcagatgccagtgacagaactgaaagcgcacacgcttatttccgccc

SEQ ID NO: 654450 - DNA, 75 bp, synthetic construct
  source 1..75: mol_type = other DNA
cagcttgcgaagtccagaaagcaaaaccctctgataaagattacgaactgtttgacgggcaggggctgaccctgt

SEQ ID NO: 654451 - DNA, 75 bp, synthetic construct
  source 1..75: mol_type = other DNA
ataacgctctgaacgatgcacgttaccaggcgaaatacgtttcagccatctggcaaaaaatgctcccgagtcagg

SEQ ID NO: 654452 - DNA, 75 bp, synthetic construct
  source 1..75: mol_type = other DNA
gtattaagcccaaccagccaatgaatagccagaccgttaacgcatcgctaaaacgtgcaggttttggtggtgtgc

SEQ ID NO: 654453 - DNA, 75 bp, synthetic construct
  source 1..75: mol_type = other DNA
gcaacattcgacggacatatcgttgaagcgttgatgaaaatgccagaagttaacgccatgtatccggagcttaag

SEQ ID NO: 654454 - DNA, 75 bp, synthetic construct
  source 1..75: mol_type = other DNA
cagacatggaaaacactggatgacgaactggcctacgctctctggcctggtgatgtggatgccggaaacattgac

SEQ ID NO: 654455 - DNA, 75 bp, synthetic construct
  source 1..75: mol_type = other DNA
ctattcctgacgaactggcaacaagggaagaaggctctgtggctgtagccacagccattgaagctggcgacgaac

SEQ ID NO: 654456 - DNA, 75 bp, synthetic construct
  source 1..75: mol_type = other DNA
actgccattgaagccggtgatgaacgccgcgcccgtgccaaatttacctggcaattcctggagcaatatcctgct

SEQ ID NO: 654457 - DNA, 75 bp, synthetic construct
  source 1..75: mol_type = other DNA
gctgggatgaggagtctgcttcctttgtcccggttgagactgaatccgatccgatgaacgtcacttttgacaagc

SEQ ID NO: 654458 - DNA, 75 bp, synthetic construct
  source 1..75: mol_type = other DNA
aaatcgctctgttagcaggtccattaagttctgtctcggcacgtctgcgcctggcgggctggcataaatatctca

SEQ ID NO: 654459 - DNA, 75 bp, synthetic construct
  source 1..75: mol_type = other DNA
tgatgccgataagttgcttgctgcatcacgtggtgaatttattgaagggattagcgacccgaatgatccgaaatg

SEQ ID NO: 654460 - DNA, 75 bp, synthetic construct
  source 1..75: mol_type = other DNA
aaagcggtggcggcaactgccctgattgtggcgcggtgatgggtgacgcaacataccaggaaacattcgatgaag

SEQ ID NO: 654461 - DNA, 75 bp, synthetic construct
  source 1..75: mol_type = other DNA
cgatcgggacaccattaagtggtggctgaaacagtcacgggaagcacaatcagccattctgaccgatgaaatccc

SEQ ID NO: 654462 - DNA, 75 bp, synthetic construct
  source 1..75: mol_type = other DNA
ctgatactctctcgtcgccagtaccagaaactgatgcagtggaaacggcaattccggacaacgaaaaaaccgaat

SEQ ID NO: 654463 - DNA, 75 bp, synthetic construct
  source 1..75: mol_type = other DNA
tccgatcgacattcacaaagaccctgtggcactgaacaaatacattactgaatacctgactacaaagggcgtgtt

SEQ ID NO: 654464 - DNA, 75 bp, synthetic construct
  source 1..75: mol_type = other DNA
gagcggtggcggcaactgccctgattgtggtgcggtgatgggtgacgcaacataccaggaaatattcgatggaga

SEQ ID NO: 654465 - DNA, 75 bp, synthetic construct
  source 1..75: mol_type = other DNA
cactggcggcaatcagcatcacaatagcgataatgaaactggcgagacggcagatcacccaattaaggtgaacgg

SEQ ID NO: 654466 - DNA, 75 bp, synthetic construct
  source 1..75: mol_type = other DNA
ggtcgcgcaaacaaactttctggtctggataaggcgctggctgccggggctactgaaatcacgaaagaagaatat

SEQ ID NO: 654467 - DNA, 75 bp, synthetic construct
  source 1..75: mol_type = other DNA
acggtgaacggtcatcacgttatcacatccaccagcaggttttggcaccatctgatgattgaccttgaaacaatg

SEQ ID NO: 654468 - DNA, 75 bp, synthetic construct
  source 1..75: mol_type = other DNA
taccgctgacgaagtaaacaaaattatgcaggcagccaatatcagccagcctgacgccgataagttgcttgctgc

SEQ ID NO: 654469 - DNA, 75 bp, synthetic construct
  source 1..75: mol_type = other DNA
agaattacctaaactgatgcattctctagtaatgtcaaacctgtctattcctactcgttgtctgatcgaatggca

SEQ ID NO: 654470 - DNA, 75 bp, synthetic construct
  source 1..75: mol_type = other DNA
tgaacaagtcacacaacaacaacaaattgcagtagaaagtattttttcaaacgttgctaaaaattggtttgccat

SEQ ID NO: 654471 - DNA, 75 bp, synthetic construct
  source 1..75: mol_type = other DNA
cggagagatggggccggaatttagcaagaccatcgatctggatactgctggcggagtcattgatcgtgacgtcat

SEQ ID NO: 654472 - DNA, 75 bp, synthetic construct
  source 1..75: mol_type = other DNA
gcgatcttaacccgctgttgcaggatccggggctgatcttccatccgcctctgctctatatggggtacgtggggt

SEQ ID NO: 654473 - DNA, 75 bp, synthetic construct
  source 1..75: mol_type = other DNA
cggcaatcagcatcacgatagcgataatgaaactggcgagacggcagatcactcaattaaggtgaacggtcatca

SEQ ID NO: 654474 - DNA, 75 bp, synthetic construct
  source 1..75: mol_type = other DNA
tccggacaacgaaaaaaccgaatgcaaagtggaagtcgaaccatctgtagagcgtgaggggccgttctatttcct

SEQ ID NO: 654475 - DNA, 75 bp, synthetic construct
  source 1..75: mol_type = other DNA
gcgttactgacgccggggaaactgaaaaattacctggttgagaagatgcgcacgctgggtacggcagcctgtcct

SEQ ID NO: 654476 - DNA, 75 bp, synthetic construct
  source 1..75: mol_type = other DNA
ggcgcagggtagtattaagagtctggaatgtgttgagtatcctgaactgggaatggaagctatctggaaaatcga

SEQ ID NO: 654477 - DNA, 75 bp, synthetic construct
  source 1..75: mol_type = other DNA
gcgttactgacgccggggaaactgaaaaattatctggttgagaaaatgcgcacgctggggacggcggcctgtcct

SEQ ID NO: 654478 - DNA, 75 bp, synthetic construct
  source 1..75: mol_type = other DNA
tttctgaccgttgtctggctcccactgaatttttcgccattttggtctcaaccgtggattgactttgtcggtcca

SEQ ID NO: 654479 - DNA, 75 bp, synthetic construct
  source 1..75: mol_type = other DNA
tggtggcagtacagcgataaatggatgaccgaatccaggcaggaaaagttgatatggcagagtgcgcagatgaag

SEQ ID NO: 654480 - DNA, 75 bp, synthetic construct
  source 1..75: mol_type = other DNA
cgtcgttcgccgttgcatgaacgcgaagaagcgaaagcgatgagcgagcacgacatgctgccgtctgaacctgtc

SEQ ID NO: 654481 - DNA, 75 bp, synthetic construct
  source 1..75: mol_type = other DNA
ttgaacaaaaagttcacctggcaggagcaacatcatgacgcatattcggatcgaaaaggaacgggtggctggggc

SEQ ID NO: 654482 - DNA, 75 bp, synthetic construct
  source 1..75: mol_type = other DNA
caaccctcttccgtgggccgtgactatgacaccagcaagaaaatcaccgaacaaagcgatggtttactggcgaag

SEQ ID NO: 654483 - DNA, 75 bp, synthetic construct
  source 1..75: mol_type = other DNA
tcccttctggaattacaacttgggttattggctgaatatacgcttttgttctgcgccttatgttgcgttggttgg

SEQ ID NO: 654484 - DNA, 75 bp, synthetic construct
  source 1..75: mol_type = other DNA
tatttcttgtcatgtcactcctgttactggtcatggccgttgtagacattcagtctattggcgacaacagtatgg

SEQ ID NO: 654485 - DNA, 75 bp, synthetic construct
  source 1..75: mol_type = other DNA
aaataagctcccctgattcatggagtggtgctcttggttttctctatggattatctttgtttgtcgataattacg

SEQ ID NO: 654486 - DNA, 75 bp, synthetic construct
  source 1..75: mol_type = other DNA
aaaagtacagccgccagcaggcgagggaggcagagcagaaagcccgtgcgtaccaggcgctggtcgctcaggctg

SEQ ID NO: 654487 - DNA, 75 bp, synthetic construct
  source 1..75: mol_type = other DNA
acctgcgtgaagtggctcaggcggtaattgccttaatcgaccagccgaaaaccacgctcgatcagctgctggata

SEQ ID NO: 654488 - DNA, 75 bp, synthetic construct
  source 1..75: mol_type = other DNA
aaactggaaagcacgatccgttatctgggcattgaagtcgatgatgcgttagagacctctgaatcgattgaagtc

SEQ ID NO: 654489 - DNA, 75 bp, synthetic construct
  source 1..75: mol_type = other DNA
aagggaagcggttactgcattgataaagctcggtaactggcatagtaaaggcttcctgttccgctctcgggtcgg

SEQ ID NO: 654490 - DNA, 75 bp, synthetic construct
  source 1..75: mol_type = other DNA
gtcggcccgattagtgcacaggttggttttgcattgggatattattgccattggtgcagaaaaaatagaagccag

SEQ ID NO: 654491 - DNA, 75 bp, synthetic construct
  source 1..75: mol_type = other DNA
ccgcgcccgctgaatattttcgttaacgtggcgctgatttttaccgtgctgatgcatggtatgcagctggcgcta

SEQ ID NO: 654492 - DNA, 75 bp, synthetic construct
  source 1..75: mol_type = other DNA
tgctaccgcttttgtagaaagcgaaatcgatgaatggattcaattaattatcgaaaattcaagaaagcatgtcgc

SEQ ID NO: 654493 - DNA, 75 bp, synthetic construct
  source 1..75: mol_type = other DNA
actgtcccagccctctctcgtctgaatgatgaagacttacataaactcagttatgtaacaactgcactacgtgct

SEQ ID NO: 654494 - DNA, 75 bp, synthetic construct
  source 1..75: mol_type = other DNA
gtaaccattacccagcaaggctgggattccatgctgggcgaactggccgctgttacccgtatgggagataatatc

SEQ ID NO: 654495 - DNA, 75 bp, synthetic construct
  source 1..75: mol_type = other DNA
agcggtgatgaacttcttgctaatttccaaaaggaatatggtattgttgaggcgtccacagctgctgcatcggcc

SEQ ID NO: 654496 - DNA, 75 bp, synthetic construct
  source 1..75: mol_type = other DNA
gaaaaggtacggattttccttttcggcgtgtttgaactgctggtctggcagaagaaatttaaagttaaaaaataa

SEQ ID NO: 654497 - DNA, 75 bp, synthetic construct
  source 1..75: mol_type = other DNA
atgaataaaatcagactttatattccacctctaattctcggctttgttattgtgccgttgttggtgtggccgatg

SEQ ID NO: 654498 - DNA, 75 bp, synthetic construct
  source 1..75: mol_type = other DNA
caaaaatagaagccagaggaagaagtggggcgagtgggtaatgtgtctgagttttgttacgttgggtatgatggc

SEQ ID NO: 654499 - DNA, 75 bp, synthetic construct
  source 1..75: mol_type = other DNA
aagtggggtgagtgggtaacgtgcttaagtttggcgattttagctcaggggccgttattcaattatttacaatga

SEQ ID NO: 654500 - DNA, 75 bp, synthetic construct
  source 1..75: mol_type = other DNA
tatggtgggctgggtgggggcaccgaaaggtgcgccggtttccgtatgcgccggttacgccaaccctgctcagtt

SEQ ID NO: 654501 - DNA, 75 bp, synthetic construct
  source 1..75: mol_type = other DNA
tgattctgccattccgggacgttacactgttcaggcaccttataaagcgggtgccgggattggcgtcctgaaatt

SEQ ID NO: 654502 - DNA, 75 bp, synthetic construct
  source 1..75: mol_type = other DNA
attgctggaaaatatgcgcagtttctttctgaccgttgtctggctcccactgaatttttcgccattttggtctca

SEQ ID NO: 654503 - DNA, 75 bp, synthetic construct
  source 1..75: mol_type = other DNA
ttacaggagccgaaaatgctgcctgcccgcctgccgaacattttgcttaacggcactaccggtattgccgtcggg

SEQ ID NO: 654504 - DNA, 75 bp, synthetic construct
  source 1..75: mol_type = other DNA
aaaatcctgatgcaccaatagcctcaataggcgcagtatttttcgatccgcaaaccggagagataggaccagaat

SEQ ID NO: 654505 - DNA, 75 bp, synthetic construct
  source 1..75: mol_type = other DNA
tgctggcggagtcattgatcgtgacgtcattaaaaggtggctgaagcaatcacgtgaagcgcagtctgccattat

SEQ ID NO: 654506 - DNA, 75 bp, synthetic construct
  source 1..75: mol_type = other DNA
tcgtatctggaaaaaacgtcttgatgttgatcgcaatgatactggaaaatacacgtctgttgttgatctcgccag

SEQ ID NO: 654507 - DNA, 75 bp, synthetic construct
  source 1..75: mol_type = other DNA
tgggaaaaacttaagttccataaagaagcggggaagctcatagtaaaaaatccaacgcctttttatatttcattc

SEQ ID NO: 654508 - DNA, 75 bp, synthetic construct
  source 1..75: mol_type = other DNA
gggccgttctatttcctcttcgcagataaggacggagaaaaatacggtcgcgcaaacaaactttctggtctggat

SEQ ID NO: 654509 - DNA, 75 bp, synthetic construct
  source 1..75: mol_type = other DNA
aggagaacactggcggcaatcagcatcacgatagcgataatgaaactggcgagacggcagatcactcaattaagg

SEQ ID NO: 654510 - DNA, 75 bp, synthetic construct
  source 1..75: mol_type = other DNA
aagcaatcacgcgaagcgcaatctgccattatgaccgatgaaatcccgttagatgatgcactgttacaattgcgg

SEQ ID NO: 654511 - DNA, 75 bp, synthetic construct
  source 1..75: mol_type = other DNA
cgaataaaaaatgagcaaaaaggtaacactttcggtaacagggtaacacccgaaggtaacactccgggtaacaac

SEQ ID NO: 654512 - DNA, 75 bp, synthetic construct
  source 1..75: mol_type = other DNA
atagcagcttctgttatcggtattattattagcttgatccaggctataacacagttgcaggatcagacattacct

SEQ ID NO: 654513 - DNA, 75 bp, synthetic construct
  source 1..75: mol_type = other DNA
atcgcgaagactggaagcgtatctcagcatcaatgcgcaaacagcccgaagcacttgcctatgaccgtcagacta

SEQ ID NO: 654514 - DNA, 75 bp, synthetic construct
  source 1..75: mol_type = other DNA
atgtcagaatggctattccattcgaaggcgtaccccacaatgcacttgatgatgcacgtcaccaggcaaaacaag

SEQ ID NO: 654515 - DNA, 75 bp, synthetic construct
  source 1..75: mol_type = other DNA
aaaaactatcggcttcgatgccagaacagttattccatttgaaggcgtgcgccaccatgcgctggatgatgcccg

SEQ ID NO: 654516 - DNA, 75 bp, synthetic construct
  source 1..75: mol_type = other DNA
ctgaccgccgaagccagggagagattacagagcagcaggagacagcgcaacgcgccgcctgccagaccgccttta

SEQ ID NO: 654517 - DNA, 75 bp, synthetic construct
  source 1..75: mol_type = other DNA
tcggcaattttacatgccgacaacgccgccgggcaggttgccgcaaaaatggctatggaacatgccatcaaaacc

SEQ ID NO: 654518 - DNA, 75 bp, synthetic construct
  source 1..75: mol_type = other DNA
tggcctttgccgcgccgggagaaggcgacgagatccttacctttgatatggcgactaccgtacaggcatggggaa

SEQ ID NO: 654519 - DNA, 75 bp, synthetic construct
  source 1..75: mol_type = other DNA
taaggccgttattttttccctgcatgttgcctgccacttcaagcgcatgcaccagaacatcgttgacaaaatcga

SEQ ID NO: 654520 - DNA, 75 bp, synthetic construct
  source 1..75: mol_type = other DNA
atctgccgcagttgtcgaagggcaaaggcaataagattatcaacattccgtcggcagaagccgcgcgtggcgagg

SEQ ID NO: 654521 - DNA, 75 bp, synthetic construct
  source 1..75: mol_type = other DNA
tcggcagaagccgcgcgtggagaagatggtctggcgcaactgtacgttctgccgccgcaaagcacgctgaccatt

SEQ ID NO: 654522 - DNA, 75 bp, synthetic construct
  source 1..75: mol_type = other DNA
gaacttccaccggatacaagaacggatttattaatttatgattgttatcgagaaaaccataataaagcatgggtc

SEQ ID NO: 654523 - DNA, 75 bp, synthetic construct
  source 1..75: mol_type = other DNA
atgaaaaaatacagtcttgatgtgtggttaagtggtagcaaggagtgtttcggattatttgatagcgaagaagta

SEQ ID NO: 654524 - DNA, 75 bp, synthetic construct
  source 1..75: mol_type = other DNA
ttgaaatatctgctccggcatctggaaaaggaccataaatttgcctgtctgaatgtcttccaaatcatcatcgat

SEQ ID NO: 654525 - DNA, 75 bp, synthetic construct
  source 1..75: mol_type = other DNA
atgaccacggtgccattcctcgcggcgtttgtcggcgtcctgctctctggctgggtcgcggatctgctggtacgt

SEQ ID NO: 654526 - DNA, 75 bp, synthetic construct
  source 1..75: mol_type = other DNA
atggaccagtcttgccctggtgaaatacacgcaaaaggtttcccggctgacgatccagaagcaaaacgcgaatac

SEQ ID NO: 654527 - DNA, 75 bp, synthetic construct
  source 1..75: mol_type = other DNA
acccgaaagatattaactttaacgtcaatgttgaatttgctgattctatggatcagtcttgccctggtgaaatac

SEQ ID NO: 654528 - DNA, 75 bp, synthetic construct
  source 1..75: mol_type = other DNA
caaaaggtttcccggctgacgatccgcaagcaaaacgcgaatacgaaaaagcggcaaaggatttctgtatagata

SEQ ID NO: 654529 - DNA, 75 bp, synthetic construct
  source 1..75: mol_type = other DNA
gctctgggactggtgatggatttcgacgcaagaacgactattccattcgaaggtgaacgccataacgctctgaac

SEQ ID NO: 654530 - DNA, 75 bp, synthetic construct
  source 1..75: mol_type = other DNA
cattcgaaggtgagcgccataatgcacttgatgacgcccgttaccaggcaaaatacgtttcagctatctggcaaa

SEQ ID NO: 654531 - DNA, 75 bp, synthetic construct
  source 1..75: mol_type = other DNA
gaaaaaaatcaggctgaagttcaggaagatgatccggaggaaatggaaggcgctgaacatccgaacaatgagaat

SEQ ID NO: 654532 - DNA, 75 bp, synthetic construct
  source 1..75: mol_type = other DNA
gagcgccataatgcacttgatgacgcccgttaccaagcaaaatacgtttcagcaatctggcaaaaactgatcccg

SEQ ID NO: 654533 - DNA, 75 bp, synthetic construct
  source 1..75: mol_type = other DNA
gcgcatctggaaaaaacgtcgcgaaggtgaacgcaaggaagccggaaaatacacgtctgttgttgatctcgcccg

SEQ ID NO: 654534 - DNA, 75 bp, synthetic construct
  source 1..75: mol_type = other DNA
tagcccctgaagtacagaacgctgtcatggttaagttcgacacatgtgaaaacatcactgttgatatggtgatta

SEQ ID NO: 654535 - DNA, 75 bp, synthetic construct
  source 1..75: mol_type = other DNA
tacttcctcttcaccgacaaggatggcgaaaaatacggtcgcgcaaacaaactttctggtctggataaggcacta

SEQ ID NO: 654536 - DNA, 75 bp, synthetic construct
  source 1..75: mol_type = other DNA
gatgtggaggctgcagcagccacacttccgatggattttaatatttatgaaatacccgagagcgtttatcgtcgc

SEQ ID NO: 654537 - DNA, 75 bp, synthetic construct
  source 1..75: mol_type = other DNA
tgacggaattagcgacccaaatgatccgaaatgggttaaggggattgaaacccgcgattctgtgaaccagaacct

SEQ ID NO: 654538 - DNA, 75 bp, synthetic construct
  source 1..75: mol_type = other DNA
ctgcaaccatctggcgcaatggcaaatgaacaggcaacgcctgaagcagtggaaccggatacaactgaacatcat

SEQ ID NO: 654539 - DNA, 75 bp, synthetic construct
  source 1..75: mol_type = other DNA
aacgattatgatgaagacgactttaaaaaacccgtccgtgtccatttacccgttgtgaatgaccttccaccggaa

SEQ ID NO: 654540 - DNA, 75 bp, synthetic construct
  source 1..75: mol_type = other DNA
ttgaagttcaggaaaatgatccggaggaaatggaaggcgctgaacatccacacaaggagaaccctggcggcaatc

SEQ ID NO: 654541 - DNA, 75 bp, synthetic construct
  source 1..75: mol_type = other DNA
tccgcaaaccggagatatgggaccggaatttagtaagactatcgatctggaaactgctggcggggtcattgatcg

SEQ ID NO: 654542 - DNA, 75 bp, synthetic construct
  source 1..75: mol_type = other DNA
agttgcttgctgcctctcgcggagaatttgttgcagggattagcgacccgaatgatccgaaatgggttaagggga

SEQ ID NO: 654543 - DNA, 75 bp, synthetic construct
  source 1..75: mol_type = other DNA
cctcaccggctgtagccactcgcaaccggaacaggaaggtcgcccacaggcgtggctgcaacctggcacgcgcat

SEQ ID NO: 654544 - DNA, 75 bp, synthetic construct
  source 1..75: mol_type = other DNA
ctattcctgacgaacaggcaacaagggaagaaggcgctgtggctgtagccacagccattgaagctggcgacgaac

SEQ ID NO: 654545 - DNA, 75 bp, synthetic construct
  source 1..75: mol_type = other DNA
gaattcagcaaagctatcgatctggaaacatctggcggaatcatcgaccggaaaacaataaagtggtgggcgaag

SEQ ID NO: 654546 - DNA, 75 bp, synthetic construct
  source 1..75: mol_type = other DNA
aaagggctacgcgccgagcaatccatcgtcgtcccacagttaccgcccgcaagtcaggtactggctgacgtgatg

SEQ ID NO: 654547 - DNA, 75 bp, synthetic construct
  source 1..75: mol_type = other DNA
cccctgcccgtggcgttactacaacgatcgcgatgtacgcacaatcgttgagctggggaaagccatagacttcga

SEQ ID NO: 654548 - DNA, 75 bp, synthetic construct
  source 1..75: mol_type = other DNA
cggcattcgcctgtttctggtgacctacgatgcgcaagggctacgcgccgagcaatccatcgtcgtcccacagtt

SEQ ID NO: 654549 - DNA, 75 bp, synthetic construct
  source 1..75: mol_type = other DNA
acacgtctgttgttgatctcgcccgcgccagagtcaatcaacagcacactgaaaactcagcaggaaaaatcaacc

SEQ ID NO: 654550 - DNA, 75 bp, synthetic construct
  source 1..75: mol_type = other DNA
tgatcgaccttgaaaccatgggaaaaaatcctgatgccccgattatctcaataggtgcaatatttttcgatccgc

SEQ ID NO: 654551 - DNA, 75 bp, synthetic construct
  source 1..75: mol_type = other DNA
aacatcaccgttgatatggtattagcgcacaggaattgttgcaggaagacatggcaacattcgacggacatatcg

SEQ ID NO: 654552 - DNA, 75 bp, synthetic construct
  source 1..75: mol_type = other DNA
taccagaaactgatgcagtggaaacggcaatgccggacaacgaaaaaaccgaatgcaaagtggaagtcgaaccat

SEQ ID NO: 654553 - DNA, 75 bp, synthetic construct
  source 1..75: mol_type = other DNA
tacaaaacgagccagaaacgaaacaacctgaaccagtcgtgcaacaggaagaggaaaaagtttgtaccgcatgca

SEQ ID NO: 654554 - DNA, 75 bp, synthetic construct
  source 1..75: mol_type = other DNA
tctcttcctaactctgcccgagctgagtttttgatccaacaagggggaattgaaacaagcctgggccgttttgaa

SEQ ID NO: 654555 - DNA, 75 bp, synthetic construct
  source 1..75: mol_type = other DNA
catatatcagttctgccagcggcagcacgtgctgagttgttattaaaatctgagcaaatagaaacaagccagggg

SEQ ID NO: 654556 - DNA, 75 bp, synthetic construct
  source 1..75: mol_type = other DNA
ggaaccaacaccaatgcgcccatcgtggttattggtgcggttttcttcgacccacaaacaggggaaatcgggcca

SEQ ID NO: 654557 - DNA, 75 bp, synthetic construct
  source 1..75: mol_type = other DNA
catggcaacattcgacgggcatatcgttgaggcactgatgaaaatgcctgaagttaacgtcatgtattcagaact

SEQ ID NO: 654558 - DNA, 75 bp, synthetic construct
  source 1..75: mol_type = other DNA
ggcgatgtctgctcaggcagcagagatttataataaagacagtaacaagctggatctgtacggaaaagttaatgc

SEQ ID NO: 654559 - DNA, 75 bp, synthetic construct
  source 1..75: mol_type = other DNA
ggaaaagacttgggtgtttggggtgatcaggacctggttgaatatgttgatgtaggtgcaacctattacttcaac

SEQ ID NO: 654560 - DNA, 75 bp, synthetic construct
  source 1..75: mol_type = other DNA
cgccagagtcaaccggcaaggcactgaaaactctgcaggaaaaactgactccgtaactgctgtcgttcgtcgcga

SEQ ID NO: 654561 - DNA, 75 bp, synthetic construct
  source 1..75: mol_type = other DNA
gcgaaaatcaaccgcgaaggtatctggatcgaaaaactggaacacaatccaggccagtacattccacaagaactg

SEQ ID NO: 654562 - DNA, 75 bp, synthetic construct
  source 1..75: mol_type = other DNA
gcgcagcaagccttccacgacgcatctttcatgctccgtccggcccaccagaaacaggttgcgtctattcttcac

SEQ ID NO: 654563 - DNA, 75 bp, synthetic construct
  source 1..75: mol_type = other DNA
acaccggcactaacctgcctgcgcaaatcgatctgtatgcggtagatggtgacgagtacaaattcctctgcgtcg

SEQ ID NO: 654564 - DNA, 75 bp, synthetic construct
  source 1..75: mol_type = other DNA
gagcatatccggaaaccgctggcagcacgtcaggtactgtcccggtcagaaacggtgttgcagaaaagtctggag

SEQ ID NO: 654565 - DNA, 75 bp, synthetic construct
  source 1..75: mol_type = other DNA
ggatcgaaaaactggaacacaatccaggccagtacattccggaagaactgcgtcaggcgggtgaaggcgacgcgg

SEQ ID NO: 654566 - DNA, 75 bp, synthetic construct
  source 1..75: mol_type = other DNA
ggaaccagaagccctgaccctgctggcgcagcaagccttccacgacgcttctttcatgctccgtccggcacacca

SEQ ID NO: 654567 - DNA, 75 bp, synthetic construct
  source 1..75: mol_type = other DNA
aaggcaaccgtgctgaatctcaaggttcttccaaagataaaacccgtcttgccttcgctggcctgaaattcggtg

SEQ ID NO: 654568 - DNA, 75 bp, synthetic construct
  source 1..75: mol_type = other DNA
ccggtaacgcacgtttcacgcaacgaactccaggcattacacattgcacgggctgaggaactaccagctgttact

SEQ ID NO: 654569 - DNA, 75 bp, synthetic construct
  source 1..75: mol_type = other DNA
agtcacaggtaaattcggttgatgcgaaatatctgaaactgcgggcagaactccatgaagcccggaaaaacattc

SEQ ID NO: 654570 - DNA, 75 bp, synthetic construct
  source 1..75: mol_type = other DNA
accgttacgaaaaaggcggggaagatggcatcacaatggtatttatcgcaccctctccccctgcgcaggacaaac

SEQ ID NO: 654571 - DNA, 75 bp, synthetic construct
  source 1..75: mol_type = other DNA
ttaggcaagttacaggtactaaaggtgtatcatttgaattcaatatcaaatcatttcctgttgcattacgtgctg

SEQ ID NO: 654572 - DNA, 75 bp, synthetic construct
  source 1..75: mol_type = other DNA
cgcctgcggtcagagcggtggcggcaactgccctgattgtggtgcggtgatgggtgacgcaacatgcctggaaat

SEQ ID NO: 654573 - DNA, 75 bp, synthetic construct
  source 1..75: mol_type = other DNA
agattcgggacggggatagacaatattgatcttcgtgcggcacagcaatccggtattgttgtcaataatgcggtt

SEQ ID NO: 654574 - DNA, 75 bp, synthetic construct
  source 1..75: mol_type = other DNA
gcatttgcagggcttaaattcggtgactacggctccgtcgattacggtcgtaactacggtgtagcatacgatatc

SEQ ID NO: 654575 - DNA, 75 bp, synthetic construct
  source 1..75: mol_type = other DNA
attacaaaatcaacctgcttgataaaaatgacttcactaaagcactcggtgtaagcactgacaacatcgttgctg

SEQ ID NO: 654576 - DNA, 75 bp, synthetic construct
  source 1..75: mol_type = other DNA
atttataataaagacagtaacaagctggatctgtacgggaaagttaatgccaagcactacttctcctctaatgat

SEQ ID NO: 654577 - DNA, 75 bp, synthetic construct
  source 1..75: mol_type = other DNA
aagctgccgtacgcctggaggcgctctgggatcatctggggaataatcaggtgctgtcggtaaaccgattggttt

SEQ ID NO: 654578 - DNA, 75 bp, synthetic construct
  source 1..75: mol_type = other DNA
cgccagaaacaactgaaatctgcaactaaagcagccattaaggcgcagaaacaaatggacgcactggaagttgct

SEQ ID NO: 654579 - DNA, 75 bp, synthetic construct
  source 1..75: mol_type = other DNA
attacaaaatcaacctgcttgacaaaaatgatttcaccagaggtcttggtataaacaccgacgatattgttgctg

SEQ ID NO: 654580 - DNA, 75 bp, synthetic construct
  source 1..75: mol_type = other DNA
tgttccggttgagactgaatccgatccgatgaacgtcacttttgacaagctggcccctgaagtacagaacgctgt

SEQ ID NO: 654581 - DNA, 75 bp, synthetic construct
  source 1..75: mol_type = other DNA
acaaaattatgcaggcagccaatatcagccagcctgacgccgataagttgcttgctgcctctcgcggagaatttg

SEQ ID NO: 654582 - DNA, 75 bp, synthetic construct
  source 1..75: mol_type = other DNA
actgacactctctcgtcgccagtaccagaaactgatgcagtggaaacggcaattccggacaacgaaaaaaccgaa

SEQ ID NO: 654583 - DNA, 75 bp, synthetic construct
  source 1..75: mol_type = other DNA
tcaatgcgcaaacagcctgatgcccttcgctacgaccgccagactatttttggccttgtccgtgaacgtccgatc

SEQ ID NO: 654584 - DNA, 75 bp, synthetic construct
  source 1..75: mol_type = other DNA
aaactccggtgaattttttgttcaggtctggggtaacggtgcaactttcgacaacgtgattttacgccgttcata

SEQ ID NO: 654585 - DNA, 75 bp, synthetic construct
  source 1..75: mol_type = other DNA
atgatccggaggaaatggaaggcactgcgcatcagcacaaggagaacactggcggcaatcagcatcatgccagcg

SEQ ID NO: 654586 - DNA, 75 bp, synthetic construct
  source 1..75: mol_type = other DNA
ctggtctggacaaggcgctggctgccggggctactgaaatcacgaaagaagaatattttgcccgcaaaaacggca

SEQ ID NO: 654587 - DNA, 75 bp, synthetic construct
  source 1..75: mol_type = other DNA
gtcgcgcccgcgcaaaatttcactggcaattccttgaacattatccggctgctcaggactgcgcttataaatttc

SEQ ID NO: 654588 - DNA, 75 bp, synthetic construct
  source 1..75: mol_type = other DNA
gtcagcagaacaaactgatccagtggagacggcggaatccaattctcaaaaaaatgaaatcctggtggaagctga

SEQ ID NO: 654589 - DNA, 75 bp, synthetic construct
  source 1..75: mol_type = other DNA
tgaatcagatccgatgaacgtcacttttgacaagctggcccctgaagtacagaacgctgtcatggttaagttcga

SEQ ID NO: 654590 - DNA, 75 bp, synthetic construct
  source 1..75: mol_type = other DNA
gatcgatattcacaaagatcccgttgcactgaacaaatatatcagcgaatacctgacgacaaagggcgtgtttga

SEQ ID NO: 654591 - DNA, 75 bp, synthetic construct
  source 1..75: mol_type = other DNA
gaatatttcgcccgaaaaaatggcacatacacaggcttaccgcaaaatgcaaataccgcacaaaattctgaacaa

SEQ ID NO: 654592 - DNA, 75 bp, synthetic construct
  source 1..75: mol_type = other DNA
cacttggctatgaccgtcagactatttttggccttgttcgcgaacgtccgatcgatattcacaaagatcccgttg

SEQ ID NO: 654593 - DNA, 75 bp, synthetic construct
  source 1..75: mol_type = other DNA
caatgcaggaatatgaattgcaggtggttgctgcgcaggatcgcattgccaaaccagaacactatttcagtgcga

SEQ ID NO: 654594 - DNA, 75 bp, synthetic construct
  source 1..75: mol_type = other DNA
ggaatacccctgtgacgccactggtggatgccggatgcaatatggtgattgtgtcgcatctgagtgacggttctt

SEQ ID NO: 654595 - DNA, 75 bp, synthetic construct
  source 1..75: mol_type = other DNA
aatcaacggcttcgacaatccgatgactcagccgttgttgtcagatgggcccctgacagcgttgatggatcatta

SEQ ID NO: 654596 - DNA, 75 bp, synthetic construct
  source 1..75: mol_type = other DNA
ggtagatccagttaatcaggtgaaagttaccgctgacgaagtaaacaaaattatgcaggcagccaatatcggcca

SEQ ID NO: 654597 - DNA, 75 bp, synthetic construct
  source 1..75: mol_type = other DNA
aaaaatgatgaagaaaaaccgcaaccgtctggcgtactggcagatgaacaggcaacggctgaaacaatggaaccg

SEQ ID NO: 654598 - DNA, 75 bp, synthetic construct
  source 1..75: mol_type = other DNA
accgatacgaaaaaggcggggaagatggtatcacaatggtgcttatcgcgccctcgccctctgttcaggataaac

SEQ ID NO: 654599 - DNA, 75 bp, synthetic construct
  source 1..75: mol_type = other DNA
atgagtacagaaatgaaaacggggctggtgctgtccggcggtggagctgtgggggcttaccaggcgggagtgatt

SEQ ID NO: 654600 - DNA, 75 bp, synthetic construct
  source 1..75: mol_type = other DNA
aaaactccggtgaattttttgttcaggtctggggtaacggtgcaactttcgacaacgtgattttacgccgttcat

SEQ ID NO: 654601 - DNA, 75 bp, synthetic construct
  source 1..75: mol_type = other DNA
cgttagatgatgcactgttacaattgcgggaatttatcgacgaaaactccggtgaattttttgttcaggtctggg

SEQ ID NO: 654602 - DNA, 75 bp, synthetic construct
  source 1..75: mol_type = other DNA
gccccgcggacagcagaaagaagcctctgcttgcgtcagccgcgctgcccctgctgttccgtccccgcgagattc

SEQ ID NO: 654603 - DNA, 75 bp, synthetic construct
  source 1..75: mol_type = other DNA
ggcggtctgctcagttttacatcggcacataccgacacctggcgtcagcagggctatgaagacacgatgctgacg

SEQ ID NO: 654604 - DNA, 75 bp, synthetic construct
  source 1..75: mol_type = other DNA
atgcaggatattattgactgcattcgtgctgaactgggtgtcggaaccacgaaaaacgccgtttttcagcatatc

SEQ ID NO: 654605 - DNA, 75 bp, synthetic construct
  source 1..75: mol_type = other DNA
tatgggaccggaatttagtaagactatcgatctggatactgctggcggagtcattgatcgggacaccatgaaatg

SEQ ID NO: 654606 - DNA, 75 bp, synthetic construct
  source 1..75: mol_type = other DNA
gtacgaacgcctgaatatcccctgcccgtggcgttactacaacgatcgcgatgtacgtacaatcgttgaactggg

SEQ ID NO: 654607 - DNA, 75 bp, synthetic construct
  source 1..75: mol_type = other DNA
gcgcgctggaagatgaatcatctgtagagcgtgaggggccgttctacttcctcttcagcgataaggatggagaaa

SEQ ID NO: 654608 - DNA, 75 bp, synthetic construct
  source 1..75: mol_type = other DNA
caatgcaggaatatgagctgcaggtggttgcagcacaagatcgtatagccaaaccggaacattatttcagcgcaa

SEQ ID NO: 654609 - DNA, 75 bp, synthetic construct
  source 1..75: mol_type = other DNA
gatcgacattcacaaagatcccgttgcactgaacaaatacatcagcgaatacctgacgacaaagggcgtgtttga

SEQ ID NO: 654610 - DNA, 75 bp, synthetic construct
  source 1..75: mol_type = other DNA
gcgcacctggaaaaaacgtcgcgaagcagaacgaaaagaaaccgggaaacatacttctgttgttgagctggcccg

SEQ ID NO: 654611 - DNA, 75 bp, synthetic construct
  source 1..75: mol_type = other DNA
taagctgtatgccatcgggtgggttaagcataaatgtaagcctggtgccaaatggccagaaattcaggcagagat

SEQ ID NO: 654612 - DNA, 75 bp, synthetic construct
  source 1..75: mol_type = other DNA
gtctggacatcccctgtccgtggcattacagcaacgatcgtgatgtacgcacaatcgttgagatggggaaaatca

SEQ ID NO: 654613 - DNA, 75 bp, synthetic construct
  source 1..75: mol_type = other DNA
accagtagcgcaacaggaaccggaaaaagtctgcacagcctgcggtcagaccggcggcggcaactgtcctgactg

SEQ ID NO: 654614 - DNA, 75 bp, synthetic construct
  source 1..75: mol_type = other DNA
gtgaaggggattgaaacccgcgattctgtgaaccataaccagcaagaaacggaacagaaaggccataaagcggaa

SEQ ID NO: 654615 - DNA, 75 bp, synthetic construct
  source 1..75: mol_type = other DNA
ccctaatgatccgaaatgggtcaaggggatccagactcgcgagtcttcgaaccagaatcaaccagaagcggaaca

SEQ ID NO: 654616 - DNA, 75 bp, synthetic construct
  source 1..75: mol_type = other DNA
ccagaaagcggaacaaaacagccaaaatgcgttacaaaacgagccagaaacgaaacaatccgaaccagtagcgca

SEQ ID NO: 654617 - DNA, 75 bp, synthetic construct
  source 1..75: mol_type = other DNA
accagaaccagcaagaaacggaacagaacggccagaaagcggaacaaaacagcccaaatgcgttacaaaacgagc

SEQ ID NO: 654618 - DNA, 75 bp, synthetic construct
  source 1..75: mol_type = other DNA
ggcaggggatcacctgcccgtggcattactgcaacgatcgcgacgtgcgcacaatcgtcgaactgggaaaaacca

SEQ ID NO: 654619 - DNA, 75 bp, synthetic construct
  source 1..75: mol_type = other DNA
gaaaactcagcagaaaaaatcccccctgtcactgcagtcattcgtcgcgaatataagcagacatggaaaacactg

SEQ ID NO: 654620 - DNA, 75 bp, synthetic construct
  source 1..75: mol_type = other DNA
ttttgaaatgctgctggtcaccgccgatgaagcctggcatatcagccgtccgctggtggattttggtatgcgcca

SEQ ID NO: 654621 - DNA, 75 bp, synthetic construct
  source 1..75: mol_type = other DNA
cacaaggagaatgctggtagcgctcaggatcacgccagcgatagtgaaactggcgagacggcagatcccttaatt

SEQ ID NO: 654622 - DNA, 75 bp, synthetic construct
  source 1..75: mol_type = other DNA
gggatgctctattttcaggatctgatgcccggtcaggcaggttcagccaccacgctctataccaacacgtcgcgc

SEQ ID NO: 654623 - DNA, 75 bp, synthetic construct
  source 1..75: mol_type = other DNA
acattgatgtggggctcgaacagcctgtacatcatcaacatgccgctatttattatcaacgaactgcatcttccc

SEQ ID NO: 654624 - DNA, 75 bp, synthetic construct
  source 1..75: mol_type = other DNA
caggtttcactggcatgggtcattggcccgccgctggcttatgccttagcgatgggtttcagctttacggtaatg

SEQ ID NO: 654625 - DNA, 75 bp, synthetic construct
  source 1..75: mol_type = other DNA
cgaaaaaaccgaatgcaaagtggaagtcgaaccatctgtagagcgtgaggggccgttctacttcctcttcaccga

SEQ ID NO: 654626 - DNA, 75 bp, synthetic construct
  source 1..75: mol_type = other DNA
acggtctgcctgccagcgatatcatcgcgccgaatctggtggagctggaaatcctctgtgagcatccggtacata

SEQ ID NO: 654627 - DNA, 75 bp, synthetic construct
  source 1..75: mol_type = other DNA
gcgacaaatgaggttatcgacaaggatcgcgaagactggaaacgtatctcagcatcaatgcgcaaacagcccgaa

SEQ ID NO: 654628 - DNA, 75 bp, synthetic construct
  source 1..75: mol_type = other DNA
agcgcaacaggaaccggaaaaagtctgcaccgcctgcggtcaaagcggtggtggcaactgccctgattgtggcgc

SEQ ID NO: 654629 - DNA, 75 bp, synthetic construct
  source 1..75: mol_type = other DNA
gaaaagccatggacttcgatgctagggcggctattccattcgaaggtgagcgccacaatgcgctggatgatgccc

SEQ ID NO: 654630 - DNA, 75 bp, synthetic construct
  source 1..75: mol_type = other DNA
ttgtctgcgaggataaacccggcatgccccgccctgctatcgactcctgggataccgaatatatgcaggaaaacc

SEQ ID NO: 654631 - DNA, 75 bp, synthetic construct
  source 1..75: mol_type = other DNA
gctgggtgcgaatctgcaggccaaaatttcgcgcaattccgagccactggaaaacgcgctggcacatgtaaaaac

SEQ ID NO: 654632 - DNA, 75 bp, synthetic construct
  source 1..75: mol_type = other DNA
gagaagaaacaacagcagaagagcgacagttaacatttaacaacatgattgaattggcgctgaatactgctgtcg

SEQ ID NO: 654633 - DNA, 75 bp, synthetic construct
  source 1..75: mol_type = other DNA
tattgggactgcgataactttagggactccatttacgcccggaaaaatcacaggtaataatgcagatagaactat

SEQ ID NO: 654634 - DNA, 75 bp, synthetic construct
  source 1..75: mol_type = other DNA
gtttggcgacacagtatacgataacctgatttttccctggcagatccgtaaccagcagcctgatccggccatttt

SEQ ID NO: 654635 - DNA, 75 bp, synthetic construct
  source 1..75: mol_type = other DNA
tctcgattttctcgaacgcttcgctttgccggacagcattttgacgaaaaatatcgccgagctatctggtggtga

SEQ ID NO: 654636 - DNA, 75 bp, synthetic construct
  source 1..75: mol_type = other DNA
tcgccctgctctctcaggcgctggaaaatggccgtgagaaccattgtttaaccttttgtggcgaaccgctgcaac

SEQ ID NO: 654637 - DNA, 75 bp, synthetic construct
  source 1..75: mol_type = other DNA
tctggcaacactgcccgatctcgctgctggatgggataatttgttacagcgaagaggtcaggttacaattagaac

SEQ ID NO: 654638 - DNA, 75 bp, synthetic construct
  source 1..75: mol_type = other DNA
tcaccaaacttgaccgtctgggtcgtaatgcgatggatatccgaaaaacagtagagcaactggcggctttagata

SEQ ID NO: 654639 - DNA, 75 bp, synthetic construct
  source 1..75: mol_type = other DNA
gatggtagggcgaggcgagcgcgttattggcgtaataaaagatgggcaaaaaaaatggcgacgggtgcagcaaaa

SEQ ID NO: 654640 - DNA, 75 bp, synthetic construct
  source 1..75: mol_type = other DNA
tggcagtatcggtgattctataactctggggacaccattcacaccagagcatgtctcaggtcaggctccggccag

SEQ ID NO: 654641 - DNA, 75 bp, synthetic construct
  source 1..75: mol_type = other DNA
gataatctgacctttaaaggaaaactgattattcctgcctgtactgtacaaaatgctgaagttaactggggtgat

SEQ ID NO: 654642 - DNA, 75 bp, synthetic construct
  source 1..75: mol_type = other DNA
tactggacgcaccggtggaagctctggtgaatacggttaataccgtcggtgtcatggggaaaggcatcgcgttga

SEQ ID NO: 654643 - DNA, 75 bp, synthetic construct
  source 1..75: mol_type = other DNA
gctggatgaaagtaataaacataacgttaatgagatgatccaccgttatgtgcgcgagcaaaatattgccgtgct

SEQ ID NO: 654644 - DNA, 75 bp, synthetic construct
  source 1..75: mol_type = other DNA
aacggcctcgaccgggaggcgcgcgggctcatggctggcctgacgcgatgtgaaccggccccgggcgcgggtatc

SEQ ID NO: 654645 - DNA, 75 bp, synthetic construct
  source 1..75: mol_type = other DNA
cgttttacagatcaggatctgaatactctaagctcttctgaagtaattaattttctagattatgctgtgcagttg

SEQ ID NO: 654646 - DNA, 75 bp, synthetic construct
  source 1..75: mol_type = other DNA
tccgtgatagcgccatcaacgaaggttttaacacggcgaaaccgtgggccgatgcggtgatttccaatcgtccgt

SEQ ID NO: 654647 - DNA, 75 bp, synthetic construct
  source 1..75: mol_type = other DNA
aagaagcgtatgtgtttgcaccggctacgctgtccaacatctattacggtttcctcgccgtaaacagccgtttca

SEQ ID NO: 654648 - DNA, 75 bp, synthetic construct
  source 1..75: mol_type = other DNA
gtgaacacattttcagtttcccgtctggcgctggcattggcttttggcgtgacgctgaccgcttgtagctcaaca

SEQ ID NO: 654649 - DNA, 75 bp, synthetic construct
  source 1..75: mol_type = other DNA
tgcaacccgggaacgaacgtcacctttctgccgttgccgcggtttaagcggcgatttgtcaaagtggagttctgg

SEQ ID NO: 654650 - DNA, 75 bp, synthetic construct
  source 1..75: mol_type = other DNA
atgccagtcgtaccaacagtatcaggacgtcaggttgagagtcgtggtgtacaaaccggtggttttcagaccttc

SEQ ID NO: 654651 - DNA, 75 bp, synthetic construct
  source 1..75: mol_type = other DNA
cccgtcctgctccatctacaccaaagaactgatcactgatttcggcgtgaagaaaattatccgcgtgggttcctg

SEQ ID NO: 654652 - DNA, 75 bp, synthetic construct
  source 1..75: mol_type = other DNA
aaaattgtcgcgtcgttaatcagtcccggcgagggaacgattttgttcgaaggggaagatatcacgaccctgaag

SEQ ID NO: 654653 - DNA, 75 bp, synthetic construct
  source 1..75: mol_type = other DNA
caacaacgtcaacattctcggtcgtcagaataccttctttgtgaccaacagcggtgtacagaaccgtctggaaac

SEQ ID NO: 654654 - DNA, 75 bp, synthetic construct
  source 1..75: mol_type = other DNA
gtactgatggcgacaaagtgcagatcaataacgtcaacattctcggtcgtcagaataccttctttgtcaccaaca

SEQ ID NO: 654655 - DNA, 75 bp, synthetic construct
  source 1..75: mol_type = other DNA
tgcgtgaggcggcagaagcaataaaagtcgtggcaacgccgcaaaaattgcttgcgtttcgtatgaaagtcacac

SEQ ID NO: 654656 - DNA, 75 bp, synthetic construct
  source 1..75: mol_type = other DNA
caggtattgccttgtgccttttaaccggtatgcgtgacccttttaagccgccggaggatctatgccgggtaagcg

SEQ ID NO: 654657 - DNA, 75 bp, synthetic construct
  source 1..75: mol_type = other DNA
cgcaaccattgccattagcggtaacggcggcggcatggtggaagccgaccatattttggcagctattgaagcgcg

SEQ ID NO: 654658 - DNA, 75 bp, synthetic construct
  source 1..75: mol_type = other DNA
gtgaaaccaaactccgctatcgccctttcaaagtggactacgcgattttgcgcggcacctatgccgatccgcgtg

SEQ ID NO: 654659 - DNA, 75 bp, synthetic construct
  source 1..75: mol_type = other DNA
cgtgacgccagatggtctgcatatcacccagtcaggtcaaatacccaaactggttactcaggtggaaaaaatcac

SEQ ID NO: 654660 - DNA, 75 bp, synthetic construct
  source 1..75: mol_type = other DNA
ggcaaacgatggtgagctgatcgtgcttggcggtctgatggacgatcaggcgggagaaagcgtggcgaaagtgcc

SEQ ID NO: 654661 - DNA, 75 bp, synthetic construct
  source 1..75: mol_type = other DNA
cacggttggtagcgggcgtgaggttgtctccattgccgccagtaaacacagtaatgccctgattgtcaccgcgcc

SEQ ID NO: 654662 - DNA, 75 bp, synthetic construct
  source 1..75: mol_type = other DNA
gcagcgacaactacgcgggcgatgaaatggtcaccaaagtagtgccggtacgtaatgtgtcggtacgcgaactgg

SEQ ID NO: 654663 - DNA, 75 bp, synthetic construct
  source 1..75: mol_type = other DNA
atttctcgaaattgcgcaaaatgcccgtaaagtggtgttctgcggcacgttcgacgctaaaggcagcaagatcga

SEQ ID NO: 654664 - DNA, 75 bp, synthetic construct
  source 1..75: mol_type = other DNA
ttctggttgatggcatcgttgaacaccgcgaacaaccacaaacctatcttggcggttacgacctgaccatcagcg

SEQ ID NO: 654665 - DNA, 75 bp, synthetic construct
  source 1..75: mol_type = other DNA
ccggagagctcctacacggcgaagctgtatgccagcggcaccaagcgcatcgcgcagaaagtgggagaagaaggc

SEQ ID NO: 654666 - DNA, 75 bp, synthetic construct
  source 1..75: mol_type = other DNA
ctggtagaactgattgaaattgatggcgaaaccaaactccgctatcgccctttcaaagtggactatgccattttg

SEQ ID NO: 654667 - DNA, 75 bp, synthetic construct
  source 1..75: mol_type = other DNA
gcgacattctaccgttcatggccttccgtccgattatcaggcaaccacgtctgatggaaagcagcctgtttacgc

SEQ ID NO: 654668 - DNA, 75 bp, synthetic construct
  source 1..75: mol_type = other DNA
ctttagcgccgcctacgcacagcaaagcggtcaggaagtgctgtacatcaccgaacgtgcagtattccggttaac

SEQ ID NO: 654669 - DNA, 75 bp, synthetic construct
  source 1..75: mol_type = other DNA
ccggtactgccagcgcaaaaccaggccttaccgccggaagttcgcgcgttccttaatgccgggagaacgcgttaa

SEQ ID NO: 654670 - DNA, 75 bp, synthetic construct
  source 1..75: mol_type = other DNA
ggcgctttatgcagtgcctgacagacagcattgcaatattcaccgttaccgctgccactgagcgcgaagcacgcg

SEQ ID NO: 654671 - DNA, 75 bp, synthetic construct
  source 1..75: mol_type = other DNA
gactcactcaaagaggaattatttcctgatggaaaagcaaaagaccttagccttgaagaggctgctcaggttatt

SEQ ID NO: 654672 - DNA, 75 bp, synthetic construct
  source 1..75: mol_type = other DNA
attcttacttttcaaataaactaagcacagttctacatgaaaacactattgttattcttggctattctctaagtg

SEQ ID NO: 654673 - DNA, 75 bp, synthetic construct
  source 1..75: mol_type = other DNA
gcctttcacatggctgtatccgcacgcccttactttgtctggcgctttatgcagtgccatgaaaaacaaacctca

SEQ ID NO: 654674 - DNA, 75 bp, synthetic construct
  source 1..75: mol_type = other DNA
gctgccactgagcacgaagcacgcgcacaacttccgcacacccatctgatttttgtcacccttattcgtgagggg

SEQ ID NO: 654675 - DNA, 75 bp, synthetic construct
  source 1..75: mol_type = other DNA
atggataaaaacatgttgatcgcctcttctttcgggctgtatgatgccggagtcgcccacatggcgaccgggttt

SEQ ID NO: 654676 - DNA, 75 bp, synthetic construct
  source 1..75: mol_type = other DNA
gtgcgtttttcagcgacgatttatctggtctgtttctgcttctttaagcaactggcgatgatttttatgtctgta

SEQ ID NO: 654677 - DNA, 75 bp, synthetic construct
  source 1..75: mol_type = other DNA
gatgagaatgctgatgacattgcagggcgcttcaccgggacgtataccggagctgatgcgcgatcttgcaagtat

SEQ ID NO: 654678 - DNA, 75 bp, synthetic construct
  source 1..75: mol_type = other DNA
ggacgagcgcttgttgcgatagcagcaaaaaatgcacgtatgtgctgggcaatgttgcacctgagagatgaattc

SEQ ID NO: 654679 - DNA, 75 bp, synthetic construct
  source 1..75: mol_type = other DNA
aaaaggaaccaactttgagaaaaaatacatacatgcggttgaacactcaatgacttatatgaataaaccttacga

SEQ ID NO: 654680 - DNA, 75 bp, synthetic construct
  source 1..75: mol_type = other DNA
atgcggaatggtgatgagaatgctgatgacattgcagggcgcttcaccgggacgtataccggagctgatgcacga

SEQ ID NO: 654681 - DNA, 75 bp, synthetic construct
  source 1..75: mol_type = other DNA
ggtatcaggcacgcaagccgatggacccgtatgtggtggaagaagatccgggcgttaaatcggtgcgcaatatct

SEQ ID NO: 654682 - DNA, 75 bp, synthetic construct
  source 1..75: mol_type = other DNA
cattgcagaccgtgaggcttacaccggcgtaacggcgaaatggctgcacaccagagacccgaaactgcaaaagca

SEQ ID NO: 654683 - DNA, 75 bp, synthetic construct
  source 1..75: mol_type = other DNA
gatatcgagcttgatgattctgacgggctggttgagctgccgccacgcggggcatcgctgacgctgtggctgggc

SEQ ID NO: 654684 - DNA, 75 bp, synthetic construct
  source 1..75: mol_type = other DNA
aactgctgtttctcaaagcggggcagggggtgactgccagcggtaaaaaaatcccgcagattaccatcacccgca

SEQ ID NO: 654685 - DNA, 75 bp, synthetic construct
  source 1..75: mol_type = other DNA
acggccagcggtaaaaaaatcccgcaggtcaccatcacccgcagcgacggcgaccgtcatcattttgcgattgct

SEQ ID NO: 654686 - DNA, 75 bp, synthetic construct
  source 1..75: mol_type = other DNA
attttctcaataatagcggcttcacgacgtctttggagcttgaggtaaggctttctgatgtggagtacgaaacag

SEQ ID NO: 654687 - DNA, 75 bp, synthetic construct
  source 1..75: mol_type = other DNA
cctgaccacggtatatgccacaaaagcgcaggccatgcgcgccgctcaggctaagtgggacaaactgcaacgggg

SEQ ID NO: 654688 - DNA, 75 bp, synthetic construct
  source 1..75: mol_type = other DNA
gcttccggcagcctttttaccgggcgacagcttactggtgttggtcggcgtattgattgctaaaggcgcgatggg

SEQ ID NO: 654689 - DNA, 75 bp, synthetic construct
  source 1..75: mol_type = other DNA
gatgtggaagaaatagctgcttcattgactgatgaagcagcaagaaatatgtttttgcaacaagccagaacacag

SEQ ID NO: 654690 - DNA, 75 bp, synthetic construct
  source 1..75: mol_type = other DNA
tgaattctgctgtcagcaatatggcgcagtggttccgttgggatccgtctgcggatgaccagacgccggaagcag

SEQ ID NO: 654691 - DNA, 75 bp, synthetic construct
  source 1..75: mol_type = other DNA
gcaacgttacgccgcaggctaatccgacccggatcggggtcagtaatgttggtcaaataggtaatgctgtagctg

SEQ ID NO: 654692 - DNA, 75 bp, synthetic construct
  source 1..75: mol_type = other DNA
ggtgagcagggggcaaaagccgttaagcagctcgacatcgcgatcaacaacgccaaaaccttccaggcgatacag

SEQ ID NO: 654693 - DNA, 75 bp, synthetic construct
  source 1..75: mol_type = other DNA
ctgctgactggcgtcatgacgttaacccacgcggcaaatatatgcccggtaaaccagcgtggtatatgtacgata

SEQ ID NO: 654694 - DNA, 75 bp, synthetic construct
  source 1..75: mol_type = other DNA
acgctcggtgcgattgttgaggcgatagcctcccgtaacaagctggaggccagtgtcgctccgtcactggccgga

SEQ ID NO: 654695 - DNA, 75 bp, synthetic construct
  source 1..75: mol_type = other DNA
atcaactggtacaaccgttactggcaaaattaagcggcaacaccgccagcggcctgccagcgcgtcagcgcgtac

SEQ ID NO: 654696 - DNA, 75 bp, synthetic construct
  source 1..75: mol_type = other DNA
ggcggtgtttcggttggtgaagcggattacaccaaaaccattctcgaagagctgggcgaaatcgccttctggaag

SEQ ID NO: 654697 - DNA, 75 bp, synthetic construct
  source 1..75: mol_type = other DNA
tggcacctgcatccgtattatgaccggagcaccagtgccggaaggctgtgaagccgtggtgatgcaggaacagac

SEQ ID NO: 654698 - DNA, 75 bp, synthetic construct
  source 1..75: mol_type = other DNA
cagatatgacattcagtctaaatataaaaatggcagaacattatctgtcaggaaatcgaatagcaacccaggaat

SEQ ID NO: 654699 - DNA, 75 bp, synthetic construct
  source 1..75: mol_type = other DNA
tttactgctgaagtgcgtagcgggcaaaatattcgccgtcgcggtgaagatatctctgcgggtgcggttgttttc

SEQ ID NO: 654700 - DNA, 75 bp, synthetic construct
  source 1..75: mol_type = other DNA
tcttttagcctcggcaactgctttatcgtgctggaacgcgatcgcggcaatgttgaagcgggcgaatgggtggaa

SEQ ID NO: 654701 - DNA, 75 bp, synthetic construct
  source 1..75: mol_type = other DNA
gtgcagtacatcgaagcgtggatctctggcaacggctgtgtgccgatttatggcctgatggaagatgcggcgacg

SEQ ID NO: 654702 - DNA, 75 bp, synthetic construct
  source 1..75: mol_type = other DNA
gggcaaaagcgccagcggtaaaccactaccggttatcactatcacacgcaaggacggcgacagtcaccgctttac

SEQ ID NO: 654703 - DNA, 75 bp, synthetic construct
  source 1..75: mol_type = other DNA
gctggagttaaccaatgatgacaaaccgcaggatagcggtccgttaatgtggatatctcgcggtattatgccgta

SEQ ID NO: 654704 - DNA, 75 bp, synthetic construct
  source 1..75: mol_type = other DNA
cgtaaagtgcgtgtagcgcttttttctaccggtgatgaactccagttgccaggccagccgctgggcgacggccaa

SEQ ID NO: 654705 - DNA, 75 bp, synthetic construct
  source 1..75: mol_type = other DNA
atgactcaacaggcaacaacaaccgatgaactggctttcataaggccgtatggcgagcaggagaagcaagttctc

SEQ ID NO: 654706 - DNA, 75 bp, synthetic construct
  source 1..75: mol_type = other DNA
gctcccgtaaaaatcagcttgaagtgatgcgcgaacaagacgcgccgattactgccgatcagctgctggcacctt

SEQ ID NO: 654707 - DNA, 75 bp, synthetic construct
  source 1..75: mol_type = other DNA
aggtgagttgattctcgttcctgacttatcaactccgagagataagctttattcagttgtgatcagaacaaaaga

SEQ ID NO: 654708 - DNA, 75 bp, synthetic construct
  source 1..75: mol_type = other DNA
cgtgatgaattaattgatacaactcaggcaaggccaattcagtattgcattaatggaacgtggtataacgcgggg

SEQ ID NO: 654709 - DNA, 75 bp, synthetic construct
  source 1..75: mol_type = other DNA
ggagcattacagaaaaaccagaacggcgcagatattccgggaaaagataccttcaccaaaaatattggtgcctgc

SEQ ID NO: 654710 - DNA, 75 bp, synthetic construct
  source 1..75: mol_type = other DNA
tttccgtattttacggggaatgatgtcgccagcctggcaaccctgacaaaagtcgggcgggatattcttgcgaaa

SEQ ID NO: 654711 - DNA, 75 bp, synthetic construct
  source 1..75: mol_type = other DNA
cacgaaaaaccagcagcctgcatttgctttagggcaaacaggaggcagggttgcaaatgataaagctgttggctg

SEQ ID NO: 654712 - DNA, 75 bp, synthetic construct
  source 1..75: mol_type = other DNA
acatggaatggtcctggatggaacgataaatctggttatgttgttactgcctcaattaactcaaataaggacgaa

SEQ ID NO: 654713 - DNA, 75 bp, synthetic construct
  source 1..75: mol_type = other DNA
caggaaactggacgacggcacaattgattgaatggctggattctcaaggggcattcaatcacccatactggatgt

SEQ ID NO: 654714 - DNA, 75 bp, synthetic construct
  source 1..75: mol_type = other DNA
ccgcaggagcattacagaaaaacaagaacggtgcagatattccgaataaagataaattcatacaaaacacagggg

SEQ ID NO: 654715 - DNA, 75 bp, synthetic construct
  source 1..75: mol_type = other DNA
ttcagctgtatgaggcatacaacaatggctacccttccccctatggcaatgtgcttcaccttaaaggtgccaccg

SEQ ID NO: 654716 - DNA, 75 bp, synthetic construct
  source 1..75: mol_type = other DNA
aacgggctggatcgtgaagcccgcaggatgatgcagacgttgcagcgttgtgcgccctgtgagggggccggggtg

SEQ ID NO: 654717 - DNA, 75 bp, synthetic construct
  source 1..75: mol_type = other DNA
attaattgatacaactcaggcaaggccaattcagtattgcattaatggaacgtggtataacgcggggagtattta

SEQ ID NO: 654718 - DNA, 75 bp, synthetic construct
  source 1..75: mol_type = other DNA
ttattacggataccggttgtggaaatatctgccttgccggagccgtgattgaggttatgggaacccgcggcgcaa

SEQ ID NO: 654719 - DNA, 75 bp, synthetic construct
  source 1..75: mol_type = other DNA
cggtaaatcaggcttctggcgcattacagaaaaaccagaacggcgcagatattccgggaaaagataccttcacca

SEQ ID NO: 654720 - DNA, 75 bp, synthetic construct
  source 1..75: mol_type = other DNA
gagtctgcagtatcaggcgaacatgacctcactgaatgacattcgctttggctttaactgctcaatgatgcgtgc

SEQ ID NO: 654721 - DNA, 75 bp, synthetic construct
  source 1..75: mol_type = other DNA
atgattacgggcatgaccattgacgccggtaccagccttgcaccggcatttatgctgacgctgaacagccaggac

SEQ ID NO: 654722 - DNA, 75 bp, synthetic construct
  source 1..75: mol_type = other DNA
cgcaggagtccgactcggtatttctgacccgactggctgaccgaaacggagctgcggtatcagtgaaagcgggga

SEQ ID NO: 654723 - DNA, 75 bp, synthetic construct
  source 1..75: mol_type = other DNA
gggctttaagcgcgtaatagacgaacaggtatggttaatcagtaaagtaactcacattctgaataatagtggctt

SEQ ID NO: 654724 - DNA, 75 bp, synthetic construct
  source 1..75: mol_type = other DNA
ggcgttacggcaaaatggttgcacaccaaagacccaaaaccacaaaagcaaaaggttgcgttaaaacgcaaaccc

SEQ ID NO: 654725 - DNA, 75 bp, synthetic construct
  source 1..75: mol_type = other DNA
attaccggcaacatcagtaatcggttgttgagcctgaccatgacagacaatcgcggattcgaagccgaccagctc

SEQ ID NO: 654726 - DNA, 75 bp, synthetic construct
  source 1..75: mol_type = other DNA
ctgaccatccgggcgcgtagtgcagatttccgtgagaccctgaatacacggcgcgaaaaatcatggcatcagaca

SEQ ID NO: 654727 - DNA, 75 bp, synthetic construct
  source 1..75: mol_type = other DNA
atgataacgggaatgaatattcaggccggggcgcgtgttgctcctgcgtatatgctcacgctggacggggcggat

SEQ ID NO: 654728 - DNA, 75 bp, synthetic construct
  source 1..75: mol_type = other DNA
tttgccgctatcgctgacttcgacatggtgcgtaacgcagtagatgcagctaaagcactgggcattgatgctcgc

SEQ ID NO: 654729 - DNA, 75 bp, synthetic construct
  source 1..75: mol_type = other DNA
gttcgacgtgatggaaaaatacggcatcctcggcgtggaaatggaagcggctggtatctacggcgtggctgcaga

SEQ ID NO: 654730 - DNA, 75 bp, synthetic construct
  source 1..75: mol_type = other DNA
aggcaaagtgggacaagatacagcggggcgtggcggaattttccattacgcttgccactggccgggctgatttat

SEQ ID NO: 654731 - DNA, 75 bp, synthetic construct
  source 1..75: mol_type = other DNA
tgcgatgacggccagtggtaagccgatcccccaaatgaccgtcgagcgtggggacggcgaccgccatcagttcgc

SEQ ID NO: 654732 - DNA, 75 bp, synthetic construct
  source 1..75: mol_type = other DNA
gcgcgagcagtcatggcacgacaccacgctcggggtgattgtggagaccatcgcgcagcgtaataagctgacggc

SEQ ID NO: 654733 - DNA, 75 bp, synthetic construct
  source 1..75: mol_type = other DNA
cgatcagcgcgcgatcctgcgccgactggcggagctgcaatatgctcgtaatgatcaagcattccagcgtggtac

SEQ ID NO: 654734 - DNA, 75 bp, synthetic construct
  source 1..75: mol_type = other DNA
aatgtcattgctgaccttcagcgcccaaccatggtacttgcgcccaacaaaacgctggcggcccagctgtatggc

SEQ ID NO: 654735 - DNA, 75 bp, synthetic construct
  source 1..75: mol_type = other DNA
atactggtatgacggcgaactgacttattattatgaggaaagtctgcacggcccgctggccctgccgatgcaatt

SEQ ID NO: 654736 - DNA, 75 bp, synthetic construct
  source 1..75: mol_type = other DNA
gggttccgtgccgggtatatggaaccaggatttaacggcgcgttaatcatcgacgacccattgaaacctgctgac

SEQ ID NO: 654737 - DNA, 75 bp, synthetic construct
  source 1..75: mol_type = other DNA
tatggtatggggtatcactgaactaagccagccacaggcgatgggcctcatgttacctaagcgcctgcgagggtt

SEQ ID NO: 654738 - DNA, 75 bp, synthetic construct
  source 1..75: mol_type = other DNA
attctctatggtgataagatcaccccgtcgatggcgaaagcgatcagtgaaaccgaacgtcgtcgtgagaaacag

SEQ ID NO: 654739 - DNA, 75 bp, synthetic construct
  source 1..75: mol_type = other DNA
ctataacggctttacctatcttgcgacgggtgactttctcgatatttcatctaacagcgaagagaaagagatcaa

SEQ ID NO: 654740 - DNA, 75 bp, synthetic construct
  source 1..75: mol_type = other DNA
taccgcagcttttctccactggatcgatgtttcacattatcgaagtgataacagcgtcaggggacgttctacggc

SEQ ID NO: 654741 - DNA, 75 bp, synthetic construct
  source 1..75: mol_type = other DNA
caacaacgggattaacgtaaccgtttctaacgttcgcgaggaatacattaccctgattcgaaacaagcaattcga

SEQ ID NO: 654742 - DNA, 75 bp, synthetic construct
  source 1..75: mol_type = other DNA
ttgacgtcgtctggggcgggcgagtgttgcccaatatccgcagtactttaaagtcggtacagtatgactttattc

SEQ ID NO: 654743 - DNA, 75 bp, synthetic construct
  source 1..75: mol_type = other DNA
atccattaaaataactgaaggtgagttagcttatcttcttgaacatgagcaggtctataaaggcattcccttacc

SEQ ID NO: 654744 - DNA, 75 bp, synthetic construct
  source 1..75: mol_type = other DNA
taaatctgatgtgaaaatcgagatggttttccttaaccccaacacgggcaaggttgaaactacttaccctgtttt

SEQ ID NO: 654745 - DNA, 75 bp, synthetic construct
  source 1..75: mol_type = other DNA
acgaaagccatcccgaaagagatgctgccacttgtcgataagccattaattcaatacgtcgtgaatgaatgtatt

SEQ ID NO: 654746 - DNA, 75 bp, synthetic construct
  source 1..75: mol_type = other DNA
atggctctttctggcccgtactggaaggtatcccggcaacagagatgttcaaagttattccactgtcgccaggcc

SEQ ID NO: 654747 - DNA, 75 bp, synthetic construct
  source 1..75: mol_type = other DNA
agaaaccacgccagagccggtggtaaaacctgctgcggacgctgaaccttccccttcgtcgagtgataaaccgta

SEQ ID NO: 654748 - DNA, 75 bp, synthetic construct
  source 1..75: mol_type = other DNA
aagtattgccatgaaaggtggggcgtcgggcttcctggctggacgagcggtttgggcgtcggttgttggtgcaca

SEQ ID NO: 654749 - DNA, 75 bp, synthetic construct
  source 1..75: mol_type = other DNA
cacttgagcaagcaatcaatgctcgctggggcgatcgcgttaacgtcagcttctctaccttaacctgtctggaag

SEQ ID NO: 654750 - DNA, 75 bp, synthetic construct
  source 1..75: mol_type = other DNA
atgagcctggattactggagccggaaggcgtcagcaaagtgttcttcacctgcgattcccatgaacaactgctgc

SEQ ID NO: 654751 - DNA, 75 bp, synthetic construct
  source 1..75: mol_type = other DNA
ttaaaacactaactggatgcaatcaattgaaaacagtatttgaagatattgtccgcaagaagactaaatcattta

SEQ ID NO: 654752 - DNA, 75 bp, synthetic construct
  source 1..75: mol_type = other DNA
cgagacaatcaaatcacgactggcgatcgagacgacgccgatgattgtcatcatgcagcgcattcactaccacga

SEQ ID NO: 654753 - DNA, 75 bp, synthetic construct
  source 1..75: mol_type = other DNA
taagccattaattcaatacgtcgtgaatgaatgtattgcggctggcattactgaaattgtgctggttactcactc

SEQ ID NO: 654754 - DNA, 75 bp, synthetic construct
  source 1..75: mol_type = other DNA
ccgctgctggcaaaaactcctccgggagcaggcgatgaaattcaacttaccgatgctattgatatgctgatcgaa

SEQ ID NO: 654755 - DNA, 75 bp, synthetic construct
  source 1..75: mol_type = other DNA
tctggcaatggttgataaatttgttcgtcgctgccgtagtgccggactggttagcattattgaacctgtggtgcg

SEQ ID NO: 654756 - DNA, 75 bp, synthetic construct
  source 1..75: mol_type = other DNA
cgctgccgatctttttatcccaggtaatggcatcccggttgatagcgttgaaatagatatgtccgtcgacccgca

SEQ ID NO: 654757 - DNA, 75 bp, synthetic construct
  source 1..75: mol_type = other DNA
gcgatgaaattacttgtgctctggcgtgaagatgaacctgcagaggaacgtctggcaatggtcgataagtttgtt

SEQ ID NO: 654758 - DNA, 75 bp, synthetic construct
  source 1..75: mol_type = other DNA
atgctgggtaatatgaatatttttatggccgtactgggaataattttattttctggttttctggccgcgtatttc

SEQ ID NO: 654759 - DNA, 75 bp, synthetic construct
  source 1..75: mol_type = other DNA
tgactatcttcatctccacccactttatgaacgaagcggaacgttgtgaccgtatctcactgatgcacgccggaa

SEQ ID NO: 654760 - DNA, 75 bp, synthetic construct
  source 1..75: mol_type = other DNA
gcaaaacctggagttacatgcccgtttgtttcatatcccggaagcggaaattcccgcgcgagtggctgaaatgag

SEQ ID NO: 654761 - DNA, 75 bp, synthetic construct
  source 1..75: mol_type = other DNA
ttgatgatgattccctcaatgctaagcgcccttagcgtggtacgggaaaaagagttggggtcgattatcaatctc

SEQ ID NO: 654762 - DNA, 75 bp, synthetic construct
  source 1..75: mol_type = other DNA
aaaaaagtctggacacccaaacaatatcagaaagaaataacgcctcctgaaataatcgaaacggttgctcttctg

SEQ ID NO: 654763 - DNA, 75 bp, synthetic construct
  source 1..75: mol_type = other DNA
gacgagcaacaatttcgtgactggttgtcagttcacttatctacttttgcaacagagaaaggccatttttgcccg

SEQ ID NO: 654764 - DNA, 75 bp, synthetic construct
  source 1..75: mol_type = other DNA
cctgcaagtcgtttggttgtcgtaatttagggcaaccaacatcgacagattacagctggccagactatcgactgg

SEQ ID NO: 654765 - DNA, 75 bp, synthetic construct
  source 1..75: mol_type = other DNA
aggcatattctgccattgcccgtctgtttaacgatgagtggtggactcatcagcttaaaggccagcgtatgcgct

SEQ ID NO: 654766 - DNA, 75 bp, synthetic construct
  source 1..75: mol_type = other DNA
ccttatgccagtaaacatgccattcgtgatgtgcgtgcacgccgccaggcaaatctggaatttcttaaatcgtgt

SEQ ID NO: 654767 - DNA, 75 bp, synthetic construct
  source 1..75: mol_type = other DNA
gttacgccgccgcagagggtgatgtggggatgtttatcacgctgaccgcgccgtcaaagtatcacccgacacgtc

SEQ ID NO: 654768 - DNA, 75 bp, synthetic construct
  source 1..75: mol_type = other DNA
gctggcggtggcggtgattcatcgcccggagatgttaatcctcgatgagcctacttctggcgtcgatccggtggc

SEQ ID NO: 654769 - DNA, 75 bp, synthetic construct
  source 1..75: mol_type = other DNA
cgatgggagcttgaggcgctggcgcgtggggcaacagtaaattatgacgggaaaaaattcacgtatccggtcgct

SEQ ID NO: 654770 - DNA, 75 bp, synthetic construct
  source 1..75: mol_type = other DNA
cgcgtggcgcgacggtaaagtttgacggacgaaagtttatatatccaataagtggtgagtggaagcagtttttta

SEQ ID NO: 654771 - DNA, 75 bp, synthetic construct
  source 1..75: mol_type = other DNA
aacgcacgacgtgctggctggcctgaccgcgcgtgaagcaaaagttctgcgtatgcgtttcggtatcgatatgaa

SEQ ID NO: 654772 - DNA, 75 bp, synthetic construct
  source 1..75: mol_type = other DNA
cttgttttaataatgaagcaactataaaagaaagtattaacagcgtactatctcaaagttataaatgctgggagt

SEQ ID NO: 654773 - DNA, 75 bp, synthetic construct
  source 1..75: mol_type = other DNA
tgctgttaatgctgttgccaaacatcatataaatccgctgtgtttgttttttaagcgccactttgcctcttggag

SEQ ID NO: 654774 - DNA, 75 bp, synthetic construct
  source 1..75: mol_type = other DNA
gcaacgcattcaatgccgtaactgcaaaaaagtctggacgcctaaaaaatatcagaaagaaattacgcatcccca

SEQ ID NO: 654775 - DNA, 75 bp, synthetic construct
  source 1..75: mol_type = other DNA
tggctgtgacgggagtgttttgtctgaatcatcgcacggtacttactgttccgtgggacctaccggccgagtgca

SEQ ID NO: 654776 - DNA, 75 bp, synthetic construct
  source 1..75: mol_type = other DNA
atcgaaggaaatcctgattatctggataatgggatcccggttgcctttcatggtcataaatgtggttgtggctgt

SEQ ID NO: 654777 - DNA, 75 bp, synthetic construct
  source 1..75: mol_type = other DNA
ctgctacaacaacctataggaaattgttatacagtaatgttattggatgtctaacaggaatgtatgatactgatt

SEQ ID NO: 654778 - DNA, 75 bp, synthetic construct
  source 1..75: mol_type = other DNA
aagttctccacctacgcaacttggtggatccgtcaggcgatcacccgctctatcgcggatcaggcgcgcaccatc

SEQ ID NO: 654779 - DNA, 75 bp, synthetic construct
  source 1..75: mol_type = other DNA
acgaaaccagcgatacctggttcaacgcggcaattgcgatgaacaagccgtggtcggaaaaactgcacgatgtct

SEQ ID NO: 654780 - DNA, 75 bp, synthetic construct
  source 1..75: mol_type = other DNA
gatgaaattcagtatggcagtgctgtactcaagcgcaacggtaagggagccatactacgcccggttatcacgcgg

SEQ ID NO: 654781 - DNA, 75 bp, synthetic construct
  source 1..75: mol_type = other DNA
ttctttactgaagtccaatgttatcggatgccttactgcaatttatgacacggaagttgtgggtaaagtatatat

SEQ ID NO: 654782 - DNA, 75 bp, synthetic construct
  source 1..75: mol_type = other DNA
aggccgtaacgctggcttctccagcggcacgtattgtattgatggggttctccagtgaaccgtctgaagtgattc

SEQ ID NO: 654783 - DNA, 75 bp, synthetic construct
  source 1..75: mol_type = other DNA
ctgacaccaacaactctgctggagatgctacaggataaatatcccggtcagtaccccaacagccttcgaagaaca

SEQ ID NO: 654784 - DNA, 75 bp, synthetic construct
  source 1..75: mol_type = other DNA
tacgtaacgggcttgatgtcgtgcgtatgattgcgctcggtgccgacaccgtactgctgggtcgtgctttcctgt

SEQ ID NO: 654785 - DNA, 75 bp, synthetic construct
  source 1..75: mol_type = other DNA
atgcacgccgcggcgaggttcaggcagcaaaagcggcagatgcacatggcattccatttacgctctcgacggttt

SEQ ID NO: 654786 - DNA, 75 bp, synthetic construct
  source 1..75: mol_type = other DNA
cataccgggtcgatgccgaacaggcagtgctggggtgcctgatggtaaacaccgacactgagcgtgcggggcagg

SEQ ID NO: 654787 - DNA, 75 bp, synthetic construct
  source 1..75: mol_type = other DNA
ttatagaatttgcaaattcactagcttatagacacgggctaaaacgaccaaatggtattgaggcatattttgcta

SEQ ID NO: 654788 - DNA, 75 bp, synthetic construct
  source 1..75: mol_type = other DNA
aactggctgcaggatacgacgatatctcagtcgtggcaaaaggtatggagcagatgctgaataccccgggaaacg

SEQ ID NO: 654789 - DNA, 75 bp, synthetic construct
  source 1..75: mol_type = other DNA
tctgtcgctttgccggccatctttcgcacttctacagggtcgcccaacatgcggtgctttgcagccagctagtgc

SEQ ID NO: 654790 - DNA, 75 bp, synthetic construct
  source 1..75: mol_type = other DNA
tctgtcgctttgctggccatctttcgcacttctacagggtcgcccaacatgcggtcctttgcagccagcttgtgc

SEQ ID NO: 654791 - DNA, 75 bp, synthetic construct
  source 1..75: mol_type = other DNA
tctgtcgctttgcaggccatctttcgcacttctacagggtcgcccaacatgcggtgctttgcagccagctcgtgc

SEQ ID NO: 654792 - DNA, 75 bp, synthetic construct
  source 1..75: mol_type = other DNA
atcagacgtggcgctgcgccagcgtattctgaaaaacatgtccaacctaagtctggaaacgacgctgtttaatga

SEQ ID NO: 654793 - DNA, 75 bp, synthetic construct
  source 1..75: mol_type = other DNA
aaggtggaaggacagaccagcctcgacgtcgtgtttggtgagcgcaaactgaaaaccaccgtgctggctaacgat

SEQ ID NO: 654794 - DNA, 75 bp, synthetic construct
  source 1..75: mol_type = other DNA
tctgtcgctttgcgggccatctttcgcacttctacagggtcgcccaacatgcggtactttgcagccagctggtgc

SEQ ID NO: 654795 - DNA, 75 bp, synthetic construct
  source 1..75: mol_type = other DNA
aggaggcgagggtaaattctgaaattttttatgtcggtgccagtgatgactcggatatggcgcgggcgatggcga

SEQ ID NO: 654796 - DNA, 75 bp, synthetic construct
  source 1..75: mol_type = other DNA
tcaccggaaaaaatgaagctgctggctgacacgatttctgcggtttatctcgatggctacgagggcagacagtaa

SEQ ID NO: 654797 - DNA, 75 bp, synthetic construct
  source 1..75: mol_type = other DNA
tacaccaagaaagctgacaccacacggatgatgattccgttctttcagcagttcagggagatgggggtgaaagac

SEQ ID NO: 654798 - DNA, 75 bp, synthetic construct
  source 1..75: mol_type = other DNA
tctcatacaatgagcagcgagaatggtgttttgcatgtgataggcgtgttcaatggcaaactatctactattgcc

SEQ ID NO: 654799 - DNA, 75 bp, synthetic construct
  source 1..75: mol_type = other DNA
cggccgatctgcttgacacctggctgacaaattctccagtgcaaatggaagacgagcaacgtgaagccctttcgc

SEQ ID NO: 654800 - DNA, 75 bp, synthetic construct
  source 1..75: mol_type = other DNA
tatggctggcagaacaaaaagatgtgctgagcaccattctgaaaaccggcaaattaccgtccccacccacaggtc

SEQ ID NO: 654801 - DNA, 75 bp, synthetic construct
  source 1..75: mol_type = other DNA
tacaccaacaaggccgacaccacacggatgatgattccgttctttcagcagttcagggagatgggggagaaagac

SEQ ID NO: 654802 - DNA, 75 bp, synthetic construct
  source 1..75: mol_type = other DNA
tgacacgtttaaaaggagaaacgtcgcaacgagtttcacctttctcggatatgacttcaaagtgcgtacgctgaa

SEQ ID NO: 654803 - DNA, 75 bp, synthetic construct
  source 1..75: mol_type = other DNA
gaacattcccgtaccgggcataagggcggtttgcgtccggcaagtgaagtcgtcgatgactggatagatgacctt

SEQ ID NO: 654804 - DNA, 75 bp, synthetic construct
  source 1..75: mol_type = other DNA
taaggcggcgattccggcctcaatggtcaactacgcgaaaattgtacgtgaaaaagccattcttcgttatgccgt

SEQ ID NO: 654805 - DNA, 75 bp, synthetic construct
  source 1..75: mol_type = other DNA
accgattttatccgtgaggtgatccaccgtaccggctgcggactgttgctcgatgtgaataacctctatatcagc

SEQ ID NO: 654806 - DNA, 75 bp, synthetic construct
  source 1..75: mol_type = other DNA
gaaattcatgcagagaattatctctgtgccggggggcctttccaccaggcgctgacggccctgtgtgaatgctat

SEQ ID NO: 654807 - DNA, 75 bp, synthetic construct
  source 1..75: mol_type = other DNA
taacccgaacacgaggcactccgcagggcggggtcattagtccgctacttgctaacttgttccttcactatgcat

SEQ ID NO: 654808 - DNA, 75 bp, synthetic construct
  source 1..75: mol_type = other DNA
ccgtctggccacttatcgttctgctggtggcggtgaccctgtggtttgttcgcaaagagctgagcaaaccaaagc

SEQ ID NO: 654809 - DNA, 75 bp, synthetic construct
  source 1..75: mol_type = other DNA
acgcggtctgcacttgccggaaaaacatgtcacctggcgtggtgaggcaatccccggtagcctgtttgattttgc

SEQ ID NO: 654810 - DNA, 75 bp, synthetic construct
  source 1..75: mol_type = other DNA
ctctgtggtcccggtcatcatgaccgggacccggaccggcgcaacggatcttcaacgccacattcgctggcatta

SEQ ID NO: 654811 - DNA, 75 bp, synthetic construct
  source 1..75: mol_type = other DNA
atggctctttctggcctgtactggaaggcatcccggcaacagagatgttcaaagttattccactgtcgccaggcc

SEQ ID NO: 654812 - DNA, 75 bp, synthetic construct
  source 1..75: mol_type = other DNA
cgcttcaaccaactttggctttggtattcctggcggtattcctggggttgcgctgcgcgaaggcgtgccttatca

SEQ ID NO: 654813 - DNA, 75 bp, synthetic construct
  source 1..75: mol_type = other DNA
gcacttctacagcgtcgcccaacatgcggttctttgcagccagctggtgccgcaggaatttgcttttgaagcctt

SEQ ID NO: 654814 - DNA, 75 bp, synthetic construct
  source 1..75: mol_type = other DNA
gctgaaatttcccgtacctcaatctggcagtggatccatcatcaaaaaacgttgagcaatggcaaaccggtgact

SEQ ID NO: 654815 - DNA, 75 bp, synthetic construct
  source 1..75: mol_type = other DNA
cggagaatcgctagagaactggggttgccaccgcacccggcaatgttcccaacagacatacctgagatggctatc

SEQ ID NO: 654816 - DNA, 75 bp, synthetic construct
  source 1..75: mol_type = other DNA
tccggagctggaagtgattggtactaatgccgaagacgcggtgccgcattatctgcgtaaactctatttatcgta

SEQ ID NO: 654817 - DNA, 75 bp, synthetic construct
  source 1..75: mol_type = other DNA
atcatgacattgccagcgacctgtttggcgtggtcaacgacaacccggacatcattactaatgtttatcgtgatg

SEQ ID NO: 654818 - DNA, 75 bp, synthetic construct
  source 1..75: mol_type = other DNA
atgccaacagttctctctcgcatggcgatgcaactcaaaaaaacagcctggataattcccgtcttcatggtatcg

SEQ ID NO: 654819 - DNA, 75 bp, synthetic construct
  source 1..75: mol_type = other DNA
tgatgcaattcaaaaaagcagcctggataattcccgtcatcatggtttcgggatgctcattatctccggcgatcc

SEQ ID NO: 654820 - DNA, 75 bp, synthetic construct
  source 1..75: mol_type = other DNA
gtctctgtcgccagcgagcgcgcgggggaaaaaggtttgttggtctatcgttcggtgattgcccgtccgcatgaa

SEQ ID NO: 654821 - DNA, 75 bp, synthetic construct
  source 1..75: mol_type = other DNA
atattctggccgccattgaagcgcgtttcctgcaaaccggacacccgcgcgatctgacattaatccactcgctgg

SEQ ID NO: 654822 - DNA, 75 bp, synthetic construct
  source 1..75: mol_type = other DNA
ctggtgctgtggcgtagtgatgaagatgcgcagcaacgtctggatatggtgaaagagttcaacgaactgtgccac

SEQ ID NO: 654823 - DNA, 75 bp, synthetic construct
  source 1..75: mol_type = other DNA
aatgcatgatgcaacagaagcgtattgccaggacatccccgcgccactgaaacgccttcttcctgactataaacg

SEQ ID NO: 654824 - DNA, 75 bp, synthetic construct
  source 1..75: mol_type = other DNA
caaaaacgtctgcttccgccaccggtgacccgccctgtgacgccgccccgcccgacaatggctacgcccacagcc

SEQ ID NO: 654825 - DNA, 75 bp, synthetic construct
  source 1..75: mol_type = other DNA
gctgaaaaagttagatcctcaatatattatcatcggagaagccccatctcgacatttaaattactataccggata

SEQ ID NO: 654826 - DNA, 75 bp, synthetic construct
  source 1..75: mol_type = other DNA
aacgtgattccaatgccaccgggccatgcctacgggatgtttatggaacgctttcacgagttatcggagttacga

SEQ ID NO: 654827 - DNA, 75 bp, synthetic construct
  source 1..75: mol_type = other DNA
aggtatcccggcaacagagatgttcaaagttattccacagtcgccaggccatgcctacgggatgtttatggaacg

SEQ ID NO: 654828 - DNA, 75 bp, synthetic construct
  source 1..75: mol_type = other DNA
cacattcccggattcagtcagatattactggcgggaaacctggcgcaggcccgaatgatgatcgagcgttttaag

SEQ ID NO: 654829 - DNA, 75 bp, synthetic construct
  source 1..75: mol_type = other DNA
aaataaagacgacatcgttattaacgatatcgcggtttccctttcaaatatctgtcgctttgcaggacatctttc

SEQ ID NO: 654830 - DNA, 75 bp, synthetic construct
  source 1..75: mol_type = other DNA
cagtttccgccaggcgctggagcagctctttgcactctataccccggctgaaaaaccgctgtatgcccggaccag

SEQ ID NO: 654831 - DNA, 75 bp, synthetic construct
  source 1..75: mol_type = other DNA
caaaaacgtctgcttccgccaccggtgacccgccctgtgacgccgccccgcccgacaacaacagcgacgcccaca

SEQ ID NO: 654832 - DNA, 75 bp, synthetic construct
  source 1..75: mol_type = other DNA
gtacaacatactgcggaaacggtggcgcaggcattaaccatcagtcgcaccaccgccagacggtatctcgaatat

SEQ ID NO: 654833 - DNA, 75 bp, synthetic construct
  source 1..75: mol_type = other DNA
tcgttgaggacgaaacgccgctggcagagatgcatgcggaatatattcgtcacattcccggattcagccagatat

SEQ ID NO: 654834 - DNA, 75 bp, synthetic construct
  source 1..75: mol_type = other DNA
atctgttattcatccggcagggacagggtaaaagtgctagcggtaaaccactgccggtgatcactatcacacgta

SEQ ID NO: 654835 - DNA, 75 bp, synthetic construct
  source 1..75: mol_type = other DNA
ttgaagagataacgcgtacaccgctggaagtacaagactgtctgttaggtatgctttctgacagggtgatgacgg

SEQ ID NO: 654836 - DNA, 75 bp, synthetic construct
  source 1..75: mol_type = other DNA
taatataatcaacacttcattcttatattgtgttgctgtttggtgtatagttgcatcgattagtttgattaggcc

SEQ ID NO: 654837 - DNA, 75 bp, synthetic construct
  source 1..75: mol_type = other DNA
gaataaatcatcgtggtttaatttttatttatcatttttaggtatcattattatttattttgcattgttgttttt

SEQ ID NO: 654838 - DNA, 75 bp, synthetic construct
  source 1..75: mol_type = other DNA
caggggttgatcacccgtcatcatggaggggccgggcgcgtctccagcgtcatgaataccgcttttgagcaacgg

SEQ ID NO: 654839 - DNA, 75 bp, synthetic construct
  source 1..75: mol_type = other DNA
tattcttcttaaaattaaaaatttatccccctctataactaaactacatgaaaaatataaagcagaatttgatga

SEQ ID NO: 654840 - DNA, 75 bp, synthetic construct
  source 1..75: mol_type = other DNA
gcgtttgttgtactctcggcaaaagatatgagcagtgatgtcaaaacagttctcgccgtcagtgatagcaaaaac

SEQ ID NO: 654841 - DNA, 75 bp, synthetic construct
  source 1..75: mol_type = other DNA
tacaccggtttcaccttctttcgcaaagtttctcaggcgctggctggtttcttccccggctggatgctgacgcaa

SEQ ID NO: 654842 - DNA, 75 bp, synthetic construct
  source 1..75: mol_type = other DNA
ggcagacactcggtgtactaatcgacccgccgggataccagtttatgcagcgtcgtcaggggcagtggttgcccg

SEQ ID NO: 654843 - DNA, 75 bp, synthetic construct
  source 1..75: mol_type = other DNA
cttaaaaacgatggcaccgcatattactcaggtgcatatcaaagatgcattgatcgttaaagaacagagtggtct

SEQ ID NO: 654844 - DNA, 75 bp, synthetic construct
  source 1..75: mol_type = other DNA
gtaatgatgaaatcaataattatatatcgaggctgaggcgacaatgtgaattgaatgttgcaatcgacgaaggaa

SEQ ID NO: 654845 - DNA, 75 bp, synthetic construct
  source 1..75: mol_type = other DNA
gcgcaaaagcctggcctgttgcaatctttccgcgcaattgccggtaaccgccactgttcattctgtgtattgcca

SEQ ID NO: 654846 - DNA, 75 bp, synthetic construct
  source 1..75: mol_type = other DNA
catggcgtcagggcggcgctacgctgggcctgctgctgtgcacggtgggattcgtgccggttatgaatcttatcg

SEQ ID NO: 654847 - DNA, 75 bp, synthetic construct
  source 1..75: mol_type = other DNA
acgtcgctttaatgacggtacgctcaacaccgcaatggaaaatattcataaatacgttgaagacccggcgcagaa

SEQ ID NO: 654848 - DNA, 75 bp, synthetic construct
  source 1..75: mol_type = other DNA
tctattaaaacaggaaataaaaataataaaacggcatcataaaaataaataccctggctcaaatatatttagcta

SEQ ID NO: 654849 - DNA, 75 bp, synthetic construct
  source 1..75: mol_type = other DNA
tacgtgaacgttattcaccaattcaggtgccggaatgtcctgtttgcggcgatgaaatgtcgatacagcgcatat

SEQ ID NO: 654850 - DNA, 75 bp, synthetic construct
  source 1..75: mol_type = other DNA
acctacacagcatcaaaccaagccagtgcaggctgatgaaaagctgaactctcaacgtgattcacttaaaggaaa

SEQ ID NO: 654851 - DNA, 75 bp, synthetic construct
  source 1..75: mol_type = other DNA
tgatacggatttacgttatatctattcacaacgccaacctgaaaaaaccatgcatgaacggttaaaagggaaagg

SEQ ID NO: 654852 - DNA, 75 bp, synthetic construct
  source 1..75: mol_type = other DNA
gtcgcaaatagccaatgcacatgctttagggttgttggttattgatgaaattcagcatttaagccgctctcgttc

SEQ ID NO: 654853 - DNA, 75 bp, synthetic construct
  source 1..75: mol_type = other DNA
aatggaatgagttggcagataccgatcttcgtcatattttttcgatgaatccaaccagttcagaaagtatttata

SEQ ID NO: 654854 - DNA, 75 bp, synthetic construct
  source 1..75: mol_type = other DNA
ctggaaagtaatgacaagtatgtgagttttggccgtgcagctcttgcgcgtggtcgtgctgactggcttgttggc

SEQ ID NO: 654855 - DNA, 75 bp, synthetic construct
  source 1..75: mol_type = other DNA
tgtcggcagcgcgtggtggctcgcgtgttctgttgacggtcgggcgagttcagacaccaacgctggcgcttgttg

SEQ ID NO: 654856 - DNA, 75 bp, synthetic construct
  source 1..75: mol_type = other DNA
aagtgttaccagggcgctgaaaggtctggagagcaacgataaatatgtgaattttggtcgtgcagctcttgcgcg

SEQ ID NO: 654857 - DNA, 75 bp, synthetic construct
  source 1..75: mol_type = other DNA
aaggagcgtttgttgcggcatggcaggccagagaagatcagccagggcttgattcagagggaaggcttattgaca

SEQ ID NO: 654858 - DNA, 75 bp, synthetic construct
  source 1..75: mol_type = other DNA
caacaatcgtggctgaactgaaaaaacgaggcttcattgagaataagggtaaagacattatcagtacccgtttag

SEQ ID NO: 654859 - DNA, 75 bp, synthetic construct
  source 1..75: mol_type = other DNA
aaaaacagaaccagcctaagtcctactctttatctgatctcgttgcgcaggcatccagtagctacggttataccg

SEQ ID NO: 654860 - DNA, 75 bp, synthetic construct
  source 1..75: mol_type = other DNA
gtattatcgatcatcgctaacgacattgcctatgtgcgggaagcgtatcaggacagcggcctgacctttacgatc

SEQ ID NO: 654861 - DNA, 75 bp, synthetic construct
  source 1..75: mol_type = other DNA
agcaggaagcgccaaaagcggtttcgccggacaagaaaagcacaaagcagaccagcgcgggtgcgccggttgtcc

SEQ ID NO: 654862 - DNA, 75 bp, synthetic construct
  source 1..75: mol_type = other DNA
cctgcaggaccagtgtgcgatagtgcatcttgccggtgcccgcggtgattttgttgctgatgacaccattctgcc

SEQ ID NO: 654863 - DNA, 75 bp, synthetic construct
  source 1..75: mol_type = other DNA
tggctgtttgagctggtccgaacggacggtaatcactggtttgttgacgatcataaggtcgaagcggttaagtcg

SEQ ID NO: 654864 - DNA, 75 bp, synthetic construct
  source 1..75: mol_type = other DNA
ggtgaagcaggcgtttgatgatgaagaactgaaagtggcgctggggctgaattctgctaactccatcaacatcag

SEQ ID NO: 654865 - DNA, 75 bp, synthetic construct
  source 1..75: mol_type = other DNA
gtaaaagtggttatcctctatccacgcggcaaaatcagtcccctgcaagaaaagctgttctgtacgctgggcggc

SEQ ID NO: 654866 - DNA, 75 bp, synthetic construct
  source 1..75: mol_type = other DNA
gcaggcggtcacttcaacatggttgagaagaaaacggatatggataaccgtactgagatagcaatcagctggatc

SEQ ID NO: 654867 - DNA, 75 bp, synthetic construct
  source 1..75: mol_type = other DNA
tgctggcctgcatcgacgccaacccggaagacgtcacctgcatagaagtcgcgcctctctttgctgatatcctgc

SEQ ID NO: 654868 - DNA, 75 bp, synthetic construct
  source 1..75: mol_type = other DNA
aggtgctggcttacagtatgcctgctgcaatccccgcgccatgtcgcaccgcgccaaaaacacgggcaccaaagc

SEQ ID NO: 654869 - DNA, 75 bp, synthetic construct
  source 1..75: mol_type = other DNA
atgatattgtctgtttttataacggtaatttcaggccatgacaagccgcagccgccaggctgcctactcgacggt

SEQ ID NO: 654870 - DNA, 75 bp, synthetic construct
  source 1..75: mol_type = other DNA
actctaaagggtgcagtatatatactattatacaaccttattgaatcaacaatgagagaggctatctgccttata

SEQ ID NO: 654871 - DNA, 75 bp, synthetic construct
  source 1..75: mol_type = other DNA
gatgatgacgcgtgccgtaaaccgctcaaaaggttttaaccatccgctgttcaaaggcgaatgtgcgatgtggcg

SEQ ID NO: 654872 - DNA, 75 bp, synthetic construct
  source 1..75: mol_type = other DNA
aacggtctgaaaaaaatccgtttccccgagaagagcggcaagatgcaggatcacggcgttattgccgttgatacc

SEQ ID NO: 654873 - DNA, 75 bp, synthetic construct
  source 1..75: mol_type = other DNA
gcagtgcgaagatcctctcggcgtttattggtgatgaaatcccgcaggaaatcctggaagagcgcgtgcgcgcgg

SEQ ID NO: 654874 - DNA, 75 bp, synthetic construct
  source 1..75: mol_type = other DNA
tatcgcgagtgaaaataatctgcggggcgtcaaaattcatgttctggatggagagcgtttttctcttggtaatat

SEQ ID NO: 654875 - DNA, 75 bp, synthetic construct
  source 1..75: mol_type = other DNA
gacagcaaaggtgagcgtcacgtaatagttaacggcgtcctgatggtcaaacagggcaagaggggaagacgatga

SEQ ID NO: 654876 - DNA, 75 bp, synthetic construct
  source 1..75: mol_type = other DNA
actcggcggcgcaaaacgcatgttgggcggtaaaactggcacacgatggcgcgttatccctcaatcaatgtgatg

SEQ ID NO: 654877 - DNA, 75 bp, synthetic construct
  source 1..75: mol_type = other DNA
tcaaagcgttattaacgcaccttatctgcctgggtgatgatgagccgcaggtgacggcatatggcctggaagaag

SEQ ID NO: 654878 - DNA, 75 bp, synthetic construct
  source 1..75: mol_type = other DNA
gccgtcgccattgcgttgaaaaccggggcatcgtccgtgcgtttttatccgcgttatgaaggtaatttacgcgac

SEQ ID NO: 654879 - DNA, 75 bp, synthetic construct
  source 1..75: mol_type = other DNA
tatggcctggaagaagaggttgattactatgcgccggcgttccgctttgaagacgaagatgataatccgtggatc

SEQ ID NO: 654880 - DNA, 75 bp, synthetic construct
  source 1..75: mol_type = other DNA
cccttgcgctggtcgataatctctcgttgtttattgacgagatggctcatccgttacaaccggtacgcctgtccg

SEQ ID NO: 654881 - DNA, 75 bp, synthetic construct
  source 1..75: mol_type = other DNA
tagtcaactttcgcgttttactcgcgctctaggcgatatacttggcaattatgccgatgataagattgctcgcat

SEQ ID NO: 654882 - DNA, 75 bp, synthetic construct
  source 1..75: mol_type = other DNA
atgcaaaaacattcgctggtgttgtggcccttccacggcgtcttcggcagcggaccgacgctggatgaaaccttc

SEQ ID NO: 654883 - DNA, 75 bp, synthetic construct
  source 1..75: mol_type = other DNA
tgccctttgaagaatactggcattcaccggtaaaaatcatgctggttggacgtgaaaccgcaggctggaatacgc

SEQ ID NO: 654884 - DNA, 75 bp, synthetic construct
  source 1..75: mol_type = other DNA
tttttgtctacacatagtttccagtatcactttgcacagtttcccaaacatcctttttataaaaatggtataaac

SEQ ID NO: 654885 - DNA, 75 bp, synthetic construct
  source 1..75: mol_type = other DNA
tggtattcctgactgccggaattgttttatggacagctatgaatattatttttgatgcctgtattgattcgtgga

SEQ ID NO: 654886 - DNA, 75 bp, synthetic construct
  source 1..75: mol_type = other DNA
gctgggtgccagtgagatccatccgtcattcctctatctgtccctggcgattatcgtttgtggctatggtctgtt

SEQ ID NO: 654887 - DNA, 75 bp, synthetic construct
  source 1..75: mol_type = other DNA
cgcgatattttcggttataccgttccgaccgctatgtttcagtcgattaatgccttcgcggtcatgctgtgcggg

SEQ ID NO: 654888 - DNA, 75 bp, synthetic construct
  source 1..75: mol_type = other DNA
atgtgtatctaccttaacttaatgattttgataaaaatcattaggggattcatcagcactcaacaagaggcgatg

SEQ ID NO: 654889 - DNA, 75 bp, synthetic construct
  source 1..75: mol_type = other DNA
ccgaccagacatcgcaatcttcgtttgatgcttccggggcgatcaactactccatcaatgcgtatattgaagtat

SEQ ID NO: 654890 - DNA, 75 bp, synthetic construct
  source 1..75: mol_type = other DNA
gtgttcctggcgtgggtggtaaaagagagtgtcgcgggtaatcgtaccgtgcgcatctgggggaaatttgctctt

SEQ ID NO: 654891 - DNA, 75 bp, synthetic construct
  source 1..75: mol_type = other DNA
cagattacgcgcattgaaatccctggcgtgactggcgtattaactggcatttatatgctgctttccggcgcgatt

SEQ ID NO: 654892 - DNA, 75 bp, synthetic construct
  source 1..75: mol_type = other DNA
aaggatctatcgtcaacgtcgggtcgattggcgcacaggctgcgctgggtgactcgccgtcttctgcctattcca

SEQ ID NO: 654893 - DNA, 75 bp, synthetic construct
  source 1..75: mol_type = other DNA
tattgtgttacgagtctaatcacccatctgcacaatctcatgaagcaggttaatgtcgtggacaaccttagcgca

SEQ ID NO: 654894 - DNA, 75 bp, synthetic construct
  source 1..75: mol_type = other DNA
tctggcgacacgaggaaaaatgcataacgcttcgacactcgccggcatggccttcagccaggcggggcttggcct

SEQ ID NO: 654895 - DNA, 75 bp, synthetic construct
  source 1..75: mol_type = other DNA
atgcgtttttcccaccggttatttttactgctgatgcccctcctggcgagtgcaccattactcgctcaggaaacc

SEQ ID NO: 654896 - DNA, 75 bp, synthetic construct
  source 1..75: mol_type = other DNA
attaacaccgagctgctggcccagggaaaactcatgctcgacaacgcagcaggctgtatgccggatggtacggtg

SEQ ID NO: 654897 - DNA, 75 bp, synthetic construct
  source 1..75: mol_type = other DNA
gtagccaataccatgctgttcctgctgtctgataaagcatcatgggtcaccggagctatctgggacgtcgatgcc

SEQ ID NO: 654898 - DNA, 75 bp, synthetic construct
  source 1..75: mol_type = other DNA
agttcaatgccattctggatgcggcggcagaaccccagcagtccctgatagctgacagtatccccaattccgcca

SEQ ID NO: 654899 - DNA, 75 bp, synthetic construct
  source 1..75: mol_type = other DNA
tattgctcacgtcatcttttgaaggtttcccaatgaccctacttgaagccttgtcatgggggattccttgtatca

SEQ ID NO: 654900 - DNA, 75 bp, synthetic construct
  source 1..75: mol_type = other DNA
tatttcattgcttaataaaattggttggtcaagtcactttgaactcagagatggcatcagaaagacctataatta

SEQ ID NO: 654901 - DNA, 75 bp, synthetic construct
  source 1..75: mol_type = other DNA
gctggtttaggttacgattattcaattaatgactattataagataattgcagaagaaattggttatactgggagt

SEQ ID NO: 654902 - DNA, 75 bp, synthetic construct
  source 1..75: mol_type = other DNA
ggtcatttatatcaaccgggtgatatgaccagttttgtttctcttctcaataaatacatagccggtgaaattctc

SEQ ID NO: 654903 - DNA, 75 bp, synthetic construct
  source 1..75: mol_type = other DNA
cgatcgatgaattttaccaatcgaagtattacgatagattacataaggtaattatttctgctatttcccggagga

SEQ ID NO: 654904 - DNA, 75 bp, synthetic construct
  source 1..75: mol_type = other DNA
accatttagcgatcagtaccggcattaaacagcaaatgattaacaggggggtgccagagtccacgataaacgtta

SEQ ID NO: 654905 - DNA, 75 bp, synthetic construct
  source 1..75: mol_type = other DNA
ggcggcgctggcggatgctacattgcgtaccaacccacgtgcggctgatgccaatgcaattacagaactgcttga

SEQ ID NO: 654906 - DNA, 75 bp, synthetic construct
  source 1..75: mol_type = other DNA
ttgagattgaaacctgcgttgctattcccaccaccagcggcaccggttcggaagtgaccagcgcctgtgtcatca

SEQ ID NO: 654907 - DNA, 75 bp, synthetic construct
  source 1..75: mol_type = other DNA
cctcgtcacccgcagcaaaatgcataatgcctcgacgcttgccggaatggcctttagccaggctggtctggggtt

SEQ ID NO: 654908 - DNA, 75 bp, synthetic construct
  source 1..75: mol_type = other DNA
ctgaaagaaaaaagcagaatggtcaatacgcataccagatatggttcaggcggcactggcggatgcaacattgcg

SEQ ID NO: 654909 - DNA, 75 bp, synthetic construct
  source 1..75: mol_type = other DNA
tacgctgccgactcttgccaatgcgctgaaagaaaaaagcagaatggtcaatacgcataccagatatggttcagg

SEQ ID NO: 654910 - DNA, 75 bp, synthetic construct
  source 1..75: mol_type = other DNA
ggctacgctggcggatgccacactgcgtaccaatccacgagcggctgatgccatcgttatagcagaactgcttga

SEQ ID NO: 654911 - DNA, 75 bp, synthetic construct
  source 1..75: mol_type = other DNA
gtagcgcggtgaccaaagatcatattctgctggcagccgatgtgcgcctggcgctgcggcgcagcattacccatc

SEQ ID NO: 654912 - DNA, 75 bp, synthetic construct
  source 1..75: mol_type = other DNA
aacggcatcggacttatcattgcttcatggatcttctcgcgcctggcgcgacggattaacgcgatgacattgttg

SEQ ID NO: 654913 - DNA, 75 bp, synthetic construct
  source 1..75: mol_type = other DNA
caacaatatttactggctggtggtttggcgttttatgcaggggattgcgggggcaggtggttcggtgctttctcg

SEQ ID NO: 654914 - DNA, 75 bp, synthetic construct
  source 1..75: mol_type = other DNA
tgttggcggggcagaggctatgagtgcagtagggacgcaggaatctggaacggcgtctgcgttgatggggatgag

SEQ ID NO: 654915 - DNA, 75 bp, synthetic construct
  source 1..75: mol_type = other DNA
acatataaatggcgatgatcgttttgatttcaaatcaatggttatgaatatacgagacgatgccagagaggttgt

SEQ ID NO: 654916 - DNA, 75 bp, synthetic construct
  source 1..75: mol_type = other DNA
taaagtccacgctggcgtgcgcagcgcgatgatcgatggcagtcacttcccgtttgctgaaaacgtaaaactggt

SEQ ID NO: 654917 - DNA, 75 bp, synthetic construct
  source 1..75: mol_type = other DNA
gcgccattgtcgggaattggcggagaaacactgttaaaaatgagtctggcaattacggtgtgttatacgctggca

SEQ ID NO: 654918 - DNA, 75 bp, synthetic construct
  source 1..75: mol_type = other DNA
ccattaaacgctcagatgatttaaacagcggcagcttaaattttggtctgctattgggtgcctctaacccgagtt

SEQ ID NO: 654919 - DNA, 75 bp, synthetic construct
  source 1..75: mol_type = other DNA
gcgtggatgaacggcagagaatataaacaaattgcccccgacggaacgccaaagaaaaacagcgaatgtctctat

SEQ ID NO: 654920 - DNA, 75 bp, synthetic construct
  source 1..75: mol_type = other DNA
aatccaaagccatccagcgaatgtatgtataacagaaaagcaatagatgcctgggtctcttcaatgaaaaacaaa

SEQ ID NO: 654921 - DNA, 75 bp, synthetic construct
  source 1..75: mol_type = other DNA
ccgggatattcgtaaattaagcgagcaaggcctgattacgcgccatcacggtggcgcgggtcgggcttccagcgt

SEQ ID NO: 654922 - DNA, 75 bp, synthetic construct
  source 1..75: mol_type = other DNA
cttccagaatgatattttggcgttaaaacaggctttttcactgcctgatattgattatgccgatatttcccaacg

SEQ ID NO: 654923 - DNA, 75 bp, synthetic construct
  source 1..75: mol_type = other DNA
gctttagcccggagtttgcgcttaagtttaaccagaccgtgctgaaagagtcagagcgctttatcaatgagatgt

SEQ ID NO: 654924 - DNA, 75 bp, synthetic construct
  source 1..75: mol_type = other DNA
acgtccttttcttgcccgcggtaatcgcgttcgtcgctgccaacgctgtcttttgccagagaaattatgtctctg

SEQ ID NO: 654925 - DNA, 75 bp, synthetic construct
  source 1..75: mol_type = other DNA
ttgcagcgcgaactggagcagctaccgcaattgctcgaagatctggaggcgaagctggaagccctacagacgcaa

SEQ ID NO: 654926 - DNA, 75 bp, synthetic construct
  source 1..75: mol_type = other DNA
ttacaggcacaggtggcagatgcctccttcttcagtcagtctcatgaacatacgcaaaaagtgcttgccgatctg

SEQ ID NO: 654927 - DNA, 75 bp, synthetic construct
  source 1..75: mol_type = other DNA
cgaatatgcagaattcattaagtatgttattgagtggatgaaaccgctcttaaacaaatatcagaatatcatgat

SEQ ID NO: 654928 - DNA, 75 bp, synthetic construct
  source 1..75: mol_type = other DNA
ctgctggctgacggcgacagcgtgaccatcattaaagatctaaaagtgaaaggtagctcttcaatgctgaagatc

SEQ ID NO: 654929 - DNA, 75 bp, synthetic construct
  source 1..75: mol_type = other DNA
gatcgttaaagatgctaacggcaatctgctggctgacggcgacagcgttaccatcattaaagatctgaaggtgaa

SEQ ID NO: 654930 - DNA, 75 bp, synthetic construct
  source 1..75: mol_type = other DNA
gttccgctacaccgtgaagcacagtctgatttttgccagcgttatcggcattatcacgctgttgcaggcgtatgt

SEQ ID NO: 654931 - DNA, 75 bp, synthetic construct
  source 1..75: mol_type = other DNA
ctctgtttttttttattgtattcagcatggtttcaatttttctaacaggggcggttttatatgtatgcggggaat

SEQ ID NO: 654932 - DNA, 75 bp, synthetic construct
  source 1..75: mol_type = other DNA
atgttcgataccgagccaatgaagcccagcaataccggacgtttaattgctgatatcttgccggatactgtcgcg

SEQ ID NO: 654933 - DNA, 75 bp, synthetic construct
  source 1..75: mol_type = other DNA
gtgccccgttttctcctctgcgacaatggcggtttttcgacgctctctctcatgaccgaaaacgctgttctccag

SEQ ID NO: 654934 - DNA, 75 bp, synthetic construct
  source 1..75: mol_type = other DNA
tgttcgccgaaatactgaccacgctcggtcatattaatcgttcagcaattaacgtgttgttattgcgccatgaac

SEQ ID NO: 654935 - DNA, 75 bp, synthetic construct
  source 1..75: mol_type = other DNA
ctgaaattatgcttcctggtgtacgcaatccaacagcagcaatgcgcgttcagtacgaagttggtgcagacacca

SEQ ID NO: 654936 - DNA, 75 bp, synthetic construct
  source 1..75: mol_type = other DNA
atgttactcaccgatctccttcacggtaatacgcacctgctgtggctaaactttggcttgatggttaaccgcatc

SEQ ID NO: 654937 - DNA, 75 bp, synthetic construct
  source 1..75: mol_type = other DNA
tatgtaccgagttccgacaccttcattgagaaagatgcctcggtaaacgaacatatcgagcagatgcgtttgtcc

SEQ ID NO: 654938 - DNA, 75 bp, synthetic construct
  source 1..75: mol_type = other DNA
tcgtttcaacagtcccacgttttaccatctacccgaaaacgcactatgttacgccgcgtgaacgcattgtgcagg

SEQ ID NO: 654939 - DNA, 75 bp, synthetic construct
  source 1..75: mol_type = other DNA
tacgtaccaagctctgatacgtttattgagaaagatgcctcggtaaacgaacatattgaacagatgcgtctttca

SEQ ID NO: 654940 - DNA, 75 bp, synthetic construct
  source 1..75: mol_type = other DNA
aggcaactgcggccagcggcagaggagacggacggtattcgtcagggctgcatgatggcgctgaaaccagcacgg

SEQ ID NO: 654941 - DNA, 75 bp, synthetic construct
  source 1..75: mol_type = other DNA
ttggtgaagacaccctggaaataataacgctcgactcttctgcacctttcctgaaacaacgaattaacgccggga

SEQ ID NO: 654942 - DNA, 75 bp, synthetic construct
  source 1..75: mol_type = other DNA
atgagaaagagagatgattattatgacgggttaattgctggaggtactgtggcaattgctgttgcaacccttctg

SEQ ID NO: 654943 - DNA, 75 bp, synthetic construct
  source 1..75: mol_type = other DNA
ttccgcgatttatggtctgggcgatcctgatttatatctcaagatgatgctccatctcacggtcggtatgattat

SEQ ID NO: 654944 - DNA, 75 bp, synthetic construct
  source 1..75: mol_type = other DNA
tgtggttcagcgctctcccttaagccgaggcatggcaacatactggattctgaaaggagagaggcaggcgggtca

SEQ ID NO: 654945 - DNA, 75 bp, synthetic construct
  source 1..75: mol_type = other DNA
tgtggttcagcgctctcccttaagtcgaggcatggcaacatactggattctgaaaggagagaggcaggcgggcca

SEQ ID NO: 654946 - DNA, 75 bp, synthetic construct
  source 1..75: mol_type = other DNA
ggccgccagacgcaaagtgctgttagagaacaacaaacttctggaagagcagcggctgactcagcgaacccagtt

SEQ ID NO: 654947 - DNA, 75 bp, synthetic construct
  source 1..75: mol_type = other DNA
tatcgcggcgaccgggcgcgtaaagaaacgctggtggagtatggtttccgcctgccatcggcgctggataaccgt

SEQ ID NO: 654948 - DNA, 75 bp, synthetic construct
  source 1..75: mol_type = other DNA
tatgttccgagttcagatacgtttattgagaaagatgcctcagtaaacgaacatatcgaacagatgcgactttca

SEQ ID NO: 654949 - DNA, 75 bp, synthetic construct
  source 1..75: mol_type = other DNA
ggaaatagtccgggacgggcaaagggagaaacggcaggagggtatgccgcagggcggcccgctgtcgccgttact

SEQ ID NO: 654950 - DNA, 75 bp, synthetic construct
  source 1..75: mol_type = other DNA
gccacaccggtacgaacctggtgaagctggtaatcccattattcgcaggcgtggcggccgcggctgcgttcctgg

SEQ ID NO: 654951 - DNA, 75 bp, synthetic construct
  source 1..75: mol_type = other DNA
gccccatgaagcacaaaggctgattgatgaatgtccggagccattaaagtctgttgttgaatttgcactggcaac

SEQ ID NO: 654952 - DNA, 75 bp, synthetic construct
  source 1..75: mol_type = other DNA
ggccttgtatttatgattctcggagtctggactgcgtcctggcttgtgtatgttcgaccgcagcgtaaggcgcga

SEQ ID NO: 654953 - DNA, 75 bp, synthetic construct
  source 1..75: mol_type = other DNA
gcacctcaaaaacaccatcatacactaaatcagtaagttggcagcatcacctcgcgaaaaataatcgcatgtttt

SEQ ID NO: 654954 - DNA, 75 bp, synthetic construct
  source 1..75: mol_type = other DNA
tgctttcagcactctgttaaccccggttattgatgaattaaacgcggttatggaaatacacgacaagacccgcgc

SEQ ID NO: 654955 - DNA, 75 bp, synthetic construct
  source 1..75: mol_type = other DNA
ttaacgccagtaattaacgaattaaatacggtgatggcaattcacgagaataataaagcgcatcacaccggagaa

SEQ ID NO: 654956 - DNA, 75 bp, synthetic construct
  source 1..75: mol_type = other DNA
cctgctattgtcttcaatggtgatcgtgctcgctttgtatcagagattataaaaaagaaagaagcaatggaagaa

SEQ ID NO: 654957 - DNA, 75 bp, synthetic construct
  source 1..75: mol_type = other DNA
gaaaaccattgccgcgcgttttgtgccagaaggttctaccgcttacgaatggtttgagtttatcggccatccgtt

SEQ ID NO: 654958 - DNA, 75 bp, synthetic construct
  source 1..75: mol_type = other DNA
gctgagtgataacgatgcagataacgcgtttgttgtactctcggcaaaagatatgagcagtgatgtcaaaacagt

SEQ ID NO: 654959 - DNA, 75 bp, synthetic construct
  source 1..75: mol_type = other DNA
aatgtttgcagccattcagacattactatcgcctgttattgatgaactggataaggcaatggcaattcacgaaaa

SEQ ID NO: 654960 - DNA, 75 bp, synthetic construct
  source 1..75: mol_type = other DNA
tgtggttcagcgctctcccttaagacgaggcatggcaacatactggtttctgaaaggagagaggcaggcgggaca

SEQ ID NO: 654961 - DNA, 75 bp, synthetic construct
  source 1..75: mol_type = other DNA
tgcggtcattacgctggcgctgggttggaaggggcagccgcttttccctaaaggggcattcacggtggacgagat

SEQ ID NO: 654962 - DNA, 75 bp, synthetic construct
  source 1..75: mol_type = other DNA
ggtgaggtgtcggtaaaaatgggaaaactgctgtttctcaaagcggggcagggggtgacggccagcggtaaaaaa

SEQ ID NO: 654963 - DNA, 75 bp, synthetic construct
  source 1..75: mol_type = other DNA
gaaggtaaaactgaaacgcaaaaagaaagagaaacacctgcgcgcactggagcacccgaaagcgaaaccggtcac

SEQ ID NO: 654964 - DNA, 75 bp, synthetic construct
  source 1..75: mol_type = other DNA
gtttctgactatctggcaaaagccaaactgacaccgtatctcgatgaacttggctttaatcttgtaggctatggc

SEQ ID NO: 654965 - DNA, 75 bp, synthetic construct
  source 1..75: mol_type = other DNA
aatgatgacatcatcatcttgacgacggaggaagagtgccacaaaacaccagacattgagcaaactttgaagccc

SEQ ID NO: 654966 - DNA, 75 bp, synthetic construct
  source 1..75: mol_type = other DNA
acaaaggcaacaaaactccggcattcagcatcagtattgaaggcagggatatcactactgtgctggacaaccgcc

SEQ ID NO: 654967 - DNA, 75 bp, synthetic construct
  source 1..75: mol_type = other DNA
aaatggccgtgagaaccattgtttaaccttttgtggcgaaccgctgcaacaggcacaagtgctttacgcactatg

SEQ ID NO: 654968 - DNA, 75 bp, synthetic construct
  source 1..75: mol_type = other DNA
gcagtgggaacgcctgcaacgcggcgttgcgtcattctcgctacaactggcggaagggcgggcagatctctacac

SEQ ID NO: 654969 - DNA, 75 bp, synthetic construct
  source 1..75: mol_type = other DNA
tcggggctttgaagcggaccaacttgatctggagctggacgacgccgacggaaaaatcgtgctgccgcgccgtgg

SEQ ID NO: 654970 - DNA, 75 bp, synthetic construct
  source 1..75: mol_type = other DNA
ctaatgagagtgacggtagttttttgatgcggttggcgcgccagtacggtgctattgcgtcggtgaaaaatggca

SEQ ID NO: 654971 - DNA, 75 bp, synthetic construct
  source 1..75: mol_type = other DNA
cgacgcgtacacgggcgtaactgcatactggcttgatctcaactttggcaagaaaccatccactaccgtgaagaa

SEQ ID NO: 654972 - DNA, 75 bp, synthetic construct
  source 1..75: mol_type = other DNA
tcacgatgttggcgggggagggtttaccacgtcgctggaactggaagtaaaaatcgacgactggacagcggagag

SEQ ID NO: 654973 - DNA, 75 bp, synthetic construct
  source 1..75: mol_type = other DNA
cagtcggtttagcgtcgtgccgccaggcacaggcatttgccatcaggttaacctcgaatatctcggcaaagcagt

SEQ ID NO: 654974 - DNA, 75 bp, synthetic construct
  source 1..75: mol_type = other DNA
ttccatgcttatcccggatgttgtgggctttaaactcagcggaaaattacgtgaaggtatcaccgccacagactt

SEQ ID NO: 654975 - DNA, 75 bp, synthetic construct
  source 1..75: mol_type = other DNA
gcgaaaaaagccgtaactctgggcctcaagcggcaaccgtgggtcaaagcgtcgctggcaccgggttcgaaagtc

SEQ ID NO: 654976 - DNA, 75 bp, synthetic construct
  source 1..75: mol_type = other DNA
gcaaggcgtgacgcgtaaaacattagggctgaccggggaagagaagattgatattgtcgatctgcaaaatctaca

SEQ ID NO: 654977 - DNA, 75 bp, synthetic construct
  source 1..75: mol_type = other DNA
tcaaaaggtttgctttcccaaaccgaatatgatgttattagtaatgttttaattgagatctctatttatatgatg

SEQ ID NO: 654978 - DNA, 75 bp, synthetic construct
  source 1..75: mol_type = other DNA
ataaccttattgatagatatgtaagcaaggaagatcataaaaaacgcagacacaggccgttaaaactgtatagtg

SEQ ID NO: 654979 - DNA, 75 bp, synthetic construct
  source 1..75: mol_type = other DNA
cgtaacccgggcgatgaaccgatttttaccagtacattagaactggatatgaatgacgttgaagccagtcttgcc

SEQ ID NO: 654980 - DNA, 75 bp, synthetic construct
  source 1..75: mol_type = other DNA
gtctccacagaaatgttccgcaaagagtacgcagaagtttttgaaggcacagcagagtggaaggaaattaacgtc

SEQ ID NO: 654981 - DNA, 75 bp, synthetic construct
  source 1..75: mol_type = other DNA
atcgcctttctttgatgagatgcaggtaacaccagcgccagtggaagacattcacggtgcgcgaatcctggcaat

SEQ ID NO: 654982 - DNA, 75 bp, synthetic construct
  source 1..75: mol_type = other DNA
gatcaacggccttggcgtgctggggtggggcgtgggtgggatcgaagcagaagccgcaatgttaggccagccggt

SEQ ID NO: 654983 - DNA, 75 bp, synthetic construct
  source 1..75: mol_type = other DNA
gaatgccacgcataaagatcgccagccggtcgattatgttatgaacggacatcagtatcagttacctgatggcgc

SEQ ID NO: 654984 - DNA, 75 bp, synthetic construct
  source 1..75: mol_type = other DNA
tcgccgccgctggtggttgcctatgcgctggcgggaaatatgaatatcaacctggcttctgagcctattggtcat

SEQ ID NO: 654985 - DNA, 75 bp, synthetic construct
  source 1..75: mol_type = other DNA
taccctgccgttgtcgtatcgacaccgcgacggagttgacctactaccagaacgacggcattttgcattatgtca

SEQ ID NO: 654986 - DNA, 75 bp, synthetic construct
  source 1..75: mol_type = other DNA
atgcaaaagacgtaagaccaatatttgataccagacctctccgcgccgccatgattgtatttctcatgatgcagg

SEQ ID NO: 654987 - DNA, 75 bp, synthetic construct
  source 1..75: mol_type = other DNA
atgtttgatccatgcgaaaatcttaaggtatcagaaaaaatactggttgactgttataaacgagggggcgactta

SEQ ID NO: 654988 - DNA, 75 bp, synthetic construct
  source 1..75: mol_type = other DNA
tcaatacggtgttaatgcagataagcttttctcgccatgcacaaatcttgctgttttcgaaaaggtgctgcttga

SEQ ID NO: 654989 - DNA, 75 bp, synthetic construct
  source 1..75: mol_type = other DNA
cggttttctcgaccgcttcagcggtgcattggtgatttatggctcggtgggcgcagtagaagaagcgttatcaca

SEQ ID NO: 654990 - DNA, 75 bp, synthetic construct
  source 1..75: mol_type = other DNA
tgtaaaccggaaacatcagggaataataccaacaaatggtattacggaaacgctgatacaacttttgagccatta

SEQ ID NO: 654991 - DNA, 75 bp, synthetic construct
  source 1..75: mol_type = other DNA
gcggttggcgtggtgaaaggcgactggatggcgctggtgcaggcggttaaaaacgactccagctctaacgtgctc

SEQ ID NO: 654992 - DNA, 75 bp, synthetic construct
  source 1..75: mol_type = other DNA
caaagccgaagatctggtcgatgtgctgaagcaggtcagcggcacgctcacggcggctaaagaagaggcggaagg

SEQ ID NO: 654993 - DNA, 75 bp, synthetic construct
  source 1..75: mol_type = other DNA
aaaccgtcggcgctaaccttaataaaaccatcattatggggccgggcgttcaggggaaagtgagtattcgcacca

SEQ ID NO: 654994 - DNA, 75 bp, synthetic construct
  source 1..75: mol_type = other DNA
cggatgagcgtgaccaactcaaatccattcaggccgatatcgccgcgaaagagcgcgcggtacgccaaaagcaac

SEQ ID NO: 654995 - DNA, 75 bp, synthetic construct
  source 1..75: mol_type = other DNA
cgccagcgttcttagcgctggcgtattgttgtgcactttttccgcccacgcggatgaccgcgaccaactcaagtc

SEQ ID NO: 654996 - DNA, 75 bp, synthetic construct
  source 1..75: mol_type = other DNA
acgcaccaacagcgtgattgtcagtggtgaccccgccacgcgagacaaaatgcgccgcctgatccgtcggctgga

SEQ ID NO: 654997 - DNA, 75 bp, synthetic construct
  source 1..75: mol_type = other DNA
cccgcattacaaaaaatggtttgctcgcgacgatcgttacgtttatgcattcgatggtgcgcagctttggcgtta

SEQ ID NO: 654998 - DNA, 75 bp, synthetic construct
  source 1..75: mol_type = other DNA
aatattgccggaatactccggtacaacattgcattaagcgagcgaaacaatcgcgctgccgtacccgctatagag

SEQ ID NO: 654999 - DNA, 75 bp, synthetic construct
  source 1..75: mol_type = other DNA
ccgtttcttctgtattccaccgttatttatcctggatagcgataaaaataaaaaaaatctcacagtgcatattca

SEQ ID NO: 655000 - DNA, 75 bp, synthetic construct
  source 1..75: mol_type = other DNA
ctatttctctgacaacaaagatgtagatggcgaccagacctacatgcgtctttgcgtcttggcttcaaaggtgaa

SEQ ID NO: 655001 - DNA, 75 bp, synthetic construct
  source 1..75: mol_type = other DNA
tctgagtgttgctgaggttgagtcgctgccggacggtgcggatatcgacggcaactgggtgttcgacggggagag

SEQ ID NO: 655002 - DNA, 75 bp, synthetic construct
  source 1..75: mol_type = other DNA
gtgtctctcactgtacctccgatggaaagttcgtttgcaatgatggaactattagtaaatcaaaaaaaatctgta

SEQ ID NO: 655003 - DNA, 75 bp, synthetic construct
  source 1..75: mol_type = other DNA
cggctgggattggtgctacgtgacgcgcattttctttatatcgatgggcaccgttttgataacccagagagtttt

SEQ ID NO: 655004 - DNA, 75 bp, synthetic construct
  source 1..75: mol_type = other DNA
ggaaaaataccgcttgctttacaaaagcagcttactgaaggttgtcccctggagacttttcttattgaaaagccc

SEQ ID NO: 655005 - DNA, 75 bp, synthetic construct
  source 1..75: mol_type = other DNA
aatcagcaggcgaaaaaggagatgtagaagctcaatatgccttgggtctcatgtatttatatagagaaatactgg

SEQ ID NO: 655006 - DNA, 75 bp, synthetic construct
  source 1..75: mol_type = other DNA
aagcgccgcctaaatatcagtttgaagaaaatggtgaaacgaaatactggtctggtcgtgggcgtgcgccaaaac

SEQ ID NO: 655007 - DNA, 75 bp, synthetic construct
  source 1..75: mol_type = other DNA
aaaaacgttaccaaaagcgccgcccaagtatcaatttgaagaaaatggtgaaacgaaatactggtctggtcgtgg

SEQ ID NO: 655008 - DNA, 75 bp, synthetic construct
  source 1..75: mol_type = other DNA
ggccgaacgattgctggttgccggtgggattacagcaaggcgaaaactggtgcagtttgactgggctgacttgcc

SEQ ID NO: 655009 - DNA, 75 bp, synthetic construct
  source 1..75: mol_type = other DNA
gcgaagtgctgattttcgtgaaacgctgaatacccgccgtgaaaaatcgtggcacaagaccaccgttggggaagt

SEQ ID NO: 655010 - DNA, 75 bp, synthetic construct
  source 1..75: mol_type = other DNA
taacgcttgagcgtgtggtttccgccattgcacaccgatacggtctgaaagcacaaatcagcgaaatgctgatgc

SEQ ID NO: 655011 - DNA, 75 bp, synthetic construct
  source 1..75: mol_type = other DNA
taaagggacatatattgtggatgaagtttcgcatgacgggccaccggacaagcttatcatcggagccagtagtgc

SEQ ID NO: 655012 - DNA, 75 bp, synthetic construct
  source 1..75: mol_type = other DNA
ggcaggacagctacccggaagataagccgctggaaagtctgctggatattctgaagctcggcttccgtggctacc

SEQ ID NO: 655013 - DNA, 75 bp, synthetic construct
  source 1..75: mol_type = other DNA
ctgacttctctggtttcctgggttgtatcgtttattccgcgccgcccggagcggagcgaaacggcacaaccatcg

SEQ ID NO: 655014 - DNA, 75 bp, synthetic construct
  source 1..75: mol_type = other DNA
aaactgaagatggcattgggtgaagacctgtcggataaacccgtggagcatatagaccagaccaatgagagtgac

SEQ ID NO: 655015 - DNA, 75 bp, synthetic construct
  source 1..75: mol_type = other DNA
cgtattgatgccgcgttccaggatgaggtcgctgccagcgaaggtttcctcaagcagccagtcggtaaagattac

SEQ ID NO: 655016 - DNA, 75 bp, synthetic construct
  source 1..75: mol_type = other DNA
caaatcgatatgcagcgacgtgttgcctgggtaaaccctgaagacagtaagtcaaaccgcgctattggggtcgca

SEQ ID NO: 655017 - DNA, 75 bp, synthetic construct
  source 1..75: mol_type = other DNA
taaaaaactatgatgacaggacgagtaccctggtaaagcttcctgatttcagcatcacgctgaacaacaacgaac

SEQ ID NO: 655018 - DNA, 75 bp, synthetic construct
  source 1..75: mol_type = other DNA
ctgtatccggagatgcacggcacggtatccgggttcaagagcgacattgacaatcaggactggattatttcgcgc

SEQ ID NO: 655019 - DNA, 75 bp, synthetic construct
  source 1..75: mol_type = other DNA
attaaaaacggtatgcttctgtttatcacgccgggcaagggagtgacgcagagcggcaagccgctgccggtgatc

SEQ ID NO: 655020 - DNA, 75 bp, synthetic construct
  source 1..75: mol_type = other DNA
aacgtttcgcttatgacaatcgctatgtttatacctggatcggtagccaactttatcgaaccgcatcgccctgtc

SEQ ID NO: 655021 - DNA, 75 bp, synthetic construct
  source 1..75: mol_type = other DNA
gctgggtgccagtgagatccatccgtcattcctctatctgtccctggcgattatcgtctgcggctatggtctgtt

SEQ ID NO: 655022 - DNA, 75 bp, synthetic construct
  source 1..75: mol_type = other DNA
caatgcaggagtctgccacccgtcagcgtgaacaggatactattcggaagtttgctgaagagagtaaatctgaat

SEQ ID NO: 655023 - DNA, 75 bp, synthetic construct
  source 1..75: mol_type = other DNA
ctgccggaatcactcatggtcctcagccgtcagcgtctggttcagcttatgcgtctgactgaagacgtaccggat

SEQ ID NO: 655024 - DNA, 75 bp, synthetic construct
  source 1..75: mol_type = other DNA
cgcttgccatgcaatgcgctgccagcgttcatcctgacacaacgcacgaagtcgccagggttgaatcaggtttta

SEQ ID NO: 655025 - DNA, 75 bp, synthetic construct
  source 1..75: mol_type = other DNA
attccatgaattaggattttcggtggcatggcgattcccggaaggtacatcggaagaacagattgataaaaccgt

SEQ ID NO: 655026 - DNA, 75 bp, synthetic construct
  source 1..75: mol_type = other DNA
atgaccattctggattatatcgccgccaatccggggtgtagcggtggagaaatcgccgcagcactgaatacccca

SEQ ID NO: 655027 - DNA, 75 bp, synthetic construct
  source 1..75: mol_type = other DNA
cgtctctggcaggaaacgcacgatcaccgggaaatatccggtgcgacccggaaaaatgaaatgtatccgggtggt

SEQ ID NO: 655028 - DNA, 75 bp, synthetic construct
  source 1..75: mol_type = other DNA
tgaccgcgaggcgtatacgggggtacgcgcctactggcttgatcttaattacgggaaaaagaaaaaagtcagcgt

SEQ ID NO: 655029 - DNA, 75 bp, synthetic construct
  source 1..75: mol_type = other DNA
cgaaatgcatggcacggtaacaggatttaaaagcgagattgataatcaggactggattattgcaaaagccgagca

SEQ ID NO: 655030 - DNA, 75 bp, synthetic construct
  source 1..75: mol_type = other DNA
tccggcattagccaaggagttggtggtagtagtgacggtgtaacatcatcttctggttatgatgtttcggcagaa

SEQ ID NO: 655031 - DNA, 75 bp, synthetic construct
  source 1..75: mol_type = other DNA
aaaaaactgactggtcgggatgaacaggatatccggcgtctctggcaggagaaagtggatgcaaggcaggagtct

SEQ ID NO: 655032 - DNA, 75 bp, synthetic construct
  source 1..75: mol_type = other DNA
gatatcgtcacactggataatcctggtttggtgatagataaacgctttaacgcgggaagaactcacggctattta

SEQ ID NO: 655033 - DNA, 75 bp, synthetic construct
  source 1..75: mol_type = other DNA
gttgatgatgaaagtcgggttcagtttgttaatcagactgccggtaatgactctaacttattgatagtgttttat

SEQ ID NO: 655034 - DNA, 75 bp, synthetic construct
  source 1..75: mol_type = other DNA
acttggtgttgtgcaaaataatattattgggaaacctatccgtttcagaccattaacatttgagagtaattttac

SEQ ID NO: 655035 - DNA, 75 bp, synthetic construct
  source 1..75: mol_type = other DNA
tcctgttcggacgtgagaagggcttcatcccggaaatgagtgatgaacagttctatggctacatgttggcaaaca

SEQ ID NO: 655036 - DNA, 75 bp, synthetic construct
  source 1..75: mol_type = other DNA
cctcgatatctccacgaaaaaactgctcggcgatgaagcaggaaaagaatcgctgtcgcaacgtattcagatgat

SEQ ID NO: 655037 - DNA, 75 bp, synthetic construct
  source 1..75: mol_type = other DNA
gattgttggttcgctgtctggcggcgtgatgatggcgatgaatttctctttcgacaccctgtttttcattatcgc

SEQ ID NO: 655038 - DNA, 75 bp, synthetic construct
  source 1..75: mol_type = other DNA
atctgcaaactctggtcttcctgcgctttctcaccggcctgggtctgggcggcgcgatgccgaacaccatcacca

SEQ ID NO: 655039 - DNA, 75 bp, synthetic construct
  source 1..75: mol_type = other DNA
aagtgctcgccagcggtacaccgcaggagttggttgagaaacgcggagccgccagtctggaagaggcatttatcg

SEQ ID NO: 655040 - DNA, 75 bp, synthetic construct
  source 1..75: mol_type = other DNA
tggaagaggcggaacgcttcgactggctggtagcgatgaatgccggagaagtgctggcaactggcagcgccgaag

SEQ ID NO: 655041 - DNA, 75 bp, synthetic construct
  source 1..75: mol_type = other DNA
tattcgccagcggcagagcaatatgagcgtgctggttgccaccgcctatatggaagaggcggaacgcttcgactg

SEQ ID NO: 655042 - DNA, 75 bp, synthetic construct
  source 1..75: mol_type = other DNA
agaccaatctttcgctaccgcagattaactacaagcgtctgcgtctgttaccgaatttgttaattgacccaacaa

SEQ ID NO: 655043 - DNA, 75 bp, synthetic construct
  source 1..75: mol_type = other DNA
cgctcggcattcgccagcggctatcgctggcggtggcggtgattcatcgcccggagatgttaatcctcgatgagc

SEQ ID NO: 655044 - DNA, 75 bp, synthetic construct
  source 1..75: mol_type = other DNA
cacgctggaagaagcatttataaatctgttaccgcaagcacaacgccaggcgcatcaggcggtagtgatcccacc

SEQ ID NO: 655045 - DNA, 75 bp, synthetic construct
  source 1..75: mol_type = other DNA
ttattgattacatcgatgttgaatggagtttaagagcaaagagtaaaggttataatttatatatatcaccaaacg

SEQ ID NO: 655046 - DNA, 75 bp, synthetic construct
  source 1..75: mol_type = other DNA
ctggatctcactgagttggctaaagcacaatccggtgttgctaaggtcgttctggaatctgtccaggatatgctt

SEQ ID NO: 655047 - DNA, 75 bp, synthetic construct
  source 1..75: mol_type = other DNA
tgggcgtactgatggataaattcaatcctttccgcgtgttggcgctgagctatgccataggcgttgtatgcatcg

SEQ ID NO: 655048 - DNA, 75 bp, synthetic construct
  source 1..75: mol_type = other DNA
tgtgcccgcggtgatcagtgcggtgatgttaaccctgctgatcatcgtggttcgccagtcgacctctgtccctga

SEQ ID NO: 655049 - DNA, 75 bp, synthetic construct
  source 1..75: mol_type = other DNA
ttggtgccaggaaaaacagccttcgtgcgaaggtgtttgttcgtgatactgctgctggttaccttgaacccttcg

SEQ ID NO: 655050 - DNA, 75 bp, synthetic construct
  source 1..75: mol_type = other DNA
agattgttgatgaagtctgcgattttgtggtgaatcaacaggctgtgttcctgggcggtcactacatcctgcagg

SEQ ID NO: 655051 - DNA, 75 bp, synthetic construct
  source 1..75: mol_type = other DNA
taataaactctataaaagagcggggcgcgaaacttgccattcccggaattgtggatcttaccgaactggctaacg

SEQ ID NO: 655052 - DNA, 75 bp, synthetic construct
  source 1..75: mol_type = other DNA
cactggcaactcaccgcaggcgatctcgccccgctttttggcgcgggtctgctaggattaaccgcaggcgcactg

SEQ ID NO: 655053 - DNA, 75 bp, synthetic construct
  source 1..75: mol_type = other DNA
attacatcgatgttgaatggagtttaagagcaaagagtaaaggttataatttatatatatcaccaaacgcaaaaa

SEQ ID NO: 655054 - DNA, 75 bp, synthetic construct
  source 1..75: mol_type = other DNA
attaaaacaataaaatcggctttttatggagtcattgatggaattgcaggtcgatttggccctctaaaacgtaaa

SEQ ID NO: 655055 - DNA, 75 bp, synthetic construct
  source 1..75: mol_type = other DNA
ccacgctggcaggtacgccgccagttaccgcaggcggtgattgcaagaaccgtgagcgccattacccgtgaatgt

SEQ ID NO: 655056 - DNA, 75 bp, synthetic construct
  source 1..75: mol_type = other DNA
cgccaactagccattacgttgatgctgtgggtagtgttctttatgagcctgctgattatttacctgctttcaagc

SEQ ID NO: 655057 - DNA, 75 bp, synthetic construct
  source 1..75: mol_type = other DNA
agtcgagccacgggcgtgagctggtcaaatgctatcggccgctgcggcgcgattgttggttcgctgtctggcggc

SEQ ID NO: 655058 - DNA, 75 bp, synthetic construct
  source 1..75: mol_type = other DNA
ccaccgcaaaccacctcattaaacaaatcgccgggttccacctggcagacaaagacgcgcataaacgtgctgatg

SEQ ID NO: 655059 - DNA, 75 bp, synthetic construct
  source 1..75: mol_type = other DNA
tgcaaattacgctgcccgctgacgatcagcaaaaagcgcagaccaccgcagaaaacatcattaatacgctggtta

SEQ ID NO: 655060 - DNA, 75 bp, synthetic construct
  source 1..75: mol_type = other DNA
tggagaagttaaaaaagctgctggcgctggctaaatctgacaacccccatgaagctgcactggccctacaacgcg

SEQ ID NO: 655061 - DNA, 75 bp, synthetic construct
  source 1..75: mol_type = other DNA
ttgatgatggtcgtatctatcaacgtccgtttggcggccagtcgaaaaacttcggcggcgagcaggcggcacgta

SEQ ID NO: 655062 - DNA, 75 bp, synthetic construct
  source 1..75: mol_type = other DNA
taataacattagatatgaaaaaaacaaaagtgctgaatgtcgaatcattgttatcgctaatccggtaatgctgcc

SEQ ID NO: 655063 - DNA, 75 bp, synthetic construct
  source 1..75: mol_type = other DNA
gcatcatctccgctaaaggccagacggcgtactcttccgtcattctgggtaacgtgggaaatcaaatgctgacga

SEQ ID NO: 655064 - DNA, 75 bp, synthetic construct
  source 1..75: mol_type = other DNA
ggctgcagggggtgagcctgacctatggcagcagcgtggcgctcgatgaccttacgctggacctgcccgccggtc

SEQ ID NO: 655065 - DNA, 75 bp, synthetic construct
  source 1..75: mol_type = other DNA
aaagccagtggcgcggcgaaagccgcctgggctaactcctccttcaaaattattctgcgccagaaccgcgatgcg

SEQ ID NO: 655066 - DNA, 75 bp, synthetic construct
  source 1..75: mol_type = other DNA
ggctggtctggcttctgccggcctgtggtcgacgcgggtggataaacacgggctggtttctctggtgcgcgaact

SEQ ID NO: 655067 - DNA, 75 bp, synthetic construct
  source 1..75: mol_type = other DNA
atttcccagagcggccagacctgtgcgctgctctctaaagtcttcccgacacgttcccataccgtttctgcgcaa

SEQ ID NO: 655068 - DNA, 75 bp, synthetic construct
  source 1..75: mol_type = other DNA
ggatctggtgaaaaatcaggatggcgcggtggttggttgtaccgcactgtgcatcgaaaccggtgaagtggttta

SEQ ID NO: 655069 - DNA, 75 bp, synthetic construct
  source 1..75: mol_type = other DNA
actggccgacaggcagtctccgtccaccgcgctacatgccaggcctgatgaacatcatccgcgaggtatttggtg

SEQ ID NO: 655070 - DNA, 75 bp, synthetic construct
  source 1..75: mol_type = other DNA
tgttcatccagggtcgtaagaacggccgggactggttaccggccggacgaaggaccggccaacgcgcagcggcgg

SEQ ID NO: 655071 - DNA, 75 bp, synthetic construct
  source 1..75: mol_type = other DNA
cgccttgctgactgtaagatgaaattgcctgatatccttccgggcagtcataacgcgctagtcaggttacagcag

SEQ ID NO: 655072 - DNA, 75 bp, synthetic construct
  source 1..75: mol_type = other DNA
gtttcgcctgatgatccggcgtttttgcagccagagaaatttattggtccggtttatcagccagaagaacaagag

SEQ ID NO: 655073 - DNA, 75 bp, synthetic construct
  source 1..75: mol_type = other DNA
atttgcagtggcggcggcggtgtgcctgtgacggaagacggggcagggagtgaagcagtgattgataaagatctc

SEQ ID NO: 655074 - DNA, 75 bp, synthetic construct
  source 1..75: mol_type = other DNA
aaagcgtcgctgcttcctgagtatatccccggtgtttatgacaacctcgagcggctggcgcaactctgccgcccg

SEQ ID NO: 655075 - DNA, 75 bp, synthetic construct
  source 1..75: mol_type = other DNA
tggaagacgctgcgatgggggcaatcctcaaccagaaggcggaaaccgaaggctgggatatgacgccgattaaat

SEQ ID NO: 655076 - DNA, 75 bp, synthetic construct
  source 1..75: mol_type = other DNA
atacgcccgacgcttgtcgattaccgcggctgtgcgtgggtattttccacaccaaacggtatcgacgagagcaat

SEQ ID NO: 655077 - DNA, 75 bp, synthetic construct
  source 1..75: mol_type = other DNA
atgagcaaagaaaacatcgtcaccctggaaaaccccatcaaacgcggcgagcaggtcatcgaaaaaatcaccctg

SEQ ID NO: 655078 - DNA, 75 bp, synthetic construct
  source 1..75: mol_type = other DNA
agtcaccctgattgagccgaacgccggtaccctgcgcggtgtcagtctggcagcggtggcgcagtccgaagtcga

SEQ ID NO: 655079 - DNA, 75 bp, synthetic construct
  source 1..75: mol_type = other DNA
gcaggtcatcgaacaggtcacgctgatgaaacccaatgccgggacgctgcgcggtgtcagtctggctgcggtcgc

SEQ ID NO: 655080 - DNA, 75 bp, synthetic construct
  source 1..75: mol_type = other DNA
tcaaacaacgcatcattgccggtgaaattacttacgagcagggtagagcggagatattcgaatatcatgctcaac

SEQ ID NO: 655081 - DNA, 75 bp, synthetic construct
  source 1..75: mol_type = other DNA
ccctgggcaccggaagacatcgtaaatgttatgcgcatccggatgatacccaacgctgcattaagattgtctacc

SEQ ID NO: 655082 - DNA, 75 bp, synthetic construct
  source 1..75: mol_type = other DNA
gaaagatctgcaacctcgtgagagcaaaacgctggccctcacttcgcgccaaggcttaatccagctggtgttgtt

SEQ ID NO: 655083 - DNA, 75 bp, synthetic construct
  source 1..75: mol_type = other DNA
accagcatgcaaagatgtggtatgaaaaagcggctgctcaaaatgatgagcgtgctcaggtcaatctcgctgttc

SEQ ID NO: 655084 - DNA, 75 bp, synthetic construct
  source 1..75: mol_type = other DNA
tgaatcaaaaatggcgctgatccaaaaaaatataaataccattattggttctgaccatgggattaatgtttttat

SEQ ID NO: 655085 - DNA, 75 bp, synthetic construct
  source 1..75: mol_type = other DNA
aatttctgagccagagcggtaagatggttaccgccgccgcgctgtttggtccctcagtgccgctcgcccatgcgg

SEQ ID NO: 655086 - DNA, 75 bp, synthetic construct
  source 1..75: mol_type = other DNA
tcctggactggtctggtttacccaaccgaatgctacttcccgacctggaaagtggaagaagatcacttcaccgtt

SEQ ID NO: 655087 - DNA, 75 bp, synthetic construct
  source 1..75: mol_type = other DNA
agtggaagaagatcacttcaccgttaaagcactggtgacctgtgccgcgatgtacgctgcaatcccgttaagctg

SEQ ID NO: 655088 - DNA, 75 bp, synthetic construct
  source 1..75: mol_type = other DNA
tgtggcgaatcagcaggctgtattcctcggcggtcactacatccttcaccggggccatactgcgggcgattcggg

SEQ ID NO: 655089 - DNA, 75 bp, synthetic construct
  source 1..75: mol_type = other DNA
caaggtgctgacggataacccgaaactgtctgacggtaaggcgctgttccatgccgatcacaaaaatattgccac

SEQ ID NO: 655090 - DNA, 75 bp, synthetic construct
  source 1..75: mol_type = other DNA
aatgcgcccgtatgtcactgacagagcgggggattggggtggccagttataaccccatgcagatggtggggctgg

SEQ ID NO: 655091 - DNA, 75 bp, synthetic construct
  source 1..75: mol_type = other DNA
ccaacactcattttaagccttgcttttttaagtggtcttttctatttaactgaaaccattttcattattcataaa

SEQ ID NO: 655092 - DNA, 75 bp, synthetic construct
  source 1..75: mol_type = other DNA
ctctgccggattattttaccgggcgctttgaagataaaagccgtattttgcgcattatctccgcgctggttattt

SEQ ID NO: 655093 - DNA, 75 bp, synthetic construct
  source 1..75: mol_type = other DNA
agtgatcaaacaaaagagcatcgaaaacgttgatatgctcaaagggctgaactttgtcgccattatctcactgat

SEQ ID NO: 655094 - DNA, 75 bp, synthetic construct
  source 1..75: mol_type = other DNA
aaacaagcaagaacttggtttgggctggcatgtaagaatgggcataaggaaggatgtgaacgatttaacgtttta

SEQ ID NO: 655095 - DNA, 75 bp, synthetic construct
  source 1..75: mol_type = other DNA
aacgcggtcgtatggaaattcgtattgatgttcagggtgttagctgccacggttctgcaccagaacgcggtgaca

SEQ ID NO: 655096 - DNA, 75 bp, synthetic construct
  source 1..75: mol_type = other DNA
gcatctggtccatgtcgataagcgttgggtaagcttgccgggcgaaggcggtcacgttgattttgcgccgaatag

SEQ ID NO: 655097 - DNA, 75 bp, synthetic construct
  source 1..75: mol_type = other DNA
gattaatgcgcggcgtcgtgaaatggggcagaaaccgctcaccaccgcgcagattattgatgaaatctgcgattt

SEQ ID NO: 655098 - DNA, 75 bp, synthetic construct
  source 1..75: mol_type = other DNA
agattgttgatgaaatctgcgattttgtggtgaatcagcaggctgttttcctgggtggtcactatatccttcagg

SEQ ID NO: 655099 - DNA, 75 bp, synthetic construct
  source 1..75: mol_type = other DNA
tcaggctggcgcggaactcagggttattgcggaccttggaggcagtgatgcctccgtgttttatgaggcaatcaa

SEQ ID NO: 655100 - DNA, 75 bp, synthetic construct
  source 1..75: mol_type = other DNA
agagcgcgtagcggttgttggcgcgggttacatcgccgttgaactggcgggcgtgattaacggcctcggcgcgaa

SEQ ID NO: 655101 - DNA, 75 bp, synthetic construct
  source 1..75: mol_type = other DNA
cagagctttgtgaatgtagcgtgagtctagtaaaatccgtatgggctaaacacaaacaacaagagaataagaaaa

SEQ ID NO: 655102 - DNA, 75 bp, synthetic construct
  source 1..75: mol_type = other DNA
ctgggaattcgacccgtacgaaggtatggaaactgatgaactgatcggcggtcgcggtacttctgaccaggaagg

SEQ ID NO: 655103 - DNA, 75 bp, synthetic construct
  source 1..75: mol_type = other DNA
ggctgtttggcaaagcgccggttgttgataagtggaccttctcaactaacggcgtatctatcatgggtcgtcacg

SEQ ID NO: 655104 - DNA, 75 bp, synthetic construct
  source 1..75: mol_type = other DNA
cgactgccaggtataccgtggtcaacgcggtcgtatggaaattcgcattgatgttcagggtgttagctgccacgg

SEQ ID NO: 655105 - DNA, 75 bp, synthetic construct
  source 1..75: mol_type = other DNA
agattgttgatgaaatctgcgattttgtggcgaatcagcaggcggttttcctgggcggtcactacatcttgcagg

SEQ ID NO: 655106 - DNA, 75 bp, synthetic construct
  source 1..75: mol_type = other DNA
tgtggtggtgacggtgtattcgcgcctgaaaggttttgacgtgcggatgctggaagcggcgaaagatctcggtgc

SEQ ID NO: 655107 - DNA, 75 bp, synthetic construct
  source 1..75: mol_type = other DNA
atcattctgccactggcaatgccagcggtagcggcgggctgggtgttaagctttaccctgtcgatggacgatgtg

SEQ ID NO: 655108 - DNA, 75 bp, synthetic construct
  source 1..75: mol_type = other DNA
atttattcaacaaagccatctctgccatcaataaaatccagcactcacattgctctcctttttatggtttctatg

SEQ ID NO: 655109 - DNA, 75 bp, synthetic construct
  source 1..75: mol_type = other DNA
tgactctggaactgggcgcaaggcaatttggtatgcaggaaccgggtatcggtgtctatcgcccgaacgataatc

SEQ ID NO: 655110 - DNA, 75 bp, synthetic construct
  source 1..75: mol_type = other DNA
ccttaagcctgataatgctggggccgttggctcatgcagaagagattggttcggtcgacactgtatttaaaatga

SEQ ID NO: 655111 - DNA, 75 bp, synthetic construct
  source 1..75: mol_type = other DNA
tactccgacaaagttgtcgatggttcaccgaaaaatgccatcagcgccgttcctgtcatgccgtggcgacaataa

SEQ ID NO: 655112 - DNA, 75 bp, synthetic construct
  source 1..75: mol_type = other DNA
tccgtaagcgggtggaaaacaaagaagtggtcattggttttgggcatccggtttataccatcgccgacccgcgcc

SEQ ID NO: 655113 - DNA, 75 bp, synthetic construct
  source 1..75: mol_type = other DNA
gcctggaaacagtgatgtgggagagcaaaaagatgttccccaatctcgactggttctcagccgtttcctacaaca

SEQ ID NO: 655114 - DNA, 75 bp, synthetic construct
  source 1..75: mol_type = other DNA
gggcacaccgtctctggcgcgcgcgatattgccgacaaattattggcgtcgcttagctcaattcttctctactgg

SEQ ID NO: 655115 - DNA, 75 bp, synthetic construct
  source 1..75: mol_type = other DNA
ggaagcctttgacgatcccgatgtgaaaaatgtcacctgttatgtgagccgggcgaaaaccggtggtattaaagg

SEQ ID NO: 655116 - DNA, 75 bp, synthetic construct
  source 1..75: mol_type = other DNA
aaaaatgtcacttgctatgtgagcagagcgaaaacgggaggaattaaaggcggattaggtctggcggaagatact

SEQ ID NO: 655117 - DNA, 75 bp, synthetic construct
  source 1..75: mol_type = other DNA
cgaaacgtaaacagcgttctccaaagcttttgatccggtttggtgatgcgctacctgtgactccagtgctggggt

SEQ ID NO: 655118 - DNA, 75 bp, synthetic construct
  source 1..75: mol_type = other DNA
tcgcattaaaaacggcaaagctcaaggcgaagtcgtgttcaaaaaacggacttctctggtctttaagtcgttaca

SEQ ID NO: 655119 - DNA, 75 bp, synthetic construct
  source 1..75: mol_type = other DNA
gggattaggtctggcggaagatacttccgatgcggccatttcctgccagcaggtagggccgattgaactgtcgga

SEQ ID NO: 655120 - DNA, 75 bp, synthetic construct
  source 1..75: mol_type = other DNA
aaaaatgtcacctgttatgtgagccgggcgaaaaccggtggtattaaagggggattgggcctggcagaagatacc

SEQ ID NO: 655121 - DNA, 75 bp, synthetic construct
  source 1..75: mol_type = other DNA
acagtacccatgtcattaaaccgaaaaaatcggtggcactttctggcgttcctgcgggcaatacggcgctctgca

SEQ ID NO: 655122 - DNA, 75 bp, synthetic construct
  source 1..75: mol_type = other DNA
cagtgcgccagttgagatcccggctgccgtgcgtcaggcactggcgaaagatccgcagaaaatttttaactatat

SEQ ID NO: 655123 - DNA, 75 bp, synthetic construct
  source 1..75: mol_type = other DNA
ccgcagcaatccataaactggctgaacctcaggtaaaaatcgtttcattaaccatcaccgagaaaggctattgtc

SEQ ID NO: 655124 - DNA, 75 bp, synthetic construct
  source 1..75: mol_type = other DNA
caggctatgagtttatctggcaatgcatggaagacgctaaggaaggtgcgaataagcggggaaattcttctcggc

SEQ ID NO: 655125 - DNA, 75 bp, synthetic construct
  source 1..75: mol_type = other DNA
gggcttcagtgtggatggcgtgacaacgaaagtgcgtattgacgccggtgtcgcgccagttgatcaccgcggtct

SEQ ID NO: 655126 - DNA, 75 bp, synthetic construct
  source 1..75: mol_type = other DNA
cccggtgaaagattttgcgaccgttattgcagagcctcgtcttgatgataacagccagaccaccttctacctggc

SEQ ID NO: 655127 - DNA, 75 bp, synthetic construct
  source 1..75: mol_type = other DNA
cgcgaccatgtgatgctgcgctatcaggggaaaatggaacgtctgagtctggcagaggaggaacgcccccctgtg

SEQ ID NO: 655128 - DNA, 75 bp, synthetic construct
  source 1..75: mol_type = other DNA
cttcgctggctccgttcacgacagcccgccccgccagggggacgcccggaaaagccataagcaggagaggaacgg

SEQ ID NO: 655129 - DNA, 75 bp, synthetic construct
  source 1..75: mol_type = other DNA
ttgacgttttgcggggacctgccgtttgttccctccggtattaaccatcacctgtttgagaaccttcgccgcaag

SEQ ID NO: 655130 - DNA, 75 bp, synthetic construct
  source 1..75: mol_type = other DNA
tgtctttgcccccggcgacagggactcatacgggtgtgtggcaccggacacaacaacgggcagggtcccgccgca

SEQ ID NO: 655131 - DNA, 75 bp, synthetic construct
  source 1..75: mol_type = other DNA
cgacagcccgaaaccgcgccagcgggttcggcggagactggcaggtgcgccagcagctgcctgtcggagccgggc

SEQ ID NO: 655132 - DNA, 75 bp, synthetic construct
  source 1..75: mol_type = other DNA
caacaacgggcaggcacccgccgcaacgacgaagagcgcgtgcgcgaaacggcgttgcccctcacatcccggcgg

SEQ ID NO: 655133 - DNA, 75 bp, synthetic construct
  source 1..75: mol_type = other DNA
tcagggatggaagcccgccagggcggagacagctccgctggctccgttcacgacagcccgccccgccagggggac

SEQ ID NO: 655134 - DNA, 75 bp, synthetic construct
  source 1..75: mol_type = other DNA
cctaagctttgcgccatgtatgtagataagaagctcgccagtgtcttgtgtgttcaggcgctatctaggctcaat

SEQ ID NO: 655135 - DNA, 75 bp, synthetic construct
  source 1..75: mol_type = other DNA
tgtacgagtggtatgaagttgaagactttgtgacgcgttatttcaagaatgaagacgcccagacactcagtccaa

SEQ ID NO: 655136 - DNA, 75 bp, synthetic construct
  source 1..75: mol_type = other DNA
tttttatcgcttctaagcgtgcggaataccgtgatctggcaaaaatgtcatttatccccggtattttcaatatca

SEQ ID NO: 655137 - DNA, 75 bp, synthetic construct
  source 1..75: mol_type = other DNA
tggataatcaacagcatattgataaggcacttcctggaagaatagaacgccgctgccgtgatgtaatgcggataa

SEQ ID NO: 655138 - DNA, 75 bp, synthetic construct
  source 1..75: mol_type = other DNA
atttatacaaagcgtttctgcgtaaacaggccagccagaaagagctggtgtgggtagggcgagtgatggtgctgg

SEQ ID NO: 655139 - DNA, 75 bp, synthetic construct
  source 1..75: mol_type = other DNA
cattcgtgacggcattatcggcgggtgcgtcggatatgagcggctggctgttaatggggttgccaggcgctgttt

SEQ ID NO: 655140 - DNA, 75 bp, synthetic construct
  source 1..75: mol_type = other DNA
ctcgccctgcaatacgcgaaaaatgtatttaatgccaaagtgatcgctattgacgttaatgatgagcaactgaaa

SEQ ID NO: 655141 - DNA, 75 bp, synthetic construct
  source 1..75: mol_type = other DNA
atgcaagcgtcgcaattttcagcccaggttcaggactggtacgataaatacgggcgaaaaactctgccctggcaa

SEQ ID NO: 655142 - DNA, 75 bp, synthetic construct
  source 1..75: mol_type = other DNA
ccgagcggattgtggggcggtttatactgtttcccgcagtttgccgacgaagaaagtttgcggcagtggctggcg

SEQ ID NO: 655143 - DNA, 75 bp, synthetic construct
  source 1..75: mol_type = other DNA
ggtttgtactggaaagtgttaacggtcaacctgttgccagcgataaaaacccgccagaaatcagctttggggaaa

SEQ ID NO: 655144 - DNA, 75 bp, synthetic construct
  source 1..75: mol_type = other DNA
atgacagcgcgttatcagggtatgaaccgaaatactggcctcggcatcagcgataccgagcatatcagccagagc

SEQ ID NO: 655145 - DNA, 75 bp, synthetic construct
  source 1..75: mol_type = other DNA
tgccgttcagttaaaaatgccggatacagcgttgatggcgggatggcggaagagtgcatcgtggtcgccgattac

SEQ ID NO: 655146 - DNA, 75 bp, synthetic construct
  source 1..75: mol_type = other DNA
aaaatacgcctaccgagtatggtattcgatttgtggcgaccagcggtgaagaggaagggaaattaggcgctgaga

SEQ ID NO: 655147 - DNA, 75 bp, synthetic construct
  source 1..75: mol_type = other DNA
cgtggaaaacggcattacccatttgttttataactatcagtatgaagtgaatgagcgagcgcgggatgctctggt

SEQ ID NO: 655148 - DNA, 75 bp, synthetic construct
  source 1..75: mol_type = other DNA
tttacgccatttaaaaatgcctggctgaaacggctgcgggaagggatgccggagtgcgtcgctgcaccaacagtc

SEQ ID NO: 655149 - DNA, 75 bp, synthetic construct
  source 1..75: mol_type = other DNA
ggatcatcctgattttcacgctcggtaatttgctcgacccgtccgtacgtcctctggtgatgggcgcgacctttg

SEQ ID NO: 655150 - DNA, 75 bp, synthetic construct
  source 1..75: mol_type = other DNA
gaacggtgccggagaatatgagcaacaacgagattttccggcagtggaaggcaccagccgtttgtcggccagcct

SEQ ID NO: 655151 - DNA, 75 bp, synthetic construct
  source 1..75: mol_type = other DNA
ggcggcgcatagcatgtcgccgcgtcaggctgaatttatcaatgctcaactgaacgggctacagatcgcgctggc

SEQ ID NO: 655152 - DNA, 75 bp, synthetic construct
  source 1..75: mol_type = other DNA
caggctgaatttatcaatgctcaacttaatacactgcaaatcatgctggcggaaaaaggcattcccttgttgttt

SEQ ID NO: 655153 - DNA, 75 bp, synthetic construct
  source 1..75: mol_type = other DNA
cgggcgcgtatgtgggtcttgggatcatcttgattttcacgctcggtaatttgctcgacccgtccgtacgtccgc

SEQ ID NO: 655154 - DNA, 75 bp, synthetic construct
  source 1..75: mol_type = other DNA
tgataacgccgcaggtttaggtgtcatgctggaactggcagaacgcctgaaaaatacgcctaccgagtatggtat

SEQ ID NO: 655155 - DNA, 75 bp, synthetic construct
  source 1..75: mol_type = other DNA
gctggcaaaaaccactgcaccggcaatggtactgttcttcaaaggcgcattgtgtaactggctggtttgcctggc

SEQ ID NO: 655156 - DNA, 75 bp, synthetic construct
  source 1..75: mol_type = other DNA
ggggcggcgaaatttatcgctatctggtggttgtctgctggcatttatcgcgtctggctacgagcactctatcgc

SEQ ID NO: 655157 - DNA, 75 bp, synthetic construct
  source 1..75: mol_type = other DNA
atgtgggcaatcctgccgcaaacctggctgggtaacctggtcggttccgtctttgttgccatgctttatagctgg

SEQ ID NO: 655158 - DNA, 75 bp, synthetic construct
  source 1..75: mol_type = other DNA
aggtcgagaataaattatggagtttgagcgagcaggtgacgcccgcggtcggcgtggaacggtttaatcaggcga

SEQ ID NO: 655159 - DNA, 75 bp, synthetic construct
  source 1..75: mol_type = other DNA
gcagtggcaaatggatttccgcaaactgaaaaaaggcgatgaatttgcggtattaatgtctcgagaaatgcttga

SEQ ID NO: 655160 - DNA, 75 bp, synthetic construct
  source 1..75: mol_type = other DNA
cggcaaaactgccgcgtaccgaagggctgaccggctccgatcgtcgcgaattcctggcgcaggccaaagagattg

SEQ ID NO: 655161 - DNA, 75 bp, synthetic construct
  source 1..75: mol_type = other DNA
agaaaaaaggtccgggatatctcatttagcgtctgccggggagaaatattaggctttgccggactggtcggttcc

SEQ ID NO: 655162 - DNA, 75 bp, synthetic construct
  source 1..75: mol_type = other DNA
gcaacaaaaatcaggttaaggttacgtgggctcaggcgtggcgggatgtaatgataagagccatgtctaatggtc

SEQ ID NO: 655163 - DNA, 75 bp, synthetic construct
  source 1..75: mol_type = other DNA
ttcggcggcgagcaggcggcacgtactgcggcggctgctgaccgtaccggtcacgcactgttgcacacgctttat

SEQ ID NO: 655164 - DNA, 75 bp, synthetic construct
  source 1..75: mol_type = other DNA
ggtatcccgtttttcagatagacgatgaacagctgggccagatcgcatgttccattcgggttaacaaagagcatg

SEQ ID NO: 655165 - DNA, 75 bp, synthetic construct
  source 1..75: mol_type = other DNA
aagacttgaaagggatgaagatccgcgtgccgaataacgtcatgcagattaaagctatcgaagcgatgggcgcaa

SEQ ID NO: 655166 - DNA, 75 bp, synthetic construct
  source 1..75: mol_type = other DNA
tggatcaactgcaagccaacggtgtggcggcggcgtgccttaactcaacgcaaacccgcgagcagcagcttgaag

SEQ ID NO: 655167 - DNA, 75 bp, synthetic construct
  source 1..75: mol_type = other DNA
gtatcacgcagggctggaaaacgatgtccgtgccgacgtgcaggaaaaattccagcgtgatgacctgcaaattgt

SEQ ID NO: 655168 - DNA, 75 bp, synthetic construct
  source 1..75: mol_type = other DNA
cactggttaacttcgttgttaaatacatcaaacgtctggtgccgaaatatcatctgccagatgccatttcatttc

SEQ ID NO: 655169 - DNA, 75 bp, synthetic construct
  source 1..75: mol_type = other DNA
gtgccggaagatttagccttcctgcaatacaccggcggcaccactggcgtggcgaaaggcgcaatgctgactcac

SEQ ID NO: 655170 - DNA, 75 bp, synthetic construct
  source 1..75: mol_type = other DNA
gtgccggaagatttagccttcctgcaatacaccggcggcaccacaggtgtggcgaaaggcgcgatgctgactcac

SEQ ID NO: 655171 - DNA, 75 bp, synthetic construct
  source 1..75: mol_type = other DNA
ataccaatatccttatcgatttgttcagcggacgaattgaggcaaaacaggctctggaggcatggcccctacaga

SEQ ID NO: 655172 - DNA, 75 bp, synthetic construct
  source 1..75: mol_type = other DNA
ttggaaaaagactctttgcgatgtcacattttttaaccatcagcacatgactccgctggagttagttcgtttttc

SEQ ID NO: 655173 - DNA, 75 bp, synthetic construct
  source 1..75: mol_type = other DNA
tcatcaactgctaaccgaatggatctcacttgaagcgcgctcaggcatcgaattcacactgaacacgatggcaca

SEQ ID NO: 655174 - DNA, 75 bp, synthetic construct
  source 1..75: mol_type = other DNA
gcgatcaggctctgcaactcaacctacgggaactgctaattatcccggaactccagcagtcgctgctggattgtg

SEQ ID NO: 655175 - DNA, 75 bp, synthetic construct
  source 1..75: mol_type = other DNA
ttccccgcgctttcacgcctggttgctgtaccgctcatggtttggcagctatctacgtttctggcagaaacatca

SEQ ID NO: 655176 - DNA, 75 bp, synthetic construct
  source 1..75: mol_type = other DNA
atgcgctcctggtatggggtgacacgggcggctttttttaatctggatgaacttttaagcgttatcggacgggtt

SEQ ID NO: 655177 - DNA, 75 bp, synthetic construct
  source 1..75: mol_type = other DNA
tgccgttcgggttgatgaaatgccagcagccccacccgtatcatcctaagcagaggtgcggaggggctctcattt

SEQ ID NO: 655178 - DNA, 75 bp, synthetic construct
  source 1..75: mol_type = other DNA
gtatcggcggtctcttctttcttcggcatggtgatcctcgctgcactcatttattacttcaccatgtggttaact

SEQ ID NO: 655179 - DNA, 75 bp, synthetic construct
  source 1..75: mol_type = other DNA
taaaccctcaatggccattggttcccatcaacggaaactgtcgaatcattggtgtggccgtagaaactaagttaa

SEQ ID NO: 655180 - DNA, 75 bp, synthetic construct
  source 1..75: mol_type = other DNA
gatgccatgcaccaggctgttgttcagtatgcggagcgggcagcagagaaactacgtggggagcgtcagtattgc

SEQ ID NO: 655181 - DNA, 75 bp, synthetic construct
  source 1..75: mol_type = other DNA
ccctgtgtattgtctgcgtaagcggatacatcggtcaggtactgaacgtggtatcggcggtctcttctttcttcg

SEQ ID NO: 655182 - DNA, 75 bp, synthetic construct
  source 1..75: mol_type = other DNA
gtatcggcgggctctttttttttttgcctgggggttctcgctcgcctcattttttttttttccccttgggttaat

SEQ ID NO: 655183 - DNA, 75 bp, synthetic construct
  source 1..75: mol_type = other DNA
acggggatatttatgtttcttgccccggcttgtggcttgatgatccgctttatggtggggtatggaaggcggtaa

SEQ ID NO: 655184 - DNA, 75 bp, synthetic construct
  source 1..75: mol_type = other DNA
tgccatgcgctatgccctgcgccagtccgggtactcgttgtgcagtacgacaccggcgaaccgggtgctgtacaa

SEQ ID NO: 655185 - DNA, 75 bp, synthetic construct
  source 1..75: mol_type = other DNA
ggcgctgggcggcatcagctttaaaaaaggctgctataccggacaagagatggtggcacgagctaaattccgcgg

SEQ ID NO: 655186 - DNA, 75 bp, synthetic construct
  source 1..75: mol_type = other DNA
aactaccgccagtgtgctgaccgacaagcttcgcggcgaagcggaactgaataatagccaacagtggctggcatt

SEQ ID NO: 655187 - DNA, 75 bp, synthetic construct
  source 1..75: mol_type = other DNA
acagcaccaaaacaagacccggcaaagaacgcagaattcgcccgccgccgcatcgagcgcaaacgacagcgcgag

SEQ ID NO: 655188 - DNA, 75 bp, synthetic construct
  source 1..75: mol_type = other DNA
atgatccgcttcatgcgtaccggtcgcgaaggtttattgtggaaagagattgctgctgatgaagaaaacgtcatt

SEQ ID NO: 655189 - DNA, 75 bp, synthetic construct
  source 1..75: mol_type = other DNA
ggtctgccacagcctgcgccatggctaccggctgccggtcacccagctttcgccgccggtcagcacctggtccac

SEQ ID NO: 655190 - DNA, 75 bp, synthetic construct
  source 1..75: mol_type = other DNA
ttctctggcattgtgaccttccgtaatgctgaacaattgcgtgatgccgcgcgttatgtacctctggatcggttg

SEQ ID NO: 655191 - DNA, 75 bp, synthetic construct
  source 1..75: mol_type = other DNA
tgaaaggtgttgccgttgaagaactggcgcaggtaaccaccgataacttcgcccgtctgtttcacatcgacgctt

SEQ ID NO: 655192 - DNA, 75 bp, synthetic construct
  source 1..75: mol_type = other DNA
cgccggggtgacgctgtcgggcactgtcatgcagaccatgcagaccatgcagaatgttgaattaaccatcacgct

SEQ ID NO: 655193 - DNA, 75 bp, synthetic construct
  source 1..75: mol_type = other DNA
aaaggttgttataccgggcaagagatggtggcgcgagcaaaatttcgtggcgccaacaaacgcgcactctggttg

SEQ ID NO: 655194 - DNA, 75 bp, synthetic construct
  source 1..75: mol_type = other DNA
atgcagaacaactacgtgatgccgcgcgttatgtgccgctcgaccggttactggtagaaactgacgcgccttatc

SEQ ID NO: 655195 - DNA, 75 bp, synthetic construct
  source 1..75: mol_type = other DNA
atgtttttagtcgactcacactgccatctcgatggtctgaattatgaatctttgcacaaggacgtggatgacgtt

SEQ ID NO: 655196 - DNA, 75 bp, synthetic construct
  source 1..75: mol_type = other DNA
gaaaagcagatggaagcggcagcaaacaaaggggatgtagagacataccgcaagctcaaggcgcaactgaataaa

SEQ ID NO: 655197 - DNA, 75 bp, synthetic construct
  source 1..75: mol_type = other DNA
cggcaaaactgccgcgtactgaagggcttaccggctccgatcgtcgcgaattcttggctcaggccaaagagattg

SEQ ID NO: 655198 - DNA, 75 bp, synthetic construct
  source 1..75: mol_type = other DNA
ttggcgcattaaccacggtgatattcctcgctcgctttcattgccgtcagctacggcgctttggcttgataaccg

SEQ ID NO: 655199 - DNA, 75 bp, synthetic construct
  source 1..75: mol_type = other DNA
ggctggtgcctgcactggtggcacgagaaattctcgttcgcgggatgtacgtgcgcggacgtaaaatggtggcgt

SEQ ID NO: 655200 - DNA, 75 bp, synthetic construct
  source 1..75: mol_type = other DNA
ttgttatagcacgccaggacgttgtgaatatgacttcaatgctattgaagaatatcatgagtttctgcaaagttg

SEQ ID NO: 655201 - DNA, 75 bp, synthetic construct
  source 1..75: mol_type = other DNA
aaattggtcaacaactttcctggacattaaccactgagggcgatttacaacgtctgacgtgggaagtctctcgcc

SEQ ID NO: 655202 - DNA, 75 bp, synthetic construct
  source 1..75: mol_type = other DNA
gtgaaacccgaacctatgaccgtactgccgctaacggttttaaaatgaccagcgaaatgcagcaaggggaatggg

SEQ ID NO: 655203 - DNA, 75 bp, synthetic construct
  source 1..75: mol_type = other DNA
cagcggatggtgggcaacagcaaagccgatgcggcgttgctggatgaaatgattaacaacatccagtttatcccc

SEQ ID NO: 655204 - DNA, 75 bp, synthetic construct
  source 1..75: mol_type = other DNA
ggatattcgtgggttgtttcgtaccttgtgggctgggaagctgtggattattggcatggggctggcgtttgcgtt

SEQ ID NO: 655205 - DNA, 75 bp, synthetic construct
  source 1..75: mol_type = other DNA
gaacgctatgggtgcggttatatatttatgccgtcctctgtttgattgtgtcactggttctgtatgtttggcttt

SEQ ID NO: 655206 - DNA, 75 bp, synthetic construct
  source 1..75: mol_type = other DNA
atgcttgatcgcaaaaacctgaagggaatggtgaagtcattaaaagaaggggaaatactctggtatgcacccgac

SEQ ID NO: 655207 - DNA, 75 bp, synthetic construct
  source 1..75: mol_type = other DNA
ttgattttccctgcgtccccgaaatttccggtccgcagccagggaatgatgaaaaaggctggcaacacgattttc

SEQ ID NO: 655208 - DNA, 75 bp, synthetic construct
  source 1..75: mol_type = other DNA
atgattatgtggggcattgtcgggggggctgatcggggctggtgtcgcattaacccgccgttgctcgaaatagca

SEQ ID NO: 655209 - DNA, 75 bp, synthetic construct
  source 1..75: mol_type = other DNA
atccggacgggacgggaaacctgaatgatatggagcacctgaaacagtcagccagggacatcctgaccaccccgc

SEQ ID NO: 655210 - DNA, 75 bp, synthetic construct
  source 1..75: mol_type = other DNA
ggtgaaaacacctgctgatgaagctctcgaggctgaattaaatcaacgtttccaggcttatatcacgggtatcca

SEQ ID NO: 655211 - DNA, 75 bp, synthetic construct
  source 1..75: mol_type = other DNA
ggataaggtgacgcaacagaatgcttctctggtagaagaggcctcagcggcggcggtgtcccttgaagaacaggc

SEQ ID NO: 655212 - DNA, 75 bp, synthetic construct
  source 1..75: mol_type = other DNA
cgattgaacaaaccgctgccagcatggagcaactcaccgcgacggtgaaacagaatgcggataatgcacaccacg

SEQ ID NO: 655213 - DNA, 75 bp, synthetic construct
  source 1..75: mol_type = other DNA
gagtcagaaaaaacagacatttacctttgagatagataacggcctcaaggtgtctggcaacgaagatcagctacg

SEQ ID NO: 655214 - DNA, 75 bp, synthetic construct
  source 1..75: mol_type = other DNA
cgaccagtacggattatccaataacgatctctccccctcgcttgtcagtaggttgtggaggcattgatggttttc

SEQ ID NO: 655215 - DNA, 75 bp, synthetic construct
  source 1..75: mol_type = other DNA
taatgcccggcttgaatggggactgtctgcgccggtggctgatttcgctgcgcaactgcatcaggaaagcggctg

SEQ ID NO: 655216 - DNA, 75 bp, synthetic construct
  source 1..75: mol_type = other DNA
agttggagtcattaccttgagatccatgcaattaaggtcacccaaccatacggcgaattctttcagacggttatg

SEQ ID NO: 655217 - DNA, 75 bp, synthetic construct
  source 1..75: mol_type = other DNA
ctggcaactgttcatcgaggttaccggtgctggtggcagtggtaaaagcgtgttcacgggtattgcacgtatgct

SEQ ID NO: 655218 - DNA, 75 bp, synthetic construct
  source 1..75: mol_type = other DNA
aaagaaaagcagaaactgtactggttctcggcaactacccagcaggacgggcagcgacgtaaacccgaaaacatg

SEQ ID NO: 655219 - DNA, 75 bp, synthetic construct
  source 1..75: mol_type = other DNA
cgtgacgctactgcggagatccagactcgcaccggtctggcaaatagctctgattatctgcgttcagcccggatc

SEQ ID NO: 655220 - DNA, 75 bp, synthetic construct
  source 1..75: mol_type = other DNA
ggtgaaaacacctgctgatgaagccctcgacactgaattaaatcaacgcttccaggcttatatcacgggtatgca

SEQ ID NO: 655221 - DNA, 75 bp, synthetic construct
  source 1..75: mol_type = other DNA
gcagcattcactggggatgacagtagggactgttcgacagggtgcggaagagatttatcgtggcaccagcgaaat

SEQ ID NO: 655222 - DNA, 75 bp, synthetic construct
  source 1..75: mol_type = other DNA
ctacaggaaaagttattcatcatcatgacggatgaaaaccaggttaatcactcattcgtcactgacaaaggcgtt

SEQ ID NO: 655223 - DNA, 75 bp, synthetic construct
  source 1..75: mol_type = other DNA
tatggtggcgctgacactgttgtacggtgcccggcaaacaggaatagataacgcttgccacattggcggcctgat

SEQ ID NO: 655224 - DNA, 75 bp, synthetic construct
  source 1..75: mol_type = other DNA
tatccgcaggagattgaacaagagcgacgacaaaaaaaaacaacagttagcggaggaacgcaacgccctcaggga

SEQ ID NO: 655225 - DNA, 75 bp, synthetic construct
  source 1..75: mol_type = other DNA
aacgttgcttcactctcgttgtcgggtgaaccctggcgcttattgagcagtgtctttctgcacagtagtttttcc

SEQ ID NO: 655226 - DNA, 75 bp, synthetic construct
  source 1..75: mol_type = other DNA
ggcggcgcataacatgtcgccgcgtcaggctgaacttatcaatgctcaactgaatgggctacgaatagcgctggc

SEQ ID NO: 655227 - DNA, 75 bp, synthetic construct
  source 1..75: mol_type = other DNA
ccggtttatcagccagaagaacaagaggcactggaagcggcttacggctggcagatgaaacgtgatggtaaatac

SEQ ID NO: 655228 - DNA, 75 bp, synthetic construct
  source 1..75: mol_type = other DNA
ttggctatatgctggcgcagagcttgagcgcacagccgcagatgccgcctgtcacgacggtgctgacgcgcattg

SEQ ID NO: 655229 - DNA, 75 bp, synthetic construct
  source 1..75: mol_type = other DNA
ttgaagtgtatgcaggatatgacaataattttgcccacaacatactatctggtggagatggctgtattggtggtt

SEQ ID NO: 655230 - DNA, 75 bp, synthetic construct
  source 1..75: mol_type = other DNA
tcccggagagaaccgggtacagcgtatcaccagagatttgtttacgactggcagataaatatcccaatattattg

SEQ ID NO: 655231 - DNA, 75 bp, synthetic construct
  source 1..75: mol_type = other DNA
ttgtcaccatatttgatgaacaagggcgaatcgatcctgagcaaaacactcaggtttatgattttattaaaaatc

SEQ ID NO: 655232 - DNA, 75 bp, synthetic construct
  source 1..75: mol_type = other DNA
tgatggtcgtaaggctgattttgaagtcagcttaaaggtggcgcaggccgtaattaataactcacgtggtaagtg

SEQ ID NO: 655233 - DNA, 75 bp, synthetic construct
  source 1..75: mol_type = other DNA
ttcacgaagtctccaatgtggagtggaatatcgtcacctgtaagattgtatcgtgtaatgctacgcgtactgatg

SEQ ID NO: 655234 - DNA, 75 bp, synthetic construct
  source 1..75: mol_type = other DNA
ttgaggatgcgatgcacattggttgggacatcatcacctgcaagataacatcatgcaaggctacacgcacagacg

SEQ ID NO: 655235 - DNA, 75 bp, synthetic construct
  source 1..75: mol_type = other DNA
cccccgccagtttctgcgatggcagtgatgtttcctatcagcacgccggagatgacgccggggacggtggaggat

SEQ ID NO: 655236 - DNA, 75 bp, synthetic construct
  source 1..75: mol_type = other DNA
atgacacagggctggcgggaggataaatgcccgtctgaccgcgcagggaaaagaccgcgcgtcggtggcgctgaa

SEQ ID NO: 655237 - DNA, 75 bp, synthetic construct
  source 1..75: mol_type = other DNA
gtcccgtatgacggcgcagcccctgccattacaggcctgttaggcgggcacattgaagcggtttccgtaagccca

SEQ ID NO: 655238 - DNA, 75 bp, synthetic construct
  source 1..75: mol_type = other DNA
atgacacagggccggcgggaggataaatgcctgtctgcccgcgccggtggcgctgaaaggggccgcgctcacgcg

SEQ ID NO: 655239 - DNA, 75 bp, synthetic construct
  source 1..75: mol_type = other DNA
atgacacagggctggcgggaggataaatgcccgtctgtccgcgctgggaaaagaccgcgcgtcggtggcgctgaa

SEQ ID NO: 655240 - DNA, 75 bp, synthetic construct
  source 1..75: mol_type = other DNA
atgacacagggctggcgggaggataaatgcccgtctgaccgcgcggggaaaaaaccgcgcgtcggtggcgctgaa

SEQ ID NO: 655241 - DNA, 75 bp, synthetic construct
  source 1..75: mol_type = other DNA
atgacacagggctggcgggaggataaatgcccgtctgaccgcgctgggaaaataccgcgcgtcggtggcgctgaa

SEQ ID NO: 655242 - DNA, 75 bp, synthetic construct
  source 1..75: mol_type = other DNA
tgttcctgctactgctactgctactgctactgctactgctactgctactgctactgctactgctactgttcttct

SEQ ID NO: 655243 - DNA, 75 bp, synthetic construct
  source 1..75: mol_type = other DNA
aatatgctcagcgacccgtatttctcgcaacctgcaccgaaaagcaccggacgcgaatactttaactacggctgg

SEQ ID NO: 655244 - DNA, 75 bp, synthetic construct
  source 1..75: mol_type = other DNA
atttgtcaggggcagcagcttacgctttctcagttcggtcaactggatgctcaacttggtcgcttgtttgccgat

SEQ ID NO: 655245 - DNA, 75 bp, synthetic construct
  source 1..75: mol_type = other DNA
atgaaaaatcacataatatctaaactatcaataagtaccccctactctatttcctttatggcgacagtgttactt

SEQ ID NO: 655246 - DNA, 75 bp, synthetic construct
  source 1..75: mol_type = other DNA
agcggagctgtttggctatgaggaaggggcgtttaccggctcgcgacgcggaggtcgcgccgggctgttcgaaat

SEQ ID NO: 655247 - DNA, 75 bp, synthetic construct
  source 1..75: mol_type = other DNA
gaggtcgcgccgggctgttcgaaattgcccacggcggtacgctgtttctggatgagattggcgaaatgccgctac

SEQ ID NO: 655248 - DNA, 75 bp, synthetic construct
  source 1..75: mol_type = other DNA
atgacacagggctggcgggaggataaatgcccgtctgtccgcgcggggaaaataccgcgcgtcggtggcgctgaa

SEQ ID NO: 655249 - DNA, 75 bp, synthetic construct
  source 1..75: mol_type = other DNA
ggatccctcataaattcaatgaggaacaaatggataagttcaaaaagtccaaagcagaaacggagaactttgata

SEQ ID NO: 655250 - DNA, 75 bp, synthetic construct
  source 1..75: mol_type = other DNA
ctaaagaacaaaagtccattattgcagaagcattagaggttatgcctgaagatctggaagaaataaagattaaag

SEQ ID NO: 655251 - DNA, 75 bp, synthetic construct
  source 1..75: mol_type = other DNA
atagcttacaccggagatggtcgcgtggtatgggtcggtaaggatgtgacaggcattgaaccccgcaacaccagt

SEQ ID NO: 655252 - DNA, 75 bp, synthetic construct
  source 1..75: mol_type = other DNA
gcttccggaacttcacgaagcgatgggggggcaggggcgtttgtttgcccaggtaatggctaccaccgctgaagg

SEQ ID NO: 655253 - DNA, 75 bp, synthetic construct
  source 1..75: mol_type = other DNA
acctacatccgcaagaaactggcaagcgaacgctgtgacgccatcatcgctgctggctctaacggcgcgtacctg

SEQ ID NO: 655254 - DNA, 75 bp, synthetic construct
  source 1..75: mol_type = other DNA
acaaatggataagttcaaaaagtccaaagcagaaacggagaactttgataattcgtttagtttttataggataaa

SEQ ID NO: 655255 - DNA, 75 bp, synthetic construct
  source 1..75: mol_type = other DNA
atgacacagggctggcgggaggataaatgcccgtctggccgcgcggggaaaagaccgcgcgtcggtggcgctgaa

SEQ ID NO: 655256 - DNA, 75 bp, synthetic construct
  source 1..75: mol_type = other DNA
atgacacagggctggcgggaggataaatgcccgtctgcccgcgcggggaaaacaccgcgcgtcggtggcgctgaa

SEQ ID NO: 655257 - DNA, 75 bp, synthetic construct
  source 1..75: mol_type = other DNA
atgacacagggctggcgggaggataaatgcccgtctgcccgcgccgggaaaagaccgcgcgtcggtggcgctgaa

SEQ ID NO: 655258 - DNA, 75 bp, synthetic construct
  source 1..75: mol_type = other DNA
atgacaaaaaaatatgatattacttggcttttttcggaggacgacaaaaactggtatgaagaactgaagaatttc

SEQ ID NO: 655259 - DNA, 75 bp, synthetic construct
  source 1..75: mol_type = other DNA
cgggcaatccgaaaaccgcagaacaatatcagatgacaaaacaacatggtatcacctggcttttttcggaagatg

SEQ ID NO: 655260 - DNA, 75 bp, synthetic construct
  source 1..75: mol_type = other DNA
gtataccgcccaaccgtggaccatccgtcagtatgctggtttctcgacagcaaaagagtccaacgctttttatcg

SEQ ID NO: 655261 - DNA, 75 bp, synthetic construct
  source 1..75: mol_type = other DNA
tgcgattggttgccacgggcagactgtctggcacgaaccgactgggccggcgccacacactatacagattggcga

SEQ ID NO: 655262 - DNA, 75 bp, synthetic construct
  source 1..75: mol_type = other DNA
gcttcttcgcccttcctgctttgccagagcgcgtggcggttgttggcgcgggttacatcgccgttgaactggcgg

SEQ ID NO: 655263 - DNA, 75 bp, synthetic construct
  source 1..75: mol_type = other DNA
aaagtgatgtggcacgcggcgcaaatccgtgaagcgatccacatgtacggcccggattatggttttgataccact

SEQ ID NO: 655264 - DNA, 75 bp, synthetic construct
  source 1..75: mol_type = other DNA
gttttggtatggatgaaatgttgcagggcttcgcggtggcgctgaagatgggcgcaaccaaaaaagacttcgaca

SEQ ID NO: 655265 - DNA, 75 bp, synthetic construct
  source 1..75: mol_type = other DNA
atcaatgtccagcattatatcattattgtgatgcactatttttgccaacgttactggagtgtttcagtgccagtt

SEQ ID NO: 655266 - DNA, 75 bp, synthetic construct
  source 1..75: mol_type = other DNA
cgacttaatttttagcaagcttccaacggctaaagaaagggccttaatgtacatgcgcagcattgataagttata

SEQ ID NO: 655267 - DNA, 75 bp, synthetic construct
  source 1..75: mol_type = other DNA
agccgtaccgcctatatcgaccgtattcatacttcctatgaaaacgtgctcggtaaaaataacgttgatgtaatc

SEQ ID NO: 655268 - DNA, 75 bp, synthetic construct
  source 1..75: mol_type = other DNA
ttggtttaattcccgttcgtggggggataaagacagacagccagttattgactggtttttgcatgcccgtaaatt

SEQ ID NO: 655269 - DNA, 75 bp, synthetic construct
  source 1..75: mol_type = other DNA
aagctcgtctggcgcttgctgagcatgttgtttattgtcgccgttcagataaattaaacattccttttgttggct

SEQ ID NO: 655270 - DNA, 75 bp, synthetic construct
  source 1..75: mol_type = other DNA
aattaggctcaggcaagacacttgttagtgtttccagaatacaggaaagacttgctaagggttgtcctgttgcca

SEQ ID NO: 655271 - DNA, 75 bp, synthetic construct
  source 1..75: mol_type = other DNA
tggcgttgggcatggagcctgcgcataaagccagcgttgaagactgggaaacgatgattgataccaacaacaaag

SEQ ID NO: 655272 - DNA, 75 bp, synthetic construct
  source 1..75: mol_type = other DNA
taaagccagtgtcgaagactgggaaacaatgattgataccaacaataaaggtctggtgtatatgacgcgtgccgt

SEQ ID NO: 655273 - DNA, 75 bp, synthetic construct
  source 1..75: mol_type = other DNA
gcgctggcggctggcaaaacgtataccgccataattcacaaacacttaattgtgggatgaatttcggtgtttatc

SEQ ID NO: 655274 - DNA, 75 bp, synthetic construct
  source 1..75: mol_type = other DNA
gaaagttccggtcgttgagcctttgactttaaaaagcggcatcgccgcgcctcggagtcctgtcaataactgtgg

SEQ ID NO: 655275 - DNA, 75 bp, synthetic construct
  source 1..75: mol_type = other DNA
gtgagcatctgcttcggaataatgacggcagtctgccagaatcgggtcatcaggtacgcggattgacactgctgg

SEQ ID NO: 655276 - DNA, 75 bp, synthetic construct
  source 1..75: mol_type = other DNA
gtgaccacttttaccgacaaagaaatgattaaagaaatcaaagagcgcataggcagcttggacgttagagacaat

SEQ ID NO: 655277 - DNA, 75 bp, synthetic construct
  source 1..75: mol_type = other DNA
atgaaagcaggaaatagcaatctcccaaacaccatggtgccgccaaaaggtgaagtatcggtggatatcccgcat

SEQ ID NO: 655278 - DNA, 75 bp, synthetic construct
  source 1..75: mol_type = other DNA
tgctattggttgtcacggtcagactgtatggcacgaacccacgggcgtcgcgccgcatactctacagattgggga

SEQ ID NO: 655279 - DNA, 75 bp, synthetic construct
  source 1..75: mol_type = other DNA
caaccgagcgacgaatggtgctcaatattggcggcatcgccaatctgtcactgctcattcctgggcagccggttg

SEQ ID NO: 655280 - DNA, 75 bp, synthetic construct
  source 1..75: mol_type = other DNA
ccgtaacctggccgccgggcaaaaaggtctttccgttgcgtttgaccttgccacccaccgaggctacgactccga

SEQ ID NO: 655281 - DNA, 75 bp, synthetic construct
  source 1..75: mol_type = other DNA
gaaacggaagcccgttaaaacagtatgaaatggcaccatcggccagactgacccggtcggaacgaatgcaaatta

SEQ ID NO: 655282 - DNA, 75 bp, synthetic construct
  source 1..75: mol_type = other DNA
tcccacaccttctgagcacgccgcagcagtgcttaatctggtagatgacggtgttatcgaatggaatgaccagga

SEQ ID NO: 655283 - DNA, 75 bp, synthetic construct
  source 1..75: mol_type = other DNA
tctccttatgccagtaaacatgccattcgtgatgtgcgtgcgcgccgccaggcaaatctggaatttcttaaatcg

SEQ ID NO: 655284 - DNA, 75 bp, synthetic construct
  source 1..75: mol_type = other DNA
ctggctgatgacggtgttatcgaatggaatgacccggatgtcgtgagggcgctcaggggcgcattaaaacacggg

SEQ ID NO: 655285 - DNA, 75 bp, synthetic construct
  source 1..75: mol_type = other DNA
gaaacggaagcccgttaaaaccacatgaaattgcaccatcggccagactgacccggtcggaacgaatgcaaatta

SEQ ID NO: 655286 - DNA, 75 bp, synthetic construct
  source 1..75: mol_type = other DNA
acccggtcggaacgaatgcaaattacccgtatccgcgttgacctcgctcagaacggtatcaggccgcagcgatgg

SEQ ID NO: 655287 - DNA, 75 bp, synthetic construct
  source 1..75: mol_type = other DNA
cactggggacatcgcggcaatgaagctgtatcaaccgcaggatgccacaaccaacccttctctcattcttaacgc

SEQ ID NO: 655288 - DNA, 75 bp, synthetic construct
  source 1..75: mol_type = other DNA
acggataagaatattagtgaggcacgaaaatggtttttacttgctgcccaaaatggcaacgcatctgcgcaatat

SEQ ID NO: 655289 - DNA, 75 bp, synthetic construct
  source 1..75: mol_type = other DNA
ctgccaggttgtatagcgaaagtgagagtattccacaggaccaggaaaaagcgctgtactggtttaccaaagcag

SEQ ID NO: 655290 - DNA, 75 bp, synthetic construct
  source 1..75: mol_type = other DNA
acgaaaactacagcgcatatcaggagctgatgaacaatgaaaatcctgagcatctgcaggaaaacagtgatatgc

SEQ ID NO: 655291 - DNA, 75 bp, synthetic construct
  source 1..75: mol_type = other DNA
gtggccggagttccctgagtactggaagcctaaaacgcgggctaagttagagcggttagggttggttgcaaacgt

SEQ ID NO: 655292 - DNA, 75 bp, synthetic construct
  source 1..75: mol_type = other DNA
ccgttacgatctcgggcaaggtgccggattttacctgaacgcgacgcaagcgccgtggaatgaacattacaaaat

SEQ ID NO: 655293 - DNA, 75 bp, synthetic construct
  source 1..75: mol_type = other DNA
accgcagtcagcagccagagtaccgcactgcctccccgcccgctccttcaggccacacagctgcccgcactggtt

SEQ ID NO: 655294 - DNA, 75 bp, synthetic construct
  source 1..75: mol_type = other DNA
aaccggaaaaaaacgagtcacaacaggaatccggcacttcaccagaaataccggcccctgctgccgcccccgccg

SEQ ID NO: 655295 - DNA, 75 bp, synthetic construct
  source 1..75: mol_type = other DNA
tactgaatggacaggtaaaagcgaactatggcaaagcccatgaaatcgccgtcaagctgggattaaaaaccatca

SEQ ID NO: 655296 - DNA, 75 bp, synthetic construct
  source 1..75: mol_type = other DNA
gatatttttgttagccgaaatgtatctctacggtacaaaaaatgtcgcaaaagatgaaaatcatgcgctgcactg

SEQ ID NO: 655297 - DNA, 75 bp, synthetic construct
  source 1..75: mol_type = other DNA
ttttgcaatcggcggaacaggaccattcagacgcacaatatcatactgccaggttgtatagcgaaagtgagagta

SEQ ID NO: 655298 - DNA, 75 bp, synthetic construct
  source 1..75: mol_type = other DNA
cgacgattcacagtcctcaaatggctgggggcagtcaaaccaacctcaaaaccaccagcaatacagcggtggtgg

SEQ ID NO: 655299 - DNA, 75 bp, synthetic construct
  source 1..75: mol_type = other DNA
acatgaatacctgacccggaaaggcattcaggctgcgccgggggtgcgaataaacgacaaaaatgagctcgttat

SEQ ID NO: 655300 - DNA, 75 bp, synthetic construct
  source 1..75: mol_type = other DNA
cgaccgtaaattatgacgggaaaaaattcacgtatccggtcgctgatgagtggccgggattctcaacggtaatgg

SEQ ID NO: 655301 - DNA, 75 bp, synthetic construct
  source 1..75: mol_type = other DNA
tcggccagactgacccggtcggaacgaatgcaaattacccgtatccgcgttgaccttgctcagaacggtatcagg

SEQ ID NO: 655302 - DNA, 75 bp, synthetic construct
  source 1..75: mol_type = other DNA
aaagaggatggcgacgagcgcggtgcagctcgcaaccgctttcaggctaaacacctgaacaaaggcggtgcggcc

SEQ ID NO: 655303 - DNA, 75 bp, synthetic construct
  source 1..75: mol_type = other DNA
cggaacgccgcactggcatatgatgcttttttgtaatccacgccagcgtaaccagattatcgaaatcatgcgtcg

SEQ ID NO: 655304 - DNA, 75 bp, synthetic construct
  source 1..75: mol_type = other DNA
ctttgactttaaaaagcggcatcgccgcgcctcggagtcctgtcaataactgtggaaagcttgccgacggtggcg

SEQ ID NO: 655305 - DNA, 75 bp, synthetic construct
  source 1..75: mol_type = other DNA
atgcatgggttgatgcgcatggtgaaaaagaatcgactgtttacggatgaggcgcaggctcacctctatggtcat

SEQ ID NO: 655306 - DNA, 75 bp, synthetic construct
  source 1..75: mol_type = other DNA
tagcgaaattacgcaagattcgctggtgcaggggctgggtaaagaattgccggcggcattggctccgatggcgaa

SEQ ID NO: 655307 - DNA, 75 bp, synthetic construct
  source 1..75: mol_type = other DNA
tattgcggatgcggtgaaaggtgatattgccattctggcagatagcgggattcgtaacgggcttgatgtcgtgcg

SEQ ID NO: 655308 - DNA, 75 bp, synthetic construct
  source 1..75: mol_type = other DNA
ctggtttgcccgcccgggtgcagatctgtcattactggaccgatggcgtccacgaccacacgaaatctcaacaga

SEQ ID NO: 655309 - DNA, 75 bp, synthetic construct
  source 1..75: mol_type = other DNA
gaaacggaagtccgttaaaaacacatgaaattgcaccgtcggccagactgacccggtcggaacgaatgcaaatca

SEQ ID NO: 655310 - DNA, 75 bp, synthetic construct
  source 1..75: mol_type = other DNA
gacaaagccctcaagtcgctggagaacacagttccggatctgctgtttgagaacaaaattatgcaccggcctccg

SEQ ID NO: 655311 - DNA, 75 bp, synthetic construct
  source 1..75: mol_type = other DNA
acagcgcgttcagtgtcgcgtctgcaaaaaagtctggacgcccaaacagcttttacaaagagaaatagcaccacc

SEQ ID NO: 655312 - DNA, 75 bp, synthetic construct
  source 1..75: mol_type = other DNA
atacgcatctggcgctgaataaagaagacgagaagatccgcttccgcgatattcaggcacagccgcgcaaaatta

SEQ ID NO: 655313 - DNA, 75 bp, synthetic construct
  source 1..75: mol_type = other DNA
aagcagatctatgtaatacatccaactagctattacgatattataaggatttatagtgctattgatatggttcta

SEQ ID NO: 655314 - DNA, 75 bp, synthetic construct
  source 1..75: mol_type = other DNA
gctgggttcacctggcgaaccggaaacaccggaagcaatacagcgcgagttattacaacgcatcaataacgtttt

SEQ ID NO: 655315 - DNA, 75 bp, synthetic construct
  source 1..75: mol_type = other DNA
gatttctgcgcaacgctgggggcacctggcgaaccggaaacgccggaagcaatgcagcaagagctgctgcaacgc

SEQ ID NO: 655316 - DNA, 75 bp, synthetic construct
  source 1..75: mol_type = other DNA
ctggttgatatgagctcctcgatggcctacaaggccgccaatggaaaggagcgtcaagacattgcgcgggaagcg

SEQ ID NO: 655317 - DNA, 75 bp, synthetic construct
  source 1..75: mol_type = other DNA
tgacgcgcatgatgcacttaaagccgagctcaaccgggtggctcaagataagggggacagtagctatatgactgt

SEQ ID NO: 655318 - DNA, 75 bp, synthetic construct
  source 1..75: mol_type = other DNA
ccaacgttttggaggactgccgcatagaacgggccatgatggaactcttccccggtacgtcgcagaccctgaatg

SEQ ID NO: 655319 - DNA, 75 bp, synthetic construct
  source 1..75: mol_type = other DNA
cggcgcgattgatgtctacactgcatgggaagaaatgggcaaagtacgcgacgctctggaagcggcaggtctgaa

SEQ ID NO: 655320 - DNA, 75 bp, synthetic construct
  source 1..75: mol_type = other DNA
ccaaccgccactcacgtcggttcagagctttctcaggaagatctggacgatgacgaagatgaagacgaagaagat

SEQ ID NO: 655321 - DNA, 75 bp, synthetic construct
  source 1..75: mol_type = other DNA
tatccggcggttgacgctgccgtagcgaagtttgagcaggactggcagggcgcgtttggcagaacgtcgatttaa

SEQ ID NO: 655322 - DNA, 75 bp, synthetic construct
  source 1..75: mol_type = other DNA
atgagcaggagaagaatcactcgcagacatcaccgcacacacctgaattcctcagcaacgctaaaggcacttatt

SEQ ID NO: 655323 - DNA, 75 bp, synthetic construct
  source 1..75: mol_type = other DNA
ctcagcaacgctaagggcacttattaaaagcgagatcggtgatttcttcgcgggagttggctcaccaggtgaacc

SEQ ID NO: 655324 - DNA, 75 bp, synthetic construct
  source 1..75: mol_type = other DNA
ttcctgccgggcaggtggagcgccagtttgaacagtattgcgcattgctaaaccgaatggccgaggatgaaagcg

SEQ ID NO: 655325 - DNA, 75 bp, synthetic construct
  source 1..75: mol_type = other DNA
gcgggaagcatccttagctatttctatggctctggaagcgatccccggcgtaaatccggcagtcaccttttttgg

SEQ ID NO: 655326 - DNA, 75 bp, synthetic construct
  source 1..75: mol_type = other DNA
tccggacggggcaccgatccggaaagcaaccagatgactgactggatacagctgaagacacgctcacagaccgtc

SEQ ID NO: 655327 - DNA, 75 bp, synthetic construct
  source 1..75: mol_type = other DNA
aagggcagagcacgcaggagcagtccatcctggccgctctcggggtggccatgcagtattacggcggggtgattg

SEQ ID NO: 655328 - DNA, 75 bp, synthetic construct
  source 1..75: mol_type = other DNA
gaaaaacctgacacggcagaaatctccgcagaatatacggatgccactgcagcagcgccggcagaacagacaccg

SEQ ID NO: 655329 - DNA, 75 bp, synthetic construct
  source 1..75: mol_type = other DNA
tggacaacgggcgtccgggcaccccgactgcctcatcccgttgcctgccagcaccgctgccgcgcaacagtctca

SEQ ID NO: 655330 - DNA, 75 bp, synthetic construct
  source 1..75: mol_type = other DNA
cggagagcagacagatccccgcgcaaggcttcacctgaaagcgcattcgctgcaacgcagggaggacgcagagcg

SEQ ID NO: 655331 - DNA, 75 bp, synthetic construct
  source 1..75: mol_type = other DNA
aagtattcattgtccatgggcacgatgataaactaaaaaacgaggtttacatttttctggcaaatgaaggtttcc

SEQ ID NO: 655332 - DNA, 75 bp, synthetic construct
  source 1..75: mol_type = other DNA
gctggcaacgcgtctgcatggcatgacacaccggcggttgctcgtgatttatcacacgggctttcctttgcttag

SEQ ID NO: 655333 - DNA, 75 bp, synthetic construct
  source 1..75: mol_type = other DNA
taaaggccagcggctgtttctgtttcgcaataaaataaatttgtccacagcggcagtggcaaaaacgagattttt

SEQ ID NO: 655334 - DNA, 75 bp, synthetic construct
  source 1..75: mol_type = other DNA
tttttcgaagcggcaatgcatatgaagtcgaactgtggataccaacacgtaaaggccagcggctgtttctgtttc

SEQ ID NO: 655335 - DNA, 75 bp, synthetic construct
  source 1..75: mol_type = other DNA
aagccatcgaaatgttaccggagcgcgaacagttggtattaacgctctattaccaggaagagcttaatctcaaag

SEQ ID NO: 655336 - DNA, 75 bp, synthetic construct
  source 1..75: mol_type = other DNA
cccggacgtcctctcaggacggcacccccgtacctccggacacgctcagcttcacactggccggtaataaaacca

SEQ ID NO: 655337 - DNA, 75 bp, synthetic construct
  source 1..75: mol_type = other DNA
gaccgctgcacccgcaaatcaaccagattctgggcgatttcacctcgctgatgctgctgagctggcatcccggcg

SEQ ID NO: 655338 - DNA, 75 bp, synthetic construct
  source 1..75: mol_type = other DNA
tgaatatgttcgtccgtctaacggcgaaccgattcgttcggttgttctggaaaccaatgactctgtcgtcgttgt

SEQ ID NO: 655339 - DNA, 75 bp, synthetic construct
  source 1..75: mol_type = other DNA
ccggaatgtgtcgcccaggccgtaaaaacccgtttcgagctgtggcgcggtcagtggtttctcgatctgacggaa

SEQ ID NO: 655340 - DNA, 75 bp, synthetic construct
  source 1..75: mol_type = other DNA
catcctggctatacgtgaacgcatacaggacacaccgggcgttctgtcgattctttccttcgataccaattatga

SEQ ID NO: 655341 - DNA, 75 bp, synthetic construct
  source 1..75: mol_type = other DNA
atgcgtgatatttaccacgaaacaacagatcgcgtatttcttgcactttctcacagtgaaatcatgttggaaata

SEQ ID NO: 655342 - DNA, 75 bp, synthetic construct
  source 1..75: mol_type = other DNA
acgcttcttgagcctgtaataatggaactacaagaaatagacctattgcacgacagatataaagaacagcacacc

SEQ ID NO: 655343 - DNA, 75 bp, synthetic construct
  source 1..75: mol_type = other DNA
tcatataatgaaaattttattggttatggttgtgaagatcatgagtttgggtggcaacttgaaaaaaatgacttc

SEQ ID NO: 655344 - DNA, 75 bp, synthetic construct
  source 1..75: mol_type = other DNA
caccaccacccatgccgcccgccgcgacggcaatgtcattattcatgtggcaaacggtatcacgcatattggtcc

SEQ ID NO: 655345 - DNA, 75 bp, synthetic construct
  source 1..75: mol_type = other DNA
tgttacctgacgtcgcgtggcataacaatattcgcgccgagctgtggcgcaagctggcagtcaactgtgtgatta

SEQ ID NO: 655346 - DNA, 75 bp, synthetic construct
  source 1..75: mol_type = other DNA
aagctggcagtcaactgtgtgattaatccactgaccgccatctggaattgcccgaatggtgaattacgacatcat

SEQ ID NO: 655347 - DNA, 75 bp, synthetic construct
  source 1..75: mol_type = other DNA
cggcaccagtcgccgcgttaccttcacctcctccattgacacaatctacggccagacgactgtaacaagcgaggc

SEQ ID NO: 655348 - DNA, 75 bp, synthetic construct
  source 1..75: mol_type = other DNA
tggagagtgggtaacttacaaccaacatttgagcctatactatggttttcaaaaccttataaaataggaggtacc

SEQ ID NO: 655349 - DNA, 75 bp, synthetic construct
  source 1..75: mol_type = other DNA
aagctggcggtgagttgcgtaattaatccactgaccgccatccgggactgcccgaacggtgaattacgctatcat

SEQ ID NO: 655350 - DNA, 75 bp, synthetic construct
  source 1..75: mol_type = other DNA
tagaccgcgcatttcttgcactttctcacagtgaaatcatgatggaaatgttgcgcatatggcttgaaacgcttg

SEQ ID NO: 655351 - DNA, 75 bp, synthetic construct
  source 1..75: mol_type = other DNA
gttgagtatccgtacttcgtacccgcatgctgagagcgagtgggtatttttatcacgtaaggggaatccgctttc

SEQ ID NO: 655352 - DNA, 75 bp, synthetic construct
  source 1..75: mol_type = other DNA
atcgccggacgcccagggtctggtaaatcggcgttggcgttggcaattgcccgcgcggcggctgaacgcccatac

SEQ ID NO: 655353 - DNA, 75 bp, synthetic construct
  source 1..75: mol_type = other DNA
gcgctacaaactggaaacggggacgcttgaggtcgtcaaagagacgatgaaagactttgattcccggtattcaaa

SEQ ID NO: 655354 - DNA, 75 bp, synthetic construct
  source 1..75: mol_type = other DNA
agccctgcgcggtttaccggctaacgtgcgtaccgtgctggaagccttaccggcggcgtcgcacccgatggatgt

SEQ ID NO: 655355 - DNA, 75 bp, synthetic construct
  source 1..75: mol_type = other DNA
tccgcaagcgcgtggaaaacaaagaagtggtcattggttttggtcatccggtttacaccatcgctgacccgcgcc

SEQ ID NO: 655356 - DNA, 75 bp, synthetic construct
  source 1..75: mol_type = other DNA
tataccgctagtaatgcagggcgtttttacggtatctgggatagccccagaggtcggcaacgccatgctgtttta

SEQ ID NO: 655357 - DNA, 75 bp, synthetic construct
  source 1..75: mol_type = other DNA
cccaactgtcacgccgcgttgaggaacgaccgaataagcgccctaacaattcagatcttcgcgattccgggaacc

SEQ ID NO: 655358 - DNA, 75 bp, synthetic construct
  source 1..75: mol_type = other DNA
cctggcagtaaagatcagcgggttggcgttttgttcttcacgcttgaaatgtcactcgatcagatgactgaacgc

SEQ ID NO: 655359 - DNA, 75 bp, synthetic construct
  source 1..75: mol_type = other DNA
ggaatagatacgcgacttatccaggattatcttgggcatcgcaatattcgtcatactgtctggtataccgccagc

SEQ ID NO: 655360 - DNA, 75 bp, synthetic construct
  source 1..75: mol_type = other DNA
tgaagcaggatcacccgaacctgggtatggtaatgattgactatatcgggttaatgaagctggctaaggccgaac

SEQ ID NO: 655361 - DNA, 75 bp, synthetic construct
  source 1..75: mol_type = other DNA
cactattccgctgtataagcgggcttttgaaattatccgggcgcaagccagaaacagaaatcttatcgacgcctt

SEQ ID NO: 655362 - DNA, 75 bp, synthetic construct
  source 1..75: mol_type = other DNA
gcgaatacatggagatcattgtttcaaaaaaccgtcacgggaaaacggggactgtttaccagcggtttgacgata

SEQ ID NO: 655363 - DNA, 75 bp, synthetic construct
  source 1..75: mol_type = other DNA
gaaaatgtcattacggcaggattttccagcaatgaaagtggattacacccaacacaaaaacctgtagccttaatg

SEQ ID NO: 655364 - DNA, 75 bp, synthetic construct
  source 1..75: mol_type = other DNA
ttgcatctttatccccgcgaatccgccgtggattatcaggatggcaatctggtgttacgttttgaactggccgaa

SEQ ID NO: 655365 - DNA, 75 bp, synthetic construct
  source 1..75: mol_type = other DNA
gaatttttacgcccggctaatggcgacacaggtgcctgtcactgcagggcatatcaatgccacggctaccttcac

SEQ ID NO: 655366 - DNA, 75 bp, synthetic construct
  source 1..75: mol_type = other DNA
tcgtccgcgctttcgtggacgaccctgacgccgggtaaaccaaatacgctgaatttttacgcccggctaatggcg

SEQ ID NO: 655367 - DNA, 75 bp, synthetic construct
  source 1..75: mol_type = other DNA
attgctgaataaaccgcagacaaagcgagaatctcttgatcatcttgatcgtatgctccacctgattactgccgt

SEQ ID NO: 655368 - DNA, 75 bp, synthetic construct
  source 1..75: mol_type = other DNA
atggttattcagcataaagcgccacgtaacgttgcctcctatttgcagcgcaaagggcgtgctggtcgttcaaga

SEQ ID NO: 655369 - DNA, 75 bp, synthetic construct
  source 1..75: mol_type = other DNA
acgcaataaaaccaagcaacaggcgcatgtgaacttcaggtgggtcgacaatggcgagcctgtcggggttggcgt

SEQ ID NO: 655370 - DNA, 75 bp, synthetic construct
  source 1..75: mol_type = other DNA
ccgatttagctcaccgtcttcagttatcacattacccagttctgatcacggaaaccgggttgacccagcaggtga

SEQ ID NO: 655371 - DNA, 75 bp, synthetic construct
  source 1..75: mol_type = other DNA
gcagccggcagcccctttttatgacgcaatcaataatgccccgaatgaatggacaacaaagccggtgtcccgccc

SEQ ID NO: 655372 - DNA, 75 bp, synthetic construct
  source 1..75: mol_type = other DNA
atccgttatcccgggcatggctcacacagcacgcagcccagctgaatgcaatgaatgcggccgggatggtggtga

SEQ ID NO: 655373 - DNA, 75 bp, synthetic construct
  source 1..75: mol_type = other DNA
atgaaccagccgcaggtttctatttttccggcagaaatgaccactgcgctttaccggcgggctattgcatcggcc

SEQ ID NO: 655374 - DNA, 75 bp, synthetic construct
  source 1..75: mol_type = other DNA
cttttacttttcctgtatggcttcttttttcagcgaccgtcagtgctgaactgacggtgattgctgacctgggtg

SEQ ID NO: 655375 - DNA, 75 bp, synthetic construct
  source 1..75: mol_type = other DNA
cggaaatgacaccgggggaggtggatgatcgcgccctgcatttaccggggattggggcactgtatctggtggggg

SEQ ID NO: 655376 - DNA, 75 bp, synthetic construct
  source 1..75: mol_type = other DNA
gaggcagatcgttcgacgggacgttccccactgccggcctttattccttcagcgctattcagtgagcttaatctg

SEQ ID NO: 655377 - DNA, 75 bp, synthetic construct
  source 1..75: mol_type = other DNA
gttccttcaaagccgtcagggataagctggatacccgtcgcggctctcattccgagctggagacagcggtaaaag

SEQ ID NO: 655378 - DNA, 75 bp, synthetic construct
  source 1..75: mol_type = other DNA
aaaatgatgtcaaaaagaactatctgccggatctgacgatggttctgggtaatacacaggcccgtggcctccgta

SEQ ID NO: 655379 - DNA, 75 bp, synthetic construct
  source 1..75: mol_type = other DNA
atgtcgatatacacaaccgcacaactactggcagcaaaccagaagaaatttaagttcgatccgctgtttctgcgc

SEQ ID NO: 655380 - DNA, 75 bp, synthetic construct
  source 1..75: mol_type = other DNA
tcaccctgtggtaatgccgtttccgccgtaaaggttgggtttaccggtgtttcagatagccacaatgccaacctg

SEQ ID NO: 655381 - DNA, 75 bp, synthetic construct
  source 1..75: mol_type = other DNA
ccggtgcgcagacagcctatctgctgcgacgctggatgcaacttgcacgcagtcgcccccattttgtcgggctgt

SEQ ID NO: 655382 - DNA, 75 bp, synthetic construct
  source 1..75: mol_type = other DNA
cggatgttgattttgaaattgagcaggctttcggcaatacttggcagcccgagtgtgtcatcgagtgcgaaggtc

SEQ ID NO: 655383 - DNA, 75 bp, synthetic construct
  source 1..75: mol_type = other DNA
gctcgactgatggccacacaggtgcccgtcacggcggggcatatcaatgccacggcaacattcactcttgaatat

SEQ ID NO: 655384 - DNA, 75 bp, synthetic construct
  source 1..75: mol_type = other DNA
gtgaccatttctgaacaagttttgttgagcggtggctgcgaacgattgatggtatgtggtggaggaagtcgtaat

SEQ ID NO: 655385 - DNA, 75 bp, synthetic construct
  source 1..75: mol_type = other DNA
atgactacatccggcgtaataaaagcccggtgcacgggttttattttctcacatccacttttcagcgtcgtttat

SEQ ID NO: 655386 - DNA, 75 bp, synthetic construct
  source 1..75: mol_type = other DNA
ctactggaaaaaataccgtaaaggacagatgaccacgaggcaggcatattctgccattgcccgcctgtttaacga

SEQ ID NO: 655387 - DNA, 75 bp, synthetic construct
  source 1..75: mol_type = other DNA
ctttgactttaaaaagcggcatcgccgcgcctcggagtcctgtcaataactgtggaaagctcaccggcggtgata

SEQ ID NO: 655388 - DNA, 75 bp, synthetic construct
  source 1..75: mol_type = other DNA
tatgacgggaaaaaattcacgtatccggtcgctgatgagtggccgggattctcaacagtaatggagtggacatga

SEQ ID NO: 655389 - DNA, 75 bp, synthetic construct
  source 1..75: mol_type = other DNA
ctctgctcatgatgagtgggagcagcattgcgaatgatcattcggagaatcgccagtttatccatgagcaactgc

SEQ ID NO: 655390 - DNA, 75 bp, synthetic construct
  source 1..75: mol_type = other DNA
gctggcatccctcgcaaaaatcgccagcaaagaagcaatgagccactcaaaacgggcgagcaagcgccatcagcc

SEQ ID NO: 655391 - DNA, 75 bp, synthetic construct
  source 1..75: mol_type = other DNA
acatgtaacccgtacagccgaatggcgcattgttccaaagattttggccgttgagcctttgaccttaaaaagcgg

SEQ ID NO: 655392 - DNA, 75 bp, synthetic construct
  source 1..75: mol_type = other DNA
accaccggccactacagcatctttattaaggtaatgtgccgctcgatcgacgctctccagcatgtacttatcaac

SEQ ID NO: 655393 - DNA, 75 bp, synthetic construct
  source 1..75: mol_type = other DNA
acccggtcggaacgattgcaaattacccgtatccgtgtagaccttgctcagaacggtatcaggccgcagcgatgg

SEQ ID NO: 655394 - DNA, 75 bp, synthetic construct
  source 1..75: mol_type = other DNA
gctcacctgtatggtcatgttgctggcgctgcacgtgctttcaatatttccccgctctactggaaaaaataccgt

SEQ ID NO: 655395 - DNA, 75 bp, synthetic construct
  source 1..75: mol_type = other DNA
ggaatgacccggaggtcgtgagggcgctcaggggcgcattaaaacacggactgagaacaccaaatcgtcagcaaa

SEQ ID NO: 655396 - DNA, 75 bp, synthetic construct
  source 1..75: mol_type = other DNA
atgaaacgagtaatggtatcgctggccctgcttctggtcagcgggggcggcatggcgaataatcatacggagaac

SEQ ID NO: 655397 - DNA, 75 bp, synthetic construct
  source 1..75: mol_type = other DNA
agtatgaccctgaccaactaagacaggagttagatggtgttggtggggttaatttagtaaatggggcattacatg

SEQ ID NO: 655398 - DNA, 75 bp, synthetic construct
  source 1..75: mol_type = other DNA
ctataccctgccgctggcggagataccgaccgttctgcgggacattgccatcacgctggtgcgttaccggctcta

SEQ ID NO: 655399 - DNA, 75 bp, synthetic construct
  source 1..75: mol_type = other DNA
acaatgggggcttaccgtgaactacgcaaattgcctcgcggcgtcagcattgctgatgagtttgacgaacgcgtc

SEQ ID NO: 655400 - DNA, 75 bp, synthetic construct
  source 1..75: mol_type = other DNA
aatgtctggtgcaggccggtttaattattcctgtcgcgcggctgcgtccggtgctaacgctcaaaaacagtggag

SEQ ID NO: 655401 - DNA, 75 bp, synthetic construct
  source 1..75: mol_type = other DNA
tctggatgtggcgcataactttgttagcgcgtgtcaaatcggcgagcaacagggctggttgcatcgtaaaggtgc

SEQ ID NO: 655402 - DNA, 75 bp, synthetic construct
  source 1..75: mol_type = other DNA
ataaataacattgatggaatcgttagggttgatagcacaaccaacagtaatgtcggcctttacagagggattacc

SEQ ID NO: 655403 - DNA, 75 bp, synthetic construct
  source 1..75: mol_type = other DNA
gtttacttcacgctatgactacatccggcgcaataaaagcccggtgcacgggttttatttcctcacatccacttt

SEQ ID NO: 655404 - DNA, 75 bp, synthetic construct
  source 1..75: mol_type = other DNA
gctaaagcgattgagtgggatgaggcgttcaagaaaatggacgatccgtctggtcgtgcggttggcgttcaccag

SEQ ID NO: 655405 - DNA, 75 bp, synthetic construct
  source 1..75: mol_type = other DNA
cccaggaagtggcaaatcatctgggcactgtgcatcacgaaattcacttcaccgtacaggaaggtctcgatgcca

SEQ ID NO: 655406 - DNA, 75 bp, synthetic construct
  source 1..75: mol_type = other DNA
gagcttgaggcgctggcgcgtggcgcgaccgtaaattatgatgggaaaacgttttcatatccgatttctgatggt

SEQ ID NO: 655407 - DNA, 75 bp, synthetic construct
  source 1..75: mol_type = other DNA
cgggtggcggatattctgccgctggcggaaagctttttgaaaatgtctctggcggcactctctgtccctttttct

SEQ ID NO: 655408 - DNA, 75 bp, synthetic construct
  source 1..75: mol_type = other DNA
gagcttgaggcgctggcgcgtggagcgaccgtaaattatgacgggaaaaaattcacgtatccggtcgctgatgag

SEQ ID NO: 655409 - DNA, 75 bp, synthetic construct
  source 1..75: mol_type = other DNA
taaaagtgatgtgccgttcgatcgatgctctccagcatgtacttatcaacaagatccaaacaattgatgaaattc

SEQ ID NO: 655410 - DNA, 75 bp, synthetic construct
  source 1..75: mol_type = other DNA
aaaccaataaccgggagcaggcacggctttatgcagaagcagaacagaccagcgcgctgctgagacaacgacaac

SEQ ID NO: 655411 - DNA, 75 bp, synthetic construct
  source 1..75: mol_type = other DNA
gaacgaggatttacgccgctgggctgatattcctttgcctactgacattatccggctgcgggaacgtccgacact

SEQ ID NO: 655412 - DNA, 75 bp, synthetic construct
  source 1..75: mol_type = other DNA
atgaaccggttgctgctggttgtgctggcgttattactggtagcgctgggctggcagacatggcggctggctgat

SEQ ID NO: 655413 - DNA, 75 bp, synthetic construct
  source 1..75: mol_type = other DNA
gaagagttcgaatggggagacttccttctatccagagaggaaagtcttttacttcacactattcagtctgaacga

SEQ ID NO: 655414 - DNA, 75 bp, synthetic construct
  source 1..75: mol_type = other DNA
ttatatagaagataatgagtttgatatggtgtcacaggaaattcttttaagtggtgctttttgtaaatggagtga

SEQ ID NO: 655415 - DNA, 75 bp, synthetic construct
  source 1..75: mol_type = other DNA
cagggtgcattcagcttatgaaggtaagcctccagccataatccagcccaaaatggaatcatttttaaaaagacc

SEQ ID NO: 655416 - DNA, 75 bp, synthetic construct
  source 1..75: mol_type = other DNA
gctctatgccgacgcagaacagaccagcgtactgctgagacaacgacaacgccggatcgaggaactgaaacgtga

SEQ ID NO: 655417 - DNA, 75 bp, synthetic construct
  source 1..75: mol_type = other DNA
atgaaaatagcgcgagtgtatttacgggttagtacagacgaacaggatttgacccggcaaaatgagatcattgaa

SEQ ID NO: 655418 - DNA, 75 bp, synthetic construct
  source 1..75: mol_type = other DNA
caaaaagatgttccccaatctcgactggttctccgctgtttcctacaacatgatgggcgttcccaccgagatgtt

SEQ ID NO: 655419 - DNA, 75 bp, synthetic construct
  source 1..75: mol_type = other DNA
agcgcactgctgagacaacgacaacgccggattgagaaactgaaacgtgagaacgaggatttacgccgctgggct

SEQ ID NO: 655420 - DNA, 75 bp, synthetic construct
  source 1..75: mol_type = other DNA
gctctatgcagaagcagaacagaccagcgcgctgctgagacaacgacaacaccggattgaggaactgaaacgtga

SEQ ID NO: 655421 - DNA, 75 bp, synthetic construct
  source 1..75: mol_type = other DNA
tcctgctcgctctgttgaccacagggctggctcaggcaactgaacacacggaaaaccgtcagtttatcaaggaac

SEQ ID NO: 655422 - DNA, 75 bp, synthetic construct
  source 1..75: mol_type = other DNA
catatatgccccacagataccccgcagccaaaatcaacaaaatgccaaaaggttctgttcctgccctgcaacaag

SEQ ID NO: 655423 - DNA, 75 bp, synthetic construct
  source 1..75: mol_type = other DNA
gtaggtgaccctaatcaaatgatttatggttttaatgggtcatcaaaagactacttttgtgaagattttattaat

SEQ ID NO: 655424 - DNA, 75 bp, synthetic construct
  source 1..75: mol_type = other DNA
atgaatttattaaggtgctgtgcggtgatgtgataaaaagtattcttatggtaggtgaccctaatcaaatgattt

SEQ ID NO: 655425 - DNA, 75 bp, synthetic construct
  source 1..75: mol_type = other DNA
gccctgacctttacgaataaagcagcggaagaaatgagttcgcgtttaagtgattttgatccagatgaagatagg

SEQ ID NO: 655426 - DNA, 75 bp, synthetic construct
  source 1..75: mol_type = other DNA
aagatccaaacaattgatgaaattcagtccaccgagacactgatcgtcctgcagaatccgatcatgcgtaccatt

SEQ ID NO: 655427 - DNA, 75 bp, synthetic construct
  source 1..75: mol_type = other DNA
tggaccgtggcatcctggaagcattaatgggcaatgcgcgtaccgcttacgccgaactggcgaaacaatttggcg

SEQ ID NO: 655428 - DNA, 75 bp, synthetic construct
  source 1..75: mol_type = other DNA
atcattaccggggcgcgtattgatgtcagcccgaagcagctcggttatgacgtaggctgctttatcggcattata

SEQ ID NO: 655429 - DNA, 75 bp, synthetic construct
  source 1..75: mol_type = other DNA
ctccgtttgcagcacaggttgcagcagagcgttgcgctgacgtcgtgaaagaatacggcatcaagaatctggaag

SEQ ID NO: 655430 - DNA, 75 bp, synthetic construct
  source 1..75: mol_type = other DNA
tctttcaacaacaccatcgtgactatcactgatcgtcagggtaacgcgttgggttgggcaacagccggtggttcc

SEQ ID NO: 655431 - DNA, 75 bp, synthetic construct
  source 1..75: mol_type = other DNA
actattttaagagccacagataaagagtccgcacacgaatttgtacaggaaacacttcaggaagccagggaaaca

SEQ ID NO: 655432 - DNA, 75 bp, synthetic construct
  source 1..75: mol_type = other DNA
gaaaaaataccgcgttttactgaatcgtattcaaccggaagatgcgccggaaattgtgtggccggaggtgcctgg

SEQ ID NO: 655433 - DNA, 75 bp, synthetic construct
  source 1..75: mol_type = other DNA
aaagacggattcgtggcaatttttaatacagaaaaacagaaatggattgctattaaagatcaccgtggcgaaatt

SEQ ID NO: 655434 - DNA, 75 bp, synthetic construct
  source 1..75: mol_type = other DNA
gtgctgactgacggtaagctccatgctgatgacacgcctgtcccggtgctgttgccaggcaataagaaaacgaag

SEQ ID NO: 655435 - DNA, 75 bp, synthetic construct
  source 1..75: mol_type = other DNA
ctccgataacatggtgtatacggagaagcacatccgtatcatcagtgtgacgactgcggcggctatccatccagt

SEQ ID NO: 655436 - DNA, 75 bp, synthetic construct
  source 1..75: mol_type = other DNA
taacgccgctggtcgataaccgggacttactgaaggtactgatgcgtggaggaacggcgaaagtctacggctgtg

SEQ ID NO: 655437 - DNA, 75 bp, synthetic construct
  source 1..75: mol_type = other DNA
cttttttgaccttgccctgcagacaacggtgccggaaatcaaaaccgcaaaagacttcctgcagaaaatggcaag

SEQ ID NO: 655438 - DNA, 75 bp, synthetic construct
  source 1..75: mol_type = other DNA
ccgcgtttcttggtgcctcgatgaacaccgccccgtcgggctggatcggcggcattgtgtgtctgctggctatct

SEQ ID NO: 655439 - DNA, 75 bp, synthetic construct
  source 1..75: mol_type = other DNA
gagcaacgccgcggggtacttttttgatctcgctttgcaaaccacggtaccggagattaaaaccgcaaaggactt

SEQ ID NO: 655440 - DNA, 75 bp, synthetic construct
  source 1..75: mol_type = other DNA
gtttcgcagtccctgtttgctcagctgacggattacatcgccgtcgatatttatctgcagtatctggaagctgtc

SEQ ID NO: 655441 - DNA, 75 bp, synthetic construct
  source 1..75: mol_type = other DNA
gagtgcgatgatgagtggtggcagcgccaaagtgtacgtctgtgataaccagaacaaatgtctgtcaccctccct

SEQ ID NO: 655442 - DNA, 75 bp, synthetic construct
  source 1..75: mol_type = other DNA
agtgatgttactgtattagaaaaaagatggtggggtattaatccacgtcttatgggtgtaaacagagaaatgtat

SEQ ID NO: 655443 - DNA, 75 bp, synthetic construct
  source 1..75: mol_type = other DNA
ccatctccccgattacccataaccagattcttgttattaccaccgagcttttggcacaactttatggcaccgaaa

SEQ ID NO: 655444 - DNA, 75 bp, synthetic construct
  source 1..75: mol_type = other DNA
aaaatttgcaaccatctttaagagggttacaaatttccccgaaagcccgctccctcatcctctggacagaacgcg

SEQ ID NO: 655445 - DNA, 75 bp, synthetic construct
  source 1..75: mol_type = other DNA
ttgcgttttggctggtctacgctcatggaaaccggagaaacgcgtctgaggcttcgtagcgcccaattttgccgt

SEQ ID NO: 655446 - DNA, 75 bp, synthetic construct
  source 1..75: mol_type = other DNA
ttggatcgagaaaccaatgaggatcttgtcattgccgacgatgtaggggatggcactgatgacgggaagcggacg

SEQ ID NO: 655447 - DNA, 75 bp, synthetic construct
  source 1..75: mol_type = other DNA
tggtttcttgagctgacgcggcagcttcacaagcgccgttttatctcgaccggtggggcgctaaaaaacgtcctc

SEQ ID NO: 655448 - DNA, 75 bp, synthetic construct
  source 1..75: mol_type = other DNA
ttgccgcttttcagtcccgtgttcaggttcagcaggacgccttgcttgtggttgacaggcaaatgagttacatgc

SEQ ID NO: 655449 - DNA, 75 bp, synthetic construct
  source 1..75: mol_type = other DNA
aggcgcgcgtgcaggcgggcagcaaaaacttcccggaagagcagatgaagatgctgcgtgagaatttctcggaag

SEQ ID NO: 655450 - DNA, 75 bp, synthetic construct
  source 1..75: mol_type = other DNA
gtttccaacagtatgatttaccagctgacggactatatcggttacgacatcctgctgcagtacattcaggagctg

SEQ ID NO: 655451 - DNA, 75 bp, synthetic construct
  source 1..75: mol_type = other DNA
ggccatgatggaaggcggcacagcaaaaatttatcactgcaacgattctgataaatgcctgaaagtggtggcaga

SEQ ID NO: 655452 - DNA, 75 bp, synthetic construct
  source 1..75: mol_type = other DNA
atgacgccttgcaggccgctgcgacactgagcgagcgttatctctccgggcgtcagttgccggacaaagccattg

SEQ ID NO: 655453 - DNA, 75 bp, synthetic construct
  source 1..75: mol_type = other DNA
cagaaaatggcggccaacacggcgattgcccggattcgcctgtcttccccgccagtgccgcgcccacagaaacat

SEQ ID NO: 655454 - DNA, 75 bp, synthetic construct
  source 1..75: mol_type = other DNA
gtgaaatccagtttatcgggccacaggctaatcaccaggggcttatccgggcgctgatgtatggcggacaggcca

SEQ ID NO: 655455 - DNA, 75 bp, synthetic construct
  source 1..75: mol_type = other DNA
cttgtcagccagaaccactgaccgctcaattatccgggccatgatggaaggcggcacagcaaaaatttatcactg

SEQ ID NO: 655456 - DNA, 75 bp, synthetic construct
  source 1..75: mol_type = other DNA
cacaccggtgaccatcagccgggataatgcactgaagtctcagattactaaacttctggccagcattcagaacaa

SEQ ID NO: 655457 - DNA, 75 bp, synthetic construct
  source 1..75: mol_type = other DNA
gccggtcagaataacgtgttctcggactgggtctcctcccgtcagggttgcacatccggcgggaaatacgaaagc

SEQ ID NO: 655458 - DNA, 75 bp, synthetic construct
  source 1..75: mol_type = other DNA
gtcgttgaccgtcagatgagctacatgcgtcagcagttgtctgcccgtatgctcagccgttaccagaataattat

SEQ ID NO: 655459 - DNA, 75 bp, synthetic construct
  source 1..75: mol_type = other DNA
gtggcctgttccctcagacgcaggaatctcagcggaaagtctgccaggacattggcagtgaaagcaatatctttg

SEQ ID NO: 655460 - DNA, 75 bp, synthetic construct
  source 1..75: mol_type = other DNA
aacgaaaagtctgccaggacattgccggtgagagcaatatttttgctgactgggcggcttctcgccagggatgca

SEQ ID NO: 655461 - DNA, 75 bp, synthetic construct
  source 1..75: mol_type = other DNA
gagccagacggaccaacgaatctttccgcatgggtaaggcttaagaacaaagaattacctccttcactgcatcgc

SEQ ID NO: 655462 - DNA, 75 bp, synthetic construct
  source 1..75: mol_type = other DNA
aacagccatggctggttcccggatacagatggtgcgctcatcaccgtgaggtgtactggcaatagcggacactac

SEQ ID NO: 655463 - DNA, 75 bp, synthetic construct
  source 1..75: mol_type = other DNA
gtaatgcagccagggatgcaacgaccgcaacagaaaaagcccggagtcagcagaaagcgcacagtcagcggaaca

SEQ ID NO: 655464 - DNA, 75 bp, synthetic construct
  source 1..75: mol_type = other DNA
acccgcggcacgatcaactcctcatgctgatcgccgagcgtgggtatatgaatattgatgagctggcaaatctgc

SEQ ID NO: 655465 - DNA, 75 bp, synthetic construct
  source 1..75: mol_type = other DNA
cggtgggggcaaccggacctcagggaccgaagggcgacccgggggagacacaaatccgttttcgtctggggccgg

SEQ ID NO: 655466 - DNA, 75 bp, synthetic construct
  source 1..75: mol_type = other DNA
aggggcccgcgggtcctcaggggccgaagggtgataagggagagcgcggtgacaccggccctgtcgggggcaacc

SEQ ID NO: 655467 - DNA, 75 bp, synthetic construct
  source 1..75: mol_type = other DNA
tctgcatgctgcctttcgaatggtactcccctggttgcttccggtaatgtgggggagacccgtttaccgggcacg

SEQ ID NO: 655468 - DNA, 75 bp, synthetic construct
  source 1..75: mol_type = other DNA
ggcacaggaaaaccggtagagaactgcaccattcaactgaaagccagacgtaacagcgccacggtggtggtgaac

SEQ ID NO: 655469 - DNA, 75 bp, synthetic construct
  source 1..75: mol_type = other DNA
cactcatcaccggactgacctttcttgaccccaaagatgccacacgggttcagggtttttttcagcatttgcagg

SEQ ID NO: 655470 - DNA, 75 bp, synthetic construct
  source 1..75: mol_type = other DNA
ggctggttcccggatacagatggtgcgctcatcaccggactgacctttcttgaccccaaagatgccacacgggtt

SEQ ID NO: 655471 - DNA, 75 bp, synthetic construct
  source 1..75: mol_type = other DNA
ttgttcattaagtcacctgttttgtgttgtggtgaggatatcacctttaatcaggtggccaaatttactgtgcca

SEQ ID NO: 655472 - DNA, 75 bp, synthetic construct
  source 1..75: mol_type = other DNA
tgtttactctcggttcattgttttgcgcgctttccggcacgctgaacgaactgttgctggcgcgcgcgaacagta

SEQ ID NO: 655473 - DNA, 75 bp, synthetic construct
  source 1..75: mol_type = other DNA
aagtccgttgcatatgcacatggtcattgtctcttatgtgctgaccgtggcggtgatgctgcccgccagcggctg

SEQ ID NO: 655474 - DNA, 75 bp, synthetic construct
  source 1..75: mol_type = other DNA
acaaaatttgcaaccatctttaagagggttacaaatttccccgaaagcccgctccctcatcctctggacagaacg

SEQ ID NO: 655475 - DNA, 75 bp, synthetic construct
  source 1..75: mol_type = other DNA
cagaggacgatgcggcgccgttgccggacgcagataccgtggaggatacgcagccagagtcagagtcagagtcag

SEQ ID NO: 655476 - DNA, 75 bp, synthetic construct
  source 1..75: mol_type = other DNA
ggcgctgcgcatcgtggcaggccaggtgccggacaagctgaaaaacaccgatatcatgacccttgacctgggcgc

SEQ ID NO: 655477 - DNA, 75 bp, synthetic construct
  source 1..75: mol_type = other DNA
tggtggaagaggcagcgcgtcacgctgaggaggcgaagaagaatgccggagaggcggagacgtccgcgaggaatg

SEQ ID NO: 655478 - DNA, 75 bp, synthetic construct
  source 1..75: mol_type = other DNA
gcatcggagtcagcccggcaggcggcagaaagtgcagccgctgcaaagcagtcagaggaggcgtcctcgtcctcg

SEQ ID NO: 655479 - DNA, 75 bp, synthetic construct
  source 1..75: mol_type = other DNA
gacaccggccctgtcggggcaaccggcgaacggggaccggcaggtgatgctggtccggcaggtccgcaggggccg

SEQ ID NO: 655480 - DNA, 75 bp, synthetic construct
  source 1..75: mol_type = other DNA
acaaagtgcagcagaagctgaattgtcaagaaagacggcagaaagtgcagccggtaatgcagccagggatgcaac

SEQ ID NO: 655481 - DNA, 75 bp, synthetic construct
  source 1..75: mol_type = other DNA
ccgaaaggcgacaggggagagcggggagagaccggtctgacaggaagtacaggtccacaggggccaaagggagat

SEQ ID NO: 655482 - DNA, 75 bp, synthetic construct
  source 1..75: mol_type = other DNA
tgaaagatggtgcgggtcagccgatacaaaactgcaccattcagctgaaagccagacgtaacagcaccacggtgg

SEQ ID NO: 655483 - DNA, 75 bp, synthetic construct
  source 1..75: mol_type = other DNA
tacggcgggtgttcaactttattgaaaacccataccgtccggtgacatttgattatttaatggtgtcaccgcaaa

SEQ ID NO: 655484 - DNA, 75 bp, synthetic construct
  source 1..75: mol_type = other DNA
tgatcaatgaacgccagctctccgtcaatcagcaaaactggctgcgtcattactttaaacagtatctacgtcagc

SEQ ID NO: 655485 - DNA, 75 bp, synthetic construct
  source 1..75: mol_type = other DNA
taaaggcctggttgatcgtctgtatgcggcctccagctccggcgtaccggttaatctgctggttcgcggaatgtg

SEQ ID NO: 655486 - DNA, 75 bp, synthetic construct
  source 1..75: mol_type = other DNA
agctcacatcctgaatatcagaccggggataaggtcctgctgaccggctggggtgtaggagaaaaacattggggt

SEQ ID NO: 655487 - DNA, 75 bp, synthetic construct
  source 1..75: mol_type = other DNA
gctgttatgcaacttagtgctgatatggcgctgaatgaggcaggcaaaattcttaccgcagatattcaaggggcg

SEQ ID NO: 655488 - DNA, 75 bp, synthetic construct
  source 1..75: mol_type = other DNA
attatccagtcgccgcatttcaacgacgcggtcgatattcttatccccgattatcagcgttatctcgctgaccgt

SEQ ID NO: 655489 - DNA, 75 bp, synthetic construct
  source 1..75: mol_type = other DNA
aaactgaaaggtctggtcgcgatgggcgttgattgctttaagaccgactttggcgaacgtattccaaccgatgtt

SEQ ID NO: 655490 - DNA, 75 bp, synthetic construct
  source 1..75: mol_type = other DNA
taacacattttatataagtacaccattaacaatttttggcgcctcaaagaaaagtggtggtggatggactgccga

SEQ ID NO: 655491 - DNA, 75 bp, synthetic construct
  source 1..75: mol_type = other DNA
tccgccagcacgacgccgcgccattccgggagtgcagctttgcattacctgccaggaaatcgtagagctgaaagg

SEQ ID NO: 655492 - DNA, 75 bp, synthetic construct
  source 1..75: mol_type = other DNA
ggtggaccgcgagatcgccaacgcgcagcaggggctgcccagcggtatcaccctgaagctaaataaccttgtcga

SEQ ID NO: 655493 - DNA, 75 bp, synthetic construct
  source 1..75: mol_type = other DNA
gggcgctacttgtcgccggacctgaaatgatgagtcgcagccagaaacagctggggatttccacaatttccattg

SEQ ID NO: 655494 - DNA, 75 bp, synthetic construct
  source 1..75: mol_type = other DNA
tgtgaagtgcccgctgctgacggttcggtgatctttactctaaaagcaacacgtactggtaacacgattactgtg

SEQ ID NO: 655495 - DNA, 75 bp, synthetic construct
  source 1..75: mol_type = other DNA
ctctgctgccggtgaggcgatcattacgaccggggagacggataaccggagcggacgtatcgtgtctgacgggaa

SEQ ID NO: 655496 - DNA, 75 bp, synthetic construct
  source 1..75: mol_type = other DNA
cgcggacggggcggaaatacacgtcgcggacgttgtgctccggcagggattattgcctccctgtccccggtttgt

SEQ ID NO: 655497 - DNA, 75 bp, synthetic construct
  source 1..75: mol_type = other DNA
atatggttctgttacatcaggggtcgcaggagatgttgcgggggctatagtggaatcatcatctgaaaataccat

SEQ ID NO: 655498 - DNA, 75 bp, synthetic construct
  source 1..75: mol_type = other DNA
agccagaggtttactggttgcatgggcaccagttcctgcgattgcagccagtacagttatagcaccggtaacagc

SEQ ID NO: 655499 - DNA, 75 bp, synthetic construct
  source 1..75: mol_type = other DNA
cagatggtgaaggaggcggtaagccatattcctgttccgcgcgacggtcgtgactacgatccggatgttctgcag

SEQ ID NO: 655500 - DNA, 75 bp, synthetic construct
  source 1..75: mol_type = other DNA
gtgcgtccgatgattgagcagatggtgaaagaggcagtgagccatattcctgttccgcgtgatggtcgtgactac

SEQ ID NO: 655501 - DNA, 75 bp, synthetic construct
  source 1..75: mol_type = other DNA
aagtgcgtgacgggtgatgatgtgcgtccgatgcttgagcagatggtgaaagaggcagtgagccatattcctgtt

SEQ ID NO: 655502 - DNA, 75 bp, synthetic construct
  source 1..75: mol_type = other DNA
tcatctggataacgattatcgtgcaaccggccggggcgatgtcctgaataatgacggtgcatttattgaggccgg

SEQ ID NO: 655503 - DNA, 75 bp, synthetic construct
  source 1..75: mol_type = other DNA
gaacactggagaatcgcgggctgattgacggtgaactgacacacctgacgaccggtgtgctgaacaacaccggca

SEQ ID NO: 655504 - DNA, 75 bp, synthetic construct
  source 1..75: mol_type = other DNA
acgttgaactgacggcgccgggaacactgaataacgagggggttatccggggcgggcaggatgtcaggctgacag

SEQ ID NO: 655505 - DNA, 75 bp, synthetic construct
  source 1..75: mol_type = other DNA
tagcgtcggtttcggcaatggttctctgaacatttctgccagccgggataagatgcacagtgaataccgttcagt

SEQ ID NO: 655506 - DNA, 75 bp, synthetic construct
  source 1..75: mol_type = other DNA
tgacagcaggtcatgacctgcgtctggatacggtcagtacagtccgttctcaggaaagtgactggggtaaagata

SEQ ID NO: 655507 - DNA, 75 bp, synthetic construct
  source 1..75: mol_type = other DNA
ggtgacgggtattatgagcagagactggttcgtgatcagttgatccagctgaccggggggcgttataccggtaat

SEQ ID NO: 655508 - DNA, 75 bp, synthetic construct
  source 1..75: mol_type = other DNA
ttcagattatagtacctgtttctgccatatgcctaaggagaactatgataaaacaaacagtgggtatgtcgaaaa

SEQ ID NO: 655509 - DNA, 75 bp, synthetic construct
  source 1..75: mol_type = other DNA
acctcagctcctgtcaggtggcgcaggggattgtcggaggattatttcctcagactcaggtgtcacagcagaagg

SEQ ID NO: 655510 - DNA, 75 bp, synthetic construct
  source 1..75: mol_type = other DNA
ggtgtgcagctttgcattacctgtcaggaaatcgcagaactgaaaggcaaacattacaacggaggtgctgtatga

SEQ ID NO: 655511 - DNA, 75 bp, synthetic construct
  source 1..75: mol_type = other DNA
aacagcgacatgaatcagttctttaataagctggggtttgcttccaataccacacagccgggcgtctggcagggg

SEQ ID NO: 655512 - DNA, 75 bp, synthetic construct
  source 1..75: mol_type = other DNA
ctgactgggcggcttcccggcagggatgtaccgttggcgggaaatctgacagcgtcagggataaagtcagcgaca

SEQ ID NO: 655513 - DNA, 75 bp, synthetic construct
  source 1..75: mol_type = other DNA
aacagcgatatgaatcagttctttaacaagctgggcttcgcctccaataccacacagccgggcgtctggcagggg

SEQ ID NO: 655514 - DNA, 75 bp, synthetic construct
  source 1..75: mol_type = other DNA
tgtcagccagaaccactgaccgctcaattatccgggccatgatggaaggcggtacagcaaaaatttatcactgca

SEQ ID NO: 655515 - DNA, 75 bp, synthetic construct
  source 1..75: mol_type = other DNA
tttgtcgaatacggcctgtaaaacgtcatctcgctcgtgcaggcgtaaatcaaataattccattcctgctttgcc

SEQ ID NO: 655516 - DNA, 75 bp, synthetic construct
  source 1..75: mol_type = other DNA
tcaagggccaggaccgggcgatcgccagcctgcataaacacctgcgtacctcacgcgccgacctgcgccgtccag

SEQ ID NO: 655517 - DNA, 75 bp, synthetic construct
  source 1..75: mol_type = other DNA
aaacgcttcaaagggctgatggcggaggtcatttcctccccggtgccggtcattctgtttatcgacgaagcgcat

SEQ ID NO: 655518 - DNA, 75 bp, synthetic construct
  source 1..75: mol_type = other DNA
cagcagttgctgggcgcggcagaagacactgatgctgtggtggaagaagtcaccgaaacagtttccccggtgcag

SEQ ID NO: 655519 - DNA, 75 bp, synthetic construct
  source 1..75: mol_type = other DNA
taacggcaggctcgacccggtactgtgccgcgaccacgaaatcgacctgatgatcgacattctctgccgccgccg

SEQ ID NO: 655520 - DNA, 75 bp, synthetic construct
  source 1..75: mol_type = other DNA
ggccaggacctggcgattgccagcctgcataagcatctactgaccgcacgcgccgacctgcgtcgtccgggacgc

SEQ ID NO: 655521 - DNA, 75 bp, synthetic construct
  source 1..75: mol_type = other DNA
tatcctccgggcgattatggaggggggaacggcaaaagtttatcactgcaacgattcggacaagtgtctgaaggt

SEQ ID NO: 655522 - DNA, 75 bp, synthetic construct
  source 1..75: mol_type = other DNA
atcatgcaactaaccgcatagatggtttattcgaaattgatgatggttcaggtcggagccaggatgttgatttac

SEQ ID NO: 655523 - DNA, 75 bp, synthetic construct
  source 1..75: mol_type = other DNA
atcctatagatattgagttatccacgggtaaagaagttagtatcgaagatcttgaccctggtagcgggcttatct

SEQ ID NO: 655524 - DNA, 75 bp, synthetic construct
  source 1..75: mol_type = other DNA
ggccgatttaggcattgatattgaagaaaaagcctttttcgacattcttgctcatatgcgcgataaatatcagtt

SEQ ID NO: 655525 - DNA, 75 bp, synthetic construct
  source 1..75: mol_type = other DNA
ttcagggcgttatgatgcggctatcgtagatggcgaaaaaggaaaacgttttcatattgcctggtgcagaactct

SEQ ID NO: 655526 - DNA, 75 bp, synthetic construct
  source 1..75: mol_type = other DNA
cgaaggatggagaatatataccgtgggtgagctggttaaagaaatacaaacaggagcctttacgccagcaaaatt

SEQ ID NO: 655527 - DNA, 75 bp, synthetic construct
  source 1..75: mol_type = other DNA
gaacataaagttattgcaactgtagaggctgcatggccaggtcttaaaattgcagttaatcttattcctgctaaa

SEQ ID NO: 655528 - DNA, 75 bp, synthetic construct
  source 1..75: mol_type = other DNA
aacgaagtgtaataaggacttgatcccaacgcctacagagactgaaaaggataaaacggaggggtttttcttatg

SEQ ID NO: 655529 - DNA, 75 bp, synthetic construct
  source 1..75: mol_type = other DNA
cggggcagggagagcgttacgaccagatactcgcgtttgcttatcccgacaacagccttagccgctggggagcgc

SEQ ID NO: 655530 - DNA, 75 bp, synthetic construct
  source 1..75: mol_type = other DNA
tgccggcgcgtaccactgaccgcgatatcctccgggcgattatgggaaggggggaacggcaaaaatttaccaact

SEQ ID NO: 655531 - DNA, 75 bp, synthetic construct
  source 1..75: mol_type = other DNA
ggcacagctttgccactcatttcatgattaatggaggaagtattatcacgctacaacggatactaggtcacacgc

SEQ ID NO: 655532 - DNA, 75 bp, synthetic construct
  source 1..75: mol_type = other DNA
tacaaggcgagacggggtacaacgaaccagacgtgtttgcggtctgtcgtttagtctcaggtttcccctataccg

SEQ ID NO: 655533 - DNA, 75 bp, synthetic construct
  source 1..75: mol_type = other DNA
cgctagccgctgaagaaaatcacagcggagaagagtacgacggcagtaaaaccggcgtacttaatgggcgctatc

SEQ ID NO: 655534 - DNA, 75 bp, synthetic construct
  source 1..75: mol_type = other DNA
gaccaaccagagccgctggtttggtctgccacttgacgaactcattcctgcagtaatctgtatcggctggggaat

SEQ ID NO: 655535 - DNA, 75 bp, synthetic construct
  source 1..75: mol_type = other DNA
tcgttatcataattttaaagactttattaatttccccaatgtcggcaaagccaatctggtgaacaaaccactgcc

SEQ ID NO: 655536 - DNA, 75 bp, synthetic construct
  source 1..75: mol_type = other DNA
ttctggtggtacagaccatcttcatggcgttgtatgccattttcgtcacctggcgcatgatgggtaaaaactacg

SEQ ID NO: 655537 - DNA, 75 bp, synthetic construct
  source 1..75: mol_type = other DNA
ggcctgccactggatgaactgatccccgcagcaatctgtattggctggggtatcacaacatcgaaatatctgttc

SEQ ID NO: 655538 - DNA, 75 bp, synthetic construct
  source 1..75: mol_type = other DNA
attggtgcagcggttctagtttatttcgggattaaaaaactgaaaaaagggcggggcagttcctggttacgtgac

SEQ ID NO: 655539 - DNA, 75 bp, synthetic construct
  source 1..75: mol_type = other DNA
ggtggaccagaaaagggcttgtctcttctcatcagggtagctatagtgtcgccccttcgcagaccatggggtcta

SEQ ID NO: 655540 - DNA, 75 bp, synthetic construct
  source 1..75: mol_type = other DNA
gcttgtctaacattattgcagagggctgtgatgcggggattcgtcctggacaggggctggatgaacatatgacag

SEQ ID NO: 655541 - DNA, 75 bp, synthetic construct
  source 1..75: mol_type = other DNA
atgatgaaaatagagccttcaattttgccttctcttgcctggtttgcgctgattgttcgtgccggcagtttttcc

SEQ ID NO: 655542 - DNA, 75 bp, synthetic construct
  source 1..75: mol_type = other DNA
gcaacaacgcgagcaacaccacggtcatcgtggtgttgtgctgtggtttaccggtctctccggttccggtaaatc

SEQ ID NO: 655543 - DNA, 75 bp, synthetic construct
  source 1..75: mol_type = other DNA
atctgcctgacagtggggaaaatcgttgcccagttactggctggaaccgcttttgaattgccaaccttcgtttgt

SEQ ID NO: 655544 - DNA, 75 bp, synthetic construct
  source 1..75: mol_type = other DNA
gagtgaggatgccttctaaagtccgcgcttttatagattttatggttgagaaaagattaagcctcaagagtaata

SEQ ID NO: 655545 - DNA, 75 bp, synthetic construct
  source 1..75: mol_type = other DNA
gaatgaagagttcgaaatagaggtgtcaggtaagtatatttctaatgatgacgaaagcatgatacgaatggcgct

SEQ ID NO: 655546 - DNA, 75 bp, synthetic construct
  source 1..75: mol_type = other DNA
ctggtttgccactgaaaaaggccaggcggtggatctgaacagcctgaaacgctcgccaaagcaacaacaggcact

SEQ ID NO: 655547 - DNA, 75 bp, synthetic construct
  source 1..75: mol_type = other DNA
ctgttcctgcaacaactgcgtaatctgatcctttccagcccgctggcagacgacaaactgtgggttctcggtccg

SEQ ID NO: 655548 - DNA, 75 bp, synthetic construct
  source 1..75: mol_type = other DNA
gttaaagccgggagtcgcgtgcgcgtgccgtttggcaaacaacaggagcgtatcggtgttgtggtgtcagtgagc

SEQ ID NO: 655549 - DNA, 75 bp, synthetic construct
  source 1..75: mol_type = other DNA
ccgattttactgcgccaggggcgacctgcggcgaacacgccaatgtggtactggtttgccaccgagcagggccag

SEQ ID NO: 655550 - DNA, 75 bp, synthetic construct
  source 1..75: mol_type = other DNA
atgttccctggtgtagccatttcacgtatcgaccgcgataccaccagccgcaaaggggcgctggagcaacaattg

SEQ ID NO: 655551 - DNA, 75 bp, synthetic construct
  source 1..75: mol_type = other DNA
tccgtctggcgattactgctatgggcggcggattattatcatcatcccattggcgatgtgttgtttcatgccttg

SEQ ID NO: 655552 - DNA, 75 bp, synthetic construct
  source 1..75: mol_type = other DNA
gttccggcactggcccctaagcgtggtggccgctggcgctggcaaattttgttgcagcacccttcccgcgtgcgc

SEQ ID NO: 655553 - DNA, 75 bp, synthetic construct
  source 1..75: mol_type = other DNA
ggcgaaaggtcaccactttccggatgtgacgctggtggcgttactggatgtggacggcgcgctgttttctgcgga

SEQ ID NO: 655554 - DNA, 75 bp, synthetic construct
  source 1..75: mol_type = other DNA
aatttaatgatgccgcgttgcaggcgctgcgcaaaaaaggtctgtgtgatttagcaagtgaaacaccagagttta

SEQ ID NO: 655555 - DNA, 75 bp, synthetic construct
  source 1..75: mol_type = other DNA
gtgacgctggtggcattactggacgtagacggcgcgctgttttctgccgattttcgctcggcagagcgtttcgcc

SEQ ID NO: 655556 - DNA, 75 bp, synthetic construct
  source 1..75: mol_type = other DNA
tggcgcgaccaggtcgcggaacttgaatttaatgatgccgcgttgcaggcgctgcgcaaaaaaggtctgtgtgat

SEQ ID NO: 655557 - DNA, 75 bp, synthetic construct
  source 1..75: mol_type = other DNA
ggatttaaaaggtcagaaggtgcaggcagggctggctccggcgttaatcacccgtatgcgccagcatttacaggc

SEQ ID NO: 655558 - DNA, 75 bp, synthetic construct
  source 1..75: mol_type = other DNA
gttgcagcacccttcccgcgtgcgcttgcaacacatcattagtggtacgctggcgctcatcaatacaataccgga

SEQ ID NO: 655559 - DNA, 75 bp, synthetic construct
  source 1..75: mol_type = other DNA
gcgctggcagccaacatcaccaatgaaggcggggcggaaggtcgctatcgggtgctgaaaaatatcatgggctta

SEQ ID NO: 655560 - DNA, 75 bp, synthetic construct
  source 1..75: mol_type = other DNA
tgtaagtgttttcagaaggtattttggtgttcctccccatctgcgtattttcatgaaaggagatcactcaataac

SEQ ID NO: 655561 - DNA, 75 bp, synthetic construct
  source 1..75: mol_type = other DNA
gcttcagagtcgcggaagaagagctgttactgccggatgagcagcatgacgattaccgctggctgacgccggacg

SEQ ID NO: 655562 - DNA, 75 bp, synthetic construct
  source 1..75: mol_type = other DNA
aagcaatcgtccgtttcatccacatattaccttattgcgcgacgccagcgaggcggtgacaatcccgccgccagg

SEQ ID NO: 655563 - DNA, 75 bp, synthetic construct
  source 1..75: mol_type = other DNA
aaagttttgcagagattacttcatgataatgttctgtcgaaattgccgattcatccaaatgctgtagcatatcag

SEQ ID NO: 655564 - DNA, 75 bp, synthetic construct
  source 1..75: mol_type = other DNA
aaaacaatttctaacgaggttttagtcaagcagttcaagccattagatgataatgagttacaagtaatgactctt

SEQ ID NO: 655565 - DNA, 75 bp, synthetic construct
  source 1..75: mol_type = other DNA
aagagattgcctggaaatcttaaagatgtttcgatgacattatcatcatggatttcaaaatggttaaatgtaggt

SEQ ID NO: 655566 - DNA, 75 bp, synthetic construct
  source 1..75: mol_type = other DNA
taaagatctggaacagcaacttggcaccctgctgtttgttcgtcattcgcgcagtgtggcgcttactcatgcggg

SEQ ID NO: 655567 - DNA, 75 bp, synthetic construct
  source 1..75: mol_type = other DNA
tattccagcagatttgtatattgtttatgaacagcaacaggcaacaccagcgctggagagattagttaatgcttt

SEQ ID NO: 655568 - DNA, 75 bp, synthetic construct
  source 1..75: mol_type = other DNA
ccggtttctggaacagcaccgcctacggtcgcgagttctactggtggtggtcgatgttcggtgctggtggcaggc

SEQ ID NO: 655569 - DNA, 75 bp, synthetic construct
  source 1..75: mol_type = other DNA
gcatctgactctggcatttttaggcgaagtgagcgcagagaaagagaaggcgctttctcttttagccggacggat

SEQ ID NO: 655570 - DNA, 75 bp, synthetic construct
  source 1..75: mol_type = other DNA
ggcaattatcgttgtagcgtttgccggaccgagtttgtcccacgctatgtttgctgtctggctggcattgctgcc

SEQ ID NO: 655571 - DNA, 75 bp, synthetic construct
  source 1..75: mol_type = other DNA
agcgtgttgttggttaacctccttggcgatggcgttcgtcgtgcgattattgcggggtggaataatgccattact

SEQ ID NO: 655572 - DNA, 75 bp, synthetic construct
  source 1..75: mol_type = other DNA
tatacacgctatgctgatgatatgtacttctcaacaaacgaagaaaatgtattgaagcaaataccacctttttta

SEQ ID NO: 655573 - DNA, 75 bp, synthetic construct
  source 1..75: mol_type = other DNA
gcttatcgcgatagccgcaccaatggcctgatgacgcaggcacaacagcaactcggcaaacgcgatatttatcag

SEQ ID NO: 655574 - DNA, 75 bp, synthetic construct
  source 1..75: mol_type = other DNA
aatgagattccggtggtcgccgttgccagccatgataccgccagcgcggttatcgcctcgccgttaaacggttca

SEQ ID NO: 655575 - DNA, 75 bp, synthetic construct
  source 1..75: mol_type = other DNA
cagcaatctgtactggctggggtatcacaacatcgaaatatctgttcggtattggtgcagcggttctggtttatt

SEQ ID NO: 655576 - DNA, 75 bp, synthetic construct
  source 1..75: mol_type = other DNA
gcgctcgcagccaacatcaccaatgaaggcggtgcggaaggtcgctatcgggtactgaaaaatatcatgggttta

SEQ ID NO: 655577 - DNA, 75 bp, synthetic construct
  source 1..75: mol_type = other DNA
attgttcgtcacgatctgtttgaccgggtgcatatcggcctcgacttctttgatgcctctatcaaccgcattgcc

SEQ ID NO: 655578 - DNA, 75 bp, synthetic construct
  source 1..75: mol_type = other DNA
ccgacaagatttccgccgccatgctgtatgtgccgcagttgctgctgcacgtcagccgtccggttcgctgggaca

SEQ ID NO: 655579 - DNA, 75 bp, synthetic construct
  source 1..75: mol_type = other DNA
cagtacaggttcagttaattgaaactaacgcccagggcgatatttcgaaagaaagtacatttgttgatacgcttg

SEQ ID NO: 655580 - DNA, 75 bp, synthetic construct
  source 1..75: mol_type = other DNA
gccgattattttattgccaacaaaattgctcaaccgaaaattgccgttataaattgcgaagcctttgaagtttgt

SEQ ID NO: 655581 - DNA, 75 bp, synthetic construct
  source 1..75: mol_type = other DNA
gtgcaacgacgtaaagggtttgaagaagtattaaaagcccgcgttcccggcgcgcaaattgtcgctaatcaggaa

SEQ ID NO: 655582 - DNA, 75 bp, synthetic construct
  source 1..75: mol_type = other DNA
ccaatagtacaaatgataatgttccaggcttgctttccctgataactgcacatctcaaagacctgcctgatgatg

SEQ ID NO: 655583 - DNA, 75 bp, synthetic construct
  source 1..75: mol_type = other DNA
atgcctaaaaaaatgacaagaacccgtaatttattattaatggctacgctattgggtagcgcactatttgccagg

SEQ ID NO: 655584 - DNA, 75 bp, synthetic construct
  source 1..75: mol_type = other DNA
ggaaaaattgctgttttcggttcggatatgaccactgaaattgctcaggagctggaaaacaatcaggtgctgaaa

SEQ ID NO: 655585 - DNA, 75 bp, synthetic construct
  source 1..75: mol_type = other DNA
gactgacctttcttgaccccaaagatgccacacgggttcagggtttttttcagcatttgcaggtcaggtttggcg

SEQ ID NO: 655586 - DNA, 75 bp, synthetic construct
  source 1..75: mol_type = other DNA
gcaggtcaggtttggtgacgggccgtggcaggatgtcaaggggctggatgaagtgggcagtgatacaggcagaac

SEQ ID NO: 655587 - DNA, 75 bp, synthetic construct
  source 1..75: mol_type = other DNA
ccggcctctctggttccggtaaatcaaccgtcgcgggggcgctggaggaggcgttacataaccttggtgtcagta

SEQ ID NO: 655588 - DNA, 75 bp, synthetic construct
  source 1..75: mol_type = other DNA
attgagacaaacagcaatggctggttcccggatacagatggtgcactcatcaccggactgacctttcttgacccc

SEQ ID NO: 655589 - DNA, 75 bp, synthetic construct
  source 1..75: mol_type = other DNA
tggtggaagaggtggcgcgtcacgccggggaggcgaagaagaatgccggagaggcggagacgtcagcgaggaatg

SEQ ID NO: 655590 - DNA, 75 bp, synthetic construct
  source 1..75: mol_type = other DNA
gtctggggccggcgagcattattgagacaaacagcaatggctggttcccgggtacagatggtgcgctcatcaccg

SEQ ID NO: 655591 - DNA, 75 bp, synthetic construct
  source 1..75: mol_type = other DNA
taaaccgaatccccaccgtggtgggacctcccgggccaaagggggaacaggggcccgcgggtcctcaggggccga

SEQ ID NO: 655592 - DNA, 75 bp, synthetic construct
  source 1..75: mol_type = other DNA
aaacaggtgcggctggcccggtgggggcaaccggacctcagggaccaaagggcgacccgggggagacacaaatcc

SEQ ID NO: 655593 - DNA, 75 bp, synthetic construct
  source 1..75: mol_type = other DNA
tccgccagcacgccgccgtgccattcctggagtgcagctttgcattacctgccaggaaatcgcagagttgaaagg

SEQ ID NO: 655594 - DNA, 75 bp, synthetic construct
  source 1..75: mol_type = other DNA
gccggcgagcattattgagacaaacagcaatggctggttcccgggaacagatggtgcgctcatcaccggactgac

SEQ ID NO: 655595 - DNA, 75 bp, synthetic construct
  source 1..75: mol_type = other DNA
tgtccggcgaaaactcgtgtcagagaagagaatgtgcgtgaagttcaaaacagagacattatgattattacagag

SEQ ID NO: 655596 - DNA, 75 bp, synthetic construct
  source 1..75: mol_type = other DNA
cgcgctgatgcaaacagtgatagcaaggaaccagaatttgctgaagccacggcaatatatggtttgaataatact

SEQ ID NO: 655597 - DNA, 75 bp, synthetic construct
  source 1..75: mol_type = other DNA
gcaatatctgggcaacgcttttgcgcttatcgatgctaacggggcttctggcgtgaggatacaaaactatccggg

SEQ ID NO: 655598 - DNA, 75 bp, synthetic construct
  source 1..75: mol_type = other DNA
ccaacaacctctgtattacaaggcacggtgaaccgccccgggtttcctggagagtattttatctgtgaactcagg

SEQ ID NO: 655599 - DNA, 75 bp, synthetic construct
  source 1..75: mol_type = other DNA
tggtgaatacggtggcctctgaaaatccggatgaagccggtcgttacagcatggacgttgagtacggtcagtaca

SEQ ID NO: 655600 - DNA, 75 bp, synthetic construct
  source 1..75: mol_type = other DNA
ctctctgggatatcgagtaaatcacaaagctggactgtacgctggggaaatcaggcagatgaaccgccccgggtt

SEQ ID NO: 655601 - DNA, 75 bp, synthetic construct
  source 1..75: mol_type = other DNA
gtggtatgcaaacaaccgatctgtcacgtttttcaaaaaaaatacgcacaactaccaggaacttatcaggttgat

SEQ ID NO: 655602 - DNA, 75 bp, synthetic construct
  source 1..75: mol_type = other DNA
ggggacggatgcgcccggttatgcggcgattccttagagaaaatcctaacgttgaagttctttttcgcgaaaaga

SEQ ID NO: 655603 - DNA, 75 bp, synthetic construct
  source 1..75: mol_type = other DNA
atgccgcccgtgtacactgactgggattttttgcagcgagtttgccagcaggtgggattttcaccggttgttatt

SEQ ID NO: 655604 - DNA, 75 bp, synthetic construct
  source 1..75: mol_type = other DNA
aggggctgtttcagcatttgcaggtcaggtttggtgacgggccgtggcaggatgttaaggggctgaatgaagtgg

SEQ ID NO: 655605 - DNA, 75 bp, synthetic construct
  source 1..75: mol_type = other DNA
cagcggcatcatcgaagaacgcggcgaaaacctcagaaacgaacgcagctaacagcgcacaggcggcagcggcct

SEQ ID NO: 655606 - DNA, 75 bp, synthetic construct
  source 1..75: mol_type = other DNA
cgcggtgacaccggccctgtcggggcaaccggcgaacggggaccggcaggtgatgctggtccggcaggcccgcag

SEQ ID NO: 655607 - DNA, 75 bp, synthetic construct
  source 1..75: mol_type = other DNA
accgtgtatgaggattctcaacccggtacgctgaatgattttctcggtgccatgacggaggatgatgccccgtcc

SEQ ID NO: 655608 - DNA, 75 bp, synthetic construct
  source 1..75: mol_type = other DNA
agcattattgagacaaacagcaatggctggttcccgggtacagatggtgcgctcatcaccggactgacctttctt

SEQ ID NO: 655609 - DNA, 75 bp, synthetic construct
  source 1..75: mol_type = other DNA
gggacgaggtatcgcacctgagtggcaaatgaaacgggagatgctttcaccggcctatacaactcgctggtctga

SEQ ID NO: 655610 - DNA, 75 bp, synthetic construct
  source 1..75: mol_type = other DNA
tctgggtggatggtcaccgttacgcaaaggcaggctgtatgctgaacgatttcgctcctgacggggtttcgctgt

SEQ ID NO: 655611 - DNA, 75 bp, synthetic construct
  source 1..75: mol_type = other DNA
aaagcacggtagaggcgatctgggcgggaattaaagcgaccgaagccgcagttagcaaagagtttggcctggcac

SEQ ID NO: 655612 - DNA, 75 bp, synthetic construct
  source 1..75: mol_type = other DNA
acactctggcatgcattgaaagtgggtgaaagcattttaggttcacgaccagaaattcgcttctatggcacgtat

SEQ ID NO: 655613 - DNA, 75 bp, synthetic construct
  source 1..75: mol_type = other DNA
atcaatattctggataacgaattatctaattttaagtttaatgagaacagcaaagacgaatttatggccgacatc

SEQ ID NO: 655614 - DNA, 75 bp, synthetic construct
  source 1..75: mol_type = other DNA
cagccatggctggttcccggatacagatggcgcactcatcaccggactgacctttcttgaccccaaagatgccac

SEQ ID NO: 655615 - DNA, 75 bp, synthetic construct
  source 1..75: mol_type = other DNA
aaagacggcagaaagtgcagccggtaatgcagccagggatgcaacgaccgcaacagaaaaagcccgggagtcagc

SEQ ID NO: 655616 - DNA, 75 bp, synthetic construct
  source 1..75: mol_type = other DNA
gcggcaaagaaatccgaaacggcagcagcctcatcgaagaatgcagcgaaaacctcagaaacgaatgcagctaac

SEQ ID NO: 655617 - DNA, 75 bp, synthetic construct
  source 1..75: mol_type = other DNA
aacgtcaaattagcttcgtgaaatctcacttttctcgtcaactggaagaacgcttagggctgattgaagtccagg

SEQ ID NO: 655618 - DNA, 75 bp, synthetic construct
  source 1..75: mol_type = other DNA
gcttctacgccagttgtgagaaagtatttcgtcccgatttgcgtaataagtccgttgtggtgctcagtaacaacg

SEQ ID NO: 655619 - DNA, 75 bp, synthetic construct
  source 1..75: mol_type = other DNA
ctcatcaccggactgacctttcttgaccccaaagatgccacacgggttcaggggctgtttcagcatttgcaggtc

SEQ ID NO: 655620 - DNA, 75 bp, synthetic construct
  source 1..75: mol_type = other DNA
agaggcagcgcgtcacgctgaggaggcgaagaagaatgccggagaggcagagacgtcagcgaggaatgcgggtat

SEQ ID NO: 655621 - DNA, 75 bp, synthetic construct
  source 1..75: mol_type = other DNA
cgctgcaaagcagtcagaggaggcgtcctcgtcctcggcttctgcggccgctcaaaaagccagtgagtcatcaca

SEQ ID NO: 655622 - DNA, 75 bp, synthetic construct
  source 1..75: mol_type = other DNA
cccggcaggcggcagaaagtgcagccgctgcaaagcagtcagaggaggcgtcctcgtcctcggcctctgaggccg

SEQ ID NO: 655623 - DNA, 75 bp, synthetic construct
  source 1..75: mol_type = other DNA
tttggtgacgggccgtggcaggatgttaaggggcttgatgaagtgggcagtgatacaggcagaacaggagaatga

SEQ ID NO: 655624 - DNA, 75 bp, synthetic construct
  source 1..75: mol_type = other DNA
gaggcactgcgtcgttttgaactgatggtggaagaagcagcgcgtcacgcagaggaggcgaagaagaatgccgga

SEQ ID NO: 655625 - DNA, 75 bp, synthetic construct
  source 1..75: mol_type = other DNA
cgctgcaaagcagtcagaggaggcgtcctcgtcctcggcctctgcggccgctcaaaaagccagtgagtcattaca

SEQ ID NO: 655626 - DNA, 75 bp, synthetic construct
  source 1..75: mol_type = other DNA
gtcgttacctatgatggcaacgtgggtgagcagtataacgatgcctggtttggtgacaggccaatgaaaatatca

SEQ ID NO: 655627 - DNA, 75 bp, synthetic construct
  source 1..75: mol_type = other DNA
ggtgggggcaaccggacctcagggaccgaagggcgacccgggggagacacaaatccgttttcgtctggggccggc

SEQ ID NO: 655628 - DNA, 75 bp, synthetic construct
  source 1..75: mol_type = other DNA
acaaatccgttttcgtctggggccggcgagcattattgagacaaacagcaatggctggttcccggatacagatgg

SEQ ID NO: 655629 - DNA, 75 bp, synthetic construct
  source 1..75: mol_type = other DNA
caggtccggcaggcccacagggaccgaaaggagaaacaggtgcggctggcccggtgggggcaaccggacctcagg

SEQ ID NO: 655630 - DNA, 75 bp, synthetic construct
  source 1..75: mol_type = other DNA
accggcgaacgggaccggcaggtgatgctggtccggcaggcccgcgaggggccgaaaggtgacaggggagagcag

SEQ ID NO: 655631 - DNA, 75 bp, synthetic construct
  source 1..75: mol_type = other DNA
accgtgtatgaagattctcagccgggtacgctgaatgattttctcggtgccatgacggaggaggatgcccggccg

SEQ ID NO: 655632 - DNA, 75 bp, synthetic construct
  source 1..75: mol_type = other DNA
atgaatgaacgtgaactgtccattatccgtgcgctgggtgaagaattcgccacggtgctggcggatttacagctc

SEQ ID NO: 655633 - DNA, 75 bp, synthetic construct
  source 1..75: mol_type = other DNA
aatccatgggagcgtggatggaacgatggctggactgaatgtctgaatcaacgtgtagccggcatcctgaggcag

SEQ ID NO: 655634 - DNA, 75 bp, synthetic construct
  source 1..75: mol_type = other DNA
catcaccattctcacatctttctgctattggtagtgattatttcaatacaggcaaagaaaatcatgttgaactaa

SEQ ID NO: 655635 - DNA, 75 bp, synthetic construct
  source 1..75: mol_type = other DNA
gtgtacccatctggtactcatcatggtcaagatagtccaaatgaaaaatattttgatggtagcaatcctctctac

SEQ ID NO: 655636 - DNA, 75 bp, synthetic construct
  source 1..75: mol_type = other DNA
acaaactagcgggacttatcggggcattgtcaccggcttcgcgacgtaagctggccgcagagattgcgaaggaac

SEQ ID NO: 655637 - DNA, 75 bp, synthetic construct
  source 1..75: mol_type = other DNA
cgttaagcgaaaaatgtttgcgaaacttatcaccagtcgttttttgcatatccgcgccagcccggagcaggcatc

SEQ ID NO: 655638 - DNA, 75 bp, synthetic construct
  source 1..75: mol_type = other DNA
gctgtcaccgtcagggcgtcggcgactgagcgccgaactggcgaaacgtctgcggcagagtcagcagcgtcgggt

SEQ ID NO: 655639 - DNA, 75 bp, synthetic construct
  source 1..75: mol_type = other DNA
tcgctggataagtattttccccgtattcactctgctttccttattgaagggaacctgaatctggtggtagaccag

SEQ ID NO: 655640 - DNA, 75 bp, synthetic construct
  source 1..75: mol_type = other DNA
ttacaaaacgttttcctgctaccagttgttgcagcggccttgcatcgtttaaacaaagccgaactgctccctatt

SEQ ID NO: 655641 - DNA, 75 bp, synthetic construct
  source 1..75: mol_type = other DNA
gaatcgggaattatctttgacaacaatgaggataaaacggattcagcagcactgttgccctgtatcgaacaggcc

SEQ ID NO: 655642 - DNA, 75 bp, synthetic construct
  source 1..75: mol_type = other DNA
aagttcttggtatgggagattttattggttatcaacgcgacagaatgactgataagcaaacatttaatgcactgc

SEQ ID NO: 655643 - DNA, 75 bp, synthetic construct
  source 1..75: mol_type = other DNA
ttttcttaaaaacggcgtcgtgtatcgcagtgacgacggggtgataatgaaagagtggttatttaagcgtgaaga

SEQ ID NO: 655644 - DNA, 75 bp, synthetic construct
  source 1..75: mol_type = other DNA
gcgttactgctggcatgggtattcaaccattattttatccgctcacggttggtgaaacgctttaccctactgaat

SEQ ID NO: 655645 - DNA, 75 bp, synthetic construct
  source 1..75: mol_type = other DNA
gaagagtttgatactgagattccggacgaagaagctgagaaaatcaccaccgttcaggctgccattgattacatc

SEQ ID NO: 655646 - DNA, 75 bp, synthetic construct
  source 1..75: mol_type = other DNA
gtgaatgcctctactctgaaagagccggaagaaattaaactggcgatgcaggttgtggtgctacgtgacaagctg

SEQ ID NO: 655647 - DNA, 75 bp, synthetic construct
  source 1..75: mol_type = other DNA
gtccggttcacactgtaaccctgctgctgggcgacaaagttattccggctaccattctgggtattcagtccgatc

SEQ ID NO: 655648 - DNA, 75 bp, synthetic construct
  source 1..75: mol_type = other DNA
gtatcgcgcccacgtgaagggcgaaagcaccgaagcactgctgccgaatatggttgcgacttcgctggcgaaact

SEQ ID NO: 655649 - DNA, 75 bp, synthetic construct
  source 1..75: mol_type = other DNA
ttcttcgataaagtgatggtcatggttgatgacaaagaattgcgtatcaaccgtctgaccatgctggagaaactg

SEQ ID NO: 655650 - DNA, 75 bp, synthetic construct
  source 1..75: mol_type = other DNA
atctgacgaagtgctgagcgatcgcgtgaatgcctctactctgaaagagccggaagaaattaaactggcgatgca

SEQ ID NO: 655651 - DNA, 75 bp, synthetic construct
  source 1..75: mol_type = other DNA
gccctggtttacaccatgaaaggtgaccagaagtacttcccggtgtacgcgaacgacggcaaactgctgccgaac

SEQ ID NO: 655652 - DNA, 75 bp, synthetic construct
  source 1..75: mol_type = other DNA
cattagtttctcgcgaggaagttaaacccggcactgcaattctttacaacgggcgttattacatggcgtcagcta

SEQ ID NO: 655653 - DNA, 75 bp, synthetic construct
  source 1..75: mol_type = other DNA
tcgactatggcgagtgcgtgaggacgcagagttagttggggagttagttactccagtaataaagaaaagtgattc

SEQ ID NO: 655654 - DNA, 75 bp, synthetic construct
  source 1..75: mol_type = other DNA
tcgccatttgccccgcgtaagcgcccgcccgtcagaacaaagcaaggccggattaagcgcgagatgttcgcgaaa

SEQ ID NO: 655655 - DNA, 75 bp, synthetic construct
  source 1..75: mol_type = other DNA
accgaggctttaccaaaggtgcagaagtcgagccttctattgaaggaaaagtactgctcaactatgaaacgcttc

SEQ ID NO: 655656 - DNA, 75 bp, synthetic construct
  source 1..75: mol_type = other DNA
tcaatattttttctgaagatgacgctgcccgcgcggcacgtcagctgcttgcccaccgtccggatggcattatct

SEQ ID NO: 655657 - DNA, 75 bp, synthetic construct
  source 1..75: mol_type = other DNA
cggtgcaatttatctgaccggtattttcatgacctggcgtagagcgcgtggctttattaaacaagagaaaaccgt

SEQ ID NO: 655658 - DNA, 75 bp, synthetic construct
  source 1..75: mol_type = other DNA
atgaaatcattaaccacggaaacagcgctgtatattctgattgcgtggctgcaggacaatattgactgcgaatca

SEQ ID NO: 655659 - DNA, 75 bp, synthetic construct
  source 1..75: mol_type = other DNA
tggattggtgtgttgctgtccatgatatgaatgccggatttgatgaaaagattttgttcccctcgtcagttgaaa

SEQ ID NO: 655660 - DNA, 75 bp, synthetic construct
  source 1..75: mol_type = other DNA
atggcaactttgacaaaaaaagaacgggcatggttaaacgaattacaggaagttcttgatcgctgtccatcaccg

SEQ ID NO: 655661 - DNA, 75 bp, synthetic construct
  source 1..75: mol_type = other DNA
agcagcactgttgccctgtatcgaacaggccagagaggatatccgtaccctgcgccaactgcagcttcagcacca

SEQ ID NO: 655662 - DNA, 75 bp, synthetic construct
  source 1..75: mol_type = other DNA
cgttcttgatcgctgtccatcaccgaaaaaaattggcttttacaccattggcgataaaagcatttacctgtatga

SEQ ID NO: 655663 - DNA, 75 bp, synthetic construct
  source 1..75: mol_type = other DNA
atggcaactttgacaaaaaaagaacaagcatggttgaacgaattacaggacgttcttgatcgctgtccatcaccg

SEQ ID NO: 655664 - DNA, 75 bp, synthetic construct
  source 1..75: mol_type = other DNA
atggcaactttgacaaaaaaagagcaagcatggttgagcgaattacaggacgttcttgatcgctgtccatcaccg

SEQ ID NO: 655665 - DNA, 75 bp, synthetic construct
  source 1..75: mol_type = other DNA
atgcctgccgggtttacccactttcaactggtaaccagcaacaacatgaaatcattaaccacggaaactgctctg

SEQ ID NO: 655666 - DNA, 75 bp, synthetic construct
  source 1..75: mol_type = other DNA
ataaaacggattcggcagcactgctgccccgcattgaacaggccagggaagatatccataccctgcgtcaactgc

SEQ ID NO: 655667 - DNA, 75 bp, synthetic construct
  source 1..75: mol_type = other DNA
gcattacgggggtagctttcattatccttattttcgtcgtgttgctgtgtctgttgggatttatgacctctgcca

SEQ ID NO: 655668 - DNA, 75 bp, synthetic construct
  source 1..75: mol_type = other DNA
atgcctgccgggtttacccactttcgactggtaaccagtaacaacatgaaatcattaaccacggaaaccgctctg

SEQ ID NO: 655669 - DNA, 75 bp, synthetic construct
  source 1..75: mol_type = other DNA
atgcctgccgggtttacccactttccactggtaaccagaaacaacatgaaatcattaaccacggaaactgctctg

SEQ ID NO: 655670 - DNA, 75 bp, synthetic construct
  source 1..75: mol_type = other DNA
atgcctgccgggtttacccactttctactggtaaccagcaacaacatgaaatcattaaccacggaaacggctctg

SEQ ID NO: 655671 - DNA, 75 bp, synthetic construct
  source 1..75: mol_type = other DNA
ggaattatctttgacaacgatgagtatagaacggattcggcagcactgttgccctgtatcgaacaggccagagag

SEQ ID NO: 655672 - DNA, 75 bp, synthetic construct
  source 1..75: mol_type = other DNA
atgcctgccgggtttacccactttcgactggtaaccagaaacaacatgaaatcattaaccacggaaaccgcactg

SEQ ID NO: 655673 - DNA, 75 bp, synthetic construct
  source 1..75: mol_type = other DNA
cactggatattctgattgcatggctgcaggacaatatcgactgtgaatcggaaattatctttgacaacgatgagg

SEQ ID NO: 655674 - DNA, 75 bp, synthetic construct
  source 1..75: mol_type = other DNA
gggatagcgccggacggtaaccgtaacgttctccgtcacctgaaaggcattgaggggaataccggtggtctgctg

SEQ ID NO: 655675 - DNA, 75 bp, synthetic construct
  source 1..75: mol_type = other DNA
acggattcggcagcactgttgccctgtatcgaacaggcccgggagaatgtccgtactcttcgtcatctgcagctt

SEQ ID NO: 655676 - DNA, 75 bp, synthetic construct
  source 1..75: mol_type = other DNA
acccggttctgcggcttaaacgcctggggctgtcaaaaacgttccgccgtctggttgtcacacttacccgacgtt

SEQ ID NO: 655677 - DNA, 75 bp, synthetic construct
  source 1..75: mol_type = other DNA
ggagtgcggacaccgtgggctgaccagtctggtggacgagctggatcgctgccatgaagaatgtccggtcgagga

SEQ ID NO: 655678 - DNA, 75 bp, synthetic construct
  source 1..75: mol_type = other DNA
cggaccgtctttggtgttgatgtgccgcagagcattcaggccgctgccatcatgatgaagaacgggctggctgcc

SEQ ID NO: 655679 - DNA, 75 bp, synthetic construct
  source 1..75: mol_type = other DNA
acctgatggcggcagggatgcagaaaatgtctgccgaaatgcgcggcgaacttcctgaaattctgcatgagtatt

SEQ ID NO: 655680 - DNA, 75 bp, synthetic construct
  source 1..75: mol_type = other DNA
gcaaaaagtttcgcgtggctgtctccggatcaactgttgatggccgtgaaatcagtccggtgcatctgcgtgaag

SEQ ID NO: 655681 - DNA, 75 bp, synthetic construct
  source 1..75: mol_type = other DNA
catgggagtgggatccggaacagaaaaaaatggttcagaaggcgtggcactggtcgcctcctggtggggccagtg

SEQ ID NO: 655682 - DNA, 75 bp, synthetic construct
  source 1..75: mol_type = other DNA
gttcgggctgattggcgatggcatcaaagccgtgtgggagtggttcacccgcctgcttgaacctgcaaacgcctc

SEQ ID NO: 655683 - DNA, 75 bp, synthetic construct
  source 1..75: mol_type = other DNA
cggcagcaaatccccgctggatgaggcatggttccggcaggggatacagaaaaccgccagcaatacaggcgggct

SEQ ID NO: 655684 - DNA, 75 bp, synthetic construct
  source 1..75: mol_type = other DNA
atgacaaatgatatttatattggtggcaaagtgattgatagcttcggtgactggtcgccacagactgaacatcca

SEQ ID NO: 655685 - DNA, 75 bp, synthetic construct
  source 1..75: mol_type = other DNA
agaatatcccagacgtgattaataatcttcctgacggatatcgaattgtgaagatggttaaagcttcaaggggtg

SEQ ID NO: 655686 - DNA, 75 bp, synthetic construct
  source 1..75: mol_type = other DNA
aatcagtgcgctcttcttcctttgtcgaagttaattattattagcgataactttagaaagttagcaaaaaatgct

SEQ ID NO: 655687 - DNA, 75 bp, synthetic construct
  source 1..75: mol_type = other DNA
aatatgaatcacagaagaaaattgctatgcaggctgatattgagcagcttacgaagatttctcagaaatatgcaa

SEQ ID NO: 655688 - DNA, 75 bp, synthetic construct
  source 1..75: mol_type = other DNA
atctttgtgtctcctgagcctcaagagatgccagatattggtaaaactgaagcactatttaatcttgagcgtgaa

SEQ ID NO: 655689 - DNA, 75 bp, synthetic construct
  source 1..75: mol_type = other DNA
gtcaccacagattgaacatccagctatcgctattcagcgtaaagaacacgatgcgagaattgcacttgagcaaga

SEQ ID NO: 655690 - DNA, 75 bp, synthetic construct
  source 1..75: mol_type = other DNA
aatgacaccactgaaatcatgcaacaagcggtagcagacttgcaaccactcatagcacaactaatcgataaggct

SEQ ID NO: 655691 - DNA, 75 bp, synthetic construct
  source 1..75: mol_type = other DNA
tacgcagacttgaaaataatgaactaaaaattcatcaatatttcgatttaattgaacttagcacaacgtttgatt

SEQ ID NO: 655692 - DNA, 75 bp, synthetic construct
  source 1..75: mol_type = other DNA
atttagtggaattaaagatcaattatctggtcaatctgatagctttactgctttaatcaattcaacaattgagaa

SEQ ID NO: 655693 - DNA, 75 bp, synthetic construct
  source 1..75: mol_type = other DNA
tcttattcagcccaatacaacgattaatgatattaataattggttgaatgctaacttaaatagacgagttgcact

SEQ ID NO: 655694 - DNA, 75 bp, synthetic construct
  source 1..75: mol_type = other DNA
ggcaggtggcccgaatattcgcttaaaaggagtgctgtatgagcgagattttaaatttagcgcgggagttcgaga

SEQ ID NO: 655695 - DNA, 75 bp, synthetic construct
  source 1..75: mol_type = other DNA
cgctgattatcaggcactggacgcagatattattcaatgcatccaacgcgcagatgaagtgcataccatgacgtc

SEQ ID NO: 655696 - DNA, 75 bp, synthetic construct
  source 1..75: mol_type = other DNA
gttatgaaagggattgtgaaagaatatgaagatgctaagaaggttgctatgcaggctgatattgagcagttagtg

SEQ ID NO: 655697 - DNA, 75 bp, synthetic construct
  source 1..75: mol_type = other DNA
tggatagtgagatatggggcgcaaatttggcagggaaatgtgtggcgtgtaggtcgaataaggcgttcacgccgc

SEQ ID NO: 655698 - DNA, 75 bp, synthetic construct
  source 1..75: mol_type = other DNA
tcaatgacgcggatcggctacgcaaatacctggcgcgttttggtctgacgtgggaagccgtgcaggatcagcaca

SEQ ID NO: 655699 - DNA, 75 bp, synthetic construct
  source 1..75: mol_type = other DNA
gcagtaccactcacatcagagcagcaacgtattcgtgagctggaaaagcaggtgcgtcgtctggaggaacaaaat

SEQ ID NO: 655700 - DNA, 75 bp, synthetic construct
  source 1..75: mol_type = other DNA
acagcttacactccctacaggaagtctctttcagtagtcttggttttaccgaacgtggcaatctgcaggaatggc

SEQ ID NO: 655701 - DNA, 75 bp, synthetic construct
  source 1..75: mol_type = other DNA
ggatgaagtgcaaattaaccagagccgcacccagagggtgatgatggtggcggcgagcttccgcaaagaggtcac

SEQ ID NO: 655702 - DNA, 75 bp, synthetic construct
  source 1..75: mol_type = other DNA
ttgacgacaccaaagagcgcctcgacctgctggctatcgataaacagcgcaacctggtgatcattgaaaacaagc

SEQ ID NO: 655703 - DNA, 75 bp, synthetic construct
  source 1..75: mol_type = other DNA
gctatgaaagaccttatttctgaatatgaaacgcagaagaagattgctatgcaggctgatattgagcagcttact

SEQ ID NO: 655704 - DNA, 75 bp, synthetic construct
  source 1..75: mol_type = other DNA
agaattaaagatgtcaccaaaggaaatcatctttgtggctcctgaaccccaagagatgcctgatatctgcaaaac

SEQ ID NO: 655705 - DNA, 75 bp, synthetic construct
  source 1..75: mol_type = other DNA
gatggttttggtacttttcctgagaatatcccagacgtgattaataatcttcctgatggatatcgaattgtgaag

SEQ ID NO: 655706 - DNA, 75 bp, synthetic construct
  source 1..75: mol_type = other DNA
actatgaaacgcagaagaagattgctatgcaggctgatattgagcagttagtgaagatttcaacgaagtacgcaa

SEQ ID NO: 655707 - DNA, 75 bp, synthetic construct
  source 1..75: mol_type = other DNA
aagagatgcctgatatttgcaagagtgaagcattatttaatcttgagcgtgaatattacccactgctaaaagaac

SEQ ID NO: 655708 - DNA, 75 bp, synthetic construct
  source 1..75: mol_type = other DNA
cagaagaagattgctatgcaggctgatattgagcagttagtgaagatttcaacgaagtacgcaaaggtgctttga

SEQ ID NO: 655709 - DNA, 75 bp, synthetic construct
  source 1..75: mol_type = other DNA
gtaatcgtacccaagtgtataccaatggcggatttcttgttgggggaaccgtcagcgcgctgaactcctataaca

SEQ ID NO: 655710 - DNA, 75 bp, synthetic construct
  source 1..75: mol_type = other DNA
gagcgaggccgggttttaccagacgctggcttacacgcgcacagggatgccagcgaagcagaatgccggggacca

SEQ ID NO: 655711 - DNA, 75 bp, synthetic construct
  source 1..75: mol_type = other DNA
gtggagatatagaaagaatggaagatatattgatgttgcggtagatacaggggaaattgtctcttttggtcgttt

SEQ ID NO: 655712 - DNA, 75 bp, synthetic construct
  source 1..75: mol_type = other DNA
ttcaccgccgatctgctgaaggtaaacaaagcagacgatgttgtcagtgacgcagaaaagctggcggatgatgtg

SEQ ID NO: 655713 - DNA, 75 bp, synthetic construct
  source 1..75: mol_type = other DNA
cagtgaccgtattctgagcgccaccaccttccgctatgacacgctgtgccgtctggtggaggcgaaaaacgatga

SEQ ID NO: 655714 - DNA, 75 bp, synthetic construct
  source 1..75: mol_type = other DNA
accacgatgagttctggatgaacagccgtaacaccatcggcctaatcgtgggccagccgccaccggcaggcgtgc

SEQ ID NO: 655715 - DNA, 75 bp, synthetic construct
  source 1..75: mol_type = other DNA
gtgagtcagcgcggattcacaatactggagatgatgctgatccttttgttgatgggcattactgcagggttggta

SEQ ID NO: 655716 - DNA, 75 bp, synthetic construct
  source 1..75: mol_type = other DNA
atcagccgcgctttgctggtgattctctgccgtctaacccggtggcctgtgcgctggcgatcgctgacaaaatgg

SEQ ID NO: 655717 - DNA, 75 bp, synthetic construct
  source 1..75: mol_type = other DNA
cgttgacaccatccaggcggtactggcgcgtcgtccgactcgtccggctgatttcgatgcccgtatgaaagcggt

SEQ ID NO: 655718 - DNA, 75 bp, synthetic construct
  source 1..75: mol_type = other DNA
gccgattccgaaactgatgcgctggggcgcaagcgacgtacacttcgtgcgtccagttcatactgtgactttgct

SEQ ID NO: 655719 - DNA, 75 bp, synthetic construct
  source 1..75: mol_type = other DNA
cggtcgcagcatccgtgatgccgcttctccggttgaagccgcgcgtcagttcaaacgttccatcgccgaactgtg

SEQ ID NO: 655720 - DNA, 75 bp, synthetic construct
  source 1..75: mol_type = other DNA
caaaccctgaccgaagaagcggtgcgtctgtatggcgataagctgactaatagcaatgtagttgatgatgttatc

SEQ ID NO: 655721 - DNA, 75 bp, synthetic construct
  source 1..75: mol_type = other DNA
accgttgaccaggctgagcgtctgaccaccgataaaggcgaatggttgctgtatcgcgctcatgtgaagggcgaa

SEQ ID NO: 655722 - DNA, 75 bp, synthetic construct
  source 1..75: mol_type = other DNA
gaaaagagcagctggctggactgggtgcagacaggactggatattgccgggtttgcaccgggctttggttttttt

SEQ ID NO: 655723 - DNA, 75 bp, synthetic construct
  source 1..75: mol_type = other DNA
ctgctattggcgattgcagtagtgtgggtaataaaggcggttaaagcaccaaaagtgccgaaatatcagcgttat

SEQ ID NO: 655724 - DNA, 75 bp, synthetic construct
  source 1..75: mol_type = other DNA
atgctggaactactttttgtgattggcttttttgtcatgctgatggtcaccggcgtttcgttgctgggcattatc

SEQ ID NO: 655725 - DNA, 75 bp, synthetic construct
  source 1..75: mol_type = other DNA
gtgtcctaaaaaaatatgctaagaagtattattactatacttcttcttttttaatgtcagatgaattatatataa

SEQ ID NO: 655726 - DNA, 75 bp, synthetic construct
  source 1..75: mol_type = other DNA
ctgttattggcgattgcggtagtgtgggtgattaaggcgattaaagcgccaaaagtgccgaaatatcagcgttat

SEQ ID NO: 655727 - DNA, 75 bp, synthetic construct
  source 1..75: mol_type = other DNA
gtggtgtgggttattaaggcgattaaagcaccaaaagtgccgaaatatcagcgttatgaccgctggcgttactaa

SEQ ID NO: 655728 - DNA, 75 bp, synthetic construct
  source 1..75: mol_type = other DNA
ctgctgttggcggttgcggtggtgtgggtgatcagggcgattaaagcaccaaaagtgccgaaatatcagcgttat

SEQ ID NO: 655729 - DNA, 75 bp, synthetic construct
  source 1..75: mol_type = other DNA
catgccagtgctgaacgtaaatacctgtggattttccttgagtgtgtaattgtgtttattttgtgtgctgtgctg

SEQ ID NO: 655730 - DNA, 75 bp, synthetic construct
  source 1..75: mol_type = other DNA
tcacggcgaacgaccagataagccacgccacctggacgggtgattccagtcagtttccgctgtgtgaggaactgt

SEQ ID NO: 655731 - DNA, 75 bp, synthetic construct
  source 1..75: mol_type = other DNA
gaaaaaggaagctggctggactgggtacaaacaggactggatattgccggatttgcaccgggctttggttttttt

SEQ ID NO: 655732 - DNA, 75 bp, synthetic construct
  source 1..75: mol_type = other DNA
tagaggcaacaccggatattttgctgctgcccggcggtgaagtgacgccatttacccttttgtttcgacagatgg

SEQ ID NO: 655733 - DNA, 75 bp, synthetic construct
  source 1..75: mol_type = other DNA
gcttgaaagcaagttgagcactgttaaaaaacagtttgattatcaggagccagtacagaatacgccagggcaaca

SEQ ID NO: 655734 - DNA, 75 bp, synthetic construct
  source 1..75: mol_type = other DNA
agaatcatctgcaacaacagcgggagcgtctgcaggcgcagctggattatgccttggatagaagcctgcaggacg

SEQ ID NO: 655735 - DNA, 75 bp, synthetic construct
  source 1..75: mol_type = other DNA
gggctcggtactcctggttcccgcacggtggctgaactggaatctgaaattctgcaactacgtaaggcgttaaat

SEQ ID NO: 655736 - DNA, 75 bp, synthetic construct
  source 1..75: mol_type = other DNA
aaggcgttaaatgaagctcgccttgagcgagatatattaaaaaaagcaacagcgtattttgcacaggagtcgctg

SEQ ID NO: 655737 - DNA, 75 bp, synthetic construct
  source 1..75: mol_type = other DNA
tcacgctacgcgatgcgcaaggggatatccctgctgttgtgatgcattacggtgtcttcattcaaaacgtctttg

SEQ ID NO: 655738 - DNA, 75 bp, synthetic construct
  source 1..75: mol_type = other DNA
atgaatgaccgtgactttatgcgttacagccgtcaaatcctgctcgatgatgttgccattgaagggcagcaaaaa

SEQ ID NO: 655739 - DNA, 75 bp, synthetic construct
  source 1..75: mol_type = other DNA
ggcgtcgggacgctggtactggcagatgacgacgatgtgcatttgagcaatctgcaacgacaaatcctctttacc

SEQ ID NO: 655740 - DNA, 75 bp, synthetic construct
  source 1..75: mol_type = other DNA
cacgagcgatgaaaatctcaaagccgtgataaatctgcgtcttgcccgagttcaggtgcagctcaagcagactga

SEQ ID NO: 655741 - DNA, 75 bp, synthetic construct
  source 1..75: mol_type = other DNA
gaagcacgacttgagcgagatatattaaaaaaagcaacagcgtattttgcccaggagtcgctgaaaaatacgcgt

SEQ ID NO: 655742 - DNA, 75 bp, synthetic construct
  source 1..75: mol_type = other DNA
ctacggagtttaaagccgaagccgtcaaaacggttcctgaaaatcagctttcgatcagtgaaggcgcttcccgat

SEQ ID NO: 655743 - DNA, 75 bp, synthetic construct
  source 1..75: mol_type = other DNA
tccccgaagcggagattaaagcgcgtatcgccgaactgggtcgtcagattactgagcgttacaaagacagcggca

SEQ ID NO: 655744 - DNA, 75 bp, synthetic construct
  source 1..75: mol_type = other DNA
ctttatggcaataaagctaatcaataaactgaatcgtaagaaagaagaaccggtcgccgcgcctgcgccgaccaa

SEQ ID NO: 655745 - DNA, 75 bp, synthetic construct
  source 1..75: mol_type = other DNA
ggatttggcggtgggtgtcattatcggtgcggcattcgggaagattgtctcttcactggttgccgatatcatcat

SEQ ID NO: 655746 - DNA, 75 bp, synthetic construct
  source 1..75: mol_type = other DNA
atgatctggcagcctgagttcacagataaaacactctccaggaaacccggggcggttcaacgttactctaaagag

SEQ ID NO: 655747 - DNA, 75 bp, synthetic construct
  source 1..75: mol_type = other DNA
atgaatcgtattgaacattatcatgactggttacgtgacgcccacgcaatggaaaagcaagccgaatctatgctt

SEQ ID NO: 655748 - DNA, 75 bp, synthetic construct
  source 1..75: mol_type = other DNA
aaagctacggaagaactcgggcaacttatcgccatcgctcgtgaagaactacagcgccgcaaggccaaagagcag

SEQ ID NO: 655749 - DNA, 75 bp, synthetic construct
  source 1..75: mol_type = other DNA
tgttcatgtcccagaccttgttaatgccgttaacggagagattcaggcatacgaatttcggcctgatcttccatc

SEQ ID NO: 655750 - DNA, 75 bp, synthetic construct
  source 1..75: mol_type = other DNA
gccgttaacggagaaattcaggcatacgaatttcgacctgatcttccatccatttttccacatccaaataaccat

SEQ ID NO: 655751 - DNA, 75 bp, synthetic construct
  source 1..75: mol_type = other DNA
tctacgatgctgacccggtattcaagaaagaccttgatgatgcgctgaaatcagcaggacttaccgggttaaccg

SEQ ID NO: 655752 - DNA, 75 bp, synthetic construct
  source 1..75: mol_type = other DNA
gcaagggcagcatcaacaacggtcagtatctgtccgtcgatattggtatcaacggggtgctggtgaagcagttcc

SEQ ID NO: 655753 - DNA, 75 bp, synthetic construct
  source 1..75: mol_type = other DNA
aaagccgccgaggagatcgggcaactcgtcaccgtcgcgcgtgaagaactccagcgacgcaaggtcaaagggcag

SEQ ID NO: 655754 - DNA, 75 bp, synthetic construct
  source 1..75: mol_type = other DNA
ttcagcggtggtgaagaaaccaaaccgaccgagcaaccagcaccgaaagcagaagcgaaaccggaacgtcaacag

SEQ ID NO: 655755 - DNA, 75 bp, synthetic construct
  source 1..75: mol_type = other DNA
atgagcagaaaaacccaacgttactctacggagtttaaagccgaagccgtcaaaacggttcctgaaaatcagctt

SEQ ID NO: 655756 - DNA, 75 bp, synthetic construct
  source 1..75: mol_type = other DNA
taaatgaggaaaagcaaatggccgactggctgattcagcatattccgcaaacaactgagaaatttttaattcgct

SEQ ID NO: 655757 - DNA, 75 bp, synthetic construct
  source 1..75: mol_type = other DNA
ctattgagattcttggaagtcagcaagccttagccaagcgatgcggaaaggcccagtcaacagtctgcgattggt

SEQ ID NO: 655758 - DNA, 75 bp, synthetic construct
  source 1..75: mol_type = other DNA
gtaagtggtcagcgtcgtcgtcgctatcgtgacgagcgttatccaacccagtcgccaatgccgttgaccgtagcg

SEQ ID NO: 655759 - DNA, 75 bp, synthetic construct
  source 1..75: mol_type = other DNA
gtcgtaatcgtcgccaggcacagcagcagactgccgagacgcgtgagagccgtcagcaggctgaggtaacggaaa

SEQ ID NO: 655760 - DNA, 75 bp, synthetic construct
  source 1..75: mol_type = other DNA
gggcattgcgaccattactcgtggatcgaacagcctgaaagccgcacccgtcgagttgcgccagtggctggaaga

SEQ ID NO: 655761 - DNA, 75 bp, synthetic construct
  source 1..75: mol_type = other DNA
actggaaataatccccgccattgacgatcaaaaatcctttccccggggcacgtatgccacacaccagggcggact

SEQ ID NO: 655762 - DNA, 75 bp, synthetic construct
  source 1..75: mol_type = other DNA
gtatgaccggtgataaacccggagaagctcattcatcaggctggaccctggctgcaaaacgtggacgggatgcag

SEQ ID NO: 655763 - DNA, 75 bp, synthetic construct
  source 1..75: mol_type = other DNA
tgatgcggtcgggaaaataccggtaccggcggacggtaaaagtatcacccccgatgatgtgcgtccgatgattga

SEQ ID NO: 655764 - DNA, 75 bp, synthetic construct
  source 1..75: mol_type = other DNA
aggcacaaacgtttgaagaaaaactggcttctcagtctgtggtattacagaagtgcgtgacgggtgatgatgtgc

SEQ ID NO: 655765 - DNA, 75 bp, synthetic construct
  source 1..75: mol_type = other DNA
cccgccattgacgatcaaaaatcctttccccggggcacgtatgccacacacctgggaggattctggcgggcgtat

SEQ ID NO: 655766 - DNA, 75 bp, synthetic construct
  source 1..75: mol_type = other DNA
cggtgacgtgggggggctcgctgtggcactgcaacagtatgaccgaagataaacccggagaagctcattcatcag

SEQ ID NO: 655767 - DNA, 75 bp, synthetic construct
  source 1..75: mol_type = other DNA
ttcgtgcactgggagaagaattcgccacggtgctggcggatttacagcgcacatttgaggagaagatggccgcgc

SEQ ID NO: 655768 - DNA, 75 bp, synthetic construct
  source 1..75: mol_type = other DNA
ccatatccctgttccgcgtgatggtcgtgactacgatccggaagtactgcagaaggcggtgaatgatgcggtcgc

SEQ ID NO: 655769 - DNA, 75 bp, synthetic construct
  source 1..75: mol_type = other DNA
tgtggcactgcaacagcatgaccggtgataagcccggtgaagcccattcatcaggctggaccctggctgccaaac

SEQ ID NO: 655770 - DNA, 75 bp, synthetic construct
  source 1..75: mol_type = other DNA
tatgaccggtgataaacccggagaagctcattcatcaggctggaccctggctgccaaacgtggacgggatgcagg

SEQ ID NO: 655771 - DNA, 75 bp, synthetic construct
  source 1..75: mol_type = other DNA
ggaggcggtgagtgccctgccggctccgcaggacgggcgtgatgccacggcactggaaatactccccgccattga

SEQ ID NO: 655772 - DNA, 75 bp, synthetic construct
  source 1..75: mol_type = other DNA
acagtatgaccggtgataaacccggagaagctcattcatcaggctggaccctggctgcaaaacgtggacgggatg

SEQ ID NO: 655773 - DNA, 75 bp, synthetic construct
  source 1..75: mol_type = other DNA
gtgattacgatccggaagtactgaagctggcggtgaatgatgcggtcgcgaaaataccggtgccggcagacggca

SEQ ID NO: 655774 - DNA, 75 bp, synthetic construct
  source 1..75: mol_type = other DNA
catctacaacgaactggtgtggaacgtgctcaaggaaaccgtcggcgaggaagaagccgtcttgtttgcccgctc

SEQ ID NO: 655775 - DNA, 75 bp, synthetic construct
  source 1..75: mol_type = other DNA
gctggattatctggaagcactggagctggtggatacatccagtgcgccagatattgaatggcctacccctccggc

SEQ ID NO: 655776 - DNA, 75 bp, synthetic construct
  source 1..75: mol_type = other DNA
gctggattatctggaagcactggacctggtggatacctccagtgcgccagatattgaatggcctacacctccggc

SEQ ID NO: 655777 - DNA, 75 bp, synthetic construct
  source 1..75: mol_type = other DNA
ccagaatctgacgccggtgaccgggcagctgctgtgcgaagtggcgtcttcgggcaaacgagacatcgatctggc

SEQ ID NO: 655778 - DNA, 75 bp, synthetic construct
  source 1..75: mol_type = other DNA
tcggtggtatattcccttctaatgaaatagtcaaaggctctattagcggatatgtcttcgagcaatttgaaatcg

SEQ ID NO: 655779 - DNA, 75 bp, synthetic construct
  source 1..75: mol_type = other DNA
atggcggaacgcaatctgccgctgcatgttttccactttgactgtttctggatgaaagccttccagtggtgcgat

SEQ ID NO: 655780 - DNA, 75 bp, synthetic construct
  source 1..75: mol_type = other DNA
gagagatcctgattttgctttgtttaagaaaaaaataatacaatatattaacgaggcagtgtttgattcaaaggt

SEQ ID NO: 655781 - DNA, 75 bp, synthetic construct
  source 1..75: mol_type = other DNA
ctgtagttcattgatagaatcgggattgtggtcgagggatgcagtagaaagacagatgagccatcaggagcgtag

SEQ ID NO: 655782 - DNA, 75 bp, synthetic construct
  source 1..75: mol_type = other DNA
gattaaacgcacctttaatccaggtttcaaaattgcgctgcaccagaaagatctcaacctggcactgcaaagtgc

SEQ ID NO: 655783 - DNA, 75 bp, synthetic construct
  source 1..75: mol_type = other DNA
gctggattatctggaagcactggatctggtggatacttccagtgcgccagatattgaatggcctacccctccggc

SEQ ID NO: 655784 - DNA, 75 bp, synthetic construct
  source 1..75: mol_type = other DNA
gctggattatctggaagcactggaactggtggatacgtccagtgcgccagatattgaatggcctacccctccggc

SEQ ID NO: 655785 - DNA, 75 bp, synthetic construct
  source 1..75: mol_type = other DNA
atccttatttaacttttgtcacgctttctgttttgggggggatttttctttttatttggtggcgaaacgatgttt

SEQ ID NO: 655786 - DNA, 75 bp, synthetic construct
  source 1..75: mol_type = other DNA
cataccctgctgaatgttctgtttaattacagcgtgtttgacagcagccagactctgctcgtcatgcgcccctat

SEQ ID NO: 655787 - DNA, 75 bp, synthetic construct
  source 1..75: mol_type = other DNA
attgcgacaatcttctcctttgccgccaatgaagaacaaaatgccattggtgaaatttccgatgaaacttttgat

SEQ ID NO: 655788 - DNA, 75 bp, synthetic construct
  source 1..75: mol_type = other DNA
gacgctactggtgatgcgaccgtaccagattgccgccaccgaacgaatcttatggaaaatcaacagctcctataa

SEQ ID NO: 655789 - DNA, 75 bp, synthetic construct
  source 1..75: mol_type = other DNA
ggcgctggagcagcagtattattcccagtgcctgcagacgctgattgagtccattgaactgttactggatgaggc

SEQ ID NO: 655790 - DNA, 75 bp, synthetic construct
  source 1..75: mol_type = other DNA
gtgattgaggtccccggcagtattacggaagaaaacgcgaaaaaactgaaggggaactgggacagcggatatacg

SEQ ID NO: 655791 - DNA, 75 bp, synthetic construct
  source 1..75: mol_type = other DNA
aatcgtcagagaaaaggtaaagaagccctgactgaagaggtcagacgcttaatccgctcaagtctgggcaaccgt

SEQ ID NO: 655792 - DNA, 75 bp, synthetic construct
  source 1..75: mol_type = other DNA
gacactactggtgatgcgaccgtaccagattgccgccactgagcggatcttatggaagatcaacagctcttataa

SEQ ID NO: 655793 - DNA, 75 bp, synthetic construct
  source 1..75: mol_type = other DNA
gcaaaactatgatgaatttgccacgctgaaagccctgcaacaaatcgatcttagcgatcctgttgcggtagaaaa

SEQ ID NO: 655794 - DNA, 75 bp, synthetic construct
  source 1..75: mol_type = other DNA
ccattcgtctcccggcagaacgtaaagttcaggactatcgctcagcatacaatgatatcagggactggcagcgac

SEQ ID NO: 655795 - DNA, 75 bp, synthetic construct
  source 1..75: mol_type = other DNA
gctgtttggtgacaaaaacaccaaaaatgtggttttagaaaagagttatgcagagtatatggaaggctttactga

SEQ ID NO: 655796 - DNA, 75 bp, synthetic construct
  source 1..75: mol_type = other DNA
aacttgcgttttcacggcctgatgcaggcattctcccgcaccaaccgcatttatgacgccactaaaaccttcggt

SEQ ID NO: 655797 - DNA, 75 bp, synthetic construct
  source 1..75: mol_type = other DNA
tttaatgacagcgagtggcggcgtttcacggagcagtatctggataacccgagcgatggcattctggataagacc

SEQ ID NO: 655798 - DNA, 75 bp, synthetic construct
  source 1..75: mol_type = other DNA
aaattgtctgttcggtgttccgtgtcccggcctacaagattggcgtgggacaaccgccttccagtgacaacgtgg

SEQ ID NO: 655799 - DNA, 75 bp, synthetic construct
  source 1..75: mol_type = other DNA
cgctggatattctgattgcgtggctgcaggataatatcgactgcgaatcggaaattatctttgacaacgatgagg

SEQ ID NO: 655800 - DNA, 75 bp, synthetic construct
  source 1..75: mol_type = other DNA
tccaacatggacgaaatcaaagaactgatcaaactgtccggtagcgtaaccgtgggtgaaacccataagcgctaa

SEQ ID NO: 655801 - DNA, 75 bp, synthetic construct
  source 1..75: mol_type = other DNA
ggcgaaggcttcaagcgtattgctgaagaaggtcagcgcgtgaaagttggcgatactgtgattgaattcgatctg

SEQ ID NO: 655802 - DNA, 75 bp, synthetic construct
  source 1..75: mol_type = other DNA
ctctcgatattttgatttgcttgctgcaggacaacatctgttgcgacagcgggattatcttcgataacgacgaag

SEQ ID NO: 655803 - DNA, 75 bp, synthetic construct
  source 1..75: mol_type = other DNA
ctccatacacattatgcaatccggctttgggagggcaggaaacgtgatgctccggacgagacaggggtgaaaaaa

SEQ ID NO: 655804 - DNA, 75 bp, synthetic construct
  source 1..75: mol_type = other DNA
taaaacggattcggcagcactgttgccctgtattgaacaggctagggaggatatccgtatcctgcgccaactgca

SEQ ID NO: 655805 - DNA, 75 bp, synthetic construct
  source 1..75: mol_type = other DNA
cctacaaaacagttcatgccacccggcaggatattttatccggcacggagaagggcagggtggctgtcagccgtt

SEQ ID NO: 655806 - DNA, 75 bp, synthetic construct
  source 1..75: mol_type = other DNA
gtattagctgagatgattgaaaagctaaaaaattacagcgatcagtacaacaccgtgctgctttatgtgtccgat

SEQ ID NO: 655807 - DNA, 75 bp, synthetic construct
  source 1..75: mol_type = other DNA
tacgcggtcgatgctgttgccgctattgcagaggtgagaggctggaacgcctgccgtgccgctatgcttcagggg

SEQ ID NO: 655808 - DNA, 75 bp, synthetic construct
  source 1..75: mol_type = other DNA
ggacctacaaaatcagggctatgaatttatagccgtaaaatctcagtcggcgatgctggccaatgttcgacaaca

SEQ ID NO: 655809 - DNA, 75 bp, synthetic construct
  source 1..75: mol_type = other DNA
tgcagattatccagcagtttgaacaggcgggttctcatgctaaccgttatgacgtaactatcctggttaatggct

SEQ ID NO: 655810 - DNA, 75 bp, synthetic construct
  source 1..75: mol_type = other DNA
cttatcaggtaccagttgaagtccgtccggttcgtcgtaatgctctagcaatgcgttggatcgttgaagctgctc

SEQ ID NO: 655811 - DNA, 75 bp, synthetic construct
  source 1..75: mol_type = other DNA
aacagagagaaaaaaggtaaagaagccctgactgaagaggtcagacgcttaatccggtcaagtctgggcaaccgt

SEQ ID NO: 655812 - DNA, 75 bp, synthetic construct
  source 1..75: mol_type = other DNA
cggaacggcgacgatgtggttatccgtcctggcatttggcagacaggccgaagcactggaaaggcaccgcaaggg

SEQ ID NO: 655813 - DNA, 75 bp, synthetic construct
  source 1..75: mol_type = other DNA
ttttgagtgggacccgctgactttccctgacccggaagggatgatccgccgcctgaaagcgaaaggactgaaaat

SEQ ID NO: 655814 - DNA, 75 bp, synthetic construct
  source 1..75: mol_type = other DNA
tcaggttattgcagacagcgtaatcagtgcccgtgcggcacgtcctggcgggaacagacgcaagaccacaggcac

SEQ ID NO: 655815 - DNA, 75 bp, synthetic construct
  source 1..75: mol_type = other DNA
agggctggcaggttatcgcagacagcgtaatcagtgcgcgatcggtgcgaccgggcggcaaaaaaggccaacagg

SEQ ID NO: 655816 - DNA, 75 bp, synthetic construct
  source 1..75: mol_type = other DNA
aaaacagaccagcaagggcacaccaatgacgctggcacgtatggcggtatcgttgccatgtagtcaggcgcagga

SEQ ID NO: 655817 - DNA, 75 bp, synthetic construct
  source 1..75: mol_type = other DNA
agcagcgagttgaagaagaacgccaacgtcatatccgtgctgcccgtgccaaagcgccgggcgtgtcccgcgtgc

SEQ ID NO: 655818 - DNA, 75 bp, synthetic construct
  source 1..75: mol_type = other DNA
ataatgacatcggatacggttcctgcccctttctcggcagcatttacgatactgacccggcatttaagaaagacc

SEQ ID NO: 655819 - DNA, 75 bp, synthetic construct
  source 1..75: mol_type = other DNA
aacaggtaatactgatatcctcattttgttttattagcaccgggggttacgccgctaatattgcaaaaactgcag

SEQ ID NO: 655820 - DNA, 75 bp, synthetic construct
  source 1..75: mol_type = other DNA
acgacgtacccgacgttacaccagtgcagcaggctccggcattaccagtaacacctgcagacagcgcaccggcag

SEQ ID NO: 655821 - DNA, 75 bp, synthetic construct
  source 1..75: mol_type = other DNA
tacagaacgctaaacgcgtgcaaaacgcgcttaacgcctgccgcgctgccatgcttcagggtagggaacgccttg

SEQ ID NO: 655822 - DNA, 75 bp, synthetic construct
  source 1..75: mol_type = other DNA
gttactgacgatggggaagaaccggcatcgaaagtaacccactggatgccgataccagaaccgccgcaggaggcg

SEQ ID NO: 655823 - DNA, 75 bp, synthetic construct
  source 1..75: mol_type = other DNA
cgtatatccgcaagggcagcatcaacaacggtcagtatctgtccgtcgatatcggtatcaacggggtgctggtga

SEQ ID NO: 655824 - DNA, 75 bp, synthetic construct
  source 1..75: mol_type = other DNA
tactgacgcactgaacagagcaaaacaacaggcagatcagcaaggaagccatccactagtgggagataatgagca

SEQ ID NO: 655825 - DNA, 75 bp, synthetic construct
  source 1..75: mol_type = other DNA
accgtgagttgcgggacgctctggtatcttggcgggctgatacaggcgaacctggaagaaatcaggaagcagaac

SEQ ID NO: 655826 - DNA, 75 bp, synthetic construct
  source 1..75: mol_type = other DNA
gcgccatatccgtgctgcccgtgccaaaacaccgggcgtgtctcgcgtgctttgcattgaatgtgaagcaccaat

SEQ ID NO: 655827 - DNA, 75 bp, synthetic construct
  source 1..75: mol_type = other DNA
gagcgatggcattctggataagacccgtaaaatccatatcgactatatttgcgactttatttttgatgacgagcg

SEQ ID NO: 655828 - DNA, 75 bp, synthetic construct
  source 1..75: mol_type = other DNA
gagcaaaaggcttcaatgccatgttagcagtgagcagcgtggacgcggcaaaagcttattacacgacatttaaaa

SEQ ID NO: 655829 - DNA, 75 bp, synthetic construct
  source 1..75: mol_type = other DNA
atgcagatgaaggacgtcatttggcctgcggctgaaaaagaagcctacgacaaaatgaaagggatgaacgcaaca

SEQ ID NO: 655830 - DNA, 75 bp, synthetic construct
  source 1..75: mol_type = other DNA
ttgatgttgataaatccgctttcaaagaacgcgtcaaaccgttatacgatgaattcaaggcgaaagatgcacaat

SEQ ID NO: 655831 - DNA, 75 bp, synthetic construct
  source 1..75: mol_type = other DNA
tcgtgacgaaaaagtgctcaaattcaaggtggactacaacgatgtgcggccacagtttaagtctttagagacaga

SEQ ID NO: 655832 - DNA, 75 bp, synthetic construct
  source 1..75: mol_type = other DNA
cgaactggtgagcatggcgggtaacatgcagataagccagtggacagaccagaacggggaaatgcggcagggctg

SEQ ID NO: 655833 - DNA, 75 bp, synthetic construct
  source 1..75: mol_type = other DNA
atggcgctggtgagtatggctgttccccttccgtgcagtcaggcatatgacggaacagcgacgatgtggttatcc

SEQ ID NO: 655834 - DNA, 75 bp, synthetic construct
  source 1..75: mol_type = other DNA
tccgccagcacgccgccgtgccattcctggagtgcagctttgcattacctgtcaggaaatcgcagagctgaaagg

SEQ ID NO: 655835 - DNA, 75 bp, synthetic construct
  source 1..75: mol_type = other DNA
gagacactgcccagactcagtcctttaaatccgcaatataaaacgaaaaaacagactgtttttcaaaaaattagc

SEQ ID NO: 655836 - DNA, 75 bp, synthetic construct
  source 1..75: mol_type = other DNA
tatccttggactgattttcgaacacaacaggcaaaataaaggcaagggcgaaatgatcgaagaggtcaaacgctt

SEQ ID NO: 655837 - DNA, 75 bp, synthetic construct
  source 1..75: mol_type = other DNA
agcggttcctgtcattcattctctagtttttaatcgttcgacagagtatgacaaacgagcaagtaaagcgttttc

SEQ ID NO: 655838 - DNA, 75 bp, synthetic construct
  source 1..75: mol_type = other DNA
ttcatgtctctgaaattaacgggcatgtccctgacaatgtatttttgattgcaggcgacccaagcctggaagttc

SEQ ID NO: 655839 - DNA, 75 bp, synthetic construct
  source 1..75: mol_type = other DNA
cgagaaactgtacctcgcttaatccagcgccttaaacaggccggtttcacatttaatgaagctcaaatagcgaac

SEQ ID NO: 655840 - DNA, 75 bp, synthetic construct
  source 1..75: mol_type = other DNA
ttgaagcgcgtaaagacatgcaggaaatgtttgaagcgcctgtccacctggagctgtgggtgaaagtgaaatctg

SEQ ID NO: 655841 - DNA, 75 bp, synthetic construct
  source 1..75: mol_type = other DNA
ccaaaaataccaatgatgatcacaagcgcgagcgggctgtaacgccaaccgaaatcgccacgctggatgatctga

SEQ ID NO: 655842 - DNA, 75 bp, synthetic construct
  source 1..75: mol_type = other DNA
atatgtcagaggcactaaagcacaggctttatttgctggtagcggtcgggccgttggtagtgctcgctttgtgct

SEQ ID NO: 655843 - DNA, 75 bp, synthetic construct
  source 1..75: mol_type = other DNA
aaacttttgctgaaatgttgggggtaacagaaggtgagttaattttcgctattaagacaactggcacatttaaaa

SEQ ID NO: 655844 - DNA, 75 bp, synthetic construct
  source 1..75: mol_type = other DNA
ttatattcagacgtaatgaaatttatcgaatcaataaaagacaaagaaaacctacaaaaaaaatatctgatgcgt

SEQ ID NO: 655845 - DNA, 75 bp, synthetic construct
  source 1..75: mol_type = other DNA
gtcagtgcaaattacacctttgccagcaactgggggatctacggaaccgcacgttacagccgcttatctgatgaa

SEQ ID NO: 655846 - DNA, 75 bp, synthetic construct
  source 1..75: mol_type = other DNA
tatgggtatcgttctgcccgatggtgttctcggtaacccagctgcagaatacatccgttggtggatcatgcgcga

SEQ ID NO: 655847 - DNA, 75 bp, synthetic construct
  source 1..75: mol_type = other DNA
cttgctggccttatcaaggttggtgcatcagaagatgttgctaaaaatatcataacagccatcgtaaaaggcgaa

SEQ ID NO: 655848 - DNA, 75 bp, synthetic construct
  source 1..75: mol_type = other DNA
gcaaattatttattatatagtgcaaaatttattcccctattactcacattatttatcctcattcgatgaaagttc

SEQ ID NO: 655849 - DNA, 75 bp, synthetic construct
  source 1..75: mol_type = other DNA
aagctgatgcgtttcctcggtgcagaactgccgtactccgtgaccgtggagatcgaacgttttgtcaccaatgag

SEQ ID NO: 655850 - DNA, 75 bp, synthetic construct
  source 1..75: mol_type = other DNA
caataatgttgagtttgctaatgtatttagaataattaagccgagcgcatggagaaatcttcctgatgatgtttt

SEQ ID NO: 655851 - DNA, 75 bp, synthetic construct
  source 1..75: mol_type = other DNA
caaaattatgttgcgaaatattacgttttttcaatcccttctatcattactgatgatgtgaaagttaaggagtta

SEQ ID NO: 655852 - DNA, 75 bp, synthetic construct
  source 1..75: mol_type = other DNA
tgaagacaaagcgcgtctgacccgtaacatcattgctggtcttccgggcgcggaagaaggctacaccctcgacca

SEQ ID NO: 655853 - DNA, 75 bp, synthetic construct
  source 1..75: mol_type = other DNA
atgagtgtgcttattaatgaaaaaatgcattcgcgtcggctgaaattgcgctggccgctctcgcgtcaggtcact

SEQ ID NO: 655854 - DNA, 75 bp, synthetic construct
  source 1..75: mol_type = other DNA
attatcgcctttcttttagaactggggttgcgcgcgttacagcaccgcctgacgccctggcatggagaaatacaa

SEQ ID NO: 655855 - DNA, 75 bp, synthetic construct
  source 1..75: mol_type = other DNA
accggaatacgtattggtttgggggtgggttggtctacgctggtggcggcggaactgattgcagcgacgcgtggt

SEQ ID NO: 655856 - DNA, 75 bp, synthetic construct
  source 1..75: mol_type = other DNA
ctcaccggctatctggcgttgcctggtgatatgcccgtcgctaagttcaaggctaaacacgttaaataccatcgc

SEQ ID NO: 655857 - DNA, 75 bp, synthetic construct
  source 1..75: mol_type = other DNA
tatgattacgagcgcttagtgaactctattgttcaggaaagccctgatatggctactgaagaatggttcggctat

SEQ ID NO: 655858 - DNA, 75 bp, synthetic construct
  source 1..75: mol_type = other DNA
ctggcaggaagaaatgaaaaggtcattaaacccgctaatttcctgctggctggattcaattttctctatcgtcct

SEQ ID NO: 655859 - DNA, 75 bp, synthetic construct
  source 1..75: mol_type = other DNA
atgatgaagggctttctgaaaccagaaagtcgagataacattcctgcacagatcctcaaggaactcccttcatgg

SEQ ID NO: 655860 - DNA, 75 bp, synthetic construct
  source 1..75: mol_type = other DNA
gaccgcagtgcaatcagactctacaatcgattcctgcatatcgggaagaagttatggggaaaccatttttggtcg

SEQ ID NO: 655861 - DNA, 75 bp, synthetic construct
  source 1..75: mol_type = other DNA
taaaagagtttgtgaaaggtacacctgcggaagccctgtttatcaaaggcgctgaaagggccaccgggagcgccc

SEQ ID NO: 655862 - DNA, 75 bp, synthetic construct
  source 1..75: mol_type = other DNA
gtggcctgaaagtctatgatgcaggcaatgactgggcaccttatctggaagtcagtacaaattataattttgccg

SEQ ID NO: 655863 - DNA, 75 bp, synthetic construct
  source 1..75: mol_type = other DNA
gagcgtcaagagttttgccgatgagggcttgctcaataaagtgaaagagcgcggcacgctgctggtgggcctgga

SEQ ID NO: 655864 - DNA, 75 bp, synthetic construct
  source 1..75: mol_type = other DNA
agaaaaaatacgatttctctaccccgtacaccatttccggtattcaggcgctggtgaaaaaaggtaatgaaggca

SEQ ID NO: 655865 - DNA, 75 bp, synthetic construct
  source 1..75: mol_type = other DNA
cgactccgcttgaaaaccgtaaacgctggattttcggtgcgccgccggcgggggaaatcacggtagatgaagggg

SEQ ID NO: 655866 - DNA, 75 bp, synthetic construct
  source 1..75: mol_type = other DNA
atgaatgctctggctgaagatatccaggtcctggaagtggaaccgttcattgacgatattgaggtgtctgtagag

SEQ ID NO: 655867 - DNA, 75 bp, synthetic construct
  source 1..75: mol_type = other DNA
atgttgctgacccgtgctgatatggaagatcgtgaacgcttcctgaacgcccgcgataccctgcgtgcgttgctc

SEQ ID NO: 655868 - DNA, 75 bp, synthetic construct
  source 1..75: mol_type = other DNA
cccgaccaaatatcaggatctgcgcgtaggccgtatcgatgcgatcctcgttgaccgtctggcggcgctggatct

SEQ ID NO: 655869 - DNA, 75 bp, synthetic construct
  source 1..75: mol_type = other DNA
cgtgcggggatcgacaccattattgccgcaggtaacaagccgggcgtcattggtgatgtgatggaaggtactcct

SEQ ID NO: 655870 - DNA, 75 bp, synthetic construct
  source 1..75: mol_type = other DNA
acctgggttacccggaactgccagcgaccatcgcctcgaaacaactgctggcggcggtagggcagagtcgactga

SEQ ID NO: 655871 - DNA, 75 bp, synthetic construct
  source 1..75: mol_type = other DNA
aaacagttaaatccgcgcagctactggatcaagcaagttcaaaacgtattcaacgcctatatccgcgaacgtgac

SEQ ID NO: 655872 - DNA, 75 bp, synthetic construct
  source 1..75: mol_type = other DNA
gcggcggtagggcagagtcgactgattcaactgtgggaacagctgttttcgatttatggcattcacgtcgggcaa

SEQ ID NO: 655873 - DNA, 75 bp, synthetic construct
  source 1..75: mol_type = other DNA
cgtgcggggatcgacactattattgccgcaggtaacaagccgggcgtcattggtgatgcgatggaaggtatttct

SEQ ID NO: 655874 - DNA, 75 bp, synthetic construct
  source 1..75: mol_type = other DNA
cggtattgatgatgcgctgcgcgcgattgccggtgacagcgtttcaggccttggaaccggcggcatgggcaccaa

SEQ ID NO: 655875 - DNA, 75 bp, synthetic construct
  source 1..75: mol_type = other DNA
aagaccgtgaacgcttcctgaacgcccgcgacaccttgcgtgcactgctcgataacaacatcgttccggtaatca

SEQ ID NO: 655876 - DNA, 75 bp, synthetic construct
  source 1..75: mol_type = other DNA
tggaagaactgaaatttgatcagctatgccgcgaccgtgaaaaggcaatgaaggcgatggaacggaagaaacgcc

SEQ ID NO: 655877 - DNA, 75 bp, synthetic construct
  source 1..75: mol_type = other DNA
aacagatgctgctgggctggggaactgtaggggttatctacaactttagcgactatctgcaaggtgagggatatc

SEQ ID NO: 655878 - DNA, 75 bp, synthetic construct
  source 1..75: mol_type = other DNA
aacagatgctactgggctggggaactgttggggttatctacaactttagcgactacctgcaaggtgagggatatc

SEQ ID NO: 655879 - DNA, 75 bp, synthetic construct
  source 1..75: mol_type = other DNA
accgctgaaagaagttcagtttaaagccggtactgacagcctgttccagactggttttgactttagcgatgcgct

SEQ ID NO: 655880 - DNA, 75 bp, synthetic construct
  source 1..75: mol_type = other DNA
agtcggttgaagatatcaccggcgtcagcgccagtgagattcgtcaggcggcgcggatgtatgcccaggcagaaa

SEQ ID NO: 655881 - DNA, 75 bp, synthetic construct
  source 1..75: mol_type = other DNA
gggtaatagaaataatgcgccgcgacttacgtaatcgcattacccatgagccggatccggaagtcgttattcgtt

SEQ ID NO: 655882 - DNA, 75 bp, synthetic construct
  source 1..75: mol_type = other DNA
ttttatttctggtccggatgccattatgatggcgatgaaagattactataattcattaggtgagctgggtgagtg

SEQ ID NO: 655883 - DNA, 75 bp, synthetic construct
  source 1..75: mol_type = other DNA
cgcagctactggatcaagcaagttcaaaatgtatttaacgcctatatccgcgaacgtgacgcgcggttgccgtgc

SEQ ID NO: 655884 - DNA, 75 bp, synthetic construct
  source 1..75: mol_type = other DNA
gcagcgatgaatgtctggaagaactgaagtttgatcagctatgccgcgaccgtgaaaaggctatgaaggcgatgg

SEQ ID NO: 655885 - DNA, 75 bp, synthetic construct
  source 1..75: mol_type = other DNA
gcgtggaaaccgtgcgttctctgaccagcctcgcgatgctgaccggtaacctcggtaagccgcatgcgggtgtaa

SEQ ID NO: 655886 - DNA, 75 bp, synthetic construct
  source 1..75: mol_type = other DNA
tatggggcctgtatcgggtattggtgacacgttagactttggtacattgcgtcccattgttattggtgtctgtat

SEQ ID NO: 655887 - DNA, 75 bp, synthetic construct
  source 1..75: mol_type = other DNA
ctgaaaaatgggagagagaataagatgaaatactatttatctgtctcatttgtccctaaactttctgaggataag

SEQ ID NO: 655888 - DNA, 75 bp, synthetic construct
  source 1..75: mol_type = other DNA
aggttaaagatgcacgtataaaagctggcttgtcgatacaagaagccgctgatcgatttggttttacctatacag

SEQ ID NO: 655889 - DNA, 75 bp, synthetic construct
  source 1..75: mol_type = other DNA
accgaagaagaaattgctcaggcagctgttcgcttcgccactatgagcgacgaagacaaagcgcgtctgacccgt

SEQ ID NO: 655890 - DNA, 75 bp, synthetic construct
  source 1..75: mol_type = other DNA
atctggtccccggaagagattcaggcactggccgacggtatggatatttccctgtccgatcatgaaatcaggacc

SEQ ID NO: 655891 - DNA, 75 bp, synthetic construct
  source 1..75: mol_type = other DNA
ctggcatggcctttcctcttcaaaaatatatcataggctctcatcactttataggaatgctattagaagagtgct

SEQ ID NO: 655892 - DNA, 75 bp, synthetic construct
  source 1..75: mol_type = other DNA
ggcaaagcattcaacgaaatgacgctggtctatgcaggtgacgcgcgtaacaacatgggaaactcgatgctcgaa

SEQ ID NO: 655893 - DNA, 75 bp, synthetic construct
  source 1..75: mol_type = other DNA
acggcgggaatattacactgacagaagatatcgcggcaggcgttaaaggcgcagactttatctataccgatgtgt

SEQ ID NO: 655894 - DNA, 75 bp, synthetic construct
  source 1..75: mol_type = other DNA
gctgcggcgttgaccggtctggatttacgcctggtagcgccacaagcgtgctggccggaagcttcgctggttacg

SEQ ID NO: 655895 - DNA, 75 bp, synthetic construct
  source 1..75: mol_type = other DNA
atggatttattagctgagagtattactgaagtcgctgtctctgggaaaattactaacaccgatcgtgtgttaaat

SEQ ID NO: 655896 - DNA, 75 bp, synthetic construct
  source 1..75: mol_type = other DNA
atcgcttacggtattgaccgtaactttttatttggtgcggcagtatctatgcaatcagttgttatgcataacccg

SEQ ID NO: 655897 - DNA, 75 bp, synthetic construct
  source 1..75: mol_type = other DNA
atggtcaggagattgtcgaaacactggcggaatacgctggcgtgccggtatggaacggcctgaccaatgagttcc

SEQ ID NO: 655898 - DNA, 75 bp, synthetic construct
  source 1..75: mol_type = other DNA
gccgggagctggcagcaaagtatccgggagacacgccgctgatgctgcttatctggtccccggaagagattcagg

SEQ ID NO: 655899 - DNA, 75 bp, synthetic construct
  source 1..75: mol_type = other DNA
gggagacacgccactgatgctggttgtctggtccccggaagagattcaggccctcgctgacggaatggatatttc

SEQ ID NO: 655900 - DNA, 75 bp, synthetic construct
  source 1..75: mol_type = other DNA
gccgggagctggcagcaaagtatccgggaaacgcgccgctgatgctggttatctggtccccggaagagattcagg

SEQ ID NO: 655901 - DNA, 75 bp, synthetic construct
  source 1..75: mol_type = other DNA
cggaagaccagcgaattgagtccggtatttcttctgccgcggcgatggagattatcagcaacgtgagcgaaaacc

SEQ ID NO: 655902 - DNA, 75 bp, synthetic construct
  source 1..75: mol_type = other DNA
gccgccggtggtgacgggtgcggtggtgatggcgattggcctgaacttagcgcctatcgcagtgaaaagtgtatc

SEQ ID NO: 655903 - DNA, 75 bp, synthetic construct
  source 1..75: mol_type = other DNA
ggtagcggcgtgaccacctatgctgaaaatatcggtgtgatggccgtgacaaaagtctactcgacgctggtgttt

SEQ ID NO: 655904 - DNA, 75 bp, synthetic construct
  source 1..75: mol_type = other DNA
attatccgcaacgagagcgaaaaccgcctggtgaccgtccctgctgaactgctggcgtccctgattcagaccgct

SEQ ID NO: 655905 - DNA, 75 bp, synthetic construct
  source 1..75: mol_type = other DNA
atgtacggaacatgcgaaacgctatgccggaagctggcagcaaagtatccgggagacacgccactgatgctggtt

SEQ ID NO: 655906 - DNA, 75 bp, synthetic construct
  source 1..75: mol_type = other DNA
tgatgttgttgcatttatacaatctatgcgccgtcgtcttactaatgcgctgagccgtccatctcttcccccttc

SEQ ID NO: 655907 - DNA, 75 bp, synthetic construct
  source 1..75: mol_type = other DNA
ttgtggaaacgtgaatgggccgcccgggatcatggcctcgccgtcccggaatgcgtcacccgccgtcaggcggtg

SEQ ID NO: 655908 - DNA, 75 bp, synthetic construct
  source 1..75: mol_type = other DNA
atgtacggaacatgcgaaacgctatgccgggagctggcagcaaagtattcgggagacacgcctctgatgctggtt

SEQ ID NO: 655909 - DNA, 75 bp, synthetic construct
  source 1..75: mol_type = other DNA
atgtacggaacatgcgaaacgctatgccggcagctggcagcaaagtatgcgggagacacgcccctgatgctggtt

SEQ ID NO: 655910 - DNA, 75 bp, synthetic construct
  source 1..75: mol_type = other DNA
atgtacggaacatgcgaaacgctatgccggtagctggcagcaaagtattcgggagacacgccgctgatgctggtt

SEQ ID NO: 655911 - DNA, 75 bp, synthetic construct
  source 1..75: mol_type = other DNA
cacgcggatcaacagcgtttgagaaagccatgcagcaggcgcaaaaggccattaacgcccttactcagggtgcca

SEQ ID NO: 655912 - DNA, 75 bp, synthetic construct
  source 1..75: mol_type = other DNA
cgggcactagctcaatgagggcggcgcaacaggaaggccgcagccagttagttaatgaatatgcatcccgattcg

SEQ ID NO: 655913 - DNA, 75 bp, synthetic construct
  source 1..75: mol_type = other DNA
tggctaattaatacattcacagatgaaaaagaatctgtgttaatgcttcaagataagccatccgaagaaacgatg

SEQ ID NO: 655914 - DNA, 75 bp, synthetic construct
  source 1..75: mol_type = other DNA
ggtcacgctgacaaacgagaacggagaaagctaccggttccgccatgacgtgctggaccgtctggcggagcagat

SEQ ID NO: 655915 - DNA, 75 bp, synthetic construct
  source 1..75: mol_type = other DNA
aatcaatcacaggagctgaaaatatgaacacggcattcaaaatcattatggccgcgatctatttctggctgttct

SEQ ID NO: 655916 - DNA, 75 bp, synthetic construct
  source 1..75: mol_type = other DNA
tgcaaacgccttgaatgtgccgcagccgacgagctatgacgctcgcattcaggaagctacttataatcctgatga

SEQ ID NO: 655917 - DNA, 75 bp, synthetic construct
  source 1..75: mol_type = other DNA
gcatagcggcaactttaccaggcgttgcaaacgccttgaatgtgccgcagccgacgagctatgacgctcgcattc

SEQ ID NO: 655918 - DNA, 75 bp, synthetic construct
  source 1..75: mol_type = other DNA
tgcattcgcgtcggctgaaatggcgctggccgctctcaggtcgggtgactttaagcattggcacgttagccgttt

SEQ ID NO: 655919 - DNA, 75 bp, synthetic construct
  source 1..75: mol_type = other DNA
cgtggtgctggcggggatcgcggtgattgcgattatcgcctttcttttagaactgggtttgcgcgcgttacagcg

SEQ ID NO: 655920 - DNA, 75 bp, synthetic construct
  source 1..75: mol_type = other DNA
gggatcgcggtgattgcgattatcgcctttcttttagaactgggtctgcgcgcgttacagcgccgtctgacgccc

SEQ ID NO: 655921 - DNA, 75 bp, synthetic construct
  source 1..75: mol_type = other DNA
tacctaacgagcaattagagtgggtaacaaaccctcgataccatatagatgaattgactgtgaaaggtgatattg

SEQ ID NO: 655922 - DNA, 75 bp, synthetic construct
  source 1..75: mol_type = other DNA
gtagttccagatatggcaagggttgttgtaaaacccgacggttctgtacgtacatcgttcccattcaattcatca

SEQ ID NO: 655923 - DNA, 75 bp, synthetic construct
  source 1..75: mol_type = other DNA
gatccgctgggactgactgcatgttccaaaaacgcgaaatctttgcgagaggggcctcaaggaaccgttgtcaca

SEQ ID NO: 655924 - DNA, 75 bp, synthetic construct
  source 1..75: mol_type = other DNA
tcgaagtagaagatttcccggcgtttatcctggtcgatgacaaaggtaacgacttcttccagcaaatcgtcaaca

SEQ ID NO: 655925 - DNA, 75 bp, synthetic construct
  source 1..75: mol_type = other DNA
gcctgcggcctttatcgaaaccaacattatcggcacctatgtgctgctcgaagcggcgcgtcagtactggtcgca

SEQ ID NO: 655926 - DNA, 75 bp, synthetic construct
  source 1..75: mol_type = other DNA
tacggcgagcgcgagcgcaatttccagttatatcgtcgcggtcgttatgtcgagttcaatctggtctgggatcgc

SEQ ID NO: 655927 - DNA, 75 bp, synthetic construct
  source 1..75: mol_type = other DNA
aatgccgccactggtacgctgggagtacgattatcaaccggaagaaggcagcccggaagcggcgttgagtaaatt

SEQ ID NO: 655928 - DNA, 75 bp, synthetic construct
  source 1..75: mol_type = other DNA
cgcagttggatcacttgctgcaaatagtgcgaaagatgatgcggaagcactcgccaccgatttaggcgttggcgt

SEQ ID NO: 655929 - DNA, 75 bp, synthetic construct
  source 1..75: mol_type = other DNA
gtggtcataacgaacgtaaaaatatcgatgtagtgaaaactatttgtcgcattctcgatgaattgattgcagata

SEQ ID NO: 655930 - DNA, 75 bp, synthetic construct
  source 1..75: mol_type = other DNA
gggtaaacttttacctgtttatgggaacggtgagcaaattcgagattggttatatgttgaagatcatgcccgggc

SEQ ID NO: 655931 - DNA, 75 bp, synthetic construct
  source 1..75: mol_type = other DNA
aatggtggtgttttcgaacaggcgggcgtcaacttttcacatgtccacggtgaggcgatgcctgcttccgccacc

SEQ ID NO: 655932 - DNA, 75 bp, synthetic construct
  source 1..75: mol_type = other DNA
catttagtacgtgcatggcgccgtacttacggcttgccgaccctggtgacgaattgctcaaataactatggccca

SEQ ID NO: 655933 - DNA, 75 bp, synthetic construct
  source 1..75: mol_type = other DNA
gtcatttcggcatgttctgtggtgaagttgtacccagcgacgcagtgcaaatgctacgccgcgaccgtacagcaa

SEQ ID NO: 655934 - DNA, 75 bp, synthetic construct
  source 1..75: mol_type = other DNA
tatgttcccaccagccacgcgaatgtgcgtttttttattgccgaaaaaccgggtgccgatcccgtctggtggttt

SEQ ID NO: 655935 - DNA, 75 bp, synthetic construct
  source 1..75: mol_type = other DNA
tctaccgtcgcggtcgttatgtcgaattcaacctggtctgggatcgcggcacgctgtttggcttacaaactggcg

SEQ ID NO: 655936 - DNA, 75 bp, synthetic construct
  source 1..75: mol_type = other DNA
cgagttcaatctggtctgggatcgcggcacgctgtttggcctgcaaaccggcgggcgcaccgagtctatcctgat

SEQ ID NO: 655937 - DNA, 75 bp, synthetic construct
  source 1..75: mol_type = other DNA
gaaatgtattacaaccctggcagcaatgtaatctcctggacatatcacgctcctgcgggacacggattgtcaggg

SEQ ID NO: 655938 - DNA, 75 bp, synthetic construct
  source 1..75: mol_type = other DNA
cggcctgctggatatttatgccaatggccagcatatattccgttttcagaacgggacgctacaaagcaacagggc

SEQ ID NO: 655939 - DNA, 75 bp, synthetic construct
  source 1..75: mol_type = other DNA
cacgaaaaacgcaacgtttaatttatggggcaattcatcccgccctgtagttgcagagcttggtgatgattctgg

SEQ ID NO: 655940 - DNA, 75 bp, synthetic construct
  source 1..75: mol_type = other DNA
atttacgttcaggaaacgggaagcaggtcagcagataatattggtggtgtgtattacaaacaggctcagatttat

SEQ ID NO: 655941 - DNA, 75 bp, synthetic construct
  source 1..75: mol_type = other DNA
ctacgaaccccgattatagttttccccgttcagaacaataccaacgcggcgacacttcaactaacactaggcgga

SEQ ID NO: 655942 - DNA, 75 bp, synthetic construct
  source 1..75: mol_type = other DNA
attcagcggataacgtcaacggcgtgtattaccgaccgcttcagaaactgattaacggcacctggtataacgtgg

SEQ ID NO: 655943 - DNA, 75 bp, synthetic construct
  source 1..75: mol_type = other DNA
atggtattgtccgcgtggaagaacataagttacccgaaatttgtcatcaggatgatgtgcggattaaaattgcca

SEQ ID NO: 655944 - DNA, 75 bp, synthetic construct
  source 1..75: mol_type = other DNA
tccggaatgtctgaaaggcttttattcccagtgtgcgaaatatgattttattggatcacggcgcaacgggggatt

SEQ ID NO: 655945 - DNA, 75 bp, synthetic construct
  source 1..75: mol_type = other DNA
cgctcaccgtgggagctttgaaagcttcgcccaggcggtgcgtgagatcgctcgcaataccatgccgggtaaggt

SEQ ID NO: 655946 - DNA, 75 bp, synthetic construct
  source 1..75: mol_type = other DNA
ccggcgctgcagaaattgaagcagcatatcagaacgggcaaatcgtgaccgtccggcatgttctgcttggtgacg

SEQ ID NO: 655947 - DNA, 75 bp, synthetic construct
  source 1..75: mol_type = other DNA
tcctcatgcccaactggcgctggtgggcacgttgcatcaggatctgcatttaacatcggcaacgtttggcaaaat

SEQ ID NO: 655948 - DNA, 75 bp, synthetic construct
  source 1..75: mol_type = other DNA
cgttatcagcagcgaaatggcggcgtgcaggatgtgcgttatggttccgaaatgtattacaccccgggaggtaac

SEQ ID NO: 655949 - DNA, 75 bp, synthetic construct
  source 1..75: mol_type = other DNA
gttcttgggctgacgcacgcacaaaacgtggtgctggaagttgatccggacagggccattattactcaggaaatc

SEQ ID NO: 655950 - DNA, 75 bp, synthetic construct
  source 1..75: mol_type = other DNA
aaaagagattaccaatccgtatgccatgcgtttatacgaatccctgtgtcagtaccgtaaacctgatggctcagg

SEQ ID NO: 655951 - DNA, 75 bp, synthetic construct
  source 1..75: mol_type = other DNA
cgtcaatctgccacttcatctgcgtgacggcatctggcaggccgatgttcatgacacggaactgctacagtccgc

SEQ ID NO: 655952 - DNA, 75 bp, synthetic construct
  source 1..75: mol_type = other DNA
atgaggggatctctcagcgccgcgcatatgagcggtgcagaagatatgagcgcctatattacgctcccgctttgc

SEQ ID NO: 655953 - DNA, 75 bp, synthetic construct
  source 1..75: mol_type = other DNA
cgttctcgacccgtttgctggtagctttactaccggccggtgccgtagccatcgccagcggacgaaaattcattg

SEQ ID NO: 655954 - DNA, 75 bp, synthetic construct
  source 1..75: mol_type = other DNA
ctttttaccatcaaaagtcgcatcgtctggtcatatgacagttctggagtacaggcgaaaaaacactacggctcc

SEQ ID NO: 655955 - DNA, 75 bp, synthetic construct
  source 1..75: mol_type = other DNA
acaagaaacgtaaaaatagcccgcgaattgtccagtcaaacgacctgactgaggcggcatatagtctctcccggg

SEQ ID NO: 655956 - DNA, 75 bp, synthetic construct
  source 1..75: mol_type = other DNA
ccattctgcgcccggcccccatggccatcacctgttcaatggtttgcctccatccatggtcagaaaatacgggaa

SEQ ID NO: 655957 - DNA, 75 bp, synthetic construct
  source 1..75: mol_type = other DNA
gctgctgaccagcgatggtgaactttatgccgtcggaagttgtgctgccattgagaaaccggaaaacggtgtgac

SEQ ID NO: 655958 - DNA, 75 bp, synthetic construct
  source 1..75: mol_type = other DNA
ctggtcagggaagtttatcgtggcactatatcacgtctggcggtctcgcctgatcaggaaaaccagtttattgcg

SEQ ID NO: 655959 - DNA, 75 bp, synthetic construct
  source 1..75: mol_type = other DNA
ggttttacagaaccttatctgaatggctgggtgatggaccctacccgcgccattgaaggaattttggataacctg

SEQ ID NO: 655960 - DNA, 75 bp, synthetic construct
  source 1..75: mol_type = other DNA
gcgcactttaatagataactgcactgacgagactttattaaatgaaactcgtgggcagccctttctattgagtgt

SEQ ID NO: 655961 - DNA, 75 bp, synthetic construct
  source 1..75: mol_type = other DNA
caggccgcaattcagaaaaacacctgtccggtgtggcgttttttttatacgggcacactaaatcaggttgcagca

SEQ ID NO: 655962 - DNA, 75 bp, synthetic construct
  source 1..75: mol_type = other DNA
cggcgttcagaacgcgctgggcggaaactcaattgctttcggggataacgatacaggtataaaacaaaacggcga

SEQ ID NO: 655963 - DNA, 75 bp, synthetic construct
  source 1..75: mol_type = other DNA
acttatgtgcgttttaacagtgggctaaatttgctgggatggcagctgcattcagatgccagttttagcaaaacg

SEQ ID NO: 655964 - DNA, 75 bp, synthetic construct
  source 1..75: mol_type = other DNA
cagtaaggattatcagttgagttattccaacaacctgcgacggataagctataccctcgcggcaagccaggctta

SEQ ID NO: 655965 - DNA, 75 bp, synthetic construct
  source 1..75: mol_type = other DNA
atcgcggcgcggtcgtactggttaattttgataccgatcagcgcaagccctggtttataaaagcgttaagagcgg

SEQ ID NO: 655966 - DNA, 75 bp, synthetic construct
  source 1..75: mol_type = other DNA
gggaaatgaaacgacagctggagcgaatttaacctggaacgcgccggtggcaacagtgaatggcagttatagtca

SEQ ID NO: 655967 - DNA, 75 bp, synthetic construct
  source 1..75: mol_type = other DNA
tattaccagaatgattttggtcgcaaaaatagcttttccgccaatatgagtcagtcattgccagaaggctgggga

SEQ ID NO: 655968 - DNA, 75 bp, synthetic construct
  source 1..75: mol_type = other DNA
tctgtgtcattaagtacgttatggcgagattactgggggcgtagcggcagcagtaaggattatcagttgagttat

SEQ ID NO: 655969 - DNA, 75 bp, synthetic construct
  source 1..75: mol_type = other DNA
gaggcccaagacgccaaccccgtcacaagcagcatcgtcctacagcagaaatgcaaggtaatcctggttggagat

SEQ ID NO: 655970 - DNA, 75 bp, synthetic construct
  source 1..75: mol_type = other DNA
cacgattgctacctcaaacagtatcagctcgggatgccgaatctgtctcgccggtacaccaccattctttttgat

SEQ ID NO: 655971 - DNA, 75 bp, synthetic construct
  source 1..75: mol_type = other DNA
ttgctcgcgccgatacgggtaaagtgcttacgtccaaacaggagagataccaaatccaggtggtcgaaggtgctg

SEQ ID NO: 655972 - DNA, 75 bp, synthetic construct
  source 1..75: mol_type = other DNA
ggcattcacgcagcggcagatatcattgtgcagctattactggcgctgttttttgccatcgttctcaacccgctc

SEQ ID NO: 655973 - DNA, 75 bp, synthetic construct
  source 1..75: mol_type = other DNA
gttggcatgtaaaggtgatagagaagcattatttgtgctctttcatgaaatcggacatttggtgttggggcatag

SEQ ID NO: 655974 - DNA, 75 bp, synthetic construct
  source 1..75: mol_type = other DNA
tatgggataaagccgcccttgcggatttcattgtagataatagaataggatatgcagtgggatcaatcaaagaaa

SEQ ID NO: 655975 - DNA, 75 bp, synthetic construct
  source 1..75: mol_type = other DNA
atcacctgatgctggatgtgtcgcaaagcgatagcgaagcagaattgcgcggtaaccggaaaattgccgcccctt

SEQ ID NO: 655976 - DNA, 75 bp, synthetic construct
  source 1..75: mol_type = other DNA
atgaagcggccctggcatcgctctgtggcgtaaatccactgccagcatcatcagggaaaacagtaaggcacagat

SEQ ID NO: 655977 - DNA, 75 bp, synthetic construct
  source 1..75: mol_type = other DNA
gttacgtatagccttgtgtagtacgcttcgaagccttgcgaaacgatggatggccctgactgaagagctgaatga

SEQ ID NO: 655978 - DNA, 75 bp, synthetic construct
  source 1..75: mol_type = other DNA
cacgaatgcgtaaccgcctgcattaacagcgaagtgtcagagcactcaccgttacgtatagccttgtgtagtacg

SEQ ID NO: 655979 - DNA, 75 bp, synthetic construct
  source 1..75: mol_type = other DNA
attatggaaatttcgatgcccgttaccagaccaaatcagggggcgtgcagaattttcagtacaccagtgaggtgt

SEQ ID NO: 655980 - DNA, 75 bp, synthetic construct
  source 1..75: mol_type = other DNA
atttcgtacagatagcgcagcttcagagcggtcattatattgcaggtgtcgctggcggcactgcaaatgcactga

SEQ ID NO: 655981 - DNA, 75 bp, synthetic construct
  source 1..75: mol_type = other DNA
aacagtcactgtgactttcagactgacagcagaacatatcgagaatcagcccgtcattcaactgaacagggggtg

SEQ ID NO: 655982 - DNA, 75 bp, synthetic construct
  source 1..75: mol_type = other DNA
ccagtcattgccagaaggctgggggtctgtgtccttaagtacgttatggcgagattactgggggcgtagcgctga

SEQ ID NO: 655983 - DNA, 75 bp, synthetic construct
  source 1..75: mol_type = other DNA
attgataaacaacaagggctttcatgcacaatcaccttcggtaaacagattgatgaaagtagaacttatatttgc

SEQ ID NO: 655984 - DNA, 75 bp, synthetic construct
  source 1..75: mol_type = other DNA
ttatctgaacataaaacactatcagtaagttggagtcattaccgcaagagtacatatgtacgttttaacagcggg

SEQ ID NO: 655985 - DNA, 75 bp, synthetic construct
  source 1..75: mol_type = other DNA
cgcggcagcgtatgctggaagtggtgcgcggcttaagcggcgtgtctgatattgcctacgatacggtggtggcgc

SEQ ID NO: 655986 - DNA, 75 bp, synthetic construct
  source 1..75: mol_type = other DNA
agctctcgaaaaccttggtttgggagaaggctctgcattaccggttggtgtgcctgttccgtggccttcagccac

SEQ ID NO: 655987 - DNA, 75 bp, synthetic construct
  source 1..75: mol_type = other DNA
tactgagatcaccattggtaataacgtgatgtttgcgtcaaatgtgacgatttcaaccgccggccacccgatcca

SEQ ID NO: 655988 - DNA, 75 bp, synthetic construct
  source 1..75: mol_type = other DNA
cttccagggaaccgaactgattggtattgcagcgggcgaatctgaagatcctgggaaaaatattccgcgtgcggt

SEQ ID NO: 655989 - DNA, 75 bp, synthetic construct
  source 1..75: mol_type = other DNA
gccattggcggttccatcggtacaggtctttttgttgcctctggcgcaacgatttctcaggcaggtccgggcggg

SEQ ID NO: 655990 - DNA, 75 bp, synthetic construct
  source 1..75: mol_type = other DNA
taggtttaattgccattggaggcttatgggttattggcgatatcattatcggaattttagtatttcttactaaac

SEQ ID NO: 655991 - DNA, 75 bp, synthetic construct
  source 1..75: mol_type = other DNA
gtgaaagacatcagcgtcagcccattcactctggtgttccagcatgcgggtctgctttctgcggcagcggtgatg

SEQ ID NO: 655992 - DNA, 75 bp, synthetic construct
  source 1..75: mol_type = other DNA
attctgtgtctgattatcactttgggccagaactacgaagcgttcctgaaagataccattgactggggcggcgta

SEQ ID NO: 655993 - DNA, 75 bp, synthetic construct
  source 1..75: mol_type = other DNA
tctcactgatcaaagttacgaccgtgattatctttatcgccgttggcgtgatgatgattttcggtatcttcaaag

SEQ ID NO: 655994 - DNA, 75 bp, synthetic construct
  source 1..75: mol_type = other DNA
cgcaacagccgcaacagccgcaacagccgcaacagccgcaacagccgcaacagccggtgtctcctgccatcaacg

SEQ ID NO: 655995 - DNA, 75 bp, synthetic construct
  source 1..75: mol_type = other DNA
aagaagtcagattcaggtgtgaatgttccggcaggggggatcgagcaggagctgaaaatgaaaccggaagaagag

SEQ ID NO: 655996 - DNA, 75 bp, synthetic construct
  source 1..75: mol_type = other DNA
cccgccgccagaaccggtgatgctattgactgcggcggcgtggttattggtggcggtacggtaaatataggctga

SEQ ID NO: 655997 - DNA, 75 bp, synthetic construct
  source 1..75: mol_type = other DNA
atggcattaatcaaatgtcctgaatgccagaaagaggtaagcgattcagcattatgttgccctgcttgtggtaaa

SEQ ID NO: 655998 - DNA, 75 bp, synthetic construct
  source 1..75: mol_type = other DNA
atctacacgatttgtgttgggctaagagaggtgggtgaaataataaacaacgccacatccgatgccgaaaaagcc

SEQ ID NO: 655999 - DNA, 75 bp, synthetic construct
  source 1..75: mol_type = other DNA
gagtcgctctccagattatccatttgaagtggtttactgaatttggccacctgaacagaggtgatatgctcacct

SEQ ID NO: 656000 - DNA, 75 bp, synthetic construct
  source 1..75: mol_type = other DNA
agcggttacgacattcgaaccgtgcaggatctgctcggccattccgacgtctctacgaggcactgttgcaaatag

SEQ ID NO: 656001 - DNA, 75 bp, synthetic construct
  source 1..75: mol_type = other DNA
aaggaccaggccgagggccgcagcggcgttgcgcttcccgacgcccttgagcggaagggcactgttgcaaatagt

SEQ ID NO: 656002 - DNA, 75 bp, synthetic construct
  source 1..75: mol_type = other DNA
aaggcgatggaacggaagaaacgccgtgatagccagcgggaagaacgcaaccgtaagcggaaacagttaaatccg

SEQ ID NO: 656003 - DNA, 75 bp, synthetic construct
  source 1..75: mol_type = other DNA
cggaccgacgctggatgaaaccttcggtttaatcgacaccgcagaaaaatcagcggaagtgttagtgaaggtgta

SEQ ID NO: 656004 - DNA, 75 bp, synthetic construct
  source 1..75: mol_type = other DNA
atgtcgctgagatgcatgattgtgattgtcctgaccttcttctgtgccggtcaggtgcatgctgagtccggtggt

SEQ ID NO: 656005 - DNA, 75 bp, synthetic construct
  source 1..75: mol_type = other DNA
acgccagcggaattatcagaaatcataacccatctggcgttctactcaggttggccaaatgcaatgtcagccgtc

SEQ ID NO: 656006 - DNA, 75 bp, synthetic construct
  source 1..75: mol_type = other DNA
aaaatcgttcatatacaggggagtatgcactcgacgaaagtaataccttgcttaatttctatttaaatgatattc

SEQ ID NO: 656007 - DNA, 75 bp, synthetic construct
  source 1..75: mol_type = other DNA
ccgacgaattacgcagcgcccatgtcgcaatggcgctgtacccactttcagcgttccgcgccatgaaccgcgccg

SEQ ID NO: 656008 - DNA, 75 bp, synthetic construct
  source 1..75: mol_type = other DNA
tcggtatttctacccttgatgatgtgctgacagatattcgccgtatcaccgacgtctgctcgctgccgctgctgg

SEQ ID NO: 656009 - DNA, 75 bp, synthetic construct
  source 1..75: mol_type = other DNA
cgatgatttacacgcatgtgctgaaagttggcggtgccggagtgggcactgttgcaaagttagcgatgaggcagc

SEQ ID NO: 656010 - DNA, 75 bp, synthetic construct
  source 1..75: mol_type = other DNA
cttcaggagatcggaagacctcggccgtcgcggcgcttgccggtggtgctgacccggatgaagtggttcgcatcc

SEQ ID NO: 656011 - DNA, 75 bp, synthetic construct
  source 1..75: mol_type = other DNA
cgtttcgcgctgcacttagcaaagaaaccccgttgcaaattgttggcaccatcaacgctaaccatgcgctgctgg

SEQ ID NO: 656012 - DNA, 75 bp, synthetic construct
  source 1..75: mol_type = other DNA
atgtctctacactctccaggtaaagcgtttcgcgctgcacttagcaaagaaaccccgttgcaaattgttggcacc

SEQ ID NO: 656013 - DNA, 75 bp, synthetic construct
  source 1..75: mol_type = other DNA
cagccgcaacagccgcaacagccgcaacagccggtgtctcctgccatcaacgataagaagtcagattcaggtgtg

SEQ ID NO: 656014 - DNA, 75 bp, synthetic construct
  source 1..75: mol_type = other DNA
aagaacgtttttccattcagtctatttccaaagtgcttagtctcgttgtcgccatgcgtcattactccgaagagg

SEQ ID NO: 656015 - DNA, 75 bp, synthetic construct
  source 1..75: mol_type = other DNA
aaaatcgtccgttttgaagagataacgcgtactccactggaagtacaagactgtttattaggtatgctttctgac

SEQ ID NO: 656016 - DNA, 75 bp, synthetic construct
  source 1..75: mol_type = other DNA
caaaatgataacgcaccttgcccgcccggttggcagttaagtttgcctgcggcccgtgcttttattcttggcgac

SEQ ID NO: 656017 - DNA, 75 bp, synthetic construct
  source 1..75: mol_type = other DNA
aacacttcagacagagatatgttagtcaaggttgctgtctcccctgatgatgctcgtcagttgacgggaacggtt

SEQ ID NO: 656018 - DNA, 75 bp, synthetic construct
  source 1..75: mol_type = other DNA
acgcggtttgagcggcgtgtcagatattgcctacgataccgtcgttgcacgttctgagtttgaacattcagcaag

SEQ ID NO: 656019 - DNA, 75 bp, synthetic construct
  source 1..75: mol_type = other DNA
ttagtgcaactggaaatggagcagggtattccgcgtaatccgtttattaatgctggtgcgctggtggtctgcgat

SEQ ID NO: 656020 - DNA, 75 bp, synthetic construct
  source 1..75: mol_type = other DNA
atgagtacacttgaacctgctgcccagccaaaaccctttaagctgtggctgtcgcagttgcaaatgaagcatggg

SEQ ID NO: 656021 - DNA, 75 bp, synthetic construct
  source 1..75: mol_type = other DNA
ctgaaaacgttctttactgtgatcgtgccgctgaccaaaggcgggattattgccggatcgatgctggtgtttatc

SEQ ID NO: 656022 - DNA, 75 bp, synthetic construct
  source 1..75: mol_type = other DNA
tgagaaccacccgacgcaaaaaccggaagccttactgaaactcttccaacccaggcgatatcgttctcgacccgt

SEQ ID NO: 656023 - DNA, 75 bp, synthetic construct
  source 1..75: mol_type = other DNA
caaaatgatcacgctccttgcccgcccggttggcagttaagtttacctgcggcccgtgcttttctccttggcgac

SEQ ID NO: 656024 - DNA, 75 bp, synthetic construct
  source 1..75: mol_type = other DNA
tggctgaaggatctttctcatacgggcaggcggttgctgtcataaccgcttaccgcaatgtgtttatccaggatt

SEQ ID NO: 656025 - DNA, 75 bp, synthetic construct
  source 1..75: mol_type = other DNA
cctcagcggtggcaatcgttatgttattgctgctgattgtgccaattatgtggttccacaaatatcagcaaaaaa

SEQ ID NO: 656026 - DNA, 75 bp, synthetic construct
  source 1..75: mol_type = other DNA
cgctggcaatggctttagggctggcttgcgcttcttcgtgggccgctgaactggcgaagcctcttacacctgacc

SEQ ID NO: 656027 - DNA, 75 bp, synthetic construct
  source 1..75: mol_type = other DNA
atgagtttaatcactcgcatccagcggaagttgaaaaaagggaaagcctgattaaagaaatgtttgccacggtag

SEQ ID NO: 656028 - DNA, 75 bp, synthetic construct
  source 1..75: mol_type = other DNA
acaaaggcacccagcacgacggttattacgagaccgtcatcaccgccgggtcatccaccgtctttatcgatggtc

SEQ ID NO: 656029 - DNA, 75 bp, synthetic construct
  source 1..75: mol_type = other DNA
agcgtctgtcaggggcgggagagcatcaacatgagcatcagaacctacgcagtgaattgcaatgacgcatggcta

SEQ ID NO: 656030 - DNA, 75 bp, synthetic construct
  source 1..75: mol_type = other DNA
agatcagtgaatccggtgaagtggtggatatggccgcttatgaggcatggcagcaggaaaatcatccggacacct

SEQ ID NO: 656031 - DNA, 75 bp, synthetic construct
  source 1..75: mol_type = other DNA
gcttatgaggcatggcaacaggaaaatcatccggacatccagcagcagatgcagcgtcgtgaagaggtgaacatt

SEQ ID NO: 656032 - DNA, 75 bp, synthetic construct
  source 1..75: mol_type = other DNA
ccaacgttaccatttccgttacgggacaccctgtacaccatgaattaagaaaaaacggagagatgtactcttttg

SEQ ID NO: 656033 - DNA, 75 bp, synthetic construct
  source 1..75: mol_type = other DNA
ctactggataaaattaagcacctggaggacacaaatattgatgccacatgccgtattgcggagtttgagactaat

SEQ ID NO: 656034 - DNA, 75 bp, synthetic construct
  source 1..75: mol_type = other DNA
tcgccgggtactggtacgtatgcggtgcatacgcccggtgataaacgatgtgaagatgttatcaaatggaccggc

SEQ ID NO: 656035 - DNA, 75 bp, synthetic construct
  source 1..75: mol_type = other DNA
ttatcgcctgtttgccaggctacgaaacaatcggtacctgggctccggcattattgcttctcgcgcgtttattct

SEQ ID NO: 656036 - DNA, 75 bp, synthetic construct
  source 1..75: mol_type = other DNA
aactctaagcgcctgattgcgctcatctcggcaatcggtatgtccatcttcctgcaaaactacgttagcctgact

SEQ ID NO: 656037 - DNA, 75 bp, synthetic construct
  source 1..75: mol_type = other DNA
ccagcgcctacggctggagtatcgaacgggtggcctatcgcccggtgcgcaactccaagcgcctgattgcgctca

SEQ ID NO: 656038 - DNA, 75 bp, synthetic construct
  source 1..75: mol_type = other DNA
tatgtcagccaccgacgctttcctgtctgaagtacgggcgcagggtgtggagatgtttgcacagtggtgtagagg

SEQ ID NO: 656039 - DNA, 75 bp, synthetic construct
  source 1..75: mol_type = other DNA
tgcgttacccgccgtcaggcggtggttaatcaggcccgcaccctgctgaaaaacaacacacacgaaaacgactga

SEQ ID NO: 656040 - DNA, 75 bp, synthetic construct
  source 1..75: mol_type = other DNA
tattgcaggaagagtattcaaaaatttaagttccgggcacaaaattgtattgctaactatcactagacttgtcga

SEQ ID NO: 656041 - DNA, 75 bp, synthetic construct
  source 1..75: mol_type = other DNA
acctacgtttggtaaatgggttggggtgaatttatctgcagagaataagcgacagttgtggataccagaggggtt

SEQ ID NO: 656042 - DNA, 75 bp, synthetic construct
  source 1..75: mol_type = other DNA
tatggcggtggcgtgctggggcttggcttgctgctcggtctggtactgccacacctgatcccaacgcgcaaacgc

SEQ ID NO: 656043 - DNA, 75 bp, synthetic construct
  source 1..75: mol_type = other DNA
gggcattgaagttccgcgtgaagcgcgcccgattaccgtttatgaattgctgtttattcgccatgaaggcaatga

SEQ ID NO: 656044 - DNA, 75 bp, synthetic construct
  source 1..75: mol_type = other DNA
cggttgaacggatggtgactctggaacatctgcgtgaactggttgagcaagccgaacagcaagatattcctgctg

SEQ ID NO: 656045 - DNA, 75 bp, synthetic construct
  source 1..75: mol_type = other DNA
tgcgttgttggtgaagtttttgacgtagcggttgatattcgtaaatcgtcaccaacttttggcaaatgggttggg

SEQ ID NO: 656046 - DNA, 75 bp, synthetic construct
  source 1..75: mol_type = other DNA
cggatgtattaatatttgaaccaaaagtatttggggatgagcgtggtttctttatggaaagctttaatcagaaag

SEQ ID NO: 656047 - DNA, 75 bp, synthetic construct
  source 1..75: mol_type = other DNA
acctacctatggaaaatgggttggggtgaatttatctgctgagaataagcgccagttgtggatacctgaaggatt

SEQ ID NO: 656048 - DNA, 75 bp, synthetic construct
  source 1..75: mol_type = other DNA
tagtggctctgtaggtgtcgggttgcaatggggatctaattccgatttgcgaaatgacataggtgctgtaggtag

SEQ ID NO: 656049 - DNA, 75 bp, synthetic construct
  source 1..75: mol_type = other DNA
cacacgcacatactgtcggtattggtgctcatacgcactccgttgcgattggctcacatggacacaccatcaccg

SEQ ID NO: 656050 - DNA, 75 bp, synthetic construct
  source 1..75: mol_type = other DNA
ttcaaaagatgaggcgaccagacaggcgtcagcagcgaagagcagcgccacgacggcatccacgaaggcgacaga

SEQ ID NO: 656051 - DNA, 75 bp, synthetic construct
  source 1..75: mol_type = other DNA
agcaaattccgcgaaggcggcaaaaacgtccgagacgaacgctaagtcttctgagacggcagcagcacagagtgc

SEQ ID NO: 656052 - DNA, 75 bp, synthetic construct
  source 1..75: mol_type = other DNA
cgcaagtacctatgaagccgttcattgtagaagtggcaagtgttgaagagggtgttcgcctgatggatgcactgg

SEQ ID NO: 656053 - DNA, 75 bp, synthetic construct
  source 1..75: mol_type = other DNA
tggccaggaggcggcggttctgcgttagcattttatgatggcggtgggttcacttatgtccagaattcacagtat

SEQ ID NO: 656054 - DNA, 75 bp, synthetic construct
  source 1..75: mol_type = other DNA
acgagcgcagcctcgagcgccagtagttccgcttcctcggcaacggcggcaggcaattccgcgaacgcggcaaaa

SEQ ID NO: 656055 - DNA, 75 bp, synthetic construct
  source 1..75: mol_type = other DNA
ttaaagacacctatcagtatggttctacagctgtcggaagtaactcataccaggtacaaggggcggttggtctgg

SEQ ID NO: 656056 - DNA, 75 bp, synthetic construct
  source 1..75: mol_type = other DNA
acgtccgagacgaacgctaagtcttctgagacggcagcggaacagagtgcctccgcagcagcagactcaaaaaca

SEQ ID NO: 656057 - DNA, 75 bp, synthetic construct
  source 1..75: mol_type = other DNA
acttctgcatccgccgcgaccacgaaggcgtcagaagctgccacctcagcccgggatgcggcggcctcaaaagag

SEQ ID NO: 656058 - DNA, 75 bp, synthetic construct
  source 1..75: mol_type = other DNA
aaacgccaggtcttctgaaacggcagcgggacagagcgcctcagctgcggcaggctcaaaaacagcggctgcgtc

SEQ ID NO: 656059 - DNA, 75 bp, synthetic construct
  source 1..75: mol_type = other DNA
aaccactatcttcaagacgtacaacgagccacaacggtcgcttcgctccgcgctcgggatgttaatgagtctgtc

SEQ ID NO: 656060 - DNA, 75 bp, synthetic construct
  source 1..75: mol_type = other DNA
ctttaaggccgtcattcagtggcctgccaatatgaagctgtgggacgagtgggaagaactcatccgcaacaaaca

SEQ ID NO: 656061 - DNA, 75 bp, synthetic construct
  source 1..75: mol_type = other DNA
gattgaccagctgcgccactaccccaaagccgaccacgatgatggcccggactgtctgcacatgctgtggacgct

SEQ ID NO: 656062 - DNA, 75 bp, synthetic construct
  source 1..75: mol_type = other DNA
gtgaaaaaacctgtgatctgcctgttcctgctgatatcgctggtgggttgctcgaataacggatttgttatgcct

SEQ ID NO: 656063 - DNA, 75 bp, synthetic construct
  source 1..75: mol_type = other DNA
cactgacacgttcaaaaactacaatgagcctcatcgtaatctccgttctgcactcggcatgctgatgagcctgtc

SEQ ID NO: 656064 - DNA, 75 bp, synthetic construct
  source 1..75: mol_type = other DNA
gatgccgatgctgtttctctctattcaggccgtgtatggccaacacctcaggcagttaagtacggcctggtggat

SEQ ID NO: 656065 - DNA, 75 bp, synthetic construct
  source 1..75: mol_type = other DNA
gataaatattgctatcgcgataacagctacaaacaggcgggatctatcgacggtagccagatgttccacggtcct

SEQ ID NO: 656066 - DNA, 75 bp, synthetic construct
  source 1..75: mol_type = other DNA
tgaagatgaaatgggtctgcgcgtggcagaaacaccggaatcggtgattgcccgtactcgcaaagaaaacgacct

SEQ ID NO: 656067 - DNA, 75 bp, synthetic construct
  source 1..75: mol_type = other DNA
gaaggcttccgcgttgtaccaccagcggcggtacgtcagggtgcgtttattgcccgtaacaccgtgctgatgccg

SEQ ID NO: 656068 - DNA, 75 bp, synthetic construct
  source 1..75: mol_type = other DNA
attcgcggcgaacggctggcgcatattctttccggtgccaacgtgaacttccacggcctgcgctacgtctcggaa

SEQ ID NO: 656069 - DNA, 75 bp, synthetic construct
  source 1..75: mol_type = other DNA
gagcggttccgatcgcattctgaacctgatgggacgtacccatacggcgctggagtacaaagcgatcatccgtaa

SEQ ID NO: 656070 - DNA, 75 bp, synthetic construct
  source 1..75: mol_type = other DNA
tggcttcgcaggaaggcgaccacattcgtcaacgcgcccactacgtcgatattatttttgggccgcaaacgctgc

SEQ ID NO: 656071 - DNA, 75 bp, synthetic construct
  source 1..75: mol_type = other DNA
agattgcccagcttgcggctcagggcgtgcgtgaagtcaacctgctcggtcagaacgtgaacgcctggcgtggtg

SEQ ID NO: 656072 - DNA, 75 bp, synthetic construct
  source 1..75: mol_type = other DNA
ccggtgccccggaaggtgccgaatatttaagagcggtgctgcgcgcgccggtctacgaagcggcgcaggtcacgc

SEQ ID NO: 656073 - DNA, 75 bp, synthetic construct
  source 1..75: mol_type = other DNA
aacgcctctacagcttcgaattcccggaatcaccgggcgcgctgctgcgcttcctcaacacgctgggtacgcact

SEQ ID NO: 656074 - DNA, 75 bp, synthetic construct
  source 1..75: mol_type = other DNA
ctggcggcgttcgaacttggcgaccatgaaccggatttcgaaacccggctaaatgagctgggctacgattgccac

SEQ ID NO: 656075 - DNA, 75 bp, synthetic construct
  source 1..75: mol_type = other DNA
atgatggctgactcgcaacccctgtccggcaccccggaaggtgccgaatatttaagagcggtgctacgcgcgccg

SEQ ID NO: 656076 - DNA, 75 bp, synthetic construct
  source 1..75: mol_type = other DNA
atgatggcagactcacaacccctgtctggtgctccggaaggcgccgaatatttaagagcggtgctacgtgcaccg

SEQ ID NO: 656077 - DNA, 75 bp, synthetic construct
  source 1..75: mol_type = other DNA
aagcgcgaagatcgtcagccagttcatagctttaagctgcgcggcgcatacgccatgatggcgggcctgacggaa

SEQ ID NO: 656078 - DNA, 75 bp, synthetic construct
  source 1..75: mol_type = other DNA
ctgaagatcttgccactaagcgtaaagcgatgaaccgtggactacggaaaattttgctcgcccgccacgcgttgt

SEQ ID NO: 656079 - DNA, 75 bp, synthetic construct
  source 1..75: mol_type = other DNA
ttaacggtcaattgtgcagcaaagatgtggcagccatgcttattagcaaggttcttccaactgtgctggaggtca

SEQ ID NO: 656080 - DNA, 75 bp, synthetic construct
  source 1..75: mol_type = other DNA
aggttatagcgtgaacgtgattaccgatggctgtcgcggcgtgaatatccagccacaggacagcgcgcacgcgtt

SEQ ID NO: 656081 - DNA, 75 bp, synthetic construct
  source 1..75: mol_type = other DNA
atgatttctgtgctggtggcgcgctcgccgtgcccggaaggtgacagtacggtggatgtcgctaaccgcctgatt

SEQ ID NO: 656082 - DNA, 75 bp, synthetic construct
  source 1..75: mol_type = other DNA
ttatcgctaaatacatccattcaacaaacgtttatagctatttaagtccaagagacaaagagaacttcagcacaa

SEQ ID NO: 656083 - DNA, 75 bp, synthetic construct
  source 1..75: mol_type = other DNA
gtgtaatggataaacactcgctgtggcaacgttatgtcccgctggtgcgtcacgaagcattgcgcctgcaggttc

SEQ ID NO: 656084 - DNA, 75 bp, synthetic construct
  source 1..75: mol_type = other DNA
ggttgaatttgttcaggataaccattctaaatccagtaaaggcgtattacgtgggcttcattaccagttagaacc

SEQ ID NO: 656085 - DNA, 75 bp, synthetic construct
  source 1..75: mol_type = other DNA
taatggcgatttgacggtaaccggaaacggctcatttaacgacgttcagatccgctcggataaacgcaacaagcg

SEQ ID NO: 656086 - DNA, 75 bp, synthetic construct
  source 1..75: mol_type = other DNA
acctggatgcacgattgaactcaaagccctgcggacgacggagacggtgattgtcaccaccgtggcagagggaga

SEQ ID NO: 656087 - DNA, 75 bp, synthetic construct
  source 1..75: mol_type = other DNA
caggcgaaccgggagcgaaaggcgataaaggtgaccccggaggaaccgaactgcttgcttcagccaatacatgga

SEQ ID NO: 656088 - DNA, 75 bp, synthetic construct
  source 1..75: mol_type = other DNA
gcgcggagaagcggttattgccagtcaggactggcacccggctaaccatggcagttttgccagccagcatggtgt

SEQ ID NO: 656089 - DNA, 75 bp, synthetic construct
  source 1..75: mol_type = other DNA
gtgcgacggcggcagcacagagcaaaagtacggcggaatccgcggcaacgcgcgccgagacagcggcaaaacggg

SEQ ID NO: 656090 - DNA, 75 bp, synthetic construct
  source 1..75: mol_type = other DNA
gcagcgaggtctgcatccgcagcgatgacatccgaaacgaacgcgaaagcctcggaaaccagtgcagaatcctca

SEQ ID NO: 656091 - DNA, 75 bp, synthetic construct
  source 1..75: mol_type = other DNA
caaccgctttgggcaaaagcgagcatttattattggcatggggttatgcaccatcggtgctgctgcggtggctat

SEQ ID NO: 656092 - DNA, 75 bp, synthetic construct
  source 1..75: mol_type = other DNA
atataacgccgtaggtgtttatcttcctcttacgttggcgggaataataagtggcgggcttactggcgcgttgac

SEQ ID NO: 656093 - DNA, 75 bp, synthetic construct
  source 1..75: mol_type = other DNA
atataacgccgtaggcgtttatcttcctcttacgttggcgggaataataagcggagggcttactggcgcgttgac

SEQ ID NO: 656094 - DNA, 75 bp, synthetic construct
  source 1..75: mol_type = other DNA
atgatgcagcaagactggcaccccgccgatattatcgcgggactgagaaaacagaggacatcgctggctgaggtt

SEQ ID NO: 656095 - DNA, 75 bp, synthetic construct
  source 1..75: mol_type = other DNA
ctgcaaaagggcatcagaaagcgattattgttttccaggatacgttgcagacaggaaaatatgactctggattga

SEQ ID NO: 656096 - DNA, 75 bp, synthetic construct
  source 1..75: mol_type = other DNA
acgaaacgctggaagccgcatttgagcggctgacgatggcggaactggggctgcgtctgccgataacagcaggcc

SEQ ID NO: 656097 - DNA, 75 bp, synthetic construct
  source 1..75: mol_type = other DNA
aatcatgagccttaagggactttataaacactcaatgaatcaaggtaatacaaaaataaaaactaagagttttgc

SEQ ID NO: 656098 - DNA, 75 bp, synthetic construct
  source 1..75: mol_type = other DNA
aggcctttacaaatactcacaacatgataaaaaatctgaggtaaaatcagtaagcttcgctctgcctgtttgtgg

SEQ ID NO: 656099 - DNA, 75 bp, synthetic construct
  source 1..75: mol_type = other DNA
atgtctgaaccgcaacggctgttctttgctatcgacttacctgcagaaatccgcgaacagattatccactggcgc

SEQ ID NO: 656100 - DNA, 75 bp, synthetic construct
  source 1..75: mol_type = other DNA
gtttaggcatcgacttccctttggcaaccaatgccgtggcagagcttcgtggttcaacgtcgaagaaaaccggaa

SEQ ID NO: 656101 - DNA, 75 bp, synthetic construct
  source 1..75: mol_type = other DNA
agagatgttgattttgaagagttttgcaatagggtatactgcagaaataaaattattgtttcactcagcacaagt

SEQ ID NO: 656102 - DNA, 75 bp, synthetic construct
  source 1..75: mol_type = other DNA
acaaaaaaatattcatagacaaaattgaaggtctagttaaatataatttgcatctaatggaagtagaatgtgggc

SEQ ID NO: 656103 - DNA, 75 bp, synthetic construct
  source 1..75: mol_type = other DNA
tcaacagtatggtccgattataaaaatgaaaaactgactaacacaatctcactgcgctatctggtgcgattcacg

SEQ ID NO: 656104 - DNA, 75 bp, synthetic construct
  source 1..75: mol_type = other DNA
atggcaagaaatcaaagtctgccgacgcctgagcagttcagggcaacctttccgcagttcgctgacgaaacaaag

SEQ ID NO: 656105 - DNA, 75 bp, synthetic construct
  source 1..75: mol_type = other DNA
atggtgttcagtcctcaaagtccgtggataaggtaagcgtcagttatgacaccagcgtgacgctgaatcctgatg

SEQ ID NO: 656106 - DNA, 75 bp, synthetic construct
  source 1..75: mol_type = other DNA
ttgtttccgtactttgccgggttgttcgtggctcactacatgacgctatgggcggcagatagtcgggcaatgctg

SEQ ID NO: 656107 - DNA, 75 bp, synthetic construct
  source 1..75: mol_type = other DNA
tcgttgcgcactacatgacgctctgggcggcagacagctgggcgatgctggctggtggtccgggcggttcaacca

SEQ ID NO: 656108 - DNA, 75 bp, synthetic construct
  source 1..75: mol_type = other DNA
atggcaagaaatcaaagtctgccgacgcctgagcagttcagggcaaccttcccccagttcgctgacgatacaaag

SEQ ID NO: 656109 - DNA, 75 bp, synthetic construct
  source 1..75: mol_type = other DNA
tccgcagttcgctgacgaaacaaagtaccccacgccaatgatccaggctcgactgaattttgctgatgccctgct

SEQ ID NO: 656110 - DNA, 75 bp, synthetic construct
  source 1..75: mol_type = other DNA
aaaacactcgcgattgagatcatgttgaagtattccaatgaccatgcaaaagtccttgcacatttggaatcgtgt

SEQ ID NO: 656111 - DNA, 75 bp, synthetic construct
  source 1..75: mol_type = other DNA
ttacggtgtctggcagcacttttatgacgataacttctccggcacggatttcaccactcactatgtggtgctcgg

SEQ ID NO: 656112 - DNA, 75 bp, synthetic construct
  source 1..75: mol_type = other DNA
tatgtgtattattctcgctgcttgcaggatgtgcctctgaatctcctattgatgaaaaaaagaaaaaaactcaaa

SEQ ID NO: 656113 - DNA, 75 bp, synthetic construct
  source 1..75: mol_type = other DNA
ggataaggtttcagccagttatgacgcaagcgcaaccctggaccctaatgccggtttctggaacaactcccgtta

SEQ ID NO: 656114 - DNA, 75 bp, synthetic construct
  source 1..75: mol_type = other DNA
gaatatgaactggatgcaggcactgcgttttgtggctgcaaaaggacatcagaaagcgattattgtttaccagga

SEQ ID NO: 656115 - DNA, 75 bp, synthetic construct
  source 1..75: mol_type = other DNA
gagaaactagataacccggaaacactccctgttcatgttattcctaaggaagttaaaacaaaatccatcactcgc

SEQ ID NO: 656116 - DNA, 75 bp, synthetic construct
  source 1..75: mol_type = other DNA
ctgctttcacttcagccggtggaagaactctggggtgtgggcaggcggattgcaaaaaagctgaatgtcctgggg

SEQ ID NO: 656117 - DNA, 75 bp, synthetic construct
  source 1..75: mol_type = other DNA
ttcgcttttttaaacatgtcttctggatatgtttaccgcatcgacacattccagccatatgtcgataaagcctta

SEQ ID NO: 656118 - DNA, 75 bp, synthetic construct
  source 1..75: mol_type = other DNA
atgccgaattaaacgctgttgctgatgagcgcatgaaaaatccagaaattgtgaaggttaacctggatgacctat

SEQ ID NO: 656119 - DNA, 75 bp, synthetic construct
  source 1..75: mol_type = other DNA
ttgccgcaggccttctggtctccggcgtggcgggtgcagcagagaaacctgccgttgcctttaccccggaacagg

SEQ ID NO: 656120 - DNA, 75 bp, synthetic construct
  source 1..75: mol_type = other DNA
tgttacatagtctgtgtgaatcaaaatttagatgcagtcaggaaaaaaatcagcacgaatgtagggattattgtt

SEQ ID NO: 656121 - DNA, 75 bp, synthetic construct
  source 1..75: mol_type = other DNA
ggacattttcttcaggcatcactgttttccggtatcttcaacagtatcgctggtttcatttcggaaatatatcct

SEQ ID NO: 656122 - DNA, 75 bp, synthetic construct
  source 1..75: mol_type = other DNA
atcgttttggtgatgatgaggcatttgaagaaaacgtacgcctggaaatggagcgcaaccacgaacgttatgtgt

SEQ ID NO: 656123 - DNA, 75 bp, synthetic construct
  source 1..75: mol_type = other DNA
tctttggaagcgcgtgtttttcccgtgtttatgttgatggtaaagaggtggcagatttaggtacagctcagaaag

SEQ ID NO: 656124 - DNA, 75 bp, synthetic construct
  source 1..75: mol_type = other DNA
tcctgaaccgaaacgaacccgcgttctattgcgttccaccaaaactttacgcctactatcgggaactcgctgaag

SEQ ID NO: 656125 - DNA, 75 bp, synthetic construct
  source 1..75: mol_type = other DNA
gcaacggcggcaggaaattccgcgaaggcggcaaaaacgtccgagacgaacgccaggtcttctgagacggcagcg

SEQ ID NO: 656126 - DNA, 75 bp, synthetic construct
  source 1..75: mol_type = other DNA
aatagaatatttaaatttacgggtattacactgttaaggtcaagaaaaacaacagagcttttaaataaggtttga

SEQ ID NO: 656127 - DNA, 75 bp, synthetic construct
  source 1..75: mol_type = other DNA
caccgcggtcttcactcgccaactgtgggaaggcagcaccgagtgtctggtggtattcccggatggcgttggcat

SEQ ID NO: 656128 - DNA, 75 bp, synthetic construct
  source 1..75: mol_type = other DNA
ttgggattatgtgtgcgcttgctggttgtgcaaccaagccagtctcaaacgagcaggctactcccgttccagaaa

SEQ ID NO: 656129 - DNA, 75 bp, synthetic construct
  source 1..75: mol_type = other DNA
cgcggcagaaccttgcattggttctggaaacagcggcgacaggtactccggtaacgatcacgaggcgtgggcata

SEQ ID NO: 656130 - DNA, 75 bp, synthetic construct
  source 1..75: mol_type = other DNA
tccgcaacatgttccacgacccgcgccagcgccagttcgccatcggcgtgtggatcgccgcgttttcgctgggca

SEQ ID NO: 656131 - DNA, 75 bp, synthetic construct
  source 1..75: mol_type = other DNA
cgtggcgaacagttttatgtggtacgcgatgatcgcgtcctgtcttccccgtttctcactaaacgtaacggcgaa

SEQ ID NO: 656132 - DNA, 75 bp, synthetic construct
  source 1..75: mol_type = other DNA
gcgctcttaccgacgtcataaaagcaccatatggcgcgatggtcgtagacagcggcgaccagttctatgttgtgc

SEQ ID NO: 656133 - DNA, 75 bp, synthetic construct
  source 1..75: mol_type = other DNA
cgcttgttgccgcaacgctgacgttgctgctcgggcgtaagttggtccattccgtctcctttttgaagaaataca

SEQ ID NO: 656134 - DNA, 75 bp, synthetic construct
  source 1..75: mol_type = other DNA
gtgttctcacgctggaattattcgtcggcaaaaacgtgacggtagttgatgttgcggaaggcgagccagcagaca

SEQ ID NO: 656135 - DNA, 75 bp, synthetic construct
  source 1..75: mol_type = other DNA
tagattatgaaaatattggtacacttgaaagtgtccgtctgtcccgttatgaacgccttattttatttaccgggc

SEQ ID NO: 656136 - DNA, 75 bp, synthetic construct
  source 1..75: mol_type = other DNA
tattatgtctgacttccctttattagatagaggcaaccctccattaaaaggtgaaaaaaaatccacaataactcg

SEQ ID NO: 656137 - DNA, 75 bp, synthetic construct
  source 1..75: mol_type = other DNA
acgtgttcgtctgatcgatattgatgcccctgagaaaaagcagccatacggccagaaagcaaaacagttcctaac

SEQ ID NO: 656138 - DNA, 75 bp, synthetic construct
  source 1..75: mol_type = other DNA
gaatgcttgtcgtacctggtcaatgcggaaatggttaaaaatggctatgcgtgggcgtatcgttaccatgataaa

SEQ ID NO: 656139 - DNA, 75 bp, synthetic construct
  source 1..75: mol_type = other DNA
caccaactggcctagaaattactggaactgccactattaaccataattcattagcctctgtacgtcccgatttga

SEQ ID NO: 656140 - DNA, 75 bp, synthetic construct
  source 1..75: mol_type = other DNA
gaaattgtctgagctggtaaaagatgctgatggtgttgctgtatcttcaaccggtaaagatcgttatggacgtac

SEQ ID NO: 656141 - DNA, 75 bp, synthetic construct
  source 1..75: mol_type = other DNA
tgatacccttgaggtcaaagatgacggtgagttgataagaattcggcttgtagatattgatgccccggagaaaag

SEQ ID NO: 656142 - DNA, 75 bp, synthetic construct
  source 1..75: mol_type = other DNA
gggcgaaatacgcgtggaacagcgtcaacggctatccgagcactgttgtttactaccagcagcgcctgtactttg

SEQ ID NO: 656143 - DNA, 75 bp, synthetic construct
  source 1..75: mol_type = other DNA
cattaaattcacgcagagcgccgacgttctgacgctggtgcatcctgcttacccgccgaaagagctgcgtcgtta

SEQ ID NO: 656144 - DNA, 75 bp, synthetic construct
  source 1..75: mol_type = other DNA
cgctgtaatatccaacgatatagtccgttattgcgtgagctgcatcgttcaaaaataagattaatgagaaaatca

SEQ ID NO: 656145 - DNA, 75 bp, synthetic construct
  source 1..75: mol_type = other DNA
cagacctatgctctggagttcgggcacaactatatgcgcgttatcaaagacggcgagtatgttctgacgaccagc

SEQ ID NO: 656146 - DNA, 75 bp, synthetic construct
  source 1..75: mol_type = other DNA
cgttgagcctcagaaggttgtcactggtggttcagtcacgctggagtcaccaggtgcagttgtgcatatcggatt

SEQ ID NO: 656147 - DNA, 75 bp, synthetic construct
  source 1..75: mol_type = other DNA
gcagcgctttctgcattcgtgatgacggtaaattactggtgctcacgtatatgcgcgatcagcaggttttcgcct

SEQ ID NO: 656148 - DNA, 75 bp, synthetic construct
  source 1..75: mol_type = other DNA
tggcgaaaaggccaaaaccgtgcttactggatcaaaatttaccattgcgaaagcttgttctggaaaagctggaga

SEQ ID NO: 656149 - DNA, 75 bp, synthetic construct
  source 1..75: mol_type = other DNA
tccgatggaagcataataagctttttctgcttctgccggtgggatatggcccagcctttccagcaatcgtcgatt

SEQ ID NO: 656150 - DNA, 75 bp, synthetic construct
  source 1..75: mol_type = other DNA
gagcgtaagcgggctgtagctcacctgacactgtctgagcgcgaggagatacgagctggtttgtcagccaacata

SEQ ID NO: 656151 - DNA, 75 bp, synthetic construct
  source 1..75: mol_type = other DNA
aaaaataagattaatgagaaaatcactccttgaataccgtagagcgttacttatatgttcaaaaagcttaactcg

SEQ ID NO: 656152 - DNA, 75 bp, synthetic construct
  source 1..75: mol_type = other DNA
tcgtgcgatagctactgcgctgaatcgcagtccttcgacgatctcacgtgaagttcagcgtaatcggggcagacg

SEQ ID NO: 656153 - DNA, 75 bp, synthetic construct
  source 1..75: mol_type = other DNA
atgttaagggatactggcggcataaaaccccatgagcgtaagcgggctgtagctcacctgacactgtctgagcgc

SEQ ID NO: 656154 - DNA, 75 bp, synthetic construct
  source 1..75: mol_type = other DNA
tgattggttacgagcgcaacgtctggactaacgagaaatacgacaaagccggcatcaccgtgctgcccatcccgg

SEQ ID NO: 656155 - DNA, 75 bp, synthetic construct
  source 1..75: mol_type = other DNA
gcatctggcaggccatgtgatgctgcgctcgcagatgaacgctgacaccgtattgccggtgcagggaacggtcat

SEQ ID NO: 656156 - DNA, 75 bp, synthetic construct
  source 1..75: mol_type = other DNA
tacatgcaccggacctgtcgggaggcgcgtcttccggcgagattgctgacgagcaggtgcggaaagctgtcagcg

SEQ ID NO: 656157 - DNA, 75 bp, synthetic construct
  source 1..75: mol_type = other DNA
ctgcacggcttatcgaggtttgtgccgcactttatcgccctttctgccgcatcgccgtatatgcagggaacggat

SEQ ID NO: 656158 - DNA, 75 bp, synthetic construct
  source 1..75: mol_type = other DNA
cagccgctggctgatgtccggactgaaatcgcccggcaggtgagcagcggggaactgattcagctggattcggtt

SEQ ID NO: 656159 - DNA, 75 bp, synthetic construct
  source 1..75: mol_type = other DNA
gcgtgtctgccgtccggcttgccagtgaccagctccgccagtcgaccggcgaggaaaacctggatatcgccatac

SEQ ID NO: 656160 - DNA, 75 bp, synthetic construct
  source 1..75: mol_type = other DNA
gtggccagtttctgtcagaaagcccgcacctggcaggtcatgtgatgctgcgctcgcagatgaacgccgataccg

SEQ ID NO: 656161 - DNA, 75 bp, synthetic construct
  source 1..75: mol_type = other DNA
aaatgagatcacggccggagaggtaaagcacgatatcaccgaaagtatgctggagctggcgacggatgtttgccg

SEQ ID NO: 656162 - DNA, 75 bp, synthetic construct
  source 1..75: mol_type = other DNA
ggtatcaccgtgctgcccatcccgggggacgaattgggacgaggccgcggcggcgcacgctgcatgagctgtccg

SEQ ID NO: 656163 - DNA, 75 bp, synthetic construct
  source 1..75: mol_type = other DNA
tggtgatgtgctggtgattggtcggggggccgtgttgatcggcatgtctgaacgcaccacgccacaaggaatcga

SEQ ID NO: 656164 - DNA, 75 bp, synthetic construct
  source 1..75: mol_type = other DNA
gaatgaagcgcagctgatgcgcgatttcgtcgccgatggcggctcgctgattgggctggtgaaaaagcattgtga

SEQ ID NO: 656165 - DNA, 75 bp, synthetic construct
  source 1..75: mol_type = other DNA
ataaatatggcgggattgattcagtccaccgctcactggctgctgacggaacgcccttttaagcatcaggaaaag

SEQ ID NO: 656166 - DNA, 75 bp, synthetic construct
  source 1..75: mol_type = other DNA
gcttccaggcctgccgttatgggctggaaggtgccattaccgatccgcacactggcgatcgtcggccactaacgg

SEQ ID NO: 656167 - DNA, 75 bp, synthetic construct
  source 1..75: mol_type = other DNA
cccgcttcggctgggggctgactgtggcgatcgaaccgccagagctggaaacccgtgtggcgatcctgatgaaaa

SEQ ID NO: 656168 - DNA, 75 bp, synthetic construct
  source 1..75: mol_type = other DNA
gcctgcgtaatgatgatgttgatttgatcaatattctgaatgtcgatgattgttggcaagccgacccagaactac

SEQ ID NO: 656169 - DNA, 75 bp, synthetic construct
  source 1..75: mol_type = other DNA
gatgcgcgcaactggcagtatgttgcagagtacctggcggaacaactggatcgggaacagcaacagcaggacggt

SEQ ID NO: 656170 - DNA, 75 bp, synthetic construct
  source 1..75: mol_type = other DNA
ggtgccaatttatgccacgccgaactcgacggtttagatccccgcaaagtcgatacatcaggtatcaaaattgca

SEQ ID NO: 656171 - DNA, 75 bp, synthetic construct
  source 1..75: mol_type = other DNA
tgatgaaaaatgccgcgaaaacgataggaaaaaggctgtacgggatcctgaatgcgatgcgacacagtgtctcaa

SEQ ID NO: 656172 - DNA, 75 bp, synthetic construct
  source 1..75: mol_type = other DNA
ccatgtggcgaagcaactgggcgaagtggttgataaaacccgccagaatgaacatccgcacctccctgttgaaag

SEQ ID NO: 656173 - DNA, 75 bp, synthetic construct
  source 1..75: mol_type = other DNA
cgacacttaattcagaactcattaataaaatcgcgcaggattttgcgcaggcgaccagccttgcggttgtcgtgg

SEQ ID NO: 656174 - DNA, 75 bp, synthetic construct
  source 1..75: mol_type = other DNA
aaattacggatgagtttgctgacatcgcgttatgcacttggcgttgggccgttacgggaagcgctttcgcaactg

SEQ ID NO: 656175 - DNA, 75 bp, synthetic construct
  source 1..75: mol_type = other DNA
tggaagcgatgttagtgagtctggcgattgcccgcggtggcgatgagtgggaggcagacgttctcgcaaaagcgc

SEQ ID NO: 656176 - DNA, 75 bp, synthetic construct
  source 1..75: mol_type = other DNA
tattggatgcgttcagaaaagttcctgaaatggactattcgcgagtgatggctgcagccgatcttctgaaactga

SEQ ID NO: 656177 - DNA, 75 bp, synthetic construct
  source 1..75: mol_type = other DNA
cgcatcagcaaaacttatttcaggcactgagtgcggatatattcctgtgccccttccagctgcttctgcattgtc

SEQ ID NO: 656178 - DNA, 75 bp, synthetic construct
  source 1..75: mol_type = other DNA
gaggcagacgttcttgcgaaggcgcatctgctcagtaagcttgaggcctgtgacgccagtgagaaaatgcttgat

SEQ ID NO: 656179 - DNA, 75 bp, synthetic construct
  source 1..75: mol_type = other DNA
cgcgctatcggttcatctggctgcggcaaacggtgctttctgtagaaatgctggaagataaacatgaacagcacc

SEQ ID NO: 656180 - DNA, 75 bp, synthetic construct
  source 1..75: mol_type = other DNA
gccaggggataccgaaaccgggagcgctttaaactgggggtgatgttccactacggaaagctgaatatggcgttc

SEQ ID NO: 656181 - DNA, 75 bp, synthetic construct
  source 1..75: mol_type = other DNA
gccaaaccgttttgtcctcgattgggtacgggacaagtacctcaataatatcaatggactgctaaccagtttctg

SEQ ID NO: 656182 - DNA, 75 bp, synthetic construct
  source 1..75: mol_type = other DNA
cgtagccgtgaagcgctacaccacctgaatatacagcagctgcgacggtcgcatagccttcgccatggcaggcgt

SEQ ID NO: 656183 - DNA, 75 bp, synthetic construct
  source 1..75: mol_type = other DNA
tcatctttagactcaggggcaaagattctgtctcagtaaatcaggctcttaccgacaaattcctgagtttaccgt

SEQ ID NO: 656184 - DNA, 75 bp, synthetic construct
  source 1..75: mol_type = other DNA
tcgacgatattcagttttttgctaataaagaacgatctcaggaagagtttttccacaccttcaacgccctgctgg

SEQ ID NO: 656185 - DNA, 75 bp, synthetic construct
  source 1..75: mol_type = other DNA
tgaccacacgacggtgcttcatgcctgccgtaagatcgagcagttgcgtgaagagagccacgatatcaaagaaga

SEQ ID NO: 656186 - DNA, 75 bp, synthetic construct
  source 1..75: mol_type = other DNA
tacgtgaggcgctgcgcgacttactggctttgcaggaaaaactggtcactatcgacaatattcagaagacggtgg

SEQ ID NO: 656187 - DNA, 75 bp, synthetic construct
  source 1..75: mol_type = other DNA
atcgacgggcgagtgctgttgtgcagctcgttcagtaaaagcattgcaccaggcctgcgcgtgggttgggtcgca

SEQ ID NO: 656188 - DNA, 75 bp, synthetic construct
  source 1..75: mol_type = other DNA
cgtagccgtgaagcgctacaccacctgaatatacagcatctgcgacgttcgcatagccttcgccatggcaggcgt

SEQ ID NO: 656189 - DNA, 75 bp, synthetic construct
  source 1..75: mol_type = other DNA
ggtataagagaggattggaaacctattgcacaaggagctaaaaaagtaaaagcagacgtatatacttcaagcgat

SEQ ID NO: 656190 - DNA, 75 bp, synthetic construct
  source 1..75: mol_type = other DNA
aatccacgaacgctcgcggcatatcgataacagacgctctctggggcactgggaaggcgatttggtgtcaggtac

SEQ ID NO: 656191 - DNA, 75 bp, synthetic construct
  source 1..75: mol_type = other DNA
gagcgcaagcgggctgtggctcacctgacgctatctgagcgcgaggaaatacgagccggtttgtcagccaaaatg

SEQ ID NO: 656192 - DNA, 75 bp, synthetic construct
  source 1..75: mol_type = other DNA
acaacaggccaagaaagacactgaagttcaaaacaccgaaagagataattgaaaggagtgttgcgttgacagatt

SEQ ID NO: 656193 - DNA, 75 bp, synthetic construct
  source 1..75: mol_type = other DNA
ccattgggattgtactacaaatgcgtcagtttctatttatacctcgccaacatattcagcgagtaagccttccag

SEQ ID NO: 656194 - DNA, 75 bp, synthetic construct
  source 1..75: mol_type = other DNA
acacgtaagcaaaatctggaaacagagaaaatccaggcgcaaatagcggtaactcaggcccaggcagaagcagac

SEQ ID NO: 656195 - DNA, 75 bp, synthetic construct
  source 1..75: mol_type = other DNA
tgtctcaggaacaggatggcattaaatcgcatacccacagcgccagcgcatccagtacggatttggggacgaaaa

SEQ ID NO: 656196 - DNA, 75 bp, synthetic construct
  source 1..75: mol_type = other DNA
cgcttcgcccacaaaaatttattggcattactgttggcgtactggcagtcattacgctgccatttctttcgtatt

SEQ ID NO: 656197 - DNA, 75 bp, synthetic construct
  source 1..75: mol_type = other DNA
aggcctacagccgcgaccagcaaccggcacaaatgacagtatcagtcagcttccacattaaaccttcagaagcag

SEQ ID NO: 656198 - DNA, 75 bp, synthetic construct
  source 1..75: mol_type = other DNA
gcgatttcaaatctaagcgcggggattatgagcacaacaagcggtagtggccagactcgtaatgcagggaagaca

SEQ ID NO: 656199 - DNA, 75 bp, synthetic construct
  source 1..75: mol_type = other DNA
ccattgggattgtactgcaaatgcgtcagtttctgtttatacctcgccaacatattcagcgagtaagccttccag

SEQ ID NO: 656200 - DNA, 75 bp, synthetic construct
  source 1..75: mol_type = other DNA
aacactggtgcacatacccatagtgttagcggtacggctgcttcagccggtgcacatacccattcgatgacattt

SEQ ID NO: 656201 - DNA, 75 bp, synthetic construct
  source 1..75: mol_type = other DNA
aactgacagaagaacaggccgtagctcaaaaacttaaaaatcaggtaaccgaaggtaagcttattgacaccggat

SEQ ID NO: 656202 - DNA, 75 bp, synthetic construct
  source 1..75: mol_type = other DNA
gtcatttccatgggcgtatacatcggtcaaagcacccgtatttacgaccgtgaaaccggcgaaatccactacggt

SEQ ID NO: 656203 - DNA, 75 bp, synthetic construct
  source 1..75: mol_type = other DNA
tggcaaatacagcctctactgtgcggttatcgttaagaaagttgacgcgaaaactcgcggcaaagttggtattaa

SEQ ID NO: 656204 - DNA, 75 bp, synthetic construct
  source 1..75: mol_type = other DNA
cctgcctgccgtttcatcatcaatcccaatgacgctcgctttattaatcctgacgcgatgtgccgcgaaattcag

SEQ ID NO: 656205 - DNA, 75 bp, synthetic construct
  source 1..75: mol_type = other DNA
atggtaatgcaagtacagccacgaaattgcagacggcaagatctatcggtggagttgttttcgacggttctgcaa

SEQ ID NO: 656206 - DNA, 75 bp, synthetic construct
  source 1..75: mol_type = other DNA
acagctttatcttctccgcacgtccgggtacaccagccgccgatatggttgatgatgttccggaagaagagaaga

SEQ ID NO: 656207 - DNA, 75 bp, synthetic construct
  source 1..75: mol_type = other DNA
acacgcaatcaaaacccacaactgccagaaaggcactgactcaacgtgaacgccagaagcgccgctgtctgcgta

SEQ ID NO: 656208 - DNA, 75 bp, synthetic construct
  source 1..75: mol_type = other DNA
cctctgccggtacaccggaaaaatcccccgctaaatgctcccgtcgccgtcgttatctgaagtctgtcgccggtg

SEQ ID NO: 656209 - DNA, 75 bp, synthetic construct
  source 1..75: mol_type = other DNA
taacgtgaactttcacggcctgcgctacgtctcggaacgctgcgaactgggcgaacagcgtgaagcgttgctggc

SEQ ID NO: 656210 - DNA, 75 bp, synthetic construct
  source 1..75: mol_type = other DNA
agcctctgccagcctcgcaccactctctgcatttgatgttctgattagcgatcgtccgttaccggcagattatgt

SEQ ID NO: 656211 - DNA, 75 bp, synthetic construct
  source 1..75: mol_type = other DNA
ctgatgggccgtactcacacggcgctggagtacaaagcgatcatccgtaaactgcgtgcggcgcgtccggatatt

SEQ ID NO: 656212 - DNA, 75 bp, synthetic construct
  source 1..75: mol_type = other DNA
ggcgcaccaatcccgtggccatcagataccgttccgtctggttatgccctgatgcaggggcaggcttttgacaaa

SEQ ID NO: 656213 - DNA, 75 bp, synthetic construct
  source 1..75: mol_type = other DNA
tagtacagctcagcagtgcgaccaacagcacgtctgaaacgctggcggcaacgccaaaggcagtaaaagcagcct

SEQ ID NO: 656214 - DNA, 75 bp, synthetic construct
  source 1..75: mol_type = other DNA
tgttgtgaaacttagcagtgctgtcgatagcaccagcgaatcactggctgcaactccaaaggcagttaaagctgc

SEQ ID NO: 656215 - DNA, 75 bp, synthetic construct
  source 1..75: mol_type = other DNA
gatttcaaatccaagcgcggggattatgagcacaacaagcggtagtggccagactcgtaatgcagggaagacatc

SEQ ID NO: 656216 - DNA, 75 bp, synthetic construct
  source 1..75: mol_type = other DNA
tttgaggaagactgggcagaagtttatacctcgaaaaatcttccgccagaaagctacccagtcggcgcaccaatc

SEQ ID NO: 656217 - DNA, 75 bp, synthetic construct
  source 1..75: mol_type = other DNA
tagagatggccgtcgatttaaccccagtgtttttaaagatacttatcaatatggttatacaagctcaggtcaaaa

SEQ ID NO: 656218 - DNA, 75 bp, synthetic construct
  source 1..75: mol_type = other DNA
gcgtcattcgccatgagcaggaggcgtttattctccacgggcgattacagggcgaagagcgtgagacggcaattg

SEQ ID NO: 656219 - DNA, 75 bp, synthetic construct
  source 1..75: mol_type = other DNA
aacggctgggacgtattcatggtccgcaagaagcgaaacgcgctgcaaaactggcaagcgggctggggctacgta

SEQ ID NO: 656220 - DNA, 75 bp, synthetic construct
  source 1..75: mol_type = other DNA
gacggaggaccgtcatattgacctcgcctacgccctgacagtctatggcgtacagggcgccagcgagcgttttgc

SEQ ID NO: 656221 - DNA, 75 bp, synthetic construct
  source 1..75: mol_type = other DNA
catgatgaatgaacgctactggacggtggcggaggtgaacctggacgacgccgtggtcacgctgcgtaatgccga

SEQ ID NO: 656222 - DNA, 75 bp, synthetic construct
  source 1..75: mol_type = other DNA
ctggcgagcggtttagggttacgtagctttaaccttgatttgatgcatgggctgccggatcaatcactggaagag

SEQ ID NO: 656223 - DNA, 75 bp, synthetic construct
  source 1..75: mol_type = other DNA
gagtttagccagtatactggcctttcagaagaggttattcgccctcagttagacgaggctattgctcagggttat

SEQ ID NO: 656224 - DNA, 75 bp, synthetic construct
  source 1..75: mol_type = other DNA
ctggcaagcgggctggggctgcgtagttttaaccttgatttgatgcatgggctgccggatcaatcactggaagag

SEQ ID NO: 656225 - DNA, 75 bp, synthetic construct
  source 1..75: mol_type = other DNA
gaggcgcataaccgtgccgtggcggtggtgatgcaggaggttgagaagctggtcagtgcgcgcattacagaagac

SEQ ID NO: 656226 - DNA, 75 bp, synthetic construct
  source 1..75: mol_type = other DNA
ggagccgctccgggtgccagacaacgccctgcgtgcggctgaaacctttgcggagtacaccggcgccgtggccat

SEQ ID NO: 656227 - DNA, 75 bp, synthetic construct
  source 1..75: mol_type = other DNA
cggtgcgcagtgtggcggaggctgaatcggtggcgaaagcggaagaccccattacgctgcctccggatgagcagc

SEQ ID NO: 656228 - DNA, 75 bp, synthetic construct
  source 1..75: mol_type = other DNA
gagacatccctgcgccaggtggatgaggtcagcccacagcaggtcccacgtcaggccggggcatgggtgccggaa

SEQ ID NO: 656229 - DNA, 75 bp, synthetic construct
  source 1..75: mol_type = other DNA
tattgccggtgcagggcacggttatcgttgaccgggcggagcgcctgtcgctgaaagagacggtgctgctgcagg

SEQ ID NO: 656230 - DNA, 75 bp, synthetic construct
  source 1..75: mol_type = other DNA
tgactggatggggcgtaccccggaggcacagcagcagacgctgattatggcagagctcaacgctgaccggcatgc

SEQ ID NO: 656231 - DNA, 75 bp, synthetic construct
  source 1..75: mol_type = other DNA
ctgtactgccggacgatgacgcgctgtgggatattttcgaacaggggcatcagttattaaccgcagcgggttatc

SEQ ID NO: 656232 - DNA, 75 bp, synthetic construct
  source 1..75: mol_type = other DNA
tatgccattgatgccacgaaaattgctcgtgaacttggctggctgccgcaggaaacctttgaaagcgggatgcgc

SEQ ID NO: 656233 - DNA, 75 bp, synthetic construct
  source 1..75: mol_type = other DNA
aacaagccgcacggcgtggcgcactatcgtgacttgatcacctttgtcgctgaccgtccggggcatgatctgcgt

SEQ ID NO: 656234 - DNA, 75 bp, synthetic construct
  source 1..75: mol_type = other DNA
atgagaaagattctgataacaggcggtgccgggtttattggctcggcgctggtgcgttatatcatcaacgaaacg

SEQ ID NO: 656235 - DNA, 75 bp, synthetic construct
  source 1..75: mol_type = other DNA
tggcggagcaaatcagcacctggcgcgcggagtatagcgccggtatcgcggctgatatggccgatacctgtaagc

SEQ ID NO: 656236 - DNA, 75 bp, synthetic construct
  source 1..75: mol_type = other DNA
gtgggacgtggagtccgtttactcaaagcacccctgcgccaatcggggcagcagcaggaaccagattacccggag

SEQ ID NO: 656237 - DNA, 75 bp, synthetic construct
  source 1..75: mol_type = other DNA
ataaagcgatcttacttgagggtaaattgactcaaccagcagctttgttcgagttgatagttaaggcaaacctac

SEQ ID NO: 656238 - DNA, 75 bp, synthetic construct
  source 1..75: mol_type = other DNA
tcatttatttaacacatattatggtgaaggcagtgctgaattatttactgaaaaaggacgtacctgtttacgtat

SEQ ID NO: 656239 - DNA, 75 bp, synthetic construct
  source 1..75: mol_type = other DNA
gcgctaggcgatctgcgccaggctattgaactgaatccgccgcatctttcctggtatcaactgaccatcgaaccc

SEQ ID NO: 656240 - DNA, 75 bp, synthetic construct
  source 1..75: mol_type = other DNA
gctttgtcgattatcagcgtgctggtgtaaaccgcatctctattggtgtgcagagttttagcgaagaaaagctga

SEQ ID NO: 656241 - DNA, 75 bp, synthetic construct
  source 1..75: mol_type = other DNA
accgacaaattcctgagtttaccgtcagaactgaaccgccccgggtttcctggagagtgttttatctgtgaactc

SEQ ID NO: 656242 - DNA, 75 bp, synthetic construct
  source 1..75: mol_type = other DNA
gaacccgcacactccagcggcgaaatcctcgctcaacgagcaggatatctacgatgtggtgaaacgcatcattga

SEQ ID NO: 656243 - DNA, 75 bp, synthetic construct
  source 1..75: mol_type = other DNA
ccactccacctcagcacaacaagtgtgtgtgcaagaaacaaacagaactataaaaataacacaaccattaccgag

SEQ ID NO: 656244 - DNA, 75 bp, synthetic construct
  source 1..75: mol_type = other DNA
aacagatgaggagcgtagccgactggaagcatgggagcgctacagtgttctggtcagccgtgtggatacggcaaa

SEQ ID NO: 656245 - DNA, 75 bp, synthetic construct
  source 1..75: mol_type = other DNA
atgcagcatttaaaaaatattaagtccggaagtccaaaaacaaaagaacaatatcagctaacaaagaattttgat

SEQ ID NO: 656246 - DNA, 75 bp, synthetic construct
  source 1..75: mol_type = other DNA
acggaaagcaaaatatggtgtgattataaaacgattaaaacagttaccctggatgaaataatttactggcatttc

SEQ ID NO: 656247 - DNA, 75 bp, synthetic construct
  source 1..75: mol_type = other DNA
attgtttacgatgaaaataatattattgtcgccatcaccaaagatgcctccacgcttaaccctgaaggttttagc

SEQ ID NO: 656248 - DNA, 75 bp, synthetic construct
  source 1..75: mol_type = other DNA
atgatgcacttaaagaacataaaagcgggtaatgctaaaacagtggagcagtatgagttaacaaagaagcacgga

SEQ ID NO: 656249 - DNA, 75 bp, synthetic construct
  source 1..75: mol_type = other DNA
acaatatcagctaacaaagaattttgatgttatctggttatggtccgaagacggtaaaaactggtatgaagaagt

SEQ ID NO: 656250 - DNA, 75 bp, synthetic construct
  source 1..75: mol_type = other DNA
ccagctgcgtgcggtaatgagcgatgctcgtctgagtgaagcgcgtgaatatgcggtgcagcagaacattaatat

SEQ ID NO: 656251 - DNA, 75 bp, synthetic construct
  source 1..75: mol_type = other DNA
ctccacttccagccaggacgaatacaaccaaccgcaggtgaacatctcgctcgacagcgcaggtggcaacatcat

SEQ ID NO: 656252 - DNA, 75 bp, synthetic construct
  source 1..75: mol_type = other DNA
ctggtttctattctgttcatgatcatcttctataagaagtttggtctgattgcgaccagtgctctgattgccaac

SEQ ID NO: 656253 - DNA, 75 bp, synthetic construct
  source 1..75: mol_type = other DNA
gtggatatggacaccgcgcttggcaaactccaggaacaaaacatcgatagcctgcgcagcgacctgcgtgaaaag

SEQ ID NO: 656254 - DNA, 75 bp, synthetic construct
  source 1..75: mol_type = other DNA
ctccacttccagccaggacgaatacaaccagccgcaggttaacatctcgctcgatagcgctggtggtaacatcat

SEQ ID NO: 656255 - DNA, 75 bp, synthetic construct
  source 1..75: mol_type = other DNA
agcctgtggttcagcgtcagggcgccgatcgtatcgtggtcgaactgccgggtattcaggataccgctcgtgcga

SEQ ID NO: 656256 - DNA, 75 bp, synthetic construct
  source 1..75: mol_type = other DNA
atgcagcatttaaaaaacattaagtcaggtaatccaaaaaccgttgaacaatatcagctaacaaagaattttgat

SEQ ID NO: 656257 - DNA, 75 bp, synthetic construct
  source 1..75: mol_type = other DNA
gtatgagttaacaaagaagcacggagttatctggctttactctgaagacgggaagaactggtatgaagaggtaaa

SEQ ID NO: 656258 - DNA, 75 bp, synthetic construct
  source 1..75: mol_type = other DNA
atgcagcatttaaaaaatattaagtccggaaatccaaaaacaaaagaacaatatcagctaacaaaaaattttgat

SEQ ID NO: 656259 - DNA, 75 bp, synthetic construct
  source 1..75: mol_type = other DNA
acaatatcagctaacaaagaattttgatgttatctggttatggtccgaagacgataaaaactggtatgaggaagt

SEQ ID NO: 656260 - DNA, 75 bp, synthetic construct
  source 1..75: mol_type = other DNA
attgtatacgacgaaaataatattattgttgccataaccaaagatgcctcaacacttaatcccgaaggctttagc

SEQ ID NO: 656261 - DNA, 75 bp, synthetic construct
  source 1..75: mol_type = other DNA
agcgcgctgtcaggctgaatatggcaacagatgaggagcgcagtcgactggaggcatgggaacgctacagtgttc

SEQ ID NO: 656262 - DNA, 75 bp, synthetic construct
  source 1..75: mol_type = other DNA
ctaatcgacgggcggacatttcagggggctggatgtttaaggacggcaaagtgattaaacgcatttatacggcag

SEQ ID NO: 656263 - DNA, 75 bp, synthetic construct
  source 1..75: mol_type = other DNA
acgtcacaggaaaaagaaaatgtgctgatgtatgtacttggagtgagtgatgcgacagaaagtaaaacctggtgt

SEQ ID NO: 656264 - DNA, 75 bp, synthetic construct
  source 1..75: mol_type = other DNA
gaactttcagccagatacaataaagattgtttacgatgaaaataatattattgtcgctatcaccagagatgcttc

SEQ ID NO: 656265 - DNA, 75 bp, synthetic construct
  source 1..75: mol_type = other DNA
caaatcgtcgcgcagacaataacggaaactggatgtttctggatggtaaagtagtaaagagggaatatacagaac

SEQ ID NO: 656266 - DNA, 75 bp, synthetic construct
  source 1..75: mol_type = other DNA
atatcagctaacaaagaattttgatgttatctggttatatacagaagacggtaaaaactggtatgaggaagtaaa

SEQ ID NO: 656267 - DNA, 75 bp, synthetic construct
  source 1..75: mol_type = other DNA
gaaaaaactggtatgaagaggtaaagaattttcaggaagacacaataaagattgtttacgatgaaaataatatta

SEQ ID NO: 656268 - DNA, 75 bp, synthetic construct
  source 1..75: mol_type = other DNA
atagtctatgaccacaacgacgttattatttgtattgaaaaggatgtttcagcaattaatccggaaggcgcaagc

SEQ ID NO: 656269 - DNA, 75 bp, synthetic construct
  source 1..75: mol_type = other DNA
atgctgatcgtggtgattgtcatcggtctgctgtatgcgcttcccaacctgtttggtgaggatccggctgttcag

SEQ ID NO: 656270 - DNA, 75 bp, synthetic construct
  source 1..75: mol_type = other DNA
gtgtttggtgatcgtgacggattactgattattccccaggttgttgagaaagaagttattacccaggccctggaa

SEQ ID NO: 656271 - DNA, 75 bp, synthetic construct
  source 1..75: mol_type = other DNA
gccgcagaattattttcagggatacggcacatcgctattaatattttaacgaatgataaggtattcaaggcaggg

SEQ ID NO: 656272 - DNA, 75 bp, synthetic construct
  source 1..75: mol_type = other DNA
gaacggtaaggtcgtcgccaaaccgtgtacggtttccaccaccaatgccacggttgatctcggcgatctttattc

SEQ ID NO: 656273 - DNA, 75 bp, synthetic construct
  source 1..75: mol_type = other DNA
gagccgacgaccagcgagctgaaaaatccggagcgtaatatttcaatgggggcggcttacctgaatattctggaa

SEQ ID NO: 656274 - DNA, 75 bp, synthetic construct
  source 1..75: mol_type = other DNA
atccgaaggtactgcaatatgcgctggtggtgtcatacgctaacggggcaggtgcgctgctacggactttctcgt

SEQ ID NO: 656275 - DNA, 75 bp, synthetic construct
  source 1..75: mol_type = other DNA
atccgaaggtgctgcaatatgcgctggtggtgtcgtacgccaacggggctggcgcgttgctacggactttctcgt

SEQ ID NO: 656276 - DNA, 75 bp, synthetic construct
  source 1..75: mol_type = other DNA
gcagcagaattattttcagggatacggcacattgctattaatattttgacgaatgataaggtattcaaggtaggg

SEQ ID NO: 656277 - DNA, 75 bp, synthetic construct
  source 1..75: mol_type = other DNA
gggctgaagaaattatgcgaggcagtctcctttcggtccataatagcagaacaaaagaaagagccagaaatgacg

SEQ ID NO: 656278 - DNA, 75 bp, synthetic construct
  source 1..75: mol_type = other DNA
ttaagacgtaagatgcgaaaagcagccatggacagaaactatctggcgtcagtccttgcggagagcgggctttcg

SEQ ID NO: 656279 - DNA, 75 bp, synthetic construct
  source 1..75: mol_type = other DNA
cgcacttcccgttacaggtcagagcattgacagtaaatggcggagccactcagggaaccattcaggcagtgatta

SEQ ID NO: 656280 - DNA, 75 bp, synthetic construct
  source 1..75: mol_type = other DNA
tcgccatcgccgcggaaagcaccgacatcgtcgctgccggtccacatatcatcctgccgccgtcacgtcacttta

SEQ ID NO: 656281 - DNA, 75 bp, synthetic construct
  source 1..75: mol_type = other DNA
gccacccttatacccgtcagtatgatcttgatctgctggcagaattacgccgcgataaccaggcaatgcgcgtga

SEQ ID NO: 656282 - DNA, 75 bp, synthetic construct
  source 1..75: mol_type = other DNA
ttcctcgagcatgtagcgaaaaatcatcccgcaccgcaggcaccgcgctatatctacaaactcgagcaggcactg

SEQ ID NO: 656283 - DNA, 75 bp, synthetic construct
  source 1..75: mol_type = other DNA
atctcaacagattgcttttcaacactattgtcaaagtctggagcagattgaagatcgcatacttcaactcgacca

SEQ ID NO: 656284 - DNA, 75 bp, synthetic construct
  source 1..75: mol_type = other DNA
cgggacgcaatttctctcgccaggttactgcgggctggagaacttacccctgtctggatccctgacctgactcat

SEQ ID NO: 656285 - DNA, 75 bp, synthetic construct
  source 1..75: mol_type = other DNA
catctcagcagattgcttttcaacactattgtcacagtctggagcagattgaagatcgcatacttcaactcgacc

SEQ ID NO: 656286 - DNA, 75 bp, synthetic construct
  source 1..75: mol_type = other DNA
cttcgtcttcaccagctatctggcaaaagtgaacgaagagtggaaaaacaaagtcggttctggctctaccgtaaa

SEQ ID NO: 656287 - DNA, 75 bp, synthetic construct
  source 1..75: mol_type = other DNA
acgtcgggctggatgtgcataaagaaacgttggcggttgctattgcagcacctgaacggcttggcgaagttcgtt

SEQ ID NO: 656288 - DNA, 75 bp, synthetic construct
  source 1..75: mol_type = other DNA
tattccagtggaaacagtattcgtcccagaggaataacaaaagttggaaacagcgaactgagacgtctgctttac

SEQ ID NO: 656289 - DNA, 75 bp, synthetic construct
  source 1..75: mol_type = other DNA
aaaacatcgaacctggttagctaatcaatcatttagtcagccatctcaacagattgcttttcaacactattgtca

SEQ ID NO: 656290 - DNA, 75 bp, synthetic construct
  source 1..75: mol_type = other DNA
taatccgaacgcggtgagtaaatcgaatgccattggtttgatgcagataaaagcttcaacctccggacgtgatgt

SEQ ID NO: 656291 - DNA, 75 bp, synthetic construct
  source 1..75: mol_type = other DNA
taacccgaacgcggtaagtaagtcgaatgctattggtttgatgcagttaaaagcctcaacctccggacgtgatgt

SEQ ID NO: 656292 - DNA, 75 bp, synthetic construct
  source 1..75: mol_type = other DNA
cccaggggaataacaaaagttggaaacagcgaactgagacgtctgctttacgaagccgcctggtcttatcgtaca

SEQ ID NO: 656293 - DNA, 75 bp, synthetic construct
  source 1..75: mol_type = other DNA
atgcattcggaaaatattgcggcttacgtcgggctggatgtgcataaagaaacgttggaggttgctattgctgca

SEQ ID NO: 656294 - DNA, 75 bp, synthetic construct
  source 1..75: mol_type = other DNA
gtctgacagcaaaagggaaaaaatcacaagtagccattacggcggtggctcgtgagttgactggatttatgtggg

SEQ ID NO: 656295 - DNA, 75 bp, synthetic construct
  source 1..75: mol_type = other DNA
attatatcgaatgtgattacattcgttggcggcggcacagttggtgtggcggtctcactctggaacaatttgaaa

SEQ ID NO: 656296 - DNA, 75 bp, synthetic construct
  source 1..75: mol_type = other DNA
attatatcgaatgtgattacattcgatggcggcggcacagttggtgtggcggtctcactcaggaacaatttgaaa

SEQ ID NO: 656297 - DNA, 75 bp, synthetic construct
  source 1..75: mol_type = other DNA
atgtctttactgaaaaacatcaggctgagttcagcatcaaggcaatgtgccgcgtgctccggggggcccgcagcg

SEQ ID NO: 656298 - DNA, 75 bp, synthetic construct
  source 1..75: mol_type = other DNA
attatatcgaatgtgattacattcgctggcggcggcacagttggtgtggcggtctcactccggaacaatttgaaa

SEQ ID NO: 656299 - DNA, 75 bp, synthetic construct
  source 1..75: mol_type = other DNA
attatatcgaatgtgattacattcgctggcggcggcacagttggtgtggcggtctcattctggaacaatttgaaa

SEQ ID NO: 656300 - DNA, 75 bp, synthetic construct
  source 1..75: mol_type = other DNA
attatatcgaatgtgattacattcgctggcggcggcacagttggtgtggcggtctcaatcaggaacaatttgaaa

SEQ ID NO: 656301 - DNA, 75 bp, synthetic construct
  source 1..75: mol_type = other DNA
tggtcacgcgccgtcattggctggtcgatgtcactgcgaatgacagcacaactggcctgtgatgcactgcaaatg

SEQ ID NO: 656302 - DNA, 75 bp, synthetic construct
  source 1..75: mol_type = other DNA
gaaataatgcgggtaacggtgtttaattatatcgaatgtgattataatcggtggtggcggcctcagtccggaaca

SEQ ID NO: 656303 - DNA, 75 bp, synthetic construct
  source 1..75: mol_type = other DNA
cgtggaaagcttctttcattcgctgaaagtggaatgtatccatggagaacactttatcagccgggaaataatggt

SEQ ID NO: 656304 - DNA, 75 bp, synthetic construct
  source 1..75: mol_type = other DNA
acctgcgtggcagtatgagtgcgaaaggttactgttatgacaatgcctgtgtggaaagcttctttcattcgctga

SEQ ID NO: 656305 - DNA, 75 bp, synthetic construct
  source 1..75: mol_type = other DNA
attatatcgaatgtgattacaatcggtggcggcggcacagttggtgtggcggcctcagtccggagcaatttgaaa

SEQ ID NO: 656306 - DNA, 75 bp, synthetic construct
  source 1..75: mol_type = other DNA
aggctactgttatgacaatacctgtgtggaaagcttctttcattcgctgaaggtggaatgtatccacagggaacg

SEQ ID NO: 656307 - DNA, 75 bp, synthetic construct
  source 1..75: mol_type = other DNA
attatatcgaatgtgattacattcgctggcggcggcacagttggtgtggcggtctcagtcgggaacaatttgaaa

SEQ ID NO: 656308 - DNA, 75 bp, synthetic construct
  source 1..75: mol_type = other DNA
actatttatgatagtggtgcactggcaaagaccgccctgacagcaggtaaacgagttgtttctgcaaaggtgcct

SEQ ID NO: 656309 - DNA, 75 bp, synthetic construct
  source 1..75: mol_type = other DNA
tctccgaagctcaggcggttacgaataccgcggcttctactgacgtaatcgatctcggtccaattgacggaaaac

SEQ ID NO: 656310 - DNA, 75 bp, synthetic construct
  source 1..75: mol_type = other DNA
ccccatgctaccagaactacaggaagtacgcgtttaaacgaaatgggctatcgacctgatgctattgaggcccaa

SEQ ID NO: 656311 - DNA, 75 bp, synthetic construct
  source 1..75: mol_type = other DNA
gggactcaacatactacatgacagcttcattgaactgattcagaaagacggtatgccagacatgccggttatgca

SEQ ID NO: 656312 - DNA, 75 bp, synthetic construct
  source 1..75: mol_type = other DNA
gaatattcaatggcgctgggtgcaagtagcgccgcatctgcggctaacgcgattgcagtaggccgcaacagtgct

SEQ ID NO: 656313 - DNA, 75 bp, synthetic construct
  source 1..75: mol_type = other DNA
aactggcgatcgttcgatggctcttggtcgttacgcaaagacgaacggttttacatctcttgctgttggggactc

SEQ ID NO: 656314 - DNA, 75 bp, synthetic construct
  source 1..75: mol_type = other DNA
gcgatttactcgatctgttgtccgtccccttcaatgccaccacagatttcactgtgctggccgactactgcaccc

SEQ ID NO: 656315 - DNA, 75 bp, synthetic construct
  source 1..75: mol_type = other DNA
agcgcaaaaggttgctgctacgataatgcctgcgtggaaagcttctttcattcgctgaaagtggaatgtatccat

SEQ ID NO: 656316 - DNA, 75 bp, synthetic construct
  source 1..75: mol_type = other DNA
attatatcgaatgtgattacattcggtggcggcggcacagttggtgtggcggtctcactcgggaacaatttgaaa

SEQ ID NO: 656317 - DNA, 75 bp, synthetic construct
  source 1..75: mol_type = other DNA
cactacaaggattaaccgggcataggcagcatctttttccgggcagggataatccgctaggcccaatgacatcgc

SEQ ID NO: 656318 - DNA, 75 bp, synthetic construct
  source 1..75: mol_type = other DNA
gcttcgccgaaaccctgattgaaaccgacgatccagcgctacgactggcgctctgcgggcggcttcacgcggctc

SEQ ID NO: 656319 - DNA, 75 bp, synthetic construct
  source 1..75: mol_type = other DNA
ccccttcaatgccaccacagatttcactgtgctggccgactactgcacccgcttcgcggaaaccctgatagaaac

SEQ ID NO: 656320 - DNA, 75 bp, synthetic construct
  source 1..75: mol_type = other DNA
gtcgatgtcaccgcgaatgacagcacaactggcctgtgatgcactacaaatggcgttgtggcggagaagacgccc

SEQ ID NO: 656321 - DNA, 75 bp, synthetic construct
  source 1..75: mol_type = other DNA
agagatgcttcaacgcttaaccctgaaggttttagcgttgtcgaggttcctgatattaccgccaaccgacgtgct

SEQ ID NO: 656322 - DNA, 75 bp, synthetic construct
  source 1..75: mol_type = other DNA
aaaattttgatgttatctggttatggtctgaagacggaaaaaactggtatgaggaagtaagtaattttcaggaag

SEQ ID NO: 656323 - DNA, 75 bp, synthetic construct
  source 1..75: mol_type = other DNA
aaatattactgcgggtaatcccaaaactgttgctcaatatcaactgacaaaaaattttgatgttatctggttatg

SEQ ID NO: 656324 - DNA, 75 bp, synthetic construct
  source 1..75: mol_type = other DNA
cacggaagaagagcgaacccggctgtcggcctgggagcgttacagcgtcctgctcagccgggtggattcagcgaa

SEQ ID NO: 656325 - DNA, 75 bp, synthetic construct
  source 1..75: mol_type = other DNA
ggcaacagacgaggaacgcacacgactggaagcatgggaacgctacagtgttctggtcaaccgtgtggatacggc

SEQ ID NO: 656326 - DNA, 75 bp, synthetic construct
  source 1..75: mol_type = other DNA
gccgaatccgtgattttgccgctggagcgcgctgtcaggctgaatatggcaacagatgaggagcgtagccgactg

SEQ ID NO: 656327 - DNA, 75 bp, synthetic construct
  source 1..75: mol_type = other DNA
tccttacaatattcaaaattacgcttacggattaaccacaatcgccttctggccttatacccttatttcggcact

SEQ ID NO: 656328 - DNA, 75 bp, synthetic construct
  source 1..75: mol_type = other DNA
ctcctcgagttcattcctgttggcacgctttttggggcgcgatttattgctgaaatacgttggtcacagccatac

SEQ ID NO: 656329 - DNA, 75 bp, synthetic construct
  source 1..75: mol_type = other DNA
tataccgtgatggcaagcgatctcgccaatgaaggcattacgctgcgctttattttacaactctgtctggcgggc

SEQ ID NO: 656330 - DNA, 75 bp, synthetic construct
  source 1..75: mol_type = other DNA
ggacgcttgcttaaacaggtccgtgatattgagcaagtggcgccgctattccgtgatgctggcttagtgaaagcg

SEQ ID NO: 656331 - DNA, 75 bp, synthetic construct
  source 1..75: mol_type = other DNA
gaagcatgggaacgctacagcgttctggtcagtcgtgtggatcctgcaaatcctgaatggccggaaatgccgcaa

SEQ ID NO: 656332 - DNA, 75 bp, synthetic construct
  source 1..75: mol_type = other DNA
ccagtgaaggcattacgctgcgctttattttaaaactctgtctggcaggactggcgctgtttattctcgtccagt

SEQ ID NO: 656333 - DNA, 75 bp, synthetic construct
  source 1..75: mol_type = other DNA
aacgcgctgtcaggctgaatatggcaacagatgaggaacgtacacgactggaagcatgggaacgctacagtgttc

SEQ ID NO: 656334 - DNA, 75 bp, synthetic construct
  source 1..75: mol_type = other DNA
taacggtgacggcggcgttgatatcgcagttatttattcgggtaagaaaggaaatttgagtatctaccccggtcc

SEQ ID NO: 656335 - DNA, 75 bp, synthetic construct
  source 1..75: mol_type = other DNA
ttgaggcaaagcagcgatacggtgctccccgccttgctgacgaaatgctggagttcaatatttaaaaccattgct

SEQ ID NO: 656336 - DNA, 75 bp, synthetic construct
  source 1..75: mol_type = other DNA
atgaaacaacgcgcaaaattgacttattgaacgaccaggagcgaaaaaaagcagacgtgaatgacgctgatatat

SEQ ID NO: 656337 - DNA, 75 bp, synthetic construct
  source 1..75: mol_type = other DNA
ttggagaatctgctggagcaggacttcagcgccagaggcccgaaccagaagtgggcgggtgacatcacgtacttg

SEQ ID NO: 656338 - DNA, 75 bp, synthetic construct
  source 1..75: mol_type = other DNA
ttcacacggaccgtggaggccagtactgttcagcagattatcaggcgcaactgaagcggcataatctgcgtggaa

SEQ ID NO: 656339 - DNA, 75 bp, synthetic construct
  source 1..75: mol_type = other DNA
ggaagtatgagcgcaaaaggttgctgctacgataatgcctgcgtggaaagcttctttcattcgctgaaagtggaa

SEQ ID NO: 656340 - DNA, 75 bp, synthetic construct
  source 1..75: mol_type = other DNA
gatgagcagtcgccggaaaagcgccccgtaattttagaggcgcagaatgtatggataacctacaaaggaaagcta

SEQ ID NO: 656341 - DNA, 75 bp, synthetic construct
  source 1..75: mol_type = other DNA
cacgcttaaccctgaaggttttagcgtcgttgaggttccagatattacagccaaccgccgcgctgatgattcagg

SEQ ID NO: 656342 - DNA, 75 bp, synthetic construct
  source 1..75: mol_type = other DNA
tcaccaaagatgcctccacgcttaaccctgaaggctatagcgtcgttgaagttcctgatattacagctaatcgcc

SEQ ID NO: 656343 - DNA, 75 bp, synthetic construct
  source 1..75: mol_type = other DNA
aatgtgtggataacttacaaaggaaagctaccaggaagaattactgattctctgaagactccaccgaaatggtaa

SEQ ID NO: 656344 - DNA, 75 bp, synthetic construct
  source 1..75: mol_type = other DNA
caggagaaagaacgcttagacggtgaaatttttgacctggacatctcgatagaccgtgttgcaggtgccgcactg

SEQ ID NO: 656345 - DNA, 75 bp, synthetic construct
  source 1..75: mol_type = other DNA
ccgtaattttagaggcgcagaatgtatggataacctacaaaggaaagctaccgggaaggattactggttccctga

SEQ ID NO: 656346 - DNA, 75 bp, synthetic construct
  source 1..75: mol_type = other DNA
gcatttgcagcttatgaattcaactcacaattaaaaaatgtagcacttgaacatgcaaaaagtgaagttattaac

SEQ ID NO: 656347 - DNA, 75 bp, synthetic construct
  source 1..75: mol_type = other DNA
aaatagataaaaaaattcatgtaatttggatcgctggcgcaccacctgagactataacaaaatatgcaaaagcat

SEQ ID NO: 656348 - DNA, 75 bp, synthetic construct
  source 1..75: mol_type = other DNA
aaaataatatccaaacgcaagtgattcataaaagggagaagagaaatacaaacaacataaaaaaaacagaggagc

SEQ ID NO: 656349 - DNA, 75 bp, synthetic construct
  source 1..75: mol_type = other DNA
attgggaatgatccaaacctgagtgatatagatgttagaaaaataagtaaatatgctgttgcttgtgttaatgat

SEQ ID NO: 656350 - DNA, 75 bp, synthetic construct
  source 1..75: mol_type = other DNA
aagagtctggagttgttatacaaaatgctgccgtttcagcaccatcaaaagagctagtcgatattgtatccaaat

SEQ ID NO: 656351 - DNA, 75 bp, synthetic construct
  source 1..75: mol_type = other DNA
tatctcaaatagatcaaaagataagtaagtatttgatatctcaaactaatagtcttgttaaatgggtaggcatat

SEQ ID NO: 656352 - DNA, 75 bp, synthetic construct
  source 1..75: mol_type = other DNA
ttgcaacaagacttggtggagttcaaggaagaattttatctaagatagctaatgtaattaagtttcctgtcatcg

SEQ ID NO: 656353 - DNA, 75 bp, synthetic construct
  source 1..75: mol_type = other DNA
gtaaaaggctacaatcctgtttcgggttttggctccggacttatgcaggtggactcccagcactttaacgaactg

SEQ ID NO: 656354 - DNA, 75 bp, synthetic construct
  source 1..75: mol_type = other DNA
tatctacaccggggcttactatcttgcaattgcattcaaaaagtggggagtcagctggcaggccgtgggcgctta

SEQ ID NO: 656355 - DNA, 75 bp, synthetic construct
  source 1..75: mol_type = other DNA
ggtttaagtgagttatatatccttgctgatactaaagaaaaatataatacgttacaagagaaccttgatttaatc

SEQ ID NO: 656356 - DNA, 75 bp, synthetic construct
  source 1..75: mol_type = other DNA
ggtaattttcatattcatgatgcaacaacgttgccagatatgaaaaaagtacaatataaacaacgatatcaacaa

SEQ ID NO: 656357 - DNA, 75 bp, synthetic construct
  source 1..75: mol_type = other DNA
gcagcttatgaatttaactctcaattaaaaaaagcagcacttgaacatgcaaaaagtgaagttattgacagttta

SEQ ID NO: 656358 - DNA, 75 bp, synthetic construct
  source 1..75: mol_type = other DNA
tccgcattatatgcgactggaactataataaaaaacaaaggtaatattaatgccaatcttataaaatatatattc

SEQ ID NO: 656359 - DNA, 75 bp, synthetic construct
  source 1..75: mol_type = other DNA
gaatatgcgaatatggtcgaagatatcagggagaaggtgtcatctgagatggagagattctttccagaaaatgat

SEQ ID NO: 656360 - DNA, 75 bp, synthetic construct
  source 1..75: mol_type = other DNA
ctgaaaatagtcttttttctaattatcgaatggactcaattatccccaaaaaatacagtacgctttttatttctg

SEQ ID NO: 656361 - DNA, 75 bp, synthetic construct
  source 1..75: mol_type = other DNA
ggataatgttagtgaatttgactttggtaattatagagttgtttcttcccaagacatgtttatatacaaagtaac

SEQ ID NO: 656362 - DNA, 75 bp, synthetic construct
  source 1..75: mol_type = other DNA
gagggggcaagagataaagatataagtgtttcgggaacagcttcaatgcttcttgaactggggcttcgtgtatat

SEQ ID NO: 656363 - DNA, 75 bp, synthetic construct
  source 1..75: mol_type = other DNA
taagtgtggcagatggactgaaaacctggaccgtattaaccacgatcctcggcttcacaggcttcctgattacct

SEQ ID NO: 656364 - DNA, 75 bp, synthetic construct
  source 1..75: mol_type = other DNA
aatgagccccccaggtgtggcgctggttaccgctctgattgtcattccaattgccattattatggccggaaccgt

SEQ ID NO: 656365 - DNA, 75 bp, synthetic construct
  source 1..75: mol_type = other DNA
cggtgcggttgaaacgcgcaaacgctgcaaaatcgtcgccgggcagacagtgagttttgcaggtcacagcgtaca

SEQ ID NO: 656366 - DNA, 75 bp, synthetic construct
  source 1..75: mol_type = other DNA
ccgacaataaaaaaggggaattatgataccgtaatactggggtattcttctaaaattgtggctaatacagaagtt

SEQ ID NO: 656367 - DNA, 75 bp, synthetic construct
  source 1..75: mol_type = other DNA
aacgttggtactggattactaagtaagcttcaaattcaagaagaatcggtttcggggatcttaagtgctattcac

SEQ ID NO: 656368 - DNA, 75 bp, synthetic construct
  source 1..75: mol_type = other DNA
actatatatcccggaaaaggttcaaatgtaataaccattcctaataagattaatgattttttcattgctaaaatt

SEQ ID NO: 656369 - DNA, 75 bp, synthetic construct
  source 1..75: mol_type = other DNA
tggtcgccctgcttagcggatgcggcagtatcattagccgcaccatgccagggcaggggcatggcaaccaatatt

SEQ ID NO: 656370 - DNA, 75 bp, synthetic construct
  source 1..75: mol_type = other DNA
atccttgatctgccattctccctggttttcgatactttactgctgccgatcgacgtacatcatggcccgtatgag

SEQ ID NO: 656371 - DNA, 75 bp, synthetic construct
  source 1..75: mol_type = other DNA
acgccaccagtgaaacagaatatgcaggggctttcgttcctcattcgctggcggttatgcaacttagtgcggata

SEQ ID NO: 656372 - DNA, 75 bp, synthetic construct
  source 1..75: mol_type = other DNA
gggcgttcattgctaagtggtcagactgcaacatttattcgtacagctttgcaggattattacggtgtcgatctg

SEQ ID NO: 656373 - DNA, 75 bp, synthetic construct
  source 1..75: mol_type = other DNA
ctctcgctgcccttgcgactggtgcaaacaaactgccttatttcactggtaaggatacggtagctcagactgatt

SEQ ID NO: 656374 - DNA, 75 bp, synthetic construct
  source 1..75: mol_type = other DNA
aaagctcctttagcaagtcctgcattaacgggaatacctactgcgcctaccgctgaacagggtacgaataacacg

SEQ ID NO: 656375 - DNA, 75 bp, synthetic construct
  source 1..75: mol_type = other DNA
ccggaaaaatgggctcgtcgttttgccgtcgattttgtcggtggtgatctgaaagctgctgcgccgaaagggatt

SEQ ID NO: 656376 - DNA, 75 bp, synthetic construct
  source 1..75: mol_type = other DNA
ggcgatgctatcagtgaaacatggttgtatcagtattttcctccagcaccggataagcgccagtatgttgacgat

SEQ ID NO: 656377 - DNA, 75 bp, synthetic construct
  source 1..75: mol_type = other DNA
aaggatacggtagcgcagactgatttaacgtcagtcggtcgcgatattctggccaaaacaagcgtccttgctgtt

SEQ ID NO: 656378 - DNA, 75 bp, synthetic construct
  source 1..75: mol_type = other DNA
gcgatacgacggttgcaggctacaacatcctcaacaatcgcagcgcgaccagcaccagttcggtatccaacaacg

SEQ ID NO: 656379 - DNA, 75 bp, synthetic construct
  source 1..75: mol_type = other DNA
ccaaagcggagaactaccagtccctcgccgccagcgataatgatgccatccgcaccgaccagaaagcggccaaag

SEQ ID NO: 656380 - DNA, 75 bp, synthetic construct
  source 1..75: mol_type = other DNA
agcccctcgccgcttagcttaggtcttggctggaacgccgatatgatgtgcggcaatttcgacatcgacaccacg

SEQ ID NO: 656381 - DNA, 75 bp, synthetic construct
  source 1..75: mol_type = other DNA
gtagatttaaaagtaactcaatatatgatcggagatgccataaaaaccatattcgaaattgagcatgtaaaaaaa

SEQ ID NO: 656382 - DNA, 75 bp, synthetic construct
  source 1..75: mol_type = other DNA
atggcagatacctcttcaaccaccgctggcgcacaaacgttattacgcgggctggcggttcttaatgctgtttat

SEQ ID NO: 656383 - DNA, 75 bp, synthetic construct
  source 1..75: mol_type = other DNA
tcgtcgcctttctcgctccggctgctgataaataccagtatcagcagcagggggcgatcagcgactggatgtatt

SEQ ID NO: 656384 - DNA, 75 bp, synthetic construct
  source 1..75: mol_type = other DNA
catcgccgttgagccaggggaggggatgggcggtttttcggtgatcccagcgaccgatgaactacagacacacca

SEQ ID NO: 656385 - DNA, 75 bp, synthetic construct
  source 1..75: mol_type = other DNA
atttataagttcataaactgtcaggaacatgaaaccaataacattcactcagctatgataaataacctattacag

SEQ ID NO: 656386 - DNA, 75 bp, synthetic construct
  source 1..75: mol_type = other DNA
gctgaaactggaaggctggagcgaaagcggcgcgcaggcgaaaatcgcgatagcagaaggccaggtgaaagtcga

SEQ ID NO: 656387 - DNA, 75 bp, synthetic construct
  source 1..75: mol_type = other DNA
ttatcgtgacagagaagatgtgctggcttcgcgggttaatcgttctacaacgtttagtcatgcctgaagaacgga

SEQ ID NO: 656388 - DNA, 75 bp, synthetic construct
  source 1..75: mol_type = other DNA
gctgttatgcaatttagtgctgatatggcgctgaatgaggcaggcaaaattcttaccgcagatattcaaggggtg

SEQ ID NO: 656389 - DNA, 75 bp, synthetic construct
  source 1..75: mol_type = other DNA
actcactttccagtgatgaaaccttaaggagaaaatttttggcatattatttgcttgagtattcggtttgtagtg

SEQ ID NO: 656390 - DNA, 75 bp, synthetic construct
  source 1..75: mol_type = other DNA
aagcattataataatatctgatgctgaaataaaaaaaatggtatcaaattgcaaatacaacgaaataattgactt

SEQ ID NO: 656391 - DNA, 75 bp, synthetic construct
  source 1..75: mol_type = other DNA
ggtagttgtaaaaaggcatccatattgcaacagcattgaagtagaaaaattgataaatgaattagaaaaagaagg

SEQ ID NO: 656392 - DNA, 75 bp, synthetic construct
  source 1..75: mol_type = other DNA
ctgtagccaaaaaaaataacaaaaaaagcattataagaatatctgatgctgaaataaaaaaaatggtatcaagtt

SEQ ID NO: 656393 - DNA, 75 bp, synthetic construct
  source 1..75: mol_type = other DNA
gataacaaaaagcatttacatattcaggagtcaacattagcagaacgttgtagcatggactatatgggttatgct

SEQ ID NO: 656394 - DNA, 75 bp, synthetic construct
  source 1..75: mol_type = other DNA
tccctggagcaagtgttaatattagcaaaaagttttcagcagattgggaaacacacagaagcatataagacactc

SEQ ID NO: 656395 - DNA, 75 bp, synthetic construct
  source 1..75: mol_type = other DNA
gttacgctttcccgacgttatctcacaggtcgccagctaccggacaaagccgttgacctgctcgacaccgcaagc

SEQ ID NO: 656396 - DNA, 75 bp, synthetic construct
  source 1..75: mol_type = other DNA
gttttcagatggtgaaagtggacgagcccgacgatgacaccgcctgcctgatgctgcgtggcctgaaatctcgct

SEQ ID NO: 656397 - DNA, 75 bp, synthetic construct
  source 1..75: mol_type = other DNA
tcaaacctgtcgtgctacgcactcttgatcttggtctgctgcaggcaggagcgggtgtgaagggggaatttgaac

SEQ ID NO: 656398 - DNA, 75 bp, synthetic construct
  source 1..75: mol_type = other DNA
cagtatcagcaggaaaaggcgctggcgcagcagattatgacgttgcgtcaggaagggacagacagcactgaactg

SEQ ID NO: 656399 - DNA, 75 bp, synthetic construct
  source 1..75: mol_type = other DNA
gcggcgatgcgtgccattgtggcaatgaaactcttgcaggtcagcacgcgcttgcatcgtcactatggcctgacc

SEQ ID NO: 656400 - DNA, 75 bp, synthetic construct
  source 1..75: mol_type = other DNA
ttgatgaacagcctgatgccagtgaaggcgacctgcacgaactgctgcgcccgatcctgcgcgaacacttccagc

SEQ ID NO: 656401 - DNA, 75 bp, synthetic construct
  source 1..75: mol_type = other DNA
agcagaaaccacaggcgctgacactggcatggagtgacgaggacggtatcgtgattgagctgcggcaggaatgcg

SEQ ID NO: 656402 - DNA, 75 bp, synthetic construct
  source 1..75: mol_type = other DNA
cttatccgatagatatgccgataatcgaacagcttgatgagttgattctcgcccgccagcgtttcgcccacggag

SEQ ID NO: 656403 - DNA, 75 bp, synthetic construct
  source 1..75: mol_type = other DNA
tcgcagtttatctgggatttcaaatgttttagcggtatcgaccatatcgaaaacccaaacgaagacggtatcttt

SEQ ID NO: 656404 - DNA, 75 bp, synthetic construct
  source 1..75: mol_type = other DNA
gctgatgcaagaagcctggctgattgcctcactggcgggtgaggcgcagatccgaagtcatcacctgatgatggc

SEQ ID NO: 656405 - DNA, 75 bp, synthetic construct
  source 1..75: mol_type = other DNA
atggaaaattcggcagctctgttacgtcgtcttaatcattactgtgcccgtgcactggaaggcgcagcctccctt

SEQ ID NO: 656406 - DNA, 75 bp, synthetic construct
  source 1..75: mol_type = other DNA
gatgaaggatgaacagacggaactgctgcatctggaaaaggatatcggcagacgggtggtcggacaggacgtggc

SEQ ID NO: 656407 - DNA, 75 bp, synthetic construct
  source 1..75: mol_type = other DNA
acaacgtggagcgaatacaaacagtattttgagcgcgacgccgcgctggaacgccgcttccagatggtgaaagtc

SEQ ID NO: 656408 - DNA, 75 bp, synthetic construct
  source 1..75: mol_type = other DNA
aaatatgccggcactgcttcccgtgacgttaacgccggagccggataataaaatcccggcccccgcacaggaacc

SEQ ID NO: 656409 - DNA, 75 bp, synthetic construct
  source 1..75: mol_type = other DNA
tcccttatgagtttaaaatcgccttagtggagcagtcactgcagcccggagcctgtgtggcgcagatcgcccggg

SEQ ID NO: 656410 - DNA, 75 bp, synthetic construct
  source 1..75: mol_type = other DNA
aaccatggttttgacatcatctatatgctttcgacacatcatcagcggttcactttcgttcgtctcttcgatcca

SEQ ID NO: 656411 - DNA, 75 bp, synthetic construct
  source 1..75: mol_type = other DNA
acacgtaaattacgtgacggatggaaacgactcatcgacgtacttaatcagccaggagttcccaaaaatggataa

SEQ ID NO: 656412 - DNA, 75 bp, synthetic construct
  source 1..75: mol_type = other DNA
cctgacggaaaatccgcacctggttcgctgtgacgggctgtggcccctgctgacactgagtcagagccagttgca

SEQ ID NO: 656413 - DNA, 75 bp, synthetic construct
  source 1..75: mol_type = other DNA
ctgactctggcatggagtgacgaggacggtattgtgatggtatttgatgcacaggcagagggagagccgtcatga

SEQ ID NO: 656414 - DNA, 75 bp, synthetic construct
  source 1..75: mol_type = other DNA
ttgctaaatgctacgcccgttacaaacaagtggcactgaccacttctgataaaacctctttaaccgaacaacaaa

SEQ ID NO: 656415 - DNA, 75 bp, synthetic construct
  source 1..75: mol_type = other DNA
atgcaactggcccgggctcttttccctgggcgatacccttcagccccgacagtgactcaacctgtgaaaacagag

SEQ ID NO: 656416 - DNA, 75 bp, synthetic construct
  source 1..75: mol_type = other DNA
gcagataaatacaccgtccgacagtctgtgctgtgagctggttctgccggccggaactctcaggcttaaaggtaa

SEQ ID NO: 656417 - DNA, 75 bp, synthetic construct
  source 1..75: mol_type = other DNA
cggcgaggggcgtgaaattgacttccgtaatacggtcattctgatgacctccaacctgggcagtgaccttctgat

SEQ ID NO: 656418 - DNA, 75 bp, synthetic construct
  source 1..75: mol_type = other DNA
ggatattccgtcggttacgattcctacgatttatttgatttaggcgagtttgagcaaaaaggcagcgtccctaca

SEQ ID NO: 656419 - DNA, 75 bp, synthetic construct
  source 1..75: mol_type = other DNA
tgaatatgccgtggtggggtggttttgacccgcgcgtgtgggatatggcaagtctgatggattttgctgtgccgg

SEQ ID NO: 656420 - DNA, 75 bp, synthetic construct
  source 1..75: mol_type = other DNA
tatttagcacaaaaaaatgatattgttcacttacaactccctaaaaatacaggtggggctggtggttttcatgaa

SEQ ID NO: 656421 - DNA, 75 bp, synthetic construct
  source 1..75: mol_type = other DNA
tgatgatgcagttccaaataataatacactaaaaggtctaattaacgatgcacaatttctcgaagcatctggtga

SEQ ID NO: 656422 - DNA, 75 bp, synthetic construct
  source 1..75: mol_type = other DNA
tgctttgtgatgtggctgcgcagatactggttggtctttttaccggaagctgggtttacggtgcgatagtcggtt

SEQ ID NO: 656423 - DNA, 75 bp, synthetic construct
  source 1..75: mol_type = other DNA
tgatccgcgtgcatgggatgtggcaagcctgatggattttgctgtgccggtggtggcgtgtctgctggtctggct

SEQ ID NO: 656424 - DNA, 75 bp, synthetic construct
  source 1..75: mol_type = other DNA
tgatccgcgcgtgtgggatgtagcaagcctgatggattttgctgtgccggtgatggcgtgtctgctggtctggct

SEQ ID NO: 656425 - DNA, 75 bp, synthetic construct
  source 1..75: mol_type = other DNA
tgatccgcgtgcatgggatgtggcaagcctgatggatttttctttcccaattatcggatgcttattggtatggat

SEQ ID NO: 656426 - DNA, 75 bp, synthetic construct
  source 1..75: mol_type = other DNA
gtttttcaagtgtcgcttcgatgctccttgaattagggcttagggtttatgaggctcaaatggaaagaaaagatt

SEQ ID NO: 656427 - DNA, 75 bp, synthetic construct
  source 1..75: mol_type = other DNA
gtttgaatatgcgaatatggtcgaagatatcagggataaggtgtcatctgagatggagaggttctttccagaaaa

SEQ ID NO: 656428 - DNA, 75 bp, synthetic construct
  source 1..75: mol_type = other DNA
tgcgattattgagaagcgtcgacaggaaggggcaagagaaaaagatgtcagtttttcagcaacagcttcaatgct

SEQ ID NO: 656429 - DNA, 75 bp, synthetic construct
  source 1..75: mol_type = other DNA
gcctttcaggaactgcttcaatgcttcttgaattagggcttcgtgtatatgaggctcagatggagcgtaaagagt

SEQ ID NO: 656430 - DNA, 75 bp, synthetic construct
  source 1..75: mol_type = other DNA
tcatgtctccggaaatccaaagtttgaatatgccaatatggttgaagatatcagggagaaggtgtcatctgagat

SEQ ID NO: 656431 - DNA, 75 bp, synthetic construct
  source 1..75: mol_type = other DNA
ggttttgatccgcgcgcgtgggatgtggcaagcctgatggattttgctgtgccggtggtggcgtgtctgctggtc

SEQ ID NO: 656432 - DNA, 75 bp, synthetic construct
  source 1..75: mol_type = other DNA
tccaaaaataataaattactacgtctaaagtgtctattgattggtatttttaaaggggtggtgtttaatccccaa

SEQ ID NO: 656433 - DNA, 75 bp, synthetic construct
  source 1..75: mol_type = other DNA
tgacaatacgggtttgaaccgccccgggtttcctggagagtgttttatctgtgaactcaggctgccagatcatcg

SEQ ID NO: 656434 - DNA, 75 bp, synthetic construct
  source 1..75: mol_type = other DNA
tgatccgcgcgtgtgggatgtggcaagcctgatggattttgctgtgccggtggtggcgtgtctgctggtctggct

SEQ ID NO: 656435 - DNA, 75 bp, synthetic construct
  source 1..75: mol_type = other DNA
gtcgcgtgaagtagataagctgcaaacatatattgcccaggtagaaggcaaaaccatgctatttgatgcgccgct

SEQ ID NO: 656436 - DNA, 75 bp, synthetic construct
  source 1..75: mol_type = other DNA
aaatccaaacgaagatggcatttttaaaatcgtcaacgactacaccggcgaaggctggaatgaccaggttgatga

SEQ ID NO: 656437 - DNA, 75 bp, synthetic construct
  source 1..75: mol_type = other DNA
aaatgctgacgaccgtacgcaaattgatgaagaaatcattgagtgcgaaggctggacgcgttacaccttccccgc

SEQ ID NO: 656438 - DNA, 75 bp, synthetic construct
  source 1..75: mol_type = other DNA
gatgcagcaggcgaaagtgattctcgctgacgaaccgatcgcctcgctggacccggaatcggcgcgcatcgtgat

SEQ ID NO: 656439 - DNA, 75 bp, synthetic construct
  source 1..75: mol_type = other DNA
actggctggtctttttaccggaaactgggcttacggtgcgatagccggttgtacgttcttcattgcgcgtgaaca

SEQ ID NO: 656440 - DNA, 75 bp, synthetic construct
  source 1..75: mol_type = other DNA
tgatccgcgcgtgtgggatgtggcaagcctgatggatttttctgtgccggtggtggcttgtctgctggtctggct

SEQ ID NO: 656441 - DNA, 75 bp, synthetic construct
  source 1..75: mol_type = other DNA
tcttctacgacggcagcagccaacagtttgataacgaacgttttgaccatctctaccgcagcatcaaccgcgtcg

SEQ ID NO: 656442 - DNA, 75 bp, synthetic construct
  source 1..75: mol_type = other DNA
aacgtgtggcgattgcccgtgcgctgatgcagcaggcgaaagtgattctggccgatgaacccatcgcctcgctgg

SEQ ID NO: 656443 - DNA, 75 bp, synthetic construct
  source 1..75: mol_type = other DNA
gaacgttttgaccatctctaccgcagcattaaccgcgtcgaagagaacgcgaaagctgcctgacatccccatcat

SEQ ID NO: 656444 - DNA, 75 bp, synthetic construct
  source 1..75: mol_type = other DNA
gaatattctatggcgctgggagcaagtagcgccgcatctgcggctaacgcgattgcagtaggccgcaacagtgct

SEQ ID NO: 656445 - DNA, 75 bp, synthetic construct
  source 1..75: mol_type = other DNA
ccatggagaacactttatcagccgggaaataatgcgggcaacggtgtttcagttcattcattccataaattgtgg

SEQ ID NO: 656446 - DNA, 75 bp, synthetic construct
  source 1..75: mol_type = other DNA
gtggcggcggcacagttggtgtggcggcctcagtccggaacaattgaaaaccagaacctcgcttaggcctgtgtc

SEQ ID NO: 656447 - DNA, 75 bp, synthetic construct
  source 1..75: mol_type = other DNA
tggagccctgccggctcatttattacagcggtagctggtatctgatcgcgttacagaagggaaaactgcaggtct

SEQ ID NO: 656448 - DNA, 75 bp, synthetic construct
  source 1..75: mol_type = other DNA
acgggcgcggtcatatgcgcgtcggcgacagctcatggccagtcagcgccagcgaggatttagccgcgggtacgc

SEQ ID NO: 656449 - DNA, 75 bp, synthetic construct
  source 1..75: mol_type = other DNA
cgcatattttctggcttagtctcggcggtttgctgctggctgccgagatgctggacggtaacggttatttgttgt

SEQ ID NO: 656450 - DNA, 75 bp, synthetic construct
  source 1..75: mol_type = other DNA
atgagggctggctgtatctggcggtggtcatcgacctgtggtcgcgtgcggttatcggctggtcaatgtcatcac

SEQ ID NO: 656451 - DNA, 75 bp, synthetic construct
  source 1..75: mol_type = other DNA
ccgcaacaagggatctacgcgacccgacccaacgccgggttgattgacctgatggatgagatgtttgccggtatg

SEQ ID NO: 656452 - DNA, 75 bp, synthetic construct
  source 1..75: mol_type = other DNA
taccgccacaaacggttacagtgcgattaaaactgccagcacagcctctaacagcaacggcaaatggatttggaa

SEQ ID NO: 656453 - DNA, 75 bp, synthetic construct
  source 1..75: mol_type = other DNA
acgcctatggtaatttcagtggtagtcaggaaaacatcagtgggttggtggtttcaggggatgacaatagcgtta

SEQ ID NO: 656454 - DNA, 75 bp, synthetic construct
  source 1..75: mol_type = other DNA
acgcatatcagatgattttatgcatgctgttctcagtaactgcaccacaggaatcgtacttccttcacaggagaa

SEQ ID NO: 656455 - DNA, 75 bp, synthetic construct
  source 1..75: mol_type = other DNA
tacgctaccaggcctgcgccgatttctggcgtcgccactgctacccgctgccgcgtgaaattgcccaggtcgtct

SEQ ID NO: 656456 - DNA, 75 bp, synthetic construct
  source 1..75: mol_type = other DNA
ggttgacccgaactgggtacaggaaaaactggagctcggtggctttgaaccgcagtgggaaccggtgttgactga

SEQ ID NO: 656457 - DNA, 75 bp, synthetic construct
  source 1..75: mol_type = other DNA
tatctatgcaccgggtaccaccggtacgctgaacgatcataacagtactactgatattatcgttcctgcagcaac

SEQ ID NO: 656458 - DNA, 75 bp, synthetic construct
  source 1..75: mol_type = other DNA
ataccggattcagtgcaggtactgccgacacgactgttgtgattaatgatgttttcaaaggtgaaaatatttccg

SEQ ID NO: 656459 - DNA, 75 bp, synthetic construct
  source 1..75: mol_type = other DNA
cggattccatcggtattcagatcgacggcgacaaggcggtcgtcaacaacgacggtgacagtgccatcagtaacg

SEQ ID NO: 656460 - DNA, 75 bp, synthetic construct
  source 1..75: mol_type = other DNA
ttagcaggggaggcccgcaaggccgatgcgctgtatattcttggcgatctgtttgaagcctggatcggcgacgac

SEQ ID NO: 656461 - DNA, 75 bp, synthetic construct
  source 1..75: mol_type = other DNA
aaagaaggctggagtgcgaacgccacgctggaaggtgggccgaatctgagctatgtgaaaagtcagcgaactgcg

SEQ ID NO: 656462 - DNA, 75 bp, synthetic construct
  source 1..75: mol_type = other DNA
cttcctttaggctatacaagcattattcagttaaaaaataaagctatcctggaaattggtcgtgatgctttgttg

SEQ ID NO: 656463 - DNA, 75 bp, synthetic construct
  source 1..75: mol_type = other DNA
atgaatgttggtgacttttcaacaggcatggcgctcagtggtaataacaacagtgtgacgttggcggcgaaagat

SEQ ID NO: 656464 - DNA, 75 bp, synthetic construct
  source 1..75: mol_type = other DNA
tgatatcaccggcgacagcgcaacggtggacaacaaaggcggtatgaccgtcgcggatgcggattcgattggcat

SEQ ID NO: 656465 - DNA, 75 bp, synthetic construct
  source 1..75: mol_type = other DNA
cgtggggatggcggtctataacagaggcaccgctatcaacgataaaacaggcgtgatcaatattaacgtcgatac

SEQ ID NO: 656466 - DNA, 75 bp, synthetic construct
  source 1..75: mol_type = other DNA
ctgctgaactgaacagtgcgctgaaacaaattagcggcagccaggcaaccacggtattcaatgaagcacgagtgt

SEQ ID NO: 656467 - DNA, 75 bp, synthetic construct
  source 1..75: mol_type = other DNA
ggcatgattgatggcaaggtcaacatccgcgatcgcgaacaagttctggaacactatctcgaaaaaatcgctggc

SEQ ID NO: 656468 - DNA, 75 bp, synthetic construct
  source 1..75: mol_type = other DNA
tcgtcgcctacaggaccagtggcacatctactgcaattcgctggttcaggggatcacgttatcgaaagcgcgcct

SEQ ID NO: 656469 - DNA, 75 bp, synthetic construct
  source 1..75: mol_type = other DNA
aatcgcgggtaacaacgcggtggtgaaccaggacggcgagctggatgtgagcggcggcggtcacggtattgatat

SEQ ID NO: 656470 - DNA, 75 bp, synthetic construct
  source 1..75: mol_type = other DNA
ggacaggcatgatagggatgcaactggagtccgatgccacggctgatgcggtgattgagaataacggcaccatca

SEQ ID NO: 656471 - DNA, 75 bp, synthetic construct
  source 1..75: mol_type = other DNA
ggcaaggattccaccggcacggaaatcaacggtaataacggaaaagttatccaggacggtgatctggatgtcagc

SEQ ID NO: 656472 - DNA, 75 bp, synthetic construct
  source 1..75: mol_type = other DNA
ggacaacaagggcaccatgaccgtcaccgatccggagtccatggggatccagatcgacggcgacaaggccatcgt

SEQ ID NO: 656473 - DNA, 75 bp, synthetic construct
  source 1..75: mol_type = other DNA
aagaaagttcgctgaatctggatgcttaccactggaaagaggacggcatcagcgataaaggcgtgatgctgaact

SEQ ID NO: 656474 - DNA, 75 bp, synthetic construct
  source 1..75: mol_type = other DNA
ctggagctacgacggcgaaggcaaaatccacatcaccaaagaagccggcgtggtggttgatggaacaacaggcaa

SEQ ID NO: 656475 - DNA, 75 bp, synthetic construct
  source 1..75: mol_type = other DNA
gggaagtatgcaggtcggtgatttttcaacagggctgacattaactggcgataataatagcctgacaatggcaat

SEQ ID NO: 656476 - DNA, 75 bp, synthetic construct
  source 1..75: mol_type = other DNA
gcagactcgatcggtgtactgatcaatggcgacaacgcgacacttgccaatactggtgatgtggatgtcagcaat

SEQ ID NO: 656477 - DNA, 75 bp, synthetic construct
  source 1..75: mol_type = other DNA
atggacatcagtaattcctcacataacggtgctgtcaatatgtggggtgggaatggtcgctttatcaacgatgga

SEQ ID NO: 656478 - DNA, 75 bp, synthetic construct
  source 1..75: mol_type = other DNA
ggatgatggcggcgatacaccagtcccgccagatgatggtggcgacacacctgtcccgccggatgatggcggcga

SEQ ID NO: 656479 - DNA, 75 bp, synthetic construct
  source 1..75: mol_type = other DNA
tgaaaattggtgatgatgcatcttttacaatgaaggatattgatgtttacaatcactactacatcgaaacgcgag

SEQ ID NO: 656480 - DNA, 75 bp, synthetic construct
  source 1..75: mol_type = other DNA
ggtgttgagaacattggtgacaacggcacggttaacaacaaaggagatattgttgtttccgatactggatcgatt

SEQ ID NO: 656481 - DNA, 75 bp, synthetic construct
  source 1..75: mol_type = other DNA
gccggggaaatcaatgtcgatggctttattcccgaactggacagcgatggtaatatcatcagtaaatcctactgg

SEQ ID NO: 656482 - DNA, 75 bp, synthetic construct
  source 1..75: mol_type = other DNA
gcggcaccggtgctgtggctatggaaggtgataagaatgcgcaactggttaacactggcaccatcaacctcggta

SEQ ID NO: 656483 - DNA, 75 bp, synthetic construct
  source 1..75: mol_type = other DNA
taacggcgagtttgttctcaataatgccaaaaatgctatccacctgaatcagtctggtacgctgtacaacaccgg

SEQ ID NO: 656484 - DNA, 75 bp, synthetic construct
  source 1..75: mol_type = other DNA
tcagcgctaaatggtgcgaatggcgttattgatatgtatggccggggtaatgtcggtatgctggcgattaatcat

SEQ ID NO: 656485 - DNA, 75 bp, synthetic construct
  source 1..75: mol_type = other DNA
taatgtgactggcagtgttgctacaggggtaaatgtggccggtgatggcaatgaagttgaaattaccggtaatat

SEQ ID NO: 656486 - DNA, 75 bp, synthetic construct
  source 1..75: mol_type = other DNA
gaaacgcttaacctgtcttcatatggcggtactactgatatcacggcaacagccgaaaccctggtaaccaacgcg

SEQ ID NO: 656487 - DNA, 75 bp, synthetic construct
  source 1..75: mol_type = other DNA
agtgttcactaacgaaggtatggtgaccgggcaagtcggaacgactgttgcaggatcgattattcacaactcagg

SEQ ID NO: 656488 - DNA, 75 bp, synthetic construct
  source 1..75: mol_type = other DNA
caatatgggtaagattttcattgacgcattatgggttgatgaaaacgatacttccagtctggcgtccaatatcgc

SEQ ID NO: 656489 - DNA, 75 bp, synthetic construct
  source 1..75: mol_type = other DNA
agcaccgaagatgggcaacgctctggcatttaacgtggtggcgaaaggcgatccgcgtgctgagctgggtaacaa

SEQ ID NO: 656490 - DNA, 75 bp, synthetic construct
  source 1..75: mol_type = other DNA
aatgactccggaacgcatattgataactacggaaccattaatgcggctacctcacaggagttgatggtggctcgc

SEQ ID NO: 656491 - DNA, 75 bp, synthetic construct
  source 1..75: mol_type = other DNA
tgaccgtggaaggcgataatattgttctgaacaatgacggtaaaaccactgcgattggcgaaggttccattgtcg

SEQ ID NO: 656492 - DNA, 75 bp, synthetic construct
  source 1..75: mol_type = other DNA
aatggcaccattaatatctatgccaatgattcttatgcgttcagtatgctggggacgaatggccacgtagtcaac

SEQ ID NO: 656493 - DNA, 75 bp, synthetic construct
  source 1..75: mol_type = other DNA
gtaacaggtgtcgcggtctatgccctacacgatgataataatcaccatcacgacgatcggtctccggtgccggat

SEQ ID NO: 656494 - DNA, 75 bp, synthetic construct
  source 1..75: mol_type = other DNA
aacaccaccgaagttcattacggcgattacacattaccggatgtaccaaatactacagtgacatcgtttgctgat

SEQ ID NO: 656495 - DNA, 75 bp, synthetic construct
  source 1..75: mol_type = other DNA
gcgcggttggcaccggcgtggcgattaatgacaaaaccggtgtgatcaatattgataccgatgtcggccaggctt

SEQ ID NO: 656496 - DNA, 75 bp, synthetic construct
  source 1..75: mol_type = other DNA
atccggtacgtggcagaaaaatggcggcggtacagtacagatggttactgcgacagcaagtgactggaatcagcc

SEQ ID NO: 656497 - DNA, 75 bp, synthetic construct
  source 1..75: mol_type = other DNA
tcaggcgagagggcaggatattagccgagcaaatgcgttaacgtcagcatatgcaccaacagccgcaatgcagaa

SEQ ID NO: 656498 - DNA, 75 bp, synthetic construct
  source 1..75: mol_type = other DNA
gttaacgtcagcatatgcaccaacagcagcaatgcagaattacaatcagtacgctcaaatgttaaaggcggatcc

SEQ ID NO: 656499 - DNA, 75 bp, synthetic construct
  source 1..75: mol_type = other DNA
aggaaactagaagagataacttttatgtcacgggcgttcgtcgctcgggagaaacaaatcaggacataaatattg

SEQ ID NO: 656500 - DNA, 75 bp, synthetic construct
  source 1..75: mol_type = other DNA
ggtttcgtccaatagctttgccaacagctcaaaagatcatggaaaagtcgccagaaggggctaaaaaagctgctg

SEQ ID NO: 656501 - DNA, 75 bp, synthetic construct
  source 1..75: mol_type = other DNA
cgcagcaaaggcctcttagcgacggaaatcaatcaccatacggccacggattttgccttcttccatctcagtaaa

SEQ ID NO: 656502 - DNA, 75 bp, synthetic construct
  source 1..75: mol_type = other DNA
cgcagcaaagacctcttagcgacggaaatcaatcaccatacggccacggattttgccttcttccatctcggtaaa

SEQ ID NO: 656503 - DNA, 75 bp, synthetic construct
  source 1..75: mol_type = other DNA
agaacactctgcgcagtgcgttagcaacgtcgatgatggggttgaacgccctggatatcgaaacgttgaatgatg

SEQ ID NO: 656504 - DNA, 75 bp, synthetic construct
  source 1..75: mol_type = other DNA
gattaacattgataatttaaaagataaaattgcaaacgattcatcagagattgcaaggctaaataatattgatat

SEQ ID NO: 656505 - DNA, 75 bp, synthetic construct
  source 1..75: mol_type = other DNA
ttcgcgtccccgcaagttctattgctgctccggctacatcggcagctaatgcgcagaattacgaaatgaagaaag

SEQ ID NO: 656506 - DNA, 75 bp, synthetic construct
  source 1..75: mol_type = other DNA
ggaagcgcatcacgacgggatcgaaaccgacagtcgcacgctcacgctcgacaacgtgccgcgtgcgcttgccaa

SEQ ID NO: 656507 - DNA, 75 bp, synthetic construct
  source 1..75: mol_type = other DNA
ttgttcccctacctgacgatggtcgaagggttgaagctcgcggcgcagaccttcaacaaggatgtgaagcagctt

SEQ ID NO: 656508 - DNA, 75 bp, synthetic construct
  source 1..75: mol_type = other DNA
ttcgatatcaaagatcaaatggaaggtcgggatattgagcgtggcaagttggcagagacaatccgcagcaatcag

SEQ ID NO: 656509 - DNA, 75 bp, synthetic construct
  source 1..75: mol_type = other DNA
gacccttaagcccgtttcggggacatgtttcaaaaaaaacagaaaacattgcaagaattgcagcgttatttcagt

SEQ ID NO: 656510 - DNA, 75 bp, synthetic construct
  source 1..75: mol_type = other DNA
gtgacaaaaagtatttcgttaagtaaacgcatctccgttattgtgattctttttgccattgtggcagtgtgtact

SEQ ID NO: 656511 - DNA, 75 bp, synthetic construct
  source 1..75: mol_type = other DNA
acttcggcagcattgagaaagttgctgcttttttcggcataacaactgaagccgtttatcagtggcgaaaccgtc

SEQ ID NO: 656512 - DNA, 75 bp, synthetic construct
  source 1..75: mol_type = other DNA
gctgatgcagctgttgcgcttggcgctgatcaggacgatgtaaccgaaatgatcgacgatgaagatgactcagct

SEQ ID NO: 656513 - DNA, 75 bp, synthetic construct
  source 1..75: mol_type = other DNA
agttcaggctttctgtcgtgccggaaggaaaaaccatgtatgttctgcttccccagatagccagtttaaagttgt

SEQ ID NO: 656514 - DNA, 75 bp, synthetic construct
  source 1..75: mol_type = other DNA
tgtttcaaaaaaacagaaaacattgcaagaattgcagcgttatttcagtatttcagctatggtgaagggaaaatc

SEQ ID NO: 656515 - DNA, 75 bp, synthetic construct
  source 1..75: mol_type = other DNA
tggaagaaaaaccctggcggcatagatggtgcaatttccaatatatttccggaaccaattcatatccctgcaatg

SEQ ID NO: 656516 - DNA, 75 bp, synthetic construct
  source 1..75: mol_type = other DNA
aagagaatcaacaaaaaatagctccgtttataattgacgggactcttacctttgcaagaagacaggaatttaata

SEQ ID NO: 656517 - DNA, 75 bp, synthetic construct
  source 1..75: mol_type = other DNA
gcggctggaattaatacaaacgccaaaaaattaatgagtgttagagaaaacgatgatggcactgtcacaaaatac

SEQ ID NO: 656518 - DNA, 75 bp, synthetic construct
  source 1..75: mol_type = other DNA
tctcttgaggaaaaaggtattctgaggcgatgccaaagatgttctcattctcaagatgagtatttcgagtatatt

SEQ ID NO: 656519 - DNA, 75 bp, synthetic construct
  source 1..75: mol_type = other DNA
caacctgcttttcgcgtggtactgggtgcctggcatacggaaggttcgatggtgaaagtcacggcggatgacgtt

SEQ ID NO: 656520 - DNA, 75 bp, synthetic construct
  source 1..75: mol_type = other DNA
ggaaccaattcatatccctgcaatgtctgacgctgtcgaagactcaacaaaatgcaaaaacacgaccacaatagg

SEQ ID NO: 656521 - DNA, 75 bp, synthetic construct
  source 1..75: mol_type = other DNA
gtctgttattcaagccatagtgaacaaatctaaagttaaccaaggtgatatggtttatataagccatgaagatat

SEQ ID NO: 656522 - DNA, 75 bp, synthetic construct
  source 1..75: mol_type = other DNA
ggtgggaatactcctgacgatggcggcaacgtcaccccgcccaaagagcctaaaatcttcaataacaatgtcacg

SEQ ID NO: 656523 - DNA, 75 bp, synthetic construct
  source 1..75: mol_type = other DNA
gaaacattaatgtgacgtccagtatgggggaccaaccgtccacctcaccccagtcgttaaccggcgttaccatcg

SEQ ID NO: 656524 - DNA, 75 bp, synthetic construct
  source 1..75: mol_type = other DNA
cacggtattccgcgaagcgcgcgtgctaagcaaccgctttagcatgctggcggatgccgcaccgaaagtgggtaa

SEQ ID NO: 656525 - DNA, 75 bp, synthetic construct
  source 1..75: mol_type = other DNA
ccgaacctgagctacgcgaagagccagcgcacggcaagcctggcaggcgcaggcagccagcactttaatgtcgat

SEQ ID NO: 656526 - DNA, 75 bp, synthetic construct
  source 1..75: mol_type = other DNA
tgctggcaatgagcggcgggaccgttgtaaaccaggggacaattaatctcactgccgatgagggcgtgacgaaac

SEQ ID NO: 656527 - DNA, 75 bp, synthetic construct
  source 1..75: mol_type = other DNA
ttacccagccttcttacggcggaggatttagtgaatacccggtgaaatggtatttcaacacgggctatgcattgc

SEQ ID NO: 656528 - DNA, 75 bp, synthetic construct
  source 1..75: mol_type = other DNA
gattacctgggggatgaaaacagtctttacggcgtggttgttttgggtacaaacaacaccatcaatctcgatggt

SEQ ID NO: 656529 - DNA, 75 bp, synthetic construct
  source 1..75: mol_type = other DNA
cctcaagtaaaaaaaatgcactcttcctcttgttgggggtgatggtcgtcgcctttctgctggtgcctgatcagg

SEQ ID NO: 656530 - DNA, 75 bp, synthetic construct
  source 1..75: mol_type = other DNA
gattataaaggctactacaggttctaaggtcatcaataatggcaatatagatatccaaaatatcggttttatttc

SEQ ID NO: 656531 - DNA, 75 bp, synthetic construct
  source 1..75: mol_type = other DNA
tggtgacagtggcggacattttatcaacggcgtgcaggtaaccgggaataattccgtcaatattggtggtcattc

SEQ ID NO: 656532 - DNA, 75 bp, synthetic construct
  source 1..75: mol_type = other DNA
caaaactgaaaatactggctcgaacagtaacgggaaatggatttggaatacggaaacaggagtgataaatggtat

SEQ ID NO: 656533 - DNA, 75 bp, synthetic construct
  source 1..75: mol_type = other DNA
ctcagtgagctgtctggcagcggcgagagcatcagtaaaactacaactagcgacggttttatcgcagttaataac

SEQ ID NO: 656534 - DNA, 75 bp, synthetic construct
  source 1..75: mol_type = other DNA
aaaacagcaaaaacgttaactattcgcgattcagttttcagttataccgagaatgctgatgggactatttctctg

SEQ ID NO: 656535 - DNA, 75 bp, synthetic construct
  source 1..75: mol_type = other DNA
ctttttgccattgtggcagtgtgtactttcttcgtgcaatcttgcgcccgtaaaagcaatcatgcagcatcattt

SEQ ID NO: 656536 - DNA, 75 bp, synthetic construct
  source 1..75: mol_type = other DNA
actacgtcgagcaagcccgagaacgttcaaacgcacgtatgatcgtcatcgatccacgttataacgacactgctg

SEQ ID NO: 656537 - DNA, 75 bp, synthetic construct
  source 1..75: mol_type = other DNA
agagaaagcggtctggagttcctgcaccgttaactgcgggagccgctgtctgttacgtttgcatgtgaaagatga

SEQ ID NO: 656538 - DNA, 75 bp, synthetic construct
  source 1..75: mol_type = other DNA
tggtgcagattgtcacgatccataaatcaaaagggctggaatatccgctggtctggttgccatttattaccaatt

SEQ ID NO: 656539 - DNA, 75 bp, synthetic construct
  source 1..75: mol_type = other DNA
gggctattgcgtagcgatgagttgcatatcagcaaagataaagcgttgcagcgtcagtttactttggatgatgtt

SEQ ID NO: 656540 - DNA, 75 bp, synthetic construct
  source 1..75: mol_type = other DNA
aggtgaaaatcctcaaaaaaataaaaatcccgctgcaggacacgccgaccaatagtggttttgaaggactggctt

SEQ ID NO: 656541 - DNA, 75 bp, synthetic construct
  source 1..75: mol_type = other DNA
tcagataagtgttgcaacaaatgttgacggctgccttctaaaagttaacgagagagataaagctgaaattgatag

SEQ ID NO: 656542 - DNA, 75 bp, synthetic construct
  source 1..75: mol_type = other DNA
caggtactgccgatacgactgttgtgattaatgatgttttcaaaggtgaaaatatttccggggctgagaatattt

SEQ ID NO: 656543 - DNA, 75 bp, synthetic construct
  source 1..75: mol_type = other DNA
atgaccgtcgcggatgcggattcgattggcattcagatagacggcgacaaggcggtcgtgaacaacgacggtgac

SEQ ID NO: 656544 - DNA, 75 bp, synthetic construct
  source 1..75: mol_type = other DNA
atgttagaaaattgatattaatagatgatctaattggttctggggatagaactaaagaatttattgaaagagttt

SEQ ID NO: 656545 - DNA, 75 bp, synthetic construct
  source 1..75: mol_type = other DNA
tgctctcgcgctttaataacatcacggtgatgaccaacagcctgcatatcgtcaatgcgctatccgaactggata

SEQ ID NO: 656546 - DNA, 75 bp, synthetic construct
  source 1..75: mol_type = other DNA
cagaatttgatgcacaaaatatgacagctaaaataattttagatggtgatgactcaaaaaagagaatcactgctg

SEQ ID NO: 656547 - DNA, 75 bp, synthetic construct
  source 1..75: mol_type = other DNA
tgatttactttattaaaaccgtcattatcattcggcaaattattgaggggcgtttgacaagcagtgttgttcaaa

SEQ ID NO: 656548 - DNA, 75 bp, synthetic construct
  source 1..75: mol_type = other DNA
cattatcattcagcaatttattgaggggcatttgataagcagcgttgtacaaaatgatattgcaatttattattt

SEQ ID NO: 656549 - DNA, 75 bp, synthetic construct
  source 1..75: mol_type = other DNA
gcaaagcggtacttttaataatgttggcgaagcgttaaaaagtcttgacgataatacattgcaatgggactcgct

SEQ ID NO: 656550 - DNA, 75 bp, synthetic construct
  source 1..75: mol_type = other DNA
ccccgtagaacctcctacccgcacgactcagctcttattcatgatgacaatacagtgagccagggattccaacaa

SEQ ID NO: 656551 - DNA, 75 bp, synthetic construct
  source 1..75: mol_type = other DNA
tacgggattaaggttgagttctttatgtcagttgacgatggagaactttttcctataaaatctaagtcctctaaa

SEQ ID NO: 656552 - DNA, 75 bp, synthetic construct
  source 1..75: mol_type = other DNA
gttaagcataagcatttaaaaaccgactacacaacatctggctttagtcgtgaggaagcgaaagagattttaata

SEQ ID NO: 656553 - DNA, 75 bp, synthetic construct
  source 1..75: mol_type = other DNA
gcaaatgggcttaatagtatcgcgttgggttccgggagtattgccgatgccgacaacacgattgctctgggcagt

SEQ ID NO: 656554 - DNA, 75 bp, synthetic construct
  source 1..75: mol_type = other DNA
atgtcaaatatcatatacttatcaattaaagggaaaatacaaggtttgatctctgagggttgtggttcgtatgca

SEQ ID NO: 656555 - DNA, 75 bp, synthetic construct
  source 1..75: mol_type = other DNA
actgtttctttgctgagtcatgatgatgtcaatgcccgtctggcctggctggaaaaccagcaaatcacaccacag

SEQ ID NO: 656556 - DNA, 75 bp, synthetic construct
  source 1..75: mol_type = other DNA
gctataggcaaaggggcgaaagcaaatacttttatgaacaccagtggttccagtactgctgtgggttatgacgct

SEQ ID NO: 656557 - DNA, 75 bp, synthetic construct
  source 1..75: mol_type = other DNA
agcgccgctcacggcaccgacgtcaccagcaaaatcaccaatgtcaccgctggcgaactctctgacaccagcacc

SEQ ID NO: 656558 - DNA, 75 bp, synthetic construct
  source 1..75: mol_type = other DNA
gggtgggttactctcacccgttggggcctatgctgaggttgcacttgacggtggtaaaagcgcagaagaagctgc

SEQ ID NO: 656559 - DNA, 75 bp, synthetic construct
  source 1..75: mol_type = other DNA
ggctggctgcacatgtgctcctgtataaatgccagccaaatacgttcagtgaacaacaggaattaagagactctc

SEQ ID NO: 656560 - DNA, 75 bp, synthetic construct
  source 1..75: mol_type = other DNA
cgtttggtgcggtggataacagcaacagtgatgttgtggccgttatggcctcggtcacttaccgcggtgctgatg

SEQ ID NO: 656561 - DNA, 75 bp, synthetic construct
  source 1..75: mol_type = other DNA
gcaacgattacagagaatggcgtacaaagcgacacaaacagctggacgactgtctcacagagttttatggcccag

SEQ ID NO: 656562 - DNA, 75 bp, synthetic construct
  source 1..75: mol_type = other DNA
tgattgatcaggatattgcacggcatctggaaaaggatgccatgaatgccctgttcgaatacgataaaggggctt

SEQ ID NO: 656563 - DNA, 75 bp, synthetic construct
  source 1..75: mol_type = other DNA
ccttactggatgtgcaaaggctcatgggcttatgcaaataataaggtcattacagatacaggttgcggaaatatt

SEQ ID NO: 656564 - DNA, 75 bp, synthetic construct
  source 1..75: mol_type = other DNA
aaccgcatttaccggggggagtgcgaaaaactcgctggataaagatatcgtcacgggactgaacacctctgacag

SEQ ID NO: 656565 - DNA, 75 bp, synthetic construct
  source 1..75: mol_type = other DNA
tccgacaaattccggcgaatgagggattgtgcgagaactattattcaacaaatattatttcagcactgaacgaaa

SEQ ID NO: 656566 - DNA, 75 bp, synthetic construct
  source 1..75: mol_type = other DNA
ttttatgaggcgctggctttaaaaaaagcagcctcgctaattcatgaaatttctgatgatttagcagtggctgct

SEQ ID NO: 656567 - DNA, 75 bp, synthetic construct
  source 1..75: mol_type = other DNA
ggcgtaatcgaccaggatgtggctcgtcatcttgagaaagatgctatgcatgcgctgtttgagtacgataacgac

SEQ ID NO: 656568 - DNA, 75 bp, synthetic construct
  source 1..75: mol_type = other DNA
tattacatcagtcatcaaggtcgagctcaatgtcagatacagatatcgagtctcttgtaaaagcatcgagcgttc

SEQ ID NO: 656569 - DNA, 75 bp, synthetic construct
  source 1..75: mol_type = other DNA
tgaaaagtgatacacgtgttcacttgcttggtattgcccgtccagagagtttcgccgactttatcaagtttggtg

SEQ ID NO: 656570 - DNA, 75 bp, synthetic construct
  source 1..75: mol_type = other DNA
aaactcctaccgtcagtctgtagaggccctgctagccatgggatacaaaaatatcaccatgggggggatggtacc

SEQ ID NO: 656571 - DNA, 75 bp, synthetic construct
  source 1..75: mol_type = other DNA
cagtgcaatatttgccaggccatcggtatcaacgtcatcattttccgcggagcagaacgtaaccgtcgccgcggt

SEQ ID NO: 656572 - DNA, 75 bp, synthetic construct
  source 1..75: mol_type = other DNA
ggctcacagctttatacgatcagtgattcagtcgccaagcgactcggaggaggcgctactgtaggcagcgatggc

SEQ ID NO: 656573 - DNA, 75 bp, synthetic construct
  source 1..75: mol_type = other DNA
caatactgccaatatcgccgataacactgccgatatctccactaacactacagatattgccaccaacactgccaa

SEQ ID NO: 656574 - DNA, 75 bp, synthetic construct
  source 1..75: mol_type = other DNA
atggaaattatcgacgaactagaaccgcagcgacgcaacgcctggtgtggcagcattggttatttgagcttttgc

SEQ ID NO: 656575 - DNA, 75 bp, synthetic construct
  source 1..75: mol_type = other DNA
ccagcaccgatgccattaatggtacacaacttcaaagcactgcaagcaccattacgtcctatttgggcggcggcg

SEQ ID NO: 656576 - DNA, 75 bp, synthetic construct
  source 1..75: mol_type = other DNA
gttacctgtttgcgttggtggctggtgattttgatgtactgcgcgataccttcactacccgctctggccgtgaag

SEQ ID NO: 656577 - DNA, 75 bp, synthetic construct
  source 1..75: mol_type = other DNA
aaatacccgttcctgctttccaatggtaaccgtgttgcacagggtgagctggaaaacgggcgtcactgggtgcag

SEQ ID NO: 656578 - DNA, 75 bp, synthetic construct
  source 1..75: mol_type = other DNA
gccgccagtcttggatacaaggccaaagcagcaggtatgtatagtctggcatttggttcagaagcggaagcgaac

SEQ ID NO: 656579 - DNA, 75 bp, synthetic construct
  source 1..75: mol_type = other DNA
accgaagccaccagcaaaatcactaacgtcaccgctggcaacctgactgccagcagcactgacgccgttaacggc

SEQ ID NO: 656580 - DNA, 75 bp, synthetic construct
  source 1..75: mol_type = other DNA
acgacaacgtgacgaccaacaccaccaacatcgccactaacaccaccaacatcaccaacctgactgacgctgtta

SEQ ID NO: 656581 - DNA, 75 bp, synthetic construct
  source 1..75: mol_type = other DNA
agcaaaatcactaacgtcaaagacggtgacctgacggctggcagcaccgacgcggttaacggctctcagctcaaa

SEQ ID NO: 656582 - DNA, 75 bp, synthetic construct
  source 1..75: mol_type = other DNA
atgctattaatggctcacaactttatagtttagctgattcattacgtcataccttggcggtggtgctgatatcaa

SEQ ID NO: 656583 - DNA, 75 bp, synthetic construct
  source 1..75: mol_type = other DNA
aagaagatagcaatcaagcagaaaaactggcgaactcagcgaaagatcgcgctgaaaatctgatgattgttgatt

SEQ ID NO: 656584 - DNA, 75 bp, synthetic construct
  source 1..75: mol_type = other DNA
gcagttcgaccattctttaagtcgagaatataatgtagtgcatcaccccataaaattttacaagccaatagataa

SEQ ID NO: 656585 - DNA, 75 bp, synthetic construct
  source 1..75: mol_type = other DNA
ttaaactggtttctgttcatattaatgatgagccgtggaccgcctggaaagaagaagagggcgcactggtcatca

SEQ ID NO: 656586 - DNA, 75 bp, synthetic construct
  source 1..75: mol_type = other DNA
ggtaaagaagccgccgcaaatgaagtgggttatcgcatcagcgcgcaactggcggagtttgtcgccaataccccc

SEQ ID NO: 656587 - DNA, 75 bp, synthetic construct
  source 1..75: mol_type = other DNA
acaccacctggctgggcgaagaggccgcacgtaacactcgtattctggaacgccagccgcgcgtgataagccatg

SEQ ID NO: 656588 - DNA, 75 bp, synthetic construct
  source 1..75: mol_type = other DNA
aaaacgtttctggcgttacctcgacagaaccctgccagatgcctttatgcacgccaatatcggcccgtctgattc

SEQ ID NO: 656589 - DNA, 75 bp, synthetic construct
  source 1..75: mol_type = other DNA
gcgctttctatggggtatacggcgaaggcgaatgggctatacagcctggcaatgggtgcagaaagtgctacttcg

SEQ ID NO: 656590 - DNA, 75 bp, synthetic construct
  source 1..75: mol_type = other DNA
ggaacccggcgacaggcagttacagcgtcgccagcgaaacggcgaagagccgtggtaaaaaatcagggcgcagta

SEQ ID NO: 656591 - DNA, 75 bp, synthetic construct
  source 1..75: mol_type = other DNA
agccagatccgatcacccatctgcaaactgtcgccccgcatcatgcttattattattccggcatcagcgacattc

SEQ ID NO: 656592 - DNA, 75 bp, synthetic construct
  source 1..75: mol_type = other DNA
ccaccgacaaagattacctcgatattgaacgcgttatcggccatgaatatttccataactggaccggtaaccgag

SEQ ID NO: 656593 - DNA, 75 bp, synthetic construct
  source 1..75: mol_type = other DNA
aacgcatctggctgacgtgctggtgagcaagcagttccacgaagcgaacaatatgaccgatgcgctggcggcgct

SEQ ID NO: 656594 - DNA, 75 bp, synthetic construct
  source 1..75: mol_type = other DNA
gcgtgttattggtcacgaatatttccacaactggaccggtaaccgtgtgacctgccgcgactggttccagctcag

SEQ ID NO: 656595 - DNA, 75 bp, synthetic construct
  source 1..75: mol_type = other DNA
gcgcaactggcggagtttgtcgccaatacccccgtgaaatatggctggcaaaaacgcgccatgttacacgcacag

SEQ ID NO: 656596 - DNA, 75 bp, synthetic construct
  source 1..75: mol_type = other DNA
aacggcactgcattcagcgccgcacacggtagtgataccaccagcaaaatcactaatgttgctaaaggtacggtt

SEQ ID NO: 656597 - DNA, 75 bp, synthetic construct
  source 1..75: mol_type = other DNA
gctacttgtttgcgctggtggcaggcgattttgatgtactgcgcgacaccttcaccacgcgttctggccgtgaag

SEQ ID NO: 656598 - DNA, 75 bp, synthetic construct
  source 1..75: mol_type = other DNA
ggatggatgttcgttaagtttattggaacacataaggaatacgatgccattgaagcggatacaatagaactggag

SEQ ID NO: 656599 - DNA, 75 bp, synthetic construct
  source 1..75: mol_type = other DNA
gggtggatgtttattaaattcatcggtacgcacaaagagtatgacaaaatagatgctgagacagttagcctggag

SEQ ID NO: 656600 - DNA, 75 bp, synthetic construct
  source 1..75: mol_type = other DNA
tgaggcagttgggtaacgctgtgccggttcacttggcgtattgtgttgccagtagtgtagcggaaaagctgctga

SEQ ID NO: 656601 - DNA, 75 bp, synthetic construct
  source 1..75: mol_type = other DNA
tgacggaagatgcactgtggctggtcagcaagaatgctgccgatgctgtgcgtggctggctgctgcgccagggca

SEQ ID NO: 656602 - DNA, 75 bp, synthetic construct
  source 1..75: mol_type = other DNA
ggcttttctggttatgttctgtgtgctcggatggggaatgaaaacaatactcgacaggaactacaacgccacagc

SEQ ID NO: 656603 - DNA, 75 bp, synthetic construct
  source 1..75: mol_type = other DNA
tggcgctgacaaacagggatattgcgacaattcacagcaatatcgtgcaggaatacaacacccttaaagggtata

SEQ ID NO: 656604 - DNA, 75 bp, synthetic construct
  source 1..75: mol_type = other DNA
tcttatcaacaatggaaaagcatcccttatacgagccaatgctggttgatgttcgcaccaaaatggcgagcaggg

SEQ ID NO: 656605 - DNA, 75 bp, synthetic construct
  source 1..75: mol_type = other DNA
tgatgcacgctgaaaatgccctttctgaaagcgaaggagcctatgaggttctcagcatgtggctagacagtattc

SEQ ID NO: 656606 - DNA, 75 bp, synthetic construct
  source 1..75: mol_type = other DNA
agcgtgccgtgtcggagcaattatgtctctgctgcacaaatctatcggcgagctggtgaaggcgcgggaggctta

SEQ ID NO: 656607 - DNA, 75 bp, synthetic construct
  source 1..75: mol_type = other DNA
tcacagtcgtgtaattggcggagggctttttgaactgagagttggggataaaaatatcgcaaggacactgtacgc

SEQ ID NO: 656608 - DNA, 75 bp, synthetic construct
  source 1..75: mol_type = other DNA
aacgtccagcaagagagcgatatcgacagcgacaaagtggcacaaatacaggcgatgctggcctccggcagcctg

SEQ ID NO: 656609 - DNA, 75 bp, synthetic construct
  source 1..75: mol_type = other DNA
gcaatcacccgacagccacaatggcaggctccagtcagccgcgcaaaagcacggcgaccaccgccacgacgctga

SEQ ID NO: 656610 - DNA, 75 bp, synthetic construct
  source 1..75: mol_type = other DNA
tggaccaccgttatcatctacgccgcgttgctgcacgatttgggcaaacttatcaccgatattgaggtggaagaa

SEQ ID NO: 656611 - DNA, 75 bp, synthetic construct
  source 1..75: mol_type = other DNA
tcatcaacaatgctggcactattagtagtatcgaacagtgggccagcgctgtttataacaccggaacggtgagca

SEQ ID NO: 656612 - DNA, 75 bp, synthetic construct
  source 1..75: mol_type = other DNA
ttggcgaacaactcgattcgtttattagtcgattaatagacagtggccgttacggctctgcgagtgaagttatgc

SEQ ID NO: 656613 - DNA, 75 bp, synthetic construct
  source 1..75: mol_type = other DNA
gtgcctgagtctgaagtttttaactggatcccccgtgaggggatggagacgacacgaaagccatctgttattacg

SEQ ID NO: 656614 - DNA, 75 bp, synthetic construct
  source 1..75: mol_type = other DNA
tgataatggcgttacaggcggttatagccagttctttggcctgaaacatcagatgtccttcgacaatggcatgaa

SEQ ID NO: 656615 - DNA, 75 bp, synthetic construct
  source 1..75: mol_type = other DNA
ggtcacgtggttaacaacggcacagtggtgatcgccgatggggttacgggttcgggcctgatcatgcagggcgac

SEQ ID NO: 656616 - DNA, 75 bp, synthetic construct
  source 1..75: mol_type = other DNA
cggcgatgataccccggacgacggtggcgatgacacgccagtcaaacacgatcctgtggtctataaaaacgatgt

SEQ ID NO: 656617 - DNA, 75 bp, synthetic construct
  source 1..75: mol_type = other DNA
accacggggtaatgctttttactggcctgctcccttatcgggaagcggggcgcatcatatcaaatgacgcgccgc

SEQ ID NO: 656618 - DNA, 75 bp, synthetic construct
  source 1..75: mol_type = other DNA
aacgcagccgccttaaccgggctgcactgacggcaggtctggccttatacagacaagatcccagggcccctttcc

SEQ ID NO: 656619 - DNA, 75 bp, synthetic construct
  source 1..75: mol_type = other DNA
ctggccactgccggtatcagtggtgctatgggttccgtagcgctcacgtatttctgggaacgaatcaccggagtg

SEQ ID NO: 656620 - DNA, 75 bp, synthetic construct
  source 1..75: mol_type = other DNA
tattccccgacagcagaaagcagttgtgagggaagaagtttctgtgcctcttgttcttgagcaacagatacctgt

SEQ ID NO: 656621 - DNA, 75 bp, synthetic construct
  source 1..75: mol_type = other DNA
tatcaggtcagacggccggggagatactccctttgcgttgagtccgccagtccgcctccttgacaaacgtgatga

SEQ ID NO: 656622 - DNA, 75 bp, synthetic construct
  source 1..75: mol_type = other DNA
tattccccaacagcagaaagcagttgtgggggagggagtttctgtgcctcttgttcttgagcaacagatacctgt

SEQ ID NO: 656623 - DNA, 75 bp, synthetic construct
  source 1..75: mol_type = other DNA
attattgaggaacagggcaaagaaatcgatactcttaaaacacagtcaacagttgcagccatgaatccgtccagc

SEQ ID NO: 656624 - DNA, 75 bp, synthetic construct
  source 1..75: mol_type = other DNA
tcgccgcaacaccaaaagccgttaagacggtaatggatgaaacgaacaaaaaagcgccattaaacagccctgcac

SEQ ID NO: 656625 - DNA, 75 bp, synthetic construct
  source 1..75: mol_type = other DNA
tggtgatatagggccactacgcccctttacgcttaatctcagaactggtcggataagcatggggcatggtctgga

SEQ ID NO: 656626 - DNA, 75 bp, synthetic construct
  source 1..75: mol_type = other DNA
ggatattcttgcgaaatcgaccgttgccgctgttatcgaatacctcggtttacaggaaacggtaaacagggctgg

SEQ ID NO: 656627 - DNA, 75 bp, synthetic construct
  source 1..75: mol_type = other DNA
tgcagagttaggcgatgaggcaggatggcatttctatagccagcgaaatacagataactcggtaatattttctgt

SEQ ID NO: 656628 - DNA, 75 bp, synthetic construct
  source 1..75: mol_type = other DNA
accggatttaaacagaatggagacggtattcttgatgtttatgctaacagtcagcgtgtattccgttttcagaat

SEQ ID NO: 656629 - DNA, 75 bp, synthetic construct
  source 1..75: mol_type = other DNA
aacaacggcaatgaatatttcaaatggagacaccgcatcattggcacccggcctaaagacctgatgaatcttaaa

SEQ ID NO: 656630 - DNA, 75 bp, synthetic construct
  source 1..75: mol_type = other DNA
ccagatgggaaacctgtccgcctgacacatatggccgtgggtgacggcggcggtactttacccacgccagacagt

SEQ ID NO: 656631 - DNA, 75 bp, synthetic construct
  source 1..75: mol_type = other DNA
cagatcgcaagtacggcttatgtgatggccgcgattgccgcccttgtagactcgtcgcctgacgcactgaatacg

SEQ ID NO: 656632 - DNA, 75 bp, synthetic construct
  source 1..75: mol_type = other DNA
aacaccaaaagccgttaagacggtaatggatgaaacgaacaagaaagcgccattaaacagccctgcactgaccgg

SEQ ID NO: 656633 - DNA, 75 bp, synthetic construct
  source 1..75: mol_type = other DNA
ttgctattaacagcagtaatggtatgtggattcagatgcgcgataacaacgctatctttgggaaaaatatagtta

SEQ ID NO: 656634 - DNA, 75 bp, synthetic construct
  source 1..75: mol_type = other DNA
ctgcgacgccaaaagcggttaaggcggtaatgaatgaaacaaataagaaagccccattaaacagtccggaactga

SEQ ID NO: 656635 - DNA, 75 bp, synthetic construct
  source 1..75: mol_type = other DNA
ggcggtaatggatgaaacgaacaagaaagcgcccttaaacagtcctgcgttgaccggaacgccaacaacgccaac

SEQ ID NO: 656636 - DNA, 75 bp, synthetic construct
  source 1..75: mol_type = other DNA
aaatcagataccggacatgtccgccttcgcgtcaggatctgggtatcaaaaactaccgggaggatacattttgca

SEQ ID NO: 656637 - DNA, 75 bp, synthetic construct
  source 1..75: mol_type = other DNA
caaaaccagcactcagggagttcttgattaccttggtttgggggaaggctctgcactgcccgttggtgtacctgt

SEQ ID NO: 656638 - DNA, 75 bp, synthetic construct
  source 1..75: mol_type = other DNA
gctctgttgatggcgatgatccggctgtattcagaccaatacaaaaatacatcaatggcacatggtataacgtcg

SEQ ID NO: 656639 - DNA, 75 bp, synthetic construct
  source 1..75: mol_type = other DNA
attacaacgattgcccggcgataactggcgcgtcaccagctactcaggtttacaacagcgtggtcacggaatcgc

SEQ ID NO: 656640 - DNA, 75 bp, synthetic construct
  source 1..75: mol_type = other DNA
gcaaatacaccgcacaggacgctaccactgcgcaaaaagggatagttcagctcagtagcgccaccaacagcacat

SEQ ID NO: 656641 - DNA, 75 bp, synthetic construct
  source 1..75: mol_type = other DNA
cgttcccaattccattcccgtcagggattgtcatcattacgaccgggcagattgacccctcttatacttcaacac

SEQ ID NO: 656642 - DNA, 75 bp, synthetic construct
  source 1..75: mol_type = other DNA
taatatttgctgttaacggtcagatgcaacccagcaactgggggaattttgattcccgctatgtgaaagatgttc

SEQ ID NO: 656643 - DNA, 75 bp, synthetic construct
  source 1..75: mol_type = other DNA
tcaattgatggcgcgtggtggtcgttatgaaaaagccggacacgcaattaccggattaagaatcattggtgaagt

SEQ ID NO: 656644 - DNA, 75 bp, synthetic construct
  source 1..75: mol_type = other DNA
actaccagtttggtttttacatgattaataactcaaggacagccaatggcaccgatggtcaggcgtacatggaca

SEQ ID NO: 656645 - DNA, 75 bp, synthetic construct
  source 1..75: mol_type = other DNA
ctttacgattaaccttagaactggtcggataagcatggggcatggtcttgatgttacaggggatatatttgcaaa

SEQ ID NO: 656646 - DNA, 75 bp, synthetic construct
  source 1..75: mol_type = other DNA
agatgtccgacttggcacacgtgttgttcagactatgcaaaaaggcgtgatgtatgagaaatcaggtcatgcaat

SEQ ID NO: 656647 - DNA, 75 bp, synthetic construct
  source 1..75: mol_type = other DNA
ataactcggtaatattttctgttaacggtcagatacagcccagcaactgggggaattttgattcacgctatgtaa

SEQ ID NO: 656648 - DNA, 75 bp, synthetic construct
  source 1..75: mol_type = other DNA
actgagaagctgatcctcagtattatcgagaaccaccctgagtatgacccttctgagccgagctttgggcaacca

SEQ ID NO: 656649 - DNA, 75 bp, synthetic construct
  source 1..75: mol_type = other DNA
ttgatgtatcacctgctggtacttctgcaggatcaggagctggatttaacggcggtgattgagaatcttcgtaag

SEQ ID NO: 656650 - DNA, 75 bp, synthetic construct
  source 1..75: mol_type = other DNA
atgttaacagaacaacaacgtcgcgaactggactgggaaaaaaccgacggactgatgccggtgattgtgcaacat

SEQ ID NO: 656651 - DNA, 75 bp, synthetic construct
  source 1..75: mol_type = other DNA
tcaccagtatccattatggcgtcacagggcgtccggtttaccgttaccgtattcaggcagaacactactcactgc

SEQ ID NO: 656652 - DNA, 75 bp, synthetic construct
  source 1..75: mol_type = other DNA
tttcggtcgaactcgttacagaactgtctccgctcgattacgacaagctgagcaagcttctcccttcccttgaca

SEQ ID NO: 656653 - DNA, 75 bp, synthetic construct
  source 1..75: mol_type = other DNA
gctctgtgtaaagtgacgcattaccacggtgagagcagctatgtggcaagctatgtcctgagctgcgacgtagcg

SEQ ID NO: 656654 - DNA, 75 bp, synthetic construct
  source 1..75: mol_type = other DNA
tccggcgggtaacgttgtcatgcctggttgctgctgtgctggcgttgcctgcgcaggctgacgtcaataacgacc

SEQ ID NO: 656655 - DNA, 75 bp, synthetic construct
  source 1..75: mol_type = other DNA
gctgtctggcaggggcaggcggcaggctatgccaccggcggcaatctgttcttacgcaatcaggtgaataacctg

SEQ ID NO: 656656 - DNA, 75 bp, synthetic construct
  source 1..75: mol_type = other DNA
gaaaacgatccagctggtcagcatgacgctccctgatattaatgccggctgcggagggattgatgcctatctagg

SEQ ID NO: 656657 - DNA, 75 bp, synthetic construct
  source 1..75: mol_type = other DNA
aaaaagaacaagatgtttgacggtaacaaagagctgaaagaattcatcatgacgcttaccggaactctgattttt

SEQ ID NO: 656658 - DNA, 75 bp, synthetic construct
  source 1..75: mol_type = other DNA
atgaaccgaaaaccttctttcctgctccggcgggtaacgttgtcatgcctggttgctgctgtgctggcgttgcct

SEQ ID NO: 656659 - DNA, 75 bp, synthetic construct
  source 1..75: mol_type = other DNA
gggacgctgatttttgatgataaaggtgaagttaaatttattggcccgcaggctaatcatcagggactcattcgt

SEQ ID NO: 656660 - DNA, 75 bp, synthetic construct
  source 1..75: mol_type = other DNA
ctgttaccttctgtgaaagaactgcttgaacaaggcggcctgaataatcagggcggattcctgtcatttattatc

SEQ ID NO: 656661 - DNA, 75 bp, synthetic construct
  source 1..75: mol_type = other DNA
aaccaggcgattgtcgccgcaggcgggccagaaaatttactggttaccgtgacaaatccggatatcgaaaccgcg

SEQ ID NO: 656662 - DNA, 75 bp, synthetic construct
  source 1..75: mol_type = other DNA
tgggtcgcgttgaagataaatttgccaaaaacgtcgctcaggcacgcggcacgccaggcgttgagtgtctctctc

SEQ ID NO: 656663 - DNA, 75 bp, synthetic construct
  source 1..75: mol_type = other DNA
aaaaggcaccgtcagccgtgactgggttggtcgcgatgcggcgaaaatcgcggcggcaatcggcctgaacgtgcc

SEQ ID NO: 656664 - DNA, 75 bp, synthetic construct
  source 1..75: mol_type = other DNA
gaaaccaccgcagaacatccgtttgccgtgaccgaactgatgatgccggtgctgcccgtcgtgcgcgtcgccaac

SEQ ID NO: 656665 - DNA, 75 bp, synthetic construct
  source 1..75: mol_type = other DNA
caaaaacgtcgctcaggcgcgcggcacaccaggcgttgagtgcctctcaccacaggtgctgaccggcgacaacgg

SEQ ID NO: 656666 - DNA, 75 bp, synthetic construct
  source 1..75: mol_type = other DNA
gaacgcggtgaaactgaccgccgagcaggcgcagcagctacacccagtgttgctgaaaaatatcgacgaacgcgg

SEQ ID NO: 656667 - DNA, 75 bp, synthetic construct
  source 1..75: mol_type = other DNA
gtacaggtcgcaatgcgaaaatgacaggcgtgactggggcttctagggattgattgccgaggaagtgggagaaat

SEQ ID NO: 656668 - DNA, 75 bp, synthetic construct
  source 1..75: mol_type = other DNA
gtacaggtcgcaatgcgaaaatgacaggcgtgactggggtttctatggattgattgccgaggaagtcggagaaat

SEQ ID NO: 656669 - DNA, 75 bp, synthetic construct
  source 1..75: mol_type = other DNA
gccacgcaaggtaatgtggtgacgcagctttccaatcagcagcagtcgatttccggtgtcaatctcgatgaggag

SEQ ID NO: 656670 - DNA, 75 bp, synthetic construct
  source 1..75: mol_type = other DNA
cggagatttttatccactgacaggtcgtgaagcgttttatttatggaatttggccacgactacagcggcggcaaa

SEQ ID NO: 656671 - DNA, 75 bp, synthetic construct
  source 1..75: mol_type = other DNA
ggattgattgccgaggaagtaggagaaattgcccctcagtttgtacactggcgaccagctaacgaagatgatgct

SEQ ID NO: 656672 - DNA, 75 bp, synthetic construct
  source 1..75: mol_type = other DNA
gtacaggtcgcaatgcgaaaatgacaggcgtgactgggggttctaaggattgattgccgaggaagtaggagaaat

SEQ ID NO: 656673 - DNA, 75 bp, synthetic construct
  source 1..75: mol_type = other DNA
tctgattagagccatgatggagggcggcacggctaaaatctaccactgcaatgattcggataagtgtcttaaggt

SEQ ID NO: 656674 - DNA, 75 bp, synthetic construct
  source 1..75: mol_type = other DNA
ttacggtgacagaatggcttgataaatataattctatccaggaggacaggctgcaacataatgaactaagaccca

SEQ ID NO: 656675 - DNA, 75 bp, synthetic construct
  source 1..75: mol_type = other DNA
caggccgatgcctccgtgattgcggcaaaagccaccgtcgaaagcgcacgaatcaatctcgcttataccaaagtg

SEQ ID NO: 656676 - DNA, 75 bp, synthetic construct
  source 1..75: mol_type = other DNA
aatggctaatacagaccctaccccaatcgctcaggacgatgagttcgaattttataaagaatttatcgagcaatc

SEQ ID NO: 656677 - DNA, 75 bp, synthetic construct
  source 1..75: mol_type = other DNA
tgaaaggcggtcgtgccagacttattctggtcgatacgcaagtttgcgagtttattcagaacacgcctgcgttcc

SEQ ID NO: 656678 - DNA, 75 bp, synthetic construct
  source 1..75: mol_type = other DNA
ggcaatttatgaggctggttatcagttaagtctgtttgattctctgctacctgattttgttgctgatgttcaccc

SEQ ID NO: 656679 - DNA, 75 bp, synthetic construct
  source 1..75: mol_type = other DNA
attcggggacatgtcagtaagggatttcaggatggtgcattgcagatgagccgggctaatgcggccagcattgca

SEQ ID NO: 656680 - DNA, 75 bp, synthetic construct
  source 1..75: mol_type = other DNA
acaaaacacccatgcggcatggacgaagtacaaccttgctgccagaacccgctggttacaggacgaaccccgggg

SEQ ID NO: 656681 - DNA, 75 bp, synthetic construct
  source 1..75: mol_type = other DNA
cacggtattgatatctccagtcgggaagtgctcaaccattacactcccgaatatcaacaactgtttcgccgtggc

SEQ ID NO: 656682 - DNA, 75 bp, synthetic construct
  source 1..75: mol_type = other DNA
tttgcggccaggtcgcaacaccgtttcgcgccgatgtgttcatcgctcattttggccctgcgggggtaaccgcag

SEQ ID NO: 656683 - DNA, 75 bp, synthetic construct
  source 1..75: mol_type = other DNA
cacggcattgatatctccagtcgggaagtgctcaaccactacactcccgaatatcagcaactgtttcgccgtggc

SEQ ID NO: 656684 - DNA, 75 bp, synthetic construct
  source 1..75: mol_type = other DNA
caaaactacgggaactgggtgtcattcgcggcaaaatcgctactatcttccacggcatagatatctccagtcggg

SEQ ID NO: 656685 - DNA, 75 bp, synthetic construct
  source 1..75: mol_type = other DNA
tcgcggaacctgattttgtctgccatttgcggccaggtcgcaacaccgtttcgtgccgatgtgttcatcgctcat

SEQ ID NO: 656686 - DNA, 75 bp, synthetic construct
  source 1..75: mol_type = other DNA
ctttgaggatgcgccatattatccgaaagccctcgctgagctggaagcggtggcagcggaaatactgaagcgtgc

SEQ ID NO: 656687 - DNA, 75 bp, synthetic construct
  source 1..75: mol_type = other DNA
ggtgtggaaacggtcgctgacgattattatgcccgtagtctggcggtgggcgaatatcgcggcgtggtgactgct

SEQ ID NO: 656688 - DNA, 75 bp, synthetic construct
  source 1..75: mol_type = other DNA
gcacaaatccgccgttatgccgagcgctggaaaccctggcgttcttatgcgttgttgcatatctggtatacggat

SEQ ID NO: 656689 - DNA, 75 bp, synthetic construct
  source 1..75: mol_type = other DNA
cccagggcggtcagattgcgtccatgcgtatccgcatgttcagccagatcgccaatatcagtaagcgtcaacgga

SEQ ID NO: 656690 - DNA, 75 bp, synthetic construct
  source 1..75: mol_type = other DNA
agtgatcttgaggcgtatgccgctatgatggcctttggcggtgaaacaactgactccgctcagcaaaagcctgaa

SEQ ID NO: 656691 - DNA, 75 bp, synthetic construct
  source 1..75: mol_type = other DNA
gcgcccctgcagctgatgaaccggtggaagccgcgcaggtggccagcgcccctgcagctgatgaaccggtggaag

SEQ ID NO: 656692 - DNA, 75 bp, synthetic construct
  source 1..75: mol_type = other DNA
tgacttgcaatgtaatccgcagatggttaacggcgcgttgggcgcgttaggtgcggcgcgacctggtttgcgttt

SEQ ID NO: 656693 - DNA, 75 bp, synthetic construct
  source 1..75: mol_type = other DNA
atgaccaccgaagaactggcggaatgtctcggtgtggctaaacagacagttaaccgctggattagagaaaaaggc

SEQ ID NO: 656694 - DNA, 75 bp, synthetic construct
  source 1..75: mol_type = other DNA
ccgggaaaacttaatctgggtggctgtgtcattgaggtgatggggaagtatgaggcagccatagtccgggtcacc

SEQ ID NO: 656695 - DNA, 75 bp, synthetic construct
  source 1..75: mol_type = other DNA
tgcactccatccgttttccggtggtttttccttcagcagtgctgaatgttcaggtttctccggtgggggagcccg

SEQ ID NO: 656696 - DNA, 75 bp, synthetic construct
  source 1..75: mol_type = other DNA
gcccacgcttggtcaacacaattacgaagtgcttaaagaacgtctgaactattcagatgaaaaaattgagcagct

SEQ ID NO: 656697 - DNA, 75 bp, synthetic construct
  source 1..75: mol_type = other DNA
aacgcgccgcagatcaatggcgaaagtgcctactttatgaatttaaaccgcaataagcgcggaatgacgctgaat

SEQ ID NO: 656698 - DNA, 75 bp, synthetic construct
  source 1..75: mol_type = other DNA
taaacataccgttcagagcctgatcattgagtcgctgaaagagaaagataaaccgtttctctatctcgataccca

SEQ ID NO: 656699 - DNA, 75 bp, synthetic construct
  source 1..75: mol_type = other DNA
gacgatgccttacgcttcagaggccaatttcgagcgggttgatagcttaaagtcgtggcatgaaacgctggcgaa

SEQ ID NO: 656700 - DNA, 75 bp, synthetic construct
  source 1..75: mol_type = other DNA
tgtaattgtttgtatttttgcatacgtatataaatacgtactttcaatagtttttaaagcgctcaggaaggcatt

SEQ ID NO: 656701 - DNA, 75 bp, synthetic construct
  source 1..75: mol_type = other DNA
taaagattcgctgcattacggtgtcgtggattacctgatcaaacccttccaggcttcccgctttgaagaggcgct

SEQ ID NO: 656702 - DNA, 75 bp, synthetic construct
  source 1..75: mol_type = other DNA
tttttgccaaagtagttgaatttggctcttttaccgccgccgccaggcagttacagatgagcgtatcatccatca

SEQ ID NO: 656703 - DNA, 75 bp, synthetic construct
  source 1..75: mol_type = other DNA
tagtctccaggattcccggggcggttcacacacgcagcattggcctgaccgaagccggtagaatttactaccagg

SEQ ID NO: 656704 - DNA, 75 bp, synthetic construct
  source 1..75: mol_type = other DNA
ggcgtgccggaaaaacccgccgatttaagtagtcattcatggcttgaatacagcgtgcgcccggacaatgaattt

SEQ ID NO: 656705 - DNA, 75 bp, synthetic construct
  source 1..75: mol_type = other DNA
tcttgcgccgttgcttcacacccaccagccacagaacccagcacaggaaaaggcggtggtcagcattaccgttga

SEQ ID NO: 656706 - DNA, 75 bp, synthetic construct
  source 1..75: mol_type = other DNA
ttgatgtatcacctgctggtgctgttgcaggatcaggatctggacttaacgacggtgattgagaacctgcgtaaa

SEQ ID NO: 656707 - DNA, 75 bp, synthetic construct
  source 1..75: mol_type = other DNA
gtgcggatattacttcgacctgttctggtaccggaacttgggctggtggtccttaggccgggccgtgaatccatg

SEQ ID NO: 656708 - DNA, 75 bp, synthetic construct
  source 1..75: mol_type = other DNA
gtcaatcaaattgggcgtggttggcgctgtgttgggagtcatgggcttcctgactggcgtagctccgtacctctt

SEQ ID NO: 656709 - DNA, 75 bp, synthetic construct
  source 1..75: mol_type = other DNA
tacctcccgaggattcaggccttcaacactgcattgccaggttccataaccgcaacatggattccaagcgaaaag

SEQ ID NO: 656710 - DNA, 75 bp, synthetic construct
  source 1..75: mol_type = other DNA
ttgatgtatcacctgctggtgttgttgcaggatcaagggctggatctcggagaagtgattgataatctgaagaat

SEQ ID NO: 656711 - DNA, 75 bp, synthetic construct
  source 1..75: mol_type = other DNA
tttttacttagtagagataaacggaactgtgctgccggggatcatggtatcgggcagtttaccgtcccaacgctc

SEQ ID NO: 656712 - DNA, 75 bp, synthetic construct
  source 1..75: mol_type = other DNA
catcctgggtgaaatacgcacaggaccacaatctttcgccggaacaggttcaggcggggctgacggatattgtgc

SEQ ID NO: 656713 - DNA, 75 bp, synthetic construct
  source 1..75: mol_type = other DNA
gcggtggcgtgggtgtcagtatcggtgccggtggtaacggtgccggtatcagcgtctttgccggcgttaatgcgg

SEQ ID NO: 656714 - DNA, 75 bp, synthetic construct
  source 1..75: mol_type = other DNA
cgtcatgcaaacagtgagtctcaccagctcagcgccgggcttacgaccattactgccggcgacagtgtgatgctg

SEQ ID NO: 656715 - DNA, 75 bp, synthetic construct
  source 1..75: mol_type = other DNA
aactggatggtctcggaaaggtggacagcagtctgtttgccggactttatgacctgctcaggatgcaacccggag

SEQ ID NO: 656716 - DNA, 75 bp, synthetic construct
  source 1..75: mol_type = other DNA
gactccgttgctgaacaaaccggaatgtttgccggtgatggtggcttcgacatcacagtgggtaaacatacccaa

SEQ ID NO: 656717 - DNA, 75 bp, synthetic construct
  source 1..75: mol_type = other DNA
tccggcggcgctgatatgcatatccgtgcaggacgactggataatgaggcatcgtttattctcgccggtggcagt

SEQ ID NO: 656718 - DNA, 75 bp, synthetic construct
  source 1..75: mol_type = other DNA
cgtcatttcaaaaataatacaggattattctgatgagattggaaatgtatttcttaaaattgataagggtaatta

SEQ ID NO: 656719 - DNA, 75 bp, synthetic construct
  source 1..75: mol_type = other DNA
aaatcagcattcactggctggtctttttactggttatcgcagcgtattgcgcaatggagtttcggggtttcttcc

SEQ ID NO: 656720 - DNA, 75 bp, synthetic construct
  source 1..75: mol_type = other DNA
cgaaacgctcattccaggagtgcgtgtagagttttgccgtgttaatggtctacgcggccccactgcggcaaatgt

SEQ ID NO: 656721 - DNA, 75 bp, synthetic construct
  source 1..75: mol_type = other DNA
tggtgttaacggtcgccggggcagtcattaacaccgcactgttgtatgcgggcaataatctctcgctgtttgcca

SEQ ID NO: 656722 - DNA, 75 bp, synthetic construct
  source 1..75: mol_type = other DNA
agcttcagggggcggataaccgcatcaccgccagttcgctgaccaactcaggtcgtgtgcagggcgacagcgggc

SEQ ID NO: 656723 - DNA, 75 bp, synthetic construct
  source 1..75: mol_type = other DNA
aacgctcagcaacagtggctccctgctcagtggcggtcccctgactgttaatacccacgaatttaaccagagcgg

SEQ ID NO: 656724 - DNA, 75 bp, synthetic construct
  source 1..75: mol_type = other DNA
gtggacgcattacctgaggcagtatcgcgtcgctctctgggattaccggcggaaaaaatccgctccgtataccgt

SEQ ID NO: 656725 - DNA, 75 bp, synthetic construct
  source 1..75: mol_type = other DNA
acacgttactggtgctggcgaatcccatcggcccgacctgccacaaaggcaccagcagctgcttcggcgacaccg

SEQ ID NO: 656726 - DNA, 75 bp, synthetic construct
  source 1..75: mol_type = other DNA
tgaaatcccctacccgcgtgatccaaatcctttccgtactcggcctgctgacgttaactgccctgctcgtcacga

SEQ ID NO: 656727 - DNA, 75 bp, synthetic construct
  source 1..75: mol_type = other DNA
atggcgaaagaaaagctggttaccatccatgttcacaccccgtttacgctgacgctcggcgatcagtcaaaacag

SEQ ID NO: 656728 - DNA, 75 bp, synthetic construct
  source 1..75: mol_type = other DNA
gtcaccaagccagttgtgggttacatcgctggggtgactgcgccgaaaggcaaacgtatgggccacgcgggtgcc

SEQ ID NO: 656729 - DNA, 75 bp, synthetic construct
  source 1..75: mol_type = other DNA
aagtgaaactggatgaagcgggcgttcgtatgattggcccgaactgcccgggcgtaatcactccgggtgaatgca

SEQ ID NO: 656730 - DNA, 75 bp, synthetic construct
  source 1..75: mol_type = other DNA
ccgttctgcaaagactccattctggaagccatcgatgcaggcattaaactgattatcaccatcactgaaggtatc

SEQ ID NO: 656731 - DNA, 75 bp, synthetic construct
  source 1..75: mol_type = other DNA
cacgactacagcggcggcaaacctttatcttaatcctgaccccgcaatttcgtctgtgctgcggtcaacatcgtc

SEQ ID NO: 656732 - DNA, 75 bp, synthetic construct
  source 1..75: mol_type = other DNA
tcattttcaggatgcgccctgtgtggtacaggtcgcaatgcgaaaatgacaggcgtgactgggggttctacggat

SEQ ID NO: 656733 - DNA, 75 bp, synthetic construct
  source 1..75: mol_type = other DNA
catatccagaagctgactgaaagagttgatgaacttgagtcagaattaaagttgttatccgtttcccgaagcgat

SEQ ID NO: 656734 - DNA, 75 bp, synthetic construct
  source 1..75: mol_type = other DNA
aagcaggaggcggttctgcagcagatgatgagtcgtcagcctgggtttttggctctgcccggccagaaggcaaaa

SEQ ID NO: 656735 - DNA, 75 bp, synthetic construct
  source 1..75: mol_type = other DNA
ccacccgggtttcctcaacactggtcacggtgacaagcgcaccatgatcatctctgtatcgctgattgattttcg

SEQ ID NO: 656736 - DNA, 75 bp, synthetic construct
  source 1..75: mol_type = other DNA
tcattttcaggatgcgccctgtgtggtacaggtcacaatgcgaaaatgacaggcgtgactggggattctacggat

SEQ ID NO: 656737 - DNA, 75 bp, synthetic construct
  source 1..75: mol_type = other DNA
tggttaatgcaggaatacggcgacgatacagcgcataatgtgtcaggcttgaatacctttatcgaatcccggtaa

SEQ ID NO: 656738 - DNA, 75 bp, synthetic construct
  source 1..75: mol_type = other DNA
gatcgggcgtgggaagtgttcgaaaaactggaagactgctatttcagtcaaaaaatcccagaacaacttcagctt

SEQ ID NO: 656739 - DNA, 75 bp, synthetic construct
  source 1..75: mol_type = other DNA
ccagggaaaaacaacacaaaccgaacagcagtcgcagattcagccacaattcacagccgaggaaatcatcctcct

SEQ ID NO: 656740 - DNA, 75 bp, synthetic construct
  source 1..75: mol_type = other DNA
ccgtgctcttcgatatgccaagcccaactatgcgcatcctcaacgagctacacagcaagggctataacgttgacg

SEQ ID NO: 656741 - DNA, 75 bp, synthetic construct
  source 1..75: mol_type = other DNA
gcgtcgctctctgggattaccggcggaaaaaatccgctccgtataccgtgaaagcgacatcataccgggagaaca

SEQ ID NO: 656742 - DNA, 75 bp, synthetic construct
  source 1..75: mol_type = other DNA
atgtgcaatagaagttaaaggaaatgccccctgtaaaagtcttttattttctgacataagaagaaatcttgaata

SEQ ID NO: 656743 - DNA, 75 bp, synthetic construct
  source 1..75: mol_type = other DNA
acggaagaaatgcgccgtactctacaggatatttcaagattgtcagatcgaaattcccgaaaaggcttctcgtta

SEQ ID NO: 656744 - DNA, 75 bp, synthetic construct
  source 1..75: mol_type = other DNA
cgcgcatttttggaagcaaaagcattacaaggcgataactcggacaacattagcggtgttggtggcattggtgct

SEQ ID NO: 656745 - DNA, 75 bp, synthetic construct
  source 1..75: mol_type = other DNA
attctttgggatggatttagtgacaagcgtcgcgacttttacccggactacaaagcaaatcgcgacgacgatcct

SEQ ID NO: 656746 - DNA, 75 bp, synthetic construct
  source 1..75: mol_type = other DNA
cctgctggcgccggaagtcagcgccctgctccattacgtgccggatcttcaccgcaagatgctgctggcgacgct

SEQ ID NO: 656747 - DNA, 75 bp, synthetic construct
  source 1..75: mol_type = other DNA
ttacaggcatttggttgtgaagtattacgccaatggcagccgcaacgcagagcttttcagtacggctgtttccca

SEQ ID NO: 656748 - DNA, 75 bp, synthetic construct
  source 1..75: mol_type = other DNA
ctgtggaacaccggtgcgcgcattaatgaagcactggcgctgacgcgggggatttttcgctcgcgcctccgtatc

SEQ ID NO: 656749 - DNA, 75 bp, synthetic construct
  source 1..75: mol_type = other DNA
aatggggaagcgtggccgcaatggtacgcggcattaacgacggttccattgtcatcaacaaaggtcgctataaga

SEQ ID NO: 656750 - DNA, 75 bp, synthetic construct
  source 1..75: mol_type = other DNA
actggaaaacgtcgcatctgcctgtcactggatgaaacaagccggagaacgcgctgtcgccagaagtgaagggcc

SEQ ID NO: 656751 - DNA, 75 bp, synthetic construct
  source 1..75: mol_type = other DNA
ttggtattcacggtggcaatccattaatgaccaaagtggtaggaactggctgtgcactatcggcggttgtcgctg

SEQ ID NO: 656752 - DNA, 75 bp, synthetic construct
  source 1..75: mol_type = other DNA
cgtcgtggtcactggcgaggtggattatgttaccgatggacatcgtatcattggtattcacggtggcgatccgtt

SEQ ID NO: 656753 - DNA, 75 bp, synthetic construct
  source 1..75: mol_type = other DNA
tgtgtgggcaaacggcgcagccgtaccgcgctgatgtctttatcgcccactttggcccggcaggggtgaccgcag

SEQ ID NO: 656754 - DNA, 75 bp, synthetic construct
  source 1..75: mol_type = other DNA
cgctgcacagcgggatcccggagctgatcaagtcagatcattccggctggctggtccccgaaaataacgccatgg

SEQ ID NO: 656755 - DNA, 75 bp, synthetic construct
  source 1..75: mol_type = other DNA
gggagtggataccactgacgccgcagctaacgcgatacccgctgcacaaacactggcacgggaaactggcgcaat

SEQ ID NO: 656756 - DNA, 75 bp, synthetic construct
  source 1..75: mol_type = other DNA
gtcgggcggcgcaaatctggtggcagcaaaatcagagcaaatgtgtgcagtttgccaatctttccgtctggtatc

SEQ ID NO: 656757 - DNA, 75 bp, synthetic construct
  source 1..75: mol_type = other DNA
ggcggggttgtctgcacaggagcatgagcatctggcctggattgcgcgtcagatcatcccgacagaagctgatga

SEQ ID NO: 656758 - DNA, 75 bp, synthetic construct
  source 1..75: mol_type = other DNA
gctgatgctgaccacggatgcggggatcacggaaggtgtgcttctccagcgcagtgatggcgtggtttaccgcat

SEQ ID NO: 656759 - DNA, 75 bp, synthetic construct
  source 1..75: mol_type = other DNA
gtgctgacggtgatatggaaggcattccggtggcgctaatggaagcaatggcggtcggcattccggtggtttcta

SEQ ID NO: 656760 - DNA, 75 bp, synthetic construct
  source 1..75: mol_type = other DNA
gatggcgtgatctggttatcggatgataagaataatctggaagtgaacttaaccgcctggcaacaaccttcatga

SEQ ID NO: 656761 - DNA, 75 bp, synthetic construct
  source 1..75: mol_type = other DNA
aatatgccgatgaacgtctgcaatttacccgtggtttgtgtgccgatgatgagccggaagcgtggctgcgtaacg

SEQ ID NO: 656762 - DNA, 75 bp, synthetic construct
  source 1..75: mol_type = other DNA
aaacgtggcgctgaccaacgccgaattcacaggggccggtgacgctaacggcaatgcagaaatctcctggaagat

SEQ ID NO: 656763 - DNA, 75 bp, synthetic construct
  source 1..75: mol_type = other DNA
agcctgccgccagttgaaagagcgcggagtcgcgtttcattaccgcatcctcggcattggcccgtgggaacgtcg

SEQ ID NO: 656764 - DNA, 75 bp, synthetic construct
  source 1..75: mol_type = other DNA
gagcccgtgctgcacaatgcccgacaaaaagtcgaggcagattttaaccagcaggtgatcaatcgccagttagcg

SEQ ID NO: 656765 - DNA, 75 bp, synthetic construct
  source 1..75: mol_type = other DNA
gtttaatccttatcgacccgccgtatgaaatgaaaaccgactatcaggcggtggtcagcgggatagcagaaggtt

SEQ ID NO: 656766 - DNA, 75 bp, synthetic construct
  source 1..75: mol_type = other DNA
gcggaagtcaccatccgtcacgctgacctgatgggggtattctgcatcctctctggcagcctgaatcagaagtaa

SEQ ID NO: 656767 - DNA, 75 bp, synthetic construct
  source 1..75: mol_type = other DNA
gaattaatgttgcctattagcaaattgtgggctaagcgtttggcaatgttaggatgcccggttgaaaaaatcgta

SEQ ID NO: 656768 - DNA, 75 bp, synthetic construct
  source 1..75: mol_type = other DNA
ccaagctgcgcgaactgggggtgatcgacgggaagatagccaccgtctttcacggtattgatatctcaagccgcg

SEQ ID NO: 656769 - DNA, 75 bp, synthetic construct
  source 1..75: mol_type = other DNA
gtttttttgctgccttcgattaccgggagtgacggcgatatggaagggatccctgtcgcactgatggaggcaatg

SEQ ID NO: 656770 - DNA, 75 bp, synthetic construct
  source 1..75: mol_type = other DNA
ctggtggcggagaacgacgctccggcgctggcgggcaaactcagcgaactgcgccatcttgatgagccgacgctg

SEQ ID NO: 656771 - DNA, 75 bp, synthetic construct
  source 1..75: mol_type = other DNA
aattcccgctgtcttccgaaacgttcgtgctcaaccagattgtggcctttatcgaaatgggccacgaggtcgaaa

SEQ ID NO: 656772 - DNA, 75 bp, synthetic construct
  source 1..75: mol_type = other DNA
tgaactgcacccgagcgattatccgttgttacgttcggaattccagaaagacaatcgtgcgcgcgttgaaaaagc

SEQ ID NO: 656773 - DNA, 75 bp, synthetic construct
  source 1..75: mol_type = other DNA
gcagagctggaggcgtacatcaatgtggtaaaacacttcaaccgtagcggtcagttgcgttactaccccggttcg

SEQ ID NO: 656774 - DNA, 75 bp, synthetic construct
  source 1..75: mol_type = other DNA
acgctggcaaccacgccgacgtctttaaacataccgttcagagcctgatcattgagtcgctgaaagagaaagata

SEQ ID NO: 656775 - DNA, 75 bp, synthetic construct
  source 1..75: mol_type = other DNA
tttgtgggctgttcatttaccctggacagtcagtgcggcaggttgtggctgtctatgcccccggcgacagggact

SEQ ID NO: 656776 - DNA, 75 bp, synthetic construct
  source 1..75: mol_type = other DNA
aatgtgaaacgcactattgagacattagccaaaggtggcgttgtccggtttcctcaaattgaggttttcgaaaaa

SEQ ID NO: 656777 - DNA, 75 bp, synthetic construct
  source 1..75: mol_type = other DNA
ccaccgatacgcatgagtttttaactccagatggtttgcttgcgcgacgctccattgtggccctggcccccttcc

SEQ ID NO: 656778 - DNA, 75 bp, synthetic construct
  source 1..75: mol_type = other DNA
gaaagcactggcgcaccatccgtgacgggaaaatccatgctattgatttagctccagaggatgttattgctatgg

SEQ ID NO: 656779 - DNA, 75 bp, synthetic construct
  source 1..75: mol_type = other DNA
atgaatctgtccatctctcaaaaagcgacaatgaccagcattgagatcgcggaactggtaggaagtcgccaagat

SEQ ID NO: 656780 - DNA, 75 bp, synthetic construct
  source 1..75: mol_type = other DNA
atcctttaccggaaatcccaaaagataatctgtcactgcataccgccagagagaagatcagaagtggatatgcaa

SEQ ID NO: 656781 - DNA, 75 bp, synthetic construct
  source 1..75: mol_type = other DNA
ggctacattggctaccgccagctggcggcgaaatgtggcctgactgaagccaaatgtcgcaacctggttaacgct

SEQ ID NO: 656782 - DNA, 75 bp, synthetic construct
  source 1..75: mol_type = other DNA
agggagctggcgggtaatcttgctcagtccggtgttgacccgtccagtggtcgctttaacgcggtaatgaatgcg

SEQ ID NO: 656783 - DNA, 75 bp, synthetic construct
  source 1..75: mol_type = other DNA
tggaaagggtggcaggattacaaaaatattctccgtccggcagaagataacttcatggaaaaggtcgatgacctt

SEQ ID NO: 656784 - DNA, 75 bp, synthetic construct
  source 1..75: mol_type = other DNA
gttacagagttttaactctctggcagacagcagtctggcaaaagctaaatcggatgcacaggcggcgtttacgaa

SEQ ID NO: 656785 - DNA, 75 bp, synthetic construct
  source 1..75: mol_type = other DNA
atccctcgcccgcaacccatgcctgacccaccccccgatgaagaaccgattaaattgtcgcatcgtgagcgtaga

SEQ ID NO: 656786 - DNA, 75 bp, synthetic construct
  source 1..75: mol_type = other DNA
cttcatggaaaaggtcgatgaccttaacagtgagcagcagtacgacaatatcgctggcacaacaaatcttggtta

SEQ ID NO: 656787 - DNA, 75 bp, synthetic construct
  source 1..75: mol_type = other DNA
ggtatcgcaggcagataagtatgttgccgggctacaggatgttgcagctctcggttcaggtcagaaggcggatgc

SEQ ID NO: 656788 - DNA, 75 bp, synthetic construct
  source 1..75: mol_type = other DNA
aactcaaaatgagttcgtcgaaagaatcaataacttagggaaggttgtcaaagatccggtctatgtcttcgaagg

SEQ ID NO: 656789 - DNA, 75 bp, synthetic construct
  source 1..75: mol_type = other DNA
ccaccggcgcgcggtcttttcccggcgcgggcagacgggcatttatcctcccgcctgcccggcgtcatcaggcac

SEQ ID NO: 656790 - DNA, 75 bp, synthetic construct
  source 1..75: mol_type = other DNA
cgcgtgcgcgaaacggcgttgccccttacatcccggcggccttttgccggaatgccaggagcgcaggccacggcg

SEQ ID NO: 656791 - DNA, 75 bp, synthetic construct
  source 1..75: mol_type = other DNA
taagcaggagaacaacaaaacagacaataatcagggcagcagtaatcagagtcagagcaggaggaaaaagagaat

SEQ ID NO: 656792 - DNA, 75 bp, synthetic construct
  source 1..75: mol_type = other DNA
gcgctgtggttaaagttccgctgttcgtacagattggcgaagttatcaaagtggatacccgctctggtgaatacg

SEQ ID NO: 656793 - DNA, 75 bp, synthetic construct
  source 1..75: mol_type = other DNA
gcgctgtggttaaagttccgctgtttgtacaaatcggcgaagtcatcaaagtggataccgctctggtgaatacgt

SEQ ID NO: 656794 - DNA, 75 bp, synthetic construct
  source 1..75: mol_type = other DNA
ggtgaaagatatgcaaatttccagtgtgtatttgcaggctttcgccgacccaacaggtgatggtctggttaaaga

SEQ ID NO: 656795 - DNA, 75 bp, synthetic construct
  source 1..75: mol_type = other DNA
tgtctggatagctgcccggtcggcatcgtcagcaatgcaacatacacttatggtgcggttgaaaaacgaggtgaa

SEQ ID NO: 656796 - DNA, 75 bp, synthetic construct
  source 1..75: mol_type = other DNA
aaggcataagcaggagaacaacaaaacagacagtaatcagagcagcagaaaaaagaagaacagtagcagtagcag

SEQ ID NO: 656797 - DNA, 75 bp, synthetic construct
  source 1..75: mol_type = other DNA
ttcaggccattcaccaccctgtgcctgatagcccaaaggcaaacctgtcgttgcataccgccagagagaagatta

SEQ ID NO: 656798 - DNA, 75 bp, synthetic construct
  source 1..75: mol_type = other DNA
cagcctgccaagggttttcgcgcgggctgacaggcggcctccaccgcctgccctgtatcacctgtttctgctgcc

SEQ ID NO: 656799 - DNA, 75 bp, synthetic construct
  source 1..75: mol_type = other DNA
aggagcgcaggccacggcgcgacagaggcggtgcgaccggaacggtcgctgcaagccagggtttcgcgtcaggga

SEQ ID NO: 656800 - DNA, 75 bp, synthetic construct
  source 1..75: mol_type = other DNA
tctcccggcagataacacgctggcaacgattacctttaaaattgccgaataaaaccaggataaaggatgatgaaa

SEQ ID NO: 656801 - DNA, 75 bp, synthetic construct
  source 1..75: mol_type = other DNA
atggccaaagaagacaatattgaaatgcaaggtaccgtactggaaacgttacctaacaccatgttccgcgtagag

SEQ ID NO: 656802 - DNA, 75 bp, synthetic construct
  source 1..75: mol_type = other DNA
cgaaacagccacgaaataagataagcagacaaaggctatctctggaggaatgggaggctatttatacatccgccg

SEQ ID NO: 656803 - DNA, 75 bp, synthetic construct
  source 1..75: mol_type = other DNA
cttcaacgttcaagaaagcacgggataaaagcggtcttacctgggaagaaggaacagcaccgactttccatgaac

SEQ ID NO: 656804 - DNA, 75 bp, synthetic construct
  source 1..75: mol_type = other DNA
attgctactgaggcaaacgcaagacttgctgagcagcgttcaagacaggtactggctataagcgatcgaattgct

SEQ ID NO: 656805 - DNA, 75 bp, synthetic construct
  source 1..75: mol_type = other DNA
atatgatccacttctttcgggcaacgtcgcaggcggagcgcggtgcgcaggtgaagtccaacaccattacgatga

SEQ ID NO: 656806 - DNA, 75 bp, synthetic construct
  source 1..75: mol_type = other DNA
ggtggaggccgataaatccggttggctggtgcctgagaacgatgcctgtgcactggcgcaacgactggcggcgtt

SEQ ID NO: 656807 - DNA, 75 bp, synthetic construct
  source 1..75: mol_type = other DNA
tcacctgccacattccatgaacaaaggtctttatctgaacgtctgtacaaagaacaggggttagatacacaaaaa

SEQ ID NO: 656808 - DNA, 75 bp, synthetic construct
  source 1..75: mol_type = other DNA
aattcagcgatatttgggatgaccatctacatgtcgaacaggaaaagactggaagcaaaatcgcaattcctcttt

SEQ ID NO: 656809 - DNA, 75 bp, synthetic construct
  source 1..75: mol_type = other DNA
aaaatcttcgatatcgcagatgccagtcatcgttacatgggaaatgccatgctcctagcattggtcactggacag

SEQ ID NO: 656810 - DNA, 75 bp, synthetic construct
  source 1..75: mol_type = other DNA
ttcacaggctgaacgtggaacacaggttaaatctaacacattgacgatgaatttcagtaaagcgagggacttagc

SEQ ID NO: 656811 - DNA, 75 bp, synthetic construct
  source 1..75: mol_type = other DNA
tctccatgttattcaggaaaagaccgggagcaaaatcgcaatcccgctttcccttcgtctcaacgcgattagctg

SEQ ID NO: 656812 - DNA, 75 bp, synthetic construct
  source 1..75: mol_type = other DNA
aatttagcgatatttgggatgatcatctccatgtcatccaggaaaaaaccgggagcaaaatcgccatcccgcttt

SEQ ID NO: 656813 - DNA, 75 bp, synthetic construct
  source 1..75: mol_type = other DNA
gctttgtcgtttgtgccaactgcgggagggaaaacgacgtcacatctctgctcatcgttgctaaatcgaaaggga

SEQ ID NO: 656814 - DNA, 75 bp, synthetic construct
  source 1..75: mol_type = other DNA
tcgcggaacctgattttgtctgccatttgcggccaggtcgcaacaccattttatgccgatgtctttatcgctcat

SEQ ID NO: 656815 - DNA, 75 bp, synthetic construct
  source 1..75: mol_type = other DNA
tttggcccggcgggggtaaccgcagcaaaactacgcgaactgggtgtcattcgcggcaaaattgccactattttc

SEQ ID NO: 656816 - DNA, 75 bp, synthetic construct
  source 1..75: mol_type = other DNA
atttccgtcgcacgcttaaccgagaaaaaaggtctgcatgtggcgattgaagcctgccggcagttgaaagagcag

SEQ ID NO: 656817 - DNA, 75 bp, synthetic construct
  source 1..75: mol_type = other DNA
gcgcggatggcgatatggaagggatacccgtggcattgatggaagcgatggcggtcggcattccggtcgtttcta

SEQ ID NO: 656818 - DNA, 75 bp, synthetic construct
  source 1..75: mol_type = other DNA
tgcaggacgagaccatagcgcatggcctttatgtgacgcgctacggcaccggcgtcgcccggcgcatggtcgcgt

SEQ ID NO: 656819 - DNA, 75 bp, synthetic construct
  source 1..75: mol_type = other DNA
cactatcttccacggtattgatatctccagtcgggaggtgctcaaccattacactcccgaatatcagcaactgtt

SEQ ID NO: 656820 - DNA, 75 bp, synthetic construct
  source 1..75: mol_type = other DNA
aacctgaaattgccatcgttgatggtcaggctgttacttcatccctggctgttgccaacttcttctctaaacgtc

SEQ ID NO: 656821 - DNA, 75 bp, synthetic construct
  source 1..75: mol_type = other DNA
cgcaacgaactctggaaccttaaccgatccagaaaaggcctttgtttctaacctccctggaggcattggcaccat

SEQ ID NO: 656822 - DNA, 75 bp, synthetic construct
  source 1..75: mol_type = other DNA
atggggcgaaactgccacctgttcgaaatgacgcgcaaatgggcttacagggcgattcgtcagggctggccagcg

SEQ ID NO: 656823 - DNA, 75 bp, synthetic construct
  source 1..75: mol_type = other DNA
ctctgcatagcggaattccggaactggtggaggctgacaaatccggctggctggtgcctgagaacgatgctcgcg

SEQ ID NO: 656824 - DNA, 75 bp, synthetic construct
  source 1..75: mol_type = other DNA
gtgcccgcaattttgcggagacatcgatttcggtaaatcaaccgaacggtggtacacgcaagctcctttgctatc

SEQ ID NO: 656825 - DNA, 75 bp, synthetic construct
  source 1..75: mol_type = other DNA
ctgatgatgcttcagcttgggttaagtctacgcacaatgcggtactacgagagctgcattgaagcattccaggag

SEQ ID NO: 656826 - DNA, 75 bp, synthetic construct
  source 1..75: mol_type = other DNA
agcgatccaggatgaccgactgaaaagtggtgatataagactcaacacttataagcagaaagccaaaccagtatc

SEQ ID NO: 656827 - DNA, 75 bp, synthetic construct
  source 1..75: mol_type = other DNA
tggcgctttccggcgagcgttacggcgactatccgcacatcattccgtgcatcggtttcaccatggggattaacg

SEQ ID NO: 656828 - DNA, 75 bp, synthetic construct
  source 1..75: mol_type = other DNA
tcgctgctgacccgcgagccaaagatcaacttcttcaagccgatgatcgacaaccacaagcaggagtacgaaggg

SEQ ID NO: 656829 - DNA, 75 bp, synthetic construct
  source 1..75: mol_type = other DNA
aagcctggctacattttggcaaatacgatcgctatgacgacaaatacacctatccggcaatgatgaacggttaca

SEQ ID NO: 656830 - DNA, 75 bp, synthetic construct
  source 1..75: mol_type = other DNA
ccggtaaaaatccacgcgctggatctgactcgcggcgagttgaaagtcgaaaataaactgtggtttaccacgctt

SEQ ID NO: 656831 - DNA, 75 bp, synthetic construct
  source 1..75: mol_type = other DNA
acttcagtgcctggcactacacccaggaaaacatccacgctgcccagcactgtaacgagttgcagcgcagtgatg

SEQ ID NO: 656832 - DNA, 75 bp, synthetic construct
  source 1..75: mol_type = other DNA
gaagggctgtggcagccgaatcatttgcagatcatgcaggaacatctgcgcgactttgccgtagaacagagcgat

SEQ ID NO: 656833 - DNA, 75 bp, synthetic construct
  source 1..75: mol_type = other DNA
aaatgcatttacctgctactttttagtaaaaattttactaaactccccagcaattacacaaactaccatcaccat

SEQ ID NO: 656834 - DNA, 75 bp, synthetic construct
  source 1..75: mol_type = other DNA
catcgtagacgcgcagtacaaagcgaaaactctgactcgcctcgcgcaggagtatgaaatcccgctggcgcagac

SEQ ID NO: 656835 - DNA, 75 bp, synthetic construct
  source 1..75: mol_type = other DNA
gcgattgcctccggcgggtttaccttctttgccgaatatctgcgcgacaagctgcgattaaccgccgtggtagcc

SEQ ID NO: 656836 - DNA, 75 bp, synthetic construct
  source 1..75: mol_type = other DNA
ccccgatctgggctacgtcattcccaatacccgcgacattatgactgcgctgaaggtacagaacttaagcggcaa

SEQ ID NO: 656837 - DNA, 75 bp, synthetic construct
  source 1..75: mol_type = other DNA
caggtgaatggcgaatcgctgctgactcgcgagccaaagatcaacttcttcaagccgatgatcgacaaccacaag

SEQ ID NO: 656838 - DNA, 75 bp, synthetic construct
  source 1..75: mol_type = other DNA
gaagatcgcgatgctgaagtggtcgatattatttccaccatgtacacccgcgtgccgctgatgaatgagtttggt

SEQ ID NO: 656839 - DNA, 75 bp, synthetic construct
  source 1..75: mol_type = other DNA
gttggagccgaggccaagcagctggtggtcgagattcagggtgatgtcatcactgcgctgaagctcgttacagtg

SEQ ID NO: 656840 - DNA, 75 bp, synthetic construct
  source 1..75: mol_type = other DNA
cacaaacgaagctgaagccattgctattgccactgaggccaatacacgcctggctgagcaaagaacccggcagat

SEQ ID NO: 656841 - DNA, 75 bp, synthetic construct
  source 1..75: mol_type = other DNA
gttaagccagcaacattaaccgttgcatttaaaaaagcccgggattctgtggattacaactggcgtgctaatggc

SEQ ID NO: 656842 - DNA, 75 bp, synthetic construct
  source 1..75: mol_type = other DNA
attaccaaacggtaatggcatacaaagtttctgaggtcatcgctgcaatccgcgccgctggcattcgcatcaaag

SEQ ID NO: 656843 - DNA, 75 bp, synthetic construct
  source 1..75: mol_type = other DNA
cttggtcataaaacgcaacaacaaaccgatcgttatcatgacgatcgcggcaaaggatggagcaaagttgcgttg

SEQ ID NO: 656844 - DNA, 75 bp, synthetic construct
  source 1..75: mol_type = other DNA
ctttatctgaacgtctgtacaaagaacaggggttagacacacaaaaactacttggtcataaaacgcaacaacaaa

SEQ ID NO: 656845 - DNA, 75 bp, synthetic construct
  source 1..75: mol_type = other DNA
gctgttagcactggttaccggccagcggttaggtgatatctcacgtatgaaatttagcgatatttgggatgatca

SEQ ID NO: 656846 - DNA, 75 bp, synthetic construct
  source 1..75: mol_type = other DNA
gggctacggcacagaagctggcggcagatgacgacgtcgatatgctggtgattttaaccgcctgttattttcacg

SEQ ID NO: 656847 - DNA, 75 bp, synthetic construct
  source 1..75: mol_type = other DNA
cgattggtctggcgcgagtgtttgcggtctcaggctcgctgggtgtggcgctgtttgacggtgaagacccgttcg

SEQ ID NO: 656848 - DNA, 75 bp, synthetic construct
  source 1..75: mol_type = other DNA
ctggcggcagaagagacgcgtcgcctgctccgtgaagagttcgtgcaatttccggcggagaaaattgaggccgtt

SEQ ID NO: 656849 - DNA, 75 bp, synthetic construct
  source 1..75: mol_type = other DNA
gattaccaaacggtaatggcatacaaagtttctgaggtcatcgctgcaatccgcgccgctggcattcgcatcaaa

SEQ ID NO: 656850 - DNA, 75 bp, synthetic construct
  source 1..75: mol_type = other DNA
aagaatggtgaattctctttaagtctacttagcttcaagttggttcatataaaaagaacacaagagaataagaga

SEQ ID NO: 656851 - DNA, 75 bp, synthetic construct
  source 1..75: mol_type = other DNA
cgtggcgacgctgctgctgggactgcttgcaggatttttcaacggtgtgctggttacttggctgaagatcccggc

SEQ ID NO: 656852 - DNA, 75 bp, synthetic construct
  source 1..75: mol_type = other DNA
tgttgatgttcttgctgccaccagtacagatacgtcctggcgctttaaggaaacgaagaaatccggtctgacggg

SEQ ID NO: 656853 - DNA, 75 bp, synthetic construct
  source 1..75: mol_type = other DNA
gctattgcccgtgccaaagcacgcaagctggaacagcaacaggctaatgccgaaccagaacaacaggtcgatccg

SEQ ID NO: 656854 - DNA, 75 bp, synthetic construct
  source 1..75: mol_type = other DNA
atgcggagccagaagaacaggttgacccgcgcaaagccaccgtcgaagccgcgattgcccgtgccaaagcacgca

SEQ ID NO: 656855 - DNA, 75 bp, synthetic construct
  source 1..75: mol_type = other DNA
ggttgatccgcgcaaagctgccgtcgaagcggctattgcacgcgccaaagcacgcaagctggaacagcaacaggc

SEQ ID NO: 656856 - DNA, 75 bp, synthetic construct
  source 1..75: mol_type = other DNA
attggcgcagaaggcgagttgtgcgtcagcgttggcgataaagtgctgcgcggtcagcctctgactcgtggtcgc

SEQ ID NO: 656857 - DNA, 75 bp, synthetic construct
  source 1..75: mol_type = other DNA
aagctgccgtcgaagcggctattgcacgcgccaaagcacgcaagctggaacagcaacaggctaatgcggtaccag

SEQ ID NO: 656858 - DNA, 75 bp, synthetic construct
  source 1..75: mol_type = other DNA
gaagcggctattgcccgtgccaaagcacgcaagctggaacagcaacaggctaatgcggagccagaagaacagatt

SEQ ID NO: 656859 - DNA, 75 bp, synthetic construct
  source 1..75: mol_type = other DNA
tgaccagatggatgtgatggatatcctgaacgacgatatgagcatcaagccggtttcagaatggcccaaggtctg

SEQ ID NO: 656860 - DNA, 75 bp, synthetic construct
  source 1..75: mol_type = other DNA
gataaaggcgattatcaattgctggtgatggatgacgtggggcaaatagcgacagtgaaatttgtcatgcaatag

SEQ ID NO: 656861 - DNA, 75 bp, synthetic construct
  source 1..75: mol_type = other DNA
taaactctggcctctgccattgcaagaagtgaatcctgcacgcgtggtggtggcgcaggatggtacgccgctctg

SEQ ID NO: 656862 - DNA, 75 bp, synthetic construct
  source 1..75: mol_type = other DNA
accagcagctgcttcggcgacaccgctcaccagtggctgttcctgtatcaactggaacaactgctcgccgaacgt

SEQ ID NO: 656863 - DNA, 75 bp, synthetic construct
  source 1..75: mol_type = other DNA
tccccaagcgattaaataacactgctgagcatcatgcaaaaaatagggaggggttattaaatgcagccatatata

SEQ ID NO: 656864 - DNA, 75 bp, synthetic construct
  source 1..75: mol_type = other DNA
gcgcaccacactgagtggtttcgacctgtcctctaccatcatgaacatggatgagacatcaatcgagaccatcct

SEQ ID NO: 656865 - DNA, 75 bp, synthetic construct
  source 1..75: mol_type = other DNA
gaaccgtatattaccgccgatgaccgtctgatgcaggattgcgcagctcaggtagtggaaggcattcgcattctt

SEQ ID NO: 656866 - DNA, 75 bp, synthetic construct
  source 1..75: mol_type = other DNA
gaaagatattgctgtcgtttttccgcccgaagttgtacacaccacgttaagtcatcgcagctttccggagttcct

SEQ ID NO: 656867 - DNA, 75 bp, synthetic construct
  source 1..75: mol_type = other DNA
tggtggtcatgtcgaacggggatgatggcgaaaaaaccattcatctgggagagaattacggcaataaaacctggc

SEQ ID NO: 656868 - DNA, 75 bp, synthetic construct
  source 1..75: mol_type = other DNA
gcaggattctccccaaatacagcggcagttaaagccagtgtcatgatgcgcgatgaacgcattcaaaaacggatt

SEQ ID NO: 656869 - DNA, 75 bp, synthetic construct
  source 1..75: mol_type = other DNA
gcggaactcaagctgattgcggagaaaacgaaaaaggggtatgtggaacaagcggagaatgctacatcgaaacat

SEQ ID NO: 656870 - DNA, 75 bp, synthetic construct
  source 1..75: mol_type = other DNA
acaccgccaaactgtatgccagcggcaccaaacgcattgcgcagaaagtgggcgaagaaggcgtggaaaccgcac

SEQ ID NO: 656871 - DNA, 75 bp, synthetic construct
  source 1..75: mol_type = other DNA
ttcagatgctgcggcagcggcaaaagcggagcttaagctgattgcggagaaggtgaagaaggggtatgtggagca

SEQ ID NO: 656872 - DNA, 75 bp, synthetic construct
  source 1..75: mol_type = other DNA
gcccgcgccaaagcgcgcaagctggaacagcaacaggctaatgcggaaccagaagaacaggtcgatccgcgcaaa

SEQ ID NO: 656873 - DNA, 75 bp, synthetic construct
  source 1..75: mol_type = other DNA
gaacgacataagagcgcagcagtccaaccggcagccaaagacaaagatgcgattgctgccgcactggcacgtgtg

SEQ ID NO: 656874 - DNA, 75 bp, synthetic construct
  source 1..75: mol_type = other DNA
ggtgaagcgattacgcgtccaggcaatgtctgggcacgactaggaaccccggtaaaacacctgcttactgatgct

SEQ ID NO: 656875 - DNA, 75 bp, synthetic construct
  source 1..75: mol_type = other DNA
ctaacagcaatgcaggaggcttattgccagtcatacatcaaaacgcctgaaaaccagactcaggcagcgattaac

SEQ ID NO: 656876 - DNA, 75 bp, synthetic construct
  source 1..75: mol_type = other DNA
ctgccgccaactatggcggctttattttgcatggtactattaccacaacggtaactattaccacggtggttatga

SEQ ID NO: 656877 - DNA, 75 bp, synthetic construct
  source 1..75: mol_type = other DNA
cgccaaagcacgcaagctggagcagcagcagacaaacgcagaaccagaagaacaggttgacccgcgcaaagccgc

SEQ ID NO: 656878 - DNA, 75 bp, synthetic construct
  source 1..75: mol_type = other DNA
gccattatcaagcgtttacctggtgcggcggaagcgactttgccggtgcaatccagcggtggtgccggagaacgc

SEQ ID NO: 656879 - DNA, 75 bp, synthetic construct
  source 1..75: mol_type = other DNA
tgatcctgaaaaaggcacacacatcaatatatgggattactcacagggtaaaggccctggaaaagcggtgaagca

SEQ ID NO: 656880 - DNA, 75 bp, synthetic construct
  source 1..75: mol_type = other DNA
ggagcgtttgctgcacaactgggtggaaacaatgcggcgtccggtgctgcgggggcattcagtggtgaacttgct

SEQ ID NO: 656881 - DNA, 75 bp, synthetic construct
  source 1..75: mol_type = other DNA
ccgatatttgacagggagaaagagcagaagcgtctgcaggaagcgcaggttatcagccagattagcggtcagatg

SEQ ID NO: 656882 - DNA, 75 bp, synthetic construct
  source 1..75: mol_type = other DNA
cggcggcattgccagtggcgatgtggctggcgcggctgctggagctggtgccgggaagaacgttgttgagaataa

SEQ ID NO: 656883 - DNA, 75 bp, synthetic construct
  source 1..75: mol_type = other DNA
aaaaggaacaggaaaagtatggtaccggcagcgatatgcagcgcggtatccaggctgcaacggctgcacttcagg

SEQ ID NO: 656884 - DNA, 75 bp, synthetic construct
  source 1..75: mol_type = other DNA
acccgggaatagctggcggttttataggttctggtgcttcagagttgggtagttctgttgttcaagaaaaaacaa

SEQ ID NO: 656885 - DNA, 75 bp, synthetic construct
  source 1..75: mol_type = other DNA
ggtgcacccggaatggtgttttagtacatgcgaaaagcgaattgctaattggttggctgttgctgaatatgcgct

SEQ ID NO: 656886 - DNA, 75 bp, synthetic construct
  source 1..75: mol_type = other DNA
gcctggtttgcacagaattatgctgatttcctaaaaagctatgactggaccgctattatggctatgccttatatg

SEQ ID NO: 656887 - DNA, 75 bp, synthetic construct
  source 1..75: mol_type = other DNA
ggtctggtttccaaatcgtttgctaccaatgaaagcagatattttagtcgggttgcctggcaattacgtacccgc

SEQ ID NO: 656888 - DNA, 75 bp, synthetic construct
  source 1..75: mol_type = other DNA
ttgttaccagtactgaatttgccagtcagctacaaaatcgttacggtatagataagcaacaggctgaaatccttg

SEQ ID NO: 656889 - DNA, 75 bp, synthetic construct
  source 1..75: mol_type = other DNA
agacctgacgctggatataccggacatccgcaacagcgggcttatcaccggtgataatggtttaatgttaaacac

SEQ ID NO: 656890 - DNA, 75 bp, synthetic construct
  source 1..75: mol_type = other DNA
tatcgataaatggaagaaaatcagtgatgaacagagtgcagaaatcgatcagaagctgaaagacaatccgctgga

SEQ ID NO: 656891 - DNA, 75 bp, synthetic construct
  source 1..75: mol_type = other DNA
aaaaattgacgaaaacagccatcaatgaagccctgcgcagaatgaaaaaagcgggaatagagaaagctgagctgg

SEQ ID NO: 656892 - DNA, 75 bp, synthetic construct
  source 1..75: mol_type = other DNA
gcctgttgttggtcagtttggctttgccagcgccgtaccgctgttgaatcaggtcaataatatcttactgtcgcg

SEQ ID NO: 656893 - DNA, 75 bp, synthetic construct
  source 1..75: mol_type = other DNA
tcaccccaaaacgtttggcggcaaaattcgtcagctctggcgcgcgttgcaactggaatggcatctgtctaaacg

SEQ ID NO: 656894 - DNA, 75 bp, synthetic construct
  source 1..75: mol_type = other DNA
tgtatcttaaccgtgccccgtttggcggtacgttgcaggggattggtgcggcaagttgggcttacctcgggaaat

SEQ ID NO: 656895 - DNA, 75 bp, synthetic construct
  source 1..75: mol_type = other DNA
aggttaataatattttgttgtcgcgcagtgcaaatctgccggaagatccgcgcccgaactcagtcactcgtggcg

SEQ ID NO: 656896 - DNA, 75 bp, synthetic construct
  source 1..75: mol_type = other DNA
atccggcatcgctgttgcaagacgtcccacgacgcaccggtgattaccggcctggaaactttgacagcggttttc

SEQ ID NO: 656897 - DNA, 75 bp, synthetic construct
  source 1..75: mol_type = other DNA
tactgccggagcaggaaggcattaatggcattcgtttccccatctggctggatgaaaacggcaaacgtgttgccg

SEQ ID NO: 656898 - DNA, 75 bp, synthetic construct
  source 1..75: mol_type = other DNA
ctgcttgatcctcaccccaaaacatttggcggcaaaattcgccagctctggcgcgcgttgcaactggaatggcat

SEQ ID NO: 656899 - DNA, 75 bp, synthetic construct
  source 1..75: mol_type = other DNA
cagaaagagaacatggcgctggtgttaattacccatgacctggcgctggtggcggaagctgcacataaaatcatc

SEQ ID NO: 656900 - DNA, 75 bp, synthetic construct
  source 1..75: mol_type = other DNA
tatcggtgcatttcggcgacgaaagcgcaccgttccgcgccgtagaccgtatcagctacagcgtgaaacaaggcg

SEQ ID NO: 656901 - DNA, 75 bp, synthetic construct
  source 1..75: mol_type = other DNA
tttgcgtttgacagaaaaaggtgattatcaattactggtgatggatgaggtgggccaggtggcgacggtgagatt

SEQ ID NO: 656902 - DNA, 75 bp, synthetic construct
  source 1..75: mol_type = other DNA
ggaacgccgcgccgcacgcctgcctgcggcatcgacaacctgcccgccgcatgggcgtgacgcctggttaccgtt

SEQ ID NO: 656903 - DNA, 75 bp, synthetic construct
  source 1..75: mol_type = other DNA
ccaggtaactttgatagcggttttcatggcccgatcagcatgagcgaggcgctggtgcgctcgctgaacttacct

SEQ ID NO: 656904 - DNA, 75 bp, synthetic construct
  source 1..75: mol_type = other DNA
gtgacggtgcctgcccgggaagtgatccacgaccggtttaactgtttttttcatccgcttgtggggctgccgccg

SEQ ID NO: 656905 - DNA, 75 bp, synthetic construct
  source 1..75: mol_type = other DNA
aatgtgcggtgtggtttgtaggcatgataagacgcgccagcgtcgcatcaggcattgtgtacagagcggcggatg

SEQ ID NO: 656906 - DNA, 75 bp, synthetic construct
  source 1..75: mol_type = other DNA
agtggcctgcattatcgccgttatcctttctttgctgccttgcgtgaacgcgcaggtccggtaacctgggtgatg

SEQ ID NO: 656907 - DNA, 75 bp, synthetic construct
  source 1..75: mol_type = other DNA
tatcgctcaactgttcccccctgtcgcattgttgatattgggaattgcactcaaccgtttgtggtctaactttca

SEQ ID NO: 656908 - DNA, 75 bp, synthetic construct
  source 1..75: mol_type = other DNA
aacgacgagctgactcataaacaacaggcattgggcgatatgttcggcggtggcgatgttgatctgcgtcgtatt

SEQ ID NO: 656909 - DNA, 75 bp, synthetic construct
  source 1..75: mol_type = other DNA
tcgcccaaagggggttattcggtgacagtacaccggaagctgaggcattggcgctattcatcgtagcaaataatc

SEQ ID NO: 656910 - DNA, 75 bp, synthetic construct
  source 1..75: mol_type = other DNA
tcggttggcgaagtcgctgatacgctcaacttcttcgactcctttcatttcagcaaagcctttaaacataaattt

SEQ ID NO: 656911 - DNA, 75 bp, synthetic construct
  source 1..75: mol_type = other DNA
cagcaaagcgttatttataatggcgaaatttataatcaggaactcaccgaagttgctgagttaataacttcacca

SEQ ID NO: 656912 - DNA, 75 bp, synthetic construct
  source 1..75: mol_type = other DNA
caaaaccatcgaaagcggcaaagtcaccttcttctcgcgcactaaacagcgactgtggaccaaaggcgaaacgtc

SEQ ID NO: 656913 - DNA, 75 bp, synthetic construct
  source 1..75: mol_type = other DNA
tttttttcatccgcttgtggggctgccgccggtgtatgctgccgggctggcggccacgcaggggcatcatattca

SEQ ID NO: 656914 - DNA, 75 bp, synthetic construct
  source 1..75: mol_type = other DNA
caccacgctgctgagaatggacagcgaacgtcgcatgaaaacgctgggtgaatcggtgaaaaatacgcttctcac

SEQ ID NO: 656915 - DNA, 75 bp, synthetic construct
  source 1..75: mol_type = other DNA
cgggttgaacctctggtggcggatgacggcgaggtgttctatcgcattacaccggaccggaactgcgggatcacg

SEQ ID NO: 656916 - DNA, 75 bp, synthetic construct
  source 1..75: mol_type = other DNA
ttctgccctatctatttgccatgctagcagatggaatgtaccagtggaaattgaagaggtacgtatttggtaagg

SEQ ID NO: 656917 - DNA, 75 bp, synthetic construct
  source 1..75: mol_type = other DNA
attaatgagaatagtattcagcgattcatttacagagaagacgattttacgacatattataacaattatttagag

SEQ ID NO: 656918 - DNA, 75 bp, synthetic construct
  source 1..75: mol_type = other DNA
cgaccatcgcagatggtgtgatgaacttgatagcagttttccctactttgcggaagggaacacctgccctcaatg

SEQ ID NO: 656919 - DNA, 75 bp, synthetic construct
  source 1..75: mol_type = other DNA
atttgactacgatttctatcggtctggctacaatatctcctgttttatcagggagcttgatggcttctttactta

SEQ ID NO: 656920 - DNA, 75 bp, synthetic construct
  source 1..75: mol_type = other DNA
ggcagacgactacagcttccgcacgcgaggcgcggttgacgacctgctttactatcagattggcggcggcgaggc

SEQ ID NO: 656921 - DNA, 75 bp, synthetic construct
  source 1..75: mol_type = other DNA
gccttgatatggtgggtgaaccctgcccttatccggcagtcgcaactcttgaggcgatgccgcagttaaaaaagg

SEQ ID NO: 656922 - DNA, 75 bp, synthetic construct
  source 1..75: mol_type = other DNA
aattggattgcctgccctcaattatatattttcattttttatagggaatccctttccttattttctgcaaatgac

SEQ ID NO: 656923 - DNA, 75 bp, synthetic construct
  source 1..75: mol_type = other DNA
gaaagagatcgagaagaaagtacgtgagttgctgctgagcaacccgaactcaacgccggatttctctgtagatga

SEQ ID NO: 656924 - DNA, 75 bp, synthetic construct
  source 1..75: mol_type = other DNA
atgtgggatgccatacgccacgtaaaagtcggggccgtgtgatgtttgatgcaggggtagctatagagacaatag

SEQ ID NO: 656925 - DNA, 75 bp, synthetic construct
  source 1..75: mol_type = other DNA
tgagtaaccagagcaactataagcgtacgaaacattcagatatgcatttagcttccccagaaacaaacatttcgc

SEQ ID NO: 656926 - DNA, 75 bp, synthetic construct
  source 1..75: mol_type = other DNA
gatgcaattcgaacattttataaggaaaaaattgatccggcattcattgccctattccctcattatcgtacgaaa

SEQ ID NO: 656927 - DNA, 75 bp, synthetic construct
  source 1..75: mol_type = other DNA
cacggccgtggttaatccccaaaacccattcgattcaggatttcaacaataccgtaactaccttatccaccggtt

SEQ ID NO: 656928 - DNA, 75 bp, synthetic construct
  source 1..75: mol_type = other DNA
gacggcgcatctgacggtaataaggcaatcagtgaaacagagcatgatgcggtgaaagcgatgttcagggggata

SEQ ID NO: 656929 - DNA, 75 bp, synthetic construct
  source 1..75: mol_type = other DNA
ggtgtccgggttgctacagtcatggggactgaagcaaatatgaaagtaacacaacctattgatctttttatcgca

SEQ ID NO: 656930 - DNA, 75 bp, synthetic construct
  source 1..75: mol_type = other DNA
tgcggcggggccaaacaccacaagcatttaagttaggaacaataaaattggcatatcaacgtgcaattgctgaaa

SEQ ID NO: 656931 - DNA, 75 bp, synthetic construct
  source 1..75: mol_type = other DNA
aaaagcagagtcgctttattgcctggacttttatgaacgacgaacagcgccgtcgttttgtcaatcgccagcgtt

SEQ ID NO: 656932 - DNA, 75 bp, synthetic construct
  source 1..75: mol_type = other DNA
gataacaattctaatattttacttcatgatgcagtaagaccattaattaatgaatcaattattaataattgcatt

SEQ ID NO: 656933 - DNA, 75 bp, synthetic construct
  source 1..75: mol_type = other DNA
gttatgtggacctaatttggaaatttgtaaaaaaaaatcaatggaaaaaagttacaaaagtttttaatggtggaa

SEQ ID NO: 656934 - DNA, 75 bp, synthetic construct
  source 1..75: mol_type = other DNA
ggactgaagcaaatatgaaagtaacacaacctattgatctttttatcgcagaaaaattacttcaggaagcgggtg

SEQ ID NO: 656935 - DNA, 75 bp, synthetic construct
  source 1..75: mol_type = other DNA
atatcggcgttggtgcgaactgtatttatccgctgattggcgtacatgaatatggctggcgttttaccggtagtg

SEQ ID NO: 656936 - DNA, 75 bp, synthetic construct
  source 1..75: mol_type = other DNA
gcgtgaggatgttatggatcagatcattcaggaaggcggtctggaatatgctactgatgtaataatacaccttca

SEQ ID NO: 656937 - DNA, 75 bp, synthetic construct
  source 1..75: mol_type = other DNA
ttagtatggcaaaacaccgtcgcccaggcgatcagtcagatcgactgcctgaaaacaacacagttaccatcacca

SEQ ID NO: 656938 - DNA, 75 bp, synthetic construct
  source 1..75: mol_type = other DNA
gacctttatgaacgacgagcagcgccgccgttttgtcaatcgccagcagttaaagcgttggttcccccggcggta

SEQ ID NO: 656939 - DNA, 75 bp, synthetic construct
  source 1..75: mol_type = other DNA
gtcaatcctgaactcaggcaattcctcacgcttacacccgccggggagcaaagcgtagactttgccaatccgctg

SEQ ID NO: 656940 - DNA, 75 bp, synthetic construct
  source 1..75: mol_type = other DNA
gcggtgaaggcgctcaacaaggcgttgctggcacatttttatgccgtggcgaactgggatattcctgacggtttt

SEQ ID NO: 656941 - DNA, 75 bp, synthetic construct
  source 1..75: mol_type = other DNA
gattggcccaacctgccataaaggcacctcaagctgctttggtgacgccagccaccagtggctgttcctgtatca

SEQ ID NO: 656942 - DNA, 75 bp, synthetic construct
  source 1..75: mol_type = other DNA
atgtgctgatgaagagcctcgggatgacgctgggtaacgcactgcatttgtcacctgaagcgtcattgtcgctgg

SEQ ID NO: 656943 - DNA, 75 bp, synthetic construct
  source 1..75: mol_type = other DNA
gcgtatggtttgcgcgtattaccggactttccatgttcctcgcctacaccggtgcgttctttacgctttgctact

SEQ ID NO: 656944 - DNA, 75 bp, synthetic construct
  source 1..75: mol_type = other DNA
ttttgcttatggcggaattgaggctgtaggtgggctggtagataaaacggaaaacccagaaaagaactttgctaa

SEQ ID NO: 656945 - DNA, 75 bp, synthetic construct
  source 1..75: mol_type = other DNA
atgcttctaattgctggcgcttttcttatcggcttgtcagtttttacatctgctttaggttcggaagagactgat

SEQ ID NO: 656946 - DNA, 75 bp, synthetic construct
  source 1..75: mol_type = other DNA
cgagcacgttcgccgcgagcacaccgcgtggtctcaggccacctttggtaatgtcggcccgattggtccactgaa

SEQ ID NO: 656947 - DNA, 75 bp, synthetic construct
  source 1..75: mol_type = other DNA
aataatagtgtcggaccacgttttgccttcattggtacgtttatgtggttttcctcttatatcatctggatggtg

SEQ ID NO: 656948 - DNA, 75 bp, synthetic construct
  source 1..75: mol_type = other DNA
aactggactgggaaaaaaccgacggactgatgccggtgattgtacaacacgcggtatctggcgaagtgttaatgc

SEQ ID NO: 656949 - DNA, 75 bp, synthetic construct
  source 1..75: mol_type = other DNA
ggcgcaaagcctgctggcaacctacatcaagctgaacgtcgcgcgtcatcagcaaggtcagccgctgtctctgcc

SEQ ID NO: 656950 - DNA, 75 bp, synthetic construct
  source 1..75: mol_type = other DNA
tgaaatgggatgaagaacgcttcggcctggagtatgacctcgacatctatatgatcgtcgcggtggacttcttta

SEQ ID NO: 656951 - DNA, 75 bp, synthetic construct
  source 1..75: mol_type = other DNA
atgcgcaacgtcgtgccggtatcagtgataagcagattaccctggcgatggtagaaaagctggcggttaacaaaa

SEQ ID NO: 656952 - DNA, 75 bp, synthetic construct
  source 1..75: mol_type = other DNA
tggtgagtacctccgcgaaagtttgggtaccgttctcaacattcctctatggtagcgacatgacccagcactggc

SEQ ID NO: 656953 - DNA, 75 bp, synthetic construct
  source 1..75: mol_type = other DNA
ggcgcgttctttacgctctgttattcgccgttaaaagcgattatccaggggacgccgaaagcgttgtggccagag

SEQ ID NO: 656954 - DNA, 75 bp, synthetic construct
  source 1..75: mol_type = other DNA
gctgacggcgggcgacctctccctccggggtaaaacactgcataccgcagggaccacgcagggacagaatctcac

SEQ ID NO: 656955 - DNA, 75 bp, synthetic construct
  source 1..75: mol_type = other DNA
aggtaacacgataacggtgccttcgctgaactccctgacaccaccgacggtcagtcagggggggagcggtgaagc

SEQ ID NO: 656956 - DNA, 75 bp, synthetic construct
  source 1..75: mol_type = other DNA
acagaagccagtggcacctctccggcaggtcagtaccgtgcggttatcagcgctgccggtgatgtgtctgccagc

SEQ ID NO: 656957 - DNA, 75 bp, synthetic construct
  source 1..75: mol_type = other DNA
gctgaaaatgtcaccttgaccaccaccgatgataccacactgaaaggccgcagcgttgccgggaaaacactcacc

SEQ ID NO: 656958 - DNA, 75 bp, synthetic construct
  source 1..75: mol_type = other DNA
ttggcaataaagttgttggtaagccaagtggtggaattatttcgcctgaatctaaagtaattcaagaaagtagct

SEQ ID NO: 656959 - DNA, 75 bp, synthetic construct
  source 1..75: mol_type = other DNA
gaatccggcagtggcacagcttataaaacaggctaccggcgataaccgggaagcaaacctgatggctcacgcagt

SEQ ID NO: 656960 - DNA, 75 bp, synthetic construct
  source 1..75: mol_type = other DNA
gcgtgctgggcggactgaatgcagggaatccgggtcaggcactggcgggcggtctgaatccggcagtggcacagc

SEQ ID NO: 656961 - DNA, 75 bp, synthetic construct
  source 1..75: mol_type = other DNA
ctgagtgatgcacagttgcgggagaccccggaatacagagaggtcatgaaaggctacggtacgggcagtacgccg

SEQ ID NO: 656962 - DNA, 75 bp, synthetic construct
  source 1..75: mol_type = other DNA
gctcaggtcagtggtgagaaagtcacagcggatgtgggtaataacctgaccatttcgagccttcaggacagcgac

SEQ ID NO: 656963 - DNA, 75 bp, synthetic construct
  source 1..75: mol_type = other DNA
ggaacctccgggcttggcgtcaagggcagttcactgctgcaaaatggtacagggcggctgtacagtgcaggcaac

SEQ ID NO: 656964 - DNA, 75 bp, synthetic construct
  source 1..75: mol_type = other DNA
tgcgcagacgctgagctccggtaaaaaatcggtcacccacagcgatgctgcgatgacgctgaatgtgacaacagt

SEQ ID NO: 656965 - DNA, 75 bp, synthetic construct
  source 1..75: mol_type = other DNA
gatagccactgaaacagcagctaatacgtcagcagcaatagctggtgctacaggtaatgccagtaaggataccgg

SEQ ID NO: 656966 - DNA, 75 bp, synthetic construct
  source 1..75: mol_type = other DNA
tacagtgggcagacatacccaactggatggtgcggtgattgcctccactgccacaccggataaaaaccacctgga

SEQ ID NO: 656967 - DNA, 75 bp, synthetic construct
  source 1..75: mol_type = other DNA
agtggcgacacactgaacaatcagggctggcaggaggggaccaccggaaaggaaacggtctggcggcttgcctcc

SEQ ID NO: 656968 - DNA, 75 bp, synthetic construct
  source 1..75: mol_type = other DNA
ggcggcattagtttgctcggcggtttccggcgcgatcatcggtgcggtactcggcgcatggttcctgacgcagat

SEQ ID NO: 656969 - DNA, 75 bp, synthetic construct
  source 1..75: mol_type = other DNA
gggttgtacagaggcatcatgttgctgtggactggcggtaaatggattgaggggttacccgccgaactgaaacag

SEQ ID NO: 656970 - DNA, 75 bp, synthetic construct
  source 1..75: mol_type = other DNA
acaaagtctcggaagcactccaagaagaatacggtttggatgaagttcaggcgggaatagtcgcgagcgctgcgg

SEQ ID NO: 656971 - DNA, 75 bp, synthetic construct
  source 1..75: mol_type = other DNA
agcgctggtggcgtttcaaaagacctttaatttgcgcctcgaccaacgtagctacatcaccgaagaagacgcccg

SEQ ID NO: 656972 - DNA, 75 bp, synthetic construct
  source 1..75: mol_type = other DNA
catcagtaacctaacccggacagaacagtgggcgatgaacaacggatataaccatttcagcggaacggataccgg

SEQ ID NO: 656973 - DNA, 75 bp, synthetic construct
  source 1..75: mol_type = other DNA
ccagagacaccggtcaggctctgagagccgtgattcaggcaggcaaaaatgtcactgccgttttttccagtgata

SEQ ID NO: 656974 - DNA, 75 bp, synthetic construct
  source 1..75: mol_type = other DNA
cattaacaccgcactgttgtatgcgggcaataatctctcgctgtttgccagcaccatccggaaccatcacggcga

SEQ ID NO: 656975 - DNA, 75 bp, synthetic construct
  source 1..75: mol_type = other DNA
gcgatgaacaacggatataaccatttcagcggaacggataccggtccgctggctgctgtcagggcaacggactca

SEQ ID NO: 656976 - DNA, 75 bp, synthetic construct
  source 1..75: mol_type = other DNA
tgtcgcgactttactgcttggtttgctcgcgggatttttcaacggtgtcctggtcgcgtggctaaagatccctgc

SEQ ID NO: 656977 - DNA, 75 bp, synthetic construct
  source 1..75: mol_type = other DNA
attatcgccgatgtgggccacgacctgctgataagcagccagcaggacaccagtaagtacgacagtaaacagacc

SEQ ID NO: 656978 - DNA, 75 bp, synthetic construct
  source 1..75: mol_type = other DNA
atccgaaactggatggtctcggaaaggtggacagcagtctgtttgccggactgtatgacctgctcaggatgcacc

SEQ ID NO: 656979 - DNA, 75 bp, synthetic construct
  source 1..75: mol_type = other DNA
ttcagagggcagggagaaaggcaacggtaccacctggaccgaaaccacggtggatgcgggtaaaaatgtctccct

SEQ ID NO: 656980 - DNA, 75 bp, synthetic construct
  source 1..75: mol_type = other DNA
atgcatcagcctcctgttcgcttcacttaccgcctgctgagttaccttatcagtacaattatcgccgggcagccg

SEQ ID NO: 656981 - DNA, 75 bp, synthetic construct
  source 1..75: mol_type = other DNA
agcatgataatggataagttattggactcagctcagggggctacatctgcaaatagaaaaacatctgttgttgta

SEQ ID NO: 656982 - DNA, 75 bp, synthetic construct
  source 1..75: mol_type = other DNA
accgttttcgactcaattaaagcgactcaacctgcgataccaggaacatccattccaaaatcttttgaattacat

SEQ ID NO: 656983 - DNA, 75 bp, synthetic construct
  source 1..75: mol_type = other DNA
taactagaacgacttattggagtggtgacgtaggtgtagtcactgaaaataacagtaatattattgttactattc

SEQ ID NO: 656984 - DNA, 75 bp, synthetic construct
  source 1..75: mol_type = other DNA
cggtatgtccggcagcagtggacatgctgaaggtaccacgtcatccgccatcagcggcggaaatctcattatccg

SEQ ID NO: 656985 - DNA, 75 bp, synthetic construct
  source 1..75: mol_type = other DNA
aagacaacgcacgaccgccgcgaggccgggacaacgcagagtcagagtgccagtaccatcggctccactgccggt

SEQ ID NO: 656986 - DNA, 75 bp, synthetic construct
  source 1..75: mol_type = other DNA
agcggcgcttcaggggctggcggggggtaatttagcaggtgctctggccggagcttcagcaccggaactggcaca

SEQ ID NO: 656987 - DNA, 75 bp, synthetic construct
  source 1..75: mol_type = other DNA
tgccggagcaaaagacagagccctcgttaccgtcagcggtacacttgaaaaccgcggcagactcgtcagcgatga

SEQ ID NO: 656988 - DNA, 75 bp, synthetic construct
  source 1..75: mol_type = other DNA
gagacgaaggagagcagtgacagccgtctgaaagccctgcaggccacaaagacagcgctgtctggtgtgcaggcc

SEQ ID NO: 656989 - DNA, 75 bp, synthetic construct
  source 1..75: mol_type = other DNA
cggtgatgtgtctgccagctttgccactgacaccggtaataccactgtcatgccccgggcaggtggtgcaggtaa

SEQ ID NO: 656990 - DNA, 75 bp, synthetic construct
  source 1..75: mol_type = other DNA
ctgctggtgctgttgcaggatcaggatctggatttaacgacggtaattgagaacctgcgtaaacggcatcagtga

SEQ ID NO: 656991 - DNA, 75 bp, synthetic construct
  source 1..75: mol_type = other DNA
cagtaccggcgatatcatgagccagggtgacaccacgctgaacgcagccaccacggacaaccggggcagtctgct

SEQ ID NO: 656992 - DNA, 75 bp, synthetic construct
  source 1..75: mol_type = other DNA
cgctggggttcagtgaccttcacaacgaagcggattataaagtcagtcacagtggaatcagtctgagcggtggtg

SEQ ID NO: 656993 - DNA, 75 bp, synthetic construct
  source 1..75: mol_type = other DNA
caccgcatcagcagcagtgggagcacagagcgggaagaatgctgtcgagaataacctgctgggtggcagtgaatg

SEQ ID NO: 656994 - DNA, 75 bp, synthetic construct
  source 1..75: mol_type = other DNA
aatcagtctgagcggtggtggcagcttcggggataaatttcagggtaacatgccgggtggcatgatgtccgccgg

SEQ ID NO: 656995 - DNA, 75 bp, synthetic construct
  source 1..75: mol_type = other DNA
gactacagtggcagtggctggctacaggccattgatctactgctgaacgtggcgaagcttgccggtaatggcact

SEQ ID NO: 656996 - DNA, 75 bp, synthetic construct
  source 1..75: mol_type = other DNA
atcaccaacggcggtgtgatgcagggtgatgccatggtgctcggtgccggagaggcattcaccaacaatggaacg

SEQ ID NO: 656997 - DNA, 75 bp, synthetic construct
  source 1..75: mol_type = other DNA
gttccaggccgcacaactgaatgtcaacacgcagaccatcaccaacagcggcacgctgctgggtaatcagggcct

SEQ ID NO: 656998 - DNA, 75 bp, synthetic construct
  source 1..75: mol_type = other DNA
ggcaaccacacccagctcgatggtgcggttatcgcttccacggcgacggcagataaaaacagcctcgataccggg

SEQ ID NO: 656999 - DNA, 75 bp, synthetic construct
  source 1..75: mol_type = other DNA
tctgtcgacaggggcggattttgtaccagtggttggcgatatcaagagttttgcggaggcacaaagcgctctgga

SEQ ID NO: 657000 - DNA, 75 bp, synthetic construct
  source 1..75: mol_type = other DNA
aaacactgcctccctcagcaatccgggtaaaatcaccgctgacacgctgaacgtcagggcgaccacgctggatgg

SEQ ID NO: 657001 - DNA, 75 bp, synthetic construct
  source 1..75: mol_type = other DNA
tggaatgcagccggtggtgcatttggtaactggctggatgggaaggatccattatctggtgctgcgatgagtggt

SEQ ID NO: 657002 - DNA, 75 bp, synthetic construct
  source 1..75: mol_type = other DNA
caccattatttggtcaggctgtggctaataaaattactgcattggttgataaagcgaataaatatccttcaggga

SEQ ID NO: 657003 - DNA, 75 bp, synthetic construct
  source 1..75: mol_type = other DNA
ctctccgtcagcagccagggtgatattaccaatggcgccacattgcagggcaacggtatcacgctgaatgctgca

SEQ ID NO: 657004 - DNA, 75 bp, synthetic construct
  source 1..75: mol_type = other DNA
atacaggccgcgacagccgcgcttcagggactggctggggggaatttagcgggtgctctggccggagcttcggcc

SEQ ID NO: 657005 - DNA, 75 bp, synthetic construct
  source 1..75: mol_type = other DNA
tatggcaaaacaccgctggaactggcgcgggaacgcggttttgaagagattgcgcagttgctgattgccgcaggc

SEQ ID NO: 657006 - DNA, 75 bp, synthetic construct
  source 1..75: mol_type = other DNA
tatggcaaaacaccgctggaactggcgcgggagcgcggttttgaagagattgcgcagctgctgattgtcgcaggc

SEQ ID NO: 657007 - DNA, 75 bp, synthetic construct
  source 1..75: mol_type = other DNA
tgccagcccgcatctgaccgataaatatggcaaaacgccactggaactggcgcgggaacgggctttgaagagatt

SEQ ID NO: 657008 - DNA, 75 bp, synthetic construct
  source 1..75: mol_type = other DNA
tttcagaagaagcttttcacgagcttacccgaattaaacagacaactaacctgcctcatcaaactattatgcagc

SEQ ID NO: 657009 - DNA, 75 bp, synthetic construct
  source 1..75: mol_type = other DNA
tttcagaggaagcttttaacgagcttaccagaattaaacgagctactaacttgcctcatcaaactgttatgcagc

SEQ ID NO: 657010 - DNA, 75 bp, synthetic construct
  source 1..75: mol_type = other DNA
caatatgcttgtgttcaggcattaattgatgccggtgcggatataaataaacaagaccagaccagtttaaatcct

SEQ ID NO: 657011 - DNA, 75 bp, synthetic construct
  source 1..75: mol_type = other DNA
ggaaactgccgcacaggccctgcccgggtccacgggaactgatttccgttgtcgtggaggcagggcaggcggcac

SEQ ID NO: 657012 - DNA, 75 bp, synthetic construct
  source 1..75: mol_type = other DNA
ggaaattgccacacaagccctgccctggcccactggagctggtttcagttgtcgtggaagcagggcaggcggcac

SEQ ID NO: 657013 - DNA, 75 bp, synthetic construct
  source 1..75: mol_type = other DNA
attgcgacagtggtctggcagctaatccgggcggcaaaacgcggaaagagttcccgctggttatataactggtgt

SEQ ID NO: 657014 - DNA, 75 bp, synthetic construct
  source 1..75: mol_type = other DNA
tatggtctgggcgacatgctggaaaaagccaatctctacgcgcagctctatattcgtcctaacgaacagaacctc

SEQ ID NO: 657015 - DNA, 75 bp, synthetic construct
  source 1..75: mol_type = other DNA
agccgccgcccgccaccggaatctggtgcgccgcatcaacaggattgcgcccttgtttgccgacgagctgatcga

SEQ ID NO: 657016 - DNA, 75 bp, synthetic construct
  source 1..75: mol_type = other DNA
ttgtggtcaaaaaacgccgcgttctggtcatgccggaaaatcctgtggtgaatgaaaagccgcaggaagtacaaa

SEQ ID NO: 657017 - DNA, 75 bp, synthetic construct
  source 1..75: mol_type = other DNA
gcttaccagaattaaacagacaactaacctccctcatcaaactgttatgcagcttgcaattgctaaagaggttac

SEQ ID NO: 657018 - DNA, 75 bp, synthetic construct
  source 1..75: mol_type = other DNA
ttttttgcgggatatgatcaacggcaatcaaaaaagctggctggcacattgtaccgattcagaggcgttaataat

SEQ ID NO: 657019 - DNA, 75 bp, synthetic construct
  source 1..75: mol_type = other DNA
gaaaaaagcaggtctggacaaacctgaacttgaggcttttttacgggatatgatcaacggcaagcaaaaaagctg

SEQ ID NO: 657020 - DNA, 75 bp, synthetic construct
  source 1..75: mol_type = other DNA
ggcaaactgcgtatgtgggggcgctggtcgtatattggcggtggcaggtcagggaatatgttcaatcagttgttg

SEQ ID NO: 657021 - DNA, 75 bp, synthetic construct
  source 1..75: mol_type = other DNA
atcccacattagcgcgagtaaaatatttaccgattggggagaaaaaagcacaaatttatcctgaacaatatcgcc

SEQ ID NO: 657022 - DNA, 75 bp, synthetic construct
  source 1..75: mol_type = other DNA
agccattcgcggtccacatgttaaaactgcacgaaatatttttgcacttccggtaatacaacctgaaagtgaagc

SEQ ID NO: 657023 - DNA, 75 bp, synthetic construct
  source 1..75: mol_type = other DNA
gatggtgatgggctggtcaaagaggtctggtttccaaatcgtttgctaccaatgaaagcagatatttttagtcgg

SEQ ID NO: 657024 - DNA, 75 bp, synthetic construct
  source 1..75: mol_type = other DNA
ggtctgccacactcagcagtgatgaagcttgcaattaaccgtgatattaacgagcaggatttgcttaatagtcgt

SEQ ID NO: 657025 - DNA, 75 bp, synthetic construct
  source 1..75: mol_type = other DNA
gaaggcacttaacagctttaaaattgatattgcccgactattgagtattaagattcacaaactgtctctggaggt

SEQ ID NO: 657026 - DNA, 75 bp, synthetic construct
  source 1..75: mol_type = other DNA
gaaggcacttaacggctttaagattgatattgcccgactattgagcatcaaaattcacaagttatctcaagaggt

SEQ ID NO: 657027 - DNA, 75 bp, synthetic construct
  source 1..75: mol_type = other DNA
cagttaatgaggttttacgcagaatgaagaaatccgggctggaaaaaccggaacttgaggcattttttcgggata

SEQ ID NO: 657028 - DNA, 75 bp, synthetic construct
  source 1..75: mol_type = other DNA
ggattaagcaagatgaccttgatagtctgaaatctttaaatgcttttggactggatttagcaaggttactaagta

SEQ ID NO: 657029 - DNA, 75 bp, synthetic construct
  source 1..75: mol_type = other DNA
ctgccacactcagcagtgatgaagcttgcaattaaccgtgatattaacgaacaagatttgcttaatagtcgctta

SEQ ID NO: 657030 - DNA, 75 bp, synthetic construct
  source 1..75: mol_type = other DNA
atcaatctggctgattggtggcgacggctgggcttacgatatcggctttggcggtctggatcatgtattgagttt

SEQ ID NO: 657031 - DNA, 75 bp, synthetic construct
  source 1..75: mol_type = other DNA
agtggcggcaatgcagggtaataatgtcgctgccggtgcagcaggcgcagcaacgggagagctggcagccagagc

SEQ ID NO: 657032 - DNA, 75 bp, synthetic construct
  source 1..75: mol_type = other DNA
ctcggtgccggagaggcattcaccaacaatggaacgctgactgccggtaaaggcaacagtgttttcagcgcacag

SEQ ID NO: 657033 - DNA, 75 bp, synthetic construct
  source 1..75: mol_type = other DNA
ggcacaggcaggcaggaactcggtggagaataactatctgagccgtgatgaggcggcagagaaggcttcgctgga

SEQ ID NO: 657034 - DNA, 75 bp, synthetic construct
  source 1..75: mol_type = other DNA
gaggttatgaaaccggacactacaataaccaagtcagcgatatgtatccggatgcttacgggcagatagtaaacc

SEQ ID NO: 657035 - DNA, 75 bp, synthetic construct
  source 1..75: mol_type = other DNA
cgtattgaccgaatggaagccgaatatcagaaagctggtaccagcggttcgtttaatgcaggcgttgaaggcggt

SEQ ID NO: 657036 - DNA, 75 bp, synthetic construct
  source 1..75: mol_type = other DNA
gtggtacaggccatcacgggcgtgctgggcggactgaatgcagggaatccggggcaggtactggctggcggtctg

SEQ ID NO: 657037 - DNA, 75 bp, synthetic construct
  source 1..75: mol_type = other DNA
atgcatatccgtgcaggacgactggataatgaggcatcgtttattctcgccggtggcagtatgaccctgagtggc

SEQ ID NO: 657038 - DNA, 75 bp, synthetic construct
  source 1..75: mol_type = other DNA
ggaataacctgaagctgtttacagaccgtctgcataaccagcatggtgatatcctggccggcaacagtctgtggg

SEQ ID NO: 657039 - DNA, 75 bp, synthetic construct
  source 1..75: mol_type = other DNA
cgggcagcaaagtcacctcgaacggtgaaatggcgctcagtgcactgaatttaagcaacagcggacaatggattg

SEQ ID NO: 657040 - DNA, 75 bp, synthetic construct
  source 1..75: mol_type = other DNA
cgatgtccggcagcggctatgccagcatcagccaggacaaaattaaaagcaattacgattctgtccgggaacaga

SEQ ID NO: 657041 - DNA, 75 bp, synthetic construct
  source 1..75: mol_type = other DNA
acagtttctgggctcgtcgtacattcttgaccgtcttggcctgaaaccggaaaaagattaccgctttctggggga

SEQ ID NO: 657042 - DNA, 75 bp, synthetic construct
  source 1..75: mol_type = other DNA
gtgaacccgaaactggatggtctcggaaaggtggacagcagtctgtttgccggactgtatgacctgctcaggatg

SEQ ID NO: 657043 - DNA, 75 bp, synthetic construct
  source 1..75: mol_type = other DNA
gaaaggtggtgcggtactgacggagaaggttgttgctaaggttgtgggtaagtctgaatcagcagcggcaaaagt

SEQ ID NO: 657044 - DNA, 75 bp, synthetic construct
  source 1..75: mol_type = other DNA
gctgaacaacccagtcctgcagagattgcagaggttttgatgagaaaattaaaaaaacaacgggaaacaattgta

SEQ ID NO: 657045 - DNA, 75 bp, synthetic construct
  source 1..75: mol_type = other DNA
tactggtcaacccgattgggccaacttgccacaaaggcacttccagttgcttcggcgacgccagccaccaatggt

SEQ ID NO: 657046 - DNA, 75 bp, synthetic construct
  source 1..75: mol_type = other DNA
gggtgtaacgcgttcgctcacggacgcctatcgtcgccacaatgtgggggccacaccacgtgatatggcctggat

SEQ ID NO: 657047 - DNA, 75 bp, synthetic construct
  source 1..75: mol_type = other DNA
attcgctggatgtgaaatcgcgtgatatgcgcgggcagaaatatgtcttgcaggtggcaccggaagattgcaccg

SEQ ID NO: 657048 - DNA, 75 bp, synthetic construct
  source 1..75: mol_type = other DNA
atgtaaaaaacgaaactccatacaatattcccctgttaattaatgaaaatgtgatctccagcggaatttccctga

SEQ ID NO: 657049 - DNA, 75 bp, synthetic construct
  source 1..75: mol_type = other DNA
cggcagggacggcaggagtgggagcgccgccttgcggctctgattacacgacgacgggggcatcccgggtaccgg

SEQ ID NO: 657050 - DNA, 75 bp, synthetic construct
  source 1..75: mol_type = other DNA
tggtggttggctctccgcaatggcacgatgaactggcaggtgccctgaaaaatattgccggaggttcgccactga

SEQ ID NO: 657051 - DNA, 75 bp, synthetic construct
  source 1..75: mol_type = other DNA
ggtacgccctgcaacgggcacggggcatgcaatatcacaatggatacgctttattattacgctccgtttgctgac

SEQ ID NO: 657052 - DNA, 75 bp, synthetic construct
  source 1..75: mol_type = other DNA
tcgataagattgaactatatatgcgtggtaaagcttctggtgaccttgattctttgcaagcagaatataattctt

SEQ ID NO: 657053 - DNA, 75 bp, synthetic construct
  source 1..75: mol_type = other DNA
atgctcgtactggtttacgaaaactaccatcaaatgtacgtctggttgactggatacctatgggtgtattcctta

SEQ ID NO: 657054 - DNA, 75 bp, synthetic construct
  source 1..75: mol_type = other DNA
aagcagaatctggcgaacctgagccgtgaccctgcgcacgctaatgacagtatcagcccgatatttgacaaggag

SEQ ID NO: 657055 - DNA, 75 bp, synthetic construct
  source 1..75: mol_type = other DNA
caccatccgggacagggacaatcagaagcagaatctggcgaacctgagccgtgaccctgcgcacgctaatgacag

SEQ ID NO: 657056 - DNA, 75 bp, synthetic construct
  source 1..75: mol_type = other DNA
ggaacagatggcgcggatatcgaagccgcaatgatggaagcggtggaatcccgtgcacaaagtgacatccgcagt

SEQ ID NO: 657057 - DNA, 75 bp, synthetic construct
  source 1..75: mol_type = other DNA
tcggcagtatctggcctggattcatatcgatgatatggtcaacggcattctctggctgctggataacgagctgcg

SEQ ID NO: 657058 - DNA, 75 bp, synthetic construct
  source 1..75: mol_type = other DNA
tgtagagaataaccgtttctctttgctggaaaaattaactcaggatgtgctcgatatccatgaccttaagctggc

SEQ ID NO: 657059 - DNA, 75 bp, synthetic construct
  source 1..75: mol_type = other DNA
gcacaaagtgacaaaacacgagtatgcctgctacgaaccggtgtggtgctggcaccagatggcggtatcctcagc

SEQ ID NO: 657060 - DNA, 75 bp, synthetic construct
  source 1..75: mol_type = other DNA
caatgcaggagatgttaattgacgctgcaaccacactttcattatcaatcaagaacggagaacgttctactaaat

SEQ ID NO: 657061 - DNA, 75 bp, synthetic construct
  source 1..75: mol_type = other DNA
cagccggaacattcgtaaaactgcctgatgaagtgtttaccactttatttaaagaggcacgagcgcaaggcgtaa

SEQ ID NO: 657062 - DNA, 75 bp, synthetic construct
  source 1..75: mol_type = other DNA
tggacaacgcgcactgcctaaaaggctggaagaagcgggttttgcgtttcgctggtacgatttagacgaggcgct

SEQ ID NO: 657063 - DNA, 75 bp, synthetic construct
  source 1..75: mol_type = other DNA
ttataagaaagtttaataatgtaacaataggaaaacaagatgctattaaaagtggaaaagaaaaacattgggaac

SEQ ID NO: 657064 - DNA, 75 bp, synthetic construct
  source 1..75: mol_type = other DNA
gatccttttgaggggggggtaataacgtctgcgggaaatgcctttgctaacaaaggatggtttgttacatatttt

SEQ ID NO: 657065 - DNA, 75 bp, synthetic construct
  source 1..75: mol_type = other DNA
atgataaaactgatggtctatacacactacatgtaacagggaaaccagaaaaaggagttgtaaattattttttgc

SEQ ID NO: 657066 - DNA, 75 bp, synthetic construct
  source 1..75: mol_type = other DNA
tcatttccggctcggcaacgggctattatggcgacttaggtgaagtggtggttaccgaagaggaaccgccgcata

SEQ ID NO: 657067 - DNA, 75 bp, synthetic construct
  source 1..75: mol_type = other DNA
ctgcctgcgtgtgaacagccattgttttccatcaccagtaattcccgcctgtggggcaatgtgaatgtgctggca

SEQ ID NO: 657068 - DNA, 75 bp, synthetic construct
  source 1..75: mol_type = other DNA
acagaatgcacgggtgcggatggtatcggggcaagtgatcagtggcgttgtagatgcagatgggaatattcttat

SEQ ID NO: 657069 - DNA, 75 bp, synthetic construct
  source 1..75: mol_type = other DNA
cagtgcaggagatgttaattgacgctgcaaccacactttccacatcaattaagaacggagaacgttctaccaaat

SEQ ID NO: 657070 - DNA, 75 bp, synthetic construct
  source 1..75: mol_type = other DNA
gcgtttccggcaagcggtgagatcaacagcaaactggcgcaacccgttgaggcgattaatcgcgtcgaacagcat

SEQ ID NO: 657071 - DNA, 75 bp, synthetic construct
  source 1..75: mol_type = other DNA
aacaagttcatggacacgccgttgtacatggcgcccgtccgccttgaagttcagcgcccgcgctttcgctgtgag

SEQ ID NO: 657072 - DNA, 75 bp, synthetic construct
  source 1..75: mol_type = other DNA
tttgataatgtttatacatttaatcaaacaaatgattctgacaatcaacctacagaaggaatgactacatctgag

SEQ ID NO: 657073 - DNA, 75 bp, synthetic construct
  source 1..75: mol_type = other DNA
ctgtggggtaatacggcctggatgctggcgtgcaatgtcgcagacagttttgccaaataccgctggtgtccaaat

SEQ ID NO: 657074 - DNA, 75 bp, synthetic construct
  source 1..75: mol_type = other DNA
ccggttcggaaggttatgacgttgcccgccagggtgtgacagcctttattgccagcatcctgcaatccactgcat

SEQ ID NO: 657075 - DNA, 75 bp, synthetic construct
  source 1..75: mol_type = other DNA
ttgccgactggcgctttaacctgcgcacctccaacactgaaccggtggtgcggttgaatgtggaatcgcgcggtg

SEQ ID NO: 657076 - DNA, 75 bp, synthetic construct
  source 1..75: mol_type = other DNA
ttaaaagatatagaacaagaaagacatataaatgatgctaaggataatgttttttttgatttaggtatgccaatc

SEQ ID NO: 657077 - DNA, 75 bp, synthetic construct
  source 1..75: mol_type = other DNA
ttcacgccgtcggaaatggcacttttttcacttcaaaaattcggagaaaagatggcaatgaattcaactggggtt

SEQ ID NO: 657078 - DNA, 75 bp, synthetic construct
  source 1..75: mol_type = other DNA
tacatatctacgggccgatgtcctcatctgccttaagagaaaaactgatagccaatggcctaacagaagttaacg

SEQ ID NO: 657079 - DNA, 75 bp, synthetic construct
  source 1..75: mol_type = other DNA
gctacgtttaccaaaaggttgcccgttccagccgcgctgtccacatgcgatggaaatttgtagcagtgcgccgcc

SEQ ID NO: 657080 - DNA, 75 bp, synthetic construct
  source 1..75: mol_type = other DNA
ccatcccgggtaatccgccaaacctgctacgtttaccgaaaggttgcccgttccagccacgttgtccgtatgcga

SEQ ID NO: 657081 - DNA, 75 bp, synthetic construct
  source 1..75: mol_type = other DNA
tgccgctcgcacaacaacaggctgacgcactgctgaacgtgaaagatttgcgtgtcacctttagtaccccggacg

SEQ ID NO: 657082 - DNA, 75 bp, synthetic construct
  source 1..75: mol_type = other DNA
atctccaagaggagctatttgcaataaaaaatgaaatatatcaagacccgcttacatcgtggcctttcggtggaa

SEQ ID NO: 657083 - DNA, 75 bp, synthetic construct
  source 1..75: mol_type = other DNA
tgctacgacaagcggcgggaagttatcgagatgctcaacggctcggtacccaacgatgaactgttcgggatcatc

SEQ ID NO: 657084 - DNA, 75 bp, synthetic construct
  source 1..75: mol_type = other DNA
agccactgatgtgggccattactactgccgggtacaacattgaggggccgtgctacgacaaacggcgggaagtca

SEQ ID NO: 657085 - DNA, 75 bp, synthetic construct
  source 1..75: mol_type = other DNA
gaatgctctcgcttcctcgcgaattaagccttgtcgatggtcgtgtgagaatgaaacctgctgccgaagtgaccg

SEQ ID NO: 657086 - DNA, 75 bp, synthetic construct
  source 1..75: mol_type = other DNA
gttgccgcacaccaagggtgagtgggcatttaaacggatgcccatcacgctggagccgtggcagctatttgtgat

SEQ ID NO: 657087 - DNA, 75 bp, synthetic construct
  source 1..75: mol_type = other DNA
aattgacggtgcagttgcgctgattatggcggttggcagagccatgctgtacgagaaagaagacacgctgtctga

SEQ ID NO: 657088 - DNA, 75 bp, synthetic construct
  source 1..75: mol_type = other DNA
gatgaaagagctggaagcggcgattgaatcggggcgctttcatcatgacggcaatcccatcatgacctggtgtat

SEQ ID NO: 657089 - DNA, 75 bp, synthetic construct
  source 1..75: mol_type = other DNA
gcctgatgaccggcaaagtctcacaccactaccaggtattgattacatggaagacggtcttcctgatccggtaaa

SEQ ID NO: 657090 - DNA, 75 bp, synthetic construct
  source 1..75: mol_type = other DNA
ttgcgctggcgctcatgtccgggaaaaacaaaacagcgtcagccattgccgccggttattcggcgaagacagcca

SEQ ID NO: 657091 - DNA, 75 bp, synthetic construct
  source 1..75: mol_type = other DNA
tactgtctattttgaggctgggcatgcagagatatcattcgaatttgtccaggaaaagctttcgactaactctat

SEQ ID NO: 657092 - DNA, 75 bp, synthetic construct
  source 1..75: mol_type = other DNA
gataccgggaaaaaatcggcaaaaggtgatgccgcgaaaaaagcggctaaccgttttgcggtgccaccacctccc

SEQ ID NO: 657093 - DNA, 75 bp, synthetic construct
  source 1..75: mol_type = other DNA
gcgccagagttgcctgggcttggtcaggaattaaacgatgaaatcgtacaacaatatcttgcctatgtgatcaaa

SEQ ID NO: 657094 - DNA, 75 bp, synthetic construct
  source 1..75: mol_type = other DNA
atccattgacgccacagagaatggcagtgttattcatatttcactggtcaacttattaagtacacctatctcaaa

SEQ ID NO: 657095 - DNA, 75 bp, synthetic construct
  source 1..75: mol_type = other DNA
aaagcggctaaccgttttgcggtgccaccacctccccgactggtggtgaataaccagaatgaggaaagcggatga

SEQ ID NO: 657096 - DNA, 75 bp, synthetic construct
  source 1..75: mol_type = other DNA
ctattgccagggatggttctttgcgaaggcgatgccgccgcaggtgtttatgcaatggatggagcaattacccgc

SEQ ID NO: 657097 - DNA, 75 bp, synthetic construct
  source 1..75: mol_type = other DNA
ccattcaacaaaacgtccgattgccgccattgttgccacctcaaaacagcgtcttctctcccatttttataacca

SEQ ID NO: 657098 - DNA, 75 bp, synthetic construct
  source 1..75: mol_type = other DNA
tggtactttgcaaaggcgatgccgccgcaggtttttatggcatgggcagagcaattacccgcgcatgacgccatg

SEQ ID NO: 657099 - DNA, 75 bp, synthetic construct
  source 1..75: mol_type = other DNA
aaaatcttcaagatgagctatttgcaataaaaaatgaaatatatcaagacccgcttacatcgtggcctttcggtg

SEQ ID NO: 657100 - DNA, 75 bp, synthetic construct
  source 1..75: mol_type = other DNA
ttttctctttaagcaaacaggcctccgcagaaaatttttcaccattgattcatcagagggaaataaccgtacagc

SEQ ID NO: 657101 - DNA, 75 bp, synthetic construct
  source 1..75: mol_type = other DNA
tggttctttgctaaggcgatgccaccgcaggtgttcatgcaatggatggagcaatcacccgcgcaggagttaacg

SEQ ID NO: 657102 - DNA, 75 bp, synthetic construct
  source 1..75: mol_type = other DNA
accagagtcgtccccattctgcactgggctggatgaccccgtgcgaattcgccgagaaatctgccggttgccaga

SEQ ID NO: 657103 - DNA, 75 bp, synthetic construct
  source 1..75: mol_type = other DNA
atcgaggtctggcgcatacactataaccagagtcgtccccattctgcactgggctggatgaccccgtgcgaattc

SEQ ID NO: 657104 - DNA, 75 bp, synthetic construct
  source 1..75: mol_type = other DNA
catacccggctgagtgcgttctggacccgggaggaggctgtgctgacaacgcaaaaacgaaaatttgcgctggcg

SEQ ID NO: 657105 - DNA, 75 bp, synthetic construct
  source 1..75: mol_type = other DNA
ccttgtatttgccttaccggcaggcattatgggcagcctggtgctgcttttactctggctgcgtataaaccagaa

SEQ ID NO: 657106 - DNA, 75 bp, synthetic construct
  source 1..75: mol_type = other DNA
gagaaatccgagctggtcattcgccaggcagatttagcaagcgacgatgcggaacgctatcagggacaaatttgt

SEQ ID NO: 657107 - DNA, 75 bp, synthetic construct
  source 1..75: mol_type = other DNA
atgagtcatcgtgcacgacaccaattactggcgttgccgggcattatctttttagttctctttcccatcattctg

SEQ ID NO: 657108 - DNA, 75 bp, synthetic construct
  source 1..75: mol_type = other DNA
aaggtgattaaaaaccgccatcagtcctgcccggtatgcggcggctccgaccgctttcgctttgatgataaagag

SEQ ID NO: 657109 - DNA, 75 bp, synthetic construct
  source 1..75: mol_type = other DNA
ggccctggtggaagtggcaaaagtattctggctgaaattgcgaccatgcttgctggagaggataacgccacctct

SEQ ID NO: 657110 - DNA, 75 bp, synthetic construct
  source 1..75: mol_type = other DNA
ccgaaatcttattggtttcagcaacggggtttttgatacccggttaggccaatttcgaccgcatgataaaaagga

SEQ ID NO: 657111 - DNA, 75 bp, synthetic construct
  source 1..75: mol_type = other DNA
gcgtattctcccggcgctgggtgtgaaggtgattaaaaaccggcatcaggcctgtccggtgtgcggcggctctga

SEQ ID NO: 657112 - DNA, 75 bp, synthetic construct
  source 1..75: mol_type = other DNA
ctgattattccgcagcaggatacaccggcacgtcgtctgattggctttcgcaacggggtactcgatacccaaagc

SEQ ID NO: 657113 - DNA, 75 bp, synthetic construct
  source 1..75: mol_type = other DNA
gaagggaaaaaacaggcaggaaaacgcctgtggattgcggaaggttatgcgaccgcgctcaccgtgcatcacctg

SEQ ID NO: 657114 - DNA, 75 bp, synthetic construct
  source 1..75: mol_type = other DNA
tggacagtcttattagcgcaacaccggcgctgtcgcaacaggctgtggatcaggaatggagctatatggacttcc

SEQ ID NO: 657115 - DNA, 75 bp, synthetic construct
  source 1..75: mol_type = other DNA
ttaaccagatgggagccagccagcgcggggaggttctgcttgctcattacgatggcaatctggcgatccatgctg

SEQ ID NO: 657116 - DNA, 75 bp, synthetic construct
  source 1..75: mol_type = other DNA
ggccctggcggaagtggaaagagtattcttgctgaaatagcaaccatgctggcgggtgaagataacgctacctcg

SEQ ID NO: 657117 - DNA, 75 bp, synthetic construct
  source 1..75: mol_type = other DNA
gcctctgacgcgccgctgtctgacgaaaaactggctcaggaaggcctgttccagttcccgaccgtgattggcggc

SEQ ID NO: 657118 - DNA, 75 bp, synthetic construct
  source 1..75: mol_type = other DNA
aaaaccggcggcgtgacgttccgcgccggggatgtggttgtcccgctgtatgaggataccggcgcactggttaac

SEQ ID NO: 657119 - DNA, 75 bp, synthetic construct
  source 1..75: mol_type = other DNA
atgaaaatgaacgtaacagaaacggtaaaacaggcgtgcggccactggccgcgcattcttccggcgctgggtgtg

SEQ ID NO: 657120 - DNA, 75 bp, synthetic construct
  source 1..75: mol_type = other DNA
tcatggcggaaatcgccaccctgctggccgggacggacaatgccacctctgcgaccatcgagacgctggaatctt

SEQ ID NO: 657121 - DNA, 75 bp, synthetic construct
  source 1..75: mol_type = other DNA
agctggcggtgattgttcggcagcttatgcagaagttcagcgacccgatgaccgcccgcgccctgctccagtcac

SEQ ID NO: 657122 - DNA, 75 bp, synthetic construct
  source 1..75: mol_type = other DNA
cgcgacgtgattctggccgcactgtttatggtgctggcaaaccgctacgactggcagctctttctggaggtgacc

SEQ ID NO: 657123 - DNA, 75 bp, synthetic construct
  source 1..75: mol_type = other DNA
ggtcaaagggacatgtcatgtcatcggaggaaaaaaacaggcaggaaaacgcctgtggattgcggagggttatgc

SEQ ID NO: 657124 - DNA, 75 bp, synthetic construct
  source 1..75: mol_type = other DNA
ggcgagccttgcccgtcacaaatacccggcctgccggattgtcattgccgccgaccgtgaccttaacggcgacgg

SEQ ID NO: 657125 - DNA, 75 bp, synthetic construct
  source 1..75: mol_type = other DNA
atgaaaatgaacgtaacggacaccgtaaaacaggcgtgcggccactggccgcgcattctccctgcgctgggtgta

SEQ ID NO: 657126 - DNA, 75 bp, synthetic construct
  source 1..75: mol_type = other DNA
tgccggggaagataacgccacatcggccaccattgaaacgctggagtcaccccgcgaacgcgctgcgctgattgg

SEQ ID NO: 657127 - DNA, 75 bp, synthetic construct
  source 1..75: mol_type = other DNA
agcagaactcagacgaggcgctcagtattaaacgcgaagccgacccgacctttgatttttgcggttaccttgaag

SEQ ID NO: 657128 - DNA, 75 bp, synthetic construct
  source 1..75: mol_type = other DNA
ccatgatgctgaaagagtacggcctgaattatgagaagcggcacaccaagcaggggatacaaaccaacctgtcgc

SEQ ID NO: 657129 - DNA, 75 bp, synthetic construct
  source 1..75: mol_type = other DNA
accgcaaagcggcggccgcgctggccgtcaggctcatggagaaaacccgaccagccacaggcaatgcctacctca

SEQ ID NO: 657130 - DNA, 75 bp, synthetic construct
  source 1..75: mol_type = other DNA
tcatgaaattctctgtcgcgaacgccgtgcgaaagcggcaagcagcgtggacctgagcaaagcaaaacgtgtggt

SEQ ID NO: 657131 - DNA, 75 bp, synthetic construct
  source 1..75: mol_type = other DNA
tttctgcgctatgtgccggtgctggataacagcgccctgaccgtgcgtgtgcggattattttgtcgctggcgctg

SEQ ID NO: 657132 - DNA, 75 bp, synthetic construct
  source 1..75: mol_type = other DNA
cgatccgccaaccttctctaactcaaaacgaatggaagatgcgtttgatgttcagcgcgatcatctggcgctgat

SEQ ID NO: 657133 - DNA, 75 bp, synthetic construct
  source 1..75: mol_type = other DNA
ccggaatataacgttgccgttgaccgttatgccgacgtgggtggtggtgcaggagtatgcgccgccaaaaactat

SEQ ID NO: 657134 - DNA, 75 bp, synthetic construct
  source 1..75: mol_type = other DNA
gacaccggagaaaatcagcagtgtcagcattgatccactgacaggcgtgcagccttgccatatccgcgaaatgtt

SEQ ID NO: 657135 - DNA, 75 bp, synthetic construct
  source 1..75: mol_type = other DNA
atgttttggtgtgtaaacaaaatatttaatgagaatatagatatcactcgcctaattattcctaaagaagatgtt

SEQ ID NO: 657136 - DNA, 75 bp, synthetic construct
  source 1..75: mol_type = other DNA
gcagagggtgaaattgaggtcagttcgaaagtgctggccgtactgacagcgaaagcccgcgcggcgggttcgtgg

SEQ ID NO: 657137 - DNA, 75 bp, synthetic construct
  source 1..75: mol_type = other DNA
tttagctgggtactggcgtccgcatcactgctggcgctgccgaccacttttatcatgctgattgtgcagggctgt

SEQ ID NO: 657138 - DNA, 75 bp, synthetic construct
  source 1..75: mol_type = other DNA
tcacctttgaggtgaaagatgtcgcgcaactgaccaatccgctgccgaaagggccatacggtacagtgttgagca

SEQ ID NO: 657139 - DNA, 75 bp, synthetic construct
  source 1..75: mol_type = other DNA
tgggtaaaacgcacctggcagtcgctctcggggtaaaagcggcggacgctggtcatcgggtgctgttcatgccac

SEQ ID NO: 657140 - DNA, 75 bp, synthetic construct
  source 1..75: mol_type = other DNA
atggtcgaactgcaacatcaacggctgatggtgcttgccgaacagctccagctggacagtcttatcggcgcagcg

SEQ ID NO: 657141 - DNA, 75 bp, synthetic construct
  source 1..75: mol_type = other DNA
attctctgtcgcgaacgccgtgcgaaagcggcaagcagcgtggacctgagtaaagcaaaacgcgtggtcggtgtc

SEQ ID NO: 657142 - DNA, 75 bp, synthetic construct
  source 1..75: mol_type = other DNA
caggaaccgtgcacccgtgatacctctcatcagtgcccgacagaaacggtaccttatgttgccccgcgtcatgaa

SEQ ID NO: 657143 - DNA, 75 bp, synthetic construct
  source 1..75: mol_type = other DNA
caactgaatgcggcgctggtgaacgatgccacggcggtggatattgtcgatggtcacatttgcgccgaacaccgg

SEQ ID NO: 657144 - DNA, 75 bp, synthetic construct
  source 1..75: mol_type = other DNA
gggcacgtcaggaagggattgaatgttatcgcctgtatgatgccgatctgccggagtataacgttgccgttgacc

SEQ ID NO: 657145 - DNA, 75 bp, synthetic construct
  source 1..75: mol_type = other DNA
cgatgaaagtgaaagatgccatcgttgatgctttcacgcgtaagaatctgccgcgtccgaatgttgatcgcgata

SEQ ID NO: 657146 - DNA, 75 bp, synthetic construct
  source 1..75: mol_type = other DNA
tgggcggaacgcaacctgcgtcttaacggcttaaccggacgcgcgcatcgcttaattcaggcggattgcctggcg

SEQ ID NO: 657147 - DNA, 75 bp, synthetic construct
  source 1..75: mol_type = other DNA
acgtggcttccgtatggatctcgacggcctggcaaaactgggactgaaagcacaagaaattacgcaaaaaacgct

SEQ ID NO: 657148 - DNA, 75 bp, synthetic construct
  source 1..75: mol_type = other DNA
aagaacctcaaaaaattcgagaagtgggctcgccaggaaggaattgaatgttaccgcctgtatgacgccgatctg

SEQ ID NO: 657149 - DNA, 75 bp, synthetic construct
  source 1..75: mol_type = other DNA
aacgactggccctgaagcgtctttccgggagggggagggagcgtcccctgaacctgaaacagagtgagcgcggtc

SEQ ID NO: 657150 - DNA, 75 bp, synthetic construct
  source 1..75: mol_type = other DNA
gatgctgtttggcctctctgtacaggggaatgcgccgaagttccttactcgtgttagccgtcgcggcgtgccaat

SEQ ID NO: 657151 - DNA, 75 bp, synthetic construct
  source 1..75: mol_type = other DNA
cgtgaaacccgcttcaaagctctgatgtatccgtttggcaactatctttgcattgcctttctcggcatgattttg

SEQ ID NO: 657152 - DNA, 75 bp, synthetic construct
  source 1..75: mol_type = other DNA
gttcccgggaggactgggatctgattattgtggcacttagtgcagagcctgttgctggatgggcacatcacctgt

SEQ ID NO: 657153 - DNA, 75 bp, synthetic construct
  source 1..75: mol_type = other DNA
gaatgtcgtaagcgtaagacaaaaaattcttctgaccggaacctgttggtatgagctgacagggctgtggtacat

SEQ ID NO: 657154 - DNA, 75 bp, synthetic construct
  source 1..75: mol_type = other DNA
agagactggcactgaaacgcctttctgggagaggaagagtccgtcctctgaaccagagtgagcgaggtctgtact

SEQ ID NO: 657155 - DNA, 75 bp, synthetic construct
  source 1..75: mol_type = other DNA
ttcctctctggctggaactactgggtaatgttcgtgctggtgggaatggcagagctgaccgctgcgggcatctat

SEQ ID NO: 657156 - DNA, 75 bp, synthetic construct
  source 1..75: mol_type = other DNA
gctacggcgtcgccgggatcatcgctttcctgattatgcgccagcttggcgaaatggtggttgaggagccggtat

SEQ ID NO: 657157 - DNA, 75 bp, synthetic construct
  source 1..75: mol_type = other DNA
cgagcggctgtaaccgcgccattatggtggcgcacaacgccaatttcgatcacagctttatgatggccgccgcag

SEQ ID NO: 657158 - DNA, 75 bp, synthetic construct
  source 1..75: mol_type = other DNA
gagctgattgggattactgccgctgaagcgcgcgatccggaaaaaagcatccctaaagcagtgaatcaggtggtt

SEQ ID NO: 657159 - DNA, 75 bp, synthetic construct
  source 1..75: mol_type = other DNA
gtcggtgtataacagcggggtttactctaacagccgcatgctgtttggcctttctgtgcagggtaatgcgccgaa

SEQ ID NO: 657160 - DNA, 75 bp, synthetic construct
  source 1..75: mol_type = other DNA
actatctgctgccgcaaaaagcgtttggtctgctgatggcgctggtggtagcaacgctgctgttgaactggatta

SEQ ID NO: 657161 - DNA, 75 bp, synthetic construct
  source 1..75: mol_type = other DNA
gtgccggaaaggttggaaatgctgagggtgttgcgaaatatctgcccggtgtacagcggatgtgtgcctctgtcg

SEQ ID NO: 657162 - DNA, 75 bp, synthetic construct
  source 1..75: mol_type = other DNA
aaaaatctatgagcaatatgcagcaaacagcaaaagagccgcacgggcaatcactcaccatttcatgacgctgta

SEQ ID NO: 657163 - DNA, 75 bp, synthetic construct
  source 1..75: mol_type = other DNA
cttttgtgccagtggtggtgacggttttgaagcatttttgaatggaaaaaatgtgaagacgataccgggaacaac

SEQ ID NO: 657164 - DNA, 75 bp, synthetic construct
  source 1..75: mol_type = other DNA
ggctcctgacgcacccgaacagttaaagaagaatgttattgaatatcgaaaatcgttttatatctggttgaattc

SEQ ID NO: 657165 - DNA, 75 bp, synthetic construct
  source 1..75: mol_type = other DNA
tgacgctggagcggacattgaagtaggtgaggactggattagcctggatatgcatggcaaacgtccgaaggccgt

SEQ ID NO: 657166 - DNA, 75 bp, synthetic construct
  source 1..75: mol_type = other DNA
tcagtttgtgtgaggcgattggcacactcgaattgctgaagcagtcattgattgaaggtgcaaaagagttctcaa

SEQ ID NO: 657167 - DNA, 75 bp, synthetic construct
  source 1..75: mol_type = other DNA
gtgagccgcgtaatcaatttgggtaaggagaagaaattcccaattactcaagagctatacgagaggctggaaagc

SEQ ID NO: 657168 - DNA, 75 bp, synthetic construct
  source 1..75: mol_type = other DNA
ggcggcagcacaaaaactggaaactttaacctggcaatttcgaattcaaggctggaacgtggcaatgggcgcttc

SEQ ID NO: 657169 - DNA, 75 bp, synthetic construct
  source 1..75: mol_type = other DNA
acttactggctctttttcggggctgtggggtatttccagggcctctcctttaccactctcgggaaggccctttcc

SEQ ID NO: 657170 - DNA, 75 bp, synthetic construct
  source 1..75: mol_type = other DNA
atgggggcctgggcatgaatggtttcaggataatgccacgaatatcagtgcgattgctgatgctgtatgtcagat

SEQ ID NO: 657171 - DNA, 75 bp, synthetic construct
  source 1..75: mol_type = other DNA
atcagtgcgattgctgatgctgtatgtcagttaccgaaattacaagaagtattaaaaaggaatgaaattatttga

SEQ ID NO: 657172 - DNA, 75 bp, synthetic construct
  source 1..75: mol_type = other DNA
acccacgatcttggcgtggtggcggggatctgcgacaaagtgctggtaatgtacgccgggcgcacgatggaatat

SEQ ID NO: 657173 - DNA, 75 bp, synthetic construct
  source 1..75: mol_type = other DNA
ggcgctgattgcccttggtctggtcggtggtctgtactatctgcttaaccatagcctgttcaaaagcgtactgtt

SEQ ID NO: 657174 - DNA, 75 bp, synthetic construct
  source 1..75: mol_type = other DNA
atttctgtcaatgtggtctcacagcaatattttctataagaaaggaaaggaaaggaaaggaaaggaaaggaattt

SEQ ID NO: 657175 - DNA, 75 bp, synthetic construct
  source 1..75: mol_type = other DNA
aatcacagttcacatctttgtataaagaaatacagggaggtaaaattgacatacacctacaatgcccggatggaa

SEQ ID NO: 657176 - DNA, 75 bp, synthetic construct
  source 1..75: mol_type = other DNA
gtactattttgttggaagcaaaacgtacaagtttaaataataaaggactgacagcacctgttatgttaaatggtg

SEQ ID NO: 657177 - DNA, 75 bp, synthetic construct
  source 1..75: mol_type = other DNA
attcgccagatcatcggtgctgacgggttgattttccaggatctgaacgatttgatcgaagccgttcgcgctgaa

SEQ ID NO: 657178 - DNA, 75 bp, synthetic construct
  source 1..75: mol_type = other DNA
cgcttcccgaacgtttacggtattgatatgccgagcgctaacgaattgatcgctcatggacgtgaagtggatgaa

SEQ ID NO: 657179 - DNA, 75 bp, synthetic construct
  source 1..75: mol_type = other DNA
gagttcgctcttcaccgcgcaggcaaagcgtcgcgcggaagaactcggcgtcagcgaacgcgtacattttattca

SEQ ID NO: 657180 - DNA, 75 bp, synthetic construct
  source 1..75: mol_type = other DNA
caacgggtatttgaatatctctggctggataccaacttgcgtaaagcactggaaaacgatcagttggttattcac

SEQ ID NO: 657181 - DNA, 75 bp, synthetic construct
  source 1..75: mol_type = other DNA
cacgccgacacagcaatgtacacagcgaaggaaggcggacgaggacaattttgcgtttttaccccagaaatgaat

SEQ ID NO: 657182 - DNA, 75 bp, synthetic construct
  source 1..75: mol_type = other DNA
ttaagctgtctcgaacatgaccaggtgttggcgcgtccaggtggcgatgagtttctggtactggcatccaacacc

SEQ ID NO: 657183 - DNA, 75 bp, synthetic construct
  source 1..75: mol_type = other DNA
agtcaattaggcgcacaggttcacctggatgatttcggcactggctactcttccctttctcaactggcacgattt

SEQ ID NO: 657184 - DNA, 75 bp, synthetic construct
  source 1..75: mol_type = other DNA
cacgccgacacagcaatgtacacagcgaaggaaggcggacgaggacaattttgcgttttttaccccagaaatgaa

SEQ ID NO: 657185 - DNA, 75 bp, synthetic construct
  source 1..75: mol_type = other DNA
gattgtgccactgggccgttgggttattctcgacgtcgtgcgtcaggttgcaaaatggagagataaaggtattaa

SEQ ID NO: 657186 - DNA, 75 bp, synthetic construct
  source 1..75: mol_type = other DNA
gtgaagccggagcgaagaaagtttacctcgcttctgcggcaccggaaattcgcttcccgaacgtttacgggattg

SEQ ID NO: 657187 - DNA, 75 bp, synthetic construct
  source 1..75: mol_type = other DNA
cagagatgatgcgcgattaaatcaatggatatcgaatagagtgcaggaattaggtgacagatattatcctgtaaa

SEQ ID NO: 657188 - DNA, 75 bp, synthetic construct
  source 1..75: mol_type = other DNA
gagaccgatgcacccattaagcaggcgcttgcgcatggattattattacacttaaaaaatatctaccctgttttt

SEQ ID NO: 657189 - DNA, 75 bp, synthetic construct
  source 1..75: mol_type = other DNA
ggatcttgatgtaaatatcgatcgcggcggtgtatttaatctttttgttaagaaatttcagtcagtgagtttgtt

SEQ ID NO: 657190 - DNA, 75 bp, synthetic construct
  source 1..75: mol_type = other DNA
tgctgtctgctgctgtacctctgccgctggagcctgctaacaccaccgtttctcaaccgatgatcacgttgctgc

SEQ ID NO: 657191 - DNA, 75 bp, synthetic construct
  source 1..75: mol_type = other DNA
tatacaaggggggggggggtactattgctctatatattatctttgggtattgcgttaggtatccagaacttaacg

SEQ ID NO: 657192 - DNA, 75 bp, synthetic construct
  source 1..75: mol_type = other DNA
gcccctatgttaaatatatacgatggctcatttatttcttcgaagttaatatctgagtttgggtttattggtgca

SEQ ID NO: 657193 - DNA, 75 bp, synthetic construct
  source 1..75: mol_type = other DNA
gatcctttccgcgttgatcggcgggatggtggcttgtggtggcgtgctgttgcgctatgcgatggcatccagaaa

SEQ ID NO: 657194 - DNA, 75 bp, synthetic construct
  source 1..75: mol_type = other DNA
ctcgatttcctcgatactttacgtaatgacgacgccaaagcggtgcagcgccagaacgaagtggaaaatctcgaa

SEQ ID NO: 657195 - DNA, 75 bp, synthetic construct
  source 1..75: mol_type = other DNA
aacccggatatccagcagtttgaatgctcggtgttcaacggcgtctacgtcaccaaagacgttgatcagggctac

SEQ ID NO: 657196 - DNA, 75 bp, synthetic construct
  source 1..75: mol_type = other DNA
atggtcaggccgttaaagatgatcccgatttctctatttctctcggcgctgatggtattggacgtaaactggaaa

SEQ ID NO: 657197 - DNA, 75 bp, synthetic construct
  source 1..75: mol_type = other DNA
cgattatatctctgcgttggtggtgaaagagtcgctagaaaacgtccgtaataaactggaaatcaaaacccagtt

SEQ ID NO: 657198 - DNA, 75 bp, synthetic construct
  source 1..75: mol_type = other DNA
aaaaatggaccagcgcggcggttgtcacgcctccagaacctgttcagtggcaagagctggagaaaacattcacta

SEQ ID NO: 657199 - DNA, 75 bp, synthetic construct
  source 1..75: mol_type = other DNA
agagcagggtttcatcactctgactatgcgtaaaggctctgacaatgcagcatttttctccgccaattcagtaca

SEQ ID NO: 657200 - DNA, 75 bp, synthetic construct
  source 1..75: mol_type = other DNA
gtcggtccacaaagtggtggtgctgtaaaagatttgcccgtgcatttatatgaggctatgggccagcttcaggct

SEQ ID NO: 657201 - DNA, 75 bp, synthetic construct
  source 1..75: mol_type = other DNA
tgatttccctggagtttatgactgggtggattaccctgattacccgattaagtttgtttttcggatacttgaaaa

SEQ ID NO: 657202 - DNA, 75 bp, synthetic construct
  source 1..75: mol_type = other DNA
gctttttctcggccaactcggtgcagaaacccaaaaaattccccaaaacccccgaaggcaaggctgcggagacca

SEQ ID NO: 657203 - DNA, 75 bp, synthetic construct
  source 1..75: mol_type = other DNA
gtgcgatggcgcacagcccgttcctctcatcagtatcatccgaatttttcggtctggactcatggacagagttac

SEQ ID NO: 657204 - DNA, 75 bp, synthetic construct
  source 1..75: mol_type = other DNA
tcacaaaacaacaagaagagcaaaaggccagaattgatcaactcgaaaaacgattagaacaagaaacccaaaaga

SEQ ID NO: 657205 - DNA, 75 bp, synthetic construct
  source 1..75: mol_type = other DNA
tttttacagtcccaaggtattcattttattcatgcttacattaatggcaattagctatatgtcatatatattcat

SEQ ID NO: 657206 - DNA, 75 bp, synthetic construct
  source 1..75: mol_type = other DNA
ggatgcttcaggtttttgtgaaagaggggatgatctccattgatggagagaagcaaaaaggtcgtgtgatcacca

SEQ ID NO: 657207 - DNA, 75 bp, synthetic construct
  source 1..75: mol_type = other DNA
tttacttcggagacaacgacacgggctggacggccgattttgattacctgctgagggaagactcgttaacgggag

SEQ ID NO: 657208 - DNA, 75 bp, synthetic construct
  source 1..75: mol_type = other DNA
tatgattatccttatgattgtcgtgatgatttagtcgatgatgacaaactcattcatctcatggctgccgtacga

SEQ ID NO: 657209 - DNA, 75 bp, synthetic construct
  source 1..75: mol_type = other DNA
tggaaaaatggcttcgcgaaatgtcgtctattccggagacagacgcgccattaagcaggcgcttgcgcatggatt

SEQ ID NO: 657210 - DNA, 75 bp, synthetic construct
  source 1..75: mol_type = other DNA
tatctatacgctgacaatatacacagcaataaaacctcagcaaaaacttttatagttaaccgtgtcagtagatta

SEQ ID NO: 657211 - DNA, 75 bp, synthetic construct
  source 1..75: mol_type = other DNA
tggatggtgagccaggctggtaccaggtcgcgatttctgtcagaccgcattttaaatacatgggtgccagtttcg

SEQ ID NO: 657212 - DNA, 75 bp, synthetic construct
  source 1..75: mol_type = other DNA
caaactgaatccgggtctgaaactgccttcacagaacattgctgtagtacgccgcgcagatggctccgggacgtc

SEQ ID NO: 657213 - DNA, 75 bp, synthetic construct
  source 1..75: mol_type = other DNA
gatagcgtagttgaacaggttcgcgctgcgtggaagaccaatattaaagacagtagcggcaagccgctgtactaa

SEQ ID NO: 657214 - DNA, 75 bp, synthetic construct
  source 1..75: mol_type = other DNA
gaatcgggacgctttcatcatgacggcaatcccatcatgacctggtgtatcggcaatgtggtcggcaaaaacatg

SEQ ID NO: 657215 - DNA, 75 bp, synthetic construct
  source 1..75: mol_type = other DNA
gaatttttgctctatcaagagtcaatatacaaagatactcttacagatgatactgtttattttgaggctgggcat

SEQ ID NO: 657216 - DNA, 75 bp, synthetic construct
  source 1..75: mol_type = other DNA
acgctatgggagctgatttgtctaatagtcaaaatatctcaccgggtgccgagccgttgattttaaacttaagta

SEQ ID NO: 657217 - DNA, 75 bp, synthetic construct
  source 1..75: mol_type = other DNA
tgccgggtacaacattgaggggccgtgctacgacaagcggcgggaagttatcgagatgctcaacgggtcggtacc

SEQ ID NO: 657218 - DNA, 75 bp, synthetic construct
  source 1..75: mol_type = other DNA
ggtaacgacggtatcgccgcgttcgttcagcgtctgccgggtgcaattggttacgttgaatatgcttacgctaag

SEQ ID NO: 657219 - DNA, 75 bp, synthetic construct
  source 1..75: mol_type = other DNA
catgctgcatgaggtcgggttgaatatcaaccacagcggtttgcatcgccactccgcttatattctgcaaaacag

SEQ ID NO: 657220 - DNA, 75 bp, synthetic construct
  source 1..75: mol_type = other DNA
caccgatgcgctttacaccacaatgcttaccgggatgggggcgcgacgtcagccactgatgtgggccatcaccac

SEQ ID NO: 657221 - DNA, 75 bp, synthetic construct
  source 1..75: mol_type = other DNA
gatttcggtgcttctgacgcgccgctgtctgacgaaaaactggctcaggaaggtctgttccagttcccgaccgta

SEQ ID NO: 657222 - DNA, 75 bp, synthetic construct
  source 1..75: mol_type = other DNA
acgtcggtactggctctaccgtaaaatggccgattggtctgggtggtaaaggaaacgacggtatcgccgcgttcg

SEQ ID NO: 657223 - DNA, 75 bp, synthetic construct
  source 1..75: mol_type = other DNA
ttgatggcactaacgaagcgactgttaaaaaacttgtcattgatggcccacaaaaatttttagtgccactaaatc

SEQ ID NO: 657224 - DNA, 75 bp, synthetic construct
  source 1..75: mol_type = other DNA
gacgcagctccgtggctgggtgaagggaaggacaagcgaactttaatagatctgataacaatgtggtatgaacgc

SEQ ID NO: 657225 - DNA, 75 bp, synthetic construct
  source 1..75: mol_type = other DNA
acgtcaggcgctgaatgccactgactttctgaagcgagcagaaaaggttatcccctacccaattgaaattatttc

SEQ ID NO: 657226 - DNA, 75 bp, synthetic construct
  source 1..75: mol_type = other DNA
gcagctcactgctgaaccttatgcgtttggtgagcaactaacgctggtggactgttatctttgcactatgcgggt

SEQ ID NO: 657227 - DNA, 75 bp, synthetic construct
  source 1..75: mol_type = other DNA
ggaagaaatgtttggccccgttgcggcaatcaccattgcgaaagatgcagaacatgcgctggaactggctaatga

SEQ ID NO: 657228 - DNA, 75 bp, synthetic construct
  source 1..75: mol_type = other DNA
aggcggaacctacgctggtggaaaatcagcaggcagttattgagtatcgaccgttggggacgattctggcgatta

SEQ ID NO: 657229 - DNA, 75 bp, synthetic construct
  source 1..75: mol_type = other DNA
gagagtgcgccatggttgggtgaagggaaagacaaacgaactttaatcgacctgattacgatgtggtacgaacgc

SEQ ID NO: 657230 - DNA, 75 bp, synthetic construct
  source 1..75: mol_type = other DNA
cattaacaaaatcacttcatgacatttacaattccagtcagaaaaaagcgaaacgcgtcagaataatcaacttcg

SEQ ID NO: 657231 - DNA, 75 bp, synthetic construct
  source 1..75: mol_type = other DNA
ccgctggaaaaacgccttgccccggtctttgtcgaaaatcgcgttatcaagatgacgcgttatgcgatccgtttt

SEQ ID NO: 657232 - DNA, 75 bp, synthetic construct
  source 1..75: mol_type = other DNA
gcagaaggcactaccgttatcgaaaacgcggcgcgtgaaccggaaatcgtcgataccgccaacttcctcattacg

SEQ ID NO: 657233 - DNA, 75 bp, synthetic construct
  source 1..75: mol_type = other DNA
aatatcagcgcgatcgctgatgctgtatgtcagttaccgaaattacaagaagtattaaaaaggaatgaaattatt

SEQ ID NO: 657234 - DNA, 75 bp, synthetic construct
  source 1..75: mol_type = other DNA
cagttctcaggtgaaaattcagctaagtcgaagcgcctcacgagcattgacgacggcgaaagaaattcttgaaac

SEQ ID NO: 657235 - DNA, 75 bp, synthetic construct
  source 1..75: mol_type = other DNA
cgctaatttgcaaccagaagccctcgccttcaatggtattgacccgaacgatcccgatcgcggtgcagtcagcga

SEQ ID NO: 657236 - DNA, 75 bp, synthetic construct
  source 1..75: mol_type = other DNA
ggcagggaattactatccggctacagtactggcagatgtaacgccggaaatgaccgcgtttcgtgaagagctgtt

SEQ ID NO: 657237 - DNA, 75 bp, synthetic construct
  source 1..75: mol_type = other DNA
aagccccggctgagcgtgataataatttcattagagcttttagagcttttacatctcctgaatctgatttttcga

SEQ ID NO: 657238 - DNA, 75 bp, synthetic construct
  source 1..75: mol_type = other DNA
tttccaatacgaccattatatcgacttggagaacattattttagaaatgtggacgatgatctaaaaaataaagtc

SEQ ID NO: 657239 - DNA, 75 bp, synthetic construct
  source 1..75: mol_type = other DNA
ctggttcgttaaactacaaatctataaatcttattgtcggtgatttccgttatgggaatgcggtgcttaccgata

SEQ ID NO: 657240 - DNA, 75 bp, synthetic construct
  source 1..75: mol_type = other DNA
atgaggcgtgtgcccgtgatttcctgggttcaagctgggcagtttacggaatgtaaagccgctgatttattcagt

SEQ ID NO: 657241 - DNA, 75 bp, synthetic construct
  source 1..75: mol_type = other DNA
ctcggtatcccaacatccctatcaatggtaattgccttatcattggtgtagtcaaaggagttcaatacgaactct

SEQ ID NO: 657242 - DNA, 75 bp, synthetic construct
  source 1..75: mol_type = other DNA
acctgtggttggctactgctgtcctcttttacagctccgttacccgttcctgcgtggctgatacccgtaacgcca

SEQ ID NO: 657243 - DNA, 75 bp, synthetic construct
  source 1..75: mol_type = other DNA
cggcacgtctggaatgcggcggcgtgtttatcaacggtttctgtgccagcgacgcacgggtcgcttttggcggtg

SEQ ID NO: 657244 - DNA, 75 bp, synthetic construct
  source 1..75: mol_type = other DNA
cggtgaccggcagtgtccgtgcgggagcggctattggcgcacaggccggcgcagcgctaaaaaaatgcgtactgg

SEQ ID NO: 657245 - DNA, 75 bp, synthetic construct
  source 1..75: mol_type = other DNA
aactggctaatgacagcgagttcggcttgtcggcaaccctttttacacgcaatgaaacattagccagacagatgg

SEQ ID NO: 657246 - DNA, 75 bp, synthetic construct
  source 1..75: mol_type = other DNA
atgagcattcgtatcgagattggcgagcgttatgtcgtcacaaatgaccgttttcagttcattttgcaggagaga

SEQ ID NO: 657247 - DNA, 75 bp, synthetic construct
  source 1..75: mol_type = other DNA
aacctactaagcctattcctgatgaagcaattgccattcatgggatcacaaatgaaatggttgcctatgctcctg

SEQ ID NO: 657248 - DNA, 75 bp, synthetic construct
  source 1..75: mol_type = other DNA
agcagccgtcccgtggagaaaatccgccagtggcgacagcgttatgcccgcccgatactggaagatctgtggtcc

SEQ ID NO: 657249 - DNA, 75 bp, synthetic construct
  source 1..75: mol_type = other DNA
actggttgagaaagtgttcggcgtgaccccgtcagaggcggccgggaaggtgaacgccgtgaccggcaacctgcc

SEQ ID NO: 657250 - DNA, 75 bp, synthetic construct
  source 1..75: mol_type = other DNA
tgctatcaaattcctgccttactgctaaacggtcttaccgtggttgtttcaccactgatttcgttgatgaaagat

SEQ ID NO: 657251 - DNA, 75 bp, synthetic construct
  source 1..75: mol_type = other DNA
ttgagcatctggcgcactggaatccggtgttattagccgttgatgaagcgcactgtatctcccaatggggccacg

SEQ ID NO: 657252 - DNA, 75 bp, synthetic construct
  source 1..75: mol_type = other DNA
ggtggcgaccgtggcgtttggcatgggcatcaacaagcctaacgtccgcttcgtggtccactttgatattccgcg

SEQ ID NO: 657253 - DNA, 75 bp, synthetic construct
  source 1..75: mol_type = other DNA
tacggaatttaatcgcttctcacaatttgcctctttttcatcgtctagtgcgccttcggttaccgcaccattccg

SEQ ID NO: 657254 - DNA, 75 bp, synthetic construct
  source 1..75: mol_type = other DNA
ttaaataacattcatgtccttgactgctttgttaatgttgatctggaaccagctgatggcgttgtcgactttggt

SEQ ID NO: 657255 - DNA, 75 bp, synthetic construct
  source 1..75: mol_type = other DNA
tggtgctaataaccagcgtatccgcgactatggtcatgacaaactgaaagtctatggcatgggccgtgataaaag

SEQ ID NO: 657256 - DNA, 75 bp, synthetic construct
  source 1..75: mol_type = other DNA
cgctgaacgggtttgccggggaatgggttatctatcaatccttcttcaaactgagcaatagtggcgcgtttgttg

SEQ ID NO: 657257 - DNA, 75 bp, synthetic construct
  source 1..75: mol_type = other DNA
cctgggtgtgcggctacgaccatgaaaaatcaatggtgattaccgctcacggttttgccatgccggtgaaacagg

SEQ ID NO: 657258 - DNA, 75 bp, synthetic construct
  source 1..75: mol_type = other DNA
gtgcgttgctgttccgccggatggcgctggttgaactggcggtactggtggtgattattgtttcacgaggagcct

SEQ ID NO: 657259 - DNA, 75 bp, synthetic construct
  source 1..75: mol_type = other DNA
gcgccgctcctgatgagcgtaagcgtagtggcactggcgatttgctgcgtaattggcggtgttgctgcgccgtgg

SEQ ID NO: 657260 - DNA, 75 bp, synthetic construct
  source 1..75: mol_type = other DNA
ccgggattatcccactgcatggttgggtgccgcaggctcatgccaacgcctctgcgccagcggcagcgctgtttt

SEQ ID NO: 657261 - DNA, 75 bp, synthetic construct
  source 1..75: mol_type = other DNA
ttcaccgtgctgactggcgcggtcggcgtgagcggtgcgctgtcgctggtgagttttgatatccaaatttccccg

SEQ ID NO: 657262 - DNA, 75 bp, synthetic construct
  source 1..75: mol_type = other DNA
cttcggtcaccgcaccattcagggcagaactgagtgcgaacccggcagaaacggttgttgagggaccgtttagta

SEQ ID NO: 657263 - DNA, 75 bp, synthetic construct
  source 1..75: mol_type = other DNA
gacaaaatcatcgaccatatccccggcctcaatcgtattcatatcgacccggaaaccgtacagaaaaagtttggc

SEQ ID NO: 657264 - DNA, 75 bp, synthetic construct
  source 1..75: mol_type = other DNA
tggtggatttaggctggccgccgctttccgctattacatggggttcgccaattgccccgtttgttattcccctga

SEQ ID NO: 657265 - DNA, 75 bp, synthetic construct
  source 1..75: mol_type = other DNA
gcattaagcataaatatctggacgagatctggaacaacaaagagaagtaccgtggtcgtattgtcgaggttcatt

SEQ ID NO: 657266 - DNA, 75 bp, synthetic construct
  source 1..75: mol_type = other DNA
taaacccgtcgccactctggatgatattctgcatcgcggcgactggtgcgcgcagttgcaacaggcgtggtatga

SEQ ID NO: 657267 - DNA, 75 bp, synthetic construct
  source 1..75: mol_type = other DNA
tttgaaggcacgtatatcgttctgcccgcgaagccatttggcccgtatgaagagggcgggaacgaagaagagtag

SEQ ID NO: 657268 - DNA, 75 bp, synthetic construct
  source 1..75: mol_type = other DNA
catacgctgtttgccgggagtttattctcgctggctacgctcaccggttgggggcttatctggctaatgctgcgc

SEQ ID NO: 657269 - DNA, 75 bp, synthetic construct
  source 1..75: mol_type = other DNA
catagccacgaagatttcatcgaacgtttcatgaagcgactggacgagaatgaagagggagagatgggcaaagat

SEQ ID NO: 657270 - DNA, 75 bp, synthetic construct
  source 1..75: mol_type = other DNA
agcttacgccacccacgactgaaatggccgcgttgcttacgcgatacagaagatcgaatcggagataaagaatga

SEQ ID NO: 657271 - DNA, 75 bp, synthetic construct
  source 1..75: mol_type = other DNA
aagtcgctctgctgccatggcgcgattccatggacgatctgcgtgcggatcttgcgcacgttaaagggcactgtt

SEQ ID NO: 657272 - DNA, 75 bp, synthetic construct
  source 1..75: mol_type = other DNA
acaagctggatgccataaaaacgatgggaaccaacgccaaaaaagaggcgctggccaaccttgatgaatttgagc

SEQ ID NO: 657273 - DNA, 75 bp, synthetic construct
  source 1..75: mol_type = other DNA
agaacgtgaaagccattggtgccgtttaccacattttcgatttcttcttaccggagtggcgtgctcaggcaaaaa

SEQ ID NO: 657274 - DNA, 75 bp, synthetic construct
  source 1..75: mol_type = other DNA
agacgaggattcagaagacggtgaaatcatcgacttcgagcctggcgatccggattctggatttgcgcatacgct

SEQ ID NO: 657275 - DNA, 75 bp, synthetic construct
  source 1..75: mol_type = other DNA
tttcaaaaagcgctaagtggctggatagccggaattggcggcgcggttggtagcctgtatacggcagccgcgggc

SEQ ID NO: 657276 - DNA, 75 bp, synthetic construct
  source 1..75: mol_type = other DNA
atgatttaaatacaacacgacctaagcgagacgcgatagtatataaaatgcatggtgatatttcgtccccatcca

SEQ ID NO: 657277 - DNA, 75 bp, synthetic construct
  source 1..75: mol_type = other DNA
aatcttcaggtgatcgccgaaggtgtagagagtgcaaaggaagatgcttttttaaccaagaacgggatcaatgag

SEQ ID NO: 657278 - DNA, 75 bp, synthetic construct
  source 1..75: mol_type = other DNA
tggcgggaaaaaggcataaacctgcgagtggcggtaaatatttctgcacgtcagctcgccgatcaaaccattttc

SEQ ID NO: 657279 - DNA, 75 bp, synthetic construct
  source 1..75: mol_type = other DNA
atcaatacgtttaactcaatttaaaataccaaaaaaagaggaagtttatagagtatattttgaggcggtaaaacc

SEQ ID NO: 657280 - DNA, 75 bp, synthetic construct
  source 1..75: mol_type = other DNA
gtttactcatggctccatttgttgcaaatgcaaactttatgatatatccaatatcaaaagatttaaagaatggaa

SEQ ID NO: 657281 - DNA, 75 bp, synthetic construct
  source 1..75: mol_type = other DNA
gatttgtctgagcttactgaaaaagatttttcggtaaaaaaaacaatagaagttgtaataaaaatcataaacaaa

SEQ ID NO: 657282 - DNA, 75 bp, synthetic construct
  source 1..75: mol_type = other DNA
atgaaacacatctgtaaaaagtcacatcgtcacgacagtatgtttgatgttctttctgcaaatcagggtaacgtt

SEQ ID NO: 657283 - DNA, 75 bp, synthetic construct
  source 1..75: mol_type = other DNA
acgccgcgtaacctcaagaaactgaacgtcattgatgaaggctggcgtctgctggacttcaaaaatcacaaggtc

SEQ ID NO: 657284 - DNA, 75 bp, synthetic construct
  source 1..75: mol_type = other DNA
ctatatcaccatcacacagaacatcgtcgactttgactctgacaaggcatccagtgctgcccgcgcggcatgggg

SEQ ID NO: 657285 - DNA, 75 bp, synthetic construct
  source 1..75: mol_type = other DNA
attcacgcaggtgtgttcaacatcgaaagcaaccgcttcgtactcgatgccgatctgaccaacgaccgtaccaac

SEQ ID NO: 657286 - DNA, 75 bp, synthetic construct
  source 1..75: mol_type = other DNA
attacaacaccggtaccgaagagactgcaacgcttatcgatatcaccgcgaacagcttgtggccgtcatcgactg

SEQ ID NO: 657287 - DNA, 75 bp, synthetic construct
  source 1..75: mol_type = other DNA
aacgcttatcgatatcaccgcgaacagcttgtggccgtcatcgactgttggcgttgagaacgatgattcagcata

SEQ ID NO: 657288 - DNA, 75 bp, synthetic construct
  source 1..75: mol_type = other DNA
tgttttttaatgtttttgctgccagtgcaaattttatggtatatccgatctcaaaggatatacagagtggtggca

SEQ ID NO: 657289 - DNA, 75 bp, synthetic construct
  source 1..75: mol_type = other DNA
aaaaagaacgctggtctgacggcaaagatcccgctgcctttatcaaaactggtctggatgccgcaggtatgagcc

SEQ ID NO: 657290 - DNA, 75 bp, synthetic construct
  source 1..75: mol_type = other DNA
gaacgccgataaaacgctgattaaagtgttcagctatgcctgcccgttctgctacaagtatgacaaagcagtgac

SEQ ID NO: 657291 - DNA, 75 bp, synthetic construct
  source 1..75: mol_type = other DNA
ttggagcaagtgcgaatgctggtatcagttatctggctgatggtactgtagatccggcaaacgcagccattgcag

SEQ ID NO: 657292 - DNA, 75 bp, synthetic construct
  source 1..75: mol_type = other DNA
gtgggcataagagaactaaacctcaccaaagaacagcatgagtggctgaatggctggcttgaactgtggggcgca

SEQ ID NO: 657293 - DNA, 75 bp, synthetic construct
  source 1..75: mol_type = other DNA
cggtgttgaagggatgcctgatgggctggatcttgatttacaaaatgtactactctctccagatgtagttaaagc

SEQ ID NO: 657294 - DNA, 75 bp, synthetic construct
  source 1..75: mol_type = other DNA
aaaaagaacgctggtctgacggtaaagatcccgctgcctttatcaaaactggtctggatgcagcaggtatgagct

SEQ ID NO: 657295 - DNA, 75 bp, synthetic construct
  source 1..75: mol_type = other DNA
ctttcccctcacaattcgcgaaaacgtagcgaaatttgttgcgctgtacggaacaatagtgatagtgttcctttc

SEQ ID NO: 657296 - DNA, 75 bp, synthetic construct
  source 1..75: mol_type = other DNA
caactgacacaacaatttcctgattatcgtcattatctacatactatctacgtattacagcctgagaaatggcgt

SEQ ID NO: 657297 - DNA, 75 bp, synthetic construct
  source 1..75: mol_type = other DNA
ctggcaatagttgggaatgttctttttacaccggaagaaaaaggcatgagtgttttactggggccacaggaagag

SEQ ID NO: 657298 - DNA, 75 bp, synthetic construct
  source 1..75: mol_type = other DNA
ggcgtggttgctacagaccacctgactgttgatagctacagtaccgttaatttaaccgaatctaccggttggaat

SEQ ID NO: 657299 - DNA, 75 bp, synthetic construct
  source 1..75: mol_type = other DNA
gaaagccggttacgacttcaaactgggtgatgcaggttacgtgactccttacggcagcgtttctggtctgttcca

SEQ ID NO: 657300 - DNA, 75 bp, synthetic construct
  source 1..75: mol_type = other DNA
cttcctggatgttgctgccgggttatgtgaaggggacgagctgttgccagaaacgcgcccctgttcagaggcgcg

SEQ ID NO: 657301 - DNA, 75 bp, synthetic construct
  source 1..75: mol_type = other DNA
tcttgatgcggtgcgcgatgcggtacgcagtgtcagttgccgggtggcagaagatgcgcggcgtatccgggcggc

SEQ ID NO: 657302 - DNA, 75 bp, synthetic construct
  source 1..75: mol_type = other DNA
ctccgccattcagaaactgaccggaaccggggcggaacttgttctgtccggcagtcagtggcagtcgctgccggt

SEQ ID NO: 657303 - DNA, 75 bp, synthetic construct
  source 1..75: mol_type = other DNA
ttcgtcggtggaaatgtacctggtctgtgagtgtgtggagcatatcctgtccagtgggctggcctgcgatgtgct

SEQ ID NO: 657304 - DNA, 75 bp, synthetic construct
  source 1..75: mol_type = other DNA
tgatcgccgtctgatgacagaaaaagtgctgggcacgggtgaaaaaccagcatggcatttcacgccagatgttac

SEQ ID NO: 657305 - DNA, 75 bp, synthetic construct
  source 1..75: mol_type = other DNA
ggctgtacttgcggcggtgcgcgatgcggtacgcagtgtcagttgccgggtggcagaagatacgcggcgtatccg

SEQ ID NO: 657306 - DNA, 75 bp, synthetic construct
  source 1..75: mol_type = other DNA
ttctgcgggaggtggtccgggaagcccggaccgaaatccgcagcatggcggatgccctggcaaaaatccggaaat

SEQ ID NO: 657307 - DNA, 75 bp, synthetic construct
  source 1..75: mol_type = other DNA
gatgtgctgcgtataccggatgaaccgccccgccgctggtttgacagggatattctgcgggaggtggtcctggag

SEQ ID NO: 657308 - DNA, 75 bp, synthetic construct
  source 1..75: mol_type = other DNA
atgaatgaaacgctgaatgcactgatttatcgccacgccagcaaccagttgctggcgcagggctggccggaagaa

SEQ ID NO: 657309 - DNA, 75 bp, synthetic construct
  source 1..75: mol_type = other DNA
cgaagcatctgttaccaggtggcagaagatgcgcggcgtatccgtgcggcgctgaccaccaccggtcagacgttg

SEQ ID NO: 657310 - DNA, 75 bp, synthetic construct
  source 1..75: mol_type = other DNA
atgtgctgcgtataccggatgaaccgccccgccgctggtttgaccgtggtgttctgcgggaggtggtccgggaag

SEQ ID NO: 657311 - DNA, 75 bp, synthetic construct
  source 1..75: mol_type = other DNA
gaaatcagggcagttcttgatgcagtgcgcaatgcagtacgaagcatctgttaccaagtggcagaagatgcccgg

SEQ ID NO: 657312 - DNA, 75 bp, synthetic construct
  source 1..75: mol_type = other DNA
tgaccgaagacgaaatcagggccgttcttgatgcggtgcgcgatgcggtacgcagtgtcagttgccgggtggcag

SEQ ID NO: 657313 - DNA, 75 bp, synthetic construct
  source 1..75: mol_type = other DNA
ctattattatgcgtttaacacgcaaaaagggccgacggcagatcagcgcgttcgtctggcattaagtatgacgat

SEQ ID NO: 657314 - DNA, 75 bp, synthetic construct
  source 1..75: mol_type = other DNA
catatcagcaacgttttcaccaatgaaccagcattacgtcttgggcgtaaactgattgaggcgacctttgccgaa

SEQ ID NO: 657315 - DNA, 75 bp, synthetic construct
  source 1..75: mol_type = other DNA
tctttcccgtatgccggagaatggctgaccgaagacgaaatcagggccgttcttgatgcggtgcgcgatgcggta

SEQ ID NO: 657316 - DNA, 75 bp, synthetic construct
  source 1..75: mol_type = other DNA
accgtggtgttctgcgggaggtggtcctggaagcccggagtgaaatccgcagcatggcggatgcactggcaaaaa

SEQ ID NO: 657317 - DNA, 75 bp, synthetic construct
  source 1..75: mol_type = other DNA
cattgtatttcccaatggggtcacgatttccgcccggaatatgccgcgctcggccagttgcgccagcgtttcccg

SEQ ID NO: 657318 - DNA, 75 bp, synthetic construct
  source 1..75: mol_type = other DNA
atgcgttttgcaccatcgctggtggtggaagatgcggatatcgatgaagggatgcaacgttttgcccgcgcggtg

SEQ ID NO: 657319 - DNA, 75 bp, synthetic construct
  source 1..75: mol_type = other DNA
aaaggtcgggcgcgcgatttcctttatgcgagcgccgaggctggcgtaatggtgctgaacgccgggacagatgtg

SEQ ID NO: 657320 - DNA, 75 bp, synthetic construct
  source 1..75: mol_type = other DNA
acgtcaacgcattccgggaatatttcacgctttaacaatccggcatacgacaaagtactggcccaggcatcaacg

SEQ ID NO: 657321 - DNA, 75 bp, synthetic construct
  source 1..75: mol_type = other DNA
ccaatggacgattaatcaagccgtggctgaaaggttatcccattaataaccctgaagatgtggcgtacagtcgga

SEQ ID NO: 657322 - DNA, 75 bp, synthetic construct
  source 1..75: mol_type = other DNA
ccaatttatcaatataccaatggacggttaatcaaaccgtggctgaaaggttatcccattaataacccggaagat

SEQ ID NO: 657323 - DNA, 75 bp, synthetic construct
  source 1..75: mol_type = other DNA
ttccctgtcgtatgctgcagaagttccgggcggcacagtactggcagagaagcaagagctggtacgccacattaa

SEQ ID NO: 657324 - DNA, 75 bp, synthetic construct
  source 1..75: mol_type = other DNA
gaaaatactgtgcaggcgcgtaatgctgattacaatgcagcagagaaaattctgatggagcaggcaccgattgca

SEQ ID NO: 657325 - DNA, 75 bp, synthetic construct
  source 1..75: mol_type = other DNA
ccgtttgaacaaatgagccaggaagaactgaatgcgcaagcaaaaacattgttgagtgccgcgggttatggtcca

SEQ ID NO: 657326 - DNA, 75 bp, synthetic construct
  source 1..75: mol_type = other DNA
gctatggcgtaaattacaaaacgggatatctggacggaaaaattaccgatgacggcgaatttattcctgccccac

SEQ ID NO: 657327 - DNA, 75 bp, synthetic construct
  source 1..75: mol_type = other DNA
gatgccgaccagcttcgcgcctttgtagtcagtgaggatcggatgaaagaggcgtttggaatgttgaaaaccttg

SEQ ID NO: 657328 - DNA, 75 bp, synthetic construct
  source 1..75: mol_type = other DNA
gccgactgtatattaatgccgataatgaagcgtccatccgttttatggccgttcatcccgacgtgcaggacaaag

SEQ ID NO: 657329 - DNA, 75 bp, synthetic construct
  source 1..75: mol_type = other DNA
ggctgatgtatgacagagtacgccgtaacgctcaaccagaactgttttcactgcatgaagatgacgcaaattacg

SEQ ID NO: 657330 - DNA, 75 bp, synthetic construct
  source 1..75: mol_type = other DNA
tcacccctgctggctcgatgaagatgacgaaaacctgcccgtggtgctcgatgccatcgtgaaccggggagcacg

SEQ ID NO: 657331 - DNA, 75 bp, synthetic construct
  source 1..75: mol_type = other DNA
cacgctaatcgacaacgctgccagtattctggcgtcgttaatgccaccggaagtaagcagccgcttgcagcatcg

SEQ ID NO: 657332 - DNA, 75 bp, synthetic construct
  source 1..75: mol_type = other DNA
tagaaaaaacagattctggcattctggcaacgctggaccgccagcgctgcatcgaagtggatgcggtaattgccg

SEQ ID NO: 657333 - DNA, 75 bp, synthetic construct
  source 1..75: mol_type = other DNA
cagcaagccgattagcggtaaacctcatgcggtagccgacctcggtgcgttaagtggcgatctcgaccgtctggc

SEQ ID NO: 657334 - DNA, 75 bp, synthetic construct
  source 1..75: mol_type = other DNA
ggcgtgcgtattcaacaatataccgggcaaaaatttatcaccaccatgccggaaaccggcaatcagaatccgcac

SEQ ID NO: 657335 - DNA, 75 bp, synthetic construct
  source 1..75: mol_type = other DNA
tacgactgcgtgatgcctgtttatcagttccggcgtgatttttctctggaacaggccgcaccacacaaacagccc

SEQ ID NO: 657336 - DNA, 75 bp, synthetic construct
  source 1..75: mol_type = other DNA
tgccgttggcgtattagctgatagcttgttaaaaacgagtacgttagtgaaatggcgtgaagggcttatagcagg

SEQ ID NO: 657337 - DNA, 75 bp, synthetic construct
  source 1..75: mol_type = other DNA
atcgaagtggatgcggtaattgccgccaccggactgcgcccggaaaccgccctggcacgacgcgccgggctgacg

SEQ ID NO: 657338 - DNA, 75 bp, synthetic construct
  source 1..75: mol_type = other DNA
gttcatcccgacgtgcaggacaaaggattaggaacgctgatggcgatgactctggagtcggtagcgcgccaggaa

SEQ ID NO: 657339 - DNA, 75 bp, synthetic construct
  source 1..75: mol_type = other DNA
gttcgggcttcgccgcccgccaactggtgaaaaatattcgcaaacaggacgccactattccattaaccctgattg

SEQ ID NO: 657340 - DNA, 75 bp, synthetic construct
  source 1..75: mol_type = other DNA
catcgaaacagagtctggtgaccgcaagctggaaatcgtgaaacttgatgatcccaatcttattatcaacaaacg

SEQ ID NO: 657341 - DNA, 75 bp, synthetic construct
  source 1..75: mol_type = other DNA
atctaacaactgacaacctctatgagggcgcacaagcctggtatccccattactcctggcatagcgatggtcgct

SEQ ID NO: 657342 - DNA, 75 bp, synthetic construct
  source 1..75: mol_type = other DNA
gctgcgtataccggatgaaccgtcccgtcgctggtttgaccgggatattctgcgggaggttgttctggaggcacg

SEQ ID NO: 657343 - DNA, 75 bp, synthetic construct
  source 1..75: mol_type = other DNA
ctcctactccctctatcgcttcgaatccaacgtccgctcggcgaccgtcgtcggcatggtcggtgcaggcgggat

SEQ ID NO: 657344 - DNA, 75 bp, synthetic construct
  source 1..75: mol_type = other DNA
cctactccctctatcgcttcgaatccaacgtccgctcggcgaccgtcgtcggcatggtcggcgcgggcgggatcg

SEQ ID NO: 657345 - DNA, 75 bp, synthetic construct
  source 1..75: mol_type = other DNA
ttatccacaccaccggcgtactttccaaactgctttccgaagcggtagaagcgattgaacccggcccggtggagg

SEQ ID NO: 657346 - DNA, 75 bp, synthetic construct
  source 1..75: mol_type = other DNA
tcctggcctccgccattcagaaactgaccggaaccggggcggaactggtactgtccggcagtcagtggcagtcgc

SEQ ID NO: 657347 - DNA, 75 bp, synthetic construct
  source 1..75: mol_type = other DNA
tgtgggttttcagttatgtggcctcagcgtcgtgtgcgggctgtgccgtgcctccatcgtagccgggcttctgcg

SEQ ID NO: 657348 - DNA, 75 bp, synthetic construct
  source 1..75: mol_type = other DNA
atgaataaaacgctgaatgcactgatttgtcgtcatgcccgcgacctgctgctggcgcagggctggccggaagag

SEQ ID NO: 657349 - DNA, 75 bp, synthetic construct
  source 1..75: mol_type = other DNA
cagtgtcagttgccgggtggcagaagatgcgcggcgtatccgggcggcgctgaccacaaccggtcagacgttact

SEQ ID NO: 657350 - DNA, 75 bp, synthetic construct
  source 1..75: mol_type = other DNA
gaggcgctttggtcagcattgcaaaattccgccaggagatatggttgaaatcgtggagattgccatgcgcaaggc

SEQ ID NO: 657351 - DNA, 75 bp, synthetic construct
  source 1..75: mol_type = other DNA
acgcgaagagacgctggcgcagcatggcgcggtgagcgaacccgtcgtggtggaaatggcgataggcgcactgaa

SEQ ID NO: 657352 - DNA, 75 bp, synthetic construct
  source 1..75: mol_type = other DNA
gatccgctggtgaaattttccgatattaccgtcgatttagccgcccgcgtgatccatcgcggtgaggaagaggtg

SEQ ID NO: 657353 - DNA, 75 bp, synthetic construct
  source 1..75: mol_type = other DNA
ttaccgtcgatttagcagctcgtgtgatccatcgcggtgaggaagaggtgcatctcaccccgattgagttccgcc

SEQ ID NO: 657354 - DNA, 75 bp, synthetic construct
  source 1..75: mol_type = other DNA
gatccgctggtgaaattttccgatgttaccgtcgatttagcagctcgtgtgatccatcgaggtgaggaagaggtg

SEQ ID NO: 657355 - DNA, 75 bp, synthetic construct
  source 1..75: mol_type = other DNA
gaaaaactcagcacccgcactatcgcaaaagtggaaagcgaactgtatgacgtgctgatcaagctggaggaagcg

SEQ ID NO: 657356 - DNA, 75 bp, synthetic construct
  source 1..75: mol_type = other DNA
aggaagaagcttaataacaagaaatcgtatattgttaatgatggtgtttgtaagttaacaccagaaattggttcc

SEQ ID NO: 657357 - DNA, 75 bp, synthetic construct
  source 1..75: mol_type = other DNA
caaaaactggaacaggacccggcccggcctcgccatttcattactgaaaccggtattgggtatcggtttatgctt

SEQ ID NO: 657358 - DNA, 75 bp, synthetic construct
  source 1..75: mol_type = other DNA
aggcagaaagcctgatagcacaggctctgggtgttacacctgaagagatctggccaagtcgttatcataggaaaa

SEQ ID NO: 657359 - DNA, 75 bp, synthetic construct
  source 1..75: mol_type = other DNA
tttcagctatctggcggatgatctgcgcgagcttcagcagctcatccagcagcaaaacaaactccattaattcct

SEQ ID NO: 657360 - DNA, 75 bp, synthetic construct
  source 1..75: mol_type = other DNA
tcaacaatcgtttcactactagtgaaacagttgaaaaactcatgcgtgatccttttactgaagagaaagggaaag

SEQ ID NO: 657361 - DNA, 75 bp, synthetic construct
  source 1..75: mol_type = other DNA
tgctggctgtgttgctcaacaacgccgggaaagtgcttacccagcgccagttactcaaccaggtatgggggccaa

SEQ ID NO: 657362 - DNA, 75 bp, synthetic construct
  source 1..75: mol_type = other DNA
aggcccgtctgcgcgtcgctttacgccgccactccgccaccgccgcgcccgatccgctggtgaaattttccgatg

SEQ ID NO: 657363 - DNA, 75 bp, synthetic construct
  source 1..75: mol_type = other DNA
attgtgctttccgcacgtagtgaagagagcgacaaaatcgccgcgctggatgccggagctgatgattacctgagt

SEQ ID NO: 657364 - DNA, 75 bp, synthetic construct
  source 1..75: mol_type = other DNA
acgcagacgccatcgcttctggtcacgggggaatacaaatcggaagcctctcagctgacggtgaccacccggacc

SEQ ID NO: 657365 - DNA, 75 bp, synthetic construct
  source 1..75: mol_type = other DNA
ccggatgaagttgacgtcattactgtggtgaaagtgattgatacgtgcccgagcggtgcgctgaaataccgtcat

SEQ ID NO: 657366 - DNA, 75 bp, synthetic construct
  source 1..75: mol_type = other DNA
tctcaaacgtaagccgtggatcatgccggatgaagtcgacgtcaccactgtggtgaaagtgattgatacgtgccc

SEQ ID NO: 657367 - DNA, 75 bp, synthetic construct
  source 1..75: mol_type = other DNA
gaagttgacgtcgccactgtggttaaagtgattgatacgtgcccgagcggcgcgctgaaataccgtcataaataa

SEQ ID NO: 657368 - DNA, 75 bp, synthetic construct
  source 1..75: mol_type = other DNA
cgaccagatacagaaaacaacgccagaagagatatcttcgacaacaccgcctgtacctgttagaaaaaaacataa

SEQ ID NO: 657369 - DNA, 75 bp, synthetic construct
  source 1..75: mol_type = other DNA
cggcgtagaaggtgaaaacagcgccgactggattgtcgtggatttgggcgatgtgattgtccatgttatgcagga

SEQ ID NO: 657370 - DNA, 75 bp, synthetic construct
  source 1..75: mol_type = other DNA
tctcaaacgtaagccgtggatcatgccggatgaagtcgacgttgccactgtggttaaggtaatgactccaactta

SEQ ID NO: 657371 - DNA, 75 bp, synthetic construct
  source 1..75: mol_type = other DNA
acaccgttgatgaactctgctggaggtattacggcaggacggcgggagtaaccgaagccgtgcatgaagccaatc

SEQ ID NO: 657372 - DNA, 75 bp, synthetic construct
  source 1..75: mol_type = other DNA
agtcagccagggcgaactgagcaggagaacgccctgcggaatggtcttacgccgtttgagattggccccggtgac

SEQ ID NO: 657373 - DNA, 75 bp, synthetic construct
  source 1..75: mol_type = other DNA
tcgccctgaccggcacagcatcttccggcgggaagctgagcgtgaccattaatggtacccgtattgatgtcggta

SEQ ID NO: 657374 - DNA, 75 bp, synthetic construct
  source 1..75: mol_type = other DNA
tacgtggcaacggcaagttatttaatctcaaacgaaagccgtggatcatgccggatgaagtcgacgttgccactg

SEQ ID NO: 657375 - DNA, 75 bp, synthetic construct
  source 1..75: mol_type = other DNA
ctctgaccaatccgctgtatgaggaaacgaagatggctaaacagaagtgtacctggttatttgcggcgatcaacc

SEQ ID NO: 657376 - DNA, 75 bp, synthetic construct
  source 1..75: mol_type = other DNA
gtagctttaaaattaaaggtgcgattcaccttgtgagtgcgaagcccgacagtgcagcaacactaaccgggcttc

SEQ ID NO: 657377 - DNA, 75 bp, synthetic construct
  source 1..75: mol_type = other DNA
cggtttttttgtgcgtaccgcattgccgcacattttttcgcatcagaattatggtggggcgtacggggccgactt

SEQ ID NO: 657378 - DNA, 75 bp, synthetic construct
  source 1..75: mol_type = other DNA
gtctatagttaattccgaggtcaggacgttaaccgccgataccgatagcgggaaagatgcagcggcagcacttgc

SEQ ID NO: 657379 - DNA, 75 bp, synthetic construct
  source 1..75: mol_type = other DNA
cagggaatgcaaactaacctcactttgaaagaggagagtaatgcagactggctgcccaagagtgatcagccaata

SEQ ID NO: 657380 - DNA, 75 bp, synthetic construct
  source 1..75: mol_type = other DNA
gcggcagaggccggaacgaaggctgaccgcaaagcagcggccgggctggccgtgaagctgatggagaaaacccaa

SEQ ID NO: 657381 - DNA, 75 bp, synthetic construct
  source 1..75: mol_type = other DNA
ctgattgttccgcaacagcagaatccggcgcggcagttgatcgggtttcgcaacggcgtgctcgatacccggaca

SEQ ID NO: 657382 - DNA, 75 bp, synthetic construct
  source 1..75: mol_type = other DNA
gatagcaccggaggaacgagatactcagctcaaagagaagattgccagcgagctggcggtaattgttcgccagct

SEQ ID NO: 657383 - DNA, 75 bp, synthetic construct
  source 1..75: mol_type = other DNA
caataacccgatgcgtttcactgatcgtagtggtggagtttcacgccgaagggtgatcctgcatttccccgacca

SEQ ID NO: 657384 - DNA, 75 bp, synthetic construct
  source 1..75: mol_type = other DNA
gaattacgagaagcgccataccaaacaggggatacagaccataagcgctaacttaagggttgtggtattacgcct

SEQ ID NO: 657385 - DNA, 75 bp, synthetic construct
  source 1..75: mol_type = other DNA
gattgccccggaagagcgtgacccgacgctgaaagataaaatcgcccgggagctggccgtcatcgtgcgccagct

SEQ ID NO: 657386 - DNA, 75 bp, synthetic construct
  source 1..75: mol_type = other DNA
ttatggtgctggcgaaccgttatgactggcagctcttcctcgaagtgaccggtcccggtggcagcgggaaaagta

SEQ ID NO: 657387 - DNA, 75 bp, synthetic construct
  source 1..75: mol_type = other DNA
gcgaccatcgaaacgctggagtcgccccgcgaacgcgcggcgctgattggtttctcgctgatacgtctgcctgac

SEQ ID NO: 657388 - DNA, 75 bp, synthetic construct
  source 1..75: mol_type = other DNA
ctgattattccgcagcaggatgccccgccaaggcggctgattggctttcgcaatggcgtgcttgatacccaaagc

SEQ ID NO: 657389 - DNA, 75 bp, synthetic construct
  source 1..75: mol_type = other DNA
atgaaaatgaacgtaacggacaccgtaaaacaggcgtgcggccactggccgcgcattctcccggcgctgggggta

SEQ ID NO: 657390 - DNA, 75 bp, synthetic construct
  source 1..75: mol_type = other DNA
tcccacctgtgtatggtgactggaacgatgcattcacgcagaacggcgaagaagccacccggctggcaatttatg

SEQ ID NO: 657391 - DNA, 75 bp, synthetic construct
  source 1..75: mol_type = other DNA
gtggtgattggtggtacgttgttaagtggtggggtaggaacggtgctgggaacgctttttggcgtggcgattcag

SEQ ID NO: 657392 - DNA, 75 bp, synthetic construct
  source 1..75: mol_type = other DNA
agaatcgtcagagttcgccagtgacaagagtcaacattgcgcagcaataaaaacgcctctccgtgtggagaggcg

SEQ ID NO: 657393 - DNA, 75 bp, synthetic construct
  source 1..75: mol_type = other DNA
ggcatattcctcgcgcatcgtacccatttggtaatcaggtatacgccattggcggcaacgcaacgtcggcgaatc

SEQ ID NO: 657394 - DNA, 75 bp, synthetic construct
  source 1..75: mol_type = other DNA
ggaacgccagtatcatcccgcgcaattaccgtaaatacctctatcacgcctatctggcctacatggaggcaaacg

SEQ ID NO: 657395 - DNA, 75 bp, synthetic construct
  source 1..75: mol_type = other DNA
gggaggataacgccacgtcggccaccatcgagacgctggaatccccgcgtgaacgtgccgcgttaactggcttct

SEQ ID NO: 657396 - DNA, 75 bp, synthetic construct
  source 1..75: mol_type = other DNA
tttggcgcatttatggggcttctgatcgacgccctgaagatcccggcatttatcattaccctggcggggatgttc

SEQ ID NO: 657397 - DNA, 75 bp, synthetic construct
  source 1..75: mol_type = other DNA
ctggcagctctttctggaagtgactggccctggcggaagtggcaaaagtatccttgctgaaattgcaacgatgct

SEQ ID NO: 657398 - DNA, 75 bp, synthetic construct
  source 1..75: mol_type = other DNA
tggtgctggcgaaccgctatgactggcagctctttctggaagtgactggccctggtggaagtggcaaaagtattc

SEQ ID NO: 657399 - DNA, 75 bp, synthetic construct
  source 1..75: mol_type = other DNA
tatggggaacgccaatattgtcccacgccagccacgtacctacctttaccatgcctacctcgtatacatggaggc

SEQ ID NO: 657400 - DNA, 75 bp, synthetic construct
  source 1..75: mol_type = other DNA
gtggtgattggcggtacgcttttgagcggtggcgttggaacggtattagggacgctttttggcgtggcgattcag

SEQ ID NO: 657401 - DNA, 75 bp, synthetic construct
  source 1..75: mol_type = other DNA
cagcttctgtcccgctatgaaaatggtgtctggaaggtgctgccgccacaggactttgcccgggatgtggccggg

SEQ ID NO: 657402 - DNA, 75 bp, synthetic construct
  source 1..75: mol_type = other DNA
ccggactcaaggccatcactggcggcgatgcggtgtccgttgacccgaaataccgggatgcatactccacgcata

SEQ ID NO: 657403 - DNA, 75 bp, synthetic construct
  source 1..75: mol_type = other DNA
tcttttttaattcaaagatagagcatctcgcatcaggaatagcatttccaactttagttattgtactgttcttat

SEQ ID NO: 657404 - DNA, 75 bp, synthetic construct
  source 1..75: mol_type = other DNA
atgagcgaagctctcggtatcactgcattttatatattcatagccgcaattattgttgctgcagtgctatacctt

SEQ ID NO: 657405 - DNA, 75 bp, synthetic construct
  source 1..75: mol_type = other DNA
actcaacaactggttgctgcggagagtgtgttgtctggtggagtaatcaccgagggcaaagtccgtacactggcc

SEQ ID NO: 657406 - DNA, 75 bp, synthetic construct
  source 1..75: mol_type = other DNA
gtgaaacgcaactacgggaagcgcagcgcgtgttgattgtcggtggcggcctgattggtagcgaactggcgatgg

SEQ ID NO: 657407 - DNA, 75 bp, synthetic construct
  source 1..75: mol_type = other DNA
agatcatagacgtgcagaattggcctgtaaaaagaattttgataaagtgccaaaatcagcttggaaatttgttaa

SEQ ID NO: 657408 - DNA, 75 bp, synthetic construct
  source 1..75: mol_type = other DNA
agatcatagacgtgctgaactagcttgtaataaagttttcgataaagtgcctaaatcagcttggaaatttgtacg

SEQ ID NO: 657409 - DNA, 75 bp, synthetic construct
  source 1..75: mol_type = other DNA
aatcgcaatttgtatgggggtgatcaccggcgttggcggaggactcatccgcgacgtgcttgcacgcgaaattcc

SEQ ID NO: 657410 - DNA, 75 bp, synthetic construct
  source 1..75: mol_type = other DNA
gctggacgccgttggtctggcggtgtttgtcggcattggcgtgaataaagcctttaatgcggaagccggtccgtt

SEQ ID NO: 657411 - DNA, 75 bp, synthetic construct
  source 1..75: mol_type = other DNA
tgtaatagtgcctgttctgagaacagaggaagtttcacaaagttccagaacaggtggagatgttattattattaa

SEQ ID NO: 657412 - DNA, 75 bp, synthetic construct
  source 1..75: mol_type = other DNA
aggctcgcgaaatgtgggtcgaggcggaaaacgcagatgatgtcaaagaaagctgctgttgtctcggcatcggta

SEQ ID NO: 657413 - DNA, 75 bp, synthetic construct
  source 1..75: mol_type = other DNA
atgaaggtagaaaaaatagatgttctttcctttgtgctgacggatctggaacgtctcgatccggttcgagtgatg

SEQ ID NO: 657414 - DNA, 75 bp, synthetic construct
  source 1..75: mol_type = other DNA
tttgtcggcattggcgtgaatggtaatgactccaacttattgatagtgttttatgttcagataatgcccgatgag

SEQ ID NO: 657415 - DNA, 75 bp, synthetic construct
  source 1..75: mol_type = other DNA
gattagcagggcttttaagtatgcattggatggaatcgcaaagaaaaaatccccggctgccaccgaggattctga

SEQ ID NO: 657416 - DNA, 75 bp, synthetic construct
  source 1..75: mol_type = other DNA
gcatctaacactaacgctgactggtactgccgcatggcgcaggaaaatccgggcgtagatgttccggtttatggc

SEQ ID NO: 657417 - DNA, 75 bp, synthetic construct
  source 1..75: mol_type = other DNA
ttgccggattacggtctgccggatctcagtctgatccatcaggggatggctgcgggtattcatggcctgatgcgt

SEQ ID NO: 657418 - DNA, 75 bp, synthetic construct
  source 1..75: mol_type = other DNA
aactggataacagctctgttgataacgttgttgctgcaaccggtaactacaaagttcgtatcgacaacgcaactg

SEQ ID NO: 657419 - DNA, 75 bp, synthetic construct
  source 1..75: mol_type = other DNA
ttcagggcagaactgagtgcgaacccggcagaaacggttgttgagggaccgtttagtaaagacgtaatcctgaaa

SEQ ID NO: 657420 - DNA, 75 bp, synthetic construct
  source 1..75: mol_type = other DNA
atcaatctgcgtcgtttcctgagccgtttgcagtattacgtcaatactgaccagttagtggttcggttatggaaa

SEQ ID NO: 657421 - DNA, 75 bp, synthetic construct
  source 1..75: mol_type = other DNA
aacccacgcgcctggcgtctggatctggaaaacgccattttgattcacgatccgcaactggaacttgcgccacag

SEQ ID NO: 657422 - DNA, 75 bp, synthetic construct
  source 1..75: mol_type = other DNA
gattagcagggcttttaagtatgcattggatggaatcacaaagaaaaaacgcccggcggcaaccgagcgttctga

SEQ ID NO: 657423 - DNA, 75 bp, synthetic construct
  source 1..75: mol_type = other DNA
tatcacagcgcgacgttgatcgcgcagaaacagatttacttatcaacctgtcaacgcttacccagcgcggtctgg

SEQ ID NO: 657424 - DNA, 75 bp, synthetic construct
  source 1..75: mol_type = other DNA
atggaacaaacaagttacagcaaactatcccagcgtgacgttgatcgcgcagaaacagatttactcatcaacctg

SEQ ID NO: 657425 - DNA, 75 bp, synthetic construct
  source 1..75: mol_type = other DNA
tttgctgaagcgcaaacttgccgtcgtttggtattgctgaactattttggcgaagggcgtcaggagccgtgcggg

SEQ ID NO: 657426 - DNA, 75 bp, synthetic construct
  source 1..75: mol_type = other DNA
ggtggagttactcccccagccccgtccggggtatcttaattacctgatccacgcgcagcttcccgataccggctg

SEQ ID NO: 657427 - DNA, 75 bp, synthetic construct
  source 1..75: mol_type = other DNA
cgcatgccctctgggcaacttcatctctttttcttataacaaacgggtccggtcacctgtcactcgactggttga

SEQ ID NO: 657428 - DNA, 75 bp, synthetic construct
  source 1..75: mol_type = other DNA
tgtaatagtgcctgttctgagaacagaggaagtttcacaaagttccagaacaggtggagatgttattattaaccc

SEQ ID NO: 657429 - DNA, 75 bp, synthetic construct
  source 1..75: mol_type = other DNA
cagcttcgcgcctttgtggtcagtgaggatcggatgaaagaggcatttggattgttgaaaacgttgccggtgtag

SEQ ID NO: 657430 - DNA, 75 bp, synthetic construct
  source 1..75: mol_type = other DNA
tcactacgggcggcttcgacagtgaaacagtacaggacgtcatgccaggagcggtggaacgccgcttcggcaacg

SEQ ID NO: 657431 - DNA, 75 bp, synthetic construct
  source 1..75: mol_type = other DNA
gtaatgacgaagccaaaataagaactgatatcagctcggtgaaaaaagatgccatgaacagagttgtaaaatatc

SEQ ID NO: 657432 - DNA, 75 bp, synthetic construct
  source 1..75: mol_type = other DNA
aaaccctcagcaataagatatgtctgttaactttttacaatccgccaaaaacagttaaacctttcatcgattttt

SEQ ID NO: 657433 - DNA, 75 bp, synthetic construct
  source 1..75: mol_type = other DNA
catctatattgatggacacgaacgatgaattcccagacaacaaaagatattccctgcttccgttcttatttgcct

SEQ ID NO: 657434 - DNA, 75 bp, synthetic construct
  source 1..75: mol_type = other DNA
ggtggaaacgcaccgctgaaacttcccgccatgctggtaaaaatcaaaacgccggaattaccgctgcatctggca

SEQ ID NO: 657435 - DNA, 75 bp, synthetic construct
  source 1..75: mol_type = other DNA
gaaaaaagggtacctgtgcaataaagagtatgtgtctttgccggagtcatcgcctgcggaagcgctgattattac

SEQ ID NO: 657436 - DNA, 75 bp, synthetic construct
  source 1..75: mol_type = other DNA
aacagaacattattaaaacaattccgaagaaaggttacttgtgcaataaagagtatgtgtctttgccggagtcat

SEQ ID NO: 657437 - DNA, 75 bp, synthetic construct
  source 1..75: mol_type = other DNA
aagacaaactcgataatttattgtcagcgcataatatgacaatgacaacctattataaatatgttcgtaaccgac

SEQ ID NO: 657438 - DNA, 75 bp, synthetic construct
  source 1..75: mol_type = other DNA
tgctaacgcaaacaacctcaaaactgagcagtacgggaagttcttcctggataaatctgcgcattccagcaaaca

SEQ ID NO: 657439 - DNA, 75 bp, synthetic construct
  source 1..75: mol_type = other DNA
tcggatccgttgtcacggataaaaccattgacagccaaagtcttctgatgatggttaatgaagctcgcaagttat

SEQ ID NO: 657440 - DNA, 75 bp, synthetic construct
  source 1..75: mol_type = other DNA
gaatgcctttgcgggtggtagcggttggaacgcagataatgtggacccgtcccaatgtataaaactgtctggagt

SEQ ID NO: 657441 - DNA, 75 bp, synthetic construct
  source 1..75: mol_type = other DNA
tttgaattaaccagtggggcttctgcagtggttcctgatgagcatttttcgattttcaatgatgctatttcatgt

SEQ ID NO: 657442 - DNA, 75 bp, synthetic construct
  source 1..75: mol_type = other DNA
cggctctaaagccacactcacggatacgatccgtaccttcaccgcgctgggagcttcgttgcttgaggcccgcag

SEQ ID NO: 657443 - DNA, 75 bp, synthetic construct
  source 1..75: mol_type = other DNA
gctcgccgccatcatcatcttctggaacaccatgaagctcggcgaggtcgttgcaaaccagaaacgcgatggaaa

SEQ ID NO: 657444 - DNA, 75 bp, synthetic construct
  source 1..75: mol_type = other DNA
cagatcgggctcaacaaaggcgaagctcatcatgcgctgaagcgggcaatcagcttccaccgccgcggtgaaatc

SEQ ID NO: 657445 - DNA, 75 bp, synthetic construct
  source 1..75: mol_type = other DNA
accctgtattaccgaagctatttacccgcgtgtgggtgaagactgacaccgggcgacaggttgccgcctatctca

SEQ ID NO: 657446 - DNA, 75 bp, synthetic construct
  source 1..75: mol_type = other DNA
tggaaaagcccgggaggatcttatcgttgcgaactggcctgatattttccgttgtgccgcgacgatgaccgctgg

SEQ ID NO: 657447 - DNA, 75 bp, synthetic construct
  source 1..75: mol_type = other DNA
tccaacccacaggattggctggcagacagaaaggcgcgactcacgatcgctcttaagcggctggcccgggctgcc

SEQ ID NO: 657448 - DNA, 75 bp, synthetic construct
  source 1..75: mol_type = other DNA
aaacggctcatccgggatatctgggttcgcaggacacgttctatataggcaaccattcagtgacgcaaaacaacg

SEQ ID NO: 657449 - DNA, 75 bp, synthetic construct
  source 1..75: mol_type = other DNA
atccggtggccttgtttggcattttgcgtgccgggatgattgtcgtaaacgtcaacccgttgtatacaccgcgtg

SEQ ID NO: 657450 - DNA, 75 bp, synthetic construct
  source 1..75: mol_type = other DNA
cggaagccaaactggtggatgatgatgataatgaagtaccaccgggtcaaccaggtgagctttgtgtcaaaggac

SEQ ID NO: 657451 - DNA, 75 bp, synthetic construct
  source 1..75: mol_type = other DNA
agacggctgatgatcgggtgacccgttttgtgtggctgcgccagttcgagcctggctcgaactcttcgtcggcca

SEQ ID NO: 657452 - DNA, 75 bp, synthetic construct
  source 1..75: mol_type = other DNA
ccgacagcgcggcatggcgaagccatgaacatggtcaatgccaaatatggttctgttcccggcctcaaagcgtat

SEQ ID NO: 657453 - DNA, 75 bp, synthetic construct
  source 1..75: mol_type = other DNA
tttaataaaaaaactataatgttggagccagtttctgatccatttggtgatattttagagttcgaaaggattgtt

SEQ ID NO: 657454 - DNA, 75 bp, synthetic construct
  source 1..75: mol_type = other DNA
gaacttcacgctaagtagtgacaccgctcgcaccgattcaaacggcaatgccgtggtcacattgcgaggcacaaa

SEQ ID NO: 657455 - DNA, 75 bp, synthetic construct
  source 1..75: mol_type = other DNA
atggcgcgtggttgggcgtcttcagaagcctcaggcgcgatgactgattggttaaataactttggcactgcgaaa

SEQ ID NO: 657456 - DNA, 75 bp, synthetic construct
  source 1..75: mol_type = other DNA
tactgtgccttacacgcttggtgcgctggaatcagcgcaaagcgttgctgatcgattcggtatttcactggagga

SEQ ID NO: 657457 - DNA, 75 bp, synthetic construct
  source 1..75: mol_type = other DNA
ttcgttctttatgcgcaatatcgagacggtgagttttttgatgtagtccgtgatggtgatgaatttttcgaaaca

SEQ ID NO: 657458 - DNA, 75 bp, synthetic construct
  source 1..75: mol_type = other DNA
ccgaaaaagaatcagaacgtacttatttcggtgaatttcgatagtgatctggttgagccgctaatatgctccgca

SEQ ID NO: 657459 - DNA, 75 bp, synthetic construct
  source 1..75: mol_type = other DNA
ttgggtgatggcgtggaagtggtgcaccagtacggcattgatgcggtgttcagcattttgccacgtctggcacct

SEQ ID NO: 657460 - DNA, 75 bp, synthetic construct
  source 1..75: mol_type = other DNA
cgattcgagtacgccaaaattcaaacaactggttgccgatccagataccattattgctggcaacagccagggcag

SEQ ID NO: 657461 - DNA, 75 bp, synthetic construct
  source 1..75: mol_type = other DNA
ttgccgttgatctgacctggcaacccagcagttcaatgcagaaacagcttaacccggacgaagtggccggacggc

SEQ ID NO: 657462 - DNA, 75 bp, synthetic construct
  source 1..75: mol_type = other DNA
aatatctggctaactgccaatgcgttctgcaacgcgaaaagtgatggatataatcttcctggcgtcgcacattta

SEQ ID NO: 657463 - DNA, 75 bp, synthetic construct
  source 1..75: mol_type = other DNA
acaacttagccttcacaactggaatgctccactgcaatcgcatatttataacattgaggcaaaccagaataaggc

SEQ ID NO: 657464 - DNA, 75 bp, synthetic construct
  source 1..75: mol_type = other DNA
gaattggtaaaagccgttactgtcgaaaacagcaaacctggcgccacgattgtctggcacgaagagcagcctggc

SEQ ID NO: 657465 - DNA, 75 bp, synthetic construct
  source 1..75: mol_type = other DNA
gggcaaattatcacctttagcgtaacgcctgaaggtgcaacgctaagcaatacaggggaaatccttactgaccag

SEQ ID NO: 657466 - DNA, 75 bp, synthetic construct
  source 1..75: mol_type = other DNA
aggtctgaaggcgctgggctattaccagccgaccattgaatttgatctccgaccaccgccaaagaaggggcggca

SEQ ID NO: 657467 - DNA, 75 bp, synthetic construct
  source 1..75: mol_type = other DNA
gattatccctggcggcgttagttttctttctggggattgatttttggctggaagccttatttttattccgcccga

SEQ ID NO: 657468 - DNA, 75 bp, synthetic construct
  source 1..75: mol_type = other DNA
cgccggagaggtgatccaggaatttgtcgaagaagtaaagcgtctccacgtggagaacggcagcgtccgtttcgt

SEQ ID NO: 657469 - DNA, 75 bp, synthetic construct
  source 1..75: mol_type = other DNA
ttcaaagggaagaaaagcctggtaaatggattaatttatcaagcaattataaaggggaccgatcatatctccact

SEQ ID NO: 657470 - DNA, 75 bp, synthetic construct
  source 1..75: mol_type = other DNA
atttgtatcagcgtctggcggaggaatggcgttgttcagtgaaccggataactttccacaatatgtggaatgaaa

SEQ ID NO: 657471 - DNA, 75 bp, synthetic construct
  source 1..75: mol_type = other DNA
atgtattaaaggaacatggaaaacctttgtcacataaggatatttatgattgcatcataaataaagagtattatt

SEQ ID NO: 657472 - DNA, 75 bp, synthetic construct
  source 1..75: mol_type = other DNA
agatgattttgtgacttataacccgcctcatgaatatggctccgggtggcaggatcaggttcgctatcttgataa

SEQ ID NO: 657473 - DNA, 75 bp, synthetic construct
  source 1..75: mol_type = other DNA
tcgaattgttcattaaaaaaccgcttgaaaacggccttactcgtggcgaacaaatggaactggcacgtattgctc

SEQ ID NO: 657474 - DNA, 75 bp, synthetic construct
  source 1..75: mol_type = other DNA
gacgacggcaattttgtcagcctttggcgtcagtgcgaaaaacccgaccgatggtacgccggtggtggtgaaaaa

SEQ ID NO: 657475 - DNA, 75 bp, synthetic construct
  source 1..75: mol_type = other DNA
ggaaaatggtggggcgcggtgtttgtcgatagcggcgaagcggtaagcgatattcgccgcagcgactttaaaacc

SEQ ID NO: 657476 - DNA, 75 bp, synthetic construct
  source 1..75: mol_type = other DNA
tcgaattgttcattaaaaacccgcttgaaaacgggcttactcgtggagaacaaatggaactggcacgtattgctc

SEQ ID NO: 657477 - DNA, 75 bp, synthetic construct
  source 1..75: mol_type = other DNA
tcgaattgttcattaaaaacccgcttgaaaacggtcttactcgtggtgaacaaatggaactggcacgtattgctc

SEQ ID NO: 657478 - DNA, 75 bp, synthetic construct
  source 1..75: mol_type = other DNA
tcgaattgttcattaaaaacccgcttgaaaacggacttactcgtggggaacaaatggaactggcacgtattgctc

SEQ ID NO: 657479 - DNA, 75 bp, synthetic construct
  source 1..75: mol_type = other DNA
tttctttcacaaataccggcgaccaaacttcagtcgtaataagcgctgttcccagacaaggaggtacaacctacc

SEQ ID NO: 657480 - DNA, 75 bp, synthetic construct
  source 1..75: mol_type = other DNA
ggcgacctcggcgttgaaattggcgacccggaactggtgggcattcagaaagcgttgatccgtcgcgctcgtcag

SEQ ID NO: 657481 - DNA, 75 bp, synthetic construct
  source 1..75: mol_type = other DNA
gtgtctcgctcgatccccactacagcacgcctgaatcccccaatcccggcgaccttgccgggagcacagggccag

SEQ ID NO: 657482 - DNA, 75 bp, synthetic construct
  source 1..75: mol_type = other DNA
agcgcacagcaggcgttactggcattgcaactgactgatttcacaaaccgggtaacactctggcagtcgctgggc

SEQ ID NO: 657483 - DNA, 75 bp, synthetic construct
  source 1..75: mol_type = other DNA
atatcaggtgcgagagttgtggcagggaaaatccagcaccccggtgctggaggtgcgtaatttaagtcgtcatgg

SEQ ID NO: 657484 - DNA, 75 bp, synthetic construct
  source 1..75: mol_type = other DNA
tgggaacacgatcttcatgctgcaatgaacaacattcaggaagaaatcgaattggttggcgagaatgcggcgagc

SEQ ID NO: 657485 - DNA, 75 bp, synthetic construct
  source 1..75: mol_type = other DNA
ttatcccgcgccatttgtagtcgatgatgagtgggaagatgatatagggcttgtacatagtcagcgtatcgttca

SEQ ID NO: 657486 - DNA, 75 bp, synthetic construct
  source 1..75: mol_type = other DNA
ttactggaatggccgactgtccgcctgcaatctattggttgttcccgtcgttgggcgacatcaattgtgctgatt

SEQ ID NO: 657487 - DNA, 75 bp, synthetic construct
  source 1..75: mol_type = other DNA
atcgatgcttatgctgccagtgatcctgctgaatgttttgccgtactttctgaatatttctttagcgccccagaa

SEQ ID NO: 657488 - DNA, 75 bp, synthetic construct
  source 1..75: mol_type = other DNA
ctccacggacaataccgaagcggtcatggcggaagtcaaacgcaaatggggcgaccgctttgttgccgtcacgta

SEQ ID NO: 657489 - DNA, 75 bp, synthetic construct
  source 1..75: mol_type = other DNA
cccgtgtctggcgcagtcactggataatctgatatgggtcttccccgatcatggtgggaagactcagtacgccat

SEQ ID NO: 657490 - DNA, 75 bp, synthetic construct
  source 1..75: mol_type = other DNA
gctggagatgatcgtggtggggatagccacctggctgggttttttactcttcgggctgaactattcactactgtt

SEQ ID NO: 657491 - DNA, 75 bp, synthetic construct
  source 1..75: mol_type = other DNA
tggggcgtattcttcgccattccattggcgacgctgatcaaagccgtgattcacgcctggcctgatgggcaaatc

SEQ ID NO: 657492 - DNA, 75 bp, synthetic construct
  source 1..75: mol_type = other DNA
gagtgaaactaaagttcgtgacctggtggacaggctaatcaaggcattgaccatcaaagtctctgatcctcatct

SEQ ID NO: 657493 - DNA, 75 bp, synthetic construct
  source 1..75: mol_type = other DNA
gaacccatgatccccgcgacaatcattcgtcaggttgccgataaccttgcccagcgtcaggtgggaatggcgact

SEQ ID NO: 657494 - DNA, 75 bp, synthetic construct
  source 1..75: mol_type = other DNA
ggcaaacccatgattgttcatgttcttgaacgtgcgcgcgaatcaggtgccgagcgcatcatcgtggcaaccgat

SEQ ID NO: 657495 - DNA, 75 bp, synthetic construct
  source 1..75: mol_type = other DNA
acatcgatggcatcacgaggtgcgcccgctgtgggcggttcatgtagtgcatcatcaaggggaacactacaacct

SEQ ID NO: 657496 - DNA, 75 bp, synthetic construct
  source 1..75: mol_type = other DNA
aatcagttccgtacttttgctcgcggctttgataacgtgcgccagggtgaagaactggatgttccggcaacaacc

SEQ ID NO: 657497 - DNA, 75 bp, synthetic construct
  source 1..75: mol_type = other DNA
actggaagatcagcctgccgtgcaacaggctgccaccgaagtacgtaacgcctggctggcgctggagcgtacccg

SEQ ID NO: 657498 - DNA, 75 bp, synthetic construct
  source 1..75: mol_type = other DNA
gcatctgatgcagacaaagtgacgatccgcggggccagcaatattgagctttcgcaaggtcaggttcaagaaatc

SEQ ID NO: 657499 - DNA, 75 bp, synthetic construct
  source 1..75: mol_type = other DNA
gagagaagccgctcgtcttcaatcatttcctgataactttgtttttgagtcaaatttgagagaaactgaaagaca

SEQ ID NO: 657500 - DNA, 75 bp, synthetic construct
  source 1..75: mol_type = other DNA
cccgtgtctggcgcagtcactggataatctgctgcgtaacccttatttttgccgggtaatttgcgttaacgacgg

SEQ ID NO: 657501 - DNA, 75 bp, synthetic construct
  source 1..75: mol_type = other DNA
atgatctgcgatgaaattgaagaagcgtggtatcaaagccaccggattttggtaatgcaaaaaggtcagatcacc

SEQ ID NO: 657502 - DNA, 75 bp, synthetic construct
  source 1..75: mol_type = other DNA
accagagttctccgtgggctgtgggtgcaggggttattctgctgtttatgatggtgctgggctacatccagcaat

SEQ ID NO: 657503 - DNA, 75 bp, synthetic construct
  source 1..75: mol_type = other DNA
ataaaaaaaatttcagccataatatagctgagggtgatatttgggaacttatagatttagtgcctaacgaatgtg

SEQ ID NO: 657504 - DNA, 75 bp, synthetic construct
  source 1..75: mol_type = other DNA
atgatttagaaaatatcgatgaagatcgtatctttaaccatatctggagtaaagcaaaaaaagcccagaccaagg

SEQ ID NO: 657505 - DNA, 75 bp, synthetic construct
  source 1..75: mol_type = other DNA
gggtagcagaaatggcgatggaagaagatttatcactgaacgcctttgttaataaggctctggaaaaagaagtca

SEQ ID NO: 657506 - DNA, 75 bp, synthetic construct
  source 1..75: mol_type = other DNA
tggaggatggaaaggaacctgataccccgtttaaaggtgtgtttaacgtcaggcttgatccagaactgcatcgtc

SEQ ID NO: 657507 - DNA, 75 bp, synthetic construct
  source 1..75: mol_type = other DNA
ttaccgaagattcttgccagtctggagttcctggaacgtggaggtaaaagagtgattatcaccacgcctgaatgc

SEQ ID NO: 657508 - DNA, 75 bp, synthetic construct
  source 1..75: mol_type = other DNA
ggcaaccgatcatcttaagtgtggcattgccgcctggccttgtgcgatatgaagcatcttcggaagacgcgagcc

SEQ ID NO: 657509 - DNA, 75 bp, synthetic construct
  source 1..75: mol_type = other DNA
ggcaaccgatcatcttaagcgtggcattgccgcctggccttgtgcgatttgaaacatcttcggaagacgcgagcc

SEQ ID NO: 657510 - DNA, 75 bp, synthetic construct
  source 1..75: mol_type = other DNA
ctctgggccgtctggctaaagaagacccgtctttccgtgtatggactgacgaagaatctaaccagaccatcatcg

SEQ ID NO: 657511 - DNA, 75 bp, synthetic construct
  source 1..75: mol_type = other DNA
tatactggcttaactatgcggcatcagtgcagattgtatgaaaagtgccccatggcgggtgtgaaattccgcaca

SEQ ID NO: 657512 - DNA, 75 bp, synthetic construct
  source 1..75: mol_type = other DNA
ctgcttggcgaacaccgctatgccgacgcgctggaactcatctaccaacgcaacgccctgcccgccattaccggt

SEQ ID NO: 657513 - DNA, 75 bp, synthetic construct
  source 1..75: mol_type = other DNA
gcgttatgtcgcttggcgaacccgatgagaaaggccgtcgccgtccggttgaaaccaacgaaacagtaacactgc

SEQ ID NO: 657514 - DNA, 75 bp, synthetic construct
  source 1..75: mol_type = other DNA
tccagagagcaaaacgcagcgcggcttagtggcgatttgtgaagcattgctgggaattgacggcttgggcattga

SEQ ID NO: 657515 - DNA, 75 bp, synthetic construct
  source 1..75: mol_type = other DNA
gcggtgccatgttgatggtggcgctgcccgaagcacagattcgcgcactgattaccgccccgctggcgattgccg

SEQ ID NO: 657516 - DNA, 75 bp, synthetic construct
  source 1..75: mol_type = other DNA
ctatcattgggatggcggggcgtttccctaaagccgatacggtacaggcgttttgggaaaatcttctggcaagcc

SEQ ID NO: 657517 - DNA, 75 bp, synthetic construct
  source 1..75: mol_type = other DNA
tagtgccggggcaaaaagtggaattaggaatcgccgaaggcagcctgcttagctccgcattactggtttatatgt

SEQ ID NO: 657518 - DNA, 75 bp, synthetic construct
  source 1..75: mol_type = other DNA
cacccaccgtggctacgactccgataacccgcgcgtggcgggcgacgtcggcaaagcgggcgtcgctatcgacac

SEQ ID NO: 657519 - DNA, 75 bp, synthetic construct
  source 1..75: mol_type = other DNA
cggaatacccaaccaagtcgcgtgcgacgaaaggggttatctccatcaaggttaccgaacgtaacggtttagtgg

SEQ ID NO: 657520 - DNA, 75 bp, synthetic construct
  source 1..75: mol_type = other DNA
cagaatggctggaacccgagtttggcgtgcgtgacgggctgtactatctgaccgagcagcaagctcaggcgattc

SEQ ID NO: 657521 - DNA, 75 bp, synthetic construct
  source 1..75: mol_type = other DNA
atgaaaacctggatatttatctgtatggccgtagcaatattgctatggttcctgagtacgttaaggcgtaagccc

SEQ ID NO: 657522 - DNA, 75 bp, synthetic construct
  source 1..75: mol_type = other DNA
agtatagggacgtatgcgtgttagttgatgataaaagcggatattattccaatgaacaaaccccaaataaaaaat

SEQ ID NO: 657523 - DNA, 75 bp, synthetic construct
  source 1..75: mol_type = other DNA
ttagggatagtgtgtctaatgttaaattttatattaataaaggaatggatgaggcatcttgtaaattacagaaat

SEQ ID NO: 657524 - DNA, 75 bp, synthetic construct
  source 1..75: mol_type = other DNA
gacgaatacaaagagctgctggatcagatcgcagaactgctgcgtattcttggcagtgccgatcgtctgatggaa

SEQ ID NO: 657525 - DNA, 75 bp, synthetic construct
  source 1..75: mol_type = other DNA
ttgcaggtttctttcggtatcaacatggtggcattgcaccatggtcagccgaagatcatgaacttgaaagacatc

SEQ ID NO: 657526 - DNA, 75 bp, synthetic construct
  source 1..75: mol_type = other DNA
gccatgaacgtactaggcaatgactggaacaaagcctataaaaaatctgcccgtgtcgttggtgacgtaatcggt

SEQ ID NO: 657527 - DNA, 75 bp, synthetic construct
  source 1..75: mol_type = other DNA
ttggtgcggtacaggttgatgactgcgaccagatcatgatgatcaccgatgccggtacgctggtacgtacccgcg

SEQ ID NO: 657528 - DNA, 75 bp, synthetic construct
  source 1..75: mol_type = other DNA
gggcaacgttgccgcgatgctggagcgtgcgggtgacgatgctgcgcgtccggaatggctggagccagagttcgg

SEQ ID NO: 657529 - DNA, 75 bp, synthetic construct
  source 1..75: mol_type = other DNA
gacggcagtgctgcggaaggggacgatgaaatcgctccggaagtggacgttgacgacgaaccagaagaagaataa

SEQ ID NO: 657530 - DNA, 75 bp, synthetic construct
  source 1..75: mol_type = other DNA
gatattccggaatacatccgtctgcttggcgaacaccgctatgccgacgcgctggaactcatctaccaacgcaac

SEQ ID NO: 657531 - DNA, 75 bp, synthetic construct
  source 1..75: mol_type = other DNA
agcgattgccttgctggttattttggttgctggttttggcattatctttttctttagcggcctactcgcgccgtt

SEQ ID NO: 657532 - DNA, 75 bp, synthetic construct
  source 1..75: mol_type = other DNA
atggcgacagagatgaataagggggtgctgaagaatctcggtctgctgacccctgagctggaagaggcgaaaagt

SEQ ID NO: 657533 - DNA, 75 bp, synthetic construct
  source 1..75: mol_type = other DNA
ggtctgctgacccctgagctggaagaggcgaaaagtggcgatctgatgattgtcattaaaggtaccagcgaggag

SEQ ID NO: 657534 - DNA, 75 bp, synthetic construct
  source 1..75: mol_type = other DNA
gcgaagtaaaacgcgtagctttagctgataaatacttcgcgaaacgcgctgaactgaaagcgatcatctctgatg

SEQ ID NO: 657535 - DNA, 75 bp, synthetic construct
  source 1..75: mol_type = other DNA
tactatcttattggtttcactttcatcccttcggattgttggcgaagggaattcttatgttgacgtttttctaag

SEQ ID NO: 657536 - DNA, 75 bp, synthetic construct
  source 1..75: mol_type = other DNA
ctgactgttccgcaactccagcagatcttcaccttcgctatggaagtgattgatgaagaaaacgaaaaagcggct

SEQ ID NO: 657537 - DNA, 75 bp, synthetic construct
  source 1..75: mol_type = other DNA
tccatgcaataactgcaagactccgcgattgactgacaatcaaaaattttgccatcattgtgggaatcaattgat

SEQ ID NO: 657538 - DNA, 75 bp, synthetic construct
  source 1..75: mol_type = other DNA
tttaaaaaataaaccaaatgcaattgatctctttcataaatgggtattagcaaagatactactctctgcttatga

SEQ ID NO: 657539 - DNA, 75 bp, synthetic construct
  source 1..75: mol_type = other DNA
tcaagaaacataaatttcagcgactattttagttctgcatggaaccattatcgttgtcaattcactgcatcttta

SEQ ID NO: 657540 - DNA, 75 bp, synthetic construct
  source 1..75: mol_type = other DNA
atctacattgattatattgtttttgatcttttttaatttctttttctcattaggaccaaaaaaaataaaaacatt

SEQ ID NO: 657541 - DNA, 75 bp, synthetic construct
  source 1..75: mol_type = other DNA
aactgctagatgggatagaggtggaatggaaagcccttggagatgtcacgagtgtcttgcggggaaaaaggctaa

SEQ ID NO: 657542 - DNA, 75 bp, synthetic construct
  source 1..75: mol_type = other DNA
accgaaggtcttccgcgtgaaatcgagttgcgccagaaacaatacgagtactatcgtgatttactgttcagtttc

SEQ ID NO: 657543 - DNA, 75 bp, synthetic construct
  source 1..75: mol_type = other DNA
gaagtatagggcatctatttattcatcatttgaaaaaagagttgtccggataggtttcaataacggttatgtttg

SEQ ID NO: 657544 - DNA, 75 bp, synthetic construct
  source 1..75: mol_type = other DNA
cactctcggcaccattaataacaaaggcgcactgcctggtgaagagatgtatatgtcaggccgtgcgctgttccc

SEQ ID NO: 657545 - DNA, 75 bp, synthetic construct
  source 1..75: mol_type = other DNA
ccaggcttccttgtggaagattgccgggtacgcgtacgtctgaataaccaaagctgggtgttaaacatcgacagc

SEQ ID NO: 657546 - DNA, 75 bp, synthetic construct
  source 1..75: mol_type = other DNA
tttaccgtcgttcactgcaagagatgcccgcatggcgcgaagagtatgaagaagcgttgcacgacggcgtggagt

SEQ ID NO: 657547 - DNA, 75 bp, synthetic construct
  source 1..75: mol_type = other DNA
tacataggcttaaaagaagagtcatttgatcacgacctcaagctgacgcaagcgctggaaatgctggaacgcctg

SEQ ID NO: 657548 - DNA, 75 bp, synthetic construct
  source 1..75: mol_type = other DNA
tagatgtctgcccgaaccgcgccaacgtctcaattgcggttcctggcttccagaaccgtttccagacgctgcacc

SEQ ID NO: 657549 - DNA, 75 bp, synthetic construct
  source 1..75: mol_type = other DNA
cccagaaacactggaagccagaagagcgtattgaagtggcagaagacctgccgctgaccgactgctacgttgccc

SEQ ID NO: 657550 - DNA, 75 bp, synthetic construct
  source 1..75: mol_type = other DNA
accaaaagcggtcaaggctgcatacgacctggcagccggcaaggcgcccgacagccacactcacccgtggagtca

SEQ ID NO: 657551 - DNA, 75 bp, synthetic construct
  source 1..75: mol_type = other DNA
accaaaagcggtcaaggctgcatacgacctcgcagccggcaaggcgccagccagccacactcacccgtggagtca

SEQ ID NO: 657552 - DNA, 75 bp, synthetic construct
  source 1..75: mol_type = other DNA
accaaaagcggtcaaggctgcatacgacctagcagccggcaaggcgcccggcagccacactcacccgtggagtca

SEQ ID NO: 657553 - DNA, 75 bp, synthetic construct
  source 1..75: mol_type = other DNA
gcgggcggcgtggtgaaaaatatcattcctcagttccgtattcctgcagagttaattcagcacgatatcgatttt

SEQ ID NO: 657554 - DNA, 75 bp, synthetic construct
  source 1..75: mol_type = other DNA
ctccgcatgaaatcgaagccatttgccgctacatgctggaagaaaaagggctcaacacctttgtgaaactcaacc

SEQ ID NO: 657555 - DNA, 75 bp, synthetic construct
  source 1..75: mol_type = other DNA
tcgctgacggcaaaaggcaccgtacaattgagcagtgacatcaacagcacgtctgaaatactggccgccacaccg

SEQ ID NO: 657556 - DNA, 75 bp, synthetic construct
  source 1..75: mol_type = other DNA
tccgatctggtggtgaccgccattgccgaaggtcgtaaagcggctgacgggatcatgaactggctggaagtttaa

SEQ ID NO: 657557 - DNA, 75 bp, synthetic construct
  source 1..75: mol_type = other DNA
atgaagtcagggcacatcttcgacttgatgatgatttatccggtgaaggcgaacttctgaaaatgtataccgatg

SEQ ID NO: 657558 - DNA, 75 bp, synthetic construct
  source 1..75: mol_type = other DNA
gcggcggtcacggtattgatatcaccggcgacagcgcgacggtggacaacaaaggcggcatgactgtcaccgatc

SEQ ID NO: 657559 - DNA, 75 bp, synthetic construct
  source 1..75: mol_type = other DNA
tgccgcgcaacttgatgcactgaagtgtcacgccggggattgtgttcgtctggtgcgtttgtgcgcagaggagaa

SEQ ID NO: 657560 - DNA, 75 bp, synthetic construct
  source 1..75: mol_type = other DNA
atccctggtacaactatcgcgtcggtacgctggttcacgcttcgaaagagttgaatgtctataacgcgctaccga

SEQ ID NO: 657561 - DNA, 75 bp, synthetic construct
  source 1..75: mol_type = other DNA
ggataccaattcctgtacgaaggcgatgagcttaaatgttatgaacatggtcttcttatcgaaagcgtagaataa

SEQ ID NO: 657562 - DNA, 75 bp, synthetic construct
  source 1..75: mol_type = other DNA
ccggtaatgttctggtagataaagatcaaacggctgataacgcggcagattatttctacgacccgtctgtgggga

SEQ ID NO: 657563 - DNA, 75 bp, synthetic construct
  source 1..75: mol_type = other DNA
ctctaccgggatggatctaaacggtaataacaacagcgtcacgctggcggcaaaagatctgaacgtcaccggtca

SEQ ID NO: 657564 - DNA, 75 bp, synthetic construct
  source 1..75: mol_type = other DNA
gaaatcgcgggtaataacgcggtggtgaatcaggacggcttactggatgtgagcggcggcggtcacggcattgat

SEQ ID NO: 657565 - DNA, 75 bp, synthetic construct
  source 1..75: mol_type = other DNA
cgacacacagtacgacatgatggcgctgcgtaaatctctgacgctgactgaacatcagaacctgagtctggaata

SEQ ID NO: 657566 - DNA, 75 bp, synthetic construct
  source 1..75: mol_type = other DNA
gatgcgggctataccaacaacgagttgtacagcagcctgaacgtaggcaccacggcggaactgaacagtgcgctg

SEQ ID NO: 657567 - DNA, 75 bp, synthetic construct
  source 1..75: mol_type = other DNA
cggcgacaaggcggttgtcaataacgacggtgacaatgccatcagcaacggcggcaccggcacgcaggttaacgg

SEQ ID NO: 657568 - DNA, 75 bp, synthetic construct
  source 1..75: mol_type = other DNA
ctctcactgtgacgtggcgcatctcgccgaatttcttaattgcattattcagggaatgtcgattagcgcccgtga

SEQ ID NO: 657569 - DNA, 75 bp, synthetic construct
  source 1..75: mol_type = other DNA
gtgatattggttgtctggagattcagggggccagtctattccttgcgcacaggatatagttataccagcgttatt

SEQ ID NO: 657570 - DNA, 75 bp, synthetic construct
  source 1..75: mol_type = other DNA
ggcagacccaggaaaactcagtccggaagagcttaaacgcttaccctctgaatgctctcctttagtcgaacaaaa

SEQ ID NO: 657571 - DNA, 75 bp, synthetic construct
  source 1..75: mol_type = other DNA
gtggatcacttttcatccgtcgttgacaccaaagaagcttgtctgaatagtggtcacacaattgatgaccatttc

SEQ ID NO: 657572 - DNA, 75 bp, synthetic construct
  source 1..75: mol_type = other DNA
acaataatacagatgatttcacctcactgatctataccggtggcgatacgattacacgaagcggagaaactgtaa

SEQ ID NO: 657573 - DNA, 75 bp, synthetic construct
  source 1..75: mol_type = other DNA
atgcaggatattgacagttttgaacatcatgggacaagaaccccagaacttacttatgctgattccggtgcgaaa

SEQ ID NO: 657574 - DNA, 75 bp, synthetic construct
  source 1..75: mol_type = other DNA
gtgagtcgtcggtatatctgaatggagatacgacaatcagcggagaattccctctggggtttgccggggttattc

SEQ ID NO: 657575 - DNA, 75 bp, synthetic construct
  source 1..75: mol_type = other DNA
tttttatgtcaacgccaggctcgcggggaaattcctgcccactgtgacgtaacgcatcttgcggaatttcttaat

SEQ ID NO: 657576 - DNA, 75 bp, synthetic construct
  source 1..75: mol_type = other DNA
gccagctgctttaccagcaaagacacccccgctggttgctttatgattaacaactgcaccacgctctcaccggat

SEQ ID NO: 657577 - DNA, 75 bp, synthetic construct
  source 1..75: mol_type = other DNA
agggaatgtcgattagcgcccgtgaaggcgcatcgctggaaaaactaatgcagattgctcagacaacgttgcgct

SEQ ID NO: 657578 - DNA, 75 bp, synthetic construct
  source 1..75: mol_type = other DNA
atgatttttaccaaaatcattaggggattcatcagcgaaaagcgtctttttctgagaaatgaattgaaagaacat

SEQ ID NO: 657579 - DNA, 75 bp, synthetic construct
  source 1..75: mol_type = other DNA
ggcggcttcattaggcttgagcctgttcacgttgactttaccaactgtaccagtggcgaaatctaaccaggcgca

SEQ ID NO: 657580 - DNA, 75 bp, synthetic construct
  source 1..75: mol_type = other DNA
taaaaaaaagccgtggccgcccaaaagtgttcgacagggatgccgcgcttgataaggccatgaaattgttctggc

SEQ ID NO: 657581 - DNA, 75 bp, synthetic construct
  source 1..75: mol_type = other DNA
cgcggtggtgaatcaggacggtacgctggacgtcagcggcggtgctcacggaattgatatcaccggaaacggtgc

SEQ ID NO: 657582 - DNA, 75 bp, synthetic construct
  source 1..75: mol_type = other DNA
gccgatgattgttatgaagcgcacgctacagcagctcctgggcggcgcaccgtttattatcagcggtgcctgcgg

SEQ ID NO: 657583 - DNA, 75 bp, synthetic construct
  source 1..75: mol_type = other DNA
agcggcagaaagattttcagcaggcatacgctaatgcttatgcgtctggtgatcgcggtgctttgcgtcagttgg

SEQ ID NO: 657584 - DNA, 75 bp, synthetic construct
  source 1..75: mol_type = other DNA
cgtgaaaactccctgcgcactgctggaggtgctgttcctgcatctgttaaagaatatcaatatttcaacagcctg

SEQ ID NO: 657585 - DNA, 75 bp, synthetic construct
  source 1..75: mol_type = other DNA
ctgactggatgattcagacaggtatccagaatccagaacagctatcacacatgctgactactatgtctctcggtg

SEQ ID NO: 657586 - DNA, 75 bp, synthetic construct
  source 1..75: mol_type = other DNA
acagcgaatcatgggcaaaatgcaaaatcaggggattgcagcagcccgagatatgggggcatctggcatcaacac

SEQ ID NO: 657587 - DNA, 75 bp, synthetic construct
  source 1..75: mol_type = other DNA
agagcaagtgatgcagacgccacgcttgcatacattcgacagaataacgagatggagcgttcaggacgtaataac

SEQ ID NO: 657588 - DNA, 75 bp, synthetic construct
  source 1..75: mol_type = other DNA
tgagtatcctaatgattacttgcttacacagaattacttcgatccctatccggacgaactggctctaagactgat

SEQ ID NO: 657589 - DNA, 75 bp, synthetic construct
  source 1..75: mol_type = other DNA
taagcactatctggccgagtatccggatcgctacctgcaggcgcagaactattttgacccctacccgcaggatct

SEQ ID NO: 657590 - DNA, 75 bp, synthetic construct
  source 1..75: mol_type = other DNA
tcttttgagtgttctgatttatttatcgcaatatcaaaagatgacattcttgaatataagaaaattggtattgat

SEQ ID NO: 657591 - DNA, 75 bp, synthetic construct
  source 1..75: mol_type = other DNA
atgaggcagataagatttgagatagtcaatgacgccgtaaaagaaaacgctatcaggcagataagggagatccag

SEQ ID NO: 657592 - DNA, 75 bp, synthetic construct
  source 1..75: mol_type = other DNA
ttcactgccggacttaagaaatatggcgtcgtccctaacctggataaatccggcttcgttgtattgggaacgtca

SEQ ID NO: 657593 - DNA, 75 bp, synthetic construct
  source 1..75: mol_type = other DNA
aggttaattggtacggtaaaaagctgtcgccggaagactggaaagcggtattcactgccggacttaagaaatatg

SEQ ID NO: 657594 - DNA, 75 bp, synthetic construct
  source 1..75: mol_type = other DNA
gggtacttactattcgttagtcttgccctatccgcttatctttttggtggtatggctgctgatgttgctggcgtg

SEQ ID NO: 657595 - DNA, 75 bp, synthetic construct
  source 1..75: mol_type = other DNA
ctgatggttctaccgtcgcatcaaaccgcaagggctatggcaaaacaccagtaatcactgttgatgggaagtcgt

SEQ ID NO: 657596 - DNA, 75 bp, synthetic construct
  source 1..75: mol_type = other DNA
ggttctgaaagccgtcgccagagccaataatcacccttatcaggggttccgtgggaatttctgcgataacacccg

SEQ ID NO: 657597 - DNA, 75 bp, synthetic construct
  source 1..75: mol_type = other DNA
tcatgctcgctaataatgaaaaaaatagatgtcgaaatggaagattactcaacatactgcttctctgcattaaga

SEQ ID NO: 657598 - DNA, 75 bp, synthetic construct
  source 1..75: mol_type = other DNA
agtgaatcaggacggcacgctggatgtcagcggcggcggtcacgggattgatatcaccggcgacagcgccacggt

SEQ ID NO: 657599 - DNA, 75 bp, synthetic construct
  source 1..75: mol_type = other DNA
ctgatggcagcgcaggtaagttgaaagtgagcaatgcaagcctgaagggtgtttccgttaacactggatttacgt

SEQ ID NO: 657600 - DNA, 75 bp, synthetic construct
  source 1..75: mol_type = other DNA
ccagtgccgtgaacacaggcactatcaccatgaaagtggcggaacaagagagcgtaatcaatactggagggtcac

SEQ ID NO: 657601 - DNA, 75 bp, synthetic construct
  source 1..75: mol_type = other DNA
acaaatccacaggccattgcttcgaaaaaaacgaaacgcgttttctcccgattttatctgaacgcgggagcaagt

SEQ ID NO: 657602 - DNA, 75 bp, synthetic construct
  source 1..75: mol_type = other DNA
acgagataatgtatctaaaaatgcttggtgcgctttccaacactgattactccttacagtggagtacttatgatt

SEQ ID NO: 657603 - DNA, 75 bp, synthetic construct
  source 1..75: mol_type = other DNA
ataggcgataatatcttcaccaatattgatttctctaatttgaatatagatttggacgatattgattgggacttg

SEQ ID NO: 657604 - DNA, 75 bp, synthetic construct
  source 1..75: mol_type = other DNA
cacagaacccgtttaaagcactaaatatcaatattgacaagattgagtctgctctgacgcagaatggcgtcacaa

SEQ ID NO: 657605 - DNA, 75 bp, synthetic construct
  source 1..75: mol_type = other DNA
atgaagcttttgaagacagttcctgccatcgttatgctggcggggggtatgtttgcgtctctgaatgcagctgcc

SEQ ID NO: 657606 - DNA, 75 bp, synthetic construct
  source 1..75: mol_type = other DNA
tgaccgacaacgctaaatttacccaaggtgtttccgtctttggcgcggaagacacgacgttaaactcggaaagtg

SEQ ID NO: 657607 - DNA, 75 bp, synthetic construct
  source 1..75: mol_type = other DNA
aagagacgcagattgccaatatgcgtatcggtcagccggtcaccatcaccactgatatttacggcgatgatgtga

SEQ ID NO: 657608 - DNA, 75 bp, synthetic construct
  source 1..75: mol_type = other DNA
tcgcaggtgattgggcaactctcgccggttggcatgatggttgccagcgtatttatcctgaaagagaaaatgcgc

SEQ ID NO: 657609 - DNA, 75 bp, synthetic construct
  source 1..75: mol_type = other DNA
ggggtgttatttttggggtcggtgcggcgacggtttgggtgatttatggtgtggcgcaaaaggtactattgcgtc

SEQ ID NO: 657610 - DNA, 75 bp, synthetic construct
  source 1..75: mol_type = other DNA
tgtccccgcaggttctggttcaaaactcattactgagacagccgataaattgcgggaactgtttgagtttcagga

SEQ ID NO: 657611 - DNA, 75 bp, synthetic construct
  source 1..75: mol_type = other DNA
aagaaggcgatgtattggtcactctcgacccgacggatgcccgtcaggcgtttgaaaaagccaaaacggcgctgg

SEQ ID NO: 657612 - DNA, 75 bp, synthetic construct
  source 1..75: mol_type = other DNA
gatcaaaagcaacttgagcaatatccgctacggatcggtttatccacactggtgagcgtcaataccactaaccgt

SEQ ID NO: 657613 - DNA, 75 bp, synthetic construct
  source 1..75: mol_type = other DNA
cagccttactccatgttgttcgacaatactcagttctacagtccagtactggatacgctggaacatggcaccgaa

SEQ ID NO: 657614 - DNA, 75 bp, synthetic construct
  source 1..75: mol_type = other DNA
cggctattcgtggttatgtacagatcttgcgccaacaaaccagtgacccaatacatcaggaatatctgtccgtag

SEQ ID NO: 657615 - DNA, 75 bp, synthetic construct
  source 1..75: mol_type = other DNA
attcaacgacatggctggcagggaaccgaagaagggaaacatactggcaatatggcggatgaaccggaaacgaag

SEQ ID NO: 657616 - DNA, 75 bp, synthetic construct
  source 1..75: mol_type = other DNA
gagtgatagcgcagcttagccactggcagctcgcatgtttaattttttgcggactgaataccttggtaggatatg

SEQ ID NO: 657617 - DNA, 75 bp, synthetic construct
  source 1..75: mol_type = other DNA
tttcttgatggcgagtattggccttggtgccattcttgcggtgaagaagaggttgccgccattacgcgtgtttcg

SEQ ID NO: 657618 - DNA, 75 bp, synthetic construct
  source 1..75: mol_type = other DNA
ccagaacgcctccggcgtgcgagctgaatgccatgccggatattccaggcatggtgaagcgcaaactggaagcga

SEQ ID NO: 657619 - DNA, 75 bp, synthetic construct
  source 1..75: mol_type = other DNA
ctgcttgccgatccgctggccttaaaaagagtggaactcggcattgtgacgttcggcccggtgcatgtggaacaa

SEQ ID NO: 657620 - DNA, 75 bp, synthetic construct
  source 1..75: mol_type = other DNA
atgacagcgtactggcctgggtgcggctgattggctgcggcctgctggcgctgttgctgctgtttttcgtggtgc

SEQ ID NO: 657621 - DNA, 75 bp, synthetic construct
  source 1..75: mol_type = other DNA
tgtcaccgtgctggacggcgaaaagctcacctaccgcatcgacccgcaaagcgggcagattctggtgccggaaga

SEQ ID NO: 657622 - DNA, 75 bp, synthetic construct
  source 1..75: mol_type = other DNA
cagttcgtgcagaacgtgcgctataaacgcagcctcgaaggggagctggcgcagagcattatgtcgctggacgcg

SEQ ID NO: 657623 - DNA, 75 bp, synthetic construct
  source 1..75: mol_type = other DNA
gtggtggtcgccgacgggcgcatcgcctggcagggtaaaaccgatgagttgttaagcggtaaggcgagtgcttcg

SEQ ID NO: 657624 - DNA, 75 bp, synthetic construct
  source 1..75: mol_type = other DNA
tgccagcagcaaaaaatgacgctattgatggtgtcgcacagtgtggaagatgcggcgcggatcgccacgcgctcg

SEQ ID NO: 657625 - DNA, 75 bp, synthetic construct
  source 1..75: mol_type = other DNA
ctggacagcgataccaatcaggtggcgatgggtgtgcccggttcgcttagcaaccgcccgccggttgcacctaat

SEQ ID NO: 657626 - DNA, 75 bp, synthetic construct
  source 1..75: mol_type = other DNA
cgttgaatgccgatctgatcgacgcccaggttgagcaattgatgaacctggcagagaaattcgacgttgaatacg

SEQ ID NO: 657627 - DNA, 75 bp, synthetic construct
  source 1..75: mol_type = other DNA
ttattttaacatcgacttcttcgttgctcctgaagtcctgatggaaggtgcaaaacaacggaaagtcattcatag

SEQ ID NO: 657628 - DNA, 75 bp, synthetic construct
  source 1..75: mol_type = other DNA
actgtttagctggttatccagttcgctgcgttcggtttcccgctccacgccgggaacggaagttgtgctggaagc

SEQ ID NO: 657629 - DNA, 75 bp, synthetic construct
  source 1..75: mol_type = other DNA
cccaggcgtttccggcgtttcgactgcgtctcgcagataacaaacgctgggcgttgatggcgggagtggggcttg

SEQ ID NO: 657630 - DNA, 75 bp, synthetic construct
  source 1..75: mol_type = other DNA
cagcgtgctgtggaccggtaatcgcggctacgtctcgctctacggacgccaggaaaatctgcccgtgtcgcagat

SEQ ID NO: 657631 - DNA, 75 bp, synthetic construct
  source 1..75: mol_type = other DNA
acggttggggtacttactttgaagatcctaacggcgaagatggcgacgatgaagattatgtcgacgaagacgatg

SEQ ID NO: 657632 - DNA, 75 bp, synthetic construct
  source 1..75: mol_type = other DNA
gtgaatgagaaagggttttctttaattgaaagtgtgttagtaataatgctttcaactgtcattgttatggggata

SEQ ID NO: 657633 - DNA, 75 bp, synthetic construct
  source 1..75: mol_type = other DNA
cattacccatggcctctacgctccacttatcgacgatcgacatcgagccagagggggatgttttcttcccgagta

SEQ ID NO: 657634 - DNA, 75 bp, synthetic construct
  source 1..75: mol_type = other DNA
gagcttgaatttaaagtaatcaagctggatcagaagcgcaacaacgttgttgtttctcgttgtgccgttatcgaa

SEQ ID NO: 657635 - DNA, 75 bp, synthetic construct
  source 1..75: mol_type = other DNA
ttggctatgagggaaatgcgcatgtcaccattgctgccctgatcgagtttatccacacggcgactctgctacacg

SEQ ID NO: 657636 - DNA, 75 bp, synthetic construct
  source 1..75: mol_type = other DNA
tgctggtaggcgattttatttatacccgcgcgttccagatgatgaccagcctcggttcgctcaaagtgctggaag

SEQ ID NO: 657637 - DNA, 75 bp, synthetic construct
  source 1..75: mol_type = other DNA
attgcgtgtgagctaacacacgaagcacagggttattcagcatcgctctcgtcgcaattgctgcacgataaggag

SEQ ID NO: 657638 - DNA, 75 bp, synthetic construct
  source 1..75: mol_type = other DNA
atgttgccctgcgtgaaagctgcagtgccctcgtcagagcaatgaaactcagcattctggttaaagaaaatccgc

SEQ ID NO: 657639 - DNA, 75 bp, synthetic construct
  source 1..75: mol_type = other DNA
atgctgccctgcgtgaaagctgcagtgccctcatcagagcaatgaaactcaacatactggttctgaataatccgc

SEQ ID NO: 657640 - DNA, 75 bp, synthetic construct
  source 1..75: mol_type = other DNA
ttacaggcggttatagccagttttttggcctgaaacatcagatgtcgttcgataacggcatgaactggaataacg

SEQ ID NO: 657641 - DNA, 75 bp, synthetic construct
  source 1..75: mol_type = other DNA
gctaacccgtggcagcagttcgcggaaacccacaacaagggcgaccgtgttgaaggtaaaatcaagtctatcact

SEQ ID NO: 657642 - DNA, 75 bp, synthetic construct
  source 1..75: mol_type = other DNA
tttttatgtgaggcggtgctggaaatatattcttggatatttatttttagccttttcatcaatgttttcaatatt

SEQ ID NO: 657643 - DNA, 75 bp, synthetic construct
  source 1..75: mol_type = other DNA
atgagcctgattttgagtaatttacattttgttaatcacttacatggacgtttagcaaaagcgaaattagaacac

SEQ ID NO: 657644 - DNA, 75 bp, synthetic construct
  source 1..75: mol_type = other DNA
cgccatcaagacaggagatggtcgatgcgttggcccctgtttattacctcgattattttactccctctggttctg

SEQ ID NO: 657645 - DNA, 75 bp, synthetic construct
  source 1..75: mol_type = other DNA
aaatatccgctgaaggatgcgcggcgcgcgcatgagattctggaaagccgggcaacgcagggttccagtctactg

SEQ ID NO: 657646 - DNA, 75 bp, synthetic construct
  source 1..75: mol_type = other DNA
attaatgcggataaagcggcgattctgcctgcggcaatttcttttgagcaagctgcagcatctttcctgaaaggc

SEQ ID NO: 657647 - DNA, 75 bp, synthetic construct
  source 1..75: mol_type = other DNA
tgtatgtaacacgtccttccctgcaaggctacatcaccacgcgggaggagttaactgaagccagtaatgaactgt

SEQ ID NO: 657648 - DNA, 75 bp, synthetic construct
  source 1..75: mol_type = other DNA
ttctgggtgagtggacggtgccattaagcaaatatgatcagttaaaaaaagatgaatcgaatggaaaaacagcat

SEQ ID NO: 657649 - DNA, 75 bp, synthetic construct
  source 1..75: mol_type = other DNA
agaacggttcaattgaaccgtttgttaaaagaacagcgtctatctatggatatcctgatgataaaaataaaaata

SEQ ID NO: 657650 - DNA, 75 bp, synthetic construct
  source 1..75: mol_type = other DNA
gaaatatcccagaaaatacagaataaatgcgaaaagaaaacagcagaagaatgtgaagctgcaattaatattgga

SEQ ID NO: 657651 - DNA, 75 bp, synthetic construct
  source 1..75: mol_type = other DNA
cctgcattatggtatggattgcggggattcctcatgatgtctctgatcgtaaaacctggtttggctactggcgtg

SEQ ID NO: 657652 - DNA, 75 bp, synthetic construct
  source 1..75: mol_type = other DNA
tttcaagcttggattcatggcccagtaagccgtgcgatttataaccggttctcttctacaaaatcactgtattcg

SEQ ID NO: 657653 - DNA, 75 bp, synthetic construct
  source 1..75: mol_type = other DNA
tggcgtcaccgccactggcacgtatctgccttcacggggatttacaacgatttggccgccgcctcagcctgtacg

SEQ ID NO: 657654 - DNA, 75 bp, synthetic construct
  source 1..75: mol_type = other DNA
gagcagcagaaatatccgctgaaggatgcgcagcgtgcgcatgagattctggaaagccgggcgacgcaaggttcc

SEQ ID NO: 657655 - DNA, 75 bp, synthetic construct
  source 1..75: mol_type = other DNA
gatgttgacgctggtgagcacgagctgccagcagcaaaaaatgacgctattgatggtgtcgcacagtgtggaaga

SEQ ID NO: 657656 - DNA, 75 bp, synthetic construct
  source 1..75: mol_type = other DNA
agccacagtacaggataacagaggcaacgtttccaactatgccgtgatgaatattagcgttactgatagtggtgt

SEQ ID NO: 657657 - DNA, 75 bp, synthetic construct
  source 1..75: mol_type = other DNA
ttcaatacttacgtaaaggggatacgcgacctcttgatgatggagagattgtaagatgttcttcggaagacaatc

SEQ ID NO: 657658 - DNA, 75 bp, synthetic construct
  source 1..75: mol_type = other DNA
attaagccagggcatacgcttggcattattgatgcactattggttcataagatggccagggctttattgccgctg

SEQ ID NO: 657659 - DNA, 75 bp, synthetic construct
  source 1..75: mol_type = other DNA
aatgtatggtcacggtgctggatatacggcagataaagtattggaaatagcccagcagatgctggccttgagaca

SEQ ID NO: 657660 - DNA, 75 bp, synthetic construct
  source 1..75: mol_type = other DNA
atggttagtgatgaaattgtcctgattggtgatcgctattatgtgaaagctacggcgacactaagcgacggtgaa

SEQ ID NO: 657661 - DNA, 75 bp, synthetic construct
  source 1..75: mol_type = other DNA
tgctggacagcgatggacagttttatctgctggaagccaatacctcaccgggtatgaccagccacagtctggtgc

SEQ ID NO: 657662 - DNA, 75 bp, synthetic construct
  source 1..75: mol_type = other DNA
gaaagagattgatgtgacgcagctgaagtctatgggttttcagaaagtatttatcgctttgcatgggcgtggtgg

SEQ ID NO: 657663 - DNA, 75 bp, synthetic construct
  source 1..75: mol_type = other DNA
aattacgagaaagaattagccgtgttttgggcgacgttattacgccagatcatcataaacaagccgagaaaagtg

SEQ ID NO: 657664 - DNA, 75 bp, synthetic construct
  source 1..75: mol_type = other DNA
cgtgggcgaactgcacctgcgtacccgtgcaacagctcaggtggcggcgctggtgacactggtctgcttcgcact

SEQ ID NO: 657665 - DNA, 75 bp, synthetic construct
  source 1..75: mol_type = other DNA
catgtgggactggggcatcttcattggtagcttcgttccgccgctggtaattggtgtagcgttcggtaacctgtt

SEQ ID NO: 657666 - DNA, 75 bp, synthetic construct
  source 1..75: mol_type = other DNA
tgctcacccgtttcctcggtcgtaacgacaccgagcgtcgaattatgattaactccattgcaccacactgggatg

SEQ ID NO: 657667 - DNA, 75 bp, synthetic construct
  source 1..75: mol_type = other DNA
tcgcgttggtggcagaagagctgcgtgccaaccattccggcgagcgaatcgtggcgcgttttgaggatgaagacg

SEQ ID NO: 657668 - DNA, 75 bp, synthetic construct
  source 1..75: mol_type = other DNA
tatgatgagaaaggccgcctgaccggtgagcgtcagacggtgcatcacccgcagacggaagcactgctctggcag

SEQ ID NO: 657669 - DNA, 75 bp, synthetic construct
  source 1..75: mol_type = other DNA
catgtgggactggggcatcttcattggtagcttcgttccgccgctggtgattggtgtggcgttcggtaacctgtt

SEQ ID NO: 657670 - DNA, 75 bp, synthetic construct
  source 1..75: mol_type = other DNA
aaggcgatgggctttcagaaagtatttatcgctctgcacgggcgcggcggtgaagacggcacattgcagggcatg

SEQ ID NO: 657671 - DNA, 75 bp, synthetic construct
  source 1..75: mol_type = other DNA
agcatatcccggaaagtaacctggcggtgatttccgtcaacggcctgtttgccgctcgcgaagcgcgtcaggcgc

SEQ ID NO: 657672 - DNA, 75 bp, synthetic construct
  source 1..75: mol_type = other DNA
ggactgctgacgccggagctggagcaggcgaaaaacggcgacctgatgattgtcatcaatggtaaatcgggtgcg

SEQ ID NO: 657673 - DNA, 75 bp, synthetic construct
  source 1..75: mol_type = other DNA
aagccggtggtggtctgcttcctcggccgtggcgaaacaccggtggacgagcacgggctacagtttgcccgcggc

SEQ ID NO: 657674 - DNA, 75 bp, synthetic construct
  source 1..75: mol_type = other DNA
tatctttatcagcttttttaattaatggatgcgaggaagaagcaaaaacaacaaagtggtatcgaacgcaccccg

SEQ ID NO: 657675 - DNA, 75 bp, synthetic construct
  source 1..75: mol_type = other DNA
atgtctatctccacgcgtgcaaataaactcgacggcgtcgagcaggcatttgtggcgatggcgaccgaaatgaac

SEQ ID NO: 657676 - DNA, 75 bp, synthetic construct
  source 1..75: mol_type = other DNA
accaaagaggcggcgctgaaagcagtgatgcttaccggcgtgaaacaggaacatctcgacctgcatacgctaaac

SEQ ID NO: 657677 - DNA, 75 bp, synthetic construct
  source 1..75: mol_type = other DNA
tctgttgccctgacggctgctgtcgctggacgtgatacggtcgcactctatgtccgcagcctgcataccggtcgc

SEQ ID NO: 657678 - DNA, 75 bp, synthetic construct
  source 1..75: mol_type = other DNA
tgccttttctgtcggccgatccttcagcttgccggtgggtgtgcctgcaggaggacctgctgtgtgctccaaaca

SEQ ID NO: 657679 - DNA, 75 bp, synthetic construct
  source 1..75: mol_type = other DNA
cagaatgatgtgagccctacagaagccagccgggagatcctggctttgtatgttcggcatcttaatatctcccgc

SEQ ID NO: 657680 - DNA, 75 bp, synthetic construct
  source 1..75: mol_type = other DNA
ggcaagccgcatccaatgattgaccccaccaaccgcatcagtcgcttgatcgaagaggcgcgcgatccagaagtg

SEQ ID NO: 657681 - DNA, 75 bp, synthetic construct
  source 1..75: mol_type = other DNA
atgataaaaagcacaggcgctcttttattgtttgcagcactgtctgccgggcaggcaatggcctcagatgtggca

SEQ ID NO: 657682 - DNA, 75 bp, synthetic construct
  source 1..75: mol_type = other DNA
cgggccggccggaaatccgttaccgttacgacagcgacgggcgggtgacagaacagctaaacccggcaggcttaa

SEQ ID NO: 657683 - DNA, 75 bp, synthetic construct
  source 1..75: mol_type = other DNA
ggttgcggtggttctggtaccgatcattctgctctacaccgcctggtgttactggaaaatgtttggtcgtatcac

SEQ ID NO: 657684 - DNA, 75 bp, synthetic construct
  source 1..75: mol_type = other DNA
tcaggccgcagtgtttggccgcactattcagcaaggctttgaagcggcgaaaaatatcggcactcagccagtagc

SEQ ID NO: 657685 - DNA, 75 bp, synthetic construct
  source 1..75: mol_type = other DNA
tcgccctgctgttgccgttgaatggtcaggccgcagtgtttggccgcactattcagcaaggctttgaagcggcga

SEQ ID NO: 657686 - DNA, 75 bp, synthetic construct
  source 1..75: mol_type = other DNA
gccacctggcaggcgctctccgccatgacccagcagcaggcgaatacgctggtgatcaacgccgacgaaaacatc

SEQ ID NO: 657687 - DNA, 75 bp, synthetic construct
  source 1..75: mol_type = other DNA
ctcatactatgtaaggattcacttaattaccatcgctcttgaggtggttttgtttacactctgcctgtcattcag

SEQ ID NO: 657688 - DNA, 75 bp, synthetic construct
  source 1..75: mol_type = other DNA
accggaagacgaagcgcgcgatgcagcgcgtcatattcgtgaccagggtaaacaagcgccgctggtgctgatccc

SEQ ID NO: 657689 - DNA, 75 bp, synthetic construct
  source 1..75: mol_type = other DNA
cgccgactggcagaaacgttatccgaacaacccgggcgcgaaaatgctgccaacgcagttggttaacgtaaaagc

SEQ ID NO: 657690 - DNA, 75 bp, synthetic construct
  source 1..75: mol_type = other DNA
agaaaaagcaaaggaagagtgtcgctcattcagcgcagaagtaattaaacgggtgctggacagcctgaagaggga

SEQ ID NO: 657691 - DNA, 75 bp, synthetic construct
  source 1..75: mol_type = other DNA
gaacagtatgtcgaggctggcggccccggctcacctaattttcataaatcgaacgccctgaagaccatgcgtaag

SEQ ID NO: 657692 - DNA, 75 bp, synthetic construct
  source 1..75: mol_type = other DNA
gcacacggcctgcctgtgtcagaaaatctgttggagcaggatttttacgccagtggcccgaaccagaagtggaca

SEQ ID NO: 657693 - DNA, 75 bp, synthetic construct
  source 1..75: mol_type = other DNA
actgaacgatatccagcgtcgcgaaaaatctctgctggcggtagagattaagctgacacaaaaagattttgctgg

SEQ ID NO: 657694 - DNA, 75 bp, synthetic construct
  source 1..75: mol_type = other DNA
aatatcgaaaaccgcgtcaatatttgttacttcgcgctttcaccggaagacgaagcgcgcgatgcagcgcgtcat

SEQ ID NO: 657695 - DNA, 75 bp, synthetic construct
  source 1..75: mol_type = other DNA
agactggtctaatgattctttagaaacatgtaagatgaagtgctccggaaataacattggacgttttgttagatt

SEQ ID NO: 657696 - DNA, 75 bp, synthetic construct
  source 1..75: mol_type = other DNA
ttatttctaaagtccgatataacgataaacacactcacattacccatgtgtatgtgcatgtcgataatggcgata

SEQ ID NO: 657697 - DNA, 75 bp, synthetic construct
  source 1..75: mol_type = other DNA
ccatcttacccggtacagttaagaacgcgttacatctggtagcggcttatgagcgacgtctatggcgcagtcttt

SEQ ID NO: 657698 - DNA, 75 bp, synthetic construct
  source 1..75: mol_type = other DNA
tacacttcaacaacattaattttaggtgttcggatagcattttttatgccccccctgaaacctttgattttctca

SEQ ID NO: 657699 - DNA, 75 bp, synthetic construct
  source 1..75: mol_type = other DNA
atttccttattgggatcaacaaaacaattgaagatgtcatccagaaaaataaaattaatggcgtaaaaaatatta

SEQ ID NO: 657700 - DNA, 75 bp, synthetic construct
  source 1..75: mol_type = other DNA
tgtagcgaggatgtgggcggtggtctgaagccagatgaacagaaaccgagcgcagagttatgtcgtgtggccctg

SEQ ID NO: 657701 - DNA, 75 bp, synthetic construct
  source 1..75: mol_type = other DNA
agtaatgtggctcgtttatttcgagcttatcctgatgaagattccaatactgattttgtttgtcacaataaattt

SEQ ID NO: 657702 - DNA, 75 bp, synthetic construct
  source 1..75: mol_type = other DNA
ggggaggtcacgagaattaatgcagcaaaggtgttgtttgcgaatgcttttgttgaaaacagtacgaataaaaag

SEQ ID NO: 657703 - DNA, 75 bp, synthetic construct
  source 1..75: mol_type = other DNA
cggaacgggatggttactcttaatcagtcttggtgcattatcaagcgccattgtgggcttttttcttccgatatc

SEQ ID NO: 657704 - DNA, 75 bp, synthetic construct
  source 1..75: mol_type = other DNA
tgagtctcttcatcacgacatccccctgattttcagaaacattatttccatgctgacgagcaagctgtcactgtg

SEQ ID NO: 657705 - DNA, 75 bp, synthetic construct
  source 1..75: mol_type = other DNA
acagataaaagatgccaggtcggcggcaaaagaaccatggttaatattcagcagcacagatgactttaaaccgcg

SEQ ID NO: 657706 - DNA, 75 bp, synthetic construct
  source 1..75: mol_type = other DNA
tgacttaatgaaaaggttaaatgtctgtaataatatagaattgttttacaaaggagttttgctatctattaaata

SEQ ID NO: 657707 - DNA, 75 bp, synthetic construct
  source 1..75: mol_type = other DNA
gatatctgacccccgtcggtgattcaccgccctacgatgaggatctggaacggctaatcagccgctggatacggg

SEQ ID NO: 657708 - DNA, 75 bp, synthetic construct
  source 1..75: mol_type = other DNA
gcgctgatgatatacgaaacctccccgaattgatcaacaaccagtgggtgcgccggtatgaccttgccgtgaccc

SEQ ID NO: 657709 - DNA, 75 bp, synthetic construct
  source 1..75: mol_type = other DNA
ccagcaagtggaaagccgtaatcctcttattattgttgaaaatgctcatctgaatcaccgctgtgttctcgatga

SEQ ID NO: 657710 - DNA, 75 bp, synthetic construct
  source 1..75: mol_type = other DNA
ggcgttatgggtgatattcttaatattattaccttgcaaacaggtttaaatttttctccgatcaccgtttcacac

SEQ ID NO: 657711 - DNA, 75 bp, synthetic construct
  source 1..75: mol_type = other DNA
cacaatagtgcatttgaacattatttcactgctgattactataaaaatgcaatgttaccattagaaaacagtgaa

SEQ ID NO: 657712 - DNA, 75 bp, synthetic construct
  source 1..75: mol_type = other DNA
gacgggtactggataccaccatgcagatgtacgaacagtggcgggaacagcaaccgaaactggcgcatccacagc

SEQ ID NO: 657713 - DNA, 75 bp, synthetic construct
  source 1..75: mol_type = other DNA
atgattaatcgtatcaagctggagcacatcctcgaatatgccaggcagcagaagcatactggtcagcattgtaaa

SEQ ID NO: 657714 - DNA, 75 bp, synthetic construct
  source 1..75: mol_type = other DNA
tatccgttcagcaaaagacgggaggaaaatctgcgcatctgtttttttcagaagtgcgcctccggatattcagta

SEQ ID NO: 657715 - DNA, 75 bp, synthetic construct
  source 1..75: mol_type = other DNA
cattaagttgcagcagtacgtttcctgaacattacctggttaagatcgaccctcaggcgtttaagcaggtcttat

SEQ ID NO: 657716 - DNA, 75 bp, synthetic construct
  source 1..75: mol_type = other DNA
cattaagttgcagcagtacgcttcctgaacgctacctggttaagatcgaccctcaggcgtttaagcaggtcttat

SEQ ID NO: 657717 - DNA, 75 bp, synthetic construct
  source 1..75: mol_type = other DNA
gcagcaacgggttcgtggtattaatgctgattatttaaatcttttaaaaagagcgttaaatatcaaattaacact

SEQ ID NO: 657718 - DNA, 75 bp, synthetic construct
  source 1..75: mol_type = other DNA
tcgctttcgttcgcttttcctcgcggagaaccggaacttaaggatattattaataaagcactgaatgcaattccc

SEQ ID NO: 657719 - DNA, 75 bp, synthetic construct
  source 1..75: mol_type = other DNA
atgaagtttttaccctatatttttcttctctgttgtggtctttggtcgacaataggtttcgcagacgaagattac

SEQ ID NO: 657720 - DNA, 75 bp, synthetic construct
  source 1..75: mol_type = other DNA
tagtatgatttcccgatattttactcactccttaaatgtagtaaattattatagtacaccgcgccaatataattt

SEQ ID NO: 657721 - DNA, 75 bp, synthetic construct
  source 1..75: mol_type = other DNA
acttcaacgctgtcgctggctttcagctgatgtcattatggtgctggttggcctgatttgcggcatcacgctttt

SEQ ID NO: 657722 - DNA, 75 bp, synthetic construct
  source 1..75: mol_type = other DNA
acagagtattccgctgtgtctaacataggatacggatttatccagcaacatgattttcctggattggctatcaac

SEQ ID NO: 657723 - DNA, 75 bp, synthetic construct
  source 1..75: mol_type = other DNA
tggtaatgatgacgctggatctggctgacggacgtattccggtgattgccgggaccggcgcaaatgccaccacag

SEQ ID NO: 657724 - DNA, 75 bp, synthetic construct
  source 1..75: mol_type = other DNA
caatgacagtggtatcgtcggctgcctgacggtaaccccttactacaatcgtccgtcgcaagaaggtttgtatca

SEQ ID NO: 657725 - DNA, 75 bp, synthetic construct
  source 1..75: mol_type = other DNA
taaaggccagcggctgtttctgtttcgcaataaatttgtccacagcggcagtggcaaaaacgagatttttttaat

SEQ ID NO: 657726 - DNA, 75 bp, synthetic construct
  source 1..75: mol_type = other DNA
atgaaaaccgttagggagtccacaacgttgtacaactttctcggatcgcacaatccatactggcggttgacggaa

SEQ ID NO: 657727 - DNA, 75 bp, synthetic construct
  source 1..75: mol_type = other DNA
acagagtattccgctgtgtctaacataggatacggatttatccagcaacatgattttccaggggtggctatcgac

SEQ ID NO: 657728 - DNA, 75 bp, synthetic construct
  source 1..75: mol_type = other DNA
ctatcggaagctgcggtgagtacgacgtgaagcgaccgaaggaagcaatagctaggctccgtgatttgatacgtc

SEQ ID NO: 657729 - DNA, 75 bp, synthetic construct
  source 1..75: mol_type = other DNA
gaacctaaatgtgagtatccaaattcccaaaacaaataattatattcctggtaattatacaattggtcttaacgc

SEQ ID NO: 657730 - DNA, 75 bp, synthetic construct
  source 1..75: mol_type = other DNA
acttcaacgctgtcgctggctttctgctgatgtcattatggtgctggttggcctgatttgcggcatcacgctatt

SEQ ID NO: 657731 - DNA, 75 bp, synthetic construct
  source 1..75: mol_type = other DNA
tggcaccactggcgagtccgctaccttaaatcatgacgaacatgctgatgtggtgatgatgacgctggagctggc

SEQ ID NO: 657732 - DNA, 75 bp, synthetic construct
  source 1..75: mol_type = other DNA
cgagattattcatcatgttactggatctagcgatccatctggagatagtaatatagagttaggacccaccgagat

SEQ ID NO: 657733 - DNA, 75 bp, synthetic construct
  source 1..75: mol_type = other DNA
tcattcaacagtgccagttcacttaattacaatgctgaacgggacgtctttacccctcaactggcattcgaagtg

SEQ ID NO: 657734 - DNA, 75 bp, synthetic construct
  source 1..75: mol_type = other DNA
aaattttagagcacgtatcaatggtggactagacttatatattcaccataaagatggagttgtcgcaagtcagag

SEQ ID NO: 657735 - DNA, 75 bp, synthetic construct
  source 1..75: mol_type = other DNA
gaaggatgggcatattgatacgataattggtctgcctgcaaatctgttcttctctactggtattccggtatgtat

SEQ ID NO: 657736 - DNA, 75 bp, synthetic construct
  source 1..75: mol_type = other DNA
gcattacgtaatcgaacctcagtacctttggacaagtattgcagagatggcacggactcaacatgtgaaattgct

SEQ ID NO: 657737 - DNA, 75 bp, synthetic construct
  source 1..75: mol_type = other DNA
gtaagcagggcgtttattacgccaaatttaacgccggggcgttactgcgcggggatatgaagtcccgttttgaag

SEQ ID NO: 657738 - DNA, 75 bp, synthetic construct
  source 1..75: mol_type = other DNA
ctatcggtatcgaaaggaagagcctcgctactcgcgccgggttagcatggatgagatcgaaaagaacgatttcaa

SEQ ID NO: 657739 - DNA, 75 bp, synthetic construct
  source 1..75: mol_type = other DNA
ttacggcctggcaccaaagtccgccgctgactttgccttcctgctacatggcttccatttcctgaagcaagacgg

SEQ ID NO: 657740 - DNA, 75 bp, synthetic construct
  source 1..75: mol_type = other DNA
ttaaagcgattgcagcctgaaattgaaaatacgattaccacgtttatgttatgctgttttggtgatgctgccaac

SEQ ID NO: 657741 - DNA, 75 bp, synthetic construct
  source 1..75: mol_type = other DNA
ttctgatgctgacgctggtaaaaatcatgtggcagtcgatgatcgcggcggcttctggagagcgccagttaatca

SEQ ID NO: 657742 - DNA, 75 bp, synthetic construct
  source 1..75: mol_type = other DNA
atgaaatctgaaagggaacagacagtgctatatatgctcatttgcagcgttcttatgctgacgctggttaagacc

SEQ ID NO: 657743 - DNA, 75 bp, synthetic construct
  source 1..75: mol_type = other DNA
gaaaattgtaaaaatgcaaacgaagctcactggcaaatacagcagttgaatgctccgaccgtcgatttaaattca

SEQ ID NO: 657744 - DNA, 75 bp, synthetic construct
  source 1..75: mol_type = other DNA
tgagaaaatagttaaaagtaaagataacaatatcaagtcattttatttaggtacgcccagtggtaattttaaagc

SEQ ID NO: 657745 - DNA, 75 bp, synthetic construct
  source 1..75: mol_type = other DNA
aacgcgactttttcgccgcctgccgtgctcttcaccaggatgaagccgatcctgaactgatgtttcaggattatg

SEQ ID NO: 657746 - DNA, 75 bp, synthetic construct
  source 1..75: mol_type = other DNA
ctggaatactggttgtgcagttctatcattaatactcgcatttatcttttttgacagcgctctgttcaacactgg

SEQ ID NO: 657747 - DNA, 75 bp, synthetic construct
  source 1..75: mol_type = other DNA
cgtatgaatatgcttctgcatggagtgaaagattcggaatttgatattttccacggagatacccttcttaacgat

SEQ ID NO: 657748 - DNA, 75 bp, synthetic construct
  source 1..75: mol_type = other DNA
aatctttgcgttgttatctgtttttcttgaggatgagcactttataccgctgcttttgaacgttttgcaaccgaa

SEQ ID NO: 657749 - DNA, 75 bp, synthetic construct
  source 1..75: mol_type = other DNA
tgtttttcaggaagttgtacatctttcgcaaaatcaagatctccgctatggtgagatattacgtaaaagagcatt

SEQ ID NO: 657750 - DNA, 75 bp, synthetic construct
  source 1..75: mol_type = other DNA
gaagggtacgggctttattggtattgcctcgaactaataacttatgacgtagatcagcacaatctaacttttgac

SEQ ID NO: 657751 - DNA, 75 bp, synthetic construct
  source 1..75: mol_type = other DNA
atcggcgcagggattgccgaaccgtgacccggcggcaagtattgttgcacaagggaatttttacggcactgaccg

SEQ ID NO: 657752 - DNA, 75 bp, synthetic construct
  source 1..75: mol_type = other DNA
atcggcgcagggattgtcgaactgtgactcggcggcaagtatggttgcgcaaggaaatttttacggtactgactg

SEQ ID NO: 657753 - DNA, 75 bp, synthetic construct
  source 1..75: mol_type = other DNA
cagcgagctgttgatgagtccaagcctgttaaagaaaaaattgcgcgaagaagagacatcatattcacagttgct

SEQ ID NO: 657754 - DNA, 75 bp, synthetic construct
  source 1..75: mol_type = other DNA
cagttcagtgctcacagtacgctgcaaccggtgcccgggtttgtctgcgtttactggcagataatgaaatcttgc

SEQ ID NO: 657755 - DNA, 75 bp, synthetic construct
  source 1..75: mol_type = other DNA
tcagtcattgcgccgccaggccatcgttcagtcggcgctggagtggggaaaaatgcactcctggcagacgcagcc

SEQ ID NO: 657756 - DNA, 75 bp, synthetic construct
  source 1..75: mol_type = other DNA
gattccattttttaaaagaagatggtgtaatggcaatcatcctgcctcatggtgtacttttccggagcggtactg

SEQ ID NO: 657757 - DNA, 75 bp, synthetic construct
  source 1..75: mol_type = other DNA
atgcgaaccgcgatgaaaaacttcaaaacgttttgttagattatggcctggaagggtacgggctttattggtatt

SEQ ID NO: 657758 - DNA, 75 bp, synthetic construct
  source 1..75: mol_type = other DNA
aaatatcagacgcgcaatcagagggggccttaaacaccatgtcaagtgataagactacatcattacaattatata

SEQ ID NO: 657759 - DNA, 75 bp, synthetic construct
  source 1..75: mol_type = other DNA
gatggaaacattgttttttcgccacgcggctggagtgatttctgcccgcagaaagagggagcgttatgtcagctt

SEQ ID NO: 657760 - DNA, 75 bp, synthetic construct
  source 1..75: mol_type = other DNA
ctctatctcgacaccacgttgccactgaccgtaaaccgttttttacgcttacgccccggtacatataaagaagac

SEQ ID NO: 657761 - DNA, 75 bp, synthetic construct
  source 1..75: mol_type = other DNA
gcagaagtgacaagcccgctgtcagtcagtggtgacatccacccgggtggagtcacctatgaaggcatcacagta

SEQ ID NO: 657762 - DNA, 75 bp, synthetic construct
  source 1..75: mol_type = other DNA
cactgactgttccggttatgtaacccgttatgaccatgaccgttttggtcaggtgacggcggtgcaccgcgagga

SEQ ID NO: 657763 - DNA, 75 bp, synthetic construct
  source 1..75: mol_type = other DNA
caggcggaggcggtgaaagccgtcgccgatacggtgctggaaatgctggcttccgattacgacattgtgctgacc

SEQ ID NO: 657764 - DNA, 75 bp, synthetic construct
  source 1..75: mol_type = other DNA
ctcattttctatcctaattcccaagaagatggtgaacctgaaaacatcctgaaaatcgtcaaagaatggcggcgt

SEQ ID NO: 657765 - DNA, 75 bp, synthetic construct
  source 1..75: mol_type = other DNA
gcacaacaggcgctggatgacgccttcggcagtggcgcggacgtgattaaaaaactctggggacagcaggaaatg

SEQ ID NO: 657766 - DNA, 75 bp, synthetic construct
  source 1..75: mol_type = other DNA
aagaagggtcttttttatttgtttatattattactttgaaaataaacttgaatcggataagtcgctattgatccg

SEQ ID NO: 657767 - DNA, 75 bp, synthetic construct
  source 1..75: mol_type = other DNA
aacgctgccccgctacagcctgaaagccacatttgatacctcagggaaacgcgtactgatccagcaggcggaaaa

SEQ ID NO: 657768 - DNA, 75 bp, synthetic construct
  source 1..75: mol_type = other DNA
gccgctcggctatctcattaacgtaaaggaatggtgggagacaaacgacccggccggaacctttcgtcttgatat

SEQ ID NO: 657769 - DNA, 75 bp, synthetic construct
  source 1..75: mol_type = other DNA
atgagtgaaccgtcacttctccccccttcagccagcgatttcatgcgctgcgtggagcggggggctacccggttg

SEQ ID NO: 657770 - DNA, 75 bp, synthetic construct
  source 1..75: mol_type = other DNA
cgccatgagcccggtgactgccgcgttcggtgaaattgcccgtgcgctggccccggtatggcagggcataaaaac

SEQ ID NO: 657771 - DNA, 75 bp, synthetic construct
  source 1..75: mol_type = other DNA
gaagacggtggcaggtgtggtgttcccgccggtgctggtgcagatgctcgaccggctggaaagtgaaatcctggc

SEQ ID NO: 657772 - DNA, 75 bp, synthetic construct
  source 1..75: mol_type = other DNA
gaagcatccgcctgtggtatcaaaacaaaattagctgatctcgacctggaacaggcaacgagtgctgagtggcat

SEQ ID NO: 657773 - DNA, 75 bp, synthetic construct
  source 1..75: mol_type = other DNA
caaatgcgctgaacatcgtggtactgactgcggcgctctccgtgtacaacagctgcgtatattgcaacagccgta

SEQ ID NO: 657774 - DNA, 75 bp, synthetic construct
  source 1..75: mol_type = other DNA
aagtggttgcgtcaatgagcaaaaggtcaatcaactggcaggtaatgtacaaacattaaatgccaaaatcgcccg

SEQ ID NO: 657775 - DNA, 75 bp, synthetic construct
  source 1..75: mol_type = other DNA
agtcaataataagcacgccaccaccggtcccggcgaaacccagtttgccaaggccatgcgctgccctaatattac

SEQ ID NO: 657776 - DNA, 75 bp, synthetic construct
  source 1..75: mol_type = other DNA
tgtcaaggatgcttttagtttaagatatctttctttaattcatcccagatcgcaacttaattattgtgagtttta

SEQ ID NO: 657777 - DNA, 75 bp, synthetic construct
  source 1..75: mol_type = other DNA
atgttttaccaaaatgcgagagcgttagcgcgtgaagcatccgcctgtggtatcaaaacaaaattagctgatctc

SEQ ID NO: 657778 - DNA, 75 bp, synthetic construct
  source 1..75: mol_type = other DNA
atgaagatctcacaggacatgaaaagaaaatttgctttggtgaatgccctgtctaaaacggagaagccaagtctc

SEQ ID NO: 657779 - DNA, 75 bp, synthetic construct
  source 1..75: mol_type = other DNA
gcgtacccgtaacccgcataaagcagcaattcacaaagcactggacgaatgtagtgcggagcatccggtctttta

SEQ ID NO: 657780 - DNA, 75 bp, synthetic construct
  source 1..75: mol_type = other DNA
tgtggcgcagggctgcgccaaccctgcgtacccgtaacccgcataaagcagcaattcacaaagcactggacgaat

SEQ ID NO: 657781 - DNA, 75 bp, synthetic construct
  source 1..75: mol_type = other DNA
aacagagccaatacgcgtcttgatgctcaggactattttgattgcctgcgctgcttgcgtatgtacgcagaatga

SEQ ID NO: 657782 - DNA, 75 bp, synthetic construct
  source 1..75: mol_type = other DNA
cgtccgcaaatctacgccgcaaaatccgaagccaacagagccaatacgcgtcttgacgcccaggacttttttgat

SEQ ID NO: 657783 - DNA, 75 bp, synthetic construct
  source 1..75: mol_type = other DNA
agtctaccggcgaacgaggtgccaccggctactacatgctgacagactgggggatcttagacaggtcttcgttct

SEQ ID NO: 657784 - DNA, 75 bp, synthetic construct
  source 1..75: mol_type = other DNA
tttcgctcttcgcgttctcattttcatataccgccacagcctccactcagatatcatcatcgcacaaccacgccg

SEQ ID NO: 657785 - DNA, 75 bp, synthetic construct
  source 1..75: mol_type = other DNA
ttcttacctggcagagtttctgctggaaaaaggttacgaggtgcatggtattaagcgtcgtgcatcgtccttcaa

SEQ ID NO: 657786 - DNA, 75 bp, synthetic construct
  source 1..75: mol_type = other DNA
atgttttcttacgtgatgctgggtactaacgatctagagcgcgccataaggttctacgatccgctgatggaattg

SEQ ID NO: 657787 - DNA, 75 bp, synthetic construct
  source 1..75: mol_type = other DNA
cgtacccgtgtatttgaggaaatgcgcgggctaacagcacagatcaagaaggatatggcccggcgattaaccgaa

SEQ ID NO: 657788 - DNA, 75 bp, synthetic construct
  source 1..75: mol_type = other DNA
tggattgaaaatgccgtgcgcggcatctttgatcatcaatgtctgattttacgttcggcgtccggtgatattcgc

SEQ ID NO: 657789 - DNA, 75 bp, synthetic construct
  source 1..75: mol_type = other DNA
gtgcccgtccgcgccagtattgaaccactaacctgggaaaatgccttctttggcgttaacagcgctatcgtgcat

SEQ ID NO: 657790 - DNA, 75 bp, synthetic construct
  source 1..75: mol_type = other DNA
gccccgcagtccgtgccacgcgcagcagctcgctcctgccgtctcagcggcggcgccgttcctgtggccccgcag

SEQ ID NO: 657791 - DNA, 75 bp, synthetic construct
  source 1..75: mol_type = other DNA
aacgcggcacttctcaggaatacgccaacctcgctaatcagtcagtcacatattccagggcttaccctgaagtgt

SEQ ID NO: 657792 - DNA, 75 bp, synthetic construct
  source 1..75: mol_type = other DNA
atgattgcgcactctcagatccgatgctgatcgtacaggcgtataccgttaatcctcaaacagagcgggtgaaaa

SEQ ID NO: 657793 - DNA, 75 bp, synthetic construct
  source 1..75: mol_type = other DNA
cctacgcattgctgatggtcatgttcattgctccatttgcattgtagttgaggaagttgatatggactccgtatg

SEQ ID NO: 657794 - DNA, 75 bp, synthetic construct
  source 1..75: mol_type = other DNA
accacaattaccgtattggtggatgaagacggtaatatattaaacaaccgaatcaaacaacgggcgcaagaaaac

SEQ ID NO: 657795 - DNA, 75 bp, synthetic construct
  source 1..75: mol_type = other DNA
aacgcaattaccgctatacaggtgcaaacgtattgcccgcactgaaatatgcacagcgttacgcacagcgcgtat

SEQ ID NO: 657796 - DNA, 75 bp, synthetic construct
  source 1..75: mol_type = other DNA
atcctggacaagatacccgcgcaaaagtcactgaataagaaatacaccttccaaatatacatggacgaactgcaa

SEQ ID NO: 657797 - DNA, 75 bp, synthetic construct
  source 1..75: mol_type = other DNA
aaccatggcgcagattacgcaccaggctggcggcgtgactacagtaccaaaaatcagcagcctgcatttgcttta

SEQ ID NO: 657798 - DNA, 75 bp, synthetic construct
  source 1..75: mol_type = other DNA
accgaagaagaaattgctcaggcagctgaacgcttcgccactatgagcgacgaagacaaagcgcgtctgacccgt

SEQ ID NO: 657799 - DNA, 75 bp, synthetic construct
  source 1..75: mol_type = other DNA
ccagttgcgttccgctcttttatttcatgaaccacgtattgctgcattgcaggtgagtctgaaagaagcatattg

SEQ ID NO: 657800 - DNA, 75 bp, synthetic construct
  source 1..75: mol_type = other DNA
caaaccacggcgcagcgtatgagcgtgaagccggcgagcaagctggccttgcagtggcaggcggtggacgggctg

SEQ ID NO: 657801 - DNA, 75 bp, synthetic construct
  source 1..75: mol_type = other DNA
cactatctggatgttgcacggttcgctgtgtgagttccggctgaatttgtggggagcggagtttgcggcgttctt

SEQ ID NO: 657802 - DNA, 75 bp, synthetic construct
  source 1..75: mol_type = other DNA
gaaacagcgcgtgcagtttgaagtcatcccgcaggataaaccggtcaatttaccgggcgtggggcagttctccgg

SEQ ID NO: 657803 - DNA, 75 bp, synthetic construct
  source 1..75: mol_type = other DNA
ccacgagttggccattagtctggagatgatgctgtaccacgatgatgagccgctaacgtttgacctggtctggca

SEQ ID NO: 657804 - DNA, 75 bp, synthetic construct
  source 1..75: mol_type = other DNA
gcagaatgtaactcaaggtttattacaggtattcgccttggcggtctgtcatctgttcagacatggaatggtccc

SEQ ID NO: 657805 - DNA, 75 bp, synthetic construct
  source 1..75: mol_type = other DNA
gttcagcccgtgatggttatggttttgaagccgactggtccgaattttacaccaccaccagaaaaccttcagcag

SEQ ID NO: 657806 - DNA, 75 bp, synthetic construct
  source 1..75: mol_type = other DNA
ggtttgcaggaaacggtaaatcaggcttctggcgcattacagaaaaaccagaacggcgcagatattccgggaaaa

SEQ ID NO: 657807 - DNA, 75 bp, synthetic construct
  source 1..75: mol_type = other DNA
aggggggggctgaagacgaggtgtatatggggatggagcccccctatcttgcggccagccaaccgatgcaggacg

SEQ ID NO: 657808 - DNA, 75 bp, synthetic construct
  source 1..75: mol_type = other DNA
atcgatcgtgatgataagccggtaaggggcggtgctgaagacgaggtgtatatggggatggaacctccctatctg

SEQ ID NO: 657809 - DNA, 75 bp, synthetic construct
  source 1..75: mol_type = other DNA
ttaattatggagtggtggatctgaccagtataccttatgccgccagaatttttcagcagctattaatcaacttgc

SEQ ID NO: 657810 - DNA, 75 bp, synthetic construct
  source 1..75: mol_type = other DNA
gagtttcgttaattaataatgccccgttaaacaaaggtacagcattttcagcatctgagcggagagagttcaatc

SEQ ID NO: 657811 - DNA, 75 bp, synthetic construct
  source 1..75: mol_type = other DNA
aaacccattgccgggcgcgacccgcaaacggaagatctggcgttgacccagcgttgcttgataacagaggatatg

SEQ ID NO: 657812 - DNA, 75 bp, synthetic construct
  source 1..75: mol_type = other DNA
ggcgggcaaagggcagctctatcgcgccgatctggatcgtaacggcattcaggatctggttatctggttgccaag

SEQ ID NO: 657813 - DNA, 75 bp, synthetic construct
  source 1..75: mol_type = other DNA
acctgcaatcaacggtatcctggacgacggtaaagacactccggctgaacgtcacgcaagtgatgacgagccgtt

SEQ ID NO: 657814 - DNA, 75 bp, synthetic construct
  source 1..75: mol_type = other DNA
gcagctgaagcttctgaagagctgatggaaaaatacctgggtggtgaagaactgactgaagcagaaattaaaggt

SEQ ID NO: 657815 - DNA, 75 bp, synthetic construct
  source 1..75: mol_type = other DNA
aatgcgattgtggccacaggcagcccgttctctcctgtggaatataacggggtgcagagggtgatttctcagtgc

SEQ ID NO: 657816 - DNA, 75 bp, synthetic construct
  source 1..75: mol_type = other DNA
atgatgacgctgattattccgcgaaaggaggctcctgtacccggtgagggtacggtggtcatcccgcaaccggca

SEQ ID NO: 657817 - DNA, 75 bp, synthetic construct
  source 1..75: mol_type = other DNA
gaagcggcaaaacggggtgtgggaacaggggaaaatcagataccggacatggcttcatttagtggggtgagggat

SEQ ID NO: 657818 - DNA, 75 bp, synthetic construct
  source 1..75: mol_type = other DNA
ggttcttgctgtacgttctaaagtagaaaatacaggatggtacaattataagggaacaactacaggtgaagtcag

SEQ ID NO: 657819 - DNA, 75 bp, synthetic construct
  source 1..75: mol_type = other DNA
atgatgaatgagaaacagaccgaagaactggtggtgaccctgaagcgtccggtaagggatccggataccaggacg

SEQ ID NO: 657820 - DNA, 75 bp, synthetic construct
  source 1..75: mol_type = other DNA
gcgcgtgcgtgagctgatgcgtctggagcagaccgtttccccgctgcgcctgaatgatgcgattaaagccggtat

SEQ ID NO: 657821 - DNA, 75 bp, synthetic construct
  source 1..75: mol_type = other DNA
tctccagccgcaggatgctgggcttgcacaagccgtacgtgcgacgatcgccaaacatcgtgaacatttgctgga

SEQ ID NO: 657822 - DNA, 75 bp, synthetic construct
  source 1..75: mol_type = other DNA
tggaaaaatacctaggtggtgaagaactgactgaagcagaaatcaaaggtgctctgcgtcagcgcgttctgaaca

SEQ ID NO: 657823 - DNA, 75 bp, synthetic construct
  source 1..75: mol_type = other DNA
cacgttgagtttcacgaaaccggacgcgccgcctgtttctgggtcgatgtgtgtgaagataaaaacgcaacacta

SEQ ID NO: 657824 - DNA, 75 bp, synthetic construct
  source 1..75: mol_type = other DNA
gcgcaagccgtgcgggcgacgatcgcaaaacatcgtgaacatttgctggagtttatccgcctggatgaacctgcc

SEQ ID NO: 657825 - DNA, 75 bp, synthetic construct
  source 1..75: mol_type = other DNA
ccgcttcgcgccatgacgctggcgcaatggtcatcaccgaatgcgctaagttctctactggcggtctattccgat

SEQ ID NO: 657826 - DNA, 75 bp, synthetic construct
  source 1..75: mol_type = other DNA
ggttgcggtggttctggtaccgatcattctgctctacaccgcctggtgttactggaaaatgttcggccgtatcac

SEQ ID NO: 657827 - DNA, 75 bp, synthetic construct
  source 1..75: mol_type = other DNA
ttgaagatgttatctggcgaacgcatctccagccgcaagatccaacacttgcggaaacagtacgtgcgacgatcg

SEQ ID NO: 657828 - DNA, 75 bp, synthetic construct
  source 1..75: mol_type = other DNA
aatggtcatcaccgaatgcgctaagttctctactcgcggtctattccgatcatatctaccgcaaccaacctttga

SEQ ID NO: 657829 - DNA, 75 bp, synthetic construct
  source 1..75: mol_type = other DNA
gtcgtgggggcgaatttattatcgataccgtagaggccgtgcgctttgtccccttagtgaagggggagctggctt

SEQ ID NO: 657830 - DNA, 75 bp, synthetic construct
  source 1..75: mol_type = other DNA
gtcggggaggcgaatttattatcgataccgtggaggctgtgcgctttgtccctttagtgaagggtgagctggctt

SEQ ID NO: 657831 - DNA, 75 bp, synthetic construct
  source 1..75: mol_type = other DNA
gcacttgccgccgtgccgcgtgaaaaattcgttgatgaagcgtttgaacaaaaagcctgggacaatatcgccttg

SEQ ID NO: 657832 - DNA, 75 bp, synthetic construct
  source 1..75: mol_type = other DNA
gtatgaagataaaaacgcaacaccacattcaccgcagcagcgaatggaaacgttaatcagccaggcgcttgttcc

SEQ ID NO: 657833 - DNA, 75 bp, synthetic construct
  source 1..75: mol_type = other DNA
tgcagtggcaggcgcgcaggcgtctgaaaaatcttgatttacacaatgtttcaacccgtcacggcgatggatggc

SEQ ID NO: 657834 - DNA, 75 bp, synthetic construct
  source 1..75: mol_type = other DNA
ccgataggtcaagggcagacaatttctcagccttatatggtggcgagaatgacggaactcctcgaactgaccccg

SEQ ID NO: 657835 - DNA, 75 bp, synthetic construct
  source 1..75: mol_type = other DNA
taatgcgcgtcctgtaaacgatattttggttgtgcatggtgttagtcgtgagttcagaattcgtcttaacagact

SEQ ID NO: 657836 - DNA, 75 bp, synthetic construct
  source 1..75: mol_type = other DNA
gcagaaaaaggtgatataaaaggcatccaacgcgcagccacaatatatcctctcctgttagcctttccgatgcgt

SEQ ID NO: 657837 - DNA, 75 bp, synthetic construct
  source 1..75: mol_type = other DNA
ttcaggtttgaatactattggcatctctatttttggactctgtgccgtcctcttatatatgcagtcacaaaatgc

SEQ ID NO: 657838 - DNA, 75 bp, synthetic construct
  source 1..75: mol_type = other DNA
atcatcatgatggtactactgggtcgtgaactcgcgccgctgaacaaactggcgctggcactacgtatgcgtgac

SEQ ID NO: 657839 - DNA, 75 bp, synthetic construct
  source 1..75: mol_type = other DNA
acatcgtgacgcttgaagtctgtgggccgatgggcgaaaaagtgaatgctttttatggtcttaccggcgacggga

SEQ ID NO: 657840 - DNA, 75 bp, synthetic construct
  source 1..75: mol_type = other DNA
acaatatcttctcatcaagtcgccgcccgcctccggtaagagtcgtgctctgatgttcgtcgcactcgacaaact

SEQ ID NO: 657841 - DNA, 75 bp, synthetic construct
  source 1..75: mol_type = other DNA
tgcggatcctacgactggttttcagctagtcaagcgccccgatggccatgtgttgcgtattgctgacctggtgga

SEQ ID NO: 657842 - DNA, 75 bp, synthetic construct
  source 1..75: mol_type = other DNA
tttcctacatgctgccaatggtggttgcgggtggtctgtgtatcgcgctttcctttgcttttggtatcgaagcgt

SEQ ID NO: 657843 - DNA, 75 bp, synthetic construct
  source 1..75: mol_type = other DNA
tctttacggtgttaaacccggcgcaacgcgtgtcgatcttgacggcaacccatgcggtgagctggacgagcaaca

SEQ ID NO: 657844 - DNA, 75 bp, synthetic construct
  source 1..75: mol_type = other DNA
cttgagtcagcaggtgcagagattagccgggcaggtggaccacttgagtcggttatttatcacgaacagcagata

SEQ ID NO: 657845 - DNA, 75 bp, synthetic construct
  source 1..75: mol_type = other DNA
tggttcggttggcgcgggtaatgcaatcacccccgaagaagtagccgcagcggatctggtgattgtggcggcaga

SEQ ID NO: 657846 - DNA, 75 bp, synthetic construct
  source 1..75: mol_type = other DNA
atgtatcgcacctctaccggtctggcgctgaagaaaaccgcgcaggaactggataaagcggttgctgaagcaacg

SEQ ID NO: 657847 - DNA, 75 bp, synthetic construct
  source 1..75: mol_type = other DNA
ccgggtctgattggcggtatgctggcggtcagcaccggttctggcttcattggcggtattattgcgggcttcctg

SEQ ID NO: 657848 - DNA, 75 bp, synthetic construct
  source 1..75: mol_type = other DNA
gatggcgtggaagtggtgcaccagtacggcattgacgcggtgttcagcattttgccacgtctggcacctttagcc

SEQ ID NO: 657849 - DNA, 75 bp, synthetic construct
  source 1..75: mol_type = other DNA
ccggacgtacacattgccgggcttgacgtattactcacgcaaaatttaacaccctatattatcgaaattaacggc

SEQ ID NO: 657850 - DNA, 75 bp, synthetic construct
  source 1..75: mol_type = other DNA
atggtaaagccgtcgtttaaatccctgacaggtcgcagccggacagtgtgtgtcgggtgtggttattccggtgtg

SEQ ID NO: 657851 - DNA, 75 bp, synthetic construct
  source 1..75: mol_type = other DNA
gttatgataatccacacagtgacctaccctgcgcaacggaagatgccaccggcagccggaaaaccatgacgtgga

SEQ ID NO: 657852 - DNA, 75 bp, synthetic construct
  source 1..75: mol_type = other DNA
tagcaacatatctgttcaggttcaattatccaaaaccgccagaagttggtaaaaatccatttgttgggaggaata

SEQ ID NO: 657853 - DNA, 75 bp, synthetic construct
  source 1..75: mol_type = other DNA
ttgccgtgacgcggacaggcgcacaaccttctgtaccatggcgggaagagatcgatgcgtttttagacaggcaga

SEQ ID NO: 657854 - DNA, 75 bp, synthetic construct
  source 1..75: mol_type = other DNA
aaacccatcgccggacgcgacccgcaaacggaagatctggcgctgacgcagcgttgcttgataaaggaggatgtg

SEQ ID NO: 657855 - DNA, 75 bp, synthetic construct
  source 1..75: mol_type = other DNA
gcggcagtgcgacggtcgacggcggtatgggcatggcgcaggcgctcggtgtgcgtttccttgatgccgacggtc

SEQ ID NO: 657856 - DNA, 75 bp, synthetic construct
  source 1..75: mol_type = other DNA
caaaaaggggcaacgccggaaatggtcgaagagctggagcaggggctgcaaaattacgcccgtgttttacaacag

SEQ ID NO: 657857 - DNA, 75 bp, synthetic construct
  source 1..75: mol_type = other DNA
cgcactatatctgtttgccgatagcggatggcggcgaagggacggtggatgcgatggtcgccgcgacgggcggca

SEQ ID NO: 657858 - DNA, 75 bp, synthetic construct
  source 1..75: mol_type = other DNA
tgctgctattgataacagttttaattctccgcctgtttcgcaacaagatacagccaatgcatctgcacctgctca

SEQ ID NO: 657859 - DNA, 75 bp, synthetic construct
  source 1..75: mol_type = other DNA
tattactattttgcctgtcgtgggcgaaaacaacgatagcttcttacatccctggaaatcaggttattaacgtta

SEQ ID NO: 657860 - DNA, 75 bp, synthetic construct
  source 1..75: mol_type = other DNA
gcggctaacggcggcaatttagcacgcgtggcaagtattgagatggatgaatgcgatccgcgtctggcgaactgc

SEQ ID NO: 657861 - DNA, 75 bp, synthetic construct
  source 1..75: mol_type = other DNA
atagcctgcaaccgctccaagaaaccaccttcactaacgcgggtttcaccgaacgctaccacttacaggagtggc

SEQ ID NO: 657862 - DNA, 75 bp, synthetic construct
  source 1..75: mol_type = other DNA
tggcaatgaatacgaattgcgcgaaacggattcctgcgcgcgcctgaagtgggcgcttttggctgtctgggcgaa

SEQ ID NO: 657863 - DNA, 75 bp, synthetic construct
  source 1..75: mol_type = other DNA
gcaaaagcgttatgcaaacagatgcaggcagaatgtacttttactaatcacgcgttcgacagcctgatcccgtca

SEQ ID NO: 657864 - DNA, 75 bp, synthetic construct
  source 1..75: mol_type = other DNA
ggaaaaactgaataacgcgctggcagcaattaaagctgacggtacttatcaaaaaatcagtgaccagtggttccc

SEQ ID NO: 657865 - DNA, 75 bp, synthetic construct
  source 1..75: mol_type = other DNA
gaaattacagcaggcgcaagaaaagggcgacatggaacaaatcattaatgcgaacaggttatttcgcttagcgat

SEQ ID NO: 657866 - DNA, 75 bp, synthetic construct
  source 1..75: mol_type = other DNA
aaaatattgccggtcgccgcgccttctgtccgccattcatgcccggaaaacgtcttgtggtcaccacactgcaga

SEQ ID NO: 657867 - DNA, 75 bp, synthetic construct
  source 1..75: mol_type = other DNA
tgacggtaataccttcgaactggtcgaaaccgattcctgcaacatcattccatgggacacactggccatctgggg

SEQ ID NO: 657868 - DNA, 75 bp, synthetic construct
  source 1..75: mol_type = other DNA
cttgggcgtcagcggtaatacttacgctctcgcggaaacggattccggttcattcctggactatgacaccctgac

SEQ ID NO: 657869 - DNA, 75 bp, synthetic construct
  source 1..75: mol_type = other DNA
gagtcttccgaattcctgcgcctggtcaatgtgaaagacgtccagcagaccaccggccaggttatcagtaccggc

SEQ ID NO: 657870 - DNA, 75 bp, synthetic construct
  source 1..75: mol_type = other DNA
ttcctgcgcctgctgcccaatgtgctggatgtggaccagatcaccggccaggtggtcagcaccggtaaaccgggt

SEQ ID NO: 657871 - DNA, 75 bp, synthetic construct
  source 1..75: mol_type = other DNA
gatcgtcggctttgatatcgatctggcaaaagccttgtgcaaacaaatgcaggcagaatgtacttttactaatca

SEQ ID NO: 657872 - DNA, 75 bp, synthetic construct
  source 1..75: mol_type = other DNA
ctgaataacgcgctggcagcaattaaagctgacggtacatatcagaaaatcagcgatcagtggttcccgcaataa

SEQ ID NO: 657873 - DNA, 75 bp, synthetic construct
  source 1..75: mol_type = other DNA
ggaaaaactcaataacgcactggcagcaattaaagctgacggcacgtatcagaaaatcaatgaccagtggttccc

SEQ ID NO: 657874 - DNA, 75 bp, synthetic construct
  source 1..75: mol_type = other DNA
gaaattacagcaggcgcaagaaaagggcgacatggaacaaatcattaatgtgaacaggctatttcgcttagcgat

SEQ ID NO: 657875 - DNA, 75 bp, synthetic construct
  source 1..75: mol_type = other DNA
cccaccgttcgttgtttgcacagcaccctgaattacgcccgacaggaaataatcgtcatcgctgggctgaactgg

SEQ ID NO: 657876 - DNA, 75 bp, synthetic construct
  source 1..75: mol_type = other DNA
taaaaagctggtggggtatgccgttcgctggaacagcctttcagaaattatctgggacgaattccgcgaacagtt

SEQ ID NO: 657877 - DNA, 75 bp, synthetic construct
  source 1..75: mol_type = other DNA
cggaaatcaccaccagcgccagcaacacgcttacaggctacgttgttcgctgggataacctttcggaactgttat

SEQ ID NO: 657878 - DNA, 75 bp, synthetic construct
  source 1..75: mol_type = other DNA
caaactgattaacccggtggtggttgaactggcagcgctggcgcatgacatcggaaatcctcctttcggtcattc

SEQ ID NO: 657879 - DNA, 75 bp, synthetic construct
  source 1..75: mol_type = other DNA
tgcactctctgggcgagaattaacttcatcaatgatctctaacagggtgaaccgccccgggaatcctggagacta

SEQ ID NO: 657880 - DNA, 75 bp, synthetic construct
  source 1..75: mol_type = other DNA
aggggcgaaatcttctggtgaatataaaagacatcagtttcgttgttcagaaaggcattttttgtgagattcata

SEQ ID NO: 657881 - DNA, 75 bp, synthetic construct
  source 1..75: mol_type = other DNA
gatttcccgcgcattcgtgtgatgggcactatcggctggattgcctctggtctggcatgtggattcttgccgcaa

SEQ ID NO: 657882 - DNA, 75 bp, synthetic construct
  source 1..75: mol_type = other DNA
gatgcgttgatcctgctgcgtgataaaaatttcctcgtctttttcttctgttcattcctgtttgcaatgccgctg

SEQ ID NO: 657883 - DNA, 75 bp, synthetic construct
  source 1..75: mol_type = other DNA
ttgctcggctatcgtcttggtggcgtgatgatggagaagatgtttgcttatcaggaaccggtaaacgggctgacc

SEQ ID NO: 657884 - DNA, 75 bp, synthetic construct
  source 1..75: mol_type = other DNA
gcggcatgtagcgcagtctgccagccatgaagtggtgaataacgttattaagttgaagtttggaaatcagccata

SEQ ID NO: 657885 - DNA, 75 bp, synthetic construct
  source 1..75: mol_type = other DNA
gcttgagcataacccagcacgactgctcaaaccagcaatgtttggtgcatcgatgaataaacctcgcgagcgatg

SEQ ID NO: 657886 - DNA, 75 bp, synthetic construct
  source 1..75: mol_type = other DNA
ggggattcatcagcactaggtagttaccctgccatgggattagctcaagctcgtaaagctcatgcggatgcaatt

SEQ ID NO: 657887 - DNA, 75 bp, synthetic construct
  source 1..75: mol_type = other DNA
gcaatggcatccgatctgattaacgccaaaattccggcacagttccgcaatgacccgcgtctggtcgtgatggtg

SEQ ID NO: 657888 - DNA, 75 bp, synthetic construct
  source 1..75: mol_type = other DNA
gccttcatatcgtcgtttccccaacgatgatgaatttaaacgggaattaaaagttcgcgatctctataacttccg

SEQ ID NO: 657889 - DNA, 75 bp, synthetic construct
  source 1..75: mol_type = other DNA
agcgcctctgcaacgtcacagcatctcgctcgtatgcgtgacgaagggcttatcgacagccaacgggatgcgcag

SEQ ID NO: 657890 - DNA, 75 bp, synthetic construct
  source 1..75: mol_type = other DNA
tatcgacagccaacgggatgcgcaacgcattctatattccattaaaaatgaggcggtaaatgccattatcgccac

SEQ ID NO: 657891 - DNA, 75 bp, synthetic construct
  source 1..75: mol_type = other DNA
atcaccgtcacggcggtagtgattggtattttgtggggcacgatgctggcggtgatgcgtttatccagctttgcg

SEQ ID NO: 657892 - DNA, 75 bp, synthetic construct
  source 1..75: mol_type = other DNA
atcttatgttttccgccgtgcagtatgtgcgattccgacgaattctcttaacaagacgtttgctactttttataa

SEQ ID NO: 657893 - DNA, 75 bp, synthetic construct
  source 1..75: mol_type = other DNA
aatcgcttgctacggcttttcaggatttgcgcgagttaaaggtcgatgtggcgtatcctttcttactggcgcttt

SEQ ID NO: 657894 - DNA, 75 bp, synthetic construct
  source 1..75: mol_type = other DNA
tggatctgttcgaaaccaaaatcgaacagctggcagatgaaattgaaaatatctacagcgatctggagcagttga

SEQ ID NO: 657895 - DNA, 75 bp, synthetic construct
  source 1..75: mol_type = other DNA
tcggctaccctgccgcgattatctttatgatcctcgcgggcctggcaccgtatctgtactttaagcggaagaact

SEQ ID NO: 657896 - DNA, 75 bp, synthetic construct
  source 1..75: mol_type = other DNA
tacgggatgaactttgaatttatgccagagttgaagtggagttacggctacccaggcgcgattatctttatgatc

SEQ ID NO: 657897 - DNA, 75 bp, synthetic construct
  source 1..75: mol_type = other DNA
ccagcgccgaacaggctgcggccttactgaaagcaatgagtcaccccaaacggttgctgattctgtgcatgattt

SEQ ID NO: 657898 - DNA, 75 bp, synthetic construct
  source 1..75: mol_type = other DNA
ttcctggtgcgcaaggcgcgtttacctggtgggcaactggagcaggcgcgtgaaattctgcgagatatcgaatcc

SEQ ID NO: 657899 - DNA, 75 bp, synthetic construct
  source 1..75: mol_type = other DNA
cgcgcccgtagccagtcaatggtggacggtaacgcctacgagctgctgttggatctgttcgaaaccaaaatcgaa

SEQ ID NO: 657900 - DNA, 75 bp, synthetic construct
  source 1..75: mol_type = other DNA
caaagcctacgttaacgtattccgctcgattcctttagttatggttttgctgtggttttacctgattgtgccggg

SEQ ID NO: 657901 - DNA, 75 bp, synthetic construct
  source 1..75: mol_type = other DNA
cgcgcgaaaaccactgatccggaaactaacccgaacggcgaggatgtgaacgttggctggcatgagcgtatgaaa

SEQ ID NO: 657902 - DNA, 75 bp, synthetic construct
  source 1..75: mol_type = other DNA
agacacacaaacgcaatccacggtgccggataaaaacgaccgcgccacaggtgacggcccatctcaggtgaatta

SEQ ID NO: 657903 - DNA, 75 bp, synthetic construct
  source 1..75: mol_type = other DNA
caatcaaggcgcggttcgaagccaacgatggcgaaaagttgtttggcatggggcagtaccagcagccaaatctgg

SEQ ID NO: 657904 - DNA, 75 bp, synthetic construct
  source 1..75: mol_type = other DNA
ataacccgaacggcgaagatgtcaacatcggctggcatgagcgtatgaaaacgctgctgggtggtaatcagatta

SEQ ID NO: 657905 - DNA, 75 bp, synthetic construct
  source 1..75: mol_type = other DNA
tgccggtaaggacgaaaacgagttttacaacctggtccaggcgtttaccacacaggcttttgcgctggatatgct

SEQ ID NO: 657906 - DNA, 75 bp, synthetic construct
  source 1..75: mol_type = other DNA
gataccagtcgctatttctccctgaatgacccgcaggaaaatgcgctgcgtctggcgctgctggagtccgtggag

SEQ ID NO: 657907 - DNA, 75 bp, synthetic construct
  source 1..75: mol_type = other DNA
atgttcttatttatcaggggaaggttgggggtttatttcgtgaaagaaaaaacgaaagggttgctacagacattg

SEQ ID NO: 657908 - DNA, 75 bp, synthetic construct
  source 1..75: mol_type = other DNA
aaattggaatattaacatatttcctggtcaagagcttattatttattttgtggaaaactcaaagaaaaataaaaa

SEQ ID NO: 657909 - DNA, 75 bp, synthetic construct
  source 1..75: mol_type = other DNA
tagttccttccctgccgtatctgctggacgggctggtgatcaccctgaaaattaccatcacggcagtcgtgattg

SEQ ID NO: 657910 - DNA, 75 bp, synthetic construct
  source 1..75: mol_type = other DNA
tgccagaatctaccggggggttagcgctaccgatgtagccgctatttttgatagtatgagggaaacggaggcccg

SEQ ID NO: 657911 - DNA, 75 bp, synthetic construct
  source 1..75: mol_type = other DNA
gcgccctcgaaatttagatcattatttgcctaaagcttactatcctcagttttctatattgccagttaatctggt

SEQ ID NO: 657912 - DNA, 75 bp, synthetic construct
  source 1..75: mol_type = other DNA
gaaatgaagcagaacagataatacatccctatttagacgatagccgttattatgatgaacagtggatatcggcta

SEQ ID NO: 657913 - DNA, 75 bp, synthetic construct
  source 1..75: mol_type = other DNA
gctggtatcagttatctggctgatggtactgtagatccgacaaacgcagccattgcaggctgggtgaatgtgttc

SEQ ID NO: 657914 - DNA, 75 bp, synthetic construct
  source 1..75: mol_type = other DNA
aagcttggtgtaatgcgtgctccagatggaattgcagtacatgttgatcgtcgtaatgacagtgtaaatattgaa

SEQ ID NO: 657915 - DNA, 75 bp, synthetic construct
  source 1..75: mol_type = other DNA
gggctggcgggcggtccgctgattatggcgttgatcctcgggcgtatcggtagtatcggcaagctgtactggttt

SEQ ID NO: 657916 - DNA, 75 bp, synthetic construct
  source 1..75: mol_type = other DNA
ttagctttcggcccctacccggagatatccctgttgcaggctcgccgcctgcgtgaaacggcacgcaataacatt

SEQ ID NO: 657917 - DNA, 75 bp, synthetic construct
  source 1..75: mol_type = other DNA
ccggcgaatacgatcaggataaatgcatgagcgacagcacgattaataaagcattgcgcgtgatgggctacgaca

SEQ ID NO: 657918 - DNA, 75 bp, synthetic construct
  source 1..75: mol_type = other DNA
aaaaattcatcgatcagatcgccacggaggatttgctgtttaccctgcgtaaggtggagaacaaaggctttctgg

SEQ ID NO: 657919 - DNA, 75 bp, synthetic construct
  source 1..75: mol_type = other DNA
agtgatctcaatgttcgcgcacgtatccgttttgaacggtataactcggaaggatacaccttcctttgcgacgcc

SEQ ID NO: 657920 - DNA, 75 bp, synthetic construct
  source 1..75: mol_type = other DNA
aaagcgagagtgccgcagccagttctgcaagcgcggcggctgcttctgctactgcatcagctaacagtcaaaaag

SEQ ID NO: 657921 - DNA, 75 bp, synthetic construct
  source 1..75: mol_type = other DNA
gcggcaaagaaatccgaaactgcagcggcatcatcgaagaacgcggcgaaaacctcagaaacgaatgcagctaac

SEQ ID NO: 657922 - DNA, 75 bp, synthetic construct
  source 1..75: mol_type = other DNA
cctcattgcgcgtctccggattacgcctcaacctgtttgctgttctgatcgtcatcatcggtggtctggttaccg

SEQ ID NO: 657923 - DNA, 75 bp, synthetic construct
  source 1..75: mol_type = other DNA
atgagtgatatagcattaacggtcagtattctggctttggtggcagtcgtcggtttgtttatcggcaacgtcaaa

SEQ ID NO: 657924 - DNA, 75 bp, synthetic construct
  source 1..75: mol_type = other DNA
agtttttataattatataccagccatcccttttaatatttggaaagaaaaagaactattgccagtcttaaagaaa

SEQ ID NO: 657925 - DNA, 75 bp, synthetic construct
  source 1..75: mol_type = other DNA
tccgggcatctggcatttatttttcccggcgaatacgaccaggaccagggcaagattacgaaagcccgctccccg

SEQ ID NO: 657926 - DNA, 75 bp, synthetic construct
  source 1..75: mol_type = other DNA
ggcgttgcgcgggctttctctggcagctatctggcggcgtcactggcgcaatggtacctggtttgccgcaacgtg

SEQ ID NO: 657927 - DNA, 75 bp, synthetic construct
  source 1..75: mol_type = other DNA
ttatctgctggatggcatgtttattggcgcaacgcgcgccgccgaaatgcgaaacagcatggcagtggcagcggc

SEQ ID NO: 657928 - DNA, 75 bp, synthetic construct
  source 1..75: mol_type = other DNA
gagtactaccgggcttactgcacaggcttttggtgctcaaaatcctcaggcattagcgcgggcgctggtgcagcc

SEQ ID NO: 657929 - DNA, 75 bp, synthetic construct
  source 1..75: mol_type = other DNA
cgcggcactgagcggcaaagcgctggataaacctctcgcacactcgctgacccgtcactttattactcagcattt

SEQ ID NO: 657930 - DNA, 75 bp, synthetic construct
  source 1..75: mol_type = other DNA
tgtggttggcgttaactgtctttctggcgctgcgcgggctttctctggcagctatctggcagcgtcactggcgca

SEQ ID NO: 657931 - DNA, 75 bp, synthetic construct
  source 1..75: mol_type = other DNA
ggcgcaacgcgtgcggctgaaatgcgtaacagtatggcggtagcagcagcaggttttgccctgacgctccttacg

SEQ ID NO: 657932 - DNA, 75 bp, synthetic construct
  source 1..75: mol_type = other DNA
ttgttggatgcgatctttatgggtcagattattgcatccatgtgtttattgttttttattccagtgctttccatt

SEQ ID NO: 657933 - DNA, 75 bp, synthetic construct
  source 1..75: mol_type = other DNA
ggcgcaagcaaggcactgttgcaaagttagcgatgaggcagccttttgtctcattcaaaggccttacatttcaaa

SEQ ID NO: 657934 - DNA, 75 bp, synthetic construct
  source 1..75: mol_type = other DNA
tcccggaagagcgcgaacagatcgaaaacgtgcgcttctcttaccgggggtcgaaaatgaaaatccagcacattg

SEQ ID NO: 657935 - DNA, 75 bp, synthetic construct
  source 1..75: mol_type = other DNA
tgttttggtgcaatcacggtgcttggcgcgcgacaggggagcgatattatcgccgtcaacgctgtcctgatgacg

SEQ ID NO: 657936 - DNA, 75 bp, synthetic construct
  source 1..75: mol_type = other DNA
atggcattcctcacttcatctgataaagcgctctggcatctcgccttacccatgattttctccaatatcaccgtt

SEQ ID NO: 657937 - DNA, 75 bp, synthetic construct
  source 1..75: mol_type = other DNA
ggcgttacgcgggctttctctggcggctatctggcggctatctggcggcgtcactggcgtaacgatacctggttt

SEQ ID NO: 657938 - DNA, 75 bp, synthetic construct
  source 1..75: mol_type = other DNA
tatggaaatatattcgtgaagcagccgtgattcgtatcgggggcaaacgacgacaggattacgacaccttaatgg

SEQ ID NO: 657939 - DNA, 75 bp, synthetic construct
  source 1..75: mol_type = other DNA
aagtatttgtctacttctttagccagtataaaatttgaggttaaagatgctcttaaggaagacgacttcaaagta

SEQ ID NO: 657940 - DNA, 75 bp, synthetic construct
  source 1..75: mol_type = other DNA
tcgaatttcctaaatcggaaaaaatcactgacgagtcaaagatagatgagcttgataattatctacttcaatcga

SEQ ID NO: 657941 - DNA, 75 bp, synthetic construct
  source 1..75: mol_type = other DNA
cacgctgcgcgcgctggagctgggggcgatagattttgtcaccaaaccgcaactgggtattcgcgaaggaatgct

SEQ ID NO: 657942 - DNA, 75 bp, synthetic construct
  source 1..75: mol_type = other DNA
catatcggtgttgccggttttgaaacattgctggaaaccgtgcaagtgttggtcaaagactatagcttcagcctt

SEQ ID NO: 657943 - DNA, 75 bp, synthetic construct
  source 1..75: mol_type = other DNA
gagtcgatttaactctgcctttatgaagtatttgtctacctctttagccagtataaaatttgaggttgaagtggt

SEQ ID NO: 657944 - DNA, 75 bp, synthetic construct
  source 1..75: mol_type = other DNA
attagaatatagagagtattattttaatgaaaagatgtctgatgagaaaggttatatacttctagatcgccagct

SEQ ID NO: 657945 - DNA, 75 bp, synthetic construct
  source 1..75: mol_type = other DNA
cggtgcactggtgcgttgactgccgttctgcgctggcggaagcggaagttgagtattacgacaaaacttctccgt

SEQ ID NO: 657946 - DNA, 75 bp, synthetic construct
  source 1..75: mol_type = other DNA
caatttcgctggttatctggaccaccacgccgtggacgctgcctgctaaccgcgcaatctccattgcacctgatt

SEQ ID NO: 657947 - DNA, 75 bp, synthetic construct
  source 1..75: mol_type = other DNA
ccgggaatgctggcgcgttggactgatgatgatctgtacggcatcattcgtgcagctaaaaaaggcaaaaaaacc

SEQ ID NO: 657948 - DNA, 75 bp, synthetic construct
  source 1..75: mol_type = other DNA
tctggaagagaacatggcgctgttgatggaacaggctatcgccaacgaaggcctgttttatcgcttactctactt

SEQ ID NO: 657949 - DNA, 75 bp, synthetic construct
  source 1..75: mol_type = other DNA
tctggcgggcgcgagtgtgcgtctgtttccggatcgctggcgcttaggtgcgccgtcgaaccatactcatctggc

SEQ ID NO: 657950 - DNA, 75 bp, synthetic construct
  source 1..75: mol_type = other DNA
ttgcactgttgcaggaaaaaggcgcgctgctgcatgttgagaagctgcagcacagctatccgtgctgctggcgtc

SEQ ID NO: 657951 - DNA, 75 bp, synthetic construct
  source 1..75: mol_type = other DNA
tggcgctgggcatgtcgacgacacccaaagaaaggtacaggctggataagaaagaaatactttcgttcagttaac

SEQ ID NO: 657952 - DNA, 75 bp, synthetic construct
  source 1..75: mol_type = other DNA
ttcatgccatactattgcctttgctgcaattcaaatagcatattcacttaagtatgcacggattatttgttctgg

SEQ ID NO: 657953 - DNA, 75 bp, synthetic construct
  source 1..75: mol_type = other DNA
ataatattattccctttatttatgtacttacagatgttcgctttttacatcaacgtcgtgatgatttttacaatt

SEQ ID NO: 657954 - DNA, 75 bp, synthetic construct
  source 1..75: mol_type = other DNA
accgagttcatgaatttcatggctaacacactcacccctctgccatgcaatggagagaaggtgagccgtgtttat

SEQ ID NO: 657955 - DNA, 75 bp, synthetic construct
  source 1..75: mol_type = other DNA
ggtatctgtaaaggatgcattatctgatctgcctcctttgcaacatggtgaagatggaagtggtaaatattatat

SEQ ID NO: 657956 - DNA, 75 bp, synthetic construct
  source 1..75: mol_type = other DNA
aacaaaggatattattgctgtcaatggttctgcgcaatatttgttaagtcataatatcgttccttttatatatgt

SEQ ID NO: 657957 - DNA, 75 bp, synthetic construct
  source 1..75: mol_type = other DNA
tgatacagcgattcaatatgatattattccatttatgaaagcatcagaaattgaagagtcttgtagtttggaaaa

SEQ ID NO: 657958 - DNA, 75 bp, synthetic construct
  source 1..75: mol_type = other DNA
cactcgctgtttggcacgctgatggaagggatttttggctatcaggaagcgccgagcgtcagcgaagtcgccgtc

SEQ ID NO: 657959 - DNA, 75 bp, synthetic construct
  source 1..75: mol_type = other DNA
gcgaagtcgccgtctggtttatttatctcatcccggcgctggtggcatttgctctgccaccacgcgcaggggcga

SEQ ID NO: 657960 - DNA, 75 bp, synthetic construct
  source 1..75: mol_type = other DNA
aaaagacacgaatcacacacatcagtgatggattcgactttctgggtatgaacatccgcaaatataacgggaaac

SEQ ID NO: 657961 - DNA, 75 bp, synthetic construct
  source 1..75: mol_type = other DNA
aagagatttacatgtggaaagcaaggttacttacgcattttgttattcgaacgatgactagcaacattacaaaac

SEQ ID NO: 657962 - DNA, 75 bp, synthetic construct
  source 1..75: mol_type = other DNA
aggagatttacatgtgggaagcaaagctacgtacgcatttttttattcgtaagatgactagcagcattacaaaac

SEQ ID NO: 657963 - DNA, 75 bp, synthetic construct
  source 1..75: mol_type = other DNA
gccatatctggcgcaatgacactctgttccatcgtaacagcctacctgctcgtgacctatcacagatgggggtta

SEQ ID NO: 657964 - DNA, 75 bp, synthetic construct
  source 1..75: mol_type = other DNA
taatgccgatgcgttaaccctgcaggcacctgcgcagcgcgtgacgctggaattaagcggttgcccgatagatgc

SEQ ID NO: 657965 - DNA, 75 bp, synthetic construct
  source 1..75: mol_type = other DNA
atctggatgtcctttaatactatcttacgtaactaatggaacctatgcggaggcgatgaaatcagaaaggaatat

SEQ ID NO: 657966 - DNA, 75 bp, synthetic construct
  source 1..75: mol_type = other DNA
accagcgcaccggaaaaattatccggacaggctgctgacaagatgcaggctggtgtgattctgctggactttatg

SEQ ID NO: 657967 - DNA, 75 bp, synthetic construct
  source 1..75: mol_type = other DNA
gcactgatcttatcgaaagcgctacgaatgaccttaaaactgcaactggcaatctgaccgacataactgacgatt

SEQ ID NO: 657968 - DNA, 75 bp, synthetic construct
  source 1..75: mol_type = other DNA
aggtaatgatgctctgttaagccgcgttaaggcggttgagcagtcgcaattctgcgccaaatacctggcgataat

SEQ ID NO: 657969 - DNA, 75 bp, synthetic construct
  source 1..75: mol_type = other DNA
tgttgccgaaaatacataccaccctcactatactgaaagataaaggcgtcaatgccgtattttgggatttccctg

SEQ ID NO: 657970 - DNA, 75 bp, synthetic construct
  source 1..75: mol_type = other DNA
ccattaccccggaacaaattgaaatccgtgagctgaggaaaaagctacaacgtattgaaatggaaaatgaaatat

SEQ ID NO: 657971 - DNA, 75 bp, synthetic construct
  source 1..75: mol_type = other DNA
cgccagggtattacgccctctgccacacccattactccagaccagcaacgtatccgcgagctggaaaagcaagtt

SEQ ID NO: 657972 - DNA, 75 bp, synthetic construct
  source 1..75: mol_type = other DNA
actgtagattcaattggtcaacgcaacagttatgtgaaaacatggggttgcggaggttttttgaatgagacgaac

SEQ ID NO: 657973 - DNA, 75 bp, synthetic construct
  source 1..75: mol_type = other DNA
aagaaattcgtcttcacattgtctgcgatatccctgatgaacttattgatttcacgtttgaatggaaagagctga

SEQ ID NO: 657974 - DNA, 75 bp, synthetic construct
  source 1..75: mol_type = other DNA
gatcgcatcattggcgagtatcgacagaatcgcatcagcgttaaattcaggccgaaggacgacaaggcatcggaa

SEQ ID NO: 657975 - DNA, 75 bp, synthetic construct
  source 1..75: mol_type = other DNA
caggttcgccgcctggaggaacaaaatacgatattaaaaaaggctgttgtagattcaatctgtcaatgcaacacc

SEQ ID NO: 657976 - DNA, 75 bp, synthetic construct
  source 1..75: mol_type = other DNA
aaagcgccggatgaaaaaccgtttgatattcgcgttcgtcgcataacaccagacagcaacggcgatctattgcgg

SEQ ID NO: 657977 - DNA, 75 bp, synthetic construct
  source 1..75: mol_type = other DNA
ggtgacgttgcgagtatgtcagtaattccagaggcaacattccctgcgcaatcagggtcaggtagcaggagtgta

SEQ ID NO: 657978 - DNA, 75 bp, synthetic construct
  source 1..75: mol_type = other DNA
tgctgaaaaatttgtcaaaatatcggcatctttcgacgatgtaaactcaagcatcacggaatggtcgcaggccat

SEQ ID NO: 657979 - DNA, 75 bp, synthetic construct
  source 1..75: mol_type = other DNA
gatggcaaatttaaaaaacatcagatcactggtgttaacgggaacaaaatcacactggcagcagccccggcatgg

SEQ ID NO: 657980 - DNA, 75 bp, synthetic construct
  source 1..75: mol_type = other DNA
ttccgaggcatcgcgttatgggacgggcaacgcctcacagtgatgattgatgcaccacaagacccgatcgccacc

SEQ ID NO: 657981 - DNA, 75 bp, synthetic construct
  source 1..75: mol_type = other DNA
tttctcaatactgcgatcaactggtcgatgatggttatggcggccttgagcctcgcatgacgcttaatgcttaca

SEQ ID NO: 657982 - DNA, 75 bp, synthetic construct
  source 1..75: mol_type = other DNA
atattcgtgttcgccgtgtaacagccgatagcacaggcgatctattgcggaatgatacgagatggagtagttaca

SEQ ID NO: 657983 - DNA, 75 bp, synthetic construct
  source 1..75: mol_type = other DNA
ggtgcaatgaaattaactaataccactatctcggtaaaagacggcaacgggcgtttacgcgtacaaattggtagg

SEQ ID NO: 657984 - DNA, 75 bp, synthetic construct
  source 1..75: mol_type = other DNA
cggaatcactggaaaccatcacggcagaaatgaatgtgatggacacaaaccttaaaggtcagatctctaatgtgc

SEQ ID NO: 657985 - DNA, 75 bp, synthetic construct
  source 1..75: mol_type = other DNA
tagcgcaaccatcacatataaagacagcacggataatgcattgacgaaatcagttatgcttatggcgactatttc

SEQ ID NO: 657986 - DNA, 75 bp, synthetic construct
  source 1..75: mol_type = other DNA
attgtatcatggactgacccggaaaacggctgggagcaatcaaaagagtatgtggcagatgatgagctaatcgcc

SEQ ID NO: 657987 - DNA, 75 bp, synthetic construct
  source 1..75: mol_type = other DNA
agacgcgatcagcggcgtcaaagcaagtattgacacacttgaaggtaacaccaattcagaagttaaacgcctgga

SEQ ID NO: 657988 - DNA, 75 bp, synthetic construct
  source 1..75: mol_type = other DNA
ggccataaaagctgacacggacacactgaaaaaagaaacggaagatctctataaaaaggttgaggaaaacgccga

SEQ ID NO: 657989 - DNA, 75 bp, synthetic construct
  source 1..75: mol_type = other DNA
tgagagttgggtgcgccagctcaggcgagagcgtcaggggattgccccctctgccacatctattactccagacca

SEQ ID NO: 657990 - DNA, 75 bp, synthetic construct
  source 1..75: mol_type = other DNA
gaaacggcaatctatgatgaagatcaaatcaaagatattgttgacgagctaaccgacggtgcattcgagctgatc

SEQ ID NO: 657991 - DNA, 75 bp, synthetic construct
  source 1..75: mol_type = other DNA
tgaaggtcagaaaggagcgtttaccaaagaggacggcgaaaaggtcattgacgaaacggggaagcgggttaagta

SEQ ID NO: 657992 - DNA, 75 bp, synthetic construct
  source 1..75: mol_type = other DNA
acacctgggccttgatgaagagaaattcagtgatgagcagttgattgattttatgcttcaacatccgatcctgat

SEQ ID NO: 657993 - DNA, 75 bp, synthetic construct
  source 1..75: mol_type = other DNA
caggatatgcgtgagcagattattgaggctcaacgtttcgtccgggtgtccggcgcacagtgggaaggcagcaca

SEQ ID NO: 657994 - DNA, 75 bp, synthetic construct
  source 1..75: mol_type = other DNA
acccagcctgcggcacctctcgcaacacgcttgagatgatccgtaacagcggtacagagccgaccgttattcatt

SEQ ID NO: 657995 - DNA, 75 bp, synthetic construct
  source 1..75: mol_type = other DNA
taaccgacccattgttgtatcaccactgggaacccgactgtgccgcccatcggaagtggtactggatattttgcc

SEQ ID NO: 657996 - DNA, 75 bp, synthetic construct
  source 1..75: mol_type = other DNA
taaccgcccaatcgtggtaacgcggctgggaacccggctgtgccgtccttcggaagtggtgctggagatcctgcc

SEQ ID NO: 657997 - DNA, 75 bp, synthetic construct
  source 1..75: mol_type = other DNA
ttgacactctggtagaaatcgtcaaagctgtgattggcgacaaaggtggcgtacgcatgaccggcggcggatttg

SEQ ID NO: 657998 - DNA, 75 bp, synthetic construct
  source 1..75: mol_type = other DNA
cctggccgcgtgaatcttattggtgaacacaccgactacaacgacggtttcgttctgccctgcgcgattgattat

SEQ ID NO: 657999 - DNA, 75 bp, synthetic construct
  source 1..75: mol_type = other DNA
agaggatggtgcagtacgcccgcaacagcttctatatcccgttaatgacacgcctgcgtccgatggggatcaccg

SEQ ID NO: 658000 - DNA, 75 bp, synthetic construct
  source 1..75: mol_type = other DNA
ggatgctcagaaaggggcgttcaccaaagaagacggtgagaaagtggttgatgattcaggtaaacgattaaaata

SEQ ID NO: 658001 - DNA, 75 bp, synthetic construct
  source 1..75: mol_type = other DNA
tacgctggagatgatccgcaacagcggtacagaaccgaccattatctattatctggaaacaccaccgacgcgcga

SEQ ID NO: 658002 - DNA, 75 bp, synthetic construct
  source 1..75: mol_type = other DNA
atggccgctaatcttaccgagactgctatacgtggattgaagacaaaaagtacgtcgtactacgtgtggagcaac

SEQ ID NO: 658003 - DNA, 75 bp, synthetic construct
  source 1..75: mol_type = other DNA
atcgccgccccggccaaggccagcggtcctacgccagcagaaatactgatggctgaatataaaaaacgcaaagca

SEQ ID NO: 658004 - DNA, 75 bp, synthetic construct
  source 1..75: mol_type = other DNA
cgctcgccgccaggagaagccgttcctgccgtctccgggccagttcgtcgcctggtgcaaggaggagcgctgcct

SEQ ID NO: 658005 - DNA, 75 bp, synthetic construct
  source 1..75: mol_type = other DNA
tcatggctggcgatctggtttggtcacacttccgtactggcgctgattatcggcatcctggtgctggatctcacc

SEQ ID NO: 658006 - DNA, 75 bp, synthetic construct
  source 1..75: mol_type = other DNA
gcccggcgctgatcgtgctgatgtcgatcgccaccggtctggcggtcgccagcaactattacgcccagccattgc

SEQ ID NO: 658007 - DNA, 75 bp, synthetic construct
  source 1..75: mol_type = other DNA
cacctctgcagatcaaaaccatcctctcaggcattatccagcgtgatgcggtggtgcatgctaatcggattcgct

SEQ ID NO: 658008 - DNA, 75 bp, synthetic construct
  source 1..75: mol_type = other DNA
tgcagcgtcatatccgcgaagcctcagcggaaattgaattaacccgtacctttggcaacaagtcgctggattcgc

SEQ ID NO: 658009 - DNA, 75 bp, synthetic construct
  source 1..75: mol_type = other DNA
ttatcgaccctgtcacggtcgcatcgatgtttattcccggtgcgcagggaagcctggctgctcgtattggttctc

SEQ ID NO: 658010 - DNA, 75 bp, synthetic construct
  source 1..75: mol_type = other DNA
gcccagaatgctcgttctgaggcattaaatcttattcgcaaccgtaagggaaatctccctcatgtaatggttgtt

SEQ ID NO: 658011 - DNA, 75 bp, synthetic construct
  source 1..75: mol_type = other DNA
atgtacgagtttgactggagttccattgttccttccctgccatatctgctcgacgggctggtgatcacgctgaaa

SEQ ID NO: 658012 - DNA, 75 bp, synthetic construct
  source 1..75: mol_type = other DNA
ttggcgtgaaatgcgccatctctgatcaccgttctgccgcaccggacgtttatcacctggctaatatggcggcgg

SEQ ID NO: 658013 - DNA, 75 bp, synthetic construct
  source 1..75: mol_type = other DNA
taaatcgggtgaaggttgaaatgcaaaagcttggtttattgccgccagatgaagaactgaaagcattaggccagg

SEQ ID NO: 658014 - DNA, 75 bp, synthetic construct
  source 1..75: mol_type = other DNA
cgtttgtctggctggtgcgacgattgccctggttaatctgttggtctggtggcgaggttttcatcgtcaggaagc

SEQ ID NO: 658015 - DNA, 75 bp, synthetic construct
  source 1..75: mol_type = other DNA
ccgtcgtgattgccaaaaaagatacctacaaaacgtttgccgacctgaaaggcaaacgcattgggatggaaaacg

SEQ ID NO: 658016 - DNA, 75 bp, synthetic construct
  source 1..75: mol_type = other DNA
ttcggcaccggcctgggtatcgctgtacgtccggataacaaagctctgctggaaaaactgaataacgcgctggca

SEQ ID NO: 658017 - DNA, 75 bp, synthetic construct
  source 1..75: mol_type = other DNA
ggatcagcacccggaagtgaaaactgtctcctatgacagttatcagaatgcctttatcgatctgaaaaatggtcg

SEQ ID NO: 658018 - DNA, 75 bp, synthetic construct
  source 1..75: mol_type = other DNA
tcgaagcatcggcacgtttctttgaagacgacgacggcctgcatattcactccttcttcttctttgaagatgcgg

SEQ ID NO: 658019 - DNA, 75 bp, synthetic construct
  source 1..75: mol_type = other DNA
cggacgacgacgagcgactgcgcttacaatctgaacttggccagagcctggcaacccgcccggaactggaagaca

SEQ ID NO: 658020 - DNA, 75 bp, synthetic construct
  source 1..75: mol_type = other DNA
gatggatacccagcgtgcgctcaacttcctggtacgtaaagcacgcttaccgggtgggcaactggagcaggcgcg

SEQ ID NO: 658021 - DNA, 75 bp, synthetic construct
  source 1..75: mol_type = other DNA
agtgataccgaaacagtcatctgctgaaaaagtcggtgacacctggctgacactcgaagagttgcgttttctaat

SEQ ID NO: 658022 - DNA, 75 bp, synthetic construct
  source 1..75: mol_type = other DNA
cgtgcatatcactaaccagacggtaatttatcgaatacatcctgatgcgcgtaatcgcctgaccgcaggttacat

SEQ ID NO: 658023 - DNA, 75 bp, synthetic construct
  source 1..75: mol_type = other DNA
ggcaatctggtttggtcacacttccgtactggcgctgattatcggcattctggtgctggacctcaccgtgcaggg

SEQ ID NO: 658024 - DNA, 75 bp, synthetic construct
  source 1..75: mol_type = other DNA
gaagctgggatcagtaaggaaatccgcgatcgtattcaaaatcatgcgttgaacgatgtcagttcaaaacattat

SEQ ID NO: 658025 - DNA, 75 bp, synthetic construct
  source 1..75: mol_type = other DNA
aacgcagagcacttgagatctgggaggaccgggttaataaccaccaacagcagacaggtaataatgttgttaatc

SEQ ID NO: 658026 - DNA, 75 bp, synthetic construct
  source 1..75: mol_type = other DNA
cagcaagattttctatttccgctattacgtggaaaaagggaaaaaagaaagattcattcaattgggtatatggcc

SEQ ID NO: 658027 - DNA, 75 bp, synthetic construct
  source 1..75: mol_type = other DNA
ctcaggagttcgaatggtgggaaaccaatattacacgcaagtatttcctgcaaatggacaataagaagcgaccgg

SEQ ID NO: 658028 - DNA, 75 bp, synthetic construct
  source 1..75: mol_type = other DNA
tggcgttttccaggcaacagtgtatccgatcagcaaaacaaccctgacaactgatacagcatatgagttttacta

SEQ ID NO: 658029 - DNA, 75 bp, synthetic construct
  source 1..75: mol_type = other DNA
aaatcagggtatccgctcaaaatagtaggggtgcatatataaactcgccgaccgtcattgtgtcgcgcggttctg

SEQ ID NO: 658030 - DNA, 75 bp, synthetic construct
  source 1..75: mol_type = other DNA
tcacaaacaggctgtagttgatgaaggcgcaatctttgaggtaaacaacgacacgcttaatcacttccgcgtgcc

SEQ ID NO: 658031 - DNA, 75 bp, synthetic construct
  source 1..75: mol_type = other DNA
ccctcacacggctatagctggcgcagtgatcgaccatgatcagtacgctgacacgcctacccgcacttatcacct

SEQ ID NO: 658032 - DNA, 75 bp, synthetic construct
  source 1..75: mol_type = other DNA
ggttaacaccgaggtaacacacgacaccccgttagttcgcactgtatccgatcccaacgtgacgcgagtcaggtt

SEQ ID NO: 658033 - DNA, 75 bp, synthetic construct
  source 1..75: mol_type = other DNA
acaagaaaaccgacgccagcgttaaccgccttgatcaagctatcgccgacgaaacgagcgcccgcgctcaggcta

SEQ ID NO: 658034 - DNA, 75 bp, synthetic construct
  source 1..75: mol_type = other DNA
attcgcaatggcactgtttttgctgtatcgactgaagcagcaaaacccgttttatgtaggatcaccagcgtagcg

SEQ ID NO: 658035 - DNA, 75 bp, synthetic construct
  source 1..75: mol_type = other DNA
agaatacaccaacaccagtacaggtacagaaagaagggctggacttgcgcttgttacaaggagttctggttcttg

SEQ ID NO: 658036 - DNA, 75 bp, synthetic construct
  source 1..75: mol_type = other DNA
taggcaaacatgaggtaagaatagactcattagaggtatcaaacgaaaacgttaataacgaactggcacagacaa

SEQ ID NO: 658037 - DNA, 75 bp, synthetic construct
  source 1..75: mol_type = other DNA
ccgcgcagaatcttacaacgccgtgatcgtgtcatggactgacccggaaaacggttgggaacaatcaaaagaata

SEQ ID NO: 658038 - DNA, 75 bp, synthetic construct
  source 1..75: mol_type = other DNA
gcgatgaaactaacaaatacaaccatttccgttagggatggaaacggtaggttgcgcgtccaaattggacgaatt

SEQ ID NO: 658039 - DNA, 75 bp, synthetic construct
  source 1..75: mol_type = other DNA
agcgttagcagacttgataaggcaatatctgacgaaacgcaggcaagaagcgacgcaataacagaggtcaaagct

SEQ ID NO: 658040 - DNA, 75 bp, synthetic construct
  source 1..75: mol_type = other DNA
aaacaccaacattgataaatgacaacctgtatcataaacagttttatcgtgtactggatattatttcagaaggtc

SEQ ID NO: 658041 - DNA, 75 bp, synthetic construct
  source 1..75: mol_type = other DNA
atgcagacccgagataaccttgagcgcatggtggttatcaaggcgtttatcgcggtgcgggtgctgggcctgcgg

SEQ ID NO: 658042 - DNA, 75 bp, synthetic construct
  source 1..75: mol_type = other DNA
ctggtgctgtataacagcacaggcctcacactcttgacgcccatggaatatattagagaacaaaaatttcaatat

SEQ ID NO: 658043 - DNA, 75 bp, synthetic construct
  source 1..75: mol_type = other DNA
ctgaaactggcgaaactggggcgatggtatgacagcaaacgcacaggccgccccggttgggtagtcatgtgggat

SEQ ID NO: 658044 - DNA, 75 bp, synthetic construct
  source 1..75: mol_type = other DNA
cttacgccctggaaaatggaatgtacatcaggtttctggtagaaacagattagagatagctaaatatgaacaata

SEQ ID NO: 658045 - DNA, 75 bp, synthetic construct
  source 1..75: mol_type = other DNA
agctgacatgctttccgtgatggttaatggtaaaagattaaaggatatttctgatcttcccttggatcttgcagt

SEQ ID NO: 658046 - DNA, 75 bp, synthetic construct
  source 1..75: mol_type = other DNA
ggaatttatccgtctgcctgtcgggactactctgtcatacagaaatcaggtaggaataaattgtagtggaaagtc

SEQ ID NO: 658047 - DNA, 75 bp, synthetic construct
  source 1..75: mol_type = other DNA
cgattttatatatgcttgacggtaacgcagttatggatcgcctggatgacgaactgctcaaacaattgtcagaaa

SEQ ID NO: 658048 - DNA, 75 bp, synthetic construct
  source 1..75: mol_type = other DNA
aaggttacaagcaatgtgacccgtatcgacaaagctattgcagatgagacaaaggcccgcacagatgcaataagt

SEQ ID NO: 658049 - DNA, 75 bp, synthetic construct
  source 1..75: mol_type = other DNA
cttactggacaatatcgccgggatgttcaggggtatcgcgttatgggacgggcaacgccttaccgtgatgattga

SEQ ID NO: 658050 - DNA, 75 bp, synthetic construct
  source 1..75: mol_type = other DNA
aagtctttggtgatgttggtagtattgaggctgatttgagggaaatcagcacattgattcatcggcgaaaggctc

SEQ ID NO: 658051 - DNA, 75 bp, synthetic construct
  source 1..75: mol_type = other DNA
gcccactttacgatgagcaaataaaaaaaacacttatgtatgctgaccataaattcaagcggctaatgaatacac

SEQ ID NO: 658052 - DNA, 75 bp, synthetic construct
  source 1..75: mol_type = other DNA
tagctgcgaactttcaaacctctactcatccgctgttttcagttatctggcggatgatctgcgcgagcttcagca

SEQ ID NO: 658053 - DNA, 75 bp, synthetic construct
  source 1..75: mol_type = other DNA
cagcaggtcagtagccgccgcttattgtcgaatctggtgagcgaatttcgccgcgagttaccgcgccaacaggca

SEQ ID NO: 658054 - DNA, 75 bp, synthetic construct
  source 1..75: mol_type = other DNA
attggcataatcacctttcttgctctgggttggcaatttagccagaaacgcgctgcgcgtcggttgctggaacgc

SEQ ID NO: 658055 - DNA, 75 bp, synthetic construct
  source 1..75: mol_type = other DNA
ctattgtggttttcatgcctgctttcgggactcggcggcacgttgtttgatccgccgcgttcggcgctggtggtg

SEQ ID NO: 658056 - DNA, 75 bp, synthetic construct
  source 1..75: mol_type = other DNA
gctgatgcccgggcacgcggtagctatatgggatttagtcgtctggggctggcaattggcggcaccatcggttat

SEQ ID NO: 658057 - DNA, 75 bp, synthetic construct
  source 1..75: mol_type = other DNA
agagccgccgggcgtatgatgagcgggacaggctggtatcggagacatcgcgcagcggggacgtcatccggtatg

SEQ ID NO: 658058 - DNA, 75 bp, synthetic construct
  source 1..75: mol_type = other DNA
tcagaaaaagaccttttaaaaatcgattatgttaaaaaagttagctgttccgaagaagccaataatgtttacaac

SEQ ID NO: 658059 - DNA, 75 bp, synthetic construct
  source 1..75: mol_type = other DNA
tcattctttctactttcctattaaccgcatgtaatagcgaacccagtcaagatgatatctacaatgcatttaaga

SEQ ID NO: 658060 - DNA, 75 bp, synthetic construct
  source 1..75: mol_type = other DNA
tggtcaacgatatcgccggagcgccctctgccgttaaatggatgtatgccattgaagcgtgtctctccttaacgt

SEQ ID NO: 658061 - DNA, 75 bp, synthetic construct
  source 1..75: mol_type = other DNA
acctgggtaaatatttcctgctcatcgataatatgctggtcgtgctggggttctttgttgtcttcccgctgatct

SEQ ID NO: 658062 - DNA, 75 bp, synthetic construct
  source 1..75: mol_type = other DNA
gcaagagctcgcggcagctatatggggtttagccgtctgggtctggcgattggcggcgctattggttatatcggt

SEQ ID NO: 658063 - DNA, 75 bp, synthetic construct
  source 1..75: mol_type = other DNA
tgtcgttaagcatgatgccagtcggcatggtcagcagcctgcaacaactcttcaccctgatttgcctgttttata

SEQ ID NO: 658064 - DNA, 75 bp, synthetic construct
  source 1..75: mol_type = other DNA
gcgtgaaaccctaagcgcctcgctggcagatgcacgagcgcgcggcagctatatggggtttagtcgtctgggcct

SEQ ID NO: 658065 - DNA, 75 bp, synthetic construct
  source 1..75: mol_type = other DNA
gtcgttttttctcgctgttgatgatgcaggacagtgccggtgcggtcattggcgcattgttggggagctggctgt

SEQ ID NO: 658066 - DNA, 75 bp, synthetic construct
  source 1..75: mol_type = other DNA
tcagcccggtactaaaacgctcggcaaagtcgcgattattggcgcaggtcctgccggattgcaggccagtgtgac

SEQ ID NO: 658067 - DNA, 75 bp, synthetic construct
  source 1..75: mol_type = other DNA
gtgatagccaaccttagccgtgacgtgcagccctggcaaccaacgcaaatcagcggcgactggcaactattaatg

SEQ ID NO: 658068 - DNA, 75 bp, synthetic construct
  source 1..75: mol_type = other DNA
atatctaccagggcgaagagattggcatgaccaacccgcatttcacgcgcattactgactatcgcgacgtggaga

SEQ ID NO: 658069 - DNA, 75 bp, synthetic construct
  source 1..75: mol_type = other DNA
tgccttgttctggtgtaaccacgatcagccgcgcattgtttctcgctttggtgatgaaggtgaataccgcgtgcc

SEQ ID NO: 658070 - DNA, 75 bp, synthetic construct
  source 1..75: mol_type = other DNA
ttctaaattcggcggcaatgcctggcgttggcacgcagaaagcggacagtactatttacatctgtttgcaccaga

SEQ ID NO: 658071 - DNA, 75 bp, synthetic construct
  source 1..75: mol_type = other DNA
cccaggtcgataatggttatgacgtagcgaactacacggcgattgatcccacttacggcacgctggatgattttg

SEQ ID NO: 658072 - DNA, 75 bp, synthetic construct
  source 1..75: mol_type = other DNA
attgccagcgatacgcggcactgacaggcagtgaattatcgatgacctttaattttcatcacctgaaggtcgatt

SEQ ID NO: 658073 - DNA, 75 bp, synthetic construct
  source 1..75: mol_type = other DNA
cgatggcggcagataaaattattctcgccgtcggtcagcatgccagactggatgcctttgcggagttagagccgc

SEQ ID NO: 658074 - DNA, 75 bp, synthetic construct
  source 1..75: mol_type = other DNA
tcgaaaaaatgggggtgaccattaagtgcaataacgaaatcggtaaagtactcaccctggagcaactgaaagcgg

SEQ ID NO: 658075 - DNA, 75 bp, synthetic construct
  source 1..75: mol_type = other DNA
gtttgcccaacggagaaattatgtcaaagcggttgtacccgtgccggtgttgatgatcccattgatatcggtcgc

SEQ ID NO: 658076 - DNA, 75 bp, synthetic construct
  source 1..75: mol_type = other DNA
agagcggttgtacccgcgcaggtgtcgatgatccgattgatattgctcgcttacagcgttttgttactgatttcg

SEQ ID NO: 658077 - DNA, 75 bp, synthetic construct
  source 1..75: mol_type = other DNA
ctgccggattacaagccagcgtgacgctgaccaatctgggctacgacgtcacaatttatgaaaaagaagcgcagc

SEQ ID NO: 658078 - DNA, 75 bp, synthetic construct
  source 1..75: mol_type = other DNA
ctgccgggttgcaggccagcgtaacactgacgaaccagggttatgacgtcacaatttatgaaaaagaggcgcagc

SEQ ID NO: 658079 - DNA, 75 bp, synthetic construct
  source 1..75: mol_type = other DNA
aaggtggttaagaatttaagccgccgctttgaagcggaacaatatgacccacagcgggtacgtgcagcagcttac

SEQ ID NO: 658080 - DNA, 75 bp, synthetic construct
  source 1..75: mol_type = other DNA
tagccgctggggcagggcgctgtggacgcttttctggagtacgatcccggtttatatcctggcagtgctggcgtt

SEQ ID NO: 658081 - DNA, 75 bp, synthetic construct
  source 1..75: mol_type = other DNA
atgactggtcagtcttcatctcaggcggcaacgcccattcagtggtggaaacccgcgcttttctttctcgttgtc

SEQ ID NO: 658082 - DNA, 75 bp, synthetic construct
  source 1..75: mol_type = other DNA
aatcctgaaaaaatcgtatgaagtgatgcatggggaattggggaatgcggattcgatccagagctggtcgaatgc

SEQ ID NO: 658083 - DNA, 75 bp, synthetic construct
  source 1..75: mol_type = other DNA
atgggcggtgcgctggcattctggatgggcaatccggtgttaaacccggcgacgctggtgtttatgggctttgtc

SEQ ID NO: 658084 - DNA, 75 bp, synthetic construct
  source 1..75: mol_type = other DNA
ggcaaccttactacggtaaagcctttactgccgccgaaactcacagtatcggtaaatctatccttgcgcaggcgg

SEQ ID NO: 658085 - DNA, 75 bp, synthetic construct
  source 1..75: mol_type = other DNA
tgttgttgattgcgacgctggtgcaaaaatgggtgcgtgaaacaccgcaaacgcaggcaccggtcgaaattgaca

SEQ ID NO: 658086 - DNA, 75 bp, synthetic construct
  source 1..75: mol_type = other DNA
tgccgataccgcagaacatcctgacgacgatttatgggcatcattatgttttgccggtcacgatttgatgagcca

SEQ ID NO: 658087 - DNA, 75 bp, synthetic construct
  source 1..75: mol_type = other DNA
gtcacctgatcgcaggttgatgcattacctcacgggtgaaacgtcatattctccctgccttatctggacttcatc

SEQ ID NO: 658088 - DNA, 75 bp, synthetic construct
  source 1..75: mol_type = other DNA
cgattactccaccttaatatcgttagtgagaatgggcgctggcgacttgacgggaaacgctttacagacagttcg

SEQ ID NO: 658089 - DNA, 75 bp, synthetic construct
  source 1..75: mol_type = other DNA
gcgatctgtttatgcagatttttgccgacgtgttcaaccttccggcacgccgtaacgccattaatggttgtgcaa

SEQ ID NO: 658090 - DNA, 75 bp, synthetic construct
  source 1..75: mol_type = other DNA
ttgatggcggaagtcagagcacaaaagtggtgatgtacgatctggaaggtaatgtggtttgcgaaggcaaaggct

SEQ ID NO: 658091 - DNA, 75 bp, synthetic construct
  source 1..75: mol_type = other DNA
ggttacggtattcgcaaaggcatgtggacggtgagctggctgcgcgacatgttaggcgagtcgttaattcaggat

SEQ ID NO: 658092 - DNA, 75 bp, synthetic construct
  source 1..75: mol_type = other DNA
gtcgggtaaaggtgtcacaggcgatgtcgaaggtcaacggattgttattggtaatgaactggttatgcaggaaaa

SEQ ID NO: 658093 - DNA, 75 bp, synthetic construct
  source 1..75: mol_type = other DNA
ttaacaaatgatgtatggagttacgctgatacccgatttgccgtaaaaaatacaaatgacaggtccgtggggttt

SEQ ID NO: 658094 - DNA, 75 bp, synthetic construct
  source 1..75: mol_type = other DNA
atcgatggtcttgatttattatcagttgcctgtaaaaccgaggggcacggaaggagtgttacagcaagtgaattg

SEQ ID NO: 658095 - DNA, 75 bp, synthetic construct
  source 1..75: mol_type = other DNA
ggagcccaggccggggtgttaatcaagaatgccgaagcgctggagcgccttgaaaaagtggacacgctggttgtc

SEQ ID NO: 658096 - DNA, 75 bp, synthetic construct
  source 1..75: mol_type = other DNA
aagatcattccgcttttacaggaatactttttcgatgactggaacaagatccggttggtgctggcagacaatcaa

SEQ ID NO: 658097 - DNA, 75 bp, synthetic construct
  source 1..75: mol_type = other DNA
gttccatcattagcagaatatcagcaaagcctcccattgcttagagaactcaccgaacgtgttcgtcaacaacca

SEQ ID NO: 658098 - DNA, 75 bp, synthetic construct
  source 1..75: mol_type = other DNA
atgaagcgtttcttcgtaaaaaataaatataaagaaattgatgatgagttttttgatggggaactcatttttggg

SEQ ID NO: 658099 - DNA, 75 bp, synthetic construct
  source 1..75: mol_type = other DNA
ctgtctgtggaatggcactggaaccactcgtagccacggcatccacggggccaagcgatgaacttcgcgacatga

SEQ ID NO: 658100 - DNA, 75 bp, synthetic construct
  source 1..75: mol_type = other DNA
gggagtctcatcatccgtgcagagaaagtcggtgatgaaacaatgctctcacgaattgttcagatggtcgctgat

SEQ ID NO: 658101 - DNA, 75 bp, synthetic construct
  source 1..75: mol_type = other DNA
ggtgtgaatgatgccccggcgctggcagcggctgacgtgggtatagccatgggaacgggtacagatgtggcaatt

SEQ ID NO: 658102 - DNA, 75 bp, synthetic construct
  source 1..75: mol_type = other DNA
cggtcgacggtatcgtgatcaaaggcaaaacggccattgatgaatcgatggtaaccggggagtcaatgccggtta

SEQ ID NO: 658103 - DNA, 75 bp, synthetic construct
  source 1..75: mol_type = other DNA
taaccgctccctgaatatgtttactctcgttgcaatggggaccggtgtagcctgggtgtacagcgtcattgcaac

SEQ ID NO: 658104 - DNA, 75 bp, synthetic construct
  source 1..75: mol_type = other DNA
agaatctgttttttgcgtttatctacaatgctcttggggtgcctgtagctgcaggtctgctttatcctgtgtatg

SEQ ID NO: 658105 - DNA, 75 bp, synthetic construct
  source 1..75: mol_type = other DNA
tgatggtagcggtaattctggcaacagcaggcatgaccggcattacgcttatagccgttggctctttggttgttg

SEQ ID NO: 658106 - DNA, 75 bp, synthetic construct
  source 1..75: mol_type = other DNA
aagtaaggccctccgtgcgattgaggcggctttaattcaagtaaatggaaatgcaaatattgatggtctgtcgat

SEQ ID NO: 658107 - DNA, 75 bp, synthetic construct
  source 1..75: mol_type = other DNA
gttccacggaaaccgaggatgccttccggttgaattacataagccaatcaataacttttttaacaatgatctggc

SEQ ID NO: 658108 - DNA, 75 bp, synthetic construct
  source 1..75: mol_type = other DNA
cagcaagtgctcactatcatgagcgagcgcctgccgattgaacgtattcaactccgtccgcactgtagcattggc

SEQ ID NO: 658109 - DNA, 75 bp, synthetic construct
  source 1..75: mol_type = other DNA
ctggctggcaaaagcgggcgtgggtattgcccagggcttcctttttgcacggccactccccattgaaatcttcga

SEQ ID NO: 658110 - DNA, 75 bp, synthetic construct
  source 1..75: mol_type = other DNA
ctggagaagcgagtcaggcacaaaattctgtatctcggttccaaagatgacacccgcgatgaacagcgttatcag

SEQ ID NO: 658111 - DNA, 75 bp, synthetic construct
  source 1..75: mol_type = other DNA
actggcgacacatttcccggcaggactgccggtagtttgtaccaccagtgataaaccggtagaagcattaggagc

SEQ ID NO: 658112 - DNA, 75 bp, synthetic construct
  source 1..75: mol_type = other DNA
tgggttactggatgatgaaacggcagtaatttctcttggcacctacatcgcgttgatgatgaacggtaaagcact

SEQ ID NO: 658113 - DNA, 75 bp, synthetic construct
  source 1..75: mol_type = other DNA
gttgctgccgtgcgttattgaaagccgatggcacgcctgctgcgccgttgattagctggcaggatgcacgcgtta

SEQ ID NO: 658114 - DNA, 75 bp, synthetic construct
  source 1..75: mol_type = other DNA
ctatacaagattgggtcaatccaattcagcgtgctgaggacaagaacaaaacaggcaaggaggcgaagaaaaata

SEQ ID NO: 658115 - DNA, 75 bp, synthetic construct
  source 1..75: mol_type = other DNA
gccaagttgggcgttactactcgcaaaccaaaaccccaagagatgcaagatccagagttcatcgatttcgctaaa

SEQ ID NO: 658116 - DNA, 75 bp, synthetic construct
  source 1..75: mol_type = other DNA
gcaatgccgccgtgcgcacgcgtcttacccactcgatggaagtccagcaggtggggcgctacatcgccaaagaaa

SEQ ID NO: 658117 - DNA, 75 bp, synthetic construct
  source 1..75: mol_type = other DNA
tggttaccgttggtcactgggtgctggaagagtcctgtcgactgctggctgcctggcaagagcgcggcattatgc

SEQ ID NO: 658118 - DNA, 75 bp, synthetic construct
  source 1..75: mol_type = other DNA
cagctgacctgatggaaaagcgcgcacgcggcgcgaataacatgcctacggtgaccaataccctgctgcctatta

SEQ ID NO: 658119 - DNA, 75 bp, synthetic construct
  source 1..75: mol_type = other DNA
gctggagattgacgaaaaaatctctgaagcactggtgaacgaactgaaagcgaaaagcgaggacgacgatcacct

SEQ ID NO: 658120 - DNA, 75 bp, synthetic construct
  source 1..75: mol_type = other DNA
ttacagcctgacagttaccaacagcctcaccattaaagtcggtgaatgcttactgaaaatgaataaggacggtac

SEQ ID NO: 658121 - DNA, 75 bp, synthetic construct
  source 1..75: mol_type = other DNA
aggcgcttcacggcagccaggggagaggaaccacgctgggcaatcagttagaggtgataccggcggaccggacct

SEQ ID NO: 658122 - DNA, 75 bp, synthetic construct
  source 1..75: mol_type = other DNA
gcaggcgtgggcggggccgggatttggtaatctggcgataccgcgggtgggccaggaggtgattgttgattttct

SEQ ID NO: 658123 - DNA, 75 bp, synthetic construct
  source 1..75: mol_type = other DNA
tcgggtacgggtgaagtttcactgggaccgttatcacgggatgacggaggagagttcgtgctgggtgcgtgtgtc

SEQ ID NO: 658124 - DNA, 75 bp, synthetic construct
  source 1..75: mol_type = other DNA
ttccatgaaaaatccctattggacgccgcagcataaagttattccggtcagctacggcacaaaagggtactcact

SEQ ID NO: 658125 - DNA, 75 bp, synthetic construct
  source 1..75: mol_type = other DNA
gtggcacgtaaacaaaccactgcgttgatgatcatcacctgcgagactctgcgcgatactgcgggcgtgctggaa

SEQ ID NO: 658126 - DNA, 75 bp, synthetic construct
  source 1..75: mol_type = other DNA
gacgacgaaatcggtatgctggtgcgtagttacaacctcaatcagcaattgttgcagcgccattatgaagaacag

SEQ ID NO: 658127 - DNA, 75 bp, synthetic construct
  source 1..75: mol_type = other DNA
gccacagggcagagtaattcgccgaagctgtggccggggacgcggtttacgctgacggagcatccgcagaagatg

SEQ ID NO: 658128 - DNA, 75 bp, synthetic construct
  source 1..75: mol_type = other DNA
ggaaatcttctgcgacgaacacggacgtgtgcgagtgcagtttcactgggacaggtataacccggcaacggaggc

SEQ ID NO: 658129 - DNA, 75 bp, synthetic construct
  source 1..75: mol_type = other DNA
cttcattccttgaatacagctatgaaccttacctgaatttatgtgctgcgctcgccgcgctgaaatcaacgcgaa

SEQ ID NO: 658130 - DNA, 75 bp, synthetic construct
  source 1..75: mol_type = other DNA
taatatcccccgtcatatgctgtttgatgtgcaaatgccaggcactgttcttggacagatcacaccacaagccgc

SEQ ID NO: 658131 - DNA, 75 bp, synthetic construct
  source 1..75: mol_type = other DNA
gtgagttgctttacgccgaggatgaattgtctccacagttcattgcacaaaaattgaaagctttgcatcactctg

SEQ ID NO: 658132 - DNA, 75 bp, synthetic construct
  source 1..75: mol_type = other DNA
ttacagagcgatgcacatgattctggatgggcttatcagtgaagccactgacaactcagaaccggaaaccagagt

SEQ ID NO: 658133 - DNA, 75 bp, synthetic construct
  source 1..75: mol_type = other DNA
atcagccttatcagggagtatttttagtatattagcaatgccattaggtattcttgtcgccagtttattttttat

SEQ ID NO: 658134 - DNA, 75 bp, synthetic construct
  source 1..75: mol_type = other DNA
attgttgatgcttctgactttggagctccaacgagaagacgtagggttgtggttatagggtttattcctgaagag

SEQ ID NO: 658135 - DNA, 75 bp, synthetic construct
  source 1..75: mol_type = other DNA
tgcccgaaattttccaaacactaaaattataaatggtgatatttctttattgggggagtctgaatggaactcaat

SEQ ID NO: 658136 - DNA, 75 bp, synthetic construct
  source 1..75: mol_type = other DNA
caaaagaaatgagagccattccccctactggtatgggatggaaaaatgccatagataaattgaagataggtgaaa

SEQ ID NO: 658137 - DNA, 75 bp, synthetic construct
  source 1..75: mol_type = other DNA
ttccggcaatgcaccaggtgcccgaagatgcgcagggttatcccgccgtcacgccagaacagttacttgaattac

SEQ ID NO: 658138 - DNA, 75 bp, synthetic construct
  source 1..75: mol_type = other DNA
ctgtcagtacgtattcgcgaatttgccgcccgtttcggtgcgctggctgacctttatatttttaaacgtgaaccg

SEQ ID NO: 658139 - DNA, 75 bp, synthetic construct
  source 1..75: mol_type = other DNA
tgttgaagatactccttatggtggagcgggtgaatatagtttgcataaaaacgcagctatgttgggagtaaaagc

SEQ ID NO: 658140 - DNA, 75 bp, synthetic construct
  source 1..75: mol_type = other DNA
gcctggtacaacagccagggtagcaacaaaagatggcctgatgatcgtgatgttccgacaggaggcagcaaccag

SEQ ID NO: 658141 - DNA, 75 bp, synthetic construct
  source 1..75: mol_type = other DNA
cagaaggcattagaagcgttctatgacgcatttgaacttaacagcattgaaccaggcacaacagtcagagtggca

SEQ ID NO: 658142 - DNA, 75 bp, synthetic construct
  source 1..75: mol_type = other DNA
gagcgggcattatttatcgctctgcatatgggtattcaggcgcagtgttatgccgtaccatcacccaaagatatg

SEQ ID NO: 658143 - DNA, 75 bp, synthetic construct
  source 1..75: mol_type = other DNA
ctggcgctatattgttatctgggtgcgcaactattgttggtgacgaaacgcagcttgtgcaagtgaacagcaatc

SEQ ID NO: 658144 - DNA, 75 bp, synthetic construct
  source 1..75: mol_type = other DNA
tcccgaccggctataccgcactgctcggcgggttaaccgagaacggacgtagcgcggtgaacgtgctttcgttcc

SEQ ID NO: 658145 - DNA, 75 bp, synthetic construct
  source 1..75: mol_type = other DNA
cctgcatgaaaatgaaggcaatgctgcgctgacttatgaaggtttactggagcagatccgcgccaagatcagcca

SEQ ID NO: 658146 - DNA, 75 bp, synthetic construct
  source 1..75: mol_type = other DNA
atgaagtaaaagccgcgaccagcacgcagattttcagcatcaaccagacggataaaggccaggggcacatcatta

SEQ ID NO: 658147 - DNA, 75 bp, synthetic construct
  source 1..75: mol_type = other DNA
acgctaacaattatgggaaataaatcagatgatagtgtgcagggacaccaggtgtcattttcaggtggccatgat

SEQ ID NO: 658148 - DNA, 75 bp, synthetic construct
  source 1..75: mol_type = other DNA
atggttgagggcagcaatatttgcgatatcggtcaccgtgactgggcgccggtgccgctgctctcgtcgtttatc

SEQ ID NO: 658149 - DNA, 75 bp, synthetic construct
  source 1..75: mol_type = other DNA
gccataacgcgcaacataagccgcagacgttctggcaggcgtgccagttgttctggtacatgaacatcattctgc

SEQ ID NO: 658150 - DNA, 75 bp, synthetic construct
  source 1..75: mol_type = other DNA
atgacgaatcgtatctctcgcctcaaaactgcactgtttgccaatacccgtgaaatctcgctggagcgtgcgctg

SEQ ID NO: 658151 - DNA, 75 bp, synthetic construct
  source 1..75: mol_type = other DNA
gcttatcaaagcgtgcaattaccgcaaccgaacctcggcgtgcgcactaacgccttgatcgacacgccgttcctg

SEQ ID NO: 658152 - DNA, 75 bp, synthetic construct
  source 1..75: mol_type = other DNA
tattttacattcttcatattataaaagcagatcttggcattacggatattctgatcttacccagcaatagtggac

SEQ ID NO: 658153 - DNA, 75 bp, synthetic construct
  source 1..75: mol_type = other DNA
gcctatcaaagcgtacagttgccgcagccaaatctcggtgtgcgcactaacgccttgattgacacgccgttcctg

SEQ ID NO: 658154 - DNA, 75 bp, synthetic construct
  source 1..75: mol_type = other DNA
aaacacattttgcgttacgccgaactggcggaaacaatggcggcaaattgcacagatgcccagcgtcgtgaagaa

SEQ ID NO: 658155 - DNA, 75 bp, synthetic construct
  source 1..75: mol_type = other DNA
agtcagtcagtaagctcgataacacgctgctgtctaacggtacgttgctgaacgtgaaattcactccggcgaccc

SEQ ID NO: 658156 - DNA, 75 bp, synthetic construct
  source 1..75: mol_type = other DNA
gatatgcaccgtaaagatctgcatgatgatgcagagtggatggcaaaacaggtttatctcaacgtcggtaacttc

SEQ ID NO: 658157 - DNA, 75 bp, synthetic construct
  source 1..75: mol_type = other DNA
tatcacctggctaatatggcggcggaatcccgcgttggcggtttgctcggcggtaaacctggcgtcaccgtgttc

SEQ ID NO: 658158 - DNA, 75 bp, synthetic construct
  source 1..75: mol_type = other DNA
gtcgcgacagtttccagcaaggtttgtgtgaagtgcttagcctgctacaagcgggataccagcgcgtgttgatgg

SEQ ID NO: 658159 - DNA, 75 bp, synthetic construct
  source 1..75: mol_type = other DNA
tctgcgcgaaaaccgcaatggacgatgcctggctgaagctggttgttgaccaggaagatgccgatggtcgctttg

SEQ ID NO: 658160 - DNA, 75 bp, synthetic construct
  source 1..75: mol_type = other DNA
ttgccacgccggaagcgaaagccgcgaacgataaaggtcgcaagttcttcgccgatatgcaccgtaaagatctgc

SEQ ID NO: 658161 - DNA, 75 bp, synthetic construct
  source 1..75: mol_type = other DNA
tcatcacagcgtcgaagatttcaacgctacactgccgaaatcccgtctgccgcaaaacatcaccataactgaagt

SEQ ID NO: 658162 - DNA, 75 bp, synthetic construct
  source 1..75: mol_type = other DNA
cgcacaattactctctctggaagacgatctggaggtcattggtcagtacagtagtgccgcgcaggcatggtcggc

SEQ ID NO: 658163 - DNA, 75 bp, synthetic construct
  source 1..75: mol_type = other DNA
gtgcccacactacgtttccccttccatctggcgaatcataataaagatgctgccatcaatatattgattatattt

SEQ ID NO: 658164 - DNA, 75 bp, synthetic construct
  source 1..75: mol_type = other DNA
acgaaaacggcctcagtttggttaagcgcctgcgtgcacaaaaaccgcaattccgcgccattattcttagcattt

SEQ ID NO: 658165 - DNA, 75 bp, synthetic construct
  source 1..75: mol_type = other DNA
acctgtaaagtggcacagacaagtcaccataaatgcccgtcagcaatggatacgctgcgctatctggctaaaaat

SEQ ID NO: 658166 - DNA, 75 bp, synthetic construct
  source 1..75: mol_type = other DNA
ccgggcgatttgcaacagagcggcaaatacaccagcggcaaacgcgtcaccgagctgggcagcgtggcgggcaaa

SEQ ID NO: 658167 - DNA, 75 bp, synthetic construct
  source 1..75: mol_type = other DNA
caactgtttcagtcaagtagccaagttcaaacgagtgtataaaatcgctttctcggacactaacgtcggtaaacc

SEQ ID NO: 658168 - DNA, 75 bp, synthetic construct
  source 1..75: mol_type = other DNA
ttacgtgttcaacgagcgtaaaatgctcgatgcctcgcatgtcgtggtgttctgtgcaaaaactgccatggatga

SEQ ID NO: 658169 - DNA, 75 bp, synthetic construct
  source 1..75: mol_type = other DNA
gccgcaaaggagaaccctcagccccaatatacagcaccacctacttatgaatcatgggatgttttacgcgaattt

SEQ ID NO: 658170 - DNA, 75 bp, synthetic construct
  source 1..75: mol_type = other DNA
tttcaaaaaacttagagtgacagctactgaattgttggagccgtgctctaatctgaaagcgtatcaatacattat

SEQ ID NO: 658171 - DNA, 75 bp, synthetic construct
  source 1..75: mol_type = other DNA
ctttaaggtgctgatgttagagaacacccttgaaccgtataagtatatgattatgattctggttgtggtcatggt

SEQ ID NO: 658172 - DNA, 75 bp, synthetic construct
  source 1..75: mol_type = other DNA
aagtgaatctcggtgctggcgaagggggatccgtgacgattccgcgcggacaactgaaaaatttaaaagccagtt

SEQ ID NO: 658173 - DNA, 75 bp, synthetic construct
  source 1..75: mol_type = other DNA
cgcgcgatatggcattgctgggtaaagcattgatccacgatgtgccggaagagtacgccattcataaagagaaag

SEQ ID NO: 658174 - DNA, 75 bp, synthetic construct
  source 1..75: mol_type = other DNA
ggttgctgaaccgtcgatatgaaaaagcgagcattgtgctgacgtccaataaagggttcgccgactgggggagag

SEQ ID NO: 658175 - DNA, 75 bp, synthetic construct
  source 1..75: mol_type = other DNA
tttgtatcatgtgccccaggttcagataaacatccccatcaagctgtaattaatgcctttactcgacgaggagcg

SEQ ID NO: 658176 - DNA, 75 bp, synthetic construct
  source 1..75: mol_type = other DNA
actggcaggcaagagcgcctggacttagtgaaacgctgcaatggcaggagtggtcacgtcagcctcaggcaattg

SEQ ID NO: 658177 - DNA, 75 bp, synthetic construct
  source 1..75: mol_type = other DNA
cctgaccattgcggccaaacagccgatagtttcgtcatcgctttctgctggtcgcgacactttccagcaaggttt

SEQ ID NO: 658178 - DNA, 75 bp, synthetic construct
  source 1..75: mol_type = other DNA
tttgtctatgtcggtgtctacttctggcgtgaaagcaaagtacgtaccgcactggctgaagtcacagagtcctga

SEQ ID NO: 658179 - DNA, 75 bp, synthetic construct
  source 1..75: mol_type = other DNA
tccttatgacgcgttttaatccggaaaaagtattgattctctattccgttataggggcgctgttcctggcatatg

SEQ ID NO: 658180 - DNA, 75 bp, synthetic construct
  source 1..75: mol_type = other DNA
tcccttgttccagtttattttgttatcgtgtttattcccgctatggggatgcgcagctgcattaaatgacatatt

SEQ ID NO: 658181 - DNA, 75 bp, synthetic construct
  source 1..75: mol_type = other DNA
tcgccgtcgttcaactggcagaaaaacctcgacgacaaaactattgccagcttccagcagcagctgtcggatatg

SEQ ID NO: 658182 - DNA, 75 bp, synthetic construct
  source 1..75: mol_type = other DNA
gatgaagtgagatcggcagaccttctggccattctcaaggcgctgaaggccaaaggcgttcatgccaaactgctc

SEQ ID NO: 658183 - DNA, 75 bp, synthetic construct
  source 1..75: mol_type = other DNA
atcaattttgcaattttatcaccggacggttttatcgccagtttgttacacctgaacagccttttcccgaatctg

SEQ ID NO: 658184 - DNA, 75 bp, synthetic construct
  source 1..75: mol_type = other DNA
gcccgtaatcaactggtgctcaacctggtatccagccccggttccggtaaaaccacgctgctgacggaaacctta

SEQ ID NO: 658185 - DNA, 75 bp, synthetic construct
  source 1..75: mol_type = other DNA
catatttcgacaaaaataaccagcagacgtctatgtctggtgcggattactgcacaaaacgttatgacgcctgta

SEQ ID NO: 658186 - DNA, 75 bp, synthetic construct
  source 1..75: mol_type = other DNA
tatggatgaactgttaacgctgatgacagcacaccgcgtgtggtcacgcattcctaagattgacaaaatcccggc

SEQ ID NO: 658187 - DNA, 75 bp, synthetic construct
  source 1..75: mol_type = other DNA
caaccgttgccgctttccagcccggcattgttaattaccccaacatatgccgcccggtttcacccgctcttttgc

SEQ ID NO: 658188 - DNA, 75 bp, synthetic construct
  source 1..75: mol_type = other DNA
gttgtaatggataaggttttagttcaccgggggttttcaacgttaaatattatcacaatagcatttattatagtg

SEQ ID NO: 658189 - DNA, 75 bp, synthetic construct
  source 1..75: mol_type = other DNA
cagggcgttggtctttcaggagggcagcgccaacggatcgcaatagcccgggctcttgttacaaatcctcgaatt

SEQ ID NO: 658190 - DNA, 75 bp, synthetic construct
  source 1..75: mol_type = other DNA
cattgctggaaaccgtgcaggtgctggtcaaagactatgatttcagtatcagcgatgccctgcgcccgctcacca

SEQ ID NO: 658191 - DNA, 75 bp, synthetic construct
  source 1..75: mol_type = other DNA
gggcactggaattgatcgaacagcaggccgcaaaacacggcgcaaaacgcgtaactggggtctggctcaaaattg

SEQ ID NO: 658192 - DNA, 75 bp, synthetic construct
  source 1..75: mol_type = other DNA
cggatgctggaagttgaaattgacgtgctggacaaaaacaaccgtctggctgaacgcaaccgcgcgcgctttgct

SEQ ID NO: 658193 - DNA, 75 bp, synthetic construct
  source 1..75: mol_type = other DNA
tgctggacaaaaataaccgtctggctgaacgcaaccgcgcgcgctttgctgcccgcaagcaactggtgctcaacc

SEQ ID NO: 658194 - DNA, 75 bp, synthetic construct
  source 1..75: mol_type = other DNA
tggaagaagaagttacgctactgcgtgacaaaatcgaaaaccgtcaaactctccgtctgggtggctgtgaaatct

SEQ ID NO: 658195 - DNA, 75 bp, synthetic construct
  source 1..75: mol_type = other DNA
tgtgccgccgtcttcagctacctggcggatgacctggcagagctgcaggaccttatcaaccagcaacaccaccac

SEQ ID NO: 658196 - DNA, 75 bp, synthetic construct
  source 1..75: mol_type = other DNA
acaatataattgaaataggctacaatataataaacaccgatctggtcattggcgaaaaaattcatttcaggacac

SEQ ID NO: 658197 - DNA, 75 bp, synthetic construct
  source 1..75: mol_type = other DNA
gatgaaagattttgccccggggcgtatcagcaagcgctttgccatcaaaaacattcgcgaatgccactggctagt

SEQ ID NO: 658198 - DNA, 75 bp, synthetic construct
  source 1..75: mol_type = other DNA
tctctttacagtatgtgaataagaaccagaaggcatatcgacaggcaatggggaacagcggatttcaaattgctt

SEQ ID NO: 658199 - DNA, 75 bp, synthetic construct
  source 1..75: mol_type = other DNA
ttacagtacagtacgttaacaagaaccagatgaactaccccacggcaatgggatcatcacaagtacaaatcgcac

SEQ ID NO: 658200 - DNA, 75 bp, synthetic construct
  source 1..75: mol_type = other DNA
atttttatcagccggatatacattccagtatatttacaatgacaatatattttcagaactatggggagttggcct

SEQ ID NO: 658201 - DNA, 75 bp, synthetic construct
  source 1..75: mol_type = other DNA
caggaagcgggctacggcctggccgcgctgattgatggattatggctgcgcgcggctctgagcggcaaaccgctg

SEQ ID NO: 658202 - DNA, 75 bp, synthetic construct
  source 1..75: mol_type = other DNA
cgcggctctgagcggcaaaccgctggacaaaattcgcgcaaactcgctgacccgccactttatcactcagcattt

SEQ ID NO: 658203 - DNA, 75 bp, synthetic construct
  source 1..75: mol_type = other DNA
ttgctgtcgaatctggtgagcgagtttcgtcgcgaattgccgcgcgaacaggcacaggaagcgggctacggcctg

SEQ ID NO: 658204 - DNA, 75 bp, synthetic construct
  source 1..75: mol_type = other DNA
taagcgtatgaagatcgaactgccagatattttgtttaccagcaccgaaatgctgaataagcagatgggcaaccc

SEQ ID NO: 658205 - DNA, 75 bp, synthetic construct
  source 1..75: mol_type = other DNA
ggcgttccgcgcaatggaacacaacagcgcaaggatcgccttgattgacgttcctgctcgaatcttccagacgtt

SEQ ID NO: 658206 - DNA, 75 bp, synthetic construct
  source 1..75: mol_type = other DNA
agcgttgatgcgctggcggcatccgaggcttggcctgttgccgcccggccagttcctgccgctggccgagtcgtt

SEQ ID NO: 658207 - DNA, 75 bp, synthetic construct
  source 1..75: mol_type = other DNA
aatactggagaatgatccttcagtaattcgttggatgaaacctcgtcctggtcagtttcgcatcgaatatgctaa

SEQ ID NO: 658208 - DNA, 75 bp, synthetic construct
  source 1..75: mol_type = other DNA
gaaattctgactgaacagaccataggccggggacttcgcctgccctacggaaaaagaactggcgtcgaggccgtt

SEQ ID NO: 658209 - DNA, 75 bp, synthetic construct
  source 1..75: mol_type = other DNA
atccccgtgatttcagaaacataatttatcactatcctctttcgcgagcgctgaaagatggatatgtcaaaattc

SEQ ID NO: 658210 - DNA, 75 bp, synthetic construct
  source 1..75: mol_type = other DNA
gccagggcagataacaatgatggtcagggataccgttgatggcctcgttttggactggtttaagacggcaaaaag

SEQ ID NO: 658211 - DNA, 75 bp, synthetic construct
  source 1..75: mol_type = other DNA
taatgcggcgcaaaaccgtgcttccaccaccatggacgtacaaagtgctgctgatgacacaggcttaccaatgct

SEQ ID NO: 658212 - DNA, 75 bp, synthetic construct
  source 1..75: mol_type = other DNA
caccaccggtactaattactggtgatgactatcaggaagggcgaggcgttcgtctggattatgcgattgctgaaa

SEQ ID NO: 658213 - DNA, 75 bp, synthetic construct
  source 1..75: mol_type = other DNA
aaagtacgcattgaacacgacgattttttcaatggcgcttacaaaggcaaagtaatcaccgttcactcgaaccaa

SEQ ID NO: 658214 - DNA, 75 bp, synthetic construct
  source 1..75: mol_type = other DNA
gcattgcctatacctacatatgcacatatgcatgatcaatggttggcattattagcgaagcaatatggtaacatt

SEQ ID NO: 658215 - DNA, 75 bp, synthetic construct
  source 1..75: mol_type = other DNA
ttgcagaaagtttttatcgaacgaataatattaatccacaagataatctgaaaaataataatcttctctggcgtt

SEQ ID NO: 658216 - DNA, 75 bp, synthetic construct
  source 1..75: mol_type = other DNA
gaaatcaagtcattgataatgatgggttgcaggcttgtgaacctcaagcaatatatcagacaaactccatatcaa

SEQ ID NO: 658217 - DNA, 75 bp, synthetic construct
  source 1..75: mol_type = other DNA
atttcagctatctggcaaacttgccggatttagtcgttttaatggatgaagcccaccgttactacgccagcgcgg

SEQ ID NO: 658218 - DNA, 75 bp, synthetic construct
  source 1..75: mol_type = other DNA
acccggttcgccaaagtatgtttttcagggcattcctgaactggcacaaacaccgccggttctaatcactggtga

SEQ ID NO: 658219 - DNA, 75 bp, synthetic construct
  source 1..75: mol_type = other DNA
gtgacggttgaagatattctggaagagatagttggtgatttcaccacgtcgatgtcgccaacacttgccgaagaa

SEQ ID NO: 658220 - DNA, 75 bp, synthetic construct
  source 1..75: mol_type = other DNA
gacgtggcgattatcgatcgcgtgattggcgtgaaatgcgccatctctgatcaccgttctgccgcaccggacgtt

SEQ ID NO: 658221 - DNA, 75 bp, synthetic construct
  source 1..75: mol_type = other DNA
tgaatctgtatttgatactgccatggcaattcagtggtatgcgcagagggaaactgatatcgaaaacgaaaagct

SEQ ID NO: 658222 - DNA, 75 bp, synthetic construct
  source 1..75: mol_type = other DNA
ggtgaaaactgaaatcgcgaaagcctccaatgttgcagctaaggccggtgaaaacgtgggcgggtggatcgatga

SEQ ID NO: 658223 - DNA, 75 bp, synthetic construct
  source 1..75: mol_type = other DNA
accggtttgccatcaggttgacacagattatcagccggttactgtcaggagagtctcttgacctaaaaaccctgg

SEQ ID NO: 658224 - DNA, 75 bp, synthetic construct
  source 1..75: mol_type = other DNA
tgaaagtagttacttctttttttgtggcattagtcctcaataagtttttatctatatttaggaaaagacaacttt

SEQ ID NO: 658225 - DNA, 75 bp, synthetic construct
  source 1..75: mol_type = other DNA
ctcccttataggttgtttaagagtggaatggaaaaagaaaatatggcttagcgcaatagataatctaagtagtga

SEQ ID NO: 658226 - DNA, 75 bp, synthetic construct
  source 1..75: mol_type = other DNA
gcgttatccaacgcctggactatctgcataaactgggcgttgatgccatctggctaacccccttttatgtctctc

SEQ ID NO: 658227 - DNA, 75 bp, synthetic construct
  source 1..75: mol_type = other DNA
gtgtttctgctttggtcaacggtgccgcaggcatggctacaagtgcgttaaagggagctgtgagtggagtgatta

SEQ ID NO: 658228 - DNA, 75 bp, synthetic construct
  source 1..75: mol_type = other DNA
tttcctacacaacttggggaaatcactcgctcacgtgatcaggtgtcagagttcttgtcatacccaatcactttc

SEQ ID NO: 658229 - DNA, 75 bp, synthetic construct
  source 1..75: mol_type = other DNA
ctttgcttcagctcagcggcgcgtccagaaaaatggctcagacctttatccgggtgctgggtaaagagcgtgaag

SEQ ID NO: 658230 - DNA, 75 bp, synthetic construct
  source 1..75: mol_type = other DNA
agcgaattatacggcgattgatcccacctacggcacgctggacgattttgacgaactggtgacacaggcaaaatc

SEQ ID NO: 658231 - DNA, 75 bp, synthetic construct
  source 1..75: mol_type = other DNA
ggtgaagtgtgcaaagagacgctgggaacacgtaaacggacgcatttagcctcaaatcttgcggaattccttaat

SEQ ID NO: 658232 - DNA, 75 bp, synthetic construct
  source 1..75: mol_type = other DNA
atatgttggggcttctcgcctgaaagaactgaccaagcgcaccacgtttatccgcgtactggaacaagaaaaccg

SEQ ID NO: 658233 - DNA, 75 bp, synthetic construct
  source 1..75: mol_type = other DNA
agcggcggtcgtatcgtcgaagagaacggcgaaaaatttatgttgttctacggtatgagctccgagtctgcgatg

SEQ ID NO: 658234 - DNA, 75 bp, synthetic construct
  source 1..75: mol_type = other DNA
tcgatcagttgggagaaagcaatgtttctgattacattaggtatcatcataattctcatagaaaaatggtcacaa

SEQ ID NO: 658235 - DNA, 75 bp, synthetic construct
  source 1..75: mol_type = other DNA
cctgaaatatcgcttcccgatgctgtgcgcgatgattggttctggtctggcaggattgctatgcggcctgaacgg

SEQ ID NO: 658236 - DNA, 75 bp, synthetic construct
  source 1..75: mol_type = other DNA
ctgaaagaactgaccaagcgcaccacgtttatccgtgtgcaggaacaagaaaaccgcatcttcaacaacctgtaa

SEQ ID NO: 658237 - DNA, 75 bp, synthetic construct
  source 1..75: mol_type = other DNA
ggcgatgtcgcgaaagcctttggcggcggtgccgatttcgtcatgcttggcggcatgctggcgggccacgaagag

SEQ ID NO: 658238 - DNA, 75 bp, synthetic construct
  source 1..75: mol_type = other DNA
tatatttatgaagcctataaagatgaagctgccgttgcgtttcataaaacaacgcctcattaccttgcctgtgtt

SEQ ID NO: 658239 - DNA, 75 bp, synthetic construct
  source 1..75: mol_type = other DNA
tggcgttgatcctcgggcgtatcggcagtattggcaagctgtactggtttatgccgccaagtgccaacctcgcgc

SEQ ID NO: 658240 - DNA, 75 bp, synthetic construct
  source 1..75: mol_type = other DNA
tggatgctgcgggttattttccgcgtcaatgttgaaactgaggcccagcagcacgagtccacgcgaaccaacggc

SEQ ID NO: 658241 - DNA, 75 bp, synthetic construct
  source 1..75: mol_type = other DNA
tagatttaaatagaaataataaaagatattttcaaagcatctgttcaaacttagaagctcctaatactcgtggaa

SEQ ID NO: 658242 - DNA, 75 bp, synthetic construct
  source 1..75: mol_type = other DNA
gcatacgattatttaagatcactgataaattccgcacctatttatgcatcattgattaacccgaatgattcatgg

SEQ ID NO: 658243 - DNA, 75 bp, synthetic construct
  source 1..75: mol_type = other DNA
ttctgattatctccgtgcttatggcaatcggcattatgcgaattatctacacactgaaggatatcgaattattct

SEQ ID NO: 658244 - DNA, 75 bp, synthetic construct
  source 1..75: mol_type = other DNA
ggtacgcgcagagctgaaaaaagtctgtgagttctgggccgatcgtggggtcgacgggttgcgcctggatgtggt

SEQ ID NO: 658245 - DNA, 75 bp, synthetic construct
  source 1..75: mol_type = other DNA
tatttgctgcggcggcggtggcgtgtgcactggcgcaaactatcgatcagctgattgtgatgcgtttctttcacg

SEQ ID NO: 658246 - DNA, 75 bp, synthetic construct
  source 1..75: mol_type = other DNA
ctgagtacttatattctgggttttgcattggggcagttaatttacggtccgatggccgatagcttcgggcgtaag

SEQ ID NO: 658247 - DNA, 75 bp, synthetic construct
  source 1..75: mol_type = other DNA
tttgccgggatgttctcattcttaagcgccggaccgtttgtctacattgaaattaaccacgtcgcgccggaaaac

SEQ ID NO: 658248 - DNA, 75 bp, synthetic construct
  source 1..75: mol_type = other DNA
cgctggtgtttgccgccgccgcggtggcgtgtgcgttggcacaaaccatcgatcagctgattgtgatgcgtttct

SEQ ID NO: 658249 - DNA, 75 bp, synthetic construct
  source 1..75: mol_type = other DNA
tggatggtcatcagtgcgctgctggggctgggattctggtcgctggtggttggcgttgcggcgtttgtgggctgc

SEQ ID NO: 658250 - DNA, 75 bp, synthetic construct
  source 1..75: mol_type = other DNA
ctccgcatggccaatgatctggtcaattgcgttctgcgcgaccagttccattcttttctgtctttacgccagtcg

SEQ ID NO: 658251 - DNA, 75 bp, synthetic construct
  source 1..75: mol_type = other DNA
atcacaataccgcagcaggaatgtttatgggaaccgccgcgctggctggcggtatttttaacgcagcttgtatga

SEQ ID NO: 658252 - DNA, 75 bp, synthetic construct
  source 1..75: mol_type = other DNA
ttcagcggtacattgttgggttacgtgatccccttatccagtgcggcaatcaatgcggtgagtattccagactat

SEQ ID NO: 658253 - DNA, 75 bp, synthetic construct
  source 1..75: mol_type = other DNA
cgtcagactttatatgcccgcattaagcgaaaaaattattaatcacaataccgcagcaggaatgtttatgggaac

SEQ ID NO: 658254 - DNA, 75 bp, synthetic construct
  source 1..75: mol_type = other DNA
atttacccgaaagaagagttctcgcggatgatgtcgtttgtcatgctggtgaccactattgcaccgctgatggca

SEQ ID NO: 658255 - DNA, 75 bp, synthetic construct
  source 1..75: mol_type = other DNA
cacaagagaaaagttggctctatctgttatctaaatacagcgctaaccccgttcaggcgttggcgaattatacgg

SEQ ID NO: 658256 - DNA, 75 bp, synthetic construct
  source 1..75: mol_type = other DNA
catgctccggcaggaatgattttgccggtgacctccggtgattatgcaatcccggtgactaacggtagcggtgct

SEQ ID NO: 658257 - DNA, 75 bp, synthetic construct
  source 1..75: mol_type = other DNA
attgcagaatgtcatgctaactgcctggttgaaacagatgctcaggcttatgcaaacgcagcatttatagcagag

SEQ ID NO: 658258 - DNA, 75 bp, synthetic construct
  source 1..75: mol_type = other DNA
tttaagatagggcgtacttttgcagacgaacattatgaaaaatcacgcgtaacagtagttgatgatagtgatccc

SEQ ID NO: 658259 - DNA, 75 bp, synthetic construct
  source 1..75: mol_type = other DNA
gactggctgacagcgattgagatgtacaaaccaacagtgcgcatcgtggaagttaatgtgccacacgccgcgggc

SEQ ID NO: 658260 - DNA, 75 bp, synthetic construct
  source 1..75: mol_type = other DNA
ttgaattgttcattaaaaatccgcttgataacgggcttacccgtggcgaacaaatggaactggcacgaattgcac

SEQ ID NO: 658261 - DNA, 75 bp, synthetic construct
  source 1..75: mol_type = other DNA
tctcggatgggagtaagcgcattgctgaactggagaaaagcgaagagcaactcattaatgagcgtgaccatgctg

SEQ ID NO: 658262 - DNA, 75 bp, synthetic construct
  source 1..75: mol_type = other DNA
gcaatacataaaacgccgcgaccaggagaacgaggagattgcgctaacggtagggaagctgcgcgttgagcttga

SEQ ID NO: 658263 - DNA, 75 bp, synthetic construct
  source 1..75: mol_type = other DNA
tggtgtgtggtcgctcgaatatggagagggccgatttgatggtgatgatgcactaattcatcgcgaggctgctgg

SEQ ID NO: 658264 - DNA, 75 bp, synthetic construct
  source 1..75: mol_type = other DNA
ttgctgaactggagaaaagcgaagagcaactcattaacgagcgtgaccatgctgagtctgctttagctgatatgt

SEQ ID NO: 658265 - DNA, 75 bp, synthetic construct
  source 1..75: mol_type = other DNA
gcgaacaggaacttaaagatagcggtgttgatattgatgccctcaacgccttcaaatttctggccggaccagaaa

SEQ ID NO: 658266 - DNA, 75 bp, synthetic construct
  source 1..75: mol_type = other DNA
aactggaagcacgggaaataaaaccagccaaaggcgaagttcttgtcgttgtatctggttttactggttgcggaa

SEQ ID NO: 658267 - DNA, 75 bp, synthetic construct
  source 1..75: mol_type = other DNA
gatagtgagtgccatgttgctgaactggaagaagcgctacgcgataagcaggcgttacttgaagcatcagagaag

SEQ ID NO: 658268 - DNA, 75 bp, synthetic construct
  source 1..75: mol_type = other DNA
caggagaacgaggatattgcgctaacggtagggaagctgcgtgttgagcttgaggaagcaaaatcaaaactcaac

SEQ ID NO: 658269 - DNA, 75 bp, synthetic construct
  source 1..75: mol_type = other DNA
cggcgtggaggtgtaacggttatgccaggtaatggtattgagcaagcaactcactggatgccgctaccggaaccg

SEQ ID NO: 658270 - DNA, 75 bp, synthetic construct
  source 1..75: mol_type = other DNA
caccgcagaaaatattcaggacgaagagttcaatccggcggaatttaacctcggtgaagagctgttcagcgcggt

SEQ ID NO: 658271 - DNA, 75 bp, synthetic construct
  source 1..75: mol_type = other DNA
aacctgtacctgacgctacaactgctggaactcggcattccctgcatcgtggcactgaacatgctcgacattgcc

SEQ ID NO: 658272 - DNA, 75 bp, synthetic construct
  source 1..75: mol_type = other DNA
atgacaattgactatcaggcactgcgtgatgtggcagtgaaagccggtaaagataagtggcaagctaaaaaaata

SEQ ID NO: 658273 - DNA, 75 bp, synthetic construct
  source 1..75: mol_type = other DNA
ttcggttgtaacgtaccgtcggtaatgggcgcacgtacgcttgatgcaccgcgtgaacgtctgatgaccatcatg

SEQ ID NO: 658274 - DNA, 75 bp, synthetic construct
  source 1..75: mol_type = other DNA
ttatcctgtttaacatcgtggttatcggtctgctgcgccgcgcgcgtagccgggtggatatcgaactgctggcaa

SEQ ID NO: 658275 - DNA, 75 bp, synthetic construct
  source 1..75: mol_type = other DNA
atgggcgtgatggatcagaaattcggtagcgcagcagcagcttacagctacctgattttcgtcctgctgtatgta

SEQ ID NO: 658276 - DNA, 75 bp, synthetic construct
  source 1..75: mol_type = other DNA
tcgatatgggcacccaataaatgctgataagcgacatgtcatgatacctaaagaaaatggcagttggctttgcct

SEQ ID NO: 658277 - DNA, 75 bp, synthetic construct
  source 1..75: mol_type = other DNA
gaaggagcgcatcctgaaagcggtttcgatgaagatttccaaatggaacagcaggccaatgctgaattcatcgca

SEQ ID NO: 658278 - DNA, 75 bp, synthetic construct
  source 1..75: mol_type = other DNA
tgaactggaagcgcgggaagttcaattaccgactcgctacgaccttcgatatggacacccgataaatgcagatga

SEQ ID NO: 658279 - DNA, 75 bp, synthetic construct
  source 1..75: mol_type = other DNA
ttttcacgatgattaccaaacggtaatggcatacaaagtttctgaagtcatcgatgcaatccgcgctactggcat

SEQ ID NO: 658280 - DNA, 75 bp, synthetic construct
  source 1..75: mol_type = other DNA
tttgatggacagaaaaacgcagagaacaacgctcgttatatcgcagctttcaaccctgaagtagtgcaggcgttg

SEQ ID NO: 658281 - DNA, 75 bp, synthetic construct
  source 1..75: mol_type = other DNA
ccagcaatacatcaaacgccgcgaccaagagaacgaggatattgcgctaacggtagggaagctgcgcgttgagct

SEQ ID NO: 658282 - DNA, 75 bp, synthetic construct
  source 1..75: mol_type = other DNA
caaccggggataggccggagtggagtaactggttcggcttttcagatgccgtagatgtcgtggttgacagaattg

SEQ ID NO: 658283 - DNA, 75 bp, synthetic construct
  source 1..75: mol_type = other DNA
atccggattttgtcattattgacccggagaacggactggtatttctggaggtcaaggactggacggtttccacgc

SEQ ID NO: 658284 - DNA, 75 bp, synthetic construct
  source 1..75: mol_type = other DNA
ctttacctgcagatccacgtttacgacaaaatgacggccggtataagggacggctgaatctggcatgggcgtatg

SEQ ID NO: 658285 - DNA, 75 bp, synthetic construct
  source 1..75: mol_type = other DNA
caatcaggcaaaggccgaaggtctgggtctaacagactgggtccaaaagcatatggataacgtgtgtgatctggc

SEQ ID NO: 658286 - DNA, 75 bp, synthetic construct
  source 1..75: mol_type = other DNA
agtgaaggcaaaaagacatactcgcgacgcagggatgtggtgcatttactgacgtaccagagtagcaagggactg

SEQ ID NO: 658287 - DNA, 75 bp, synthetic construct
  source 1..75: mol_type = other DNA
agaaatgcttcagtgcactggaagaggccgtgaacagcggaaaaatcacccgaaccggatatgatgctgtactgg

SEQ ID NO: 658288 - DNA, 75 bp, synthetic construct
  source 1..75: mol_type = other DNA
gcaaatcaggagcaggtcacgctggaaaccgacggtcttctgaaatcagaaataaatccgctggtacaggttcgt

SEQ ID NO: 658289 - DNA, 75 bp, synthetic construct
  source 1..75: mol_type = other DNA
ggaacttgggtatcgggttttgtgtattgaccggaatgctcatgccggtaatggttttgtctggaatcatattcc

SEQ ID NO: 658290 - DNA, 75 bp, synthetic construct
  source 1..75: mol_type = other DNA
tattacaggaaaacaggtgtgtggtgttatcagaacgctgcattcatatttaaccgatcatgacaggataattta

SEQ ID NO: 658291 - DNA, 75 bp, synthetic construct
  source 1..75: mol_type = other DNA
atgccggctatatccttggagtatctcctcaggaagaacccccccgactcaatctttccgctgaaaggaaaatcc

SEQ ID NO: 658292 - DNA, 75 bp, synthetic construct
  source 1..75: mol_type = other DNA
ccgccaggtcggctttagtcgtatcgctgcttatatcctgggaattttgccgcatgaagagccgccgttactgaa

SEQ ID NO: 658293 - DNA, 75 bp, synthetic construct
  source 1..75: mol_type = other DNA
tcattatccactttcccatcggcactttggaggagctccttggttggtttccctatgctgaacgtttccgccaga

SEQ ID NO: 658294 - DNA, 75 bp, synthetic construct
  source 1..75: mol_type = other DNA
aaaacatcaatgtaaactggaatgctcagtcagtgaggagttcataacgctactctcagataattatccggacat

SEQ ID NO: 658295 - DNA, 75 bp, synthetic construct
  source 1..75: mol_type = other DNA
gctataaaaaagacaggatattacaggcacttaaggaaattaagtacgatctggagacatccccaaacccagacg

SEQ ID NO: 658296 - DNA, 75 bp, synthetic construct
  source 1..75: mol_type = other DNA
cggagttcgatccgctgctggatgacagccgtctgctttaccagacgtttgaaccgccccggttttcctggagag

SEQ ID NO: 658297 - DNA, 75 bp, synthetic construct
  source 1..75: mol_type = other DNA
tgcttttttgcattattcacggatgatgaaaaccgccgacgatgctcttcgcgacggcgctcagttctttagcga

SEQ ID NO: 658298 - DNA, 75 bp, synthetic construct
  source 1..75: mol_type = other DNA
cgcctttttgcattattcacggatgatgaaaaccgccgacgatgctcttcgcgacggcgctcagttctttaccgc

SEQ ID NO: 658299 - DNA, 75 bp, synthetic construct
  source 1..75: mol_type = other DNA
cagcgattgagatgtacaaaccaacagtgcgcatcgtggaagttaatgtgccacgcgccgctggcattcgcatca

SEQ ID NO: 658300 - DNA, 75 bp, synthetic construct
  source 1..75: mol_type = other DNA
ttaacgattttatgaagcacttttcgccagatatcgcgctggcattgttggatgaactggaaagaaaccagcaat

SEQ ID NO: 658301 - DNA, 75 bp, synthetic construct
  source 1..75: mol_type = other DNA
atgaccaaaataaactatcaggcactgcgtgaggcggcagaacgtgcaattccggcaatggaatgcctgttaatg

SEQ ID NO: 658302 - DNA, 75 bp, synthetic construct
  source 1..75: mol_type = other DNA
aggcacaggagaacgagcaaaaacagacgatccagaaacgaatcgagggaaaaaaacaacgacgggaacgcaatc

SEQ ID NO: 658303 - DNA, 75 bp, synthetic construct
  source 1..75: mol_type = other DNA
ggcggtccaaaaacgaaatcgagggaaaaaaacaacgacgagaacgcaatcaccgactctttctcgcggctgggc

SEQ ID NO: 658304 - DNA, 75 bp, synthetic construct
  source 1..75: mol_type = other DNA
accgactctttctcgcggctggactactgatcgaagcaggactgctagacacaaaaacaggcgaactatactatc

SEQ ID NO: 658305 - DNA, 75 bp, synthetic construct
  source 1..75: mol_type = other DNA
ctttttgcattattcacggatgatgaaaaccgccgacgaggctcttcgcgacggcgctcagttctttaccgctca

SEQ ID NO: 658306 - DNA, 75 bp, synthetic construct
  source 1..75: mol_type = other DNA
agcaacgacagtattacacgcttgagcgccgattctggaatgcgggcgctccagaaatggcaaccagagcttaca

SEQ ID NO: 658307 - DNA, 75 bp, synthetic construct
  source 1..75: mol_type = other DNA
tttaatccaaaggttgcgctggcgatactggataagctggaagctaaagacaagcgcattgcagaactggaggcg

SEQ ID NO: 658308 - DNA, 75 bp, synthetic construct
  source 1..75: mol_type = other DNA
ggaaaagtattgccggggtaaattgtttattgatgaggcgacgaccggtatcagcaagatgctggatgatcgcta

SEQ ID NO: 658309 - DNA, 75 bp, synthetic construct
  source 1..75: mol_type = other DNA
acatcgttggttaattatattattggaatggtgattgctttcgctgtcgcttttagcctctctttattactcaaa

SEQ ID NO: 658310 - DNA, 75 bp, synthetic construct
  source 1..75: mol_type = other DNA
cagatattgagctacgccagatcgcacaacgcatcacacaaacctgtcatatcccggtacgaatcagcgccgatg

SEQ ID NO: 658311 - DNA, 75 bp, synthetic construct
  source 1..75: mol_type = other DNA
caaaaaacgcttgttgcctgacgaactggcggcagcgatcagcaaaatgatcgacgcgcgctactggaaccgcaa

SEQ ID NO: 658312 - DNA, 75 bp, synthetic construct
  source 1..75: mol_type = other DNA
aacgttctcacgaaaagcaggggcgacacgtcgcggcgctggcgctgcgagatatcgccagccgcgaattaatcc

SEQ ID NO: 658313 - DNA, 75 bp, synthetic construct
  source 1..75: mol_type = other DNA
atcggcggttttgagcgagtagccaatgagcagggatttgtcggcagcttttttactattaccgcgccgtcaaaa

SEQ ID NO: 658314 - DNA, 75 bp, synthetic construct
  source 1..75: mol_type = other DNA
gccttcgcgttgctgaatctcaccatgatgctactccgcattggcatggccttctgttcactgccccagaacata

SEQ ID NO: 658315 - DNA, 75 bp, synthetic construct
  source 1..75: mol_type = other DNA
gcatgacctccatgccgggaggctcggttgagccagcccggtatgcttacgcctggaatgagcctaaacaggcca

SEQ ID NO: 658316 - DNA, 75 bp, synthetic construct
  source 1..75: mol_type = other DNA
cggagagcagacagatccccgcgcaagacttcacctgaaagcgcattcgatgcaacgcagggaagacgcggagcg

SEQ ID NO: 658317 - DNA, 75 bp, synthetic construct
  source 1..75: mol_type = other DNA
ggcgcgagttgcgccgcctgaagaatcaggaaatggcagatcgtatcagtccggttttcggtgagttacatcgcg

SEQ ID NO: 658318 - DNA, 75 bp, synthetic construct
  source 1..75: mol_type = other DNA
aatacaaaaaaccatgcacgatcgcttttggtcacgccttctgcgcaagtacgcccgccgctggcgtgagcattt

SEQ ID NO: 658319 - DNA, 75 bp, synthetic construct
  source 1..75: mol_type = other DNA
gtgtttagtgatgctgagtacggcaaacgcatggtgcgtgaaggctctagactaattgcgtatttcaggttggtg

SEQ ID NO: 658320 - DNA, 75 bp, synthetic construct
  source 1..75: mol_type = other DNA
tgggcggaccgctggcaaaacgcgcggatttaccgttacgcacgttttatcaggataaaccggagcctaacagct

SEQ ID NO: 658321 - DNA, 75 bp, synthetic construct
  source 1..75: mol_type = other DNA
gccggctttctgtgccattctggtggcgcttttcgcttttgccatgatgcgcgataccccgcaatcctgtggtct

SEQ ID NO: 658322 - DNA, 75 bp, synthetic construct
  source 1..75: mol_type = other DNA
atgactggcatgcggcgctttatatgccagctttctgcgccattctggtggcgttgttcgctttcgcaatgatgc

SEQ ID NO: 658323 - DNA, 75 bp, synthetic construct
  source 1..75: mol_type = other DNA
atgttgagtatttttaaaccagcgccacacaaagcgcgcttacctgctgcggagatcgatccgacttatcgtcga

SEQ ID NO: 658324 - DNA, 75 bp, synthetic construct
  source 1..75: mol_type = other DNA
tcaggggctggagtttgaagaacaggccagagtcattgaagagttcacgtgtcgctacaacgtggaacacatcgg

SEQ ID NO: 658325 - DNA, 75 bp, synthetic construct
  source 1..75: mol_type = other DNA
cggggggccgctggaacagcgaacagccacgctcaaaacgcagtgagtttgatgtttcacatgctcacctgaaga

SEQ ID NO: 658326 - DNA, 75 bp, synthetic construct
  source 1..75: mol_type = other DNA
cgatttactcatggaaaaaacgcgatgagtgggatgccacacctccgatccagcgggtcacccagtccattgatg

SEQ ID NO: 658327 - DNA, 75 bp, synthetic construct
  source 1..75: mol_type = other DNA
tctggcgtgaacttcgccgcctgaaaaatcaggatttagccgacagggttagtcctgtttttggtgagctgcacc

SEQ ID NO: 658328 - DNA, 75 bp, synthetic construct
  source 1..75: mol_type = other DNA
tatgaaggcagcacatgctcttcgccaggaagaaagcgcggtgagtgaggaggttgaatccctggccaaggaaat

SEQ ID NO: 658329 - DNA, 75 bp, synthetic construct
  source 1..75: mol_type = other DNA
cgttgaccggacgccgaaacatgatccgcaggagttcgccgcagaatacgaattctggcagcgtgtaaaatccac

SEQ ID NO: 658330 - DNA, 75 bp, synthetic construct
  source 1..75: mol_type = other DNA
actgctgatggcgctgcgtgacgatgtggcgcaaccttaccagcgtaaccagatttttttgtctgcgtcgcgtcg

SEQ ID NO: 658331 - DNA, 75 bp, synthetic construct
  source 1..75: mol_type = other DNA
actggaaaacgctgcataacgggcttatctgccctgaccggacgtggcggcaaattgtcacgctggaagatgtgg

SEQ ID NO: 658332 - DNA, 75 bp, synthetic construct
  source 1..75: mol_type = other DNA
gtgacgtgaagcggggcgctgcaccgtattgcagtaagcaccatgttgatgagtgggatgccaggcgtaaacgta

SEQ ID NO: 658333 - DNA, 75 bp, synthetic construct
  source 1..75: mol_type = other DNA
tggcgcaggaaaatcaacactcttaaaaatccttagcggaaactatgcgccaaccacgggttctgtagtgattaa

SEQ ID NO: 658334 - DNA, 75 bp, synthetic construct
  source 1..75: mol_type = other DNA
atgtcatgatacctaaagaaaatggcagttggctttacctgattgacctagaacacgcattacgcgtcgctggca

SEQ ID NO: 658335 - DNA, 75 bp, synthetic construct
  source 1..75: mol_type = other DNA
gggcttctccatcctgtgggggctgaatatcgcttactcgctggcaacattgttctatcaggtcgccagctacag

SEQ ID NO: 658336 - DNA, 75 bp, synthetic construct
  source 1..75: mol_type = other DNA
cagccgtttcaccactgccgtagataaaatcgtgcttaaccgattccttggcctgccgattttcctctttgtgat

SEQ ID NO: 658337 - DNA, 75 bp, synthetic construct
  source 1..75: mol_type = other DNA
ttgctgcctttaatccaaatgttgcgctggcactactggatgaacgggaaagaaaccagcaatacatcaaatcac

SEQ ID NO: 658338 - DNA, 75 bp, synthetic construct
  source 1..75: mol_type = other DNA
gaacttaaagattacggtgtggatattgatgcgctcaacgccttcaaatttctggccggaccagaaaccgtgctg

SEQ ID NO: 658339 - DNA, 75 bp, synthetic construct
  source 1..75: mol_type = other DNA
agcgcatagcagaactggaagcgcgggaaataaaaccagccaaaggcgaagttcttgtcgttgtctctggtttta

SEQ ID NO: 658340 - DNA, 75 bp, synthetic construct
  source 1..75: mol_type = other DNA
gtgtgcattctggcggttgttctgtttaacatcacggtcatcggcctgctgcgccgcgcgcgtagccgggtcgat

SEQ ID NO: 658341 - DNA, 75 bp, synthetic construct
  source 1..75: mol_type = other DNA
tgcaagcgttgggtctgccagggaaatcctttgtgccgttgatcgttggcttcggttgtaacgtaccgtcggtga

SEQ ID NO: 658342 - DNA, 75 bp, synthetic construct
  source 1..75: mol_type = other DNA
gcgaaagaagtggtagtgggtacgctcaacaccctctacaccgcagaaaatattcaggacgaagagttcaatccg

SEQ ID NO: 658343 - DNA, 75 bp, synthetic construct
  source 1..75: mol_type = other DNA
gggtcagttcaccactaccgatcatcaggtcaccctggtggatctgcccggcacttattctctgaccaccatctc

SEQ ID NO: 658344 - DNA, 75 bp, synthetic construct
  source 1..75: mol_type = other DNA
taccgcagaaaacattcaggacgaagagttcaatccggcggaatttaacctcggtgaagagctgttcagcgcggt

SEQ ID NO: 658345 - DNA, 75 bp, synthetic construct
  source 1..75: mol_type = other DNA
gtgtgcattctggcggttatcctgtttaacatcgtggttatcggtttgctgcgtcgcgcgcgtagccgggtggat

SEQ ID NO: 658346 - DNA, 75 bp, synthetic construct
  source 1..75: mol_type = other DNA
gtgagtgagattaactatcaggcactgcgtgaggcagcagtagcaattgaaacagtagcaacgcctcaaaaattg

SEQ ID NO: 658347 - DNA, 75 bp, synthetic construct
  source 1..75: mol_type = other DNA
aaaaattgctggtgaagcacctgtaatgcctttcgatcagcgaattaatgcgcttaacgattttatgaagcactt

SEQ ID NO: 658348 - DNA, 75 bp, synthetic construct
  source 1..75: mol_type = other DNA
agcgattgagatgtacaaaccaacagtgcgcatcgtggaagttaatgtgccacgcgccgctgacattcgcatcaa

SEQ ID NO: 658349 - DNA, 75 bp, synthetic construct
  source 1..75: mol_type = other DNA
gagatgtacaaaccaacagtgcgcatcgtggaagttaatgtgccacgcgccgctggcattcgcatcaaaggagag

SEQ ID NO: 658350 - DNA, 75 bp, synthetic construct
  source 1..75: mol_type = other DNA
gcggtgctctttatcgcctgtgccatttttgtcccaaattttgccaccttcattaatatgaaagggttgggcctg

SEQ ID NO: 658351 - DNA, 75 bp, synthetic construct
  source 1..75: mol_type = other DNA
tgctctttgtgcggatgatttccgctatgcttcgccgttcgggcggtgatgcgggtgctgttatgtttgaggcgt

SEQ ID NO: 658352 - DNA, 75 bp, synthetic construct
  source 1..75: mol_type = other DNA
tgcgtgacgtgtcggaacgcgcaattacagcgatgacacatctgtcaatattaccaggtgatgatgatttattaa

SEQ ID NO: 658353 - DNA, 75 bp, synthetic construct
  source 1..75: mol_type = other DNA
gctggagatgcccagctttctaccccatgcactgacagcatcataaacagcattgcaacaggcattcgcatcaaa

SEQ ID NO: 658354 - DNA, 75 bp, synthetic construct
  source 1..75: mol_type = other DNA
tggaaaatgctcggcttaagtcaggtatagccggtctgatacacctcggtattcgatatgcagatgttgaggtca

SEQ ID NO: 658355 - DNA, 75 bp, synthetic construct
  source 1..75: mol_type = other DNA
ttaccgattacgcactgcaagctgccggaactgtagacgaattggttgcagcgctggaatccgcagagaagcgta

SEQ ID NO: 658356 - DNA, 75 bp, synthetic construct
  source 1..75: mol_type = other DNA
gttgtatctggttttactggttgcggaaaaagcgccattgccggggaaatagaaatcgcgatgaaggctattggt

SEQ ID NO: 658357 - DNA, 75 bp, synthetic construct
  source 1..75: mol_type = other DNA
gtgaggcggcagagcgtgcaattccggcaatggaacacctgttaatgttgccagttgatgatgatttgttaactg

SEQ ID NO: 658358 - DNA, 75 bp, synthetic construct
  source 1..75: mol_type = other DNA
ggaaaaagccattgatgcactacgtcaggtaggtctggaaaattatgcccacagctacccggacgaactctctgg

SEQ ID NO: 658359 - DNA, 75 bp, synthetic construct
  source 1..75: mol_type = other DNA
cgaaccagagaaagcagacaaaaagacgatcaaagactcagagtcaaaatcggttgaagacgaagatattattcg

SEQ ID NO: 658360 - DNA, 75 bp, synthetic construct
  source 1..75: mol_type = other DNA
tgttacgtcgtttgtgcgaagcaaacgaacctgaaaaaacggatgcgaatactgctgagaacctaaaaacggctg

SEQ ID NO: 658361 - DNA, 75 bp, synthetic construct
  source 1..75: mol_type = other DNA
aacaaaaaaatgcaattcattgggcatatggtgaattcaagacagaaggaatctattcaatatatcaagagttag

SEQ ID NO: 658362 - DNA, 75 bp, synthetic construct
  source 1..75: mol_type = other DNA
cgaaccagagaaagcagacaacaagacgataaaagactcagagtcaaaatcggttgaagacgaagatattattcg

SEQ ID NO: 658363 - DNA, 75 bp, synthetic construct
  source 1..75: mol_type = other DNA
cgaaccagagaaagcagacaataagacgatgaaagacttagagtcaaaatcggttgaagacgaagatattattcg

SEQ ID NO: 658364 - DNA, 75 bp, synthetic construct
  source 1..75: mol_type = other DNA
cgaaccagagaaagcagacaataagacgattaaagactgagagtcaaaatcggttgaagacgaagatattattcg

SEQ ID NO: 658365 - DNA, 75 bp, synthetic construct
  source 1..75: mol_type = other DNA
agaaagggattcggatagaaccccttgaaaattgcttcgtaacaagaagcatcaattcttttgattcaaaacaag

SEQ ID NO: 658366 - DNA, 75 bp, synthetic construct
  source 1..75: mol_type = other DNA
gggtttggcttgttaatggaaaagaaagggattcggatagaaccccttgaaaattgcttcgtaacaagaagcatc

SEQ ID NO: 658367 - DNA, 75 bp, synthetic construct
  source 1..75: mol_type = other DNA
tttgcctaaaagagttttcatagaaggaagctatgatgttgtattcgaaaatgaacagcaatgcataaatcttca

SEQ ID NO: 658368 - DNA, 75 bp, synthetic construct
  source 1..75: mol_type = other DNA
agtttttgaaaaatgaagtgtcaaaaccaactaaatatcacttactccctattcctgccgtttctcttttcagtc

SEQ ID NO: 658369 - DNA, 75 bp, synthetic construct
  source 1..75: mol_type = other DNA
gagattgccggtgaattgctacatgagcaggcagatgagcgccaggccttaagccttgcaatgcctaaagtcagc

SEQ ID NO: 658370 - DNA, 75 bp, synthetic construct
  source 1..75: mol_type = other DNA
ttacaaattaaacatcttggtatggatattgacccggacacgccgctgaaatatctctccattggtcagtggcag

SEQ ID NO: 658371 - DNA, 75 bp, synthetic construct
  source 1..75: mol_type = other DNA
cgaaccagagaaagcagacaacaagacgatcaaagactaagagtcaaaatcggttgaagacgaagatattattcg

SEQ ID NO: 658372 - DNA, 75 bp, synthetic construct
  source 1..75: mol_type = other DNA
attatcctgagaatgtcgatccgtggcacatcctgcaaacgggtggtaaagagattaaaagtgccatcccaatgg

SEQ ID NO: 658373 - DNA, 75 bp, synthetic construct
  source 1..75: mol_type = other DNA
tgagattcaggttaaatatgagggttatattgcgcgccaacaggatgagatcgaaaaacagcagcgtaacgagaa

SEQ ID NO: 658374 - DNA, 75 bp, synthetic construct
  source 1..75: mol_type = other DNA
ttgacggcaagattcatatcggtctggataattacagcggtggtcgtgctggagatccgccttccattccgcttt

SEQ ID NO: 658375 - DNA, 75 bp, synthetic construct
  source 1..75: mol_type = other DNA
gcaccacctttctcggcctgtacggcgtggattcgccgctgccaaccgcctatctggactacattacccagcgtc

SEQ ID NO: 658376 - DNA, 75 bp, synthetic construct
  source 1..75: mol_type = other DNA
ccccgaagtggcgtggcttgggttaatcagcataacgagactggtattgttgttgagcctaatgatgccaaagca

SEQ ID NO: 658377 - DNA, 75 bp, synthetic construct
  source 1..75: mol_type = other DNA
tttatcctccagtacacgggggaattgagcaggttgcatttgatattagcgaaggaattacaaaaagtaatggtc

SEQ ID NO: 658378 - DNA, 75 bp, synthetic construct
  source 1..75: mol_type = other DNA
cgttttctggccctgctcagcgtgatgcgcctgccgacgcgcacggcggaaggcgttacggcactggtgggactg

SEQ ID NO: 658379 - DNA, 75 bp, synthetic construct
  source 1..75: mol_type = other DNA
gggcaacgccgatgacgcggtaaaagcgcgcgccaacattgtgattggtgataacaccaccgacagcattgccca

SEQ ID NO: 658380 - DNA, 75 bp, synthetic construct
  source 1..75: mol_type = other DNA
agcaaaggtaaacgtttgacgaaatgggttgaggcgcaaggctggtcgatggaaaacgtcgtggcgttcggcgat

SEQ ID NO: 658381 - DNA, 75 bp, synthetic construct
  source 1..75: mol_type = other DNA
tcgatcgtagcccgatgtatgctggtgtgatcgaaggtgttggccctcgttactgtccatcgatcgaagataaag

SEQ ID NO: 658382 - DNA, 75 bp, synthetic construct
  source 1..75: mol_type = other DNA
gtcgtgctcaccgttgggacgttcctcgacggtaaaattcatatcggtctggataattacagcggtggccgtgct

SEQ ID NO: 658383 - DNA, 75 bp, synthetic construct
  source 1..75: mol_type = other DNA
tcgcgccacccgggcacaagcagatcgtgtactgtatcgccaggcagtacgcacagcactggagaaccagccgaa

SEQ ID NO: 658384 - DNA, 75 bp, synthetic construct
  source 1..75: mol_type = other DNA
aggctattaagcaggttagaagtgttacagatgcctttcttattgacgtaataaataaaattgtagtaactcttt

SEQ ID NO: 658385 - DNA, 75 bp, synthetic construct
  source 1..75: mol_type = other DNA
caactactatcgcgaccagttgttgagttttaaagagggtgaggttgagtggaagactttgggaacatttgcaga

SEQ ID NO: 658386 - DNA, 75 bp, synthetic construct
  source 1..75: mol_type = other DNA
aaatggggatagaatgccccttatctaaactattaaagatctactataatgtttatgttggcggtgatttaacag

SEQ ID NO: 658387 - DNA, 75 bp, synthetic construct
  source 1..75: mol_type = other DNA
cttcccgggagaatcgaatttatctgcagctaacagaagattaagggaggaaatggggatagaatgccccttatc

SEQ ID NO: 658388 - DNA, 75 bp, synthetic construct
  source 1..75: mol_type = other DNA
gactgatggcttccttcaccctaatcaggtactgaaagaacgtggtctgatgaagaagaaaggcttcccggaatc

SEQ ID NO: 658389 - DNA, 75 bp, synthetic construct
  source 1..75: mol_type = other DNA
gtatcgcaggcagtgtagctgtggggaaaagtacaaccgcccgtgtattacaggcgcttttaagccgttggccgg

SEQ ID NO: 658390 - DNA, 75 bp, synthetic construct
  source 1..75: mol_type = other DNA
tttatctattcctttaccatcgattgatgagcaacaaaaaattgcctttatcctcgataagttcgacaccctgac

SEQ ID NO: 658391 - DNA, 75 bp, synthetic construct
  source 1..75: mol_type = other DNA
cgacaggagccgcatccagacgatttatcagccggggagcttcacgccactcatcagagttgaaaccgccaccgg

SEQ ID NO: 658392 - DNA, 75 bp, synthetic construct
  source 1..75: mol_type = other DNA
aaagagaagcataaccacctggaacgcattgagttccgctacgaaaaaatcacctggacttacaaagacggcaac

SEQ ID NO: 658393 - DNA, 75 bp, synthetic construct
  source 1..75: mol_type = other DNA
aaaaacgtcaaaaagaaattgctgacggtcttgcttctgctgaacgagctaaaaaggatttggaccttgcacagg

SEQ ID NO: 658394 - DNA, 75 bp, synthetic construct
  source 1..75: mol_type = other DNA
ggccacagccaacaggtgaacggtattgtgttaactcggcatcattgcgctttaccgatggcgaaaacggcgaag

SEQ ID NO: 658395 - DNA, 75 bp, synthetic construct
  source 1..75: mol_type = other DNA
gcccacaacccacaggcgaacgctattgtgttaactcggcatcattgcgttttactgatggcgaaaatggcgaag

SEQ ID NO: 658396 - DNA, 75 bp, synthetic construct
  source 1..75: mol_type = other DNA
cgggccgcagccaacgggcgaacgttattgtgttaactctgcctctttacgctttaccgatggcgaaaacggcga

SEQ ID NO: 658397 - DNA, 75 bp, synthetic construct
  source 1..75: mol_type = other DNA
taaatctatttaccattatcacatatggaaagtggttccagatttgaatcttatttgtaaacagtttctatatta

SEQ ID NO: 658398 - DNA, 75 bp, synthetic construct
  source 1..75: mol_type = other DNA
atgcgtacattcctttatgctcgtgtatcagttgatgacctcaccacacaaaaccaagtagaagctgttaaacgt

SEQ ID NO: 658399 - DNA, 75 bp, synthetic construct
  source 1..75: mol_type = other DNA
atgaaacatgaccattttgttgttcaaagcccggataaacctgcgcaacagttgttactgcttttccacggtgtc

SEQ ID NO: 658400 - DNA, 75 bp, synthetic construct
  source 1..75: mol_type = other DNA
gttccgcaagacactaatggtgttaccgttggtgccatttcggaaataaaaccaggggtttacagcgccacggtt

SEQ ID NO: 658401 - DNA, 75 bp, synthetic construct
  source 1..75: mol_type = other DNA
ggaggcacggcacagcccgcacacgacacggcggccacagagctgaaaccccacaaggccatgccccgcatggcc

SEQ ID NO: 658402 - DNA, 75 bp, synthetic construct
  source 1..75: mol_type = other DNA
cagattatattgattattctgttgcgaataatgaagatgaatcattttttacgagtcaaatagtattatcaaata

SEQ ID NO: 658403 - DNA, 75 bp, synthetic construct
  source 1..75: mol_type = other DNA
gacggatttgcgaatctggtcaaccataagctagaagaaggtgacacccttgttgttcttaaacttgaccgtctg

SEQ ID NO: 658404 - DNA, 75 bp, synthetic construct
  source 1..75: mol_type = other DNA
tctttacgacccgctgggccgcagggtggcaaaacgggtgtggcggcgtgaacgggacctgacgggctggatgtc

SEQ ID NO: 658405 - DNA, 75 bp, synthetic construct
  source 1..75: mol_type = other DNA
taaagttgagcaagaccgaattgttgccattctggataaattcgacacactgactaactccatcaccgaaggtct

SEQ ID NO: 658406 - DNA, 75 bp, synthetic construct
  source 1..75: mol_type = other DNA
atactgtaactacaccttctcgggggcagggtggtattggttttgtaggatatcaaaaaacgccattctggttag

SEQ ID NO: 658407 - DNA, 75 bp, synthetic construct
  source 1..75: mol_type = other DNA
cgagtgtgacgcgatgactgaacactattatctcttacgcgactacgcgctaatccatccggaatgcagcgccat

SEQ ID NO: 658408 - DNA, 75 bp, synthetic construct
  source 1..75: mol_type = other DNA
cgtaagtatgacgtgatattcacacaaggcatggggagcaaagatatggttgtgtggcatctactccatatagac

SEQ ID NO: 658409 - DNA, 75 bp, synthetic construct
  source 1..75: mol_type = other DNA
ataaaaacgaatcacatcaaaacttattaagaacgcattgcatcagtgttaggttgaaccatgaagaactacaga

SEQ ID NO: 658410 - DNA, 75 bp, synthetic construct
  source 1..75: mol_type = other DNA
cgatctggaaatgggcaaaattctcggtgcctgtgaactcaccgtcggtacgcgcctgcactccgctattatctc

SEQ ID NO: 658411 - DNA, 75 bp, synthetic construct
  source 1..75: mol_type = other DNA
cgcgcctgcactccgccattatctctatgaactttgccactccggcaattgctatcaactacgaacataaatccg

SEQ ID NO: 658412 - DNA, 75 bp, synthetic construct
  source 1..75: mol_type = other DNA
ttacaccgccagctacgccgtccaacactggctgggcgtcgcatcccaacagaaaaccgtggcaattactctgcg

SEQ ID NO: 658413 - DNA, 75 bp, synthetic construct
  source 1..75: mol_type = other DNA
tctggtgatgacgctgttattagtgatggtgtttatcatccctatcgccttattggttaacagtatcgtcgatgg

SEQ ID NO: 658414 - DNA, 75 bp, synthetic construct
  source 1..75: mol_type = other DNA
accacacttgcggcaatcgtggcgacagcgccatcctgcgcggcttacttgatgccatcaacatcctcaatccac

SEQ ID NO: 658415 - DNA, 75 bp, synthetic construct
  source 1..75: mol_type = other DNA
gcaacgaacacaacaaacacagcctcacctggcatcaaatttatgaggaaaaaatgaaattacttattctgggca

SEQ ID NO: 658416 - DNA, 75 bp, synthetic construct
  source 1..75: mol_type = other DNA
cgccagcacatcagcgatcctgcccgttaccacgtagtgatggatgaactcaacgatctggaaatgggcaaaatt

SEQ ID NO: 658417 - DNA, 75 bp, synthetic construct
  source 1..75: mol_type = other DNA
cgcgttaaaaaagtcctccgtcgccgctatcaacaccaggtattgctctcacgcgtcaccgacactggcaagctg

SEQ ID NO: 658418 - DNA, 75 bp, synthetic construct
  source 1..75: mol_type = other DNA
cagaaaagaactggaaagtgcgtacaagaaagacagcccaatggtttttgagtgtgtggataaaaaactgtgttg

SEQ ID NO: 658419 - DNA, 75 bp, synthetic construct
  source 1..75: mol_type = other DNA
ctgcactctgccattatctcgatgaattttgccactccggcaattgccatcaactacgaacataaatccgccggg

SEQ ID NO: 658420 - DNA, 75 bp, synthetic construct
  source 1..75: mol_type = other DNA
gggcgcgttaaaaaagtcctccgtcgccgctaccagcaccaggtattgctctcacgcgtcaccgacactggcaag

SEQ ID NO: 658421 - DNA, 75 bp, synthetic construct
  source 1..75: mol_type = other DNA
aacgaagccgtcagtcgtgagcgttatacgggaatgcagatggtgcagtctgtactggaacgcatcggggaggtg

SEQ ID NO: 658422 - DNA, 75 bp, synthetic construct
  source 1..75: mol_type = other DNA
taatctacctgccggtgagtattcagttattcgttacgtgttcattccatttaaaggcaatgagtcaagcaataa

SEQ ID NO: 658423 - DNA, 75 bp, synthetic construct
  source 1..75: mol_type = other DNA
ttgaagtatgtgatatccaaggaggaactcagcctccaaaggacgagtttgtttatgaaaaaaaagatggatata

SEQ ID NO: 658424 - DNA, 75 bp, synthetic construct
  source 1..75: mol_type = other DNA
gcaacaaagccggttagtggaaaatttagcagccacttcaaccaaaagttcatgcttagaaaaacagacaaaaca

SEQ ID NO: 658425 - DNA, 75 bp, synthetic construct
  source 1..75: mol_type = other DNA
agaagcgccatgccctgtgcggtcactggagtgatatggctgttctgtgtccggcagagttttcagtgaaacaac

SEQ ID NO: 658426 - DNA, 75 bp, synthetic construct
  source 1..75: mol_type = other DNA
agtggtggtcgataaagatcagctggttaccagccggacaccggacgatctgccagcgtttaaccgcgaggcgtt

SEQ ID NO: 658427 - DNA, 75 bp, synthetic construct
  source 1..75: mol_type = other DNA
agtggtggtcgataaagatcagctggttaccagccgaacgccggacgatctgccagcgtttaaccgcgaggcgtt

SEQ ID NO: 658428 - DNA, 75 bp, synthetic construct
  source 1..75: mol_type = other DNA
atgagtaagaaaattgccgttttaatcactgatgaatttgaagattcagaatttacttcacccgcagacgagttc

SEQ ID NO: 658429 - DNA, 75 bp, synthetic construct
  source 1..75: mol_type = other DNA
gccatggaattcaggtgactgctggaggaaaggattacccggagaaatgcttcagtgcgctggaagatgccgtga

SEQ ID NO: 658430 - DNA, 75 bp, synthetic construct
  source 1..75: mol_type = other DNA
ctggagtgatatggctgtgctgtgtccgacagagcgttcagcgcaacaattgcaggacgttatgacactacgcgg

SEQ ID NO: 658431 - DNA, 75 bp, synthetic construct
  source 1..75: mol_type = other DNA
aacaggcggtctaaaaggttttgggatcatgagcctcagctctttgtacagttcttctgacgccgaatacatcca

SEQ ID NO: 658432 - DNA, 75 bp, synthetic construct
  source 1..75: mol_type = other DNA
actgacgtaccagagcagtaaggggctggagtttccgtatgttgcagttatcaatgcttctttcgttcattctgg

SEQ ID NO: 658433 - DNA, 75 bp, synthetic construct
  source 1..75: mol_type = other DNA
aagctgtactggtttatgccgccaagtgccaacctcgcgctgcgggagctggggatcgtgctgttcctctcggtc

SEQ ID NO: 658434 - DNA, 75 bp, synthetic construct
  source 1..75: mol_type = other DNA
gcgcagggacgtacttccgtcctgccggtaaattaccgtaatacgaaacgcattctgcactttgcttatgcattc

SEQ ID NO: 658435 - DNA, 75 bp, synthetic construct
  source 1..75: mol_type = other DNA
ggaagctcacacggtttccactctgaagggcgctcctccaggatatgtcggttttggtcagggagggactcttac

SEQ ID NO: 658436 - DNA, 75 bp, synthetic construct
  source 1..75: mol_type = other DNA
tattacggtctcgtcgccagtgacgttggctggtgaaattacttatcaaacaattaatgactttggcgctacgac

SEQ ID NO: 658437 - DNA, 75 bp, synthetic construct
  source 1..75: mol_type = other DNA
actttgtattggatgaatgttaaagcaattccgccaacagatgagaaaaatacacagaagaataccttacagttg

SEQ ID NO: 658438 - DNA, 75 bp, synthetic construct
  source 1..75: mol_type = other DNA
ccatgcggtgcaatttttaatctacaccataattatcagtgctgttggtagcattattaaggtaatgactccaac

SEQ ID NO: 658439 - DNA, 75 bp, synthetic construct
  source 1..75: mol_type = other DNA
gtgctggcgggatatctgctgattaatctggtcttcggcaatattctggaaccgcgcatcatgggacgtgggctg

SEQ ID NO: 658440 - DNA, 75 bp, synthetic construct
  source 1..75: mol_type = other DNA
atgaagatagaacttattacgacaaaacattttattgaacaagccgaatattatttcaggaactatatggacgga

SEQ ID NO: 658441 - DNA, 75 bp, synthetic construct
  source 1..75: mol_type = other DNA
atgagtgagaaaattgccgttgtctatatcggcccaaaaaccgtgaaaaaggacaccattaccggaagccgcaca

SEQ ID NO: 658442 - DNA, 75 bp, synthetic construct
  source 1..75: mol_type = other DNA
tctaccctccgatatttggtggaatagagcaagttgcacaggacataaccgaagggacgcaaaatttgtgcaatg

SEQ ID NO: 658443 - DNA, 75 bp, synthetic construct
  source 1..75: mol_type = other DNA
atattttaattgattcagcgaaatatttacctgatgattacatcatattaattggggggggggggcgcattatta

SEQ ID NO: 658444 - DNA, 75 bp, synthetic construct
  source 1..75: mol_type = other DNA
ttgaacgtgacgtgggcaatcccgacgcgcccccccacggtgcgcaccacttttctcggcctgtacggcgtggat

SEQ ID NO: 658445 - DNA, 75 bp, synthetic construct
  source 1..75: mol_type = other DNA
gtcgtggaacgaaggtatggggcaaggaagttcaggctaaagttgtcgatgacggcgacgtagaagatcaccttg

SEQ ID NO: 658446 - DNA, 75 bp, synthetic construct
  source 1..75: mol_type = other DNA
atcacttatcacctacctgttgaagaaatcgagttccttcctgaaggtactgagcttgagttcgggaaagagtgg

SEQ ID NO: 658447 - DNA, 75 bp, synthetic construct
  source 1..75: mol_type = other DNA
tagaaaaaattattgtgacatctgaaatttatgggagttcttctcctcaattacaaagatttcaagataaaataa

SEQ ID NO: 658448 - DNA, 75 bp, synthetic construct
  source 1..75: mol_type = other DNA
ggctggagacgttgaaccaaacctatatgcaacagataagccaaatgtcagagactattcagacgttgcaaggtg

SEQ ID NO: 658449 - DNA, 75 bp, synthetic construct
  source 1..75: mol_type = other DNA
gactactctgattactatcagagattcaatattgccttacaatgtagcagagacgttatgttgtgatttggatgt

SEQ ID NO: 658450 - DNA, 75 bp, synthetic construct
  source 1..75: mol_type = other DNA
tttgtttatggggatgagaataaacttatcactattaatatgactgaattccaggaggctcacacggtttccact

SEQ ID NO: 658451 - DNA, 75 bp, synthetic construct
  source 1..75: mol_type = other DNA
cacgggttgctgtatctcagtccacatcaccagatgccattcaggatattgaagcctcattagcaagacaccagg

SEQ ID NO: 658452 - DNA, 75 bp, synthetic construct
  source 1..75: mol_type = other DNA
tcaatattgccttacaatgtggccgaggcgttatattgtgatatggatgttgcagagagtttactgctgtctttt

SEQ ID NO: 658453 - DNA, 75 bp, synthetic construct
  source 1..75: mol_type = other DNA
agagaaggaaatcaggcagcttatcgatattttgcttcgtcgcagacagaataatccgatactgaccggtgaacc

SEQ ID NO: 658454 - DNA, 75 bp, synthetic construct
  source 1..75: mol_type = other DNA
ttttcaggttgtaaaagtaaatgagccaaattatgaggtaacctctgggatgctacgttcacttttacccatgat

SEQ ID NO: 658455 - DNA, 75 bp, synthetic construct
  source 1..75: mol_type = other DNA
tgccacaggcgaaacccgaacagcaggccagactggcgacttacgccagtgaagatttacatgccattgcgccga

SEQ ID NO: 658456 - DNA, 75 bp, synthetic construct
  source 1..75: mol_type = other DNA
atgaatccggcattgcttgccacgctcggaacgcttgtggaaacggcgtcgctgaaaacgggtattttaccgccg

SEQ ID NO: 658457 - DNA, 75 bp, synthetic construct
  source 1..75: mol_type = other DNA
gatcgccgtacaactcgacaacggcaaactgatggtgcacatcggcgcgaaccaaagtgaagtttgccgcgcgtt

SEQ ID NO: 658458 - DNA, 75 bp, synthetic construct
  source 1..75: mol_type = other DNA
catatcaatacagcgccacaatcctcacctgtattttctgagtcgatgcaaactctactggaaaaagcatggata

SEQ ID NO: 658459 - DNA, 75 bp, synthetic construct
  source 1..75: mol_type = other DNA
aagtcgattgtttgcattttctgtggaagttattacaggaacataagtatataaccgaaaggttttatgaactgt

SEQ ID NO: 658460 - DNA, 75 bp, synthetic construct
  source 1..75: mol_type = other DNA
cgatggagagaacataaaggactgcctgcacatcgtgtggggcggttgtggaagtttcagttgtccgaagtagac

SEQ ID NO: 658461 - DNA, 75 bp, synthetic construct
  source 1..75: mol_type = other DNA
ctggttgatattgatgaaatccgtagcgaaaactcccttgacgaatacgccaacctgtacggatgtaccttcgtt

SEQ ID NO: 658462 - DNA, 75 bp, synthetic construct
  source 1..75: mol_type = other DNA
cttacaggagtttgattacccggcggcgagcgcgattgcctcggtgatcctcgcggcatcgctgctgttgctgtt

SEQ ID NO: 658463 - DNA, 75 bp, synthetic construct
  source 1..75: mol_type = other DNA
gtgatcctcgcggcatctctgctgctgctgttctcaattaacattctgcaaagtcgctttggtcggcgtgtggta

SEQ ID NO: 658464 - DNA, 75 bp, synthetic construct
  source 1..75: mol_type = other DNA
gtgatcctcgcagcatcgctgttgctgctgttttctattaacactctgcaaagtcgcttcggtcggcgtgtggta

SEQ ID NO: 658465 - DNA, 75 bp, synthetic construct
  source 1..75: mol_type = other DNA
gacaggtaataacgttctgcgtgctgcaattgcccgcattgagtgggtttttgaaacatttccgtcggtatgtct

SEQ ID NO: 658466 - DNA, 75 bp, synthetic construct
  source 1..75: mol_type = other DNA
gatttctggtgccggactctgtccttcagcccaaacaaaccccgtcactatgaacgctatctgcaaagaatgaaa

SEQ ID NO: 658467 - DNA, 75 bp, synthetic construct
  source 1..75: mol_type = other DNA
gtttctgcaaagtggtgctgccggagctttctccggcgctggtggcgggcgtggcgctgtcgtttacccgtagtc

SEQ ID NO: 658468 - DNA, 75 bp, synthetic construct
  source 1..75: mol_type = other DNA
agtttcagccggagtggatatgctgggagccaggagtgacctgggttcgccagccaccggaagaggccattacgg

SEQ ID NO: 658469 - DNA, 75 bp, synthetic construct
  source 1..75: mol_type = other DNA
gcggtcatggctttcgcccctcgagatagcctgttacacgcgcccgatatgtatatgaaaaaactggttgttaat

SEQ ID NO: 658470 - DNA, 75 bp, synthetic construct
  source 1..75: mol_type = other DNA
gcgttgacgttaaccgtgtgtactcgctcgatgaactggtaagggggaacgatatcctctttagcgctacgggcg

SEQ ID NO: 658471 - DNA, 75 bp, synthetic construct
  source 1..75: mol_type = other DNA
cgttttatggcactcacatcacagagcaaactccgttatgccgatgataaaccctggaccacggcatcgcccgac

SEQ ID NO: 658472 - DNA, 75 bp, synthetic construct
  source 1..75: mol_type = other DNA
atgggaaccatacagaagataagaacagatgttaatgtattatatgcggccattcaccgtattgagtggttgttt

SEQ ID NO: 658473 - DNA, 75 bp, synthetic construct
  source 1..75: mol_type = other DNA
gtgattgataactccgcctttgtgcatccaaccgccattgtggaagagggtgcgacgattggcgccaacgtccac

SEQ ID NO: 658474 - DNA, 75 bp, synthetic construct
  source 1..75: mol_type = other DNA
ggatattccgtcctggcgacgtatctgtaagacactaataaagaatgatttctggtgccggaccctctccttcag

SEQ ID NO: 658475 - DNA, 75 bp, synthetic construct
  source 1..75: mol_type = other DNA
cggtttcgatccggcaaaagatatggtgaaaccggaagagatggtggtactggatcgctgggccgtaggttgtgc

SEQ ID NO: 658476 - DNA, 75 bp, synthetic construct
  source 1..75: mol_type = other DNA
gaacgggtaaggatgttctgtcggaagctatacagcgtattgagtgggtcttcgatacattctccaccatatgtt

SEQ ID NO: 658477 - DNA, 75 bp, synthetic construct
  source 1..75: mol_type = other DNA
aaattcttactggtgaaaatgttttgtcagcaactattcaccgcattgaatggctttttgatacattcccttctg

SEQ ID NO: 658478 - DNA, 75 bp, synthetic construct
  source 1..75: mol_type = other DNA
tgctctggcggcggtgcgtgaacataccacgctggtggtgattgctcaccgcttatcgactattgttgatgccga

SEQ ID NO: 658479 - DNA, 75 bp, synthetic construct
  source 1..75: mol_type = other DNA
cgtatcgagtcgatggttgctaaccgtcctgactggtgtatctctcgtcagcgtacctggggcgtaccgatgtca

SEQ ID NO: 658480 - DNA, 75 bp, synthetic construct
  source 1..75: mol_type = other DNA
acgaagtggtacagcgtctgatgcgcttctgctccgttgagatgggctctttctacctcgacatcattaaggacc

SEQ ID NO: 658481 - DNA, 75 bp, synthetic construct
  source 1..75: mol_type = other DNA
aaatccttaccggagaaaatgttttgcgtgctgcaatcgcccgcattgagtggatttttgaaacatttccgtcgg

SEQ ID NO: 658482 - DNA, 75 bp, synthetic construct
  source 1..75: mol_type = other DNA
aagcgtatcacgaagccacctcatcatacctggcgtagctatgcgatgttcctgctggatgtgatgccggaaaga

SEQ ID NO: 658483 - DNA, 75 bp, synthetic construct
  source 1..75: mol_type = other DNA
gcgtgcagcaattgctcgtattgagtggatttttgaaacatttccatcagtttgtctctctttttccggtggaaa

SEQ ID NO: 658484 - DNA, 75 bp, synthetic construct
  source 1..75: mol_type = other DNA
atacctggcgcagctatgcgatgttcctgctggatgtgatgccggaaagaacggcagaacattaccgtaacaaaa

SEQ ID NO: 658485 - DNA, 75 bp, synthetic construct
  source 1..75: mol_type = other DNA
aagcgtatttcaaaaccagcccatcatacctggcgcagctatgcgatgttcctgctggatgtgatgccggaaaga

SEQ ID NO: 658486 - DNA, 75 bp, synthetic construct
  source 1..75: mol_type = other DNA
atgagtgatacgcttttaaccgaaaaaatccttaccggagaaaatgttttgcgtgccgcaatcgcccgcattgag

SEQ ID NO: 658487 - DNA, 75 bp, synthetic construct
  source 1..75: mol_type = other DNA
tggcggtcaccgcgatgcgccaggcgttgaacgacgtcgcttttcgtggacgagtggttatcggcgaaggagaaa

SEQ ID NO: 658488 - DNA, 75 bp, synthetic construct
  source 1..75: mol_type = other DNA
agatatctggatataccatgccaggagtggagctatatataatcccctgtatgatctgatgtatcgggccggagt

SEQ ID NO: 658489 - DNA, 75 bp, synthetic construct
  source 1..75: mol_type = other DNA
gtatatgaaaaaactggtcgttaatcgactggctgccggggcaatcgatctgtctttgccccttacagaaaactt

SEQ ID NO: 658490 - DNA, 75 bp, synthetic construct
  source 1..75: mol_type = other DNA
aaaaagcctgtcgggatgccttcaccgcgctgaaaaaagaaaacgtgggagaattcgctctccggggcgtctgcg

SEQ ID NO: 658491 - DNA, 75 bp, synthetic construct
  source 1..75: mol_type = other DNA
gcgataaaagatggtgagttcttctcaatgctggggccgtccggctccggcaaaaccacctgcctgcgcctgatt

SEQ ID NO: 658492 - DNA, 75 bp, synthetic construct
  source 1..75: mol_type = other DNA
ccgaacaaaccccggcactatgaacgttatctgcagcgtatgaaagaaaggaggaaggaatgggggattctgtga

SEQ ID NO: 658493 - DNA, 75 bp, synthetic construct
  source 1..75: mol_type = other DNA
gatgtggctcgcaggaagaaacgtcgtttctctgtattattcattgactgggaagctcagtatcagtgcaccatt

SEQ ID NO: 658494 - DNA, 75 bp, synthetic construct
  source 1..75: mol_type = other DNA
tttgctgccgacgtcaggcatgtctaccgtaattgtggggaacaaaccgtacattttcattccctcatccattac

SEQ ID NO: 658495 - DNA, 75 bp, synthetic construct
  source 1..75: mol_type = other DNA
ttctccgccgcagtccgctacgccttcagtttatgatccacaacagcaggcgatggtgatcacttcgctgtttcc

SEQ ID NO: 658496 - DNA, 75 bp, synthetic construct
  source 1..75: mol_type = other DNA
ggggcattcagaaaagatcgcccccgaagccgtaagtgtatcaatgaattccttgaacagtcaggctggcatgcc

SEQ ID NO: 658497 - DNA, 75 bp, synthetic construct
  source 1..75: mol_type = other DNA
gagaatgttggcgaattttctctgcggggcgtttgtgtttctgacggaaaatcgaaggagacagagagcccatga

SEQ ID NO: 658498 - DNA, 75 bp, synthetic construct
  source 1..75: mol_type = other DNA
gagctgaaaaaactgcaacagtctctcggcattacgtttatcttcgttacccacgatcagggcgaggcattatca

SEQ ID NO: 658499 - DNA, 75 bp, synthetic construct
  source 1..75: mol_type = other DNA
cagccacgcactatcaaacatctattccgccgctgttttcagctatctggcggatgatctgcacgagcttcaaca

SEQ ID NO: 658500 - DNA, 75 bp, synthetic construct
  source 1..75: mol_type = other DNA
aacgtcatttctctgttctgttcattgactgggaggcccagtatcggtgcaccattgaacatattcagaagatgc

SEQ ID NO: 658501 - DNA, 75 bp, synthetic construct
  source 1..75: mol_type = other DNA
ggatgacattcccgatgaacaggagaatgacctgggctgccgggatatcccgtcctggcgacgtatctgtaagac

SEQ ID NO: 658502 - DNA, 75 bp, synthetic construct
  source 1..75: mol_type = other DNA
gttccggcattttcttcctggtttgccggtaaccggtgtggagtggcaatactgacaggtgtccgtgctgatgaa

SEQ ID NO: 658503 - DNA, 75 bp, synthetic construct
  source 1..75: mol_type = other DNA
cgtattttcctttttatcggtatgcaatgacttttgaggaatttgttccggcattttcttcctggcttgccggta

SEQ ID NO: 658504 - DNA, 75 bp, synthetic construct
  source 1..75: mol_type = other DNA
agcggtgcctattttgccctgcgtaaacgtatatcaaaaccagcccatcatacctggcgcagctatgcgatgttc

SEQ ID NO: 658505 - DNA, 75 bp, synthetic construct
  source 1..75: mol_type = other DNA
gcattcaccctggtgccgattattctcatcgcactgtacctggcgttcgtgaaacgtctgggagcgttcgatgca

SEQ ID NO: 658506 - DNA, 75 bp, synthetic construct
  source 1..75: mol_type = other DNA
gctttatgggactggtgtcccagcgcaaactgagatatgccgatgataagccctggaccacggcatcgcctgaag

SEQ ID NO: 658507 - DNA, 75 bp, synthetic construct
  source 1..75: mol_type = other DNA
gatctcactcaaattcctaaagtgatcgaatactgtaagaaaaacccgcagaaaaatttgtataccttcaaaaat

SEQ ID NO: 658508 - DNA, 75 bp, synthetic construct
  source 1..75: mol_type = other DNA
atgacgtacgcagtggagtttgacaacgtatcgcgactgtatggtgatgtgcgcgcggtagatggtgtcagtatt

SEQ ID NO: 658509 - DNA, 75 bp, synthetic construct
  source 1..75: mol_type = other DNA
gaccggaacatatccgcctcaacacccccggcgaagtgcaagttaatggcacgatccaggcggtgcagtatcagg

SEQ ID NO: 658510 - DNA, 75 bp, synthetic construct
  source 1..75: mol_type = other DNA
gatgtggcccgcaggaaaaagcatcgtttctcagtattattcattgactgggaggcccagtaccagtgcaccatt

SEQ ID NO: 658511 - DNA, 75 bp, synthetic construct
  source 1..75: mol_type = other DNA
tgtctcagcgcaaactgagatatgccgatgataagccctggaccacggcatcgcctgaagggttttattacacca

SEQ ID NO: 658512 - DNA, 75 bp, synthetic construct
  source 1..75: mol_type = other DNA
agaacccgggctatctacaatcccctgtatgacctgatgcaccgtgccggtgtgccgttacgcaacatgcgtgtc

SEQ ID NO: 658513 - DNA, 75 bp, synthetic construct
  source 1..75: mol_type = other DNA
tattaacgccgatgcagctaatcatgttgtagatgaaattcaacaactgggtggtcaggcatttgcctgccgctg

SEQ ID NO: 658514 - DNA, 75 bp, synthetic construct
  source 1..75: mol_type = other DNA
agcagcggcacgcaatggcgcaagaagcgctggagaaagtggcgcttggttttgttcagcaacgtaagccgtcac

SEQ ID NO: 658515 - DNA, 75 bp, synthetic construct
  source 1..75: mol_type = other DNA
caactggatttcgtaaaagaaggcctaaacgaagggtttaaatttaccaacccgaacgtcaaagatgagtgtggt

SEQ ID NO: 658516 - DNA, 75 bp, synthetic construct
  source 1..75: mol_type = other DNA
tgttgcagcacacgccaatcagacgtctgggtcaaccgcaagatattgctaacgcggcgctgtttctgtgttcac

SEQ ID NO: 658517 - DNA, 75 bp, synthetic construct
  source 1..75: mol_type = other DNA
gtggacaggcatttgcctggcgttgtgatattacttccgaacaggaattatctgctctggcagactttgccatca

SEQ ID NO: 658518 - DNA, 75 bp, synthetic construct
  source 1..75: mol_type = other DNA
tcatctggtcagaaatatggcatttgacctgggtgaaaaaaatattcgggtgaatggcattgcgccgggggcaat

SEQ ID NO: 658519 - DNA, 75 bp, synthetic construct
  source 1..75: mol_type = other DNA
gaatggggccgtttaatgctgcacatccatgctgccctggaagcccgttgcgaacaaccgccagcatggctgcta

SEQ ID NO: 658520 - DNA, 75 bp, synthetic construct
  source 1..75: mol_type = other DNA
agggctatcaacacttctttgctctgctgggtgccgccagcgccgtcacaacgggtcacccggaagcgcgcaagc

SEQ ID NO: 658521 - DNA, 75 bp, synthetic construct
  source 1..75: mol_type = other DNA
acaaccgttggctggaacaggaaaccgaccgcatctttgattttggtaaaaattccgtagtgccgactggttttg

SEQ ID NO: 658522 - DNA, 75 bp, synthetic construct
  source 1..75: mol_type = other DNA
acccggcgcaccgcttccgcgcgttcggaggtacaccaggccactggatcgaatggggccgtttaatgctgcaca

SEQ ID NO: 658523 - DNA, 75 bp, synthetic construct
  source 1..75: mol_type = other DNA
catggctgctagaagatgccaaaggtctgtttaacgccaccgtgcgcgatgcctgggcacccgatggcgcggacg

SEQ ID NO: 658524 - DNA, 75 bp, synthetic construct
  source 1..75: mol_type = other DNA
gtcaccaccaaagtctgggacggcaaacaggatatttatcacctgctgcattgcctggtgatcccgcgtatcccg

SEQ ID NO: 658525 - DNA, 75 bp, synthetic construct
  source 1..75: mol_type = other DNA
gaccggaacatatccgcttcaacatccccggcgaagtgcaggccaatggcacgatccaggcggtgcaatatcagg

SEQ ID NO: 658526 - DNA, 75 bp, synthetic construct
  source 1..75: mol_type = other DNA
atgctgaaacagcaggatatgaccgaaaccgccagagtggtgtttaatgaattaagcgtcaccgaaccggcgaca

SEQ ID NO: 658527 - DNA, 75 bp, synthetic construct
  source 1..75: mol_type = other DNA
atgctaaaacagcaagatatgaccgaaaccgccagagtggtatttaatgaattaagcgtcaccgaaccggcgacc

SEQ ID NO: 658528 - DNA, 75 bp, synthetic construct
  source 1..75: mol_type = other DNA
gtcggggagattgcgcagaatacttacctttcacgcgaacgctgtcagttaatactgacccaactatcagcgggg

SEQ ID NO: 658529 - DNA, 75 bp, synthetic construct
  source 1..75: mol_type = other DNA
acccggcctgcggcacttcacgcaacacgctggagatgatccgtaacagcggtaacgaaccgaccattatttatt

SEQ ID NO: 658530 - DNA, 75 bp, synthetic construct
  source 1..75: mol_type = other DNA
ttatgttgcaacatccgatcctgattaaccgtccgattgtagtgacgccactgggaactaaactttgccgtcctt

SEQ ID NO: 658531 - DNA, 75 bp, synthetic construct
  source 1..75: mol_type = other DNA
gtcggggagattgcgcagaatacttacctttcacgcgaacgttgccagttaatactgactcagcttgttatggcg

SEQ ID NO: 658532 - DNA, 75 bp, synthetic construct
  source 1..75: mol_type = other DNA
atgaaccgctcggcgcgctggatctcaaattgcgtgagcagatgcaacttgagctgaaaaagctgcaacagtctc

SEQ ID NO: 658533 - DNA, 75 bp, synthetic construct
  source 1..75: mol_type = other DNA
ggttgtcgttttgtttcgccatgctgaacgttgcgatcgttcaaccaatcaatgcttgtcagataaaacaggtat

SEQ ID NO: 658534 - DNA, 75 bp, synthetic construct
  source 1..75: mol_type = other DNA
caataaaacgctggccagactggcacagcagcatccggttgtcgttttgtttcgccatgctgaacgttgcgatcg

SEQ ID NO: 658535 - DNA, 75 bp, synthetic construct
  source 1..75: mol_type = other DNA
cattcttgcgctcaccggcgtttagcgtaccggagtcggcccagcgttgggcaaatcaggtgcggcaagaaaatg

SEQ ID NO: 658536 - DNA, 75 bp, synthetic construct
  source 1..75: mol_type = other DNA
cgataaagatggattcgtttcgtgatgtctggatgctgcgtggcaaatatgttgcgtttgtactgatgggagagt

SEQ ID NO: 658537 - DNA, 75 bp, synthetic construct
  source 1..75: mol_type = other DNA
aaaccgccagagttgtgtttgatgaattaagcgttaccgaaccggcgacagtcggggagattgcgcagaatactt

SEQ ID NO: 658538 - DNA, 75 bp, synthetic construct
  source 1..75: mol_type = other DNA
tcccgcaaatccgcgcgagacgcagccgcactttttcgaatcccgattccctgagctgttaaagctgctcgatac

SEQ ID NO: 658539 - DNA, 75 bp, synthetic construct
  source 1..75: mol_type = other DNA
gtcacagcgcgctgcgccagggcgtggcaatggtgcagcaagatccggttgtgctggcggattccttcctggcga

SEQ ID NO: 658540 - DNA, 75 bp, synthetic construct
  source 1..75: mol_type = other DNA
cgccagcaatatggcaatgatgatcgcccgttacagagcggcaccattgacgtcgataatgtgtcgtttgcctat

SEQ ID NO: 658541 - DNA, 75 bp, synthetic construct
  source 1..75: mol_type = other DNA
cgactctgaagcgcctgttagcatacggttcgccgtggcgtaagccgctggggattgcggttctgatgatgtggg

SEQ ID NO: 658542 - DNA, 75 bp, synthetic construct
  source 1..75: mol_type = other DNA
ttaattgatacaactcaggcaaggccaattcagtattgcattaatgggacgtggtataacgcggggagtatttaa

SEQ ID NO: 658543 - DNA, 75 bp, synthetic construct
  source 1..75: mol_type = other DNA
atctgcattaattcttcactttaatataaatgctggtagctgtcctgccgtacaattccgtgtgaattataaaaa

SEQ ID NO: 658544 - DNA, 75 bp, synthetic construct
  source 1..75: mol_type = other DNA
atgatgtcgccagcctggcaactctgacaaaaatcgggcgggatattcttgcgaaatcgaccgttgccgccgtta

SEQ ID NO: 658545 - DNA, 75 bp, synthetic construct
  source 1..75: mol_type = other DNA
cgaagaacgcgtctggcaggcgctggaaaccgtgcaactggcgaagctggcacgcagtatgagcgacgggattta

SEQ ID NO: 658546 - DNA, 75 bp, synthetic construct
  source 1..75: mol_type = other DNA
tacgccgctgggcgagcaggggaataatctctccgtcgggcaaaagcaactgctggcactggcgcgcgtgctggt

SEQ ID NO: 658547 - DNA, 75 bp, synthetic construct
  source 1..75: mol_type = other DNA
caggggaataatctctccgtcgggcaaaagcaactgctggcactggcacgcgtgttggtggagacgccgcaaatc

SEQ ID NO: 658548 - DNA, 75 bp, synthetic construct
  source 1..75: mol_type = other DNA
tacaccgttgggtgagcagggcaataatctctcggtcgggcaaaagcagttgctggcgctggcgcgtgtactggt

SEQ ID NO: 658549 - DNA, 75 bp, synthetic construct
  source 1..75: mol_type = other DNA
ccggtggtgttggtcgtgatggtgatataccagcggtacagcacgcccattgtccgccgtgtacgtgcttatctg

SEQ ID NO: 658550 - DNA, 75 bp, synthetic construct
  source 1..75: mol_type = other DNA
cacagtcgctgttgtttaatcgggcggcggttggcgtggtacaacagttgcgaacggatgtgatggatgctgcgc

SEQ ID NO: 658551 - DNA, 75 bp, synthetic construct
  source 1..75: mol_type = other DNA
cgacaaacattcagcggtggcctttctggggaactgtccggcaatgccgctactgcaacaaagctgaaaacagca

SEQ ID NO: 658552 - DNA, 75 bp, synthetic construct
  source 1..75: mol_type = other DNA
taccgcgattaacaacatcaaaaaattctggtcgctgacagcgaaaggctgcatgttcggcaagaatatcaccag

SEQ ID NO: 658553 - DNA, 75 bp, synthetic construct
  source 1..75: mol_type = other DNA
gttaaggataactggatgcgcaatatctatgacagccgtggccgacagatacctattgaaataaaaaaagaacgg

SEQ ID NO: 658554 - DNA, 75 bp, synthetic construct
  source 1..75: mol_type = other DNA
tgatggtcgtacggacctttttaccccggagaacaccggcaagtcccataaccgccatgtcgcagtcgtcagtct

SEQ ID NO: 658555 - DNA, 75 bp, synthetic construct
  source 1..75: mol_type = other DNA
agcgagttgcagatttgcaactcggtcaatatagagccagttaacgttattcgtggcggaaataaccaggggacg

SEQ ID NO: 658556 - DNA, 75 bp, synthetic construct
  source 1..75: mol_type = other DNA
tgaatccggtgagcctgagagcgctgcgcagccgcagagtcctgccgccccggcacaacctgctcaggccccggc

SEQ ID NO: 658557 - DNA, 75 bp, synthetic construct
  source 1..75: mol_type = other DNA
gcatgttcggcaagaatatcaccagtcccgcaaatccgcgcgagacgcagccgcatttcttcgaatcccgattcc

SEQ ID NO: 658558 - DNA, 75 bp, synthetic construct
  source 1..75: mol_type = other DNA
atatacgcaggcagaatgtaactcaaggtttattacaggtattcgccttggcggtctgtcatctgttcagacatg

SEQ ID NO: 658559 - DNA, 75 bp, synthetic construct
  source 1..75: mol_type = other DNA
tttcggattaattataaaaatggcggtattttttatcgttcagcccgtgatggttatggttttgaagccgactgg

SEQ ID NO: 658560 - DNA, 75 bp, synthetic construct
  source 1..75: mol_type = other DNA
cgttaattattcatttttatatgggagaaggaagttgtcctgcagctcagtttcggattaattataaaaatggcg

SEQ ID NO: 658561 - DNA, 75 bp, synthetic construct
  source 1..75: mol_type = other DNA
atcttactggcgtagcggcagttggcgaaggagagttatttattgggtggagtgggaccagcggcggtcatgctc

SEQ ID NO: 658562 - DNA, 75 bp, synthetic construct
  source 1..75: mol_type = other DNA
actaatcgacaaacattcaacggcggcctttccggggaactgtccggcaatgccgctactgcgacaaaactgaaa

SEQ ID NO: 658563 - DNA, 75 bp, synthetic construct
  source 1..75: mol_type = other DNA
tggctggttcatgtcctctctgatgatctctaccgcgatgaagggcaaagcaccgtatcgtcaggtactgaccca

SEQ ID NO: 658564 - DNA, 75 bp, synthetic construct
  source 1..75: mol_type = other DNA
ggcaactcttatcacaatctgggtgttatttatcataaaggacttgcgggtaagaaagaccaaaaactttccctg

SEQ ID NO: 658565 - DNA, 75 bp, synthetic construct
  source 1..75: mol_type = other DNA
cgtgttaagaatggacgcatcagatggcttacagaagaggaatcaaagcgcctgtttgcagaaatagctcctcat

SEQ ID NO: 658566 - DNA, 75 bp, synthetic construct
  source 1..75: mol_type = other DNA
tggcaatgcgatcggagttcctcttaacgaaaccgcatgccagatattaagaaaacagcagggtctccataagag

SEQ ID NO: 658567 - DNA, 75 bp, synthetic construct
  source 1..75: mol_type = other DNA
cggatatctgccttatcgaagcggacagcagcagactctttatgcaccgctgctatgccgactggcagcatcgta

SEQ ID NO: 658568 - DNA, 75 bp, synthetic construct
  source 1..75: mol_type = other DNA
ggtatcttcatgacatgggcgacggttatgttggatgcagatcaagagaaggtaaggaggtcttattcttacttg

SEQ ID NO: 658569 - DNA, 75 bp, synthetic construct
  source 1..75: mol_type = other DNA
tgatgccgggtatgttaaggctacttaccttcttggggtgtattaccaacatggtaaaaatgtacaaaagagtta

SEQ ID NO: 658570 - DNA, 75 bp, synthetic construct
  source 1..75: mol_type = other DNA
agtggatttgcagccggaaccacacttattaccgcattatagagcattggtaaaagaagttaagaccaatggatt

SEQ ID NO: 658571 - DNA, 75 bp, synthetic construct
  source 1..75: mol_type = other DNA
tagatttggtttttactaagaggaataaagaaaagaccatcgtttccttacatcaaagaagatgcattgaagtta

SEQ ID NO: 658572 - DNA, 75 bp, synthetic construct
  source 1..75: mol_type = other DNA
ctgataccactctgcttgatggggatgcgcgacaattatatgcaggggcaaagctcgggaaatttggtgttgaga

SEQ ID NO: 658573 - DNA, 75 bp, synthetic construct
  source 1..75: mol_type = other DNA
cttcctggaggaccgctatatcaaaaggttagaggacgcagggatcaaacccccagtgaagtcaccattgtcctg

SEQ ID NO: 658574 - DNA, 75 bp, synthetic construct
  source 1..75: mol_type = other DNA
taattctgataggtaatctgggtcagaacccggatattcgctatatgccagacggcggcgctgtggccaacattg

SEQ ID NO: 658575 - DNA, 75 bp, synthetic construct
  source 1..75: mol_type = other DNA
gcttttctggttatgttctgtgtgctcggatggggaatgaaaacaatactcgacaggaactacaacgccacagcg

SEQ ID NO: 658576 - DNA, 75 bp, synthetic construct
  source 1..75: mol_type = other DNA
atgagtaagaaaaaaatcgctaccgaagccgccgccaccgaaagctataccgtgttctacaggggtgaagccgag

SEQ ID NO: 658577 - DNA, 75 bp, synthetic construct
  source 1..75: mol_type = other DNA
gcaacccggatggtaagcatctgatcattctgcataccaaaggttcgcactttaactacacccagcgttacccgc

SEQ ID NO: 658578 - DNA, 75 bp, synthetic construct
  source 1..75: mol_type = other DNA
gccagagtcattgaagagttcacgtatcgctacaacgtggaacacatcggcattgatgcgacgggcgggcacggg

SEQ ID NO: 658579 - DNA, 75 bp, synthetic construct
  source 1..75: mol_type = other DNA
gactggctgttgagctgcaaatcctcagggatgaattactctcaggccactaccagcccttgcccgccagacggg

SEQ ID NO: 658580 - DNA, 75 bp, synthetic construct
  source 1..75: mol_type = other DNA
gtgaatttactgacagtgagtactgatctcatcagtatctttttattcacgacactgtttctattttttgcccgc

SEQ ID NO: 658581 - DNA, 75 bp, synthetic construct
  source 1..75: mol_type = other DNA
tttggctcctgggagatggtgctcggaccgtttggttacttcctgacgctatttgccgtctgggcggccattaat

SEQ ID NO: 658582 - DNA, 75 bp, synthetic construct
  source 1..75: mol_type = other DNA
gctgtttggccgccgcagctggcgtattctggcatcgctggtggtgctcttttccgcaggtgccagctattacat

SEQ ID NO: 658583 - DNA, 75 bp, synthetic construct
  source 1..75: mol_type = other DNA
ttcgaaaggtgtccaggcagcgataattaaagccgataaggctggtattcccgttatcaccgttgacgttgccgc

SEQ ID NO: 658584 - DNA, 75 bp, synthetic construct
  source 1..75: mol_type = other DNA
tgccgaaaccttcggggacgtctttgcggcagatgccggcgacatcgatattcgcgacagtattcacagcgaccg

SEQ ID NO: 658585 - DNA, 75 bp, synthetic construct
  source 1..75: mol_type = other DNA
ccgcccgggggattttttatgtcggttaccgccgtatcaacgatatcggtcgtgagctctggctgagcatggatg

SEQ ID NO: 658586 - DNA, 75 bp, synthetic construct
  source 1..75: mol_type = other DNA
tcgactgctgatgaaggctgtacgccgcaggatcagtgacgcacgtttcatgactctgctgtggaaaaccatcaa

SEQ ID NO: 658587 - DNA, 75 bp, synthetic construct
  source 1..75: mol_type = other DNA
ctgcagcgtcaggacggcatatttggtgaatcatggattgacagcccacaaatcagcatcctgatggaaagcaag

SEQ ID NO: 658588 - DNA, 75 bp, synthetic construct
  source 1..75: mol_type = other DNA
atgaacggaggaaaatcccgcagtgaaatcattctgagtggtgaaaaaacgcgtcctcagtcaaatacctggaat

SEQ ID NO: 658589 - DNA, 75 bp, synthetic construct
  source 1..75: mol_type = other DNA
atcagtaccagaaacgctataccgcagacctagatttactggtgagtcagttgatggccattgtccaggccgacc

SEQ ID NO: 658590 - DNA, 75 bp, synthetic construct
  source 1..75: mol_type = other DNA
caatggatttcaccctgcccgttcttcaacgtactggcgggctggatatggtcccggcggcaattgttcacggtt

SEQ ID NO: 658591 - DNA, 75 bp, synthetic construct
  source 1..75: mol_type = other DNA
atgttttctgggctgttaatcattctggttcccctgattgtgggttacctcattccgcttcgccaacaagctgcg

SEQ ID NO: 658592 - DNA, 75 bp, synthetic construct
  source 1..75: mol_type = other DNA
caaatctttttatcggcaagccgccgccaggcgtaccagtttcgaagtttcattcgctcggccgctgaagaagta

SEQ ID NO: 658593 - DNA, 75 bp, synthetic construct
  source 1..75: mol_type = other DNA
ctacttctccacgccatccaccgaaacgcacgaggcatacgcctactggaacggcgaccgctggaacgagaaaaa

SEQ ID NO: 658594 - DNA, 75 bp, synthetic construct
  source 1..75: mol_type = other DNA
cctcatcgctttttttccgcgtaatacctctctggcggtagatccctgccgccaaaattgcgctaaatcaatctc

SEQ ID NO: 658595 - DNA, 75 bp, synthetic construct
  source 1..75: mol_type = other DNA
ttttttaatgatctggcccgtgagctgattgctattatgttgatccctgggctgattcgccgcagccgctctact

SEQ ID NO: 658596 - DNA, 75 bp, synthetic construct
  source 1..75: mol_type = other DNA
tgaaagggcttacgcgcacttacttttcaacgccatcgagcgaaaaccatgaagcctacccgttctggacgggca

SEQ ID NO: 658597 - DNA, 75 bp, synthetic construct
  source 1..75: mol_type = other DNA
cagcgcgtcacgcaatctattgatgcccggttatgccaaatcgcgatgaaaccaacgaagaccggcagcgatctg

SEQ ID NO: 658598 - DNA, 75 bp, synthetic construct
  source 1..75: mol_type = other DNA
gcgaaaactcccttgacgaatacgccaacctgtacggatgtaccttcgttaaagcaggggaacgcgccttcgact

SEQ ID NO: 658599 - DNA, 75 bp, synthetic construct
  source 1..75: mol_type = other DNA
cagcccggaggaatacgacaacctgtacggatgccagttcatcaaaagcggtgaaagcgcctttgactataacag

SEQ ID NO: 658600 - DNA, 75 bp, synthetic construct
  source 1..75: mol_type = other DNA
cctgatccaggcattcgcatcggtgcgaaaaatacagacacccggcggctatatcacctatgacaccgaccgctc

SEQ ID NO: 658601 - DNA, 75 bp, synthetic construct
  source 1..75: mol_type = other DNA
atgcatgaggcgtatcagttctggacgggggaccgctggaacagcgaacagccacgctcaaaacgcagtgagttt

SEQ ID NO: 658602 - DNA, 75 bp, synthetic construct
  source 1..75: mol_type = other DNA
cagcggactgcggcgcacctacttctccacgccatccaccgaaacgcacgaggcatacgcctactggaacggcga

SEQ ID NO: 658603 - DNA, 75 bp, synthetic construct
  source 1..75: mol_type = other DNA
acgactgtgaaaaagccgttgccggaaaataaagaaggatctgcaaatagggatctggatgatgaatggaaacgc

SEQ ID NO: 658604 - DNA, 75 bp, synthetic construct
  source 1..75: mol_type = other DNA
ctggggagaacggctgctggatacctccattcagatgttgcgcaacgtgccgcatctggcgctgatcccgctggt

SEQ ID NO: 658605 - DNA, 75 bp, synthetic construct
  source 1..75: mol_type = other DNA
cggctgtgtaccgattatcacggcggtatctggaatttttcgacgctcagtaacggtggcgcttttatgactccc

SEQ ID NO: 658606 - DNA, 75 bp, synthetic construct
  source 1..75: mol_type = other DNA
taaggctgccgcccggcgcgaacttatcaagctgataatggcgacgaaaggaagttctgctggtggtgcaactga

SEQ ID NO: 658607 - DNA, 75 bp, synthetic construct
  source 1..75: mol_type = other DNA
accagtggcgtgatattgcagaattcgataaggcagcggcacaggcctccagagatggcaaacccgagccagaat

SEQ ID NO: 658608 - DNA, 75 bp, synthetic construct
  source 1..75: mol_type = other DNA
gtgaaaataatcttgatggcgttaaacgagaactggttgctgtggttcgtcgtgctctggaactagaagtgcgca

SEQ ID NO: 658609 - DNA, 75 bp, synthetic construct
  source 1..75: mol_type = other DNA
gcgtggtggtggtgcgtttaaaaacgtgctcattcatgcgcccaacgggggcaaagagggggtgcaaattttgcc

SEQ ID NO: 658610 - DNA, 75 bp, synthetic construct
  source 1..75: mol_type = other DNA
gctgatgcgctcaggaaagaatcatcgctcagtgcattcacatttgatggtccttatcgcctgaccgggcatgac

SEQ ID NO: 658611 - DNA, 75 bp, synthetic construct
  source 1..75: mol_type = other DNA
caaccatgcttgctgtcattaacgaaccaattggcggcgaaggagaaaaacgagcgtttcacggttatggagttc

SEQ ID NO: 658612 - DNA, 75 bp, synthetic construct
  source 1..75: mol_type = other DNA
atcagccacggcgaccttgcgtgggcaaccatgcttgctgtcattaacgaaccaattggcggcgaaggagaaaac

SEQ ID NO: 658613 - DNA, 75 bp, synthetic construct
  source 1..75: mol_type = other DNA
gaggctgtttatcagatagtgaagcggtttttccctgctgctattccgtacaccttcacgctgtcatcaaaacgg

SEQ ID NO: 658614 - DNA, 75 bp, synthetic construct
  source 1..75: mol_type = other DNA
ggcgcaacaactgggtggccacgtccgtaaaggggaggtggccacgctggcggtgatttacaaagactggaaaaa

SEQ ID NO: 658615 - DNA, 75 bp, synthetic construct
  source 1..75: mol_type = other DNA
tgattgttgaaaccagtaacggaacagactttttcacagctaaaaactggttgagggcgaacggtgcaaacggtg

SEQ ID NO: 658616 - DNA, 75 bp, synthetic construct
  source 1..75: mol_type = other DNA
cactggcagagcaggcggaagtggtattggtcgttggttcgaaaaattcatccaactccaatcgtctggcggaac

SEQ ID NO: 658617 - DNA, 75 bp, synthetic construct
  source 1..75: mol_type = other DNA
gtttttgattgacgatgcgacagatatccaggaagagtgggtgaaagaggcgaaatgcgtcggcgtgactgctgg

SEQ ID NO: 658618 - DNA, 75 bp, synthetic construct
  source 1..75: mol_type = other DNA
taccctgatgctggtcatcgagttcgcacttggcatggttgtctggtttctgattgcaacgggggagttttcccg

SEQ ID NO: 658619 - DNA, 75 bp, synthetic construct
  source 1..75: mol_type = other DNA
atgccgcgtcacgtcttgacccggagacgtataagaaagtccatgatgcaggcttccgctgggcaccaaaacagg

SEQ ID NO: 658620 - DNA, 75 bp, synthetic construct
  source 1..75: mol_type = other DNA
tgggagtacaaaacaaagtgctcaaaattgtcgggctcatggcgtttaacggtattaatttcgcttataataatc

SEQ ID NO: 658621 - DNA, 75 bp, synthetic construct
  source 1..75: mol_type = other DNA
aggtccaacactaaccggttttaattccgcttacagaactgcatcaaccagcgacacggtatcgatgaattacag

SEQ ID NO: 658622 - DNA, 75 bp, synthetic construct
  source 1..75: mol_type = other DNA
atgaaattacccaacggtaaaattctgcaatatggtcgaggtgaggctatgccgaaattatcgacgcaaacaatg

SEQ ID NO: 658623 - DNA, 75 bp, synthetic construct
  source 1..75: mol_type = other DNA
ctgcgtttgttcaggccgctattaccgctctgattaacggcgcgccagacacgctggacacactgaaagaaattg

SEQ ID NO: 658624 - DNA, 75 bp, synthetic construct
  source 1..75: mol_type = other DNA
tggaaactgacggtcaaaaacgaagagaaactctcctttatgacccagaccacgctgtcggtggatgacacgtct

SEQ ID NO: 658625 - DNA, 75 bp, synthetic construct
  source 1..75: mol_type = other DNA
taacgacggtatcgctgccgggtattacgcggcagtcttcagctatctggccgaagacctggcagaactgcaaag

SEQ ID NO: 658626 - DNA, 75 bp, synthetic construct
  source 1..75: mol_type = other DNA
aagggcaccgggtggcggtgcactatggttatgacagtaaaggccgcctcgccagtgaacacctgacggtgcatc

SEQ ID NO: 658627 - DNA, 75 bp, synthetic construct
  source 1..75: mol_type = other DNA
cgcatcaatctctgcgaacaactggacgggccgctggaagggtttggttcgcgtttctggtcgttagtcacgcaa

SEQ ID NO: 658628 - DNA, 75 bp, synthetic construct
  source 1..75: mol_type = other DNA
agtcaccgctttacagtttcttgagtcagtacaactcgttataattgatgaaagtaataagaaattaagcatcac

SEQ ID NO: 658629 - DNA, 75 bp, synthetic construct
  source 1..75: mol_type = other DNA
atggcgatagaagttccggcaactcaggtttccgtgtcggatgcggtgtctacctatctgtttaacagccaactg

SEQ ID NO: 658630 - DNA, 75 bp, synthetic construct
  source 1..75: mol_type = other DNA
aggtcagtcatttccgcccggatctggtggtatcggcttacagcgtcaccgggcaaaatccgtggacggagatgt

SEQ ID NO: 658631 - DNA, 75 bp, synthetic construct
  source 1..75: mol_type = other DNA
atttttccggttgtaaagattattgcgggaggattatatctgcgaattattacccgcaagggagaggcagttgca

SEQ ID NO: 658632 - DNA, 75 bp, synthetic construct
  source 1..75: mol_type = other DNA
atgacggggaggtttcccgctggttatcgcgtaaaagggtgacgttccccgtcgtgaatgatagcggcggtgaga

SEQ ID NO: 658633 - DNA, 75 bp, synthetic construct
  source 1..75: mol_type = other DNA
gcacaggctcaaaacggttttggtgcatttaaaaatattgagtactcctgtacgttcaatgctgatactggtgaa

SEQ ID NO: 658634 - DNA, 75 bp, synthetic construct
  source 1..75: mol_type = other DNA
tttattcaacaaagccccggcacagataaacttgtgcagattatcgcaacttcagccactattggcgaagactct

SEQ ID NO: 658635 - DNA, 75 bp, synthetic construct
  source 1..75: mol_type = other DNA
cccggacggcaggcagtacgtttgagtgagttgctcaatgttgccagaagaacctggccagatattaatcaccgt

SEQ ID NO: 658636 - DNA, 75 bp, synthetic construct
  source 1..75: mol_type = other DNA
tcgctgatctcgcgggcgttacagaacgtgatgtcaaagtggttcgcggctatcgacaaataccgcgggtatcgg

SEQ ID NO: 658637 - DNA, 75 bp, synthetic construct
  source 1..75: mol_type = other DNA
gcccggtatcgccgaagccggtggcgatactaatccccgcgctgtcggccagcacagcaaagtccgcttcaagaa

SEQ ID NO: 658638 - DNA, 75 bp, synthetic construct
  source 1..75: mol_type = other DNA
ttgagtcgggttatcagctggatattaaacaacaagctgaattttacagtccaaagcaagtgtggcgttgcccct

SEQ ID NO: 658639 - DNA, 75 bp, synthetic construct
  source 1..75: mol_type = other DNA
ctttacggattcgcgtcagggtaccgctcgcatttcagcccgcttacagcaggatgccgataaagcgacgttgcg

SEQ ID NO: 658640 - DNA, 75 bp, synthetic construct
  source 1..75: mol_type = other DNA
cgctaccgccgcacaatggataataatttccgcctggtgagtgtgtatatcaacgacatgaaaatcacggaaatc

SEQ ID NO: 658641 - DNA, 75 bp, synthetic construct
  source 1..75: mol_type = other DNA
ccgccccggaagctgccagccctgtgcagatgtaccgcgcgacctactcaccggatgacaacaaactgcgcctgt

SEQ ID NO: 658642 - DNA, 75 bp, synthetic construct
  source 1..75: mol_type = other DNA
gacatgacgcagtatggcggtagcattgttcagggttcagccggggtgcgcattggtgcccccaccggcgtggcc

SEQ ID NO: 658643 - DNA, 75 bp, synthetic construct
  source 1..75: mol_type = other DNA
ctaccccattctgctgctcgacgaacctaccgcctcgctggacgccaaaaacagcgccgcggtggtggaactgat

SEQ ID NO: 658644 - DNA, 75 bp, synthetic construct
  source 1..75: mol_type = other DNA
atgccgcgtcacgccttgacccggagacgtataagaaagtccatgatgccggtttccgctgggcaccaaaacagg

SEQ ID NO: 658645 - DNA, 75 bp, synthetic construct
  source 1..75: mol_type = other DNA
ggcgcggtcggcactgcttcacgcgaagtataaagaacgtccggatgttcgctggcgtcgtatcaaaaaaatcga

SEQ ID NO: 658646 - DNA, 75 bp, synthetic construct
  source 1..75: mol_type = other DNA
gcagatgtaccgcgcgacctactcaccggatgacaacaaactgcgcctgtatgccgagtcacgcctcgacccgga

SEQ ID NO: 658647 - DNA, 75 bp, synthetic construct
  source 1..75: mol_type = other DNA
gcgatcattcgtgccgacagcgtgctgtctgtggtatctgcatcgtcagcagaaacgctcgctgaggctgggggg

SEQ ID NO: 658648 - DNA, 75 bp, synthetic construct
  source 1..75: mol_type = other DNA
tcaaccgaaaactgaaaggctgggccatgttctataagttcgttgattttaaggccaaagtcttcagttatatcg

SEQ ID NO: 658649 - DNA, 75 bp, synthetic construct
  source 1..75: mol_type = other DNA
caaataccgtacaggtatcgcttccctgatgaggtggtggtgtaaatcaccgaaaccgggtcagagcaaaacgtg

SEQ ID NO: 658650 - DNA, 75 bp, synthetic construct
  source 1..75: mol_type = other DNA
tttctgccatcacccacaatgcgcggttgagcttaatgtcggtatcaatgctgtgaatggcccgggtatggatac

SEQ ID NO: 658651 - DNA, 75 bp, synthetic construct
  source 1..75: mol_type = other DNA
gtgattttcactacgctctcatatggcttccggcctgagcgcagtgtccaccacgcgatccgcacggtgaaatta

SEQ ID NO: 658652 - DNA, 75 bp, synthetic construct
  source 1..75: mol_type = other DNA
tgtcctcatcgtcaaaggcaccaaagcacaggcggaagccatcagggaggagtgtcggggtgtgctcgaaggcag

SEQ ID NO: 658653 - DNA, 75 bp, synthetic construct
  source 1..75: mol_type = other DNA
gcttatgatctttcagctctgaatgttcaggatagtccatggttaattgtgggaaaacttgatggtacagctcgc

SEQ ID NO: 658654 - DNA, 75 bp, synthetic construct
  source 1..75: mol_type = other DNA
tgccaaacaagatctggcaacgggaggcgtacaagttctgtcgtccacgttcctggatgaaacgccaagtctggc

SEQ ID NO: 658655 - DNA, 75 bp, synthetic construct
  source 1..75: mol_type = other DNA
cggcgaggtcatcgtgcactcagaccagggaagccagtacggcagtgacgactggcagcgcttctgccgggctaa

SEQ ID NO: 658656 - DNA, 75 bp, synthetic construct
  source 1..75: mol_type = other DNA
tcgatctcttcgcccgtaacgtggtcggctggtcgatgaagcccactctctcacgcgaactggcgctggatgcac

SEQ ID NO: 658657 - DNA, 75 bp, synthetic construct
  source 1..75: mol_type = other DNA
atgacattagcagcaatcaccatgaccgccccggaagccgccagccctgtgcagatgtaccgcgcgacctactca

SEQ ID NO: 658658 - DNA, 75 bp, synthetic construct
  source 1..75: mol_type = other DNA
gaccaggccggtcgtccgcaggtttataaagtgaatatcaacggcggtgcgccacaacgtattacctgggaaggt

SEQ ID NO: 658659 - DNA, 75 bp, synthetic construct
  source 1..75: mol_type = other DNA
ctgaatttggtttctacagatgggcgtttcaaagcgcgtcttccggcaactgatggacaggtcaaattccctgcc

SEQ ID NO: 658660 - DNA, 75 bp, synthetic construct
  source 1..75: mol_type = other DNA
actttcatacatttttgatgctgtttctggtatcgttagttcttattagtgcaaaaataaagtcgaatggcctgt

SEQ ID NO: 658661 - DNA, 75 bp, synthetic construct
  source 1..75: mol_type = other DNA
cctattaatgcctatattacttcacatggcgatgaatgtagccatagcaggaatacaatatctggcttatatcaa

SEQ ID NO: 658662 - DNA, 75 bp, synthetic construct
  source 1..75: mol_type = other DNA
aacagtgggactttgcccaatggccattatttaaagagttgctccagtttgcctcctccggtgggaatgttgagt

SEQ ID NO: 658663 - DNA, 75 bp, synthetic construct
  source 1..75: mol_type = other DNA
actttcgtacatttttgatgctatttctggtatcgttagttcttattagtgcaaaaataaagtcgaatggcctgt

SEQ ID NO: 658664 - DNA, 75 bp, synthetic construct
  source 1..75: mol_type = other DNA
actttcctacatttttgatgatctttctggtatcgttagttcttattagtgcaaaaataaagtcgaatggcctgt

SEQ ID NO: 658665 - DNA, 75 bp, synthetic construct
  source 1..75: mol_type = other DNA
actttcttacatttttgatgctttttctggtatcgttagttcttattagtgcaaaaataaagtcgaatggcctgt

SEQ ID NO: 658666 - DNA, 75 bp, synthetic construct
  source 1..75: mol_type = other DNA
ggaaggtacaaggatgaacagcacggcaaggatttcacgctgtaccagatggacagcctgcgcagtgatgcggaa

SEQ ID NO: 658667 - DNA, 75 bp, synthetic construct
  source 1..75: mol_type = other DNA
atgaaatttccaaaaacgcccgtacaggggcagggcttcgttcggcctgaaaaccagaatctgcaaaattttggt

SEQ ID NO: 658668 - DNA, 75 bp, synthetic construct
  source 1..75: mol_type = other DNA
ttaggccaggactaccaccagcggaaagctgaattaattcgcctttcgcaacgctggttagcccgccgcatggag

SEQ ID NO: 658669 - DNA, 75 bp, synthetic construct
  source 1..75: mol_type = other DNA
gaagaacagctgcgggcgcaattagtcacaccacaaaatgatcctgatcaggtggctccggtcgctccagaacct

SEQ ID NO: 658670 - DNA, 75 bp, synthetic construct
  source 1..75: mol_type = other DNA
aggggcagggctttgttcggcctgaaaaccagaatctgcaaaatttcggcgaaattatcccggttatttccggcg

SEQ ID NO: 658671 - DNA, 75 bp, synthetic construct
  source 1..75: mol_type = other DNA
gcgttgcataaagcgctgggggtgggccgcgactttactaactggattaaaggccgaattgaccagtacggtttt

SEQ ID NO: 658672 - DNA, 75 bp, synthetic construct
  source 1..75: mol_type = other DNA
cgtgctgggtggcatgactgcaaaacagtgggcacaggcgaacggcattacaggcgaaccacgcgaccacatgag

SEQ ID NO: 658673 - DNA, 75 bp, synthetic construct
  source 1..75: mol_type = other DNA
cagcgaggatgaggggctggtcacccactggcactatgacgaagcagaccgcatcacacagcgaacggtgaatgg

SEQ ID NO: 658674 - DNA, 75 bp, synthetic construct
  source 1..75: mol_type = other DNA
ggtgacggtgcattacgggtatgatgagaaaggccgcctgaccggtgagcgccagacggtgcatcacccgcagac

SEQ ID NO: 658675 - DNA, 75 bp, synthetic construct
  source 1..75: mol_type = other DNA
tcaaaatgcgcaatcgccatgttctgcgcaggcatttcctgcagacaacaacggttacgcgccgccgccgtgtcg

SEQ ID NO: 658676 - DNA, 75 bp, synthetic construct
  source 1..75: mol_type = other DNA
caatgaattttctggttatactcatgttatggttataggtggtggcgcagaattaatatgcgatgcagtaaaaaa

SEQ ID NO: 658677 - DNA, 75 bp, synthetic construct
  source 1..75: mol_type = other DNA
agatggctgtacatgctaatacaagagtgagctcattccaggctgacaatatcattgtgcaccgtaatgaacctg

SEQ ID NO: 658678 - DNA, 75 bp, synthetic construct
  source 1..75: mol_type = other DNA
gtgtgatccaaatatcggcgtgtccctgattacatccggggttaaggaacagatggctgtacatgctaatacaag

SEQ ID NO: 658679 - DNA, 75 bp, synthetic construct
  source 1..75: mol_type = other DNA
agctgagcaaaatcagcccgcgcttcaccatcgcagcgtccttcggtaacgtacacggtgtttacaagccgggta

SEQ ID NO: 658680 - DNA, 75 bp, synthetic construct
  source 1..75: mol_type = other DNA
aatggcgtggatatacgcaacatacgcaccagagttctggagatgttgtcgtaccgtcgccgcgtgcagatgtac

SEQ ID NO: 658681 - DNA, 75 bp, synthetic construct
  source 1..75: mol_type = other DNA
accaccagcaggcaaacaggaggccacgcatccggacagcgtgatagccgaaaattacgcgagtgtggtggctga

SEQ ID NO: 658682 - DNA, 75 bp, synthetic construct
  source 1..75: mol_type = other DNA
gtcataccgtcgccgcgtgcagatgtaccaggagaaagaaaaaattacttaccactggaagaagccggagcggtt

SEQ ID NO: 658683 - DNA, 75 bp, synthetic construct
  source 1..75: mol_type = other DNA
atgaccgaagccgaaatgctcaaaatgattcgctgcattaccggagccagccaggcagcaggcaaacaggaggcc

SEQ ID NO: 658684 - DNA, 75 bp, synthetic construct
  source 1..75: mol_type = other DNA
tactaaaaataatccgccgcgttaccggaatcagccaggaagcaggcaaacaggaggccacgcagccggacagcg

SEQ ID NO: 658685 - DNA, 75 bp, synthetic construct
  source 1..75: mol_type = other DNA
ttacgatgataaataccggggccggatggtggcgcaccgtcacacgggccggccggaaatccgttaccgttacga

SEQ ID NO: 658686 - DNA, 75 bp, synthetic construct
  source 1..75: mol_type = other DNA
acttaccgccacgccgcaggtcgacaaagtggtgttgtcacggttgattgatatcaccactgacgccgccattga

SEQ ID NO: 658687 - DNA, 75 bp, synthetic construct
  source 1..75: mol_type = other DNA
ttccgcgcgtcgtcagccggatgaagtgctcgatcgcgaagcgggtaatcgtctgctggcgtcagaaaaagatcg

SEQ ID NO: 658688 - DNA, 75 bp, synthetic construct
  source 1..75: mol_type = other DNA
atcaggccgcgacccaggttattgctgaactggagccgttcgaccgcgaactgtttggcggcattgttggctggt

SEQ ID NO: 658689 - DNA, 75 bp, synthetic construct
  source 1..75: mol_type = other DNA
gcctccacgcatgtggtgtgcgatcctacccgtacccgcaagttacttctcaaccaacgcgaactggactcattg

SEQ ID NO: 658690 - DNA, 75 bp, synthetic construct
  source 1..75: mol_type = other DNA
aaatggtgaaccaagctataacctgtttggcgtcaaagcctccggcaactggaaaggaccggtgactgaaattac

SEQ ID NO: 658691 - DNA, 75 bp, synthetic construct
  source 1..75: mol_type = other DNA
tgacgaccgccgcgagtgcggagcagggggcgcaggccctacaggacgcgggctatgccaccgatcctcactatg

SEQ ID NO: 658692 - DNA, 75 bp, synthetic construct
  source 1..75: mol_type = other DNA
tgtgggaatgaattatcaactatatatccgtaactacagccgtaacactaactacgagattgttgccacggttga

SEQ ID NO: 658693 - DNA, 75 bp, synthetic construct
  source 1..75: mol_type = other DNA
ttgtttcattgttctggaagagttgcgctggggggcgtttggtgatgcctgccgtctgggaagcccgcaagcggc

SEQ ID NO: 658694 - DNA, 75 bp, synthetic construct
  source 1..75: mol_type = other DNA
cccaacgctggcaaaccgtcgcgttggggatgccacggctctgttcagcacaacgtctggcgggggcaatggtcg

SEQ ID NO: 658695 - DNA, 75 bp, synthetic construct
  source 1..75: mol_type = other DNA
gcctcttcgaccgttccgacgggcggggatcatgctgattttttaagttggctgggaaagtggaccacggcagat

SEQ ID NO: 658696 - DNA, 75 bp, synthetic construct
  source 1..75: mol_type = other DNA
aagacaccggagaaaacaactgaccagacattgattcgaaagttaccagacggagaaatacgccgctacgacaga

SEQ ID NO: 658697 - DNA, 75 bp, synthetic construct
  source 1..75: mol_type = other DNA
atcagagcgagcaaatttttacccgctggcgtgctggggcgtataacgcctggtcgttgcctgggcgctgtttta

SEQ ID NO: 658698 - DNA, 75 bp, synthetic construct
  source 1..75: mol_type = other DNA
tcccggagctcccccagcaaattgccgccttgtatgagttgttttcagcccgttgtcgctggaaggaaaaggcgt

SEQ ID NO: 658699 - DNA, 75 bp, synthetic construct
  source 1..75: mol_type = other DNA
attctgaagcctatcagggttgccattgtggcgatgcttcttgccccggcagaaccatggctgatgttatgcaac

SEQ ID NO: 658700 - DNA, 75 bp, synthetic construct
  source 1..75: mol_type = other DNA
tcccgttctggatggacaaaggcgagctggcaaagttgctgaccgcctgcaaaaagttctggcaatggctgtatg

SEQ ID NO: 658701 - DNA, 75 bp, synthetic construct
  source 1..75: mol_type = other DNA
cactttcctgaaagggcgagtagggcgcaaagtggcggatttctttatggatttcctcggggccagcgaagggtt

SEQ ID NO: 658702 - DNA, 75 bp, synthetic construct
  source 1..75: mol_type = other DNA
atagtatcaatgcggcaccgaccactcgccattattaccatcagtggttttcccctcctggagccccgacaggcg

SEQ ID NO: 658703 - DNA, 75 bp, synthetic construct
  source 1..75: mol_type = other DNA
cgcatgacgatatcacaactggagagagcgacgggagcaggctggcattcagtcagacgttgccttgtggatgta

SEQ ID NO: 658704 - DNA, 75 bp, synthetic construct
  source 1..75: mol_type = other DNA
caggcattacctttgttgagaggtttttcaattaatgatttatctggcgatcttgcttgggtaaaatacaaaaac

SEQ ID NO: 658705 - DNA, 75 bp, synthetic construct
  source 1..75: mol_type = other DNA
ggccggttgttccagtaatgcgcagtataatagcagtgcatcgggcaatgtcggcaccgcctggggtggggatgt

SEQ ID NO: 658706 - DNA, 75 bp, synthetic construct
  source 1..75: mol_type = other DNA
atattgtgaatgccggagattctttagcgattaaaggattccgcaaagataaacataccgaagcggcttttcagt

SEQ ID NO: 658707 - DNA, 75 bp, synthetic construct
  source 1..75: mol_type = other DNA
ttttatcgtttaaatcaatatttgcgtcttataagattgcaaaaattttaagaaaattaaatgcatcagtagtaa

SEQ ID NO: 658708 - DNA, 75 bp, synthetic construct
  source 1..75: mol_type = other DNA
tgctggttggattaattgtactgctggccggttgcgccagtaatgcgcagtataatagtagtccatcgggtaatg

SEQ ID NO: 658709 - DNA, 75 bp, synthetic construct
  source 1..75: mol_type = other DNA
gcaaaacgcgatgccaccgtgctctggacaagcctttccggcagataacaatggctatgcgccgccaccgtgtcg

SEQ ID NO: 658710 - DNA, 75 bp, synthetic construct
  source 1..75: mol_type = other DNA
atgaaaaaatggaaagtacgtagcgcgttggtggcattagtcgtgctgctggccggttgttccagtaatgcgcag

SEQ ID NO: 658711 - DNA, 75 bp, synthetic construct
  source 1..75: mol_type = other DNA
ttgttaatcaagaaattgtaacttacacatcaaccatttaccctgtctttataaatctaattgataacgcaatat

SEQ ID NO: 658712 - DNA, 75 bp, synthetic construct
  source 1..75: mol_type = other DNA
acagtttaaagaaatgcttgaaaatttcttcatcgaaatcgcaagagatttctttaaggacgatggcgatatgtc

SEQ ID NO: 658713 - DNA, 75 bp, synthetic construct
  source 1..75: mol_type = other DNA
caacgtgcgggggttttctctctccagcaaccaatgccaccagggataaagcccccgcaacattgcgcctcaccg

SEQ ID NO: 658714 - DNA, 75 bp, synthetic construct
  source 1..75: mol_type = other DNA
ctgcatggcatgatttgcgcttttggacgggagattcagtgtgctgattggctatgtaagggtatcaacaaatga

SEQ ID NO: 658715 - DNA, 75 bp, synthetic construct
  source 1..75: mol_type = other DNA
ttccacatcatattttattaaggtatttaaggaatattacaacacaacaccaaaaaaatatagtggcgtttattc

SEQ ID NO: 658716 - DNA, 75 bp, synthetic construct
  source 1..75: mol_type = other DNA
cccagggttgatagaaatatcgtcctggggcttcatccttccagacctcagagtaaacctgaaaccggaaagctt

SEQ ID NO: 658717 - DNA, 75 bp, synthetic construct
  source 1..75: mol_type = other DNA
agaaccgagacgctgaggctatggcccaattaaccggatcagaccgtcagtatgcaggtagcgacaacgttgtga

SEQ ID NO: 658718 - DNA, 75 bp, synthetic construct
  source 1..75: mol_type = other DNA
cccgtgaacaggtttctgctggtatgcgccacgcccgctccagtgaatctccgttctggccgtcgccagggcaat

SEQ ID NO: 658719 - DNA, 75 bp, synthetic construct
  source 1..75: mol_type = other DNA
acatgtcagcagagaggcttgttgatgcccttttcaaacagttgaaacaactgtttccggcggcagtggtaacca

SEQ ID NO: 658720 - DNA, 75 bp, synthetic construct
  source 1..75: mol_type = other DNA
acgccgccaccctggggggaataacaccggcgcagtggctgatggaggaatacaggcgaggaaaggcagcaggat

SEQ ID NO: 658721 - DNA, 75 bp, synthetic construct
  source 1..75: mol_type = other DNA
ggtgtaaagacagcaagatggttcttggcgtcaccattgacgatgtgatggcggagtttcaccggtacagcaagg

SEQ ID NO: 658722 - DNA, 75 bp, synthetic construct
  source 1..75: mol_type = other DNA
aggtcgctagaattttcaatgaactatttgtccagttacaggctgcatttcctgcaagcgtttcgaccataaggg

SEQ ID NO: 658723 - DNA, 75 bp, synthetic construct
  source 1..75: mol_type = other DNA
atattctgacctacaccaacaagaaagcggctgtactggttaagaaagttctggaatctgccattgctaacgctg

SEQ ID NO: 658724 - DNA, 75 bp, synthetic construct
  source 1..75: mol_type = other DNA
caatcactggagagattgcaacatacgacagtgatcaggttgaagatattgaagatgaactggcaatagctggat

SEQ ID NO: 658725 - DNA, 75 bp, synthetic construct
  source 1..75: mol_type = other DNA
ggcgtccatattcgtggcgttaacccgcgcaccggcaatagcgataacacgatgaaggcgaataacccgagaaac

SEQ ID NO: 658726 - DNA, 75 bp, synthetic construct
  source 1..75: mol_type = other DNA
tttctggagaatgggatcacaacaatggaacaggttaacgctggtatgcgccacgcccgcgccagtgaatctccg

SEQ ID NO: 658727 - DNA, 75 bp, synthetic construct
  source 1..75: mol_type = other DNA
gcactggagctgaaaggcggctggctgaaccgcaaaactggggaggcgttcgtgcgttatgcccgactgctgttc

SEQ ID NO: 658728 - DNA, 75 bp, synthetic construct
  source 1..75: mol_type = other DNA
cgggcgttgtagtagcgctaatcgggattgcgggcgtattacttgaaaaaatcgtctggcagacagcagacacat

SEQ ID NO: 658729 - DNA, 75 bp, synthetic construct
  source 1..75: mol_type = other DNA
cagtttggctgtagcgacgacgcgtttattcatcgcgccgaaatgttcctcaaagaactgtggctaccagaaact

SEQ ID NO: 658730 - DNA, 75 bp, synthetic construct
  source 1..75: mol_type = other DNA
accggccttaacgccagctttgacctcgattttttcggtcgcttaaagaacatgagcgaagccgagcgacaaaat

SEQ ID NO: 658731 - DNA, 75 bp, synthetic construct
  source 1..75: mol_type = other DNA
catcgtgatgggcgtaagagcaaacaaaaaaaaaaaacccgccgttcgctggtggaagccgcatttagccaatta

SEQ ID NO: 658732 - DNA, 75 bp, synthetic construct
  source 1..75: mol_type = other DNA
gaagcgactggtgctgatggggataggcgtcggagcggtactcagcgcgcttaatgcgctgctgctggtgaaagg

SEQ ID NO: 658733 - DNA, 75 bp, synthetic construct
  source 1..75: mol_type = other DNA
actgggcgtggcaaacattctcgtcagcaccatgatgggcggcgtcagcgcctctaaccttgctgacgcggcgat

SEQ ID NO: 658734 - DNA, 75 bp, synthetic construct
  source 1..75: mol_type = other DNA
tgcaggaggcacgggcgcaatatcgtctgactgatgccgaccgctacccacagctcaatggtgagggcagcggca

SEQ ID NO: 658735 - DNA, 75 bp, synthetic construct
  source 1..75: mol_type = other DNA
aacgtgggatggcgcaccttttttgccgataatcaggtgaagacgctgattagcgaggcgctggtgaataaccgg

SEQ ID NO: 658736 - DNA, 75 bp, synthetic construct
  source 1..75: mol_type = other DNA
tgatgaagaagacatacaacgcatcgaagagattaagcgttggataagtaatggcgttcctgtaggcaaagttaa

SEQ ID NO: 658737 - DNA, 75 bp, synthetic construct
  source 1..75: mol_type = other DNA
cgccagagaatttttgtcatcattagccgcaaaactgagaaatgcaaatatttggatttggctaaatggttcgat

SEQ ID NO: 658738 - DNA, 75 bp, synthetic construct
  source 1..75: mol_type = other DNA
ggcgctacttctggagacagcaaagttctggattagccgcgcggtgagggttaacgaccgtctggaaattcatga

SEQ ID NO: 658739 - DNA, 75 bp, synthetic construct
  source 1..75: mol_type = other DNA
atgagtcagagggccggatgggtatgcgccgcccttgcactgttgcttggggggatgggcctgtatgccttgctg

SEQ ID NO: 658740 - DNA, 75 bp, synthetic construct
  source 1..75: mol_type = other DNA
tagatttgcaacaagcaattaataaagttggcagtgatgttgttttttatgctatactgtctgtctttacactta

SEQ ID NO: 658741 - DNA, 75 bp, synthetic construct
  source 1..75: mol_type = other DNA
atatgcaattaacatggcacaactataaatactacccatatgaaaaagatctcgcactgcgtgagatacaaagtc

SEQ ID NO: 658742 - DNA, 75 bp, synthetic construct
  source 1..75: mol_type = other DNA
aatgaaggccagcaacaagcggaatgcgttttactggcgcttcgtggagttgggaacatctacagcgcctgcaca

SEQ ID NO: 658743 - DNA, 75 bp, synthetic construct
  source 1..75: mol_type = other DNA
ccgtacacagcaagatcctcaaagagcatcataaggatcccagcaccctcattattgatgaatttacaatgaact

SEQ ID NO: 658744 - DNA, 75 bp, synthetic construct
  source 1..75: mol_type = other DNA
ggttttactcccttcctgtacaagtagctacatcgttcttaagagaagaactggatgctatgtctttgccttcgt

SEQ ID NO: 658745 - DNA, 75 bp, synthetic construct
  source 1..75: mol_type = other DNA
actggcggcggtgtatgaccgcagtggcaaacaggtgcgcagctttacttacgatgataaataccggggccggat

SEQ ID NO: 658746 - DNA, 75 bp, synthetic construct
  source 1..75: mol_type = other DNA
tcattattcagaaacccgtggataaatcttcccctttgttgagtaaggctatcagcgaaaatgagtgtctgacct

SEQ ID NO: 658747 - DNA, 75 bp, synthetic construct
  source 1..75: mol_type = other DNA
ggaaagatgagcttttgtccatcctaaaatcggtggggcaagagcgcggtttaaaaagtaaaccgcgtaaatttt

SEQ ID NO: 658748 - DNA, 75 bp, synthetic construct
  source 1..75: mol_type = other DNA
gatacccagttggtggggtgtaaaagtcgtcactcaagggttgcgaaacggcatacatctgcaaacagtgcgttc

SEQ ID NO: 658749 - DNA, 75 bp, synthetic construct
  source 1..75: mol_type = other DNA
gatgcgccgtgatggtatagaacttaatggcgttgatatgcgcaacatacggaaccgcgttcttgaaatgctggc

SEQ ID NO: 658750 - DNA, 75 bp, synthetic construct
  source 1..75: mol_type = other DNA
ctacaatcgccgcgttgagatgtatcgggagaaggagaaaattacgtaccactggaagaagccggagcggttgcg

SEQ ID NO: 658751 - DNA, 75 bp, synthetic construct
  source 1..75: mol_type = other DNA
taatggcgtggatatgcgcaacatacgaaccagagttcttgagttgctggcctaccgtcgccgcgttgagatgta

SEQ ID NO: 658752 - DNA, 75 bp, synthetic construct
  source 1..75: mol_type = other DNA
atgacagaagccgaaatactgcgattaatccgccgcgtctctggaatcaaccagcaggctgacgaacagaccacg

SEQ ID NO: 658753 - DNA, 75 bp, synthetic construct
  source 1..75: mol_type = other DNA
gatgcgccgtgatggtatccagcttaatgatgcggatatgcgcgacatacggatccgcgttcttgaaatgctggc

SEQ ID NO: 658754 - DNA, 75 bp, synthetic construct
  source 1..75: mol_type = other DNA
ctaccgtcgccgcgtgcagacgtacagggaaaaagcaaaaattacgtaccactggaagaagccggaacgactgcg

SEQ ID NO: 658755 - DNA, 75 bp, synthetic construct
  source 1..75: mol_type = other DNA
aagtacttttagatatttagccagaaaacgtattttatcaaatcgcaactttgatcgaatttcatcagtttttca

SEQ ID NO: 658756 - DNA, 75 bp, synthetic construct
  source 1..75: mol_type = other DNA
atacaggctatatattacgtatctgttctattgcagcattaggcgggatattatttggctacgatactgccgtta

SEQ ID NO: 658757 - DNA, 75 bp, synthetic construct
  source 1..75: mol_type = other DNA
gaccaaaatatccaacgaagaacatgccagacatcttcttgccgatataaaaacctcactgcaaaacgaccaact

SEQ ID NO: 658758 - DNA, 75 bp, synthetic construct
  source 1..75: mol_type = other DNA
acctgaattaacagcaagagtggatcctgttcgttatcccgtgcctgatataccagccgggaatatatcgaaact

SEQ ID NO: 658759 - DNA, 75 bp, synthetic construct
  source 1..75: mol_type = other DNA
gaagtgcgcatcgttaacgaagatggaagtgatgatatcgctgtcctgagtgcacaggttgttgacaggcaaaca

SEQ ID NO: 658760 - DNA, 75 bp, synthetic construct
  source 1..75: mol_type = other DNA
gaactggaaccacaggagagaattgcctttatttatgaagatatttcctgggagcataccgttagccggtacgaa

SEQ ID NO: 658761 - DNA, 75 bp, synthetic construct
  source 1..75: mol_type = other DNA
tatgatgaggagtccggcctctattacaaccgccaccgctattatgacccgctgcaggggcggtatatcactcag

SEQ ID NO: 658762 - DNA, 75 bp, synthetic construct
  source 1..75: mol_type = other DNA
gccagatgacgcccgccgacctggccaagttcgaggcgcagcgacgctatgccaccctggtggcgcttgccatcg

SEQ ID NO: 658763 - DNA, 75 bp, synthetic construct
  source 1..75: mol_type = other DNA
ggtagcgagccgggacggctgttctatacccatatctccgaccagtacgcgccgttcagcacccgcgtggtgaat

SEQ ID NO: 658764 - DNA, 75 bp, synthetic construct
  source 1..75: mol_type = other DNA
ttcatccggatgctcgtcaatgccgtccatcggtaacaaagcccagattgcacatcaggatcagatcatggtgac

SEQ ID NO: 658765 - DNA, 75 bp, synthetic construct
  source 1..75: mol_type = other DNA
gacgacatcctgcgcctggccagctcgatcaagcagggcaccgtcaccgcctcgctgatgctgcgcaagctcggc

SEQ ID NO: 658766 - DNA, 75 bp, synthetic construct
  source 1..75: mol_type = other DNA
gaagcgaaggaaagcggcagcgacccctatgccgccatcgaggcggtgattccctgggacgagttcaccgagagc

SEQ ID NO: 658767 - DNA, 75 bp, synthetic construct
  source 1..75: mol_type = other DNA
taagttcgagccgcagcgccgctacgcgaccctggccgccgtggtgctggagagcaccgcgaccgtgatcgatga

SEQ ID NO: 658768 - DNA, 75 bp, synthetic construct
  source 1..75: mol_type = other DNA
cgaccctggcactggtcgactccacccaggagttgcgactgctaccaaaagagagtttaccgaaactctgcgacg

SEQ ID NO: 658769 - DNA, 75 bp, synthetic construct
  source 1..75: mol_type = other DNA
gcacgtgcactcattcttgaaccgaaactgattatctgcgatgagcctgtttcggcgctggacgtgtcaattcag

SEQ ID NO: 658770 - DNA, 75 bp, synthetic construct
  source 1..75: mol_type = other DNA
tgcggtagaactggggacctatgatgaggtctaccacaatccactacatccttacaccagggcattgatgtcggc

SEQ ID NO: 658771 - DNA, 75 bp, synthetic construct
  source 1..75: mol_type = other DNA
gaatgagcactggttcagcgatgttcttcatgcccggaaaatcattaatgactggcggcaggattataacgagtg

SEQ ID NO: 658772 - DNA, 75 bp, synthetic construct
  source 1..75: mol_type = other DNA
agaacggcaaaatgttcgccagcaggtttatagctactgtaatgagcaattgcaggcgggcgaagaaatcgagct

SEQ ID NO: 658773 - DNA, 75 bp, synthetic construct
  source 1..75: mol_type = other DNA
tacccgcgcggcaatgccgtcggcgtggagctgacgccgctggaaaaactgccgattggcaaaggcatcgtgaag

SEQ ID NO: 658774 - DNA, 75 bp, synthetic construct
  source 1..75: mol_type = other DNA
tagaaccacagccgatggttgcggaacaggtgctggatgcgctggtggaacagtggcaacgaacgcctgcggagg

SEQ ID NO: 658775 - DNA, 75 bp, synthetic construct
  source 1..75: mol_type = other DNA
ctggctggcggcgcaggatttcagcggttgtaccctggcgcactggcagattgaacctcagcccgtagtggcgga

SEQ ID NO: 658776 - DNA, 75 bp, synthetic construct
  source 1..75: mol_type = other DNA
cgtgccggtatggcgtaaaagctggtggcagggcgtgtggtatgaaatccgctggtatctgtttctggcaaaacg

SEQ ID NO: 658777 - DNA, 75 bp, synthetic construct
  source 1..75: mol_type = other DNA
gcccgatgaatggcgtgccgttcgcagtgatattcagatgattttccaggatccgttggcatcgctaaacccgcg

SEQ ID NO: 658778 - DNA, 75 bp, synthetic construct
  source 1..75: mol_type = other DNA
tctcatagctatttttttacttttacaggcaaaaagcagaatgatggattcgcgttgactggtaatgttcaggat

SEQ ID NO: 658779 - DNA, 75 bp, synthetic construct
  source 1..75: mol_type = other DNA
atgaatatcgcaattgtgacaataaatcaggagaatgccgcaatagcgagctggctggcggcgcaggatttcagc

SEQ ID NO: 658780 - DNA, 75 bp, synthetic construct
  source 1..75: mol_type = other DNA
gctggcactggagcgcaggcgttttggctaccgccgcatctggcagctgctgcgtcgggagggccttcgcgtcaa

SEQ ID NO: 658781 - DNA, 75 bp, synthetic construct
  source 1..75: mol_type = other DNA
acggtcaggcgcaattcaacgcaaaatcgggggagcttagctggaaactgcatctggcggggaaagaaaacgtca

SEQ ID NO: 658782 - DNA, 75 bp, synthetic construct
  source 1..75: mol_type = other DNA
gatgtgctgtggcttaacggtaacgcatataatgacgcttcgcaggttcttaaaatactggctttttacgatggt

SEQ ID NO: 658783 - DNA, 75 bp, synthetic construct
  source 1..75: mol_type = other DNA
tatacatggccatccagaactgagtatgaacaaagggtgcatctgccactcgccggggcttacggatttggctac

SEQ ID NO: 658784 - DNA, 75 bp, synthetic construct
  source 1..75: mol_type = other DNA
atctatgatattcacgccacgggcataaaccaaccgctgcgtctggtttacaaggctaatattcgccagtatacg

SEQ ID NO: 658785 - DNA, 75 bp, synthetic construct
  source 1..75: mol_type = other DNA
gttttggcatcagtcaccatgctaagtagctttgatagttcaaagggaattgtaggcgctctaaaaagtaacgga

SEQ ID NO: 658786 - DNA, 75 bp, synthetic construct
  source 1..75: mol_type = other DNA
gaaaaaataccgtgtgctactgaatcgcgttcagccggaaaatgcccctgatatcgaatggccagaattagtgta

SEQ ID NO: 658787 - DNA, 75 bp, synthetic construct
  source 1..75: mol_type = other DNA
agggggcccttcttgattatgtgattattgatgaagcctcacagcaggatattgttccgggcattctgggactgg

SEQ ID NO: 658788 - DNA, 75 bp, synthetic construct
  source 1..75: mol_type = other DNA
aaaggaaaccatacccgtaatttttcaaatctcagggagcttgaatctctggaaggtcattactgggatgaagaa

SEQ ID NO: 658789 - DNA, 75 bp, synthetic construct
  source 1..75: mol_type = other DNA
ctgacctgtgtggatgatttcacgaaggagtgtctgacgatcaccactgctttcggtatttcaggcgttcaggtc

SEQ ID NO: 658790 - DNA, 75 bp, synthetic construct
  source 1..75: mol_type = other DNA
aagaaccgatcaggggccggaatttacctgccgcgcattggatcaatgggcctttgagcatggcgtggagctgcg

SEQ ID NO: 658791 - DNA, 75 bp, synthetic construct
  source 1..75: mol_type = other DNA
ggttaccggcgcatctggcagttactgcgtcgggagggcgttcacgtcaatcacaagcgggtataccgcatttac

SEQ ID NO: 658792 - DNA, 75 bp, synthetic construct
  source 1..75: mol_type = other DNA
atcaaatactacgctgatgacggagagattttcgagagcccggtcatatcagcatttgatttgctgtacagtgag

SEQ ID NO: 658793 - DNA, 75 bp, synthetic construct
  source 1..75: mol_type = other DNA
atgggctacatcaggttaattcacttcagcgccgggatggtttttaccgtggttttgctgatgcggatctactgg

SEQ ID NO: 658794 - DNA, 75 bp, synthetic construct
  source 1..75: mol_type = other DNA
tgaacgtcgctatcaggcaaaaatttgcgctgcatttgtccgcgaagccgcagaactgtatgtcgcgcgtaaaaa

SEQ ID NO: 658795 - DNA, 75 bp, synthetic construct
  source 1..75: mol_type = other DNA
cccgctggcaaataaacatccggaatgggttaaaacagcgaccaataaaacgctcgacgatttcactctggaaaa

SEQ ID NO: 658796 - DNA, 75 bp, synthetic construct
  source 1..75: mol_type = other DNA
cgcagcaaacgctgctgaagtttacaataaagacggcaacaaattagatagatcggaagagcagacggcctgcac

SEQ ID NO: 658797 - DNA, 75 bp, synthetic construct
  source 1..75: mol_type = other DNA
agtgaaagactgggcggaagtggtaaatatcaggctgcattaccttcccccttacagtccaaacctgaatccgat

SEQ ID NO: 658798 - DNA, 75 bp, synthetic construct
  source 1..75: mol_type = other DNA
atgcgtatgaggcaatggatatcctcactatccagattgaagatttactgcgtgacttgtcttgtgatgagtctg

SEQ ID NO: 658799 - DNA, 75 bp, synthetic construct
  source 1..75: mol_type = other DNA
ctctgtgtatgggaaacggaatttgattacgcagatgccgaactcaaggcgctggcggctaaagagtggcagcag

SEQ ID NO: 658800 - DNA, 75 bp, synthetic construct
  source 1..75: mol_type = other DNA
gcacaagcattactcaagggtagtaagaaattagttcatagtaatgggaaacggtggctggagtgtttaaaatcc

SEQ ID NO: 658801 - DNA, 75 bp, synthetic construct
  source 1..75: mol_type = other DNA
atccgactgacctcgcggatgtcagtggctacacctatctcatgaacgggcaggccccgctgaaaaactggaccg

SEQ ID NO: 658802 - DNA, 75 bp, synthetic construct
  source 1..75: mol_type = other DNA
ttacagagtgacagcagatgcgcttggccgctgggcgtatcactgccatttgctctatcacatggaaatgggaat

SEQ ID NO: 658803 - DNA, 75 bp, synthetic construct
  source 1..75: mol_type = other DNA
ccggagctggatgcgaccgttttctacggatttaacccgaatatcctttacttccgaccggaagaaggagagcga

SEQ ID NO: 658804 - DNA, 75 bp, synthetic construct
  source 1..75: mol_type = other DNA
actttatgcgtgaagagatcaatctggtgcgcccgacctatgtgctgacgtgtggtagccgggcaacggcattgt

SEQ ID NO: 658805 - DNA, 75 bp, synthetic construct
  source 1..75: mol_type = other DNA
aatcatgatcattctggacaatgcgaacggcaatgatgctcgaaccggttactttatggagaacggatacgacga

SEQ ID NO: 658806 - DNA, 75 bp, synthetic construct
  source 1..75: mol_type = other DNA
caaaaagggctgttcgaagagtacgcatggtttggtcgcggtcacggtcacgatctggcgccgttcgatgactac

SEQ ID NO: 658807 - DNA, 75 bp, synthetic construct
  source 1..75: mol_type = other DNA
agaacgtatgccgggctggcgcgatccgcgcaactttattatcgtttctgacccgtatccgacggtcagtgcgct

SEQ ID NO: 658808 - DNA, 75 bp, synthetic construct
  source 1..75: mol_type = other DNA
taccggacgcgttctggagcactggcacaccggcagtatgactcgccgtgtaccagaactgcaccgcgccttccc

SEQ ID NO: 658809 - DNA, 75 bp, synthetic construct
  source 1..75: mol_type = other DNA
tcagttctggcgtcagcaggtacaggcaccgggcgaagcgaaatcggatctctggcagttagttcagttctcccg

SEQ ID NO: 658810 - DNA, 75 bp, synthetic construct
  source 1..75: mol_type = other DNA
ctgatgacggagagattttcgagagcccggtcatatcagcatttgatttgctgtacagtgagtatgacaaatcac

SEQ ID NO: 658811 - DNA, 75 bp, synthetic construct
  source 1..75: mol_type = other DNA
caccggcagaatactataattgtgagaaatatagtctacttgattcggtttgtatgttgttcaggaacatggtgc

SEQ ID NO: 658812 - DNA, 75 bp, synthetic construct
  source 1..75: mol_type = other DNA
ggaaggtcattactgggatgaagaaagtagcaggggatacattgccccatataatgcacaggttaatctggctga

SEQ ID NO: 658813 - DNA, 75 bp, synthetic construct
  source 1..75: mol_type = other DNA
gcacgtcactgtatggcgtcggcagtagttggctttatgcgtacctttggtatggatgagccgatgggctgctat

SEQ ID NO: 658814 - DNA, 75 bp, synthetic construct
  source 1..75: mol_type = other DNA
ccgatccgtatccgacagtcagtgcgctggcagccgacttgatcctgccgaccgcaatgtgggtagagaaagagg

SEQ ID NO: 658815 - DNA, 75 bp, synthetic construct
  source 1..75: mol_type = other DNA
gctgccggtctcagcgtgccgggcgttgcccgcgccgttgttggtcagcaggaagccattaaatgggataaagcg

SEQ ID NO: 658816 - DNA, 75 bp, synthetic construct
  source 1..75: mol_type = other DNA
ctacggtaaaccggatggcaaagcggtgatcttcgcactgccgttcgaaccggcggcggaagcaccggatgaaga

SEQ ID NO: 658817 - DNA, 75 bp, synthetic construct
  source 1..75: mol_type = other DNA
cgtacctttggtatggatgagccgatgggctgctatgacgacatcgagcaggctgacgcgtttgtgctgtggggc

SEQ ID NO: 658818 - DNA, 75 bp, synthetic construct
  source 1..75: mol_type = other DNA
gacgacatcgagcaggctgacgcgtttgtgctgtggggcgctaacatggcggagatgcacccgatcctctggtca

SEQ ID NO: 658819 - DNA, 75 bp, synthetic construct
  source 1..75: mol_type = other DNA
agacgctggaaaaagtgatttcccacacacgttataaacttacccctgcggagctggaagcctttaactctgcgg

SEQ ID NO: 658820 - DNA, 75 bp, synthetic construct
  source 1..75: mol_type = other DNA
acggccctttgtgcgggtgctgtctgaaaaagtgcgggcacgacgcgggcgcccgtcaaaggatgaggtacgact

SEQ ID NO: 658821 - DNA, 75 bp, synthetic construct
  source 1..75: mol_type = other DNA
ttaaccaaagcacaaatagttgacatttaccagcagtacttagaccgctatgagcctgtaacagcagaggttgac

SEQ ID NO: 658822 - DNA, 75 bp, synthetic construct
  source 1..75: mol_type = other DNA
tctgacgttccgcagggcgctgctatcttgggtgcgatctctggtgcgcatcacgttcaccagatggctgaacac

SEQ ID NO: 658823 - DNA, 75 bp, synthetic construct
  source 1..75: mol_type = other DNA
attttactcagccgcagatcaccgtcttgcagaattgaccatgaataagctttacgacaagatcccttcctcggt

SEQ ID NO: 658824 - DNA, 75 bp, synthetic construct
  source 1..75: mol_type = other DNA
gcgaccctttgtgcgggtgctgtctgaaaaggtccgcgcccggcgtgggcgcccgccgaaagatgaggttcgtct

SEQ ID NO: 658825 - DNA, 75 bp, synthetic construct
  source 1..75: mol_type = other DNA
ttgatgaggttgacttttcaagacaattattaggcatagggctcacttccctaaggaaagcaaattttgcaagta

SEQ ID NO: 658826 - DNA, 75 bp, synthetic construct
  source 1..75: mol_type = other DNA
tcctgaagcctgtatactgggactctttgttgccccgaacaacccggggagctcaaattatttaaaaagggtaaa

SEQ ID NO: 658827 - DNA, 75 bp, synthetic construct
  source 1..75: mol_type = other DNA
aaaattgcagatgcagttcctgaaaaaacaagtgatgtgcctgaggctgaaatgccttcttcttcagataatcat

SEQ ID NO: 658828 - DNA, 75 bp, synthetic construct
  source 1..75: mol_type = other DNA
ttctgcaaaaagagcttcgagtagagctttggatcagccgtggggttaccgaagagaataaatacctttttgact

SEQ ID NO: 658829 - DNA, 75 bp, synthetic construct
  source 1..75: mol_type = other DNA
taacatattagactcaatgacagttcaagcaaaagataatcacttccaccatcttgaattaggtcgtttttttgc

SEQ ID NO: 658830 - DNA, 75 bp, synthetic construct
  source 1..75: mol_type = other DNA
aatggtataatgaaatcgataagagcatttacgacaaaatattaacaaaaagacaaaaaaatataattgataaaa

SEQ ID NO: 658831 - DNA, 75 bp, synthetic construct
  source 1..75: mol_type = other DNA
tgaatatcgtgcagcgtatgaggctgaagaagcctcagagcagcttcgggagacattagcttcctggcgaaagga

SEQ ID NO: 658832 - DNA, 75 bp, synthetic construct
  source 1..75: mol_type = other DNA
atgtgcactcaacggttcagggcgtatctgctgaacgagcctggcgcgatccggcagagatgatcgttattagtt

SEQ ID NO: 658833 - DNA, 75 bp, synthetic construct
  source 1..75: mol_type = other DNA
atgaaaaaatggaaagtacgtagcgcgttgatagcattagtcgtgctgctggccggttgttccagtaatgcgcag

SEQ ID NO: 658834 - DNA, 75 bp, synthetic construct
  source 1..75: mol_type = other DNA
taacgggaaaagccggtgttaaaactcgctatctccacctcaataaaatactcgttactaaaggggccagggtta

SEQ ID NO: 658835 - DNA, 75 bp, synthetic construct
  source 1..75: mol_type = other DNA
aagctgccgcaagcgcagacagtaaacagcgacagcctgcaaagcgttaaattaccggcgggcttgtcgtcgcaa

SEQ ID NO: 658836 - DNA, 75 bp, synthetic construct
  source 1..75: mol_type = other DNA
aaactttactcgacctgaattatgcccgtcaggttaacgaggtttccttatataccgccttaggtggcggttggc

SEQ ID NO: 658837 - DNA, 75 bp, synthetic construct
  source 1..75: mol_type = other DNA
cggctggtatcagggggaatatatttgctggcctgccaccctgagtgatgtgaataaccagccccaaataacata

SEQ ID NO: 658838 - DNA, 75 bp, synthetic construct
  source 1..75: mol_type = other DNA
catcactaaagccagcatcgacaccctgactcgctatgcccatgcgtgcggtatcaaaaaacctgttattacgct

SEQ ID NO: 658839 - DNA, 75 bp, synthetic construct
  source 1..75: mol_type = other DNA
tgacaatttgacaaaagcgcaggttgctgaacgcatgggggttactcctcctgttatttcccgcctggaaaacaa

SEQ ID NO: 658840 - DNA, 75 bp, synthetic construct
  source 1..75: mol_type = other DNA
cgcatcacgtatgagtattgatacactggtacgctatgccagagcctgtggtgtgaactttaaaattcagcaagt

SEQ ID NO: 658841 - DNA, 75 bp, synthetic construct
  source 1..75: mol_type = other DNA
cctcatctacattacgagctggtcatcaataacaatcctgttaactcgctggcgttccgggcagcggtacccgct

SEQ ID NO: 658842 - DNA, 75 bp, synthetic construct
  source 1..75: mol_type = other DNA
cagtctcgattatccgttaccgaccacagcaagactcagttcacctttcaatcctgcaagacttaacccggtatc

SEQ ID NO: 658843 - DNA, 75 bp, synthetic construct
  source 1..75: mol_type = other DNA
ataatgcttatgtagctgcctcccgtgcaggcctggaaaaaaatgaaattgctgtcctccagcgctccctgcctc

SEQ ID NO: 658844 - DNA, 75 bp, synthetic construct
  source 1..75: mol_type = other DNA
ttgattttgatgagatgattactccgaagatcatcaaggtaatatactggttttttctttttattacagtggccg

SEQ ID NO: 658845 - DNA, 75 bp, synthetic construct
  source 1..75: mol_type = other DNA
tgtccgcaccaaaatcattatctttgttctctctggtctggtatcggcgattgccgggattgttctggcttcgcg

SEQ ID NO: 658846 - DNA, 75 bp, synthetic construct
  source 1..75: mol_type = other DNA
cttcgggcgtatctgggatcagtacggtatgctggtggtgtttgcggtgctgtttatcgcctgtgccatttttgt

SEQ ID NO: 658847 - DNA, 75 bp, synthetic construct
  source 1..75: mol_type = other DNA
atgcttcatgatcacggggcagaatggccggataaaagaggactgtgccggagggcagctgaacgatgggcaaaa

SEQ ID NO: 658848 - DNA, 75 bp, synthetic construct
  source 1..75: mol_type = other DNA
ggcatgctggtggtgtttgcggtgctctttatcgcctgtgccatttttgtcccgaactttgccaccttcattaat

SEQ ID NO: 658849 - DNA, 75 bp, synthetic construct
  source 1..75: mol_type = other DNA
gacggtaaagcggtcggtatcgaagatgaaagtttctttgctctcggttatgccaactggttcggcctgcctgcg

SEQ ID NO: 658850 - DNA, 75 bp, synthetic construct
  source 1..75: mol_type = other DNA
agcctgtggattggcgtggcagcggggttgctgctgggcgttctctgtggcctggtcaatggctttgttatcgcc

SEQ ID NO: 658851 - DNA, 75 bp, synthetic construct
  source 1..75: mol_type = other DNA
cgttcggaatattcgtctaaccaggatgcctcagaattgcagaaaaccctgaaggcagagatgcaaaaaacaagg

SEQ ID NO: 658852 - DNA, 75 bp, synthetic construct
  source 1..75: mol_type = other DNA
aaagagaaaaatggtgagttattacgagccgacaatgagttgacgcagaaacttgctgataaccagcttgaaatt

SEQ ID NO: 658853 - DNA, 75 bp, synthetic construct
  source 1..75: mol_type = other DNA
ctgtcaggtaaagagaacgtgagtctgccattctcatacagcgtgaagtatccgaaaggtatgcacccttcggga

SEQ ID NO: 658854 - DNA, 75 bp, synthetic construct
  source 1..75: mol_type = other DNA
gatgtaataacctgcgcaattgaaaacctttatgaagacctgccgtatgaagaagcacaggatgaatataccggt

SEQ ID NO: 658855 - DNA, 75 bp, synthetic construct
  source 1..75: mol_type = other DNA
attagccaagcccaaggtgctgactttgttcctgtcaatattttctctgtaatgcaaatattgcatttacttata

SEQ ID NO: 658856 - DNA, 75 bp, synthetic construct
  source 1..75: mol_type = other DNA
accatgttgattttcaaacctattcccctcgccatgttgcttaccgggtgtctgtcctccgcctgggggcgcagt

SEQ ID NO: 658857 - DNA, 75 bp, synthetic construct
  source 1..75: mol_type = other DNA
tgccgacaatacgccgcttaacagccgtgtttacaccgtacgctctggcgacacgctttcaagcatcgcttcacg

SEQ ID NO: 658858 - DNA, 75 bp, synthetic construct
  source 1..75: mol_type = other DNA
agttgtgggcaaacacgggatgtgggagatgaaaggggtccctgtggaaccgttctccacccggtctcaggaggt

SEQ ID NO: 658859 - DNA, 75 bp, synthetic construct
  source 1..75: mol_type = other DNA
gctgggatccggagacccggacgcacgatcgctttgtcattgaccgggtgaccgcgagcagcaatatgctgaccc

SEQ ID NO: 658860 - DNA, 75 bp, synthetic construct
  source 1..75: mol_type = other DNA
cggcgggcagtgccggtaattactatacggataaggataattactacgtcatagggagcatggacgaacgctggc

SEQ ID NO: 658861 - DNA, 75 bp, synthetic construct
  source 1..75: mol_type = other DNA
ccggacacacgcctgaaaggcggggaaagcatcacggtgatgaaagtggaggaggggcagctgacggtacagcgg

SEQ ID NO: 658862 - DNA, 75 bp, synthetic construct
  source 1..75: mol_type = other DNA
ccgcccgcgcgtcatcggtctggcgccgacgcatcgcgcggtcggggaaatgcagagtgctggcgtggatgcgcg

SEQ ID NO: 658863 - DNA, 75 bp, synthetic construct
  source 1..75: mol_type = other DNA
cagcgccagaatcatgtctccgtcacgcccgatgcgtctgtggtgcgccaggttcctttcagcgatgccgtcagc

SEQ ID NO: 658864 - DNA, 75 bp, synthetic construct
  source 1..75: mol_type = other DNA
ctgcggataaagctgaagcgcatgttgatctggcttatgccatcaccacacacggtgcgcagggggcaagcgagc

SEQ ID NO: 658865 - DNA, 75 bp, synthetic construct
  source 1..75: mol_type = other DNA
aatgcgcttcagtaaaagtgataccgaacgtggctacgtggcgaatagtgtgtggcgagtggaaagcatatctgg

SEQ ID NO: 658866 - DNA, 75 bp, synthetic construct
  source 1..75: mol_type = other DNA
gtctggagaaaaaaggactgtaccggagagcggctgcacgatgggcaaaagtgatggtacagctaagtgatgatc

SEQ ID NO: 658867 - DNA, 75 bp, synthetic construct
  source 1..75: mol_type = other DNA
gaaaaagtaccctcagccgcatgtggcgctgccggcatttgataaaaacgggaaagccgccggtatctggctcag

SEQ ID NO: 658868 - DNA, 75 bp, synthetic construct
  source 1..75: mol_type = other DNA
agagcggaagtcatctccggctgtactcggcgcaggatgcggcgcgcacgacggagaagctgtcgcggcatacct

SEQ ID NO: 658869 - DNA, 75 bp, synthetic construct
  source 1..75: mol_type = other DNA
cggcgggcagtgccggtaactactacacagagaaagacaattactacgtcatcgggagcatggaggagcgctggc

SEQ ID NO: 658870 - DNA, 75 bp, synthetic construct
  source 1..75: mol_type = other DNA
cctgttgattatcaacatattgctactgacgctggggatgtttctggaaggaaacgccattttgctgatcctggt

SEQ ID NO: 658871 - DNA, 75 bp, synthetic construct
  source 1..75: mol_type = other DNA
agtatttatctctactcccgtcaatgattgcatctcttttctctgctaacggtgtcgcggcggccattgatttat

SEQ ID NO: 658872 - DNA, 75 bp, synthetic construct
  source 1..75: mol_type = other DNA
aagtgctgaatttacgatatcaccacaaaatgaaacagggatgaccctgtttgctaataactcgattagtggcga

SEQ ID NO: 658873 - DNA, 75 bp, synthetic construct
  source 1..75: mol_type = other DNA
atattccggtcaagctgaccgtcgagctgggccgtacacggatgaccatcaaagagctgttgcgtctgacgcaag

SEQ ID NO: 658874 - DNA, 75 bp, synthetic construct
  source 1..75: mol_type = other DNA
ttattatctggagcgttttgccagataccgagcaatccgtccaactgctctcagcaaaatattattttgatttta

SEQ ID NO: 658875 - DNA, 75 bp, synthetic construct
  source 1..75: mol_type = other DNA
gattgcagagccgttgcgatacagggagaaggtgaagagaaggcgcaaaacggaaagccggtttatggccggaat

SEQ ID NO: 658876 - DNA, 75 bp, synthetic construct
  source 1..75: mol_type = other DNA
catcgctaatgacggcaaaggcggtgcaatttataccatcaataatgacgtctatttaagtaatgatgcttttaa

SEQ ID NO: 658877 - DNA, 75 bp, synthetic construct
  source 1..75: mol_type = other DNA
aactgaaatcgcgggtaacaacgcggtggtgaaccaggacggcgagctggatgtgagcggcggcggtcacggtat

SEQ ID NO: 658878 - DNA, 75 bp, synthetic construct
  source 1..75: mol_type = other DNA
ctacccctcccaaaccgatttcgtttaataatgacgttattctcgataaagcagaaaaaacgttaactattcgcg

SEQ ID NO: 658879 - DNA, 75 bp, synthetic construct
  source 1..75: mol_type = other DNA
ccacgggcaccgagataaacggtgacaaagccatcgtcaacaacgacggtgacagcacgatccttgatggcggca

SEQ ID NO: 658880 - DNA, 75 bp, synthetic construct
  source 1..75: mol_type = other DNA
gcgaagtggtggtcgttgccgataaatatggcgtgcggatcaccgatatcattactccgtctgagcgaatgcgtc

SEQ ID NO: 658881 - DNA, 75 bp, synthetic construct
  source 1..75: mol_type = other DNA
tggcggtggtgatgtcagcggaacgttgcaggatatcgacctgattatggatattccggtcaagctgaccgtcga

SEQ ID NO: 658882 - DNA, 75 bp, synthetic construct
  source 1..75: mol_type = other DNA
atgagtgacatgaataatccggccgatgacaacaacggcgcaatggacgatctgtgggctgaagcgttgagcgaa

SEQ ID NO: 658883 - DNA, 75 bp, synthetic construct
  source 1..75: mol_type = other DNA
gattgtttatcggctgctcaatatttactcttactggctgtgatgacgtatctgcttcagacaatcaagaaatta

SEQ ID NO: 658884 - DNA, 75 bp, synthetic construct
  source 1..75: mol_type = other DNA
catgaaaaaatggtgaatgcggatgaactgacgcggcttaacgttgaacgtcatggcgcgattcgtgttggaacc

SEQ ID NO: 658885 - DNA, 75 bp, synthetic construct
  source 1..75: mol_type = other DNA
aaagggcgacaactgtatgatgatcttctgcggaacgctggaaccgggcaggataatctcactcaccaaatgcat

SEQ ID NO: 658886 - DNA, 75 bp, synthetic construct
  source 1..75: mol_type = other DNA
gaggggccgccgcgccgcgaggtaccgattttactacgccagaccagctttaaagcactggaagagacggtgttg

SEQ ID NO: 658887 - DNA, 75 bp, synthetic construct
  source 1..75: mol_type = other DNA
caggcacaggagtttgtgcaggaagccctggaaacgtttcgctggcaccagtcagcaacggtggatgaagtaacc

SEQ ID NO: 658888 - DNA, 75 bp, synthetic construct
  source 1..75: mol_type = other DNA
cctatgaagattttttgcctgttagtgcggcggggatcttccagtcaaatctgggtgatgaaatacaggcacgca

SEQ ID NO: 658889 - DNA, 75 bp, synthetic construct
  source 1..75: mol_type = other DNA
cctatgaagatttcttgcccgttagcgcggcggggatcttccagtcaaatctgggtaatgaaacgcaggcacgca

SEQ ID NO: 658890 - DNA, 75 bp, synthetic construct
  source 1..75: mol_type = other DNA
gttatgaaaagaacgctcgcacacactccgtggagcaggtagatcagattgttgccagcatacaggagtacggat

SEQ ID NO: 658891 - DNA, 75 bp, synthetic construct
  source 1..75: mol_type = other DNA
taacagtaccaccatcgctcaatttatagatcagcacttaaccacgcatagccagacgggcagcattagcacgct

SEQ ID NO: 658892 - DNA, 75 bp, synthetic construct
  source 1..75: mol_type = other DNA
tttttaatcactgttgccactggcaacaccgttcactttttagtcaccgttggcactgccaacactgctcgtttt

SEQ ID NO: 658893 - DNA, 75 bp, synthetic construct
  source 1..75: mol_type = other DNA
tcctggatgccatatcaaccacctgacgccacgtacgctggatattgaccgggtgcagtcgatgatgcctgaatg

SEQ ID NO: 658894 - DNA, 75 bp, synthetic construct
  source 1..75: mol_type = other DNA
aacgatgaactataccagtgcatgatcctagtttgtatgggctacacaattgaagaaattgttaacagggaagaa

SEQ ID NO: 658895 - DNA, 75 bp, synthetic construct
  source 1..75: mol_type = other DNA
acgtgttaatctgggtgtacgcaatcccggtcataactttgatattgtctttgctggtgaaatgccatcaatgaa

SEQ ID NO: 658896 - DNA, 75 bp, synthetic construct
  source 1..75: mol_type = other DNA
gcggcggcggtcacggtattgatatcaccggcgacagcgcaacggtggataacaaaggcggtatgaccgtcaccg

SEQ ID NO: 658897 - DNA, 75 bp, synthetic construct
  source 1..75: mol_type = other DNA
agataaaaaacgctgccgccagaacgtaaagaaagcgagaatggctaaaaccgttaacaagcgagggggttggtt

SEQ ID NO: 658898 - DNA, 75 bp, synthetic construct
  source 1..75: mol_type = other DNA
tgggggcaaatccatcaggcgtttgataccgatatgcaggtttctgcagggcagtcgtttccggtagtgaaaaca

SEQ ID NO: 658899 - DNA, 75 bp, synthetic construct
  source 1..75: mol_type = other DNA
aaaagagtggcagcgcctgtcttcaggaagaagtgaccttctcctgcgagaaaaaggtgaccggtgaagcgcagt

SEQ ID NO: 658900 - DNA, 75 bp, synthetic construct
  source 1..75: mol_type = other DNA
tactgattatgctggaggtaagaattttactgttaatgtcgtctcttgcgataatttacaaaccacacaatcgca

SEQ ID NO: 658901 - DNA, 75 bp, synthetic construct
  source 1..75: mol_type = other DNA
ttattcccgtatgcagcgggtgaataatgctctcccgcccgaatcgggaatggtgagaagccaggtgattgttaa

SEQ ID NO: 658902 - DNA, 75 bp, synthetic construct
  source 1..75: mol_type = other DNA
atgctgttccctcaacctggaccttttattcccgtatgcagcgagtgaataatgcccttcctcccgaatcaggga

SEQ ID NO: 658903 - DNA, 75 bp, synthetic construct
  source 1..75: mol_type = other DNA
ctgtaactgaattaactaaagaaatcgataaattaaagaaaattgccaaagatcttgaagatgtattaccagaaa

SEQ ID NO: 658904 - DNA, 75 bp, synthetic construct
  source 1..75: mol_type = other DNA
cagggctgacgatggctgcactgtcgttcggtcatctgcctgcggtatttgtgccatcaggcccgatggcaagtg

SEQ ID NO: 658905 - DNA, 75 bp, synthetic construct
  source 1..75: mol_type = other DNA
taacatgtttgatggtgcgctgttcctcggtgtgtgcgacaagattgttccgggtctgacgatggcagccctgtc

SEQ ID NO: 658906 - DNA, 75 bp, synthetic construct
  source 1..75: mol_type = other DNA
acggcatcgcgcgtgaactgccaggaaaagagtggcagcgcctgtcttcaggaagaagtgaccttctcctgcgag

SEQ ID NO: 658907 - DNA, 75 bp, synthetic construct
  source 1..75: mol_type = other DNA
gacgtcagaagtcatcatgaatcgcccgaaagaccccatttccatggatgcgccatttatcagcggtggttttga

SEQ ID NO: 658908 - DNA, 75 bp, synthetic construct
  source 1..75: mol_type = other DNA
ccggatggccatcgccggatttaacaactgctgtaaggactccggctggggacagggcattggtctggcacactg

SEQ ID NO: 658909 - DNA, 75 bp, synthetic construct
  source 1..75: mol_type = other DNA
ggtttattgcaactggatcgtgacttctcccattatcaggacatcatgggctggtataacaaacgcccaagtctg

SEQ ID NO: 658910 - DNA, 75 bp, synthetic construct
  source 1..75: mol_type = other DNA
atagatggtgctggtgatgaaatatggcgcaattaccagacagctaatcaacagccggagaaatccggctttttt

SEQ ID NO: 658911 - DNA, 75 bp, synthetic construct
  source 1..75: mol_type = other DNA
aaagtatagtgaaatcaggctaaagaccaatagcaatattcaacaaaaacaaattacagatgaagtaaaatcact

SEQ ID NO: 658912 - DNA, 75 bp, synthetic construct
  source 1..75: mol_type = other DNA
atgcccaaaatatcatcagttgtatcatcatgttactatttgttcagagaacatcaacaactttcaaatgaaaca

SEQ ID NO: 658913 - DNA, 75 bp, synthetic construct
  source 1..75: mol_type = other DNA
gcaacggcggcaccggcacacaaattaacggtgacgatgcgaccgcgaacaacaacggcaaaaccattgtcgacg

SEQ ID NO: 658914 - DNA, 75 bp, synthetic construct
  source 1..75: mol_type = other DNA
ggcgatcctgatatttacacctattttcctgccgatcgcccagcatctggggattgatccgattcacttcggcat

SEQ ID NO: 658915 - DNA, 75 bp, synthetic construct
  source 1..75: mol_type = other DNA
atggtacatgaccgcatagcggaagaactcgaagcgaaaggattttaccggagggcggcggcgcgatggggtgaa

SEQ ID NO: 658916 - DNA, 75 bp, synthetic construct
  source 1..75: mol_type = other DNA
ataccaaacaacttgaagggcaaagcgatctcggttttgcaggttttcgcgtgtttaaagctccagaactggcgc

SEQ ID NO: 658917 - DNA, 75 bp, synthetic construct
  source 1..75: mol_type = other DNA
acttctccattctacagtcaatggcgcacgacttagcgcaaacagcatggcgtggtgcaccacgtccgttacctg

SEQ ID NO: 658918 - DNA, 75 bp, synthetic construct
  source 1..75: mol_type = other DNA
cagaaaaagcagtcaaagcgggcgacgaactggcgtttcagtatcgcctttactggagtgcgcaacctcccgttc

SEQ ID NO: 658919 - DNA, 75 bp, synthetic construct
  source 1..75: mol_type = other DNA
ctctactcaatggcagacatacaagaagtcactcatttattattgcagggaccccaggaatgggaagcaggagcg

SEQ ID NO: 658920 - DNA, 75 bp, synthetic construct
  source 1..75: mol_type = other DNA
tctcccattatcaggacattatggctggtataacaaacgcccaagtctgtgggtggaaccgcgtaacaagtgggg

SEQ ID NO: 658921 - DNA, 75 bp, synthetic construct
  source 1..75: mol_type = other DNA
gaaacatggctgtatcagtatttcccgccagcgccggataaacgtcagtatgttgatgaccgcgtgatgagttaa

SEQ ID NO: 658922 - DNA, 75 bp, synthetic construct
  source 1..75: mol_type = other DNA
tcaaaagctgctgcggcggaaggtgttacaagcttatctggtcttcctggtgtaggtgcaacaggggtgataacg

SEQ ID NO: 658923 - DNA, 75 bp, synthetic construct
  source 1..75: mol_type = other DNA
ttattactgaattaggaagaaaagctgatgaaatgataacttcatttgggggaaaccttgataagcaactggttt

SEQ ID NO: 658924 - DNA, 75 bp, synthetic construct
  source 1..75: mol_type = other DNA
tctacagcagaagttagcggcaaaaccatcaaccgcacaagatgttggtgagttcgttggacaagcagcaccatt

SEQ ID NO: 658925 - DNA, 75 bp, synthetic construct
  source 1..75: mol_type = other DNA
cagagataaaagcagatcttcaagaggctcttgccgaagaatcaaaacaaaaaagcgagctggctcgacgcaaat

SEQ ID NO: 658926 - DNA, 75 bp, synthetic construct
  source 1..75: mol_type = other DNA
tgcgggatgtcggcgttgatactatgtatggggtggcattcggcgaaaaaggcatgaatccgctgaccagaacct

SEQ ID NO: 658927 - DNA, 75 bp, synthetic construct
  source 1..75: mol_type = other DNA
catatagcggcatcgacgctcggcaccttggaattattgaaagcgcactgatacaagatcagggagccgctgctg

SEQ ID NO: 658928 - DNA, 75 bp, synthetic construct
  source 1..75: mol_type = other DNA
ctgttatcacttaacccattactggcttgctgccgtagatattcccgtggcgagcgataacccagtgcactatgc

SEQ ID NO: 658929 - DNA, 75 bp, synthetic construct
  source 1..75: mol_type = other DNA
tgggtgatgagtctgtcaatgccagcattgacggtgcagcattccgcgtgggtgcaggtgtacaggctgatatca

SEQ ID NO: 658930 - DNA, 75 bp, synthetic construct
  source 1..75: mol_type = other DNA
gaatggtggcggtaccatcaaagctgactttaacaccaatggtttcggtgcgatggttaaaggcggttacacatg

SEQ ID NO: 658931 - DNA, 75 bp, synthetic construct
  source 1..75: mol_type = other DNA
gacgactctggatcaagatgttgttattagcaatacagcagacaaacagattacagccgtaacaattaatgcggc

SEQ ID NO: 658932 - DNA, 75 bp, synthetic construct
  source 1..75: mol_type = other DNA
ctgaaaaactccagctgggatggtgatgtcaacaacgccaaaactgctgtttttctgacggatggttctgtgtgg

SEQ ID NO: 658933 - DNA, 75 bp, synthetic construct
  source 1..75: mol_type = other DNA
gtacaaggcccagaccatcctggaagctcagggtgaagtggcgcgctttgctaaacttctgccggaatataaagc

SEQ ID NO: 658934 - DNA, 75 bp, synthetic construct
  source 1..75: mol_type = other DNA
cacaaagtcaattcagatgccaggtatgtggatatacagcgaacgccgatgtaaacggcgctcgtaacattttag

SEQ ID NO: 658935 - DNA, 75 bp, synthetic construct
  source 1..75: mol_type = other DNA
aaaaaaagcttcacacacttagcgccaatacacggtacacatattgttgagcgtaatttatcggtccttgagcca

SEQ ID NO: 658936 - DNA, 75 bp, synthetic construct
  source 1..75: mol_type = other DNA
tgctgggataccgttcggtgaatgcagcggtggagcatcttcgcgcactggagaaaaaaggcgtcatcacgataa

SEQ ID NO: 658937 - DNA, 75 bp, synthetic construct
  source 1..75: mol_type = other DNA
gcttcataccgcggtgaaggacgacgacagcgaggtggccgggattatccgcgcactgcttgctggtgaggaaaa

SEQ ID NO: 658938 - DNA, 75 bp, synthetic construct
  source 1..75: mol_type = other DNA
acgtacgttgatgatcacctcgcaggtgttattcctggcggcggggatcacccttgccgtttcaccttcccatgc

SEQ ID NO: 658939 - DNA, 75 bp, synthetic construct
  source 1..75: mol_type = other DNA
gcactgcttgccggtgaggaaaacgccaggctgcgtgcagcccactggttacatgagagaggcctgaaagtatga

SEQ ID NO: 658940 - DNA, 75 bp, synthetic construct
  source 1..75: mol_type = other DNA
ccacacacgttccgacacagctatatcatgcacatgctctatcaccgccagccccggaaagtcatccaggcactg

SEQ ID NO: 658941 - DNA, 75 bp, synthetic construct
  source 1..75: mol_type = other DNA
ctccacgaacagtggagtaagcaacacatcgtccaccagtcagggcgatattatggaccaacgccgcgctaacgc

SEQ ID NO: 658942 - DNA, 75 bp, synthetic construct
  source 1..75: mol_type = other DNA
gtaccgtgattcgtagcgatactcagcgcgaactggaagagacgattcgtccgtatgacatgggtatcacgctgc

SEQ ID NO: 658943 - DNA, 75 bp, synthetic construct
  source 1..75: mol_type = other DNA
gctcactgcttgccggtgaggaaaacgccaggctgcgtgcaacccactggttacataagaggggtatgaaagtat

SEQ ID NO: 658944 - DNA, 75 bp, synthetic construct
  source 1..75: mol_type = other DNA
gctcactgcttgcaggtgaggaaaatgccaggctgcgtgcagcccactggttacatgagaggggcatgaaagtat

SEQ ID NO: 658945 - DNA, 75 bp, synthetic construct
  source 1..75: mol_type = other DNA
attcctgtatcgcaaatatccgcagggactaccttcacaaagtcacaacgaccgtcagcaaaaaccacgcaatga

SEQ ID NO: 658946 - DNA, 75 bp, synthetic construct
  source 1..75: mol_type = other DNA
gcctaatgaagatggtggatggcaattaactagttcagtaactggcaatcctcgtttgcgtgtccgcactatcca

SEQ ID NO: 658947 - DNA, 75 bp, synthetic construct
  source 1..75: mol_type = other DNA
ggccatcacttcgtttaccgactgcgtagcgaatttatcaagcggattctggatacccacgtcgagcgcattgaa

SEQ ID NO: 658948 - DNA, 75 bp, synthetic construct
  source 1..75: mol_type = other DNA
gcgcattgccgacgctgctgacggcgcaggtggcgtttaacaagctgaacaaattcgcgctcgcgcctttcaaag

SEQ ID NO: 658949 - DNA, 75 bp, synthetic construct
  source 1..75: mol_type = other DNA
cgtctctggcaggagaaaatggatgcaattaacaagtccgtcactcgtcagtctgaacaggagactatccagaag

SEQ ID NO: 658950 - DNA, 75 bp, synthetic construct
  source 1..75: mol_type = other DNA
tcgatcaactactggggccgggggggaaacctgctaacccgcaactggtcgaaaagtggctggctcagttgaaaa

SEQ ID NO: 658951 - DNA, 75 bp, synthetic construct
  source 1..75: mol_type = other DNA
gttgttgactggcttatatcagccgcaaagcggagaaattctgctggatggcaaacctgtccgcggtgaaaaaac

SEQ ID NO: 658952 - DNA, 75 bp, synthetic construct
  source 1..75: mol_type = other DNA
ctgaaccgcgagcgcgccgagtacgtatttaacaatctctacatccccgatgcgcaagaatatcgccatcatatt

SEQ ID NO: 658953 - DNA, 75 bp, synthetic construct
  source 1..75: mol_type = other DNA
cagtgtccgttatcactggaagtctcatccagacattgggtgatgaattgctacaaaaagctgagagagaaaaaa

SEQ ID NO: 658954 - DNA, 75 bp, synthetic construct
  source 1..75: mol_type = other DNA
catccagacactgggtgataaattgctacacattgctgagaagaaaaaaacattgtctggcgttatgaaaatttt

SEQ ID NO: 658955 - DNA, 75 bp, synthetic construct
  source 1..75: mol_type = other DNA
aattgatcacagtttcgttggccgcgtaaacgcagacccagaatcaacccgaattctggattgtgtattggatct

SEQ ID NO: 658956 - DNA, 75 bp, synthetic construct
  source 1..75: mol_type = other DNA
tatgcgtctgacagagggcgcaccagatgtgaaacaggaactgcttaaccgtctgctatccgggaaaatactgac

SEQ ID NO: 658957 - DNA, 75 bp, synthetic construct
  source 1..75: mol_type = other DNA
atcttcctataagatttaacagaaaaacacaaaaaatttatgtttcagatttaattattgaaggcaatatcttct

SEQ ID NO: 658958 - DNA, 75 bp, synthetic construct
  source 1..75: mol_type = other DNA
atatcatttccatttgtcgggaaatgaatgcgtcaggtctgaatcaaggaacatcaggtaatgtgagtgccagat

SEQ ID NO: 658959 - DNA, 75 bp, synthetic construct
  source 1..75: mol_type = other DNA
gcagcaataatcgccgggatacctggagcgatcatatccgccgaacaatcattaaagaaagccgcccatttattc

SEQ ID NO: 658960 - DNA, 75 bp, synthetic construct
  source 1..75: mol_type = other DNA
acggatgccagtattaggcgcagaccgcgaatggaatgcgattcatcgactgcgggatgtcggcgttgatactat

SEQ ID NO: 658961 - DNA, 75 bp, synthetic construct
  source 1..75: mol_type = other DNA
cacgtcgaacattacgctttgaattggctgggaaaagctatttccttaaatggcacaaaggtacgaccttaaaag

SEQ ID NO: 658962 - DNA, 75 bp, synthetic construct
  source 1..75: mol_type = other DNA
tgggatgtcctaaatggctgtatgcagctaggttatccctttggtaaatgttttttaatgttagataaaatgtga

SEQ ID NO: 658963 - DNA, 75 bp, synthetic construct
  source 1..75: mol_type = other DNA
atgagtattacttatgacaatatggatattttcaccggatcgcatgttgaattatccatttctacgaatattgat

SEQ ID NO: 658964 - DNA, 75 bp, synthetic construct
  source 1..75: mol_type = other DNA
ggctgccacgctggcagtgcctttcacaggtgacgggcgggatgctgcggagatcctgcgtacactgcctcccct

SEQ ID NO: 658965 - DNA, 75 bp, synthetic construct
  source 1..75: mol_type = other DNA
atgaccatgatgttactggtaagttggctggctatcgtaaacttgaatcaacaacactcacagtaaaccgtgttc

SEQ ID NO: 658966 - DNA, 75 bp, synthetic construct
  source 1..75: mol_type = other DNA
gatttggctggcggcggtggttggtatcggcgcatggaatatgctgatcgggattctgattacctgtagcatagt

SEQ ID NO: 658967 - DNA, 75 bp, synthetic construct
  source 1..75: mol_type = other DNA
cattatggcgttgaccgctggcgtcagcatgaccgtttcattctccacgccatttgcgctgggaatttttaagcc

SEQ ID NO: 658968 - DNA, 75 bp, synthetic construct
  source 1..75: mol_type = other DNA
gtagccagctcgaccttaggtattgcgcaggtttgcggttcgtcactgtggatttggctggcagcggtggttggt

SEQ ID NO: 658969 - DNA, 75 bp, synthetic construct
  source 1..75: mol_type = other DNA
actggtgacgctgaccggcgggcaaaaacacgtagcgcaagcggcggagttctgggtgttctgtgccgactttaa

SEQ ID NO: 658970 - DNA, 75 bp, synthetic construct
  source 1..75: mol_type = other DNA
tttatgaaggtttattttgggatgcctttacgcgatatttatagacttgagattgatttacttaaaaaggcaagg

SEQ ID NO: 658971 - DNA, 75 bp, synthetic construct
  source 1..75: mol_type = other DNA
ttttattgcagcatcctaaaattcacgatgcctgtgtggttgcaatgtccgatgaacgtttaggtgaacgatcat

SEQ ID NO: 658972 - DNA, 75 bp, synthetic construct
  source 1..75: mol_type = other DNA
gcaacaagatgcgtttgcagggaatgaagatggtatcagcctcttctatctctgacccaatcattcagctgattg

SEQ ID NO: 658973 - DNA, 75 bp, synthetic construct
  source 1..75: mol_type = other DNA
agattgagcgtgctaccggcgatgtggaattccgtaatgttaccttcacctatccagggcgtgaagttcccgctt

SEQ ID NO: 658974 - DNA, 75 bp, synthetic construct
  source 1..75: mol_type = other DNA
cagatcgctccgtgctgatgtggatgccgctggtggttattgggctgatgattttacgtggtatcaccagttata

SEQ ID NO: 658975 - DNA, 75 bp, synthetic construct
  source 1..75: mol_type = other DNA
tatccagcatggcatccttttttgctggaaagagataaagctatttgggcgcctatgactcccaataatactcct

SEQ ID NO: 658976 - DNA, 75 bp, synthetic construct
  source 1..75: mol_type = other DNA
gtcgaggacggggtcattgtggaacgcggtacgcacaacgatttgcttgaacaccgtggtgtctacgcgcaactt

SEQ ID NO: 658977 - DNA, 75 bp, synthetic construct
  source 1..75: mol_type = other DNA
agatgctgaaaggccacaaagaggtgttgatttttggtggtcaggaagtagaaacgaagcgttttgataaagtca

SEQ ID NO: 658978 - DNA, 75 bp, synthetic construct
  source 1..75: mol_type = other DNA
ccatggactttattaataagatggataaaggtcttgatacggtaattggtgaaaatggtgtgttgctctccggtg

SEQ ID NO: 658979 - DNA, 75 bp, synthetic construct
  source 1..75: mol_type = other DNA
agaacggcgggcacgtctggagtcgccgggcgatcccgttttgctggcaacgctggcggcaaaagaaggggtgga

SEQ ID NO: 658980 - DNA, 75 bp, synthetic construct
  source 1..75: mol_type = other DNA
gttctgtagttattcgtgatgttcctgacaatgtagtagtggccggggctcctacaaagtttattagagcaaggt

SEQ ID NO: 658981 - DNA, 75 bp, synthetic construct
  source 1..75: mol_type = other DNA
tgcgattcaggcggcactggatgagttgcagaaaaaccgtacctctctggtgattgcccaccgcttgtctaccat

SEQ ID NO: 658982 - DNA, 75 bp, synthetic construct
  source 1..75: mol_type = other DNA
agattgagcgtgctactggcgacgtcgaatttcgcaatgtcacctttacctatccggggcgtgaagtccctgcgc

SEQ ID NO: 658983 - DNA, 75 bp, synthetic construct
  source 1..75: mol_type = other DNA
gcaacaagatgcgtttgcagggaatgaagatggtatctgcctcttccatctctgacccgatcattcagctgattg

SEQ ID NO: 658984 - DNA, 75 bp, synthetic construct
  source 1..75: mol_type = other DNA
aggtgggtaaaacacagcggcaccgtaatcaccggacacagtggacagccaccgaaattacgtttgtggaacaac

SEQ ID NO: 658985 - DNA, 75 bp, synthetic construct
  source 1..75: mol_type = other DNA
aacagaaagaagaatgaactgtcctgaaaatggctcattgaaaattggacgaatcagcaccaaggaacgcgaaca

SEQ ID NO: 658986 - DNA, 75 bp, synthetic construct
  source 1..75: mol_type = other DNA
aaatcagaaaaatgcgtgattccgggctggttgaatttcatgtacacactcattcacataaacgttgggacaggc

SEQ ID NO: 658987 - DNA, 75 bp, synthetic construct
  source 1..75: mol_type = other DNA
agcttggtttctcttatttatatacaaccgaaagaagaatgaactgtcctgaaaatggttcattacgcatagggc

SEQ ID NO: 658988 - DNA, 75 bp, synthetic construct
  source 1..75: mol_type = other DNA
taattgtggtgatgattatcttcgcccgccgcaccaaacgttccttcttccaggtatctgattttatagcaccgc

SEQ ID NO: 658989 - DNA, 75 bp, synthetic construct
  source 1..75: mol_type = other DNA
cgttttccttggcggacgtattgggtatgttctgttctacaacttcccgcagtttatggctgatccgctgtatct

SEQ ID NO: 658990 - DNA, 75 bp, synthetic construct
  source 1..75: mol_type = other DNA
atgaccagtagctatctgcattttccggaattcgatccggtcattttctcaataggccccgtagcgcttcactgg

SEQ ID NO: 658991 - DNA, 75 bp, synthetic construct
  source 1..75: mol_type = other DNA
atcgcagggattctggctccgttaagtggctcctgtaccgtagaaccaaaggcgcgcattgcctatctgccacaa

SEQ ID NO: 658992 - DNA, 75 bp, synthetic construct
  source 1..75: mol_type = other DNA
gtgtgtagctttacgccgctatcagtcgaaggaatgtcatgacggaatgcaatgggatacaaccgatcatggttg

SEQ ID NO: 658993 - DNA, 75 bp, synthetic construct
  source 1..75: mol_type = other DNA
cttggccggtctgcccatggggtggcccgaattgttcagcttttaggtctgtcccaaggcgtggcaccgccctag

SEQ ID NO: 658994 - DNA, 75 bp, synthetic construct
  source 1..75: mol_type = other DNA
ccgactcatgaaagaagatattctggtgggaaaacaatatctgatggaaaagctgggatcctgtagttcccatct

SEQ ID NO: 658995 - DNA, 75 bp, synthetic construct
  source 1..75: mol_type = other DNA
tcttattacggggctggttggtgagggagaagtacgtagcaggcaggagcaggaatattctcaccgcgactgtga

SEQ ID NO: 658996 - DNA, 75 bp, synthetic construct
  source 1..75: mol_type = other DNA
aaagcgtgatgacgacgaaccgcagaatccgcttacgcaagctgttgccgtcgagccagaagatgagtgcgacgg

SEQ ID NO: 658997 - DNA, 75 bp, synthetic construct
  source 1..75: mol_type = other DNA
tggcgcaccgcaaagtgagccagttttgagaccgctgcaaacggtaacacacgaaccgaagtctgaaacaactaa

SEQ ID NO: 658998 - DNA, 75 bp, synthetic construct
  source 1..75: mol_type = other DNA
aaggtcgccatccggtagttgaacaagtactgaatgagccatttatcgctaacccgctgaatctgtcgccgcagc

SEQ ID NO: 658999 - DNA, 75 bp, synthetic construct
  source 1..75: mol_type = other DNA
tctctagccacacaccgatgatgcagcagtatctcaggctgaaagcccagcatcccgagatcctgctgttttacc

SEQ ID NO: 659000 - DNA, 75 bp, synthetic construct
  source 1..75: mol_type = other DNA
gcaaaaagtcgagattggcccgattgaccgtatctttacccgcgtaggcgcggcagatgacctggcttccgggcg

SEQ ID NO: 659001 - DNA, 75 bp, synthetic construct
  source 1..75: mol_type = other DNA
aggcgtcgccaacgtgcatctcgatgcactggagcacggcgacaccattgcctttatgcatagcgtgcaggatgg

SEQ ID NO: 659002 - DNA, 75 bp, synthetic construct
  source 1..75: mol_type = other DNA
aggttattaagcgcgcacggcaaaaactgcgtgagctggaaagcatttcgccgaacgccgccgctacacaggttg

SEQ ID NO: 659003 - DNA, 75 bp, synthetic construct
  source 1..75: mol_type = other DNA
caaaagaggttattaagcgcgcacggcaaaagctgcgtgagctggaaagcatttcgccgaacgccgccgctacgc

SEQ ID NO: 659004 - DNA, 75 bp, synthetic construct
  source 1..75: mol_type = other DNA
acaaaaagtcgagattggacctatcgatcgcatctttacccgcgtaggcgcggcagatgacctggcttccgggcg

SEQ ID NO: 659005 - DNA, 75 bp, synthetic construct
  source 1..75: mol_type = other DNA
aggatttcaccgccgagttacagccggtactccggcaggtcggcgatctggagcgtattctggcacgcttggcgt

SEQ ID NO: 659006 - DNA, 75 bp, synthetic construct
  source 1..75: mol_type = other DNA
gtcacgccgatgggtagccgtatgctgaaacgctggctgcatatgccggtgcgcgacacccgtgtgttgcttgag

SEQ ID NO: 659007 - DNA, 75 bp, synthetic construct
  source 1..75: mol_type = other DNA
tcgtcgcggcctgcgccgtcgcccgctgtgggagtttgaaatcgacaccgcgcgccagcagttaaacctgcaatt

SEQ ID NO: 659008 - DNA, 75 bp, synthetic construct
  source 1..75: mol_type = other DNA
ccaccgaatacagtctggtgttaatggatgagatcgggcgtggaacgtccacttacgatggtctgtcgctggcgt

SEQ ID NO: 659009 - DNA, 75 bp, synthetic construct
  source 1..75: mol_type = other DNA
ggagcacggcgacaccattgcctttatgcacagcgtgcaggatggcgcggcgagcaaaagctacggcctggcggt

SEQ ID NO: 659010 - DNA, 75 bp, synthetic construct
  source 1..75: mol_type = other DNA
atgtccaggattaatgctcagataaaagaggttgatgacaaactcgatgattgcgagcaagccattaaagagtcg

SEQ ID NO: 659011 - DNA, 75 bp, synthetic construct
  source 1..75: mol_type = other DNA
aaaaaggtctccctaaaattccgcagcatttaggggcgcaggggaagtactggttcaggcgaatggcggaagagc

SEQ ID NO: 659012 - DNA, 75 bp, synthetic construct
  source 1..75: mol_type = other DNA
attagcgacctgggtgaagatgctgactttatggatatgagcgaattttgtgtggacacatacaaccgcagccag

SEQ ID NO: 659013 - DNA, 75 bp, synthetic construct
  source 1..75: mol_type = other DNA
acaacttgctaatttgagagaagaagtaaggagtgaatatgtcactttaagccattctattgatattagtgactt

SEQ ID NO: 659014 - DNA, 75 bp, synthetic construct
  source 1..75: mol_type = other DNA
tatagctgtccgggaatgccgaatggtgttcagtgtatgtcagcgcgagacgtttacgccgcaaccaatgacgga

SEQ ID NO: 659015 - DNA, 75 bp, synthetic construct
  source 1..75: mol_type = other DNA
ggggcgcaggggaagtactggttcaggcgaatggcggaagagctgaatgcggaagggatcatttctcagcttgat

SEQ ID NO: 659016 - DNA, 75 bp, synthetic construct
  source 1..75: mol_type = other DNA
agccgggcgaaagtaaataccgccggaccggatgatgttgatccgctggcggaacttttaaaagcgagagactga

SEQ ID NO: 659017 - DNA, 75 bp, synthetic construct
  source 1..75: mol_type = other DNA
atcaatatccgtctcgaacggctctcttcaccgcttgacgacgggcaggttatctcaatggacaagccggatgag

SEQ ID NO: 659018 - DNA, 75 bp, synthetic construct
  source 1..75: mol_type = other DNA
cgccggaacatgacgtttacgtgtgtgaggggtgggccaccggggccgcccttctccagtactggaacgtcatgg

SEQ ID NO: 659019 - DNA, 75 bp, synthetic construct
  source 1..75: mol_type = other DNA
ctcgattcacaaaaacgaacaaaagaggatctacaacatgttaataaatcaatagagaagttatcttttgccata

SEQ ID NO: 659020 - DNA, 75 bp, synthetic construct
  source 1..75: mol_type = other DNA
tgagagataaacagaatcagtttttatcgataaatggagaaaatctgcattcgttaaaatcgcgtcatgtgcagg

SEQ ID NO: 659021 - DNA, 75 bp, synthetic construct
  source 1..75: mol_type = other DNA
tctggacagactgaccagagagcggaaaacaacacagcaggctattctggaacaactgattctgaaccgtagact

SEQ ID NO: 659022 - DNA, 75 bp, synthetic construct
  source 1..75: mol_type = other DNA
ttacgacggttctccccaggactgaaagcccagtttgccttcggcatggtctttttgttcgttcagcccgatgcc

SEQ ID NO: 659023 - DNA, 75 bp, synthetic construct
  source 1..75: mol_type = other DNA
gctgtatcttctttcgggtgggtacagggctgtgcgcgatttctggcgcaggcagattgataaaagggccgcaga

SEQ ID NO: 659024 - DNA, 75 bp, synthetic construct
  source 1..75: mol_type = other DNA
ttccggtgaatgctgccatggtggttacgttgcaatattccgtgggccgccgacttaacccggctaacatccgcg

SEQ ID NO: 659025 - DNA, 75 bp, synthetic construct
  source 1..75: mol_type = other DNA
atggccaacaataacgaaattgatcctttgctgacgctggagttatccggcgtaaaaacgtatgagtcccaggag

SEQ ID NO: 659026 - DNA, 75 bp, synthetic construct
  source 1..75: mol_type = other DNA
ggggcgtcaaaagagctttgggatagccgccccgaagggagcggctggagctggaaggatttggcctgggatgtc

SEQ ID NO: 659027 - DNA, 75 bp, synthetic construct
  source 1..75: mol_type = other DNA
aatgaatattcacagcatcaggggatgagccgggatcgcagtgccatgtttggattgatgttctctgtcagtttg

SEQ ID NO: 659028 - DNA, 75 bp, synthetic construct
  source 1..75: mol_type = other DNA
gtaccgaaagacgcctgatgcagagaactatccataaaacacgcgacaaaaaccatgcccgcaggctgaccgcta

SEQ ID NO: 659029 - DNA, 75 bp, synthetic construct
  source 1..75: mol_type = other DNA
tgctatccgggcacggaattcaggccgataagagaaacgccctccggcgtcatgtggtaacaggcaaaggtatga

SEQ ID NO: 659030 - DNA, 75 bp, synthetic construct
  source 1..75: mol_type = other DNA
ttggacgaagcattccgcggggcttatgacaatatctaccgtgcttcacgtaatatcgccgcgacactggcgatt

SEQ ID NO: 659031 - DNA, 75 bp, synthetic construct
  source 1..75: mol_type = other DNA
gtgcggcacctgtcgggtgttgtgcggtaacactattctcgaacagtggcaatatcccgcaggcaccttcggtat

SEQ ID NO: 659032 - DNA, 75 bp, synthetic construct
  source 1..75: mol_type = other DNA
tggggaaaaatcattggcgtggccgtggccttactgatgggcggcggcttttggggcgtagtattgggcctgtta

SEQ ID NO: 659033 - DNA, 75 bp, synthetic construct
  source 1..75: mol_type = other DNA
gtggttcgccaaccagcgtgagcgtcaggcgctgttttttgccaccacttttgaagtgatggggcatttaaccaa

SEQ ID NO: 659034 - DNA, 75 bp, synthetic construct
  source 1..75: mol_type = other DNA
aggttcatggatacttgcgcattctatacgaaaagagaagggggatgtttgggaaggtgtcggtagatatcattc

SEQ ID NO: 659035 - DNA, 75 bp, synthetic construct
  source 1..75: mol_type = other DNA
agctggaaggatttggcctgggatatcgccggtgcaagcaccggctataccgtctggcaactgacccgtcactaa

SEQ ID NO: 659036 - DNA, 75 bp, synthetic construct
  source 1..75: mol_type = other DNA
cattaagcttgggcagttggttctgcttgaagcctttggcggtgggttcacctggggctccgcgctggttcgttt

SEQ ID NO: 659037 - DNA, 75 bp, synthetic construct
  source 1..75: mol_type = other DNA
tgttgttctgacggatggttctgtgtggaatggtgccattaacagcaatcctgttgcaggaagtcatgcagtggc

SEQ ID NO: 659038 - DNA, 75 bp, synthetic construct
  source 1..75: mol_type = other DNA
gctactgatagcacggtatcaactacaccggttacattggataaagataagacaactctggaacaagatgttgtt

SEQ ID NO: 659039 - DNA, 75 bp, synthetic construct
  source 1..75: mol_type = other DNA
taatatgtttgatggcgcgctgttcctcggcgtgtgcgacaagattgtccctgggcttacgatggctgctttgtc

SEQ ID NO: 659040 - DNA, 75 bp, synthetic construct
  source 1..75: mol_type = other DNA
tgctggcaaaagtgcgcgacggggacatcattcgtgtgaatggacagacaggcgaactgacgctgctggtagacg

SEQ ID NO: 659041 - DNA, 75 bp, synthetic construct
  source 1..75: mol_type = other DNA
tgtttaccgtcatggtggccaacctgatccactgggcggaagaacgcggctaccggctgacgtttggtgaagcgt

SEQ ID NO: 659042 - DNA, 75 bp, synthetic construct
  source 1..75: mol_type = other DNA
cagtcaatactggcacgtttgcttctcaaaacggcactctgattgttgatgcctcttctgaaaacactctggata

SEQ ID NO: 659043 - DNA, 75 bp, synthetic construct
  source 1..75: mol_type = other DNA
cgatggttaaaggcggttacacatggaaagacggtaatggcctgtttattcagccatatgccaaactgtctgcgc

SEQ ID NO: 659044 - DNA, 75 bp, synthetic construct
  source 1..75: mol_type = other DNA
cgggctgatgttctctgttgggctgggcgcgtcaaaagaactttgggatagccgccccgaagggagcggctggag

SEQ ID NO: 659045 - DNA, 75 bp, synthetic construct
  source 1..75: mol_type = other DNA
aattttttggcacgcaaaaggccgttaacgatctcaaccttcattttcaggaggggagtttttcggtgctgattg

SEQ ID NO: 659046 - DNA, 75 bp, synthetic construct
  source 1..75: mol_type = other DNA
gctttgccggagaagaaattcgctcgctgccagtgctggagttgcgccgccggatgggatacgccatccagtcga

SEQ ID NO: 659047 - DNA, 75 bp, synthetic construct
  source 1..75: mol_type = other DNA
gtggagcatgacagcggagtgatccgctttgccggagaagaaattcgctcgctgccagtactggagttgcgccgc

SEQ ID NO: 659048 - DNA, 75 bp, synthetic construct
  source 1..75: mol_type = other DNA
tcaacttctgtgctaagcgcattctgatgcgtaatcaaatgagtaaaataatcagacatacagacacagacgaaa

SEQ ID NO: 659049 - DNA, 75 bp, synthetic construct
  source 1..75: mol_type = other DNA
gctgatggttcggagtggtgtcgtaacaaagatgtcgtggtcgataaaaaacaatccgtcatctttgaaaaagcc

SEQ ID NO: 659050 - DNA, 75 bp, synthetic construct
  source 1..75: mol_type = other DNA
tcatacctgtgggagcgatacaaagcctttttcccaaccgcagaggcaaaattgcgggcgatgaagccagaagag

SEQ ID NO: 659051 - DNA, 75 bp, synthetic construct
  source 1..75: mol_type = other DNA
agttccttaatgcagaaatcatcgaagccatcctggatcgtactgccgcgcaagatggcgatatgattttcttcg

SEQ ID NO: 659052 - DNA, 75 bp, synthetic construct
  source 1..75: mol_type = other DNA
agtctgattttacgtaatcccaaagcgatggacagcgcccgtaatcaggtgatgtttgcacttaatgattatctc

SEQ ID NO: 659053 - DNA, 75 bp, synthetic construct
  source 1..75: mol_type = other DNA
atgcccagcagcatctggttcaaagcattactgttatttgttgccctttgggcacccttaagtcaggcgaaaacg

SEQ ID NO: 659054 - DNA, 75 bp, synthetic construct
  source 1..75: mol_type = other DNA
acacccagcgcctgccgcagctgttccaggctctgctggagggctactttagctataccgctacggaagatcagc

SEQ ID NO: 659055 - DNA, 75 bp, synthetic construct
  source 1..75: mol_type = other DNA
tcgacgaatacggtaacttcgttaagatctatggtgcgaaaggtttggcttacatcaaagtcaacgaacgtgcga

SEQ ID NO: 659056 - DNA, 75 bp, synthetic construct
  source 1..75: mol_type = other DNA
tggtgatatgcagcagacggtgtttggtattctgggtatcaacgaagaggaacagcgcgagaaattcggcttcct

SEQ ID NO: 659057 - DNA, 75 bp, synthetic construct
  source 1..75: mol_type = other DNA
gaccgacgttgccgatctgctgaaatccgttgaattcgcggtatttgcggggccggcgaacgatccgaaaggccg

SEQ ID NO: 659058 - DNA, 75 bp, synthetic construct
  source 1..75: mol_type = other DNA
tttcttcggtgccgacaacaagaaaattgttgccgacgcgatgggcgcactgcgtctgaaagtgggtaaagacct

SEQ ID NO: 659059 - DNA, 75 bp, synthetic construct
  source 1..75: mol_type = other DNA
tgttgccgctctgcgtgttccgggtggcgcatcgctgacccgtaagcagatcgacgaatacggtaacttcgttaa

SEQ ID NO: 659060 - DNA, 75 bp, synthetic construct
  source 1..75: mol_type = other DNA
acatcgaaaccccgatgctgaccaaagcgacgccggaaggcgcgcgtgactacctggtgccttctcgtgtgcata

SEQ ID NO: 659061 - DNA, 75 bp, synthetic construct
  source 1..75: mol_type = other DNA
cgcacggctttctatctggaagttgagaacgacgccttgcctggtgcggtagaccgcctggccgatgctattgct

SEQ ID NO: 659062 - DNA, 75 bp, synthetic construct
  source 1..75: mol_type = other DNA
cggcgcagctttctggtggtcagaaacagcgtgtggcgctggcgcgtgcgcttgccgtggaaccgcaaattctgt

SEQ ID NO: 659063 - DNA, 75 bp, synthetic construct
  source 1..75: mol_type = other DNA
ggctgacgcgccggatcaggtatggcgcgaaccggcgacccgttttgtgctcgaatttatgggcgaagtgaaccg

SEQ ID NO: 659064 - DNA, 75 bp, synthetic construct
  source 1..75: mol_type = other DNA
gtgctgccgcgtcgcgagcgcccgaatgccgcagccatcaaagcgaaagtgacaaaattgctggagatggtgcag

SEQ ID NO: 659065 - DNA, 75 bp, synthetic construct
  source 1..75: mol_type = other DNA
atgattatgcccgggcattaatattgtggcagcatgcatatcatgctggtaagcgtaaactgaccgccgtatgta

SEQ ID NO: 659066 - DNA, 75 bp, synthetic construct
  source 1..75: mol_type = other DNA
tggagtttatgggcgaggtaaaccgcctgcagggaaccattcgcggcgggcagttccacgttggcgcacatcgct

SEQ ID NO: 659067 - DNA, 75 bp, synthetic construct
  source 1..75: mol_type = other DNA
tggggccgtccggttccgggaaaaccacgctgctgcgcattattgccgggctggagcatcaaaccagcgggcata

SEQ ID NO: 659068 - DNA, 75 bp, synthetic construct
  source 1..75: mol_type = other DNA
tcgacatcaaattaggcgtcgataaattccatgttgatgagggccacccgcatatcattttggcggcaaatcccg

SEQ ID NO: 659069 - DNA, 75 bp, synthetic construct
  source 1..75: mol_type = other DNA
catttcagcgtccaagttatatcagtcagcgacgagcatcttgtcgatctgattgctttcagggatgatcctgag

SEQ ID NO: 659070 - DNA, 75 bp, synthetic construct
  source 1..75: mol_type = other DNA
tggcaaaaatggcggcggacacctttggtcgcgtgccgaacaaagagagcaaaaaaccggaaatcaccgtgccgg

SEQ ID NO: 659071 - DNA, 75 bp, synthetic construct
  source 1..75: mol_type = other DNA
aaatgaccgtggcactacgtgaaacgagcgcaggtgaggggatacccggagactttcgtgctcaggcaattttca

SEQ ID NO: 659072 - DNA, 75 bp, synthetic construct
  source 1..75: mol_type = other DNA
atgataaaaatcacaccacataaaatagcaatactcatggggctattattatcgccatctgtatttgcaacggat

SEQ ID NO: 659073 - DNA, 75 bp, synthetic construct
  source 1..75: mol_type = other DNA
gtaagtaaaataacgattccttctgatgttgatgtttttattagtacatggaaaggtatcggacacacacagtta

SEQ ID NO: 659074 - DNA, 75 bp, synthetic construct
  source 1..75: mol_type = other DNA
agagattaaggttttcgtcaggccagaactgaaaaactaccttatcagtccgtgtgcagaggaaggcctaactca

SEQ ID NO: 659075 - DNA, 75 bp, synthetic construct
  source 1..75: mol_type = other DNA
tgtgtgcagaggaaggtgtaactcaggcagagttgatagaaaggcttatcaaaaaagaggcctgtcacaggaata

SEQ ID NO: 659076 - DNA, 75 bp, synthetic construct
  source 1..75: mol_type = other DNA
catgagatcttgcggatctttgaaagcgatcgcgggcgtattattaactctccggcgattcgtcgtctgcaacaa

SEQ ID NO: 659077 - DNA, 75 bp, synthetic construct
  source 1..75: mol_type = other DNA
gagcgcgtacgcgtgctgagcatgggcgatttctctaccgagctgtgtggcggtactcacgccagccgcaccggt

SEQ ID NO: 659078 - DNA, 75 bp, synthetic construct
  source 1..75: mol_type = other DNA
atcgaaaccaacatcatggatctcgatgctgcgaaagcgaaaggcgcgatggcgctatttggcgagaagtatgat

SEQ ID NO: 659079 - DNA, 75 bp, synthetic construct
  source 1..75: mol_type = other DNA
tgttccgcacgctgattcaggcggttgcaaaagtcactggcgcgaccgatctgagcaacaaatcgctgcgtgtta

SEQ ID NO: 659080 - DNA, 75 bp, synthetic construct
  source 1..75: mol_type = other DNA
atgtcgcagacagaaaatacagtgacttcctcatcaggtaacaagcgtgcataccggaaaggtaaccctgttccg

SEQ ID NO: 659081 - DNA, 75 bp, synthetic construct
  source 1..75: mol_type = other DNA
tccttgtacgccggtattcctacccccgccagcgtcaccgccctttatgagcgtaggaactccagcggtgactcc

SEQ ID NO: 659082 - DNA, 75 bp, synthetic construct
  source 1..75: mol_type = other DNA
aacattgatgtattcaccgttaccgctgccactgaacgcgaagcacgcgcccagctgccgcacgcacatctgatt

SEQ ID NO: 659083 - DNA, 75 bp, synthetic construct
  source 1..75: mol_type = other DNA
acgaggcgtggggccagcatgagaaaggttcgctcttttcgctggtggttgaaaatgcctgggaaaaatcacgct

SEQ ID NO: 659084 - DNA, 75 bp, synthetic construct
  source 1..75: mol_type = other DNA
atttatcgtcctttattaagcctgtcgttatcagactttactgaactggtagaaaaagaacgggtgaaacgtttc

SEQ ID NO: 659085 - DNA, 75 bp, synthetic construct
  source 1..75: mol_type = other DNA
catgagatcctgcggatcttcgagagcgatcgcgggcgtatcatcaactctccggcaattcgtcgtctgcaacaa

SEQ ID NO: 659086 - DNA, 75 bp, synthetic construct
  source 1..75: mol_type = other DNA
cggtactcacgccagccgcaccggtgatattggtctgttccgcatcatctctgaatcgggtactgctgcaggcgt

SEQ ID NO: 659087 - DNA, 75 bp, synthetic construct
  source 1..75: mol_type = other DNA
acctcagcctgttgaaaacgcacccggcgtttcgcgcagtattcctcgctcgttttatctcaattgtttctctgg

SEQ ID NO: 659088 - DNA, 75 bp, synthetic construct
  source 1..75: mol_type = other DNA
cgtgtacgccagctttttgctgtcggataaggtgctgctgatgttgtttgcgctggtcctggtggggttggcatt

SEQ ID NO: 659089 - DNA, 75 bp, synthetic construct
  source 1..75: mol_type = other DNA
acctgaatgctggctacagcgcgttttctccggagtattgctgatgatagccacgttgattctggtgacactatg

SEQ ID NO: 659090 - DNA, 75 bp, synthetic construct
  source 1..75: mol_type = other DNA
aatggcccggcaagcctacatgcacctctacctatgcgtgcaggtgaattactagtaaggcatggtttgattgaa

SEQ ID NO: 659091 - DNA, 75 bp, synthetic construct
  source 1..75: mol_type = other DNA
caattcaggaaatacggaacattacacatcgattctttcaacaatggtcgagtcagttccaaaatattcagtcat

SEQ ID NO: 659092 - DNA, 75 bp, synthetic construct
  source 1..75: mol_type = other DNA
gacagcttcgctggctccgttcacgacagcccgccccgccagggggacgcccggggaagccataaacaggagaag

SEQ ID NO: 659093 - DNA, 75 bp, synthetic construct
  source 1..75: mol_type = other DNA
actggctgtcgcgatgggggctgacgttactgtgattagccggactaaaagcaaagaagcagacgcaaaattgct

SEQ ID NO: 659094 - DNA, 75 bp, synthetic construct
  source 1..75: mol_type = other DNA
actggtccgtgcggcccgtgtactgaaattttctacgatcatggtgaccacatctggggtggccctccgggaagt

SEQ ID NO: 659095 - DNA, 75 bp, synthetic construct
  source 1..75: mol_type = other DNA
gtcaggcgtttctcgactttttccatagtaagggacatcaggtagttgccagtagctccctggtaccccataacg

SEQ ID NO: 659096 - DNA, 75 bp, synthetic construct
  source 1..75: mol_type = other DNA
tccctgacggtggtgattctgagcgcgttgatcaacgtctgcgccttctggcgacaagggatccggttgaatacg

SEQ ID NO: 659097 - DNA, 75 bp, synthetic construct
  source 1..75: mol_type = other DNA
ggatggcgacgggaatgcaggtgggcgtgtacgccagctttttgctgtcggataaggtactgctgatgctgtttg

SEQ ID NO: 659098 - DNA, 75 bp, synthetic construct
  source 1..75: mol_type = other DNA
ttgccgttggctgtatggtcgatagctgtatgcattgcgaccagtgtgaacaaggcgaagaacagtattgccgcc

SEQ ID NO: 659099 - DNA, 75 bp, synthetic construct
  source 1..75: mol_type = other DNA
tcaccgccctttatgagcgtaggaactccagcggtgactccttaaaacagtacaaggaggcctttcacatggcta

SEQ ID NO: 659100 - DNA, 75 bp, synthetic construct
  source 1..75: mol_type = other DNA
tggtgaactttatttctcatggcacgcgtaaagacgagccatctcagtcttctgaaccaggaaaccagccgagca

SEQ ID NO: 659101 - DNA, 75 bp, synthetic construct
  source 1..75: mol_type = other DNA
atgaagcgcaccacgacgtgcgttataccgcaaaagcggtgcgtgcggcggtagagctggcggtgaaatacatta

SEQ ID NO: 659102 - DNA, 75 bp, synthetic construct
  source 1..75: mol_type = other DNA
tacgtgaaactgagcgtaaatccattggtcttatccaccaggataacagcaccgatgcgatggaagagatcaaga

SEQ ID NO: 659103 - DNA, 75 bp, synthetic construct
  source 1..75: mol_type = other DNA
atggcgcgtgcgggtttaggccacgaacataaaccggtcggttcgttcctgtttgctggtccaactggggtcggg

SEQ ID NO: 659104 - DNA, 75 bp, synthetic construct
  source 1..75: mol_type = other DNA
attctgttgcaggtgatggacaacggtacgctgaccgataacaacggacgcaaagcggacttccgtaacgtggta

SEQ ID NO: 659105 - DNA, 75 bp, synthetic construct
  source 1..75: mol_type = other DNA
gaacgccataccgtcagccgtctgattggtgcgcctccgggatacgttggttttgatcagggcggtttgctgact

SEQ ID NO: 659106 - DNA, 75 bp, synthetic construct
  source 1..75: mol_type = other DNA
tacttcaaaggcgtggatgacgtgactttttacagcgccacacgcgaagaactaatcgacttcctgaatcacggg

SEQ ID NO: 659107 - DNA, 75 bp, synthetic construct
  source 1..75: mol_type = other DNA
taagcgtgtaggaaccatcaagaaatacttcaaaggcgtggatgacgtgactttttacagcgccacacgcgaaga

SEQ ID NO: 659108 - DNA, 75 bp, synthetic construct
  source 1..75: mol_type = other DNA
tctggcgatacattctgactaacaccaccgttcagtgcgtcacatcgttcgctgcacgcaaattccgccacgggc

SEQ ID NO: 659109 - DNA, 75 bp, synthetic construct
  source 1..75: mol_type = other DNA
accgtgctctggcgcgtcgcttccagaaaattgatattactgaaccgtcgatcgaagaaactgttcaaatcatca

SEQ ID NO: 659110 - DNA, 75 bp, synthetic construct
  source 1..75: mol_type = other DNA
cagccataccagtgaaggccatcgtgtggcggtccactacggctatgacgataaaggccgcctgacgggcgaacg

SEQ ID NO: 659111 - DNA, 75 bp, synthetic construct
  source 1..75: mol_type = other DNA
gacgatctgctggcaactggcggcaccatcgaggcgacggttaaattgattcgtcgcctgggtggtgaagtggct

SEQ ID NO: 659112 - DNA, 75 bp, synthetic construct
  source 1..75: mol_type = other DNA
gcaccacgacgtgcgttataccgcaaaagcggtgcgtgcggcggtagagctggcggtgaaatacattaacgatcg

SEQ ID NO: 659113 - DNA, 75 bp, synthetic construct
  source 1..75: mol_type = other DNA
gcggcaacgaaaaagcgcgcgagcggatgaaagcacaatacagcattgcaggcatgaccaatggcgtcgtggtcg

SEQ ID NO: 659114 - DNA, 75 bp, synthetic construct
  source 1..75: mol_type = other DNA
ctaatgaaaagttaaaacgactgcttgaaatgtatccggaaaagcccgaaagaataaagatgatattaaatgatg

SEQ ID NO: 659115 - DNA, 75 bp, synthetic construct
  source 1..75: mol_type = other DNA
ctgggatcatttttaatggttacacacttaacgagctgccgtttatcaataagatgtgggatggttcaatattta

SEQ ID NO: 659116 - DNA, 75 bp, synthetic construct
  source 1..75: mol_type = other DNA
cctgtcctcgtacattctcaaactgcctttatctggcgttttatcgcttttggtgcgtcagaacgtcaaatcatc

SEQ ID NO: 659117 - DNA, 75 bp, synthetic construct
  source 1..75: mol_type = other DNA
gcatgaaacacgttaagcattatcagaaggaggctttatcaaattatcgcgctggtggccctgtacggcgtgaat

SEQ ID NO: 659118 - DNA, 75 bp, synthetic construct
  source 1..75: mol_type = other DNA
ttattcgttttatggagtcagagaagcaaaagcggatcgctatcggtttttaggcgagattaatcgccgtgggta

SEQ ID NO: 659119 - DNA, 75 bp, synthetic construct
  source 1..75: mol_type = other DNA
gaaattaatcaaaaatgccagactgacgttaggtttgatggttcagcctgatatatttaaaggttatctgcaacg

SEQ ID NO: 659120 - DNA, 75 bp, synthetic construct
  source 1..75: mol_type = other DNA
taaagcgttgctcaagcagctggagcaagacactaatagcatcctgtttattgatgagatccacaccattatcgg

SEQ ID NO: 659121 - DNA, 75 bp, synthetic construct
  source 1..75: mol_type = other DNA
cgagttgcaggttcaactggatcagaaaggtgtttctctggaagtgagccaggaagcacgtaactggctggctga

SEQ ID NO: 659122 - DNA, 75 bp, synthetic construct
  source 1..75: mol_type = other DNA
atcgtgacaaggcaaatgaattaattagaatcttaatttcacaaaacaaaatatttatatcttcatggggtaaaa

SEQ ID NO: 659123 - DNA, 75 bp, synthetic construct
  source 1..75: mol_type = other DNA
gttttctttagatgtttcagaagcagatgagctttattgttggataaaagattactgcacgcaaaaattttcttc

SEQ ID NO: 659124 - DNA, 75 bp, synthetic construct
  source 1..75: mol_type = other DNA
gtcagcctgattcaaagcaaggttccagaataatctccagcccagttatttcaagtgaacatttgccgatattcc

SEQ ID NO: 659125 - DNA, 75 bp, synthetic construct
  source 1..75: mol_type = other DNA
atttttttaaccctggtatgactgttgaacagcttgaagcctggctggagcatgcacaatttgatactggtacat

SEQ ID NO: 659126 - DNA, 75 bp, synthetic construct
  source 1..75: mol_type = other DNA
atgaataaccagtatttacagtttgttcgtgagcagctcattattgccaccgccgatttgagtgaggcaacaaaa

SEQ ID NO: 659127 - DNA, 75 bp, synthetic construct
  source 1..75: mol_type = other DNA
ccaaaacatttactggtcactgggttgcaatgaaacacattttccaccagctggatagtgaggctttattgttgg

SEQ ID NO: 659128 - DNA, 75 bp, synthetic construct
  source 1..75: mol_type = other DNA
taccggagcgtcatctgttttcagatgcagctaacttctacgctaccggcctgcatgagcttgtccactggagtg

SEQ ID NO: 659129 - DNA, 75 bp, synthetic construct
  source 1..75: mol_type = other DNA
atgaatactcaatttctcgaatacgtgcgccagcaactgatggtggccaccgccgatttaagtggtgcgacgaaa

SEQ ID NO: 659130 - DNA, 75 bp, synthetic construct
  source 1..75: mol_type = other DNA
cagagacctttactgaccgctgggttgagatgcgcagcatcttcctgcgactggatagcggggctttattgcagg

SEQ ID NO: 659131 - DNA, 75 bp, synthetic construct
  source 1..75: mol_type = other DNA
tccgttttgcctctcttcttcgccagtaggcaactgctatgagatgtgcgccaaagcttacgataccggctgggg

SEQ ID NO: 659132 - DNA, 75 bp, synthetic construct
  source 1..75: mol_type = other DNA
taaaaccgatcgccctgcgcttcattcagcaaatgcgcacccatccagaactgcgcgatttcccaatcagcggta

SEQ ID NO: 659133 - DNA, 75 bp, synthetic construct
  source 1..75: mol_type = other DNA
atggcgcaccgaaaggtaacttcgcgatcaccatggcattagcggaactggctgaacagttacagatcgaccaac

SEQ ID NO: 659134 - DNA, 75 bp, synthetic construct
  source 1..75: mol_type = other DNA
atgaataaccagtatttacagtttgtgcgtgagcagctcattatcgccaccgccgatttgagtggagcaacaaaa

SEQ ID NO: 659135 - DNA, 75 bp, synthetic construct
  source 1..75: mol_type = other DNA
cgcgttttgatcatctggtgaaagaagataccggttttatcggcttcaaaaatatggagcagattgccgaacatc

SEQ ID NO: 659136 - DNA, 75 bp, synthetic construct
  source 1..75: mol_type = other DNA
tgaaaccaatcgctttgcgctttattcaacaaatgcgcacacacccggaactgcatgatttcccgatcagcggca

SEQ ID NO: 659137 - DNA, 75 bp, synthetic construct
  source 1..75: mol_type = other DNA
aaagatctgatggcctctggcgcaaaaggtattccggagacacagaaatatccggacgtttattgctggatcccg

SEQ ID NO: 659138 - DNA, 75 bp, synthetic construct
  source 1..75: mol_type = other DNA
atgcattgcccattctgtttcgccgtggacactaaggtaattgactctcgtctcgtgggcgagggctcatctgta

SEQ ID NO: 659139 - DNA, 75 bp, synthetic construct
  source 1..75: mol_type = other DNA
atatggctttccgtccaattatcaagcacccacgcctgatggaaagtagcctgtttacgccgatggaggatgcat

SEQ ID NO: 659140 - DNA, 75 bp, synthetic construct
  source 1..75: mol_type = other DNA
cttaaaggtgcttatcaggtacttagggaacctgcccttcaagggtggacagaagtcacaaaaccgttcacaagt

SEQ ID NO: 659141 - DNA, 75 bp, synthetic construct
  source 1..75: mol_type = other DNA
ccaaatttggtaaaactgaaggcggcgcagtctggttggatccgaagaaaaccagcccgtacaaattctaccagt

SEQ ID NO: 659142 - DNA, 75 bp, synthetic construct
  source 1..75: mol_type = other DNA
catcttgttccattgttatgcctgaaacgcttccaacaggcgggccacaagccggttgcgctggtaggcggcgcg

SEQ ID NO: 659143 - DNA, 75 bp, synthetic construct
  source 1..75: mol_type = other DNA
ccccgttcctcgatttcgactgtggagaaaactctgctatcgcggcgaacaactatgactggttcggcaatatga

SEQ ID NO: 659144 - DNA, 75 bp, synthetic construct
  source 1..75: mol_type = other DNA
gttgattctacaattgctgggaaactattagaagcagtaactgagaaaatgggaacggattacactaatttatac

SEQ ID NO: 659145 - DNA, 75 bp, synthetic construct
  source 1..75: mol_type = other DNA
cgcgcaaatgggcttacagggcgattcgtcagggctggccagcgttctcacagtggcttgaagcggtgatccagc

SEQ ID NO: 659146 - DNA, 75 bp, synthetic construct
  source 1..75: mol_type = other DNA
tcacgcttattaaatggagtgtatcaacgggatcttcctcacaaacgcaatgtcgtcagtgcagagaagtattgt

SEQ ID NO: 659147 - DNA, 75 bp, synthetic construct
  source 1..75: mol_type = other DNA
agtaaaacctgctggtgattgcgatattatccattccttgggaataacaagtgatgttcaatatgtatatgtcgg

SEQ ID NO: 659148 - DNA, 75 bp, synthetic construct
  source 1..75: mol_type = other DNA
ccgggcggatatcggcaagcctgaccattgagaacgtgaccgatgagctgaagtcggcactggaaacaaaatttg

SEQ ID NO: 659149 - DNA, 75 bp, synthetic construct
  source 1..75: mol_type = other DNA
ggtaactttgtctttggtggtattgttggctggttgcttgtggacccattcaatggcggtatgtatacactgagt

SEQ ID NO: 659150 - DNA, 75 bp, synthetic construct
  source 1..75: mol_type = other DNA
ctcggtgcaatcggtgaaggtaaagcaccgacatccgttccatccgccgccagctgcgcgctggaagagatcctg

SEQ ID NO: 659151 - DNA, 75 bp, synthetic construct
  source 1..75: mol_type = other DNA
acgctggttggtttaccgctaatcgcgctgtgtcagatgttacgtcgggaagggaaaaatccgctgatgggatag

SEQ ID NO: 659152 - DNA, 75 bp, synthetic construct
  source 1..75: mol_type = other DNA
ttttcaccgactggatagtgaggctttattgtttgtaatgagaacacgttcaaaaaaagacggcattttcaaagc

SEQ ID NO: 659153 - DNA, 75 bp, synthetic construct
  source 1..75: mol_type = other DNA
ttgttgggaatatcagatcgcgataacacagtgggcgtggaatgaatttaatactcaatccggtaccagaaaaat

SEQ ID NO: 659154 - DNA, 75 bp, synthetic construct
  source 1..75: mol_type = other DNA
tggctggcggcgcaggcagtaaaagcagaactttttggtggggaaggttatgaatacaaggagctggcattactg

SEQ ID NO: 659155 - DNA, 75 bp, synthetic construct
  source 1..75: mol_type = other DNA
gacgtgacggcggtggcgggcgacacggcatttcaggctggtataaggagcatcgctcatgcagtggcaaactaa

SEQ ID NO: 659156 - DNA, 75 bp, synthetic construct
  source 1..75: mol_type = other DNA
cgtcgcgctcttctggaaaaactgcaaatctcttttgaatgtgcagcacccgaggtcgacgaaaccccacgcagc

SEQ ID NO: 659157 - DNA, 75 bp, synthetic construct
  source 1..75: mol_type = other DNA
actgattgtgctggccgccctcgatgcgaaacgtccggggccggtggcgacgcgggatatcgagcgggtgctgga

SEQ ID NO: 659158 - DNA, 75 bp, synthetic construct
  source 1..75: mol_type = other DNA
gggagcatattcaagaaatcaatccacgtctgatttttggttcgatcaaagggtttgatgagtgttcgccttatg

SEQ ID NO: 659159 - DNA, 75 bp, synthetic construct
  source 1..75: mol_type = other DNA
tgctggataatccgccgatttccggtaagcagtcgtacgcaaaaggttcatctgtcgccctgatcagtccggtcg

SEQ ID NO: 659160 - DNA, 75 bp, synthetic construct
  source 1..75: mol_type = other DNA
cagagacataccgacctcgctgggagattatgcgtgactgtgttacaggcctggacaaagatgcgcttatatcgg

SEQ ID NO: 659161 - DNA, 75 bp, synthetic construct
  source 1..75: mol_type = other DNA
tgaataccaggagctggcatcactggtgggagtgacatcaaaaaactggtctgagacatttactgaacgctgggt

SEQ ID NO: 659162 - DNA, 75 bp, synthetic construct
  source 1..75: mol_type = other DNA
cagagcagtggcagtatgacgaacgcggctggctgacagacatcagccatatcagcgaagggcaccgggtggcgg

SEQ ID NO: 659163 - DNA, 75 bp, synthetic construct
  source 1..75: mol_type = other DNA
agttctcaacatcttcatggcgccgcgcggttctgtctctcgaagaacatcagaaagcgtggttgctgtggagtt

SEQ ID NO: 659164 - DNA, 75 bp, synthetic construct
  source 1..75: mol_type = other DNA
gcaatggcggaagatgcgcctgtcgtgcacgatgaaccggtggtgtatgttgctggtgcgccagatactctggaa

SEQ ID NO: 659165 - DNA, 75 bp, synthetic construct
  source 1..75: mol_type = other DNA
gtgccgagcgacgataaagtcggcccgttcggggcgaaatcgatctcggaaatcggtgtaaatggcgcagctccg

SEQ ID NO: 659166 - DNA, 75 bp, synthetic construct
  source 1..75: mol_type = other DNA
gcgccaacactggcccttacggtaaccactcactcaccgtaccgtgtaacggaccggcgctgtcgctgccgttat

SEQ ID NO: 659167 - DNA, 75 bp, synthetic construct
  source 1..75: mol_type = other DNA
tcaggttattgagctcgcggtagcgcggaaaaacaatcctcaggcaacaattgatattgccccaaccttccgtga

SEQ ID NO: 659168 - DNA, 75 bp, synthetic construct
  source 1..75: mol_type = other DNA
gcgttccccaggagctaaaggtcaacccgggtaaaaacgtacaaaaactgttgtttaacatgggaatgcactccg

SEQ ID NO: 659169 - DNA, 75 bp, synthetic construct
  source 1..75: mol_type = other DNA
cgccaacctccgttccttctgctgccagttgcgcattggaagagatcctgcgtcagggtcgtgaaatgatccaat

SEQ ID NO: 659170 - DNA, 75 bp, synthetic construct
  source 1..75: mol_type = other DNA
ccttgcttattgccgcacagttagagaaggcagatattcgtaccgcagaatctttgggcaaatggaacgagttaa

SEQ ID NO: 659171 - DNA, 75 bp, synthetic construct
  source 1..75: mol_type = other DNA
atgcgcgctggaaggtatggcgagaacacaggttataccgctgatttgagcggagcaacgaaaggacagcttgaa

SEQ ID NO: 659172 - DNA, 75 bp, synthetic construct
  source 1..75: mol_type = other DNA
gtacaagaaaaattgccagtaaaacactggaacgcttaaagaagttgatctggctggctgcacaggatgtgaaga

SEQ ID NO: 659173 - DNA, 75 bp, synthetic construct
  source 1..75: mol_type = other DNA
gtatgttcggcaagaaaatgcgtcacgtcggcgatcgtgttgctgcggtcgtcgcagaaagtgaagaaattgcgc

SEQ ID NO: 659174 - DNA, 75 bp, synthetic construct
  source 1..75: mol_type = other DNA
cacacgctcacgcactgattactcatctggatgtcagcaaagctgaagccttaccaggcgtcgttcacgttatta

SEQ ID NO: 659175 - DNA, 75 bp, synthetic construct
  source 1..75: mol_type = other DNA
tggtgcaggcgaaaccctgctatgttgaagaccgcgtaacggctgacgcctgcgtcattaaaatgttacgtagcc

SEQ ID NO: 659176 - DNA, 75 bp, synthetic construct
  source 1..75: mol_type = other DNA
accttattgctcctggcggtagtgttattgattggttttatcgtgacctggctttgggcgccagaaactaaagca

SEQ ID NO: 659177 - DNA, 75 bp, synthetic construct
  source 1..75: mol_type = other DNA
gtgtggaccgtaggctatgtgctggcaagtattgccggacatcactttattaccgaaagcccggaggcctggcgc

SEQ ID NO: 659178 - DNA, 75 bp, synthetic construct
  source 1..75: mol_type = other DNA
ctactgcgccaggggcgttttgcagaagctcacgctatcgtacatcgctattttggtccccatgttttactgggc

SEQ ID NO: 659179 - DNA, 75 bp, synthetic construct
  source 1..75: mol_type = other DNA
gttatgggcgccagaaaccaaagctctcccgctggtggcggcgggaaatgtagagcaacgacagggaggtgtgaa

SEQ ID NO: 659180 - DNA, 75 bp, synthetic construct
  source 1..75: mol_type = other DNA
gtttcttggcagcctggttctgggctggatctccgaccatattgggcgacaaaaaatcttcaccttcagcttttt

SEQ ID NO: 659181 - DNA, 75 bp, synthetic construct
  source 1..75: mol_type = other DNA
gggcacgccggaatcgccacgctggctactgcgccaggggcgttttgctgaagctcacgctatcgtgcatcgcta

SEQ ID NO: 659182 - DNA, 75 bp, synthetic construct
  source 1..75: mol_type = other DNA
aaaatcccgccattaagttgacttttagctcccatatctccagaatgccgccgtttgccagaaattcgtcggtaa

SEQ ID NO: 659183 - DNA, 75 bp, synthetic construct
  source 1..75: mol_type = other DNA
gttgtttgagcagtatgccagtcatagcgccgttccagaaccggtcatagcgaaggaagctgtacctgatggctt

SEQ ID NO: 659184 - DNA, 75 bp, synthetic construct
  source 1..75: mol_type = other DNA
tctgctggtcctggaactggcccgtgaggagtttgattacctttccgcagaagagattgctgaagaaatacgccg

SEQ ID NO: 659185 - DNA, 75 bp, synthetic construct
  source 1..75: mol_type = other DNA
cggcaaccatccggttaaagatgttgagaaaaatgtggtgatgattaccgcccagaaccacggttttgcggtgga

SEQ ID NO: 659186 - DNA, 75 bp, synthetic construct
  source 1..75: mol_type = other DNA
catcgttccggcgcaaacttctgcggaagatgtgctgaaaatgaatccagacggcatcttcctctccaacggtcc

SEQ ID NO: 659187 - DNA, 75 bp, synthetic construct
  source 1..75: mol_type = other DNA
gcgctggcgagcggtgcgaagaccatcaaaatgaaatttggtcaccacggcggcaaccatccggttaaagatgtg

SEQ ID NO: 659188 - DNA, 75 bp, synthetic construct
  source 1..75: mol_type = other DNA
ccagcctgatgcttaatgcgttgttaattgttggcgcgttattagggttagtgttgacccacttgttagcgcatc

SEQ ID NO: 659189 - DNA, 75 bp, synthetic construct
  source 1..75: mol_type = other DNA
atgacatttcgttatccgatgttgttgacattcatgttaatgatgttcgctttctgtgttaagggggaaccgcct

SEQ ID NO: 659190 - DNA, 75 bp, synthetic construct
  source 1..75: mol_type = other DNA
tttaccgcgctcgaagcgggcgcgcaggcgctgaaaatattcccgtcatcggcttttggtccgcaatacatcaaa

SEQ ID NO: 659191 - DNA, 75 bp, synthetic construct
  source 1..75: mol_type = other DNA
cggcgaagaaacacaattgatcggcgcgcgtgctttggctccttcctctctttatgtcatgcccggtaccgcatt

SEQ ID NO: 659192 - DNA, 75 bp, synthetic construct
  source 1..75: mol_type = other DNA
aagtgatttctcatatggatatgatgaagatattaaggagtttatcaaagataaaacttatccttacggtaactg

SEQ ID NO: 659193 - DNA, 75 bp, synthetic construct
  source 1..75: mol_type = other DNA
gtcattgccgtgctgcacgatatcaatatggcggcgcgctactgtgattatctggtcgccctgcgcggcggtgaa

SEQ ID NO: 659194 - DNA, 75 bp, synthetic construct
  source 1..75: mol_type = other DNA
ctgatcttcattttctcaatgattgtctttattggtgtttttattgcctggtttgcctctgtatatattcttggc

SEQ ID NO: 659195 - DNA, 75 bp, synthetic construct
  source 1..75: mol_type = other DNA
gcctacctttgcccgaggccgagcgcctggtggcctcgatacaggccaaaggcgcaagcctggccgtccctggcg

SEQ ID NO: 659196 - DNA, 75 bp, synthetic construct
  source 1..75: mol_type = other DNA
gtcacaccttgctggctgaattttccccgcgccgccatcgcggtattttgctgggcgcattcagcgtggtgtgga

SEQ ID NO: 659197 - DNA, 75 bp, synthetic construct
  source 1..75: mol_type = other DNA
cgtcattggttacgccattattcagcttacgcccgccatgcaactgacgccgtttatggcgggaatgatcggcgg

SEQ ID NO: 659198 - DNA, 75 bp, synthetic construct
  source 1..75: mol_type = other DNA
ttttgatatatccgagccagttgagtattttaatcgagatataatcaccagagtgctaacgcaagtttttacttc

SEQ ID NO: 659199 - DNA, 75 bp, synthetic construct
  source 1..75: mol_type = other DNA
aggtgaaatctatagaaccgagcctattctatttggaggggttggaggatatccaggacgggttcaatacccttt

SEQ ID NO: 659200 - DNA, 75 bp, synthetic construct
  source 1..75: mol_type = other DNA
tatcagaggcgatttccaaaaagcaatggtatccgttaacgttgaaaagctgaacaatgccagatcaaaaagaaa

SEQ ID NO: 659201 - DNA, 75 bp, synthetic construct
  source 1..75: mol_type = other DNA
cgcagttggcgccgttgtaaccgcggtttgcgtaaacgtgctgaaaagtctggcgcgtaaaaatgggtcttcaat

SEQ ID NO: 659202 - DNA, 75 bp, synthetic construct
  source 1..75: mol_type = other DNA
cgaaaatttgctggatgcggtaattggtctgccggaaaaactgttctacggtacggggattccggctgcgattct

SEQ ID NO: 659203 - DNA, 75 bp, synthetic construct
  source 1..75: mol_type = other DNA
gtcatatcatgggtacaggccggagcatggaaagaagttggatattctgaggttgatttgagcacagcagaaacg

SEQ ID NO: 659204 - DNA, 75 bp, synthetic construct
  source 1..75: mol_type = other DNA
tggctgggggagtaattcaacacaggaagcgcagttctccgtaatcgatgccatcaccgccagcgagctaattaa

SEQ ID NO: 659205 - DNA, 75 bp, synthetic construct
  source 1..75: mol_type = other DNA
tgttgtggccatacggcgttctgatttttaaatggaatgaaacgcaaatacctgttcgccaaatattggcactga

SEQ ID NO: 659206 - DNA, 75 bp, synthetic construct
  source 1..75: mol_type = other DNA
gtgaaggcgataacgtcgagaaatatgcctatctcgccagcctgaaggagattcaggataacgattacaacctca

SEQ ID NO: 659207 - DNA, 75 bp, synthetic construct
  source 1..75: mol_type = other DNA
aactttgccgccagcggtgggcagaaagccggggaattttataccccgccggaagtctcggacctgattgctgaa

SEQ ID NO: 659208 - DNA, 75 bp, synthetic construct
  source 1..75: mol_type = other DNA
cggatccgttcgcgccctgccaccggtcaggcactgctaaaagcacaactcggtgatgagcgttcggatagttaa

SEQ ID NO: 659209 - DNA, 75 bp, synthetic construct
  source 1..75: mol_type = other DNA
cagcgaattgacctcgcaatgtatccggcagtcaagaactggcatgagcggatccgttcgcgccctgccaccggg

SEQ ID NO: 659210 - DNA, 75 bp, synthetic construct
  source 1..75: mol_type = other DNA
gcgacagacgcgggaatacggctacagcgccacgggcaggctggagagtgtgcgcaccctcgcaccagacctgga

SEQ ID NO: 659211 - DNA, 75 bp, synthetic construct
  source 1..75: mol_type = other DNA
tcagggggattatataaaccagtatggtcccggcacgccggtgcagcagtggatgactactgtgatgccgagaca

SEQ ID NO: 659212 - DNA, 75 bp, synthetic construct
  source 1..75: mol_type = other DNA
cggcagtaaaaaactggtatgagcgaatccgttcgcgtcctgctaccgggcaggcgctgctaaaagcgcaagtaa

SEQ ID NO: 659213 - DNA, 75 bp, synthetic construct
  source 1..75: mol_type = other DNA
cagcgaattgatctcacgatgtatccggcggtaaagaactggtatgagcgaatccgttctcgtccggctaccaac

SEQ ID NO: 659214 - DNA, 75 bp, synthetic construct
  source 1..75: mol_type = other DNA
acaattgctggaagattttgccggtgaggctctgaaccttaaaccgagccgcgtgggtacgcttgatgtgatcgg

SEQ ID NO: 659215 - DNA, 75 bp, synthetic construct
  source 1..75: mol_type = other DNA
gcataacatggtccgcgccgttgccgatccgtggccgggtgccttcagctatgctggcaatcagaaattcaccgt

SEQ ID NO: 659216 - DNA, 75 bp, synthetic construct
  source 1..75: mol_type = other DNA
atcgaaaatgcgggaaatcgctgcgacggcgaaattatcaatattggcaatcctgataacgaagcgagcattgag

SEQ ID NO: 659217 - DNA, 75 bp, synthetic construct
  source 1..75: mol_type = other DNA
ccccgataacgaagcgagcattgaagaactgggccagatgctactggcaagctttgaaaaacatcctctacgcca

SEQ ID NO: 659218 - DNA, 75 bp, synthetic construct
  source 1..75: mol_type = other DNA
atgaatgagttggtacagatcctgaaaaacactcgccagcacttaatgacgggcgtttcgcacatgattcccttc

SEQ ID NO: 659219 - DNA, 75 bp, synthetic construct
  source 1..75: mol_type = other DNA
gtttgtggtgcggtaactgcggcgctggtcggtgcgcagtgctatgcaggctggggtggtctgattgtgctgccg

SEQ ID NO: 659220 - DNA, 75 bp, synthetic construct
  source 1..75: mol_type = other DNA
gcgggcttctttggcgcgctgatcgccgggattatcggcggcatcgtggtgcattacctgaagaaaattccggtg

SEQ ID NO: 659221 - DNA, 75 bp, synthetic construct
  source 1..75: mol_type = other DNA
gacgctctgaacctgaaaccgagccgtgtgggtacactggacgtgatcggtaacgcctacgaatacctgattaaa

SEQ ID NO: 659222 - DNA, 75 bp, synthetic construct
  source 1..75: mol_type = other DNA
aaaaacagaaaaacaccatcctgcgtcagctactggaagacttcgccggtgaagatctcaacctgaagccgagcc

SEQ ID NO: 659223 - DNA, 75 bp, synthetic construct
  source 1..75: mol_type = other DNA
tgatgctgtttgatatcgtgaccgccaacccgccgtttagcctggataagtggggccatgatgaggccgagcacg

SEQ ID NO: 659224 - DNA, 75 bp, synthetic construct
  source 1..75: mol_type = other DNA
aacccgctgcgcgtatttgaactcgattttgaagagaatctgcgcattatccgttactgcgtgaagtaccgtaag

SEQ ID NO: 659225 - DNA, 75 bp, synthetic construct
  source 1..75: mol_type = other DNA
ggatggtaaaaaaagccgacgccggagcgattatagcgcaacaacgggtcgttatttccccggatgacattgcta

SEQ ID NO: 659226 - DNA, 75 bp, synthetic construct
  source 1..75: mol_type = other DNA
attgagtatcacgtcaaaaaatgtgatgtcgtcttgccgctggtggcgatagccacgccgattgaatatacccgc

SEQ ID NO: 659227 - DNA, 75 bp, synthetic construct
  source 1..75: mol_type = other DNA
atgcagtggggatgggcgcacggtttttgtgtggcaaaccctgttgatgtggttgaccatttgcttcctcagaag

SEQ ID NO: 659228 - DNA, 75 bp, synthetic construct
  source 1..75: mol_type = other DNA
cgttaaacagcgcattcatgttgttatgcagtggggatgggcgcatggtttttgtgcggcgaatcctgttgatgt

SEQ ID NO: 659229 - DNA, 75 bp, synthetic construct
  source 1..75: mol_type = other DNA
accgatgaaccttataatgttacccgcgcactgttattaatggtgatacttacagcaactcgctcgggcgaagcc

SEQ ID NO: 659230 - DNA, 75 bp, synthetic construct
  source 1..75: mol_type = other DNA
tatgagctcatcacctgtgagagcgtgaaaactgttttaaggagaaccgactatgaagaagccgtggttgctggt

SEQ ID NO: 659231 - DNA, 75 bp, synthetic construct
  source 1..75: mol_type = other DNA
catactgacagcatgtcgttcgggcgaagctcgtgcgatggaatggtgcgaaattgattttaaacgcaagatctg

SEQ ID NO: 659232 - DNA, 75 bp, synthetic construct
  source 1..75: mol_type = other DNA
ggttaaacagcgcattcatgttgttatgcagtggggatgggcgcacggtttttgtgtggcaaatcctgttgatgt

SEQ ID NO: 659233 - DNA, 75 bp, synthetic construct
  source 1..75: mol_type = other DNA
agaaacgtctgaattagtacaggttgtcctctcaaaccccgataagcacggatatagccaggccgcttacgaaac

SEQ ID NO: 659234 - DNA, 75 bp, synthetic construct
  source 1..75: mol_type = other DNA
agatgggcagggaaagccatgtcctcagacagtcatacgataaactacaaaagacgttgggtggtctggaaacgg

SEQ ID NO: 659235 - DNA, 75 bp, synthetic construct
  source 1..75: mol_type = other DNA
gaatttggccacctgaacagaggtgatatgctcacctcagaacaacacaggtgccataatgaaaaaaagaaattt

SEQ ID NO: 659236 - DNA, 75 bp, synthetic construct
  source 1..75: mol_type = other DNA
gcagacagaacaacactgcagtagtcagaatcagagcagcagataaaggaacaacaacatcaggaacagttccat

SEQ ID NO: 659237 - DNA, 75 bp, synthetic construct
  source 1..75: mol_type = other DNA
taccgcttggcgataccccaacaaattggtttgtgaatttgccgaacgcattcgacacattcagaatttggtggc

SEQ ID NO: 659238 - DNA, 75 bp, synthetic construct
  source 1..75: mol_type = other DNA
aggcagaaaaagcatatgataaagtgagtctttttgtagaaaaagaatgggcgaagcgtgaaacggcgataatga

SEQ ID NO: 659239 - DNA, 75 bp, synthetic construct
  source 1..75: mol_type = other DNA
aatcgggctacgatgtctttaaatatatttccatcagccgtttgcttcatgctgcaccggtcaaatatgccgcca

SEQ ID NO: 659240 - DNA, 75 bp, synthetic construct
  source 1..75: mol_type = other DNA
tgagacacgacaggtgaccggcagtggcggggaagatgaagtactgatgagccgtaccggagcggataaaccgga

SEQ ID NO: 659241 - DNA, 75 bp, synthetic construct
  source 1..75: mol_type = other DNA
cgtccggggaggagatgaaaatcaccggcagctgtggggatgatgaagtggttacttatctgcctgctggcatcc

SEQ ID NO: 659242 - DNA, 75 bp, synthetic construct
  source 1..75: mol_type = other DNA
tattactgatgtcacccggaaactgaatacccggcactggccgctgacggggctgaatgcgtttctctgtagtgc

SEQ ID NO: 659243 - DNA, 75 bp, synthetic construct
  source 1..75: mol_type = other DNA
agatgtactgcgcaatgattggccttaagcgtgtaggaaccatcaagaaatacttcaaaggcgtggatgacgtga

SEQ ID NO: 659244 - DNA, 75 bp, synthetic construct
  source 1..75: mol_type = other DNA
acatcgacctgatcgaagcagtaggaaatcaccctgacattatcgccgggagcaacaacggtgatggatacgact

SEQ ID NO: 659245 - DNA, 75 bp, synthetic construct
  source 1..75: mol_type = other DNA
gtggctaccacccgggcccgtaaaaccctggtgctgaacagcctgatgcgccagctggttgcagaagaggtgggt

SEQ ID NO: 659246 - DNA, 75 bp, synthetic construct
  source 1..75: mol_type = other DNA
cgggagacgaaattttactataacgacgggaaccagctgacggcggtggtgtacccggacgggctggagagccgc

SEQ ID NO: 659247 - DNA, 75 bp, synthetic construct
  source 1..75: mol_type = other DNA
gagccgctaacacctgcgcttattcgccacttacatgccattggcatgggtggaataaacgacgcgaaatatcgt

SEQ ID NO: 659248 - DNA, 75 bp, synthetic construct
  source 1..75: mol_type = other DNA
cgagcttgttgataaacatgccactgcactggcgctgaaagatcagactgaacggttacgcggggcgggcgccga

SEQ ID NO: 659249 - DNA, 75 bp, synthetic construct
  source 1..75: mol_type = other DNA
ggcagggaagatgaccggtcacagggcgatactgagccggacggtggccggtgtgattggcaccgcactgatggc

SEQ ID NO: 659250 - DNA, 75 bp, synthetic construct
  source 1..75: mol_type = other DNA
agggtgagtgaacttgacacaaaggaacatatcaaagtagttagtttcccggtttattgtccatatcatcagggc

SEQ ID NO: 659251 - DNA, 75 bp, synthetic construct
  source 1..75: mol_type = other DNA
attcagggactggtgtagcgaacagggatattcgcgggatttggcggaaagggcgcttgcccatacgctgaaaaa

SEQ ID NO: 659252 - DNA, 75 bp, synthetic construct
  source 1..75: mol_type = other DNA
ttggccgaatcggaaggcctactgagtgagctaaatgaaccattaaaacccaaatccctctggttggaagagtat

SEQ ID NO: 659253 - DNA, 75 bp, synthetic construct
  source 1..75: mol_type = other DNA
gccgctgattgcgctgtcgaatatcgctcaggggctccgccgtgataggcattatcatttccagccgcaagcaca

SEQ ID NO: 659254 - DNA, 75 bp, synthetic construct
  source 1..75: mol_type = other DNA
cggcactgttagccgggctggcgctgggcgttattgaaactcgccttaaacgcatcgtaccggattacctctatc

SEQ ID NO: 659255 - DNA, 75 bp, synthetic construct
  source 1..75: mol_type = other DNA
ttggcgatctacccatgagcaacgggcagacgctggcgcaaatgtacccttctctaaaaacgatctacgattttt

SEQ ID NO: 659256 - DNA, 75 bp, synthetic construct
  source 1..75: mol_type = other DNA
ccgtttgttggttccgatgttctggcttccgctgcatgtatggacaaagacgtcaccaaacgtctactgcgtgat

SEQ ID NO: 659257 - DNA, 75 bp, synthetic construct
  source 1..75: mol_type = other DNA
tgtcaccaaacgtctgctgcgcgatgccgggctgaacattgcgccatttattaccctgacgcgcgccaatcgtca

SEQ ID NO: 659258 - DNA, 75 bp, synthetic construct
  source 1..75: mol_type = other DNA
gtcattttcccgattgtccacggtacgctgggtgaagatggctccctgcaggggatgttacgcgtcgccaattta

SEQ ID NO: 659259 - DNA, 75 bp, synthetic construct
  source 1..75: mol_type = other DNA
aacacagaattgataaaaaaactttatacaaaaagcaattagaaagacaaacttacgacattcggagaattgaag

SEQ ID NO: 659260 - DNA, 75 bp, synthetic construct
  source 1..75: mol_type = other DNA
caaaaaatccatagtagtagagagaaataaaattaattatatattctcaagaataaaggagggacaagataacat

SEQ ID NO: 659261 - DNA, 75 bp, synthetic construct
  source 1..75: mol_type = other DNA
gcgtcgcatcaggcactgaatgccggatgcggcgtgaacgccttatccgtcctacggttctgtgctcggatcttg

SEQ ID NO: 659262 - DNA, 75 bp, synthetic construct
  source 1..75: mol_type = other DNA
cttcttctacctgccggtcgggatttgctggtcagcggtgaaaaaaatgggcggcacgccgatcctcggtatcgt

SEQ ID NO: 659263 - DNA, 75 bp, synthetic construct
  source 1..75: mol_type = other DNA
cagggttgattaactccggtggtgctgcgggcggtgaaactgaccttagcgatgcggtgcgtactgcggttatca

SEQ ID NO: 659264 - DNA, 75 bp, synthetic construct
  source 1..75: mol_type = other DNA
gcaaagacgccgacaaccttttacagcaccgttgtatgactattccttctgaccagctttatcttcccggacatg

SEQ ID NO: 659265 - DNA, 75 bp, synthetic construct
  source 1..75: mol_type = other DNA
cgatcgcagtgcaggcttatcagacgctggggtgtgccggtatggcacgagtggacgtctttttaaccccggaaa

SEQ ID NO: 659266 - DNA, 75 bp, synthetic construct
  source 1..75: mol_type = other DNA
attcattcatattccagataaaacaccctagtaataagacagaaaattatacatcagaatatgaatttacagatg

SEQ ID NO: 659267 - DNA, 75 bp, synthetic construct
  source 1..75: mol_type = other DNA
ttcacatcatgcagcaatggttgtatatcaatctgtcagagacaaattagagtataaaagagaagcggttattga

SEQ ID NO: 659268 - DNA, 75 bp, synthetic construct
  source 1..75: mol_type = other DNA
atatgctcttctcgataatctaagtaaacaaggattattgcaatataccaaaactcatatgaaagcatttagaat

SEQ ID NO: 659269 - DNA, 75 bp, synthetic construct
  source 1..75: mol_type = other DNA
gcaggaaatttcaacattctcaggaatgaaccgaatctatctcactggcggaggagctgagcttatttaccctca

SEQ ID NO: 659270 - DNA, 75 bp, synthetic construct
  source 1..75: mol_type = other DNA
ggaaccactctggattgtggtttaattctcggtgcatttgaaggcatttctgaaatccgtggctattcagaaatc

SEQ ID NO: 659271 - DNA, 75 bp, synthetic construct
  source 1..75: mol_type = other DNA
tatatcctggaatagccgatattattcatttattttatgataaagataaagtagagcgattatacatcaattacg

SEQ ID NO: 659272 - DNA, 75 bp, synthetic construct
  source 1..75: mol_type = other DNA
tcggcgagttttatgtgcattccgtacagccgccacgcacagagcactgctatatctgctggcgaccggaagatg

SEQ ID NO: 659273 - DNA, 75 bp, synthetic construct
  source 1..75: mol_type = other DNA
ggttttcaccagccggacagcggacgcattcttattggcgataaaacggtcaacgccctgccgccagaaaagcgc

SEQ ID NO: 659274 - DNA, 75 bp, synthetic construct
  source 1..75: mol_type = other DNA
ccagcggtctgagttacaccgacctcatcacgcgtttgattgaactggcgctggagcgccacgctgcggataacg

SEQ ID NO: 659275 - DNA, 75 bp, synthetic construct
  source 1..75: mol_type = other DNA
taaatgggcttacaacatcatcaaacaggtgggtaactactcggaaatttttgagcgtaacgtaggttcagaaag

SEQ ID NO: 659276 - DNA, 75 bp, synthetic construct
  source 1..75: mol_type = other DNA
taatccagcaacgcctgatatggcacatctgctgggtaaagagggcgattacggcaaggatctgaagctggataa

SEQ ID NO: 659277 - DNA, 75 bp, synthetic construct
  source 1..75: mol_type = other DNA
ctctctcgtaatacaacctggacttcatctcgtgacgcaggcatgggaatggcatttactggtgtcacttattac

SEQ ID NO: 659278 - DNA, 75 bp, synthetic construct
  source 1..75: mol_type = other DNA
ggagttgcaaataggtggttctgaccagaggtggaacatcacttctgagatcgacctgacccgccgtctgcatca

SEQ ID NO: 659279 - DNA, 75 bp, synthetic construct
  source 1..75: mol_type = other DNA
cactggcagatgcgcgttatgacgacaacatcggcgtgatcattctgactggcgcaggcgataaagcgttctgct

SEQ ID NO: 659280 - DNA, 75 bp, synthetic construct
  source 1..75: mol_type = other DNA
ccgcaggcgctggactggttgttctgcgtggcggcgggatatccgtttaatgttagctgcgacaatctggaaggc

SEQ ID NO: 659281 - DNA, 75 bp, synthetic construct
  source 1..75: mol_type = other DNA
agtctttgcgagaggagatgacgcggattgccagttcattctttcagcgcggctatgcaaccggttcggctggca

SEQ ID NO: 659282 - DNA, 75 bp, synthetic construct
  source 1..75: mol_type = other DNA
tatggtactttctgattgttattcatgggctaacgagcagtttggacatgcccgtctcggtgatccgcgtcgtac

SEQ ID NO: 659283 - DNA, 75 bp, synthetic construct
  source 1..75: mol_type = other DNA
cgctggcggatgcgcgttatgacgataacatcggcgtaattattctgactggcgcaggcgataaagcattctgct

SEQ ID NO: 659284 - DNA, 75 bp, synthetic construct
  source 1..75: mol_type = other DNA
tctatcttcctgctgatgcggaagtaccgtataaccgaatcgtctttgcccacggcttttatgccagcgcaattc

SEQ ID NO: 659285 - DNA, 75 bp, synthetic construct
  source 1..75: mol_type = other DNA
atgagatttcgcactggtgtattgccgggaaagcgcgccgtgagctggttgatttcggctactggtattgcccgg

SEQ ID NO: 659286 - DNA, 75 bp, synthetic construct
  source 1..75: mol_type = other DNA
tccatataaccgaatcgtctttgctcatggcttttacgccagtgctatccacgagatttcgcactggtgtattgc

SEQ ID NO: 659287 - DNA, 75 bp, synthetic construct
  source 1..75: mol_type = other DNA
atgaacagtacacaccactatgagcagctgattgaaatttttaataactgctttgccgatgaatttaatacccgt

SEQ ID NO: 659288 - DNA, 75 bp, synthetic construct
  source 1..75: mol_type = other DNA
atccgcgtcgccgagcagtatgccgatgaaggccatctggtcaccttcggtatcgtgccgaacgccccggaaacc

SEQ ID NO: 659289 - DNA, 75 bp, synthetic construct
  source 1..75: mol_type = other DNA
caccgactatttgcaacagtgccgttactgccgcgcatcaagatcaccgaactgctgatggacgtggacgactgg

SEQ ID NO: 659290 - DNA, 75 bp, synthetic construct
  source 1..75: mol_type = other DNA
aatatttcagcggttgatttagggacaattggaacgactgctgcttctggcacagtagtaaacttcaaactgatt

SEQ ID NO: 659291 - DNA, 75 bp, synthetic construct
  source 1..75: mol_type = other DNA
acacttcttttgattataacgtaagtggtggtattcaatcatttaactatgcagctcaactaatgaaaccggcta

SEQ ID NO: 659292 - DNA, 75 bp, synthetic construct
  source 1..75: mol_type = other DNA
aaatgcttgaacaactcgaccagaaaggcttccgtgtgaccgatggggcgcgacgacttcacgttgcgttgaaca

SEQ ID NO: 659293 - DNA, 75 bp, synthetic construct
  source 1..75: mol_type = other DNA
ctatctgcgtgatttcagcgtctgttattggggctgtggtgtgtggtcttggctatgctgccgggttacgcatca

SEQ ID NO: 659294 - DNA, 75 bp, synthetic construct
  source 1..75: mol_type = other DNA
gggcgtaaactgcccgccattcgtgaagtgtacacgttgggtaaatcagaactgttgctgatgactgaccgcagc

SEQ ID NO: 659295 - DNA, 75 bp, synthetic construct
  source 1..75: mol_type = other DNA
gaggtctaccacaatccactacatccttacaccagggcattgatgtcggcagtccccatacctgatccggatctg

SEQ ID NO: 659296 - DNA, 75 bp, synthetic construct
  source 1..75: mol_type = other DNA
cgaaagacgagcagggcaacgtcctcagcggcgacgcgtgggtacacaacagcgaaaactgctacatcaacagcg

SEQ ID NO: 659297 - DNA, 75 bp, synthetic construct
  source 1..75: mol_type = other DNA
taaccagtcggccttccacgacgctatccgggtcgccgagcagtatgctgatgaaggtcatctggtcaccttcgg

SEQ ID NO: 659298 - DNA, 75 bp, synthetic construct
  source 1..75: mol_type = other DNA
catctcttgattataatattacaggtggtatcccctccttcaattacagtgcttggctggctaaacctgccactg

SEQ ID NO: 659299 - DNA, 75 bp, synthetic construct
  source 1..75: mol_type = other DNA
caattatggcagttctgggtgtggcgtctaatgccatggctgcaccaaatacgggtactgtaaactttattggta

SEQ ID NO: 659300 - DNA, 75 bp, synthetic construct
  source 1..75: mol_type = other DNA
taatttaacaacccaaggttttagcaatgcaactacggggggaacaaatgcatatatggcattacttacttctaa

SEQ ID NO: 659301 - DNA, 75 bp, synthetic construct
  source 1..75: mol_type = other DNA
ttcttctattctcaatcacatgtaattgatgctaaggatgatgcggtaaccaaggtaatgtatcttctccctaat

SEQ ID NO: 659302 - DNA, 75 bp, synthetic construct
  source 1..75: mol_type = other DNA
tggttttgtctcgatggttgccggtgttgttctggtgcagtttcctgacctgtcactgcctgcggtgtgcggtat

SEQ ID NO: 659303 - DNA, 75 bp, synthetic construct
  source 1..75: mol_type = other DNA
gggtataccgtttccgttacggcgagcggtgccgggctgcgggaaattatgcagaatcagccggtagatttaatt

SEQ ID NO: 659304 - DNA, 75 bp, synthetic construct
  source 1..75: mol_type = other DNA
attctcagccgtgaacgtctgctgcgtatgctttctgcgcgtcgggtggaaaaccctgacctgcgcaccgtcgat

SEQ ID NO: 659305 - DNA, 75 bp, synthetic construct
  source 1..75: mol_type = other DNA
cagctcgccattgatgaaattggcctgatgctcaagcgatttagcctctctggctgggaaccgattctggtcaat

SEQ ID NO: 659306 - DNA, 75 bp, synthetic construct
  source 1..75: mol_type = other DNA
aagtgcgccgctggcagcaggaattaaacagtccgaacgagcaaattcgccagctcgccattgatgaaattggcc

SEQ ID NO: 659307 - DNA, 75 bp, synthetic construct
  source 1..75: mol_type = other DNA
ggtggcgagcccatcaccgcccggctttttattggccgtatgctgctgggtggctttgtctcgatggtggccggg

SEQ ID NO: 659308 - DNA, 75 bp, synthetic construct
  source 1..75: mol_type = other DNA
gggcggtctgggggcgatgatgacgccggtggcctccgcaagcgcgagcggttttggtttgttgattatcggcgt

SEQ ID NO: 659309 - DNA, 75 bp, synthetic construct
  source 1..75: mol_type = other DNA
ccggttgcttccgcaagcgcgagcggttttggtttgttgattatcggcgtgttgttattgctggtgctggtggag

SEQ ID NO: 659310 - DNA, 75 bp, synthetic construct
  source 1..75: mol_type = other DNA
aaccatcagcctgtactcgaatccgaccaaatggtttgcgggtaacatgcagtcaactggcctgtgggcaccggc

SEQ ID NO: 659311 - DNA, 75 bp, synthetic construct
  source 1..75: mol_type = other DNA
ggcatcctggtcgatggtgtatatcatgaagcacaacaacgtgaaattgctcaagtttgcacatacaaaaaacag

SEQ ID NO: 659312 - DNA, 75 bp, synthetic construct
  source 1..75: mol_type = other DNA
gtgaataaagaactgattcaggttaataccaaattaaccgctaataccatccgccgggaaacatataacgggcgc

SEQ ID NO: 659313 - DNA, 75 bp, synthetic construct
  source 1..75: mol_type = other DNA
cgttttatctcaattgtttctctggggttgctcggcgtcgcggtgccggtgcagatccagatgatgacgcattct

SEQ ID NO: 659314 - DNA, 75 bp, synthetic construct
  source 1..75: mol_type = other DNA
aagcctttattgaacaaaccacacccgttctgcctgccagtgaagaggagcgcgacacacagccgacgctgagtt

SEQ ID NO: 659315 - DNA, 75 bp, synthetic construct
  source 1..75: mol_type = other DNA
aaccagaccgtacagatgggtcaggtacgtgctaacactctggcaaaacagggtgacgtcggtcaaaacgttggc

SEQ ID NO: 659316 - DNA, 75 bp, synthetic construct
  source 1..75: mol_type = other DNA
cgcaatatgagcctcgtaaaacctcactgaccgaacaggtagctcatcatctggagtttgtgagggccgccgcca

SEQ ID NO: 659317 - DNA, 75 bp, synthetic construct
  source 1..75: mol_type = other DNA
aatgcccgtggtaacagtgcactatgggatgaatatggtcgtctcatcgttcgcgccgatcgtggttcattattg

SEQ ID NO: 659318 - DNA, 75 bp, synthetic construct
  source 1..75: mol_type = other DNA
cttcgtgattaacggggagcaatggcttgttgttgagccaatagagttgtgggattcatggtgccggctgattgc

SEQ ID NO: 659319 - DNA, 75 bp, synthetic construct
  source 1..75: mol_type = other DNA
gtgaacagcagcaaaaacaggctgaaatggcgctaaatcagttaattaaccgttatcagatgatacgtgcaggca

SEQ ID NO: 659320 - DNA, 75 bp, synthetic construct
  source 1..75: mol_type = other DNA
gtgaatcagcgcagttgtgcagtcaacgaggttttctggcttttcgtcggtcattcagcaccattagccgggtct

SEQ ID NO: 659321 - DNA, 75 bp, synthetic construct
  source 1..75: mol_type = other DNA
tctggttcgatcatctgtcaaccgacgtgatccatcaggtggtggataaattcatcgtcgagttgcaggttcagt

SEQ ID NO: 659322 - DNA, 75 bp, synthetic construct
  source 1..75: mol_type = other DNA
taattggttcgacaacctatcaggagttcagcaacattttcgagaaagaccgtgctctggcgcgtcgcttccaga

SEQ ID NO: 659323 - DNA, 75 bp, synthetic construct
  source 1..75: mol_type = other DNA
acgttctggtcgctatctttagcgaacaggagtcgcaggcggcatatctgttgcgtaaacatgaagtcagccgtc

SEQ ID NO: 659324 - DNA, 75 bp, synthetic construct
  source 1..75: mol_type = other DNA
atttcagcgggggcattctggccggatattgtgctgcgtgagctgcgtctggcgatacgactgccgggccgtgtg

SEQ ID NO: 659325 - DNA, 75 bp, synthetic construct
  source 1..75: mol_type = other DNA
aacgagtcgcaggtaaaatttctgatgatattttctctgtattcaaatgggatcgcgccgctagagcggacatga

SEQ ID NO: 659326 - DNA, 75 bp, synthetic construct
  source 1..75: mol_type = other DNA
cgctacagaatgcgccaacattagccaacagtggtgtaaacgatatgtgcgggatgagtcattaggttacaaagt

SEQ ID NO: 659327 - DNA, 75 bp, synthetic construct
  source 1..75: mol_type = other DNA
gtgggaaaaaaaccgacaaagcgcagctgctgcgcgatgctgccggtctgaagtaatctttcttcacctgcgttc

SEQ ID NO: 659328 - DNA, 75 bp, synthetic construct
  source 1..75: mol_type = other DNA
gtgccgatccgctggaacagggcgcgggtgaccagggtctgatgtttggctacgcgaccaatgaaaccgacgtgc

SEQ ID NO: 659329 - DNA, 75 bp, synthetic construct
  source 1..75: mol_type = other DNA
acctacggcggcatggcacgtcacggtggcggtgcattctctggtaaagatccatcaaaagtggaccgttccgca

SEQ ID NO: 659330 - DNA, 75 bp, synthetic construct
  source 1..75: mol_type = other DNA
gatatgcgcttgttcgcaaacgcccagcaccatatcgcggcggtggaagcactggacgatattcaggcggtgctc

SEQ ID NO: 659331 - DNA, 75 bp, synthetic construct
  source 1..75: mol_type = other DNA
aagctcaaatactaactgtatataatttttcacaagactcccaagaatatatcggtgagtctgatgcatacattg

SEQ ID NO: 659332 - DNA, 75 bp, synthetic construct
  source 1..75: mol_type = other DNA
atccttccaggtttaatgtggaaaactaaaaataacggtctgattgagttaaccaacgaaatcgctgcccagttt

SEQ ID NO: 659333 - DNA, 75 bp, synthetic construct
  source 1..75: mol_type = other DNA
taccgtcgccgcccagcaggtagcaaggctggaatccgccatgtgcctgcgtcgccgctggtcaccggaaaactt

SEQ ID NO: 659334 - DNA, 75 bp, synthetic construct
  source 1..75: mol_type = other DNA
aaaaatcacataaattctgggcggttgagcagcaaggcaacgagttgcatatcagttggggtaaggtcggcacca

SEQ ID NO: 659335 - DNA, 75 bp, synthetic construct
  source 1..75: mol_type = other DNA
aggtgaagaaggggtatgtggagcaagtagacgctaacgctcactcacatgatgcctcagcaaagaaagtcctag

SEQ ID NO: 659336 - DNA, 75 bp, synthetic construct
  source 1..75: mol_type = other DNA
taagatgctggatctgctgcacccaatctataaagataccgctgcatatggtcactttggtcgcgagcatttccc

SEQ ID NO: 659337 - DNA, 75 bp, synthetic construct
  source 1..75: mol_type = other DNA
cgaaacctacgtaaaaaccggcatggttttagttggcggcgaaatcaccaccagcgcctgggtagacatcgaaga

SEQ ID NO: 659338 - DNA, 75 bp, synthetic construct
  source 1..75: mol_type = other DNA
gacagatccacaaatactggaaatattagagccatatcaggatactaatgtatttggaagaagttggtctgccac

SEQ ID NO: 659339 - DNA, 75 bp, synthetic construct
  source 1..75: mol_type = other DNA
agcaccatatcgcggcggtggaagcactggacgatattcaggcggtgctcgactacgattattcaacaggctggc

SEQ ID NO: 659340 - DNA, 75 bp, synthetic construct
  source 1..75: mol_type = other DNA
tcaatgatggtttaccaggctgttatgtgggcaggtctgaattcgtggcttgcgacaccaccagcgcttctttgc

SEQ ID NO: 659341 - DNA, 75 bp, synthetic construct
  source 1..75: mol_type = other DNA
tcaatgatggtttaccaggctgttatgtgggcaggtctgaattcgtggctggcgacacctccaacacttctttgc

SEQ ID NO: 659342 - DNA, 75 bp, synthetic construct
  source 1..75: mol_type = other DNA
tgccatgggcaacgctggtgacgctcaccagtggttatatcggctattttattgcgaacgtggggctgaagaacc

SEQ ID NO: 659343 - DNA, 75 bp, synthetic construct
  source 1..75: mol_type = other DNA
aaaaaaacagtcggattactacaatttcaataaaccaaccgttggctcttttttccgcgacgtgaataccagggg

SEQ ID NO: 659344 - DNA, 75 bp, synthetic construct
  source 1..75: mol_type = other DNA
gcaatgatggcttaccaggctgttatgtgggcaggtctgaatgcctggctggcaacaccaccagcacttctgtgt

SEQ ID NO: 659345 - DNA, 75 bp, synthetic construct
  source 1..75: mol_type = other DNA
taccatgggaggcacttgtcacgctttcctgtggatatattggctatttcatatcaactgttgggatcaacgata

SEQ ID NO: 659346 - DNA, 75 bp, synthetic construct
  source 1..75: mol_type = other DNA
aacaacaaaaacgaagcagtcaattttgttaatgagcttgctaaagttggtgataaatattctgccggattaggg

SEQ ID NO: 659347 - DNA, 75 bp, synthetic construct
  source 1..75: mol_type = other DNA
tatgcgcctgttcgccaacgcccagcgccatatcgcggcggtggaagctctggacgatattcaggcggtgctcga

SEQ ID NO: 659348 - DNA, 75 bp, synthetic construct
  source 1..75: mol_type = other DNA
accacggattgatcgaactgacaaacgagatcgccgcgcaatttgaagcggtcactatcgcgcacgatatgcgcc

SEQ ID NO: 659349 - DNA, 75 bp, synthetic construct
  source 1..75: mol_type = other DNA
atgagtttaggttgtggtgagtgggggttgtgtttagggctggggagagtcggggaagactacgaaagcccgctc

SEQ ID NO: 659350 - DNA, 75 bp, synthetic construct
  source 1..75: mol_type = other DNA
ttagggcgtctggctgttaatgtttgtacccaaaggcatggtttcggtaaatggctgctgagtgatgctattcac

SEQ ID NO: 659351 - DNA, 75 bp, synthetic construct
  source 1..75: mol_type = other DNA
caagtctgctaatgcaatgcggtgggaatgttgatccgactacactacaaacaattatttcagtggagtcagacg

SEQ ID NO: 659352 - DNA, 75 bp, synthetic construct
  source 1..75: mol_type = other DNA
tcagctcttcctggttgagcatccgctggtacgccacttaacccgccgtctgatttggggcgtttatagcaccga

SEQ ID NO: 659353 - DNA, 75 bp, synthetic construct
  source 1..75: mol_type = other DNA
ctcaggatccgattgggctgaaggggggatggaatttttatcagtatccgttgaatccagttacgaatacagatc

SEQ ID NO: 659354 - DNA, 75 bp, synthetic construct
  source 1..75: mol_type = other DNA
gaatcgctataccgcgcagattgccgccttgtgcagcgcagaacggattctggaggttggcgccggaaccgcagc

SEQ ID NO: 659355 - DNA, 75 bp, synthetic construct
  source 1..75: mol_type = other DNA
gctgatggtctgcctgccgctgatgctggcgtttatcctttttcagaaacagttcctgcggagcttcggcttctc

SEQ ID NO: 659356 - DNA, 75 bp, synthetic construct
  source 1..75: mol_type = other DNA
aaaaagcacgtttgtttattactcacctgctactgctactttttatcgcagcgattatgttcccgctgctgatgg

SEQ ID NO: 659357 - DNA, 75 bp, synthetic construct
  source 1..75: mol_type = other DNA
tgtggggtgactttgccgccgctgccgtgatgtctgcattaccgatcaccatcgtcttcttgctggctcaacgct

SEQ ID NO: 659358 - DNA, 75 bp, synthetic construct
  source 1..75: mol_type = other DNA
accgccaccggtgagctggcgaaaacgcagcgccgcagcctggcggatgcgcttcagcagtccggcggcgaagac

SEQ ID NO: 659359 - DNA, 75 bp, synthetic construct
  source 1..75: mol_type = other DNA
ttgctgttcaacgagcagcatcgcgttaccgacgcgctgtatcgcgacaaccccgccagcgcctgtctgaatcgc

SEQ ID NO: 659360 - DNA, 75 bp, synthetic construct
  source 1..75: mol_type = other DNA
agcattctcctgtgggtgattatcggtgttgcgcctgtcgctgtagcaaaaatggcgtggcgttttgtgagttga

SEQ ID NO: 659361 - DNA, 75 bp, synthetic construct
  source 1..75: mol_type = other DNA
ggctatgcaaccggttcggctggcaatctgtcgctgcttttacctgacgggaatttactggcgacaccgacaggt

SEQ ID NO: 659362 - DNA, 75 bp, synthetic construct
  source 1..75: mol_type = other DNA
cgacgatccgtcgccatcagcggcgatgcctgatgagcacgaacttacccaactggcgctgccgttgcctgagca

SEQ ID NO: 659363 - DNA, 75 bp, synthetic construct
  source 1..75: mol_type = other DNA
tgcaaacgagctggcgtggcccgcgcaggaatcgtcgccgctgcgccagcatctgctggtagcgcgttcgcctgg

SEQ ID NO: 659364 - DNA, 75 bp, synthetic construct
  source 1..75: mol_type = other DNA
acacgcgacagtcgtaccacttcacggacgtctccgcgcagttcctcaatgacgccagagcccgtttccatgatg

SEQ ID NO: 659365 - DNA, 75 bp, synthetic construct
  source 1..75: mol_type = other DNA
tactgttaacgttattattgataatagtagtggaattagtcagacagatgcagataagcgttatttgcagataag

SEQ ID NO: 659366 - DNA, 75 bp, synthetic construct
  source 1..75: mol_type = other DNA
taaatcatgcgtcagagtggataaccctttccggtcagcagataacgcgactgacagaattccccccggcataca

SEQ ID NO: 659367 - DNA, 75 bp, synthetic construct
  source 1..75: mol_type = other DNA
gatgtatcttgagcaggggaatctgcaggttgaactattagggcgcggatttgcctggctggataccggtaccca

SEQ ID NO: 659368 - DNA, 75 bp, synthetic construct
  source 1..75: mol_type = other DNA
ccgttaaaacccaaatcaaactgggcggtcaccgggctctatttctatgataagcatgtcgtagagatggcaaaa

SEQ ID NO: 659369 - DNA, 75 bp, synthetic construct
  source 1..75: mol_type = other DNA
cggtaaaattattgccggtaatattattaacttctctcgcgagcctgcgcgccgtaacgaatttatcattggtgt

SEQ ID NO: 659370 - DNA, 75 bp, synthetic construct
  source 1..75: mol_type = other DNA
ataactgcaatatgctatattacttctggcatgattgattggcaactagtaataaaaggtataaacgagaatgtg

SEQ ID NO: 659371 - DNA, 75 bp, synthetic construct
  source 1..75: mol_type = other DNA
agtcttggtgctgctctgacatttttggacttaggtataggaaatgcattaacaaacaggatcgcacattcattt

SEQ ID NO: 659372 - DNA, 75 bp, synthetic construct
  source 1..75: mol_type = other DNA
cttccttccagcgcctgctgggtgacgggtcgcagttcggggtgaacttcagttacgccatccagccgtcgccgg

SEQ ID NO: 659373 - DNA, 75 bp, synthetic construct
  source 1..75: mol_type = other DNA
gctccggcacgcgtttatatccgatcacccagggcgtctccaagcagctgctgccgatctatgacaagccgatga

SEQ ID NO: 659374 - DNA, 75 bp, synthetic construct
  source 1..75: mol_type = other DNA
actgcattaattcacgagacgtatcgcggggatattaaatcgtcagaaaatagtggtaaccaggttatctttaca

SEQ ID NO: 659375 - DNA, 75 bp, synthetic construct
  source 1..75: mol_type = other DNA
gttatcaggtgctggatccggagcgcttcggggtggtggagttcgatgagaactttaaggcgctgtccatcgagg

SEQ ID NO: 659376 - DNA, 75 bp, synthetic construct
  source 1..75: mol_type = other DNA
gcgccaggggatgaaggtcgcctgcctggaagagattggttaccgcaatcagtggctgtcggcggaaggggtggc

SEQ ID NO: 659377 - DNA, 75 bp, synthetic construct
  source 1..75: mol_type = other DNA
gtggcggctcaggccgaacgcctgaagaaaaccgagtacggtgcttatctgaagcgcctgctgaacgagcgttaa

SEQ ID NO: 659378 - DNA, 75 bp, synthetic construct
  source 1..75: mol_type = other DNA
taccgtcaggtcttgggtgggtaaaattccggcaatctcaacgtgtgaacggtaaaatcaaaaatgcgacaatca

SEQ ID NO: 659379 - DNA, 75 bp, synthetic construct
  source 1..75: mol_type = other DNA
ccttcggctttcgagttgaaccggatgattacagtgtggaaaaaaatgccggaatacatcttcttacagcatgct

SEQ ID NO: 659380 - DNA, 75 bp, synthetic construct
  source 1..75: mol_type = other DNA
tactgcagccagcatttttcggcggacgtgcccgtcatggaattctcccgccctgacagggaggacgcgcaatga

SEQ ID NO: 659381 - DNA, 75 bp, synthetic construct
  source 1..75: mol_type = other DNA
gtcacaaagtaaattcagatgccaggcatgtggatatacagcgaacgctgatgtaaatggcgctcgtaacatttt

SEQ ID NO: 659382 - DNA, 75 bp, synthetic construct
  source 1..75: mol_type = other DNA
tgtaacccgttatgaccatgaccgttttggtcaggtgacggcggtgcaccgcgaggaagggctgagccagtaccg

SEQ ID NO: 659383 - DNA, 75 bp, synthetic construct
  source 1..75: mol_type = other DNA
gtttcgttttcaatcgcgctctggcgcttcagaatgagaatcatgaggccggtaataaatacatcccttacggga

SEQ ID NO: 659384 - DNA, 75 bp, synthetic construct
  source 1..75: mol_type = other DNA
tgaagtagagcggcttcttgactcctgtcatgcgctgatgaactacggtgtggatcggtacaaacgcccgcaaaa

SEQ ID NO: 659385 - DNA, 75 bp, synthetic construct
  source 1..75: mol_type = other DNA
tgccacgcactgatgaactacggcgtggaccggtacaaacgcccgcaaaaaatctcgctgcaagaagagaaagcc

SEQ ID NO: 659386 - DNA, 75 bp, synthetic construct
  source 1..75: mol_type = other DNA
tgaagtagaacggctgctggactcgtgccatgcgctgatgaactacggcgtggaccggtataaacgcccacaaaa

SEQ ID NO: 659387 - DNA, 75 bp, synthetic construct
  source 1..75: mol_type = other DNA
ttgatgtgatgctggaacagcaaaacgaagacggcagcgtcgagttgctggaacgttgcccgccgagaatgggaa

SEQ ID NO: 659388 - DNA, 75 bp, synthetic construct
  source 1..75: mol_type = other DNA
gctggtgatggctcatgcctgctatgggcataactctttcttcaaaaacaattacttattccgtagctggaccga

SEQ ID NO: 659389 - DNA, 75 bp, synthetic construct
  source 1..75: mol_type = other DNA
gtgtcaccctggtctgcccgtactgcagccagcatttttcggcagacgtgcccgtcatggaattctcccgccctg

SEQ ID NO: 659390 - DNA, 75 bp, synthetic construct
  source 1..75: mol_type = other DNA
atgatatttgaaaaattagtattatccctatctttattaatcattaatgcctatgttgcgagatatttagggcct

SEQ ID NO: 659391 - DNA, 75 bp, synthetic construct
  source 1..75: mol_type = other DNA
tcattgccaaaagcaataagcacttttaaggatcacatcaacgaatatgaatcagtaaaaatcaaaatgcgataa

SEQ ID NO: 659392 - DNA, 75 bp, synthetic construct
  source 1..75: mol_type = other DNA
agcacttttaaggatcacatcaatgaatatgaagcagtaaaaagtaaaatgcgacaacaaactatgatctggtaa

SEQ ID NO: 659393 - DNA, 75 bp, synthetic construct
  source 1..75: mol_type = other DNA
tttactaccgcaagccacgcagtgaaatgggtgtgacttgtgttggtcgccagaaaatgaaattcggcaacaaac

SEQ ID NO: 659394 - DNA, 75 bp, synthetic construct
  source 1..75: mol_type = other DNA
ctgtacaaccgtaacgtttatgacgatgcagaagaggctggacgttctatctttgaaatgtcaggcgctgaacgc

SEQ ID NO: 659395 - DNA, 75 bp, synthetic construct
  source 1..75: mol_type = other DNA
tcccgcttcgtcctaagcgtcgtgatttgaaatctctgcgtgacatcgatcctattatcgacaatgttcgtaatg

SEQ ID NO: 659396 - DNA, 75 bp, synthetic construct
  source 1..75: mol_type = other DNA
agccgcaggaagaacgcgacaaggttaatgttgacctggcagcctccggcgtggcctacaaagagcgcctgaata

SEQ ID NO: 659397 - DNA, 75 bp, synthetic construct
  source 1..75: mol_type = other DNA
ggccagcatacggaacgcaacaggcgagtagtgcttttcaatttgcacaggcgctgatatcagaaggccatgagt

SEQ ID NO: 659398 - DNA, 75 bp, synthetic construct
  source 1..75: mol_type = other DNA
caaaaaagatggttataatgggggtgataagtattccattaaattattatcttattaaatcgttaggtattattg

SEQ ID NO: 659399 - DNA, 75 bp, synthetic construct
  source 1..75: mol_type = other DNA
gcctatgttgcgagatatttagggcctcagcaatatggggttatagcctattctattacactactcagtatttct

SEQ ID NO: 659400 - DNA, 75 bp, synthetic construct
  source 1..75: mol_type = other DNA
catggcgatgaatgccgacccggttatggacagtgacacggtatccggccccgcagtctcagatgaggaaacgct

SEQ ID NO: 659401 - DNA, 75 bp, synthetic construct
  source 1..75: mol_type = other DNA
tatcctcggcgtttccaagtccgcgatggagccggtgtggaatggtaaagagttcgtgccgcgtctgatgctgcc

SEQ ID NO: 659402 - DNA, 75 bp, synthetic construct
  source 1..75: mol_type = other DNA
atggctatcgaaatcaaagtaccggatatcggcggtgacgaagttgaagtgaccgaagtgatggtgaaagtgggc

SEQ ID NO: 659403 - DNA, 75 bp, synthetic construct
  source 1..75: mol_type = other DNA
gatgattcgggccgatcaaattaatggtaatgactccaacttattgatagtgttttatgttcagataatgcccga

SEQ ID NO: 659404 - DNA, 75 bp, synthetic construct
  source 1..75: mol_type = other DNA
tgtggcgtttgtatcacgaagaagaggtgacggtttacgatccgcaggatgtggagttcaaatgcacctgctcgc

SEQ ID NO: 659405 - DNA, 75 bp, synthetic construct
  source 1..75: mol_type = other DNA
actcccagacctgaattaggcgaaggcatttttgttcttccttttgaacgccaccttatttatttcctgcaatca

SEQ ID NO: 659406 - DNA, 75 bp, synthetic construct
  source 1..75: mol_type = other DNA
accaatgatccccgtcatatataccttgtggcgcagccaggcagtttcatacatccatccatgccagttttgtac

SEQ ID NO: 659407 - DNA, 75 bp, synthetic construct
  source 1..75: mol_type = other DNA
atttgctggcgttacggggccgtatggaagcggcccagataagccagacattgaacactccacagccaatgatta

SEQ ID NO: 659408 - DNA, 75 bp, synthetic construct
  source 1..75: mol_type = other DNA
aggtttcttctgctcggggagcaaatacgtgatgttactttctctccactaccgatgaattcggggcaaagctta

SEQ ID NO: 659409 - DNA, 75 bp, synthetic construct
  source 1..75: mol_type = other DNA
ggacaacaccacgccggggaaattacgtaagcgtaaagccaatgccgtctgtaacacctgctccttgcagactaa

SEQ ID NO: 659410 - DNA, 75 bp, synthetic construct
  source 1..75: mol_type = other DNA
cctaacatgaagttactctccagagtgaaggagaatatgttgtcgtggtattatgtgccagttgcaggatggtat

SEQ ID NO: 659411 - DNA, 75 bp, synthetic construct
  source 1..75: mol_type = other DNA
tcagtagagaaaaattgcaaagtaacaatcggtgatattaataaagataatattagctttaataaagatagtttc

SEQ ID NO: 659412 - DNA, 75 bp, synthetic construct
  source 1..75: mol_type = other DNA
tggcactagttttgaggtaatttctgttgataataacaagactccgaacgtcagccatgccataaatgctgggaa

SEQ ID NO: 659413 - DNA, 75 bp, synthetic construct
  source 1..75: mol_type = other DNA
tattgtctcggatgcacgttcatttgctcaggatcctcgattttgtcttagcgtcatggccgaaatagcctgccg

SEQ ID NO: 659414 - DNA, 75 bp, synthetic construct
  source 1..75: mol_type = other DNA
tcaggcagacacttaaaaagctatggttcagggcaacgttatttgcaatggtagcaataataacggcccttttat

SEQ ID NO: 659415 - DNA, 75 bp, synthetic construct
  source 1..75: mol_type = other DNA
gcagaggtgttcgaatactctccgcttacgcgcagaataaaatagatgaaactgaagtgatatatccttcagtac

SEQ ID NO: 659416 - DNA, 75 bp, synthetic construct
  source 1..75: mol_type = other DNA
attacttattccgcagttggaccgacgccagttcgattgtcgattatctgatttttgcccgtaaatatattaccg

SEQ ID NO: 659417 - DNA, 75 bp, synthetic construct
  source 1..75: mol_type = other DNA
tcgcttactgtggcgtctgccattccgatctccaccaggtccgttccgagtgggcggggacggtttacccctgcg

SEQ ID NO: 659418 - DNA, 75 bp, synthetic construct
  source 1..75: mol_type = other DNA
agcaatggctggttcccggatacagatggcgcactcatcaccggactgacctttcttgaccccaaagatgccaca

SEQ ID NO: 659419 - DNA, 75 bp, synthetic construct
  source 1..75: mol_type = other DNA
agacgatgcgacaatcgactgtcaaaaagacgctgacgaattagctgacgataacgtttattatatgatgtggtg

SEQ ID NO: 659420 - DNA, 75 bp, synthetic construct
  source 1..75: mol_type = other DNA
caggagatgctcgatttttgcgccgaacatggcatcgtggctgatatagagatgattcgggccgatcaaaggaag

SEQ ID NO: 659421 - DNA, 75 bp, synthetic construct
  source 1..75: mol_type = other DNA
acatggcatcgtggctgatatagagatgattcgggccgatcaaattaatgaagcctatgagcgaatgctgcgcgg

SEQ ID NO: 659422 - DNA, 75 bp, synthetic construct
  source 1..75: mol_type = other DNA
tcggtgtcggctgcattgtcgacagttgtaaacattgcgaagagtgtgaagacgggctggaaaactactgtgatc

SEQ ID NO: 659423 - DNA, 75 bp, synthetic construct
  source 1..75: mol_type = other DNA
ttttccaataccggcgatattgcggtgttaatgcaaacgatgctgaacggcgggggctatggcgatgtgcagctg

SEQ ID NO: 659424 - DNA, 75 bp, synthetic construct
  source 1..75: mol_type = other DNA
aacctacggtcacactggctggaccgggacggtgaccgttatcgatccggtgaatcatatggcgattgtgatgtt

SEQ ID NO: 659425 - DNA, 75 bp, synthetic construct
  source 1..75: mol_type = other DNA
atgaaaagtaaccgtaaacgcctggtaaggtcatatgacaaagcgttaaaggtttttgatgatctgcgacacaat

SEQ ID NO: 659426 - DNA, 75 bp, synthetic construct
  source 1..75: mol_type = other DNA
gctggagtatcagcccggcagcaagcatatctacagcgatgtcgattatatgctgcttggatttatcgtcgagtc

SEQ ID NO: 659427 - DNA, 75 bp, synthetic construct
  source 1..75: mol_type = other DNA
tgcaaaagctgatgagcgaaggcaaactgcatcctgacgatcggattgcgaaatatattccggggtttgccgata

SEQ ID NO: 659428 - DNA, 75 bp, synthetic construct
  source 1..75: mol_type = other DNA
cacttttggcctcggctggcgcgtgaatggtaatgccaccatgacgccgacgtttggcacgctggcaagcccgca

SEQ ID NO: 659429 - DNA, 75 bp, synthetic construct
  source 1..75: mol_type = other DNA
atacgaaatatcgttacgaagagggcaaggaagatgagctgggctttaaaacgttcaccgagttcctgaactgct

SEQ ID NO: 659430 - DNA, 75 bp, synthetic construct
  source 1..75: mol_type = other DNA
cggaacagttttatcagtatcaacctacggaaatcattctttctgaaggtcgtctggtagatagccaggggaatg

SEQ ID NO: 659431 - DNA, 75 bp, synthetic construct
  source 1..75: mol_type = other DNA
gtaacctgtttaaatcgacggcggataaaaaagaaaaacgtaacctgatggtgtttatccgtccgaccattctgc

SEQ ID NO: 659432 - DNA, 75 bp, synthetic construct
  source 1..75: mol_type = other DNA
ggaacggtgttgctggcgtagactactacaccaattcaggccgtggcgtaactgacgaaaacggtaaattctcct

SEQ ID NO: 659433 - DNA, 75 bp, synthetic construct
  source 1..75: mol_type = other DNA
caagggcaacagcccaaagaatgagtcagccgaattcacctttactggtgtggtaaaagcgccgttctataaaga

SEQ ID NO: 659434 - DNA, 75 bp, synthetic construct
  source 1..75: mol_type = other DNA
gttactgaaaccatcagcctgtactcgaatccgaccaaatggtttgcgggtaacatgcagtctactggcctgtgg

SEQ ID NO: 659435 - DNA, 75 bp, synthetic construct
  source 1..75: mol_type = other DNA
gcgttaataaagacgggcagtgtacgctcaacagcgacccggatgacatgaagaacttcatggagaacgtgctgc

SEQ ID NO: 659436 - DNA, 75 bp, synthetic construct
  source 1..75: mol_type = other DNA
atcaacaagctgtggggtgtggatacaagttacaaatctgtcagcaagttccacgtcttccatgactctaccaac

SEQ ID NO: 659437 - DNA, 75 bp, synthetic construct
  source 1..75: mol_type = other DNA
actactggctggcgtttggcgaaaaacgcgcctgggataaaaatgagctggcgtacattacggaagcgccttcca

SEQ ID NO: 659438 - DNA, 75 bp, synthetic construct
  source 1..75: mol_type = other DNA
aatcgcttttagcggctatgataagcgcaatcttattaaccggttgtgatggaggtaattcaggatcgtcctccg

SEQ ID NO: 659439 - DNA, 75 bp, synthetic construct
  source 1..75: mol_type = other DNA
actgtgccgaatccaacggtaacgctgccgacacgctgatgctgtgtgcatcctgggtcgcccagacggatcttt

SEQ ID NO: 659440 - DNA, 75 bp, synthetic construct
  source 1..75: mol_type = other DNA
aacgttcaccgagttcctgaactgctacgccaacaatgcttacaccaaaggcacgcagtgctccgcagagctgaa

SEQ ID NO: 659441 - DNA, 75 bp, synthetic construct
  source 1..75: mol_type = other DNA
catcagcctgtactcgaatccgaccaaatggtttgcgggtaacatgcaatcaaccggcctgtgggcaccggctca

SEQ ID NO: 659442 - DNA, 75 bp, synthetic construct
  source 1..75: mol_type = other DNA
cagctggcaggaagatgttgatggtgagcaggaaacgcgttatgcctttattgatgaagccgatcataaaacggc

SEQ ID NO: 659443 - DNA, 75 bp, synthetic construct
  source 1..75: mol_type = other DNA
gccggacgcgaaagccagcatgaccgtaggcaccaacctggatactgtctatttcaaacgtcatggtcaggttac

SEQ ID NO: 659444 - DNA, 75 bp, synthetic construct
  source 1..75: mol_type = other DNA
acgtgcctgggataaaaatgagctggcgtacattactgaagcgccttccattgtgcgaccagagaacgtgacacg

SEQ ID NO: 659445 - DNA, 75 bp, synthetic construct
  source 1..75: mol_type = other DNA
atgacaagccgaaactggaagtggccagctggctggaagatgtcgatggcaaacaggtcaagcgttatgccttta

SEQ ID NO: 659446 - DNA, 75 bp, synthetic construct
  source 1..75: mol_type = other DNA
catactctctggatgctagcggcacggtgaagttcaaggttccttacggtggtctgatttatatcaagagcgaca

SEQ ID NO: 659447 - DNA, 75 bp, synthetic construct
  source 1..75: mol_type = other DNA
gtgggatctgaacatcaaagttgatgtcgagaagtatccgggagcggtatcggctgaaggtgagaaggttactga

SEQ ID NO: 659448 - DNA, 75 bp, synthetic construct
  source 1..75: mol_type = other DNA
aacacgatctgaactcccctgcgccgctgggcgagctggagtcagacgctttcatctacactacgccgaagaaga

SEQ ID NO: 659449 - DNA, 75 bp, synthetic construct
  source 1..75: mol_type = other DNA
aaaccgaaactggaagttgccagctggcaagaagaggttgatggtgaacaagtaactcaatacgcgtttattgat

SEQ ID NO: 659450 - DNA, 75 bp, synthetic construct
  source 1..75: mol_type = other DNA
tgaacgttatccgctggtagaaggtgaactgccgtacaccattgatgaaaaaacgaaagaagttatctggaaata

SEQ ID NO: 659451 - DNA, 75 bp, synthetic construct
  source 1..75: mol_type = other DNA
ccgaccaaatggtttgcggggaacatgcaatcaaccggcctgtgggcaccagctcagcaggaagttagcattaag

SEQ ID NO: 659452 - DNA, 75 bp, synthetic construct
  source 1..75: mol_type = other DNA
aacggtaatttctcttttagctggggcgaaaccatttctttcggtatcgacaccttcgaactgggctcggtgcgc

SEQ ID NO: 659453 - DNA, 75 bp, synthetic construct
  source 1..75: mol_type = other DNA
ttgatgaggcggagcatgaaacaaacgagtccttggaggcggcaaaggcaaaaatcattaaggcatttcctggat

SEQ ID NO: 659454 - DNA, 75 bp, synthetic construct
  source 1..75: mol_type = other DNA
ttaaggaagagagcgcgtctggctttgtacgtctgcttgatgccgcaggtctgtcgatggcactgaacaagtcgg

SEQ ID NO: 659455 - DNA, 75 bp, synthetic construct
  source 1..75: mol_type = other DNA
tttttaatttgaagaaaaaagtgattgaaagagaaaatgttatggatgttctcacaatgtattttaagattaggg

SEQ ID NO: 659456 - DNA, 75 bp, synthetic construct
  source 1..75: mol_type = other DNA
gcttgcggataacaacgaagtacaggaactgcgcagggaactttatctggttaaacaggcggttaagggaatgcg

SEQ ID NO: 659457 - DNA, 75 bp, synthetic construct
  source 1..75: mol_type = other DNA
gcggatttcaccgccccggtcccctgtgaacaccacttccgtgaccgcgttcagcacgttgtaacggtacgtctg

SEQ ID NO: 659458 - DNA, 75 bp, synthetic construct
  source 1..75: mol_type = other DNA
ctgatcatggaaaacgtgatgagcaatcttaaggaagagagcgcatctggctttgtacgtctgcttgatgccgca

SEQ ID NO: 659459 - DNA, 75 bp, synthetic construct
  source 1..75: mol_type = other DNA
tccagaaggtacaactctgcctgcgttctacagcgagcgtgaagggatgaaaggctggaacctgttccagttgat

SEQ ID NO: 659460 - DNA, 75 bp, synthetic construct
  source 1..75: mol_type = other DNA
gtcaacacttgaaggctcacttgttcaaggaactaaattaagtactgacattgccaacttgatatttttagaaga

SEQ ID NO: 659461 - DNA, 75 bp, synthetic construct
  source 1..75: mol_type = other DNA
aagtcactatttccaaaacacagcgccgctataaagtcggctatgtcagagcccgccaccaggaccgcaaaaccg

SEQ ID NO: 659462 - DNA, 75 bp, synthetic construct
  source 1..75: mol_type = other DNA
tggtttcgcgaacggctcattgcgcatcgtctcgcctctgtgaatctgtcacgtttaccttacgaacccaaactt

SEQ ID NO: 659463 - DNA, 75 bp, synthetic construct
  source 1..75: mol_type = other DNA
atctcccacaccaaccgtaaaaccaaagttcccaccggatattcgcgcagccccagcctgcaccttaagggcaac

SEQ ID NO: 659464 - DNA, 75 bp, synthetic construct
  source 1..75: mol_type = other DNA
gggcataactctttctttaaaaacaattacttattccgcagttggaccgacgccagttcgattgtcgattatctg

SEQ ID NO: 659465 - DNA, 75 bp, synthetic construct
  source 1..75: mol_type = other DNA
aaccgcagcgacacaccggtgatcaaaatcagcgccaaatggctgagagaagcgggatttgagatcggcacgggc

SEQ ID NO: 659466 - DNA, 75 bp, synthetic construct
  source 1..75: mol_type = other DNA
agcccggtattattcacaacaccccagcctgcacctgaagggcgactggctgaaagaggccggatttgataccgg

SEQ ID NO: 659467 - DNA, 75 bp, synthetic construct
  source 1..75: mol_type = other DNA
taacccaattcgcctttattgatgaagccgaccacaaaacgcctgagtcactggctgcggcaaaacagagaattc

SEQ ID NO: 659468 - DNA, 75 bp, synthetic construct
  source 1..75: mol_type = other DNA
gtcgataacaagatgatctacggagataatactgccaaagcgggcatgatgaacccgagctatccgctcaactat

SEQ ID NO: 659469 - DNA, 75 bp, synthetic construct
  source 1..75: mol_type = other DNA
tggctgatctggcacgaagtagggcacaacgccgcagaaacgccgctgactgttcctggcgcgaccgaagtggcg

SEQ ID NO: 659470 - DNA, 75 bp, synthetic construct
  source 1..75: mol_type = other DNA
ctgtgtgcatcctgggtcgctcaggcggatctttcggaattctttaagaaatggaatccgggcgcaaatgcttac

SEQ ID NO: 659471 - DNA, 75 bp, synthetic construct
  source 1..75: mol_type = other DNA
gggcatgatgaacccgagctatccgctcaactatatggaaaaaccgctgacgcgcctgatgctgggccgttcctg

SEQ ID NO: 659472 - DNA, 75 bp, synthetic construct
  source 1..75: mol_type = other DNA
tctttaagaaatggaatccgggcgcgaatgcttaccagttgccgggggcgagcgagatgagcttcgagggcggtg

SEQ ID NO: 659473 - DNA, 75 bp, synthetic construct
  source 1..75: mol_type = other DNA
ctcaatctgccgaaaccgaagcaagggccggaaaccattaataaggttaccgagtattcgatgcctgctgaataa

SEQ ID NO: 659474 - DNA, 75 bp, synthetic construct
  source 1..75: mol_type = other DNA
tgctggtgtagtaaaagcgccgttctataaagatggtaaatggaaaaatgatctgaactcaccggccccgctggg

SEQ ID NO: 659475 - DNA, 75 bp, synthetic construct
  source 1..75: mol_type = other DNA
accgggtgcaactgaagtcgcgaacaacgtgctggcgctgtacatgcaggatcgctatctcggcaagatgaaccg

SEQ ID NO: 659476 - DNA, 75 bp, synthetic construct
  source 1..75: mol_type = other DNA
aacaaatcggtggtgaataacgatcctcaagggtatccggatcgcgttcgtcagcgtcgcgcgactggcatttgg

SEQ ID NO: 659477 - DNA, 75 bp, synthetic construct
  source 1..75: mol_type = other DNA
agttcgcggcgcgaatattgatcagcttattcatcgttattcccaggccggaaaaaatgatgagcgtgaagtgcc

SEQ ID NO: 659478 - DNA, 75 bp, synthetic construct
  source 1..75: mol_type = other DNA
aaaacgttcaccgagttcctgaactgctacgccaacgatgcctatactggcggcacgcagtgttctgatgagctg

SEQ ID NO: 659479 - DNA, 75 bp, synthetic construct
  source 1..75: mol_type = other DNA
cgttttactataaccaccacagccagttaacgtcagccaccgggccagacgggctggaaatgcgccgcaaatatg

SEQ ID NO: 659480 - DNA, 75 bp, synthetic construct
  source 1..75: mol_type = other DNA
cggtaaacctggcgtcacagtgttccacatgggcgacagcaaaaaggcgctacagcctatctatgatctcctgga

SEQ ID NO: 659481 - DNA, 75 bp, synthetic construct
  source 1..75: mol_type = other DNA
tccgccatttttgtcatgctggcgatgtactacgtcatcaccccctttggtggctggatcaacggcggtatccgt

SEQ ID NO: 659482 - DNA, 75 bp, synthetic construct
  source 1..75: mol_type = other DNA
atgtctacccagccgacgcaactgctgaacttcgatcccagcactatgcaatgggcgacctcttcgccggtgccg

SEQ ID NO: 659483 - DNA, 75 bp, synthetic construct
  source 1..75: mol_type = other DNA
cggcctgctccaaccgccggccgcgcgctgggccgaggccgtggcgcgtgtcggcgtaccggccgtcgtcacacg

SEQ ID NO: 659484 - DNA, 75 bp, synthetic construct
  source 1..75: mol_type = other DNA
acaaaacatttcaggatatagttaaaaatctggtgttaccgtttctgtcgatcattattattcctcttgtcaaat

SEQ ID NO: 659485 - DNA, 75 bp, synthetic construct
  source 1..75: mol_type = other DNA
acccgattgctgagcgcattgcggcgcatatttgcgatcaggacggcgccccagtgtttaccgcggctgacattc

SEQ ID NO: 659486 - DNA, 75 bp, synthetic construct
  source 1..75: mol_type = other DNA
cagggatcgcgttgggggcaatcattaccgcattgatggtggtgttcctgcgtttgatgatgttccgcaaaggca

SEQ ID NO: 659487 - DNA, 75 bp, synthetic construct
  source 1..75: mol_type = other DNA
ggctgtggtcggtgcttggtaccagcctgtacgcttttggtattggtttgattttcccgtcgctataccgcttta

SEQ ID NO: 659488 - DNA, 75 bp, synthetic construct
  source 1..75: mol_type = other DNA
cggtgttcggcgcggtgattgttgcgaatgccatcgtggcgcgttttgttaaagatccgaccgaaccgcggttta

SEQ ID NO: 659489 - DNA, 75 bp, synthetic construct
  source 1..75: mol_type = other DNA
atggggatcgccgcggcgacagcaatcgaccttggtggcccgatcaacaaagcagctggtttcgttgccttcagc

SEQ ID NO: 659490 - DNA, 75 bp, synthetic construct
  source 1..75: mol_type = other DNA
cctggcgaccattatcgaccgtcgtttaaccggcaaacgcctgttcaacgcccagctttatccacagggcaaaac

SEQ ID NO: 659491 - DNA, 75 bp, synthetic construct
  source 1..75: mol_type = other DNA
cgcgatgttcctggcctttatgggcattagtgagggtgcgattccgtttgcactggaaagccctatcaccgccat

SEQ ID NO: 659492 - DNA, 75 bp, synthetic construct
  source 1..75: mol_type = other DNA
gttccgctacagcttcagcgccctgaaagaccaacagatccatgatgaggttcgtagtcctcgccctcgctgttt

SEQ ID NO: 659493 - DNA, 75 bp, synthetic construct
  source 1..75: mol_type = other DNA
gcggatcgcgtggaagaagagggtgaagtccgcgtctttatcgaacataacgataacttccgcctgcccgctaac

SEQ ID NO: 659494 - DNA, 75 bp, synthetic construct
  source 1..75: mol_type = other DNA
cagaaatgccgggtatcactatcatctccgcttcgcaaacgggtaatgctcgccgggtcgctgaagcgttacgtg

SEQ ID NO: 659495 - DNA, 75 bp, synthetic construct
  source 1..75: mol_type = other DNA
gagtggcagcgctacgtcaaagagggcgtgctgacacgtatcgatcttgcctggtcgcgcgatcaaaaagaaaaa

SEQ ID NO: 659496 - DNA, 75 bp, synthetic construct
  source 1..75: mol_type = other DNA
ggcgtgatccccaaggttctgaagaatactcgacgataaagcgcgtatgggtctacatcactggtgtgaccgatc

SEQ ID NO: 659497 - DNA, 75 bp, synthetic construct
  source 1..75: mol_type = other DNA
tgccggtggtgcctccagcttcctcgcggatcgtgtggaagaagagggcgaagtccgcgtctttatcgaacataa

SEQ ID NO: 659498 - DNA, 75 bp, synthetic construct
  source 1..75: mol_type = other DNA
aagtccgcgtatttatcgaacataacgacaacttccgcctgcccgctaacccggaaaccccggtgattatgattg

SEQ ID NO: 659499 - DNA, 75 bp, synthetic construct
  source 1..75: mol_type = other DNA
gcaccggtatcgcgccattccgcgcctttatgcagcagcgtgccgccgacgaagcgccgggcaaaaactggttgt

SEQ ID NO: 659500 - DNA, 75 bp, synthetic construct
  source 1..75: mol_type = other DNA
cgcctgtcgcggcaccttcgcaatccgtcgctactggcgtggtaaatgaaatccacaccagcccgtacagcaaag

SEQ ID NO: 659501 - DNA, 75 bp, synthetic construct
  source 1..75: mol_type = other DNA
acgcgccgctggtggcgagcctttcggttaaccagaaaattaccgggcgtaactctgaaaaagacgttcgccata

SEQ ID NO: 659502 - DNA, 75 bp, synthetic construct
  source 1..75: mol_type = other DNA
cgtcgctactggcgcggtaaatgaaatccacaccagcccgtacagaaaagccgcgccggggggggggagcctctc

SEQ ID NO: 659503 - DNA, 75 bp, synthetic construct
  source 1..75: mol_type = other DNA
ctggtcgcgcgatcaaaaagaaaaagtttacgtacaagacaaactgcgcgaacagggcgcggagctgtggcgctg

SEQ ID NO: 659504 - DNA, 75 bp, synthetic construct
  source 1..75: mol_type = other DNA
tgaccctgagcgaagcgctacagtggcactttgaactgaccgtcaacaccgcgaatattgttgagaactacgcca

SEQ ID NO: 659505 - DNA, 75 bp, synthetic construct
  source 1..75: mol_type = other DNA
ttgagcaggtatacgctcgcggcaaactgatggtcaaagacggcaaagcctgcgtgaaaggaacgtttgaaacgg

SEQ ID NO: 659506 - DNA, 75 bp, synthetic construct
  source 1..75: mol_type = other DNA
cagtcacacttttaaatatcactaacagcagtaaaggatatacaaatttaaaggaagttgcggcgaagtcaaaac

SEQ ID NO: 659507 - DNA, 75 bp, synthetic construct
  source 1..75: mol_type = other DNA
gggactgtggtaacgcgattactcataatacggtgtgttgtccgtactgtggttctgtcgcccccttcggctatt

SEQ ID NO: 659508 - DNA, 75 bp, synthetic construct
  source 1..75: mol_type = other DNA
caggcactgggaccggaaggtggcgaaattattctgcgtacccgcaccgcgtttcaactgaccttgcacggtgag

SEQ ID NO: 659509 - DNA, 75 bp, synthetic construct
  source 1..75: mol_type = other DNA
tgggtggaactgattaaccagaatccaactgttacatatgaattaccgactccagttattcgaatcaaaaacgtt

SEQ ID NO: 659510 - DNA, 75 bp, synthetic construct
  source 1..75: mol_type = other DNA
atgcttgatgctaatcaggtgcgtggtgacttcgtgaaagctattggtcgtcgattcccacattgggacgaaaac

SEQ ID NO: 659511 - DNA, 75 bp, synthetic construct
  source 1..75: mol_type = other DNA
tacgtctacgatacaaacaaagttaaatctggcgcactggaggcaaccgcattaatcaacgtgaaatacgactaa

SEQ ID NO: 659512 - DNA, 75 bp, synthetic construct
  source 1..75: mol_type = other DNA
gtctgttggggccgcagctgcccggtacgcgcgttaccgaaagtattcacaaagtggctgaacgcgtggtgacgc

SEQ ID NO: 659513 - DNA, 75 bp, synthetic construct
  source 1..75: mol_type = other DNA
gcataacggtgaaatcaacaccatcaccggtaaccgccaatgggcgcgcgcgcgtacctataaattccagacacc

SEQ ID NO: 659514 - DNA, 75 bp, synthetic construct
  source 1..75: mol_type = other DNA
ctctaactccggggaaggcggtgaagatccggcgcgttacggcaccaataaagtctcacgtatcaaacaagtcgc

SEQ ID NO: 659515 - DNA, 75 bp, synthetic construct
  source 1..75: mol_type = other DNA
acccggatcaaattgaacaggtcttgctgaatattgtgcgcaatgcgctaccaggcgctggggccggaaggcggt

SEQ ID NO: 659516 - DNA, 75 bp, synthetic construct
  source 1..75: mol_type = other DNA
ttctgtgacggcccagcgtatgccggacggcatgatcctgctggagatggcaccgatggataaccagcgccgctt

SEQ ID NO: 659517 - DNA, 75 bp, synthetic construct
  source 1..75: mol_type = other DNA
atgtggaagataacgggccgggcattccgcctcatttgcaggatacgctgttttacccgatggtcagcggccgcg

SEQ ID NO: 659518 - DNA, 75 bp, synthetic construct
  source 1..75: mol_type = other DNA
cagaatcatggacttatacgctcgatatgaaccagtttaacggcctttcccgtgaattgactgtagaagtatcgg

SEQ ID NO: 659519 - DNA, 75 bp, synthetic construct
  source 1..75: mol_type = other DNA
tgattattatatccgtggtgctcactacgatattttcggtatggatgatgctgtttggtctgaaccgtatttcat

SEQ ID NO: 659520 - DNA, 75 bp, synthetic construct
  source 1..75: mol_type = other DNA
aagtagcgatcattgggatacttgccgactaatcgttaagaaaaatggtggtgttctatatgatcgcactgcaac

SEQ ID NO: 659521 - DNA, 75 bp, synthetic construct
  source 1..75: mol_type = other DNA
atcgcggtagctccacaagacggatcagaagtttgtccgtttggcatcgaagataacaaagtttatcttgataat

SEQ ID NO: 659522 - DNA, 75 bp, synthetic construct
  source 1..75: mol_type = other DNA
gcgcgggaaaagaacgcaacttcctggaaaatcacttcgatgcgcattgacggcaacacacacgcaaccgcaatt

SEQ ID NO: 659523 - DNA, 75 bp, synthetic construct
  source 1..75: mol_type = other DNA
taggtgatgctggtgttcctgatggtgctgttaccgtaacgatcaatgatgaccataaatttgaccgtcaaatca

SEQ ID NO: 659524 - DNA, 75 bp, synthetic construct
  source 1..75: mol_type = other DNA
atgcggtgacactaggaacatcaaacgatccgaagacagtattacccgttcttttcggtactacccgcacgggtg

SEQ ID NO: 659525 - DNA, 75 bp, synthetic construct
  source 1..75: mol_type = other DNA
gaatcctttggacgtattacgctgaaactggatgctcctgatattgttaagcataccttcaatgaagacaatatc

SEQ ID NO: 659526 - DNA, 75 bp, synthetic construct
  source 1..75: mol_type = other DNA
caaatttttgctattgccgaaggtgagatcgatcactttaaagcactgcacatcgataataaaaacgttctcatt

SEQ ID NO: 659527 - DNA, 75 bp, synthetic construct
  source 1..75: mol_type = other DNA
gctcaagctggcgagaatgccgacatcaaactggatcgactgcataaaactatcagcacagaaactgatggtaag

SEQ ID NO: 659528 - DNA, 75 bp, synthetic construct
  source 1..75: mol_type = other DNA
tgaagggaaccattaacagcaaatataatctggcagttaatgcagatggtcgcgtggctggtattcatatgagcg

SEQ ID NO: 659529 - DNA, 75 bp, synthetic construct
  source 1..75: mol_type = other DNA
atcaacggtgaagctaacaagtttagtgacctgtttgaagcatacattatcaaggtaactaacaaggctggtaag

SEQ ID NO: 659530 - DNA, 75 bp, synthetic construct
  source 1..75: mol_type = other DNA
tttcggtattattgctcgttccgaatgggtggaactggttaaccagaatcctactgttacctatgaattgccgac

SEQ ID NO: 659531 - DNA, 75 bp, synthetic construct
  source 1..75: mol_type = other DNA
ccgcgagctggaagcatggcagcaggaacagcaggcggctggccatcagacgctggccgatgttccggcccccgt

SEQ ID NO: 659532 - DNA, 75 bp, synthetic construct
  source 1..75: mol_type = other DNA
agtggtaaaagtgaatctgaatctccgtaccactacctgcgaaacaagcagaccaaagagttcttagccgagctg

SEQ ID NO: 659533 - DNA, 75 bp, synthetic construct
  source 1..75: mol_type = other DNA
acctggtttgatcgctgaaattaactccctggctaaccagttgcagatttcgatccccgggcttccggatgagtg

SEQ ID NO: 659534 - DNA, 75 bp, synthetic construct
  source 1..75: mol_type = other DNA
accacctcccgcctgctgcataccgccaccggggccatggcacacgttacccgcgagctggaagcgtggcagcag

SEQ ID NO: 659535 - DNA, 75 bp, synthetic construct
  source 1..75: mol_type = other DNA
gacggaagcgggcgtcacgtcagtggttggtctgctgggcaccgactctatctctcgtcacccggaatccctgct

SEQ ID NO: 659536 - DNA, 75 bp, synthetic construct
  source 1..75: mol_type = other DNA
ggcaatgacgcagacttgctggtcatgacgccagaattgcgcattgagcaggtatacgctcgcggcaaactgatg

SEQ ID NO: 659537 - DNA, 75 bp, synthetic construct
  source 1..75: mol_type = other DNA
agaactctacgaactgagattccaagatgttcttattaatgataacgacaagcccattgatgtacttagttgtac

SEQ ID NO: 659538 - DNA, 75 bp, synthetic construct
  source 1..75: mol_type = other DNA
actcgctacggcgggttttgttttatggagatgattatggtctgttcaacattcaaccctctaacgttacagaaa

SEQ ID NO: 659539 - DNA, 75 bp, synthetic construct
  source 1..75: mol_type = other DNA
acgaagcattcaatcttaacagccttcagcctggttctgtcattgtagtcaccactcaaagcggcatgacgatac

SEQ ID NO: 659540 - DNA, 75 bp, synthetic construct
  source 1..75: mol_type = other DNA
gcgttggtggaaccgaaagaataaaaagcgctggccttggattcgttttacgaagcattcaatcttaacagtctt

SEQ ID NO: 659541 - DNA, 75 bp, synthetic construct
  source 1..75: mol_type = other DNA
aaagccgatgataaaagatcatagtacactacgtaattggttatttgataatttgactggttttggtcctattga

SEQ ID NO: 659542 - DNA, 75 bp, synthetic construct
  source 1..75: mol_type = other DNA
aaaaccgtattctatctactaatggtgatttgagaacaagtgttgcagcatggcttcctcctgttcttgaaactg

SEQ ID NO: 659543 - DNA, 75 bp, synthetic construct
  source 1..75: mol_type = other DNA
acggcagtagcctgtcatcagtgtgaagatgcaccgtgcgcgaatgtctgccctgttgacgcgataagccgcgaa

SEQ ID NO: 659544 - DNA, 75 bp, synthetic construct
  source 1..75: mol_type = other DNA
tgacctgctggttgcccgaatcaaaggccagcctgatttaccggtgacggcagaagttcgcgcagacagcgggga

SEQ ID NO: 659545 - DNA, 75 bp, synthetic construct
  source 1..75: mol_type = other DNA
acagcgatccgtcttatctgaacgtgaataccatcgccacgctgagttatctgcgttattcgctgcgaacccgca

SEQ ID NO: 659546 - DNA, 75 bp, synthetic construct
  source 1..75: mol_type = other DNA
gaacctgaatctgttacgcactgaattgcaggaacgctggggaccggtcaatcaggctgatggctttgccgtgac

SEQ ID NO: 659547 - DNA, 75 bp, synthetic construct
  source 1..75: mol_type = other DNA
gtatcgaatggaagtgtccatgtttttggtagttcaggaattgtcggcaaccacgataaaacgctttgcagctat

SEQ ID NO: 659548 - DNA, 75 bp, synthetic construct
  source 1..75: mol_type = other DNA
accgacgccgaaatcgctgaaggttacgtactggcctgctcctgccatccgcagggggatttggttctcgcataa

SEQ ID NO: 659549 - DNA, 75 bp, synthetic construct
  source 1..75: mol_type = other DNA
aaacctgaatctgttacgcactgaattgcaggaacgctgggggccggtcaatcaggctgatggctttgcagtaac

SEQ ID NO: 659550 - DNA, 75 bp, synthetic construct
  source 1..75: mol_type = other DNA
ggcagagcttgacgcctggaaacagaaacaggaggcggcgggacggtcgacactggcggacgttccggcagcaca

SEQ ID NO: 659551 - DNA, 75 bp, synthetic construct
  source 1..75: mol_type = other DNA
atcagtacagacgcgttctggccggatatcgtgctgaaagagctgcgccttgccatgcgcattcccgggcgcacc

SEQ ID NO: 659552 - DNA, 75 bp, synthetic construct
  source 1..75: mol_type = other DNA
taaaagctgtatgttggcttgcccgtttggtgcgatggaagtggtttcttcgcgcacaaaggcgagagcgattaa

SEQ ID NO: 659553 - DNA, 75 bp, synthetic construct
  source 1..75: mol_type = other DNA
tgggcagccaccctgtgcgccacctgtgcgccgtctttgtcagttgatcctgcacgccctttacagtcgctggca

SEQ ID NO: 659554 - DNA, 75 bp, synthetic construct
  source 1..75: mol_type = other DNA
ccgggcggacgcactggatatacagacatcggatttgtggcgcgatgtgagctgggccatctctgacattctgcg

SEQ ID NO: 659555 - DNA, 75 bp, synthetic construct
  source 1..75: mol_type = other DNA
atcagtacagacgcattctggccggatatcgtgctgaaggagctgcggcttgccatgcgtatcccggggcgaacc

SEQ ID NO: 659556 - DNA, 75 bp, synthetic construct
  source 1..75: mol_type = other DNA
gagcttttggcgcaaatagagcagtttagaaggcgttttaaaagggaggtcgtgtatcaatcacattgcgtacat

SEQ ID NO: 659557 - DNA, 75 bp, synthetic construct
  source 1..75: mol_type = other DNA
tggggaatcaaaaattaaacataaaattagccatgatgtttttgaaccttatcccgcggcgttacatggtcaatt

SEQ ID NO: 659558 - DNA, 75 bp, synthetic construct
  source 1..75: mol_type = other DNA
gcctgaacgcggcatctacaagggctggggaatcaaaaattaaacataaaattagccatgatgtttttgaacctt

SEQ ID NO: 659559 - DNA, 75 bp, synthetic construct
  source 1..75: mol_type = other DNA
gatgcgctttgttggcgcggtggcttgatgcaggggttaatcgacctctggcaaccacttttccatgacaggagt

SEQ ID NO: 659560 - DNA, 75 bp, synthetic construct
  source 1..75: mol_type = other DNA
tatcatctgaccaatatggcggcagaatcccgcgttggtggtctactcggcggtaaacctggcgtcaccgtgttc

SEQ ID NO: 659561 - DNA, 75 bp, synthetic construct
  source 1..75: mol_type = other DNA
acaatatgctgctggcttacgggaaaaattacgtccgtcaacagtaaaccgtatcctcgcaatattgtccaaaat

SEQ ID NO: 659562 - DNA, 75 bp, synthetic construct
  source 1..75: mol_type = other DNA
cagcctgagttcacagataaaacactctccaggaaacccggggcggttcaacttcgcgacatcacggcaggagaa

SEQ ID NO: 659563 - DNA, 75 bp, synthetic construct
  source 1..75: mol_type = other DNA
aagttagcgccgaaggtctgcgcattgtgctggaagcgggtgttcgcgagccgatgatcatgcaggccaatcagg

SEQ ID NO: 659564 - DNA, 75 bp, synthetic construct
  source 1..75: mol_type = other DNA
gatgcgctttgttggcgcggtggcttgatgcaggggctaatcgacctctggcaacacttttccatgacaggagtt

SEQ ID NO: 659565 - DNA, 75 bp, synthetic construct
  source 1..75: mol_type = other DNA
gtctatatcactggcgtgaccgatcaccatcagaacagccagccccagtcgatgcagcgaattgcagggaccgat

SEQ ID NO: 659566 - DNA, 75 bp, synthetic construct
  source 1..75: mol_type = other DNA
tgcccgtctggtcgccgctgacttcgttgacccgccgtcagcaacttccacctgcggtgtatgtgttgatcgatg

SEQ ID NO: 659567 - DNA, 75 bp, synthetic construct
  source 1..75: mol_type = other DNA
ggcgtgaccctcaaggttctgaagaccgctcgacggtgaagcgcgtatgggtttacatcactggcgttaccgatc

SEQ ID NO: 659568 - DNA, 75 bp, synthetic construct
  source 1..75: mol_type = other DNA
gttgacggcggacatgatgcgctttgttggcgcggtggcttgatgcaggggctaatcgacctctggcaaccactt

SEQ ID NO: 659569 - DNA, 75 bp, synthetic construct
  source 1..75: mol_type = other DNA
ttacggtgcaacgcgcgtacgagatgaacgccaaaatggtgtcggcggcggacgatatgttgcagtacatcagtc

SEQ ID NO: 659570 - DNA, 75 bp, synthetic construct
  source 1..75: mol_type = other DNA
aagttggagtcattacccatttgcccgtctcgcctgcctttcgtcattaccgacggtattgaatttcgttttccc

SEQ ID NO: 659571 - DNA, 75 bp, synthetic construct
  source 1..75: mol_type = other DNA
cgggctatctccaactggccagattcaagatcagacggacgaccacgttcttcaacagtcgttatcactaaatcg

SEQ ID NO: 659572 - DNA, 69 bp, synthetic construct
  source 1..69: mol_type = other DNA
aagcgtaaactgaccgccgtatgtagccatcagacgaaaattgataacttagacgcccatctgatatag

SEQ ID NO: 659573 - DNA, 75 bp, synthetic construct
  source 1..75: mol_type = other DNA
ctctcgatagccttcacccccacaaggcctcagcccctttgaggcttgtcatccaccagcctggagggattggtg

SEQ ID NO: 659574 - DNA, 75 bp, synthetic construct
  source 1..75: mol_type = other DNA
ttttctgaacggtgcagtgcttattattttcagttgcttgattatgcttgctggcatgaggaatatgcgcttttt

SEQ ID NO: 659575 - DNA, 75 bp, synthetic construct
  source 1..75: mol_type = other DNA
ggcaatctgctgtcgccgcacgtctggctgtggtcggtgctgggcaccagtctgtatgctttcgggattggtttg

SEQ ID NO: 659576 - DNA, 75 bp, synthetic construct
  source 1..75: mol_type = other DNA
tctggaaaccgccgccagcggtcagccgaccgaaggcgtaccgggcgaagatgggcttggcaccttgcaggacaa

SEQ ID NO: 659577 - DNA, 75 bp, synthetic construct
  source 1..75: mol_type = other DNA
ggcacccagaaaaccttcaccgaaggcaacgtcgaaaccaccgacaacgcgatgaatgtcgccattatggggcag

SEQ ID NO: 659578 - DNA, 75 bp, synthetic construct
  source 1..75: mol_type = other DNA
accacttaccctaaagctttatgactggtgggttttgggagtatcaaatcgtcttgcatggggatgtcctacaaa

SEQ ID NO: 659579 - DNA, 75 bp, synthetic construct
  source 1..75: mol_type = other DNA
acgcggcatctacaagggctggggaatcaaaaattaaacataaaattaaccatgatgtttttgaaccttatcccg

SEQ ID NO: 659580 - DNA, 75 bp, synthetic construct
  source 1..75: mol_type = other DNA
atggatttgaacgaagctagcctgaacgcggcatctacaagggctggggaatcaaaaattaaacataaaattaac

SEQ ID NO: 659581 - DNA, 75 bp, synthetic construct
  source 1..75: mol_type = other DNA
gtccggtgcttttaccgccgaaattgtcccggtaaatgttgtcacacggaagaaaaacatcgtcttcgatcgcga

SEQ ID NO: 659582 - DNA, 75 bp, synthetic construct
  source 1..75: mol_type = other DNA
gcactggcatcgctggaagcagaaccggttgcagtaaacgacgacatggcttacgcattccatcacgcattgtca

SEQ ID NO: 659583 - DNA, 75 bp, synthetic construct
  source 1..75: mol_type = other DNA
ttatcagcttcccacgctacaacagcaggctacatcatccttttcccttctttactggcatcaattctcatttta

SEQ ID NO: 659584 - DNA, 75 bp, synthetic construct
  source 1..75: mol_type = other DNA
gaaaagcgtggcgcttgccgcccaggcgattctggccggtcaggcgcagagcatcgtcgcgggtggaatggagaa

SEQ ID NO: 659585 - DNA, 75 bp, synthetic construct
  source 1..75: mol_type = other DNA
tgaattcccgaaagtagattctactgcagaagctcttgctgcattgcgcccggccttcgacaaagccggaacggt

SEQ ID NO: 659586 - DNA, 75 bp, synthetic construct
  source 1..75: mol_type = other DNA
gatgcaaaagcacgctctggttatcgtcttggagacggacaggtttatgacgtaatcctgcgcgatggcctgatg

SEQ ID NO: 659587 - DNA, 75 bp, synthetic construct
  source 1..75: mol_type = other DNA
ctgcccgaaatgtaaagcgccagatcaatacggcgataactgtgaagtctgcggcgcaacatatagcccgactga

SEQ ID NO: 659588 - DNA, 75 bp, synthetic construct
  source 1..75: mol_type = other DNA
aatccacctcggccatatgctggagcacatccaggctgatgtctgggttcgttaccagcgaatgcgcggccacga

SEQ ID NO: 659589 - DNA, 75 bp, synthetic construct
  source 1..75: mol_type = other DNA
taactgtaatatctgaattattctgtttcgttatatcagttcctgtagttgccatttacttaatatttatattct

SEQ ID NO: 659590 - DNA, 75 bp, synthetic construct
  source 1..75: mol_type = other DNA
actgtataaccgtatcgatatgaaacaggtggaagcactggtggaagcatccaaagaagaagtgaaagcaactgc

SEQ ID NO: 659591 - DNA, 75 bp, synthetic construct
  source 1..75: mol_type = other DNA
aaagtggtgaatctggcgtcccgtaacgcgggctttatcaataagcgttttgacggtgtgctggcaggcgaactg

SEQ ID NO: 659592 - DNA, 75 bp, synthetic construct
  source 1..75: mol_type = other DNA
attccgaacacttcttctttgatctgccctctttcagcgaaatgttgcaggcatggacccgcagcggcgcgttgc

SEQ ID NO: 659593 - DNA, 75 bp, synthetic construct
  source 1..75: mol_type = other DNA
tggctcccgcgttgatgggaatggggccagtacctgccacacaaaaagcgttacaactggcagggctgcaactgg

SEQ ID NO: 659594 - DNA, 75 bp, synthetic construct
  source 1..75: mol_type = other DNA
gcgtgaactggtgcgggacgggaaactttttaccagtaacgcatggcagcgcacaaaaaaagcgcactttttgac

SEQ ID NO: 659595 - DNA, 75 bp, synthetic construct
  source 1..75: mol_type = other DNA
attggttcgcgattgaaaaacagctatccgcgtgaactggtgcgcgatgggaaactttttaccggtaacgcctga

SEQ ID NO: 659596 - DNA, 75 bp, synthetic construct
  source 1..75: mol_type = other DNA
tttgcatgttttcccacaaatttacgactgcgaaggcttcttcgttgctcgtctgcgtaaaactcaggcgattcc

SEQ ID NO: 659597 - DNA, 75 bp, synthetic construct
  source 1..75: mol_type = other DNA
gccaattccgtggtgtgaagaaggtttctggattgaacgcgacgatgaagatgcattgccgttgggtagtaccgc

SEQ ID NO: 659598 - DNA, 75 bp, synthetic construct
  source 1..75: mol_type = other DNA
gtggtatcgcgggcgcgatgtttacccgcaagccgcgccagtggcggatgatgtattggttactttccagcatca

SEQ ID NO: 659599 - DNA, 75 bp, synthetic construct
  source 1..75: mol_type = other DNA
tgaaagatcgcgaagctggacaaattcgtcaggcggctgcaggtgttggcttaaactgggatgaaaacctgcgcc

SEQ ID NO: 659600 - DNA, 75 bp, synthetic construct
  source 1..75: mol_type = other DNA
aaagataaactggacgcattttgtcaggagaatgggttaactcaggcagaagcgatagagctgctcataaaacga

SEQ ID NO: 659601 - DNA, 75 bp, synthetic construct
  source 1..75: mol_type = other DNA
ggattaccgccgagaacgtggccaaagagtacggaattacccgtgaaatgcaggatgaactggcgctacattcac

SEQ ID NO: 659602 - DNA, 75 bp, synthetic construct
  source 1..75: mol_type = other DNA
ttacaactggcggggctgcaactggcagacattgatcttatcgaagccaatgaagcatttgccgcgcagttcctt

SEQ ID NO: 659603 - DNA, 75 bp, synthetic construct
  source 1..75: mol_type = other DNA
ccgctcggcttagctaaacgcattggctcgcgcttgaagaacagttacccgcgtgaactggtgcgtgacggaaaa

SEQ ID NO: 659604 - DNA, 75 bp, synthetic construct
  source 1..75: mol_type = other DNA
atgcattgccattgggtagtaccgccgagcatttaagcggcctgttttatattcaggaagccagttcaatgttgc

SEQ ID NO: 659605 - DNA, 75 bp, synthetic construct
  source 1..75: mol_type = other DNA
gcattgaagccctgatcggtaaagtccgattttctcgcttggggattaaacttgccgaaacgcacaacaaaggtt

SEQ ID NO: 659606 - DNA, 75 bp, synthetic construct
  source 1..75: mol_type = other DNA
ttaaaacggtcatcacgctgagctttgtgcagttcgccctgttcttcctcaccttctggtgggaactggcgcgct

SEQ ID NO: 659607 - DNA, 75 bp, synthetic construct
  source 1..75: mol_type = other DNA
atgaaagttcttaactctctgcgtaccgcaaaagaacgccatccagactgtcagattgtgaagcgaaaaggacgg

SEQ ID NO: 659608 - DNA, 75 bp, synthetic construct
  source 1..75: mol_type = other DNA
tgttgataaaacgggtcacacctggtttctggctgtcgaaggtgaagccggggtaaccgaagggcaggcactgca

SEQ ID NO: 659609 - DNA, 75 bp, synthetic construct
  source 1..75: mol_type = other DNA
aaggcgctgataagcaggtgatcggccaggttgcagcggatctgcgtgcctaccgtcgtcctgagccttacaaag

SEQ ID NO: 659610 - DNA, 75 bp, synthetic construct
  source 1..75: mol_type = other DNA
gctggccttcttcggtaaggggatcggggcgctgggttgggctgtaatggctgatactgcgccaaaagagatcag

SEQ ID NO: 659611 - DNA, 75 bp, synthetic construct
  source 1..75: mol_type = other DNA
gggcagccggaaaattgcagaagtcactggcaaacagcataagcatgttgtacgggatattctggctatgcttga

SEQ ID NO: 659612 - DNA, 75 bp, synthetic construct
  source 1..75: mol_type = other DNA
ctggttactcaacatgccatcgatcagtatcaggcccggataacctctggagaccctaaaaaaccgtgggcctca

SEQ ID NO: 659613 - DNA, 75 bp, synthetic construct
  source 1..75: mol_type = other DNA
gagctctggcttgccgggatgcttatctcagcagaaatcatcagcattgaacccgctacaaacatacgactctga

SEQ ID NO: 659614 - DNA, 75 bp, synthetic construct
  source 1..75: mol_type = other DNA
ttgaaagcctgtacgcaacgctgccttatgaagaagtcgaggatgagcgcgatatcatagccaccattaatatcg

SEQ ID NO: 659615 - DNA, 75 bp, synthetic construct
  source 1..75: mol_type = other DNA
gacgtcatgcggacgcatggcgaaacaaaccattcgattaactttcgggctatgggaataccgcgaaacattcga

SEQ ID NO: 659616 - DNA, 75 bp, synthetic construct
  source 1..75: mol_type = other DNA
atgttcaccctctatcatcccaggcagatcgggtccacactaagcccatcgaaatcattcagggggcgaatacaa

SEQ ID NO: 659617 - DNA, 75 bp, synthetic construct
  source 1..75: mol_type = other DNA
gctggactcctggcacactttctcttttgccaactattacgatccgaactttatgggcttctccgcgctgcgtgt

SEQ ID NO: 659618 - DNA, 75 bp, synthetic construct
  source 1..75: mol_type = other DNA
tgaagtgggtgagttcaagcgcctccggttttcccgcacgtttgttttacgtcctttgcagaaagataaagcatg

SEQ ID NO: 659619 - DNA, 75 bp, synthetic construct
  source 1..75: mol_type = other DNA
catagctacattcgccttgtgaatgacggtaaagatccatggtatacgttgtttggcgctgcatttgtctgggtg

SEQ ID NO: 659620 - DNA, 75 bp, synthetic construct
  source 1..75: mol_type = other DNA
cgactttttgttgcctccaatgacgaaatgaatcctcttgctattattgcccattcaatagcgacaatagttaga

SEQ ID NO: 659621 - DNA, 75 bp, synthetic construct
  source 1..75: mol_type = other DNA
ggtatcggacagaacggtctgctggttgtactccctgttctggtcatacagacaaatctgagtctgtctgtatgg

SEQ ID NO: 659622 - DNA, 75 bp, synthetic construct
  source 1..75: mol_type = other DNA
ttgcctgccttatctgctttgcgcaatgttactggctgcggcaatgagcatgatgcagcttggactttcgccagc

SEQ ID NO: 659623 - DNA, 75 bp, synthetic construct
  source 1..75: mol_type = other DNA
acgtgctcaccctgctcggctggctggtgaacaacggcgtgtggcagacgctgaccgccaccgggctgttcgccc

SEQ ID NO: 659624 - DNA, 75 bp, synthetic construct
  source 1..75: mol_type = other DNA
ccattcaagaagctgcctgatccaggcacgatgaaggcaatggtggacgagtccaagaagtcctccaaaaacgga

SEQ ID NO: 659625 - DNA, 75 bp, synthetic construct
  source 1..75: mol_type = other DNA
gtgataaacgcggtagttgcggtctgggcggcaccggcggtgagcgcatccgactttacgcaaaacgcccactcg

SEQ ID NO: 659626 - DNA, 75 bp, synthetic construct
  source 1..75: mol_type = other DNA
ttgtctgccttatctgctttgcgcagttgcagatctctctgacggagggcttcagcctgctcagagagcagcctt

SEQ ID NO: 659627 - DNA, 75 bp, synthetic construct
  source 1..75: mol_type = other DNA
gcccgcgtttcgcgagccgtgccggtggttacactcgtattctgaagtgtggcttccgtgcaggcgacaacgcgc

SEQ ID NO: 659628 - DNA, 75 bp, synthetic construct
  source 1..75: mol_type = other DNA
aactgaaccgcaatagcagccatcgccaggctatgttccgcaatatggcaggttcactggttcgtcatgaaatca

SEQ ID NO: 659629 - DNA, 75 bp, synthetic construct
  source 1..75: mol_type = other DNA
ggtatcgggcagaacggtctgctggttgtgctccctgttctggtcatacagacaaatctgagtctgtctgtatgg

SEQ ID NO: 659630 - DNA, 75 bp, synthetic construct
  source 1..75: mol_type = other DNA
atgttactggctgcggcaatgagcatgatgcagcttggactttcgccagcccttactcgccagttcgatactgat

SEQ ID NO: 659631 - DNA, 75 bp, synthetic construct
  source 1..75: mol_type = other DNA
cccaaaaaccactgtcctgctggccacttgcgttcagtgccgggcttctcggtatcgggcagaacggtctgctgg

SEQ ID NO: 659632 - DNA, 75 bp, synthetic construct
  source 1..75: mol_type = other DNA
ggcgttgcttagcggtggcattaagcccagtcagttttactggcatatctggggggcagatttatatgaagtctc

SEQ ID NO: 659633 - DNA, 75 bp, synthetic construct
  source 1..75: mol_type = other DNA
ttggcgatacggtgaaagtggtggtgccgatgggatatccggccaacaacgatgcgtatatcaacgaagttcgtc

SEQ ID NO: 659634 - DNA, 75 bp, synthetic construct
  source 1..75: mol_type = other DNA
ggatccttctctcaatacgatggctaacgatcggcaacgtgaagggaaaatgactattctggtggggaactccgg

SEQ ID NO: 659635 - DNA, 75 bp, synthetic construct
  source 1..75: mol_type = other DNA
agggcgcgaagcctggcgaaggcggtcagttgccgggcgacaaagtcactccttacatcgccaaactgcgctatt

SEQ ID NO: 659636 - DNA, 75 bp, synthetic construct
  source 1..75: mol_type = other DNA
accgaaataccgatcgtctgctttgtctactgacgttactgcctgtgctgattctggctgtcgtttcaggcgtca

SEQ ID NO: 659637 - DNA, 75 bp, synthetic construct
  source 1..75: mol_type = other DNA
ttggcgatacggtaaaagtcgtggtgcctatgggatatccacccaataacgatgcatatatcaatgaagttcgcc

SEQ ID NO: 659638 - DNA, 75 bp, synthetic construct
  source 1..75: mol_type = other DNA
tttccactttcggtgccgccgctgcgtgagcggggcgatgatgtcattctgctggcggggtatttctgcgagcag

SEQ ID NO: 659639 - DNA, 75 bp, synthetic construct
  source 1..75: mol_type = other DNA
aggtccacgcctgcgttggtctgccattgtttgccgggcaaaacctgatcggcgcattgacgctcgacgggatgc

SEQ ID NO: 659640 - DNA, 75 bp, synthetic construct
  source 1..75: mol_type = other DNA
acggcagcgaaggcatgctgggtgccggcactggtatggatgcgaacggcggcaacggcaacatgtcttccgaag

SEQ ID NO: 659641 - DNA, 75 bp, synthetic construct
  source 1..75: mol_type = other DNA
catcgcctgagcgtgtttccactttcggtgccgccgctgcgtgagcggggcgatgatgtcattctgctggcgggg

SEQ ID NO: 659642 - DNA, 75 bp, synthetic construct
  source 1..75: mol_type = other DNA
ggcgcattgacgctcgacgggatgcagcccgatcagttcgatgttttcagcgacgaagagttacggctgattgcc

SEQ ID NO: 659643 - DNA, 75 bp, synthetic construct
  source 1..75: mol_type = other DNA
catcacaactgggctgcctgcgcgcggatgctggaaactgacgtcgccaacctgcatcggctggcgaaacgtctg

SEQ ID NO: 659644 - DNA, 75 bp, synthetic construct
  source 1..75: mol_type = other DNA
gcgtcacaaaattcgtttgcaggtcgatggcggcctgaaaacgggtgtcgatatcatcaaagcggcgattctcgg

SEQ ID NO: 659645 - DNA, 75 bp, synthetic construct
  source 1..75: mol_type = other DNA
ccgcaccacgatatctactctatcgaagacttagcgcagcttattttcgacctcaagcaggttaacccgaaagcg

SEQ ID NO: 659646 - DNA, 75 bp, synthetic construct
  source 1..75: mol_type = other DNA
aacgactatgtcggtaaaggcatggcgggcggcttaatcgccattcgtcctccggttggctcagccttccgcagc

SEQ ID NO: 659647 - DNA, 75 bp, synthetic construct
  source 1..75: mol_type = other DNA
cctgctgaacgcgcagttgctgcaacaggcaaaaccgtttgtcgatgaacgccagagcaaaaccttctggttcga

SEQ ID NO: 659648 - DNA, 75 bp, synthetic construct
  source 1..75: mol_type = other DNA
atgcgaaaaggacaacaaggggcgaatgcgaggcgcgcgtatgacacgcaaccccgtcgccacgctctttctgtg

SEQ ID NO: 659649 - DNA, 75 bp, synthetic construct
  source 1..75: mol_type = other DNA
gtgaagagattctggcgaactggtcaaccttcgccactaaatttgcgctggttaaaccgaagtccagtgatgtaa

SEQ ID NO: 659650 - DNA, 75 bp, synthetic construct
  source 1..75: mol_type = other DNA
aggatttagcgcagctgattttcgacctcaaacaggtcaacccgaaagcgatgatctccgtgaagctggtctccg

SEQ ID NO: 659651 - DNA, 75 bp, synthetic construct
  source 1..75: mol_type = other DNA
gcgtcataagatccgtttgcaggtcgatggcggcctgaaaacgggtgtcgatatcatcaaagcggcgattctcgg

SEQ ID NO: 659652 - DNA, 75 bp, synthetic construct
  source 1..75: mol_type = other DNA
gtacagcgactatcaggaatacgcgaagctggttaacgagcgtcctgctaccacgctgcgcgatctgctggcgat

SEQ ID NO: 659653 - DNA, 75 bp, synthetic construct
  source 1..75: mol_type = other DNA
accggtaaccgccaatgggcgcgtgcgcgtacctataaattccagacgccgcttatccctgacctgcacgacgcc

SEQ ID NO: 659654 - DNA, 75 bp, synthetic construct
  source 1..75: mol_type = other DNA
gatccggcgcgctacggcactaacaaagtgtcgcgcatcaagcaggtggcgtccggtcgcttcggtgttactccg

SEQ ID NO: 659655 - DNA, 75 bp, synthetic construct
  source 1..75: mol_type = other DNA
gcccatcagccagggcggcctgctgaaatacgtgcacggcggcgaataccacgcctacaacccggacgtggtgcg

SEQ ID NO: 659656 - DNA, 75 bp, synthetic construct
  source 1..75: mol_type = other DNA
attatttacgactacttccgccagcaatttgcccaggtgactaacccgccaatcgacccgctgcgtgaagcgcat

SEQ ID NO: 659657 - DNA, 75 bp, synthetic construct
  source 1..75: mol_type = other DNA
gtcctgctgactactgtcagcgtcagtgtgtatatactgtgtagctggtgtagtggcacagtaaatttggccacc

SEQ ID NO: 659658 - DNA, 75 bp, synthetic construct
  source 1..75: mol_type = other DNA
gggaacaactggcgcaggcatttgtggatgagaaactgaaaccccagctggagcaggagttcagggaaaaccggt

SEQ ID NO: 659659 - DNA, 75 bp, synthetic construct
  source 1..75: mol_type = other DNA
aacaatatgcagatggagaacgtctccggttttaaatgggacaccaaccagtccgtgcgtgatggtcagatgctg

SEQ ID NO: 659660 - DNA, 75 bp, synthetic construct
  source 1..75: mol_type = other DNA
atgagcatggtggataccgtttatgtcatgagtggcggtgagttcttccaggcggcatttaatggcgtggccacg

SEQ ID NO: 659661 - DNA, 75 bp, synthetic construct
  source 1..75: mol_type = other DNA
attcagagcagtcgtttgggtggaattcagataaggacgaagaaaatatgcggcatctgaaggatattgtgaagt

SEQ ID NO: 659662 - DNA, 75 bp, synthetic construct
  source 1..75: mol_type = other DNA
tggggtagatactaaaaaaccaatactcggaaagcttgttgagtttacaactggagttagcggaggggggaaact

SEQ ID NO: 659663 - DNA, 75 bp, synthetic construct
  source 1..75: mol_type = other DNA
acaggtgctgaaaaatgagcaggaaatggcatcatcccaacaggaactgaagacacaacggaacacgcttgcaga

SEQ ID NO: 659664 - DNA, 75 bp, synthetic construct
  source 1..75: mol_type = other DNA
ccatcttcaacaaggcgatgtccgctttgagccgctgtcggcattggtggcggcagacagcggtatggcggatat

SEQ ID NO: 659665 - DNA, 75 bp, synthetic construct
  source 1..75: mol_type = other DNA
acccagcgggaactgatcgatagtgcatttcatgcgctacgccctggcggtacgctggtttactcaacctgcaca

SEQ ID NO: 659666 - DNA, 75 bp, synthetic construct
  source 1..75: mol_type = other DNA
ctgttgccgccttgtttgctgacggtaatgcaccacagcgggtgatggatgtcgctgctgcaccaggttccaaaa

SEQ ID NO: 659667 - DNA, 75 bp, synthetic construct
  source 1..75: mol_type = other DNA
gtgaacaagtacagtatggccgacctgatgcactcctctgatccgtatgagctgatattccgtaaacccagcccg

SEQ ID NO: 659668 - DNA, 75 bp, synthetic construct
  source 1..75: mol_type = other DNA
cggacgaacgtggtactccggaatacaacatctccctgggtgaacgtcgtgcgaacgccgttaagatgtacctgc

SEQ ID NO: 659669 - DNA, 75 bp, synthetic construct
  source 1..75: mol_type = other DNA
tcactgtagacgtgaattttaagatccaagctaaaagttcacttatcgctattaccagtagtagtgtaatagcga

SEQ ID NO: 659670 - DNA, 75 bp, synthetic construct
  source 1..75: mol_type = other DNA
gcagagcagatccagaaacaggtgcgtgatacccgtcagactgtggaatcacaggtgctgaaaaatgagcaggaa

SEQ ID NO: 659671 - DNA, 75 bp, synthetic construct
  source 1..75: mol_type = other DNA
gttgatctatcctctctggacttacgtaatgtcgatttagattattatgatttcacagataaacatatggctaat

SEQ ID NO: 659672 - DNA, 75 bp, synthetic construct
  source 1..75: mol_type = other DNA
aatatccacaggtaatatcaatattaattgcccattaaaagatatttacaatgaattcaggaggttaaacgtaat

SEQ ID NO: 659673 - DNA, 75 bp, synthetic construct
  source 1..75: mol_type = other DNA
aaaatataacacatatgaagcttataactcagagaagcaatattttaccagagaggactatacgtatgattacga

SEQ ID NO: 659674 - DNA, 75 bp, synthetic construct
  source 1..75: mol_type = other DNA
cacgttagtgtggccagttccacttctgtccggtttttccagctattacggtgtattacctccgctttgtaaaga

SEQ ID NO: 659675 - DNA, 75 bp, synthetic construct
  source 1..75: mol_type = other DNA
tgttataacaagcattagcgatatgtattctgaagaaaaaattaagcttgtcgaaagttgtttaaatgcgcttgg

SEQ ID NO: 659676 - DNA, 75 bp, synthetic construct
  source 1..75: mol_type = other DNA
tcagaaaaaatatatgattacatcgatataatcattgaagattatgaaaatatcaaagaaaatgcttatctggtc

SEQ ID NO: 659677 - DNA, 75 bp, synthetic construct
  source 1..75: mol_type = other DNA
aacggtaatattgatgcaaagagcaaacttcaagatctcaaaaagctaaagcgaatggatagaaggaagaataag

SEQ ID NO: 659678 - DNA, 75 bp, synthetic construct
  source 1..75: mol_type = other DNA
aaaatgaacaggaaatggcatcatctcagcaggagctgaagacacgacggaacacgcttgcagaacagcataagg

SEQ ID NO: 659679 - DNA, 75 bp, synthetic construct
  source 1..75: mol_type = other DNA
aacaacatgcagatggagaacgtctccggctttaaatgggataccaaccagtctgtgcgcgacggtcagatgctg

SEQ ID NO: 659680 - DNA, 75 bp, synthetic construct
  source 1..75: mol_type = other DNA
atgtcccctgtttcatcaattggtaatgatattagtagtgatttagcccgtcgaaaaatgaatgaccttcctgaa

SEQ ID NO: 659681 - DNA, 75 bp, synthetic construct
  source 1..75: mol_type = other DNA
gggactgcggagaagcgacagagcataacacggtatgttgcccacactgcggttctgtcgatcccttcggctatt

SEQ ID NO: 659682 - DNA, 75 bp, synthetic construct
  source 1..75: mol_type = other DNA
atgaaagcatgcttgttactatttttttatttttctcttattggtcaattgcatggtgctgatgtgaaaataaaa

SEQ ID NO: 659683 - DNA, 75 bp, synthetic construct
  source 1..75: mol_type = other DNA
aatttaaagaaaaaatagaaatatcattaaatcatttagaaatgcaatttttatcactacagaagagattaatgg

SEQ ID NO: 659684 - DNA, 75 bp, synthetic construct
  source 1..75: mol_type = other DNA
ggagagaatcaagcgtgttataaccgattcgaagattcgcgccagcgatacgatgcatttagaacacagtaaatt

SEQ ID NO: 659685 - DNA, 75 bp, synthetic construct
  source 1..75: mol_type = other DNA
acgtcaacttgccgagtttgccgcttcattggttcaaccgggcgaaaccatcttcatcgaaaatggcagcagcaa

SEQ ID NO: 659686 - DNA, 75 bp, synthetic construct
  source 1..75: mol_type = other DNA
tgatggctggcaacctgaaactgggtttaccggtcgcgatatgatgcgtaccgatgtggtcaatgccgtgctgga

SEQ ID NO: 659687 - DNA, 75 bp, synthetic construct
  source 1..75: mol_type = other DNA
atgccgattacgaagcagagctaggtatggagcgtggtttattcagtgatgcgcttaacgaaatcaaaaccccag

SEQ ID NO: 659688 - DNA, 75 bp, synthetic construct
  source 1..75: mol_type = other DNA
agcaatctgagaaggaatttaatgacttttgtcgtgaggagtttagcgaatgggaagatgatgttactgaaaccc

SEQ ID NO: 659689 - DNA, 75 bp, synthetic construct
  source 1..75: mol_type = other DNA
gccaccgatgcttttctggctgaagtgcgggcgcagggggtggatgctgctatagaagctgcaaaaaatctggtg

SEQ ID NO: 659690 - DNA, 75 bp, synthetic construct
  source 1..75: mol_type = other DNA
attccctacgctgattcgttatccagcctcgccgccagttgcgatgcggttttcgtacattcaagcactgccagc

SEQ ID NO: 659691 - DNA, 75 bp, synthetic construct
  source 1..75: mol_type = other DNA
gcgtcgggccacacgatctttatttcacgttgctggatgattatctgcatgtggtggataccgcgctgtggttgt

SEQ ID NO: 659692 - DNA, 75 bp, synthetic construct
  source 1..75: mol_type = other DNA
cttgccaatttgtgacagctggcgcattccttatgccgattcgttatccagccttgccgccagttgcgatgcggt

SEQ ID NO: 659693 - DNA, 75 bp, synthetic construct
  source 1..75: mol_type = other DNA
cgccggaaggcgattttgaccgctcattctctgatggcgttctcgaagatatcgccgcccagcttcgcaaaggag

SEQ ID NO: 659694 - DNA, 75 bp, synthetic construct
  source 1..75: mol_type = other DNA
gtttatcaacgattactggcggctggcgatcaagcatcaggcgtatggcgtccatttggggcaggaagatttgca

SEQ ID NO: 659695 - DNA, 75 bp, synthetic construct
  source 1..75: mol_type = other DNA
cgcgctggcagcacgcccctcttatatcgcgctgggacatgtgttcccgacgcaaaccaaacagatgccttctgc

SEQ ID NO: 659696 - DNA, 75 bp, synthetic construct
  source 1..75: mol_type = other DNA
gcttactttgtggcgaacagaatgctggctgcctgggaagccggttttattgatgatactgcgaagaacgcagcg

SEQ ID NO: 659697 - DNA, 75 bp, synthetic construct
  source 1..75: mol_type = other DNA
atgcagcctgtccctgaaggcgtgattcaggtaccagaatcacccgacgccccggaggcgctgccggggtgtcgt

SEQ ID NO: 659698 - DNA, 75 bp, synthetic construct
  source 1..75: mol_type = other DNA
gtaatatcggtcgtggctttatcggtaaactgctggcagacgcaggtatccaactgacgtttgccgatgtcaatc

SEQ ID NO: 659699 - DNA, 75 bp, synthetic construct
  source 1..75: mol_type = other DNA
cgtaaactcttcaccctgaatacgggtcatgctataaccgcgtacctcggaaaactggccggtcatcagaccatt

SEQ ID NO: 659700 - DNA, 75 bp, synthetic construct
  source 1..75: mol_type = other DNA
atgattaaaaccgaatttggtattattgatgaaattgatgctgataaagattatagtcactacgaacctgaaaaa

SEQ ID NO: 659701 - DNA, 75 bp, synthetic construct
  source 1..75: mol_type = other DNA
cagtttcttcatattgtaatatcagatccaaaattccagcacgatcctttacttctttctttatcagaagtaata

SEQ ID NO: 659702 - DNA, 75 bp, synthetic construct
  source 1..75: mol_type = other DNA
tcctgtctggcgacaacataccctgtcgctaatcacgacaacaaaaatggacccggatatggtcagcaaagcgac

SEQ ID NO: 659703 - DNA, 75 bp, synthetic construct
  source 1..75: mol_type = other DNA
ctaatgccgcccgtcgcggcgggtcttgcgacgttcattgcgcccaaactgtttacccgacaggaaaaagaggct

SEQ ID NO: 659704 - DNA, 75 bp, synthetic construct
  source 1..75: mol_type = other DNA
tggatggatttctgaaaggaaaatgcatcccgcgagacttaaaggttaacgaaacaaacgctgaatatctggtgc

SEQ ID NO: 659705 - DNA, 75 bp, synthetic construct
  source 1..75: mol_type = other DNA
gaggtggttttgatgatgccgttaagtttctacgcagtgaagcgtctggtgtacgtttgttcgccgaccagcttc

SEQ ID NO: 659706 - DNA, 75 bp, synthetic construct
  source 1..75: mol_type = other DNA
aatatgatgttggtaatatcgccgcggtgatggaagcagataccagcaccgcgccgggggttatctggccagttc

SEQ ID NO: 659707 - DNA, 75 bp, synthetic construct
  source 1..75: mol_type = other DNA
gccgctgccaactggttgcgtcatacggctaaaccagagtttgcgaacaaccacttcctgcaaggtcaatggcgc

SEQ ID NO: 659708 - DNA, 75 bp, synthetic construct
  source 1..75: mol_type = other DNA
tggatggactggaagaagcaaaatcacaactcaaagagcagcgtgagtattacgaaggcgttatctctgatggga

SEQ ID NO: 659709 - DNA, 75 bp, synthetic construct
  source 1..75: mol_type = other DNA
tgtgtgcaaaatcaaacagttccgcaaactgctggagaacaagcggtgctggcgcaacgcgttgttgacaggatc

SEQ ID NO: 659710 - DNA, 75 bp, synthetic construct
  source 1..75: mol_type = other DNA
aaagaaccactggatcgcgaaggtaaagtcagccgcatcgtcgaatttatcgaaaaaccggatcagccgcagacg

SEQ ID NO: 659711 - DNA, 75 bp, synthetic construct
  source 1..75: mol_type = other DNA
ttctgccgatatttggccggaacttgaacgcactcagccaggtgcatgggggcgtattcagctgactgatgccat

SEQ ID NO: 659712 - DNA, 75 bp, synthetic construct
  source 1..75: mol_type = other DNA
ttctgccgatatttggccggaactggaacgtactcagcctggtgcatggggacgtattcagctgactgatgctat

SEQ ID NO: 659713 - DNA, 75 bp, synthetic construct
  source 1..75: mol_type = other DNA
tgttgaatttatcgaaaaaccggatcagccacaaacgctggattcagacatcatggccgtgggccgttatgtgct

SEQ ID NO: 659714 - DNA, 75 bp, synthetic construct
  source 1..75: mol_type = other DNA
aactgctggcggaagtacagtccatttgcccgccgggcgtgactattatgaacgtgcgtcagggcgaacctttag

SEQ ID NO: 659715 - DNA, 75 bp, synthetic construct
  source 1..75: mol_type = other DNA
gggttatatgcaggcgtttgtgaagtatggcttacgcaacttgaaagaaggggcgaagttccgtctatttattca

SEQ ID NO: 659716 - DNA, 75 bp, synthetic construct
  source 1..75: mol_type = other DNA
accgcatccgattgatggcctgtctggtgaatatgcggaaaaatccctagaagaatgggcggaacagattcgcaa

SEQ ID NO: 659717 - DNA, 75 bp, synthetic construct
  source 1..75: mol_type = other DNA
ggacgatggcgactgcgttacggtgaaagaggcgactgacgccctgctgcattgtgcggaacagcttcacaaggg

SEQ ID NO: 659718 - DNA, 75 bp, synthetic construct
  source 1..75: mol_type = other DNA
gtgacaagctgtcaccgtatgacaccgaagagatgcttgaggctatgcgtatttttctggaagaacagggagttg

SEQ ID NO: 659719 - DNA, 75 bp, synthetic construct
  source 1..75: mol_type = other DNA
gggctgaactggaacgtactgagccaggcgcatggggtcggattcaattaactgacgccatcgccgaactggcga

SEQ ID NO: 659720 - DNA, 75 bp, synthetic construct
  source 1..75: mol_type = other DNA
tttgtcgtggtactgccagacgttgtgatcgacgatgccagcgccgacccgctgcgttacaaccttgctgccatg

SEQ ID NO: 659721 - DNA, 75 bp, synthetic construct
  source 1..75: mol_type = other DNA
atgaaccgcacccgattgatggcctgtccggtgaatatgcggagaaatcccttgaagaatgggcggaacagattc

SEQ ID NO: 659722 - DNA, 75 bp, synthetic construct
  source 1..75: mol_type = other DNA
cccagccaccgatgcttttctggctgaagtacgggcgcagggcgtggagatggctatggaacatatgcagtcgag

SEQ ID NO: 659723 - DNA, 75 bp, synthetic construct
  source 1..75: mol_type = other DNA
attctctgccatcgctcatctataccgatttcaagcgtctttctccttactacgactttatctccgtggggcgta

SEQ ID NO: 659724 - DNA, 75 bp, synthetic construct
  source 1..75: mol_type = other DNA
gcgctggccgaagaccaccagagagcgattgagtcaattaagcaggctgatgcggctgttaagttggcacacgag

SEQ ID NO: 659725 - DNA, 75 bp, synthetic construct
  source 1..75: mol_type = other DNA
ttgccgccgggcatgagatggcttcggaactgaaagcagaatgtggtgccattgatatgcgtagtgtggcaaagc

SEQ ID NO: 659726 - DNA, 75 bp, synthetic construct
  source 1..75: mol_type = other DNA
tgtggtggataccgcgctgtggttgtcgggcggcaaagcctctctggatggcggtacgctactgactaacgacgc

SEQ ID NO: 659727 - DNA, 75 bp, synthetic construct
  source 1..75: mol_type = other DNA
cagacgacgcagaacgaggtggttttgattatgccgttaagtttctacgcagtgaagcgtctggtgtacgtttgt

SEQ ID NO: 659728 - DNA, 75 bp, synthetic construct
  source 1..75: mol_type = other DNA
cgattgagtcaattaagcaggctgatgcggctgttaagttggcacacgagaagttttcagcgctggcggcggaga

SEQ ID NO: 659729 - DNA, 75 bp, synthetic construct
  source 1..75: mol_type = other DNA
tgttactgaaactccagctaccgatgctttcctggctgaagtacgggcgcagggggtggagatgtttgcggagtg

SEQ ID NO: 659730 - DNA, 75 bp, synthetic construct
  source 1..75: mol_type = other DNA
ttaccgccgggcatgagatggcttcggaactgaaagcagaatgtggtgccgttgatatgcgtagtgtggcaaagc

SEQ ID NO: 659731 - DNA, 75 bp, synthetic construct
  source 1..75: mol_type = other DNA
ctggctcgtaaggcggttcaggcattctgcgatgttgttggcgacaacaccgaggttatcgctgaggaggttggg

SEQ ID NO: 659732 - DNA, 75 bp, synthetic construct
  source 1..75: mol_type = other DNA
aagttttcggcgctggcggcggagaatgagctggctcgtaaggcagttcaggcattctgcgatgttgttggcgac

SEQ ID NO: 659733 - DNA, 75 bp, synthetic construct
  source 1..75: mol_type = other DNA
gccgcaaacaccagccaccgatgctttcctggctgaagtccgggcgcagggtgtggagatgttctcagaaaaatt

SEQ ID NO: 659734 - DNA, 75 bp, synthetic construct
  source 1..75: mol_type = other DNA
gcgctggcagcggagaatgcggggcttaaggcgatatgtgatgaccgtcgcaggttcatcatgaatggggtgcag

SEQ ID NO: 659735 - DNA, 75 bp, synthetic construct
  source 1..75: mol_type = other DNA
ccacttgctgaaaaatcaggattgatagttccgctcacccaaagtttgatgagtcaggtcgccacacaaatgaac

SEQ ID NO: 659736 - DNA, 75 bp, synthetic construct
  source 1..75: mol_type = other DNA
acgtttcagcaggggtattatttctataaaccggtgacgtatattgagttagtcaaaattattctctcaaaaccg

SEQ ID NO: 659737 - DNA, 75 bp, synthetic construct
  source 1..75: mol_type = other DNA
agcatatgtgcagggggggcatatgaatagtaccgggctaagcgatactaatggcgggaatttccctctttcttt

SEQ ID NO: 659738 - DNA, 75 bp, synthetic construct
  source 1..75: mol_type = other DNA
agagagcgattgagtcaattaagcaggctgattcggctgttaagttggcacacgagaagttttcagtgctggcgg

SEQ ID NO: 659739 - DNA, 75 bp, synthetic construct
  source 1..75: mol_type = other DNA
tgcgcattaatgaatgcttgcgtttgcgggttaaagattttgattttgataatggctgcatcactgtgcatgacg

SEQ ID NO: 659740 - DNA, 75 bp, synthetic construct
  source 1..75: mol_type = other DNA
ggactgtgtgctggatctggcgcgcaaactttctatcagtattgtcgccgaaggcgtcgagacgaaggagcagct

SEQ ID NO: 659741 - DNA, 75 bp, synthetic construct
  source 1..75: mol_type = other DNA
gcatttcgtacagatgatttattttaccgtcgtgatttgtctaatacaacatatgtgcagggcgggtatatgaat

SEQ ID NO: 659742 - DNA, 75 bp, synthetic construct
  source 1..75: mol_type = other DNA
atgagcgcggggacacgttgattttgcatgaatgggtgcagggtgtgtttacggggcgaaaggttgaagcccaga

SEQ ID NO: 659743 - DNA, 75 bp, synthetic construct
  source 1..75: mol_type = other DNA
cgggactgaaggagacgacagcgcgtcagcatctttacgattttccagaggggatcattgatccgatgttattga

SEQ ID NO: 659744 - DNA, 75 bp, synthetic construct
  source 1..75: mol_type = other DNA
agtgatacccgtttgcagataaatgttgcaaacgctcaccagagcagcagtatgaagctgagtcaacgctgggcg

SEQ ID NO: 659745 - DNA, 75 bp, synthetic construct
  source 1..75: mol_type = other DNA
cgctgtcagggggaagcatattgaatgccagtgttccggacgctaattcaaatggtggttttgttgctgagtttt

SEQ ID NO: 659746 - DNA, 75 bp, synthetic construct
  source 1..75: mol_type = other DNA
atagccgttatcgcagtgaaagcgcgacgtttgatatctctgaggggcggtggttcgggtcgctcgggcttaccc

SEQ ID NO: 659747 - DNA, 75 bp, synthetic construct
  source 1..75: mol_type = other DNA
cagaaagcgattgagtcaattaagcaggctgatgcagctgttaagttggcacacgagaagttttcagcgctggcg

SEQ ID NO: 659748 - DNA, 75 bp, synthetic construct
  source 1..75: mol_type = other DNA
cccttggggaaacgagaaagtttccgctgcacgaacagttcttgagaatggtttacgtggtggtttgccagaacc

SEQ ID NO: 659749 - DNA, 75 bp, synthetic construct
  source 1..75: mol_type = other DNA
tggtagtcgctgcccgctacgtatgcacgtagtggacggtgaaatcaaatatgtcgaaacggacaataccggcga

SEQ ID NO: 659750 - DNA, 75 bp, synthetic construct
  source 1..75: mol_type = other DNA
atgtcgcggcatctcgacgctgtctgtgataccgcagatgagattcataaaggcaaacgctcaactccggttgcg

SEQ ID NO: 659751 - DNA, 75 bp, synthetic construct
  source 1..75: mol_type = other DNA
cgaccaaatggtattgaggcatatttttctaagcattacccaaatgtgtatgaagactttgatattcccttttaa

SEQ ID NO: 659752 - DNA, 75 bp, synthetic construct
  source 1..75: mol_type = other DNA
cagcgcggcgcagacttgccccggactatgtgctgagctttgccagtcgcattccttgcggaggtgaaaatgcgt

SEQ ID NO: 659753 - DNA, 75 bp, synthetic construct
  source 1..75: mol_type = other DNA
gttttacaaccagtaccacctacacgacaaggaaattggactgataatcttgaggaagcgattgaatggcatttg

SEQ ID NO: 659754 - DNA, 75 bp, synthetic construct
  source 1..75: mol_type = other DNA
ctattgctgggtaagatcaatgttgttctgagtgaatttgtaacggctggggaaaacaagcctgtagatgtgcta

SEQ ID NO: 659755 - DNA, 75 bp, synthetic construct
  source 1..75: mol_type = other DNA
tgccctgaatgccgaaggcgctgtaaaagaagctgctaaaggcttccagcttgaaggcttccactctgttttcac

SEQ ID NO: 659756 - DNA, 75 bp, synthetic construct
  source 1..75: mol_type = other DNA
cgcgaacatccatcaatcaaactttgctctttgacgcacatatgtgatgagttagtcgaccagcttcgcaaagga

SEQ ID NO: 659757 - DNA, 75 bp, synthetic construct
  source 1..75: mol_type = other DNA
ccgacgcccaattttaatggcggtgtgaatattatgttctgggtgattttcatcctgatatttgttggacttgcg

SEQ ID NO: 659758 - DNA, 75 bp, synthetic construct
  source 1..75: mol_type = other DNA
gtatgcactaagtgcttacgggtgattaaagatattaaccatcaatattcagccactgaggtaaagcatgggcag

SEQ ID NO: 659759 - DNA, 75 bp, synthetic construct
  source 1..75: mol_type = other DNA
ttgctatcgccagaaagcttggcaggccagtaagacgtattcccgaagcaatgccggagcctgtaagtacgctgg

SEQ ID NO: 659760 - DNA, 75 bp, synthetic construct
  source 1..75: mol_type = other DNA
tcgtcgccagtttcagcgcgaaaaagtcgagaatggtcttagcgttggtgaatatattgtgaaatatcaactgac

SEQ ID NO: 659761 - DNA, 75 bp, synthetic construct
  source 1..75: mol_type = other DNA
tgctgcagcttctgtacaggaaagggctgttgcgcacagagataccaggtggcttttcaccggaagaagcgcagg

SEQ ID NO: 659762 - DNA, 75 bp, synthetic construct
  source 1..75: mol_type = other DNA
attccaccctgctggcggatctcgatagcgcattgccagaaggctccgtgcgtgagctgaatcctgccggtcgtc

SEQ ID NO: 659763 - DNA, 75 bp, synthetic construct
  source 1..75: mol_type = other DNA
tgccgaagatatgatgcgtgcgggtcgtgatgtcgagaaaaacgtattaagccgcgcgctttaccaggttttggc

SEQ ID NO: 659764 - DNA, 75 bp, synthetic construct
  source 1..75: mol_type = other DNA
tcgcctgcaataagctcttacagctaaacgaggaggactccgaatggttaagccaggagattaaagataataaca

SEQ ID NO: 659765 - DNA, 75 bp, synthetic construct
  source 1..75: mol_type = other DNA
aggctcagtatcagtcccctaattttggtgcacttggggcattagccggggctggtgcagctcaaggtggtctta

SEQ ID NO: 659766 - DNA, 75 bp, synthetic construct
  source 1..75: mol_type = other DNA
tcgtgggaatctgataagcagaaatggaaatgcgattgcaggttctgcgtttgcaggagggctgtcagcattggc

SEQ ID NO: 659767 - DNA, 75 bp, synthetic construct
  source 1..75: mol_type = other DNA
gggaatcggttgtatcgcaggataatggagaacgctattcccgtttaattgaaaaatctgctgtttctgcgctgg

SEQ ID NO: 659768 - DNA, 75 bp, synthetic construct
  source 1..75: mol_type = other DNA
tataattgcgtttatattgatgatgacatttatattgatgaatggtgggaacaactccagacaataaaaaccttc

SEQ ID NO: 659769 - DNA, 75 bp, synthetic construct
  source 1..75: mol_type = other DNA
acccaagattcaagcatgaccatttacttttttctttatcagtagtaatacaaaaagccatcattgaaaataaac

SEQ ID NO: 659770 - DNA, 75 bp, synthetic construct
  source 1..75: mol_type = other DNA
ctgctgatgaaagccaattacggtggactggatgtcgaaatcgcggcggttattggtaaccacgagactttacgt

SEQ ID NO: 659771 - DNA, 75 bp, synthetic construct
  source 1..75: mol_type = other DNA
ggcgacaactttaaaactttatttgaaggtcagaaagttgaattcgccattcaccgcggagacaagggtcctgct

SEQ ID NO: 659772 - DNA, 75 bp, synthetic construct
  source 1..75: mol_type = other DNA
tgtcagaaatcaaacgccttaaaatttttatccaggcaggccatgagttccttagggattctaccgaagaaaaaa

SEQ ID NO: 659773 - DNA, 75 bp, synthetic construct
  source 1..75: mol_type = other DNA
gatgtgaaaatgatacagcaggggttgattgatggaaaactaaaaacatcggattttttccttactcgcttctgg

SEQ ID NO: 659774 - DNA, 75 bp, synthetic construct
  source 1..75: mol_type = other DNA
cgacagaaggtattgattacggggacacaatggttgtgtggccgtcaactggacgaattccgggcggtgatgtga

SEQ ID NO: 659775 - DNA, 75 bp, synthetic construct
  source 1..75: mol_type = other DNA
aaccggcggcgtgtttaactttgccggtggtctgggcggcatcactgttccgctggtggtggggtacctggcgca

SEQ ID NO: 659776 - DNA, 75 bp, synthetic construct
  source 1..75: mol_type = other DNA
cctaaaagaaacaagtatttttacatcgactattgatagcttagcgcccaatcaagagttattcttcgcccttgg

SEQ ID NO: 659777 - DNA, 75 bp, synthetic construct
  source 1..75: mol_type = other DNA
ccaatagcaattccgatgttttcctgaatgctctacataaatttaactaccccgatattccagaagaaaaagttt

SEQ ID NO: 659778 - DNA, 75 bp, synthetic construct
  source 1..75: mol_type = other DNA
gacgaaaaaagcactggcatcccgatgtgctgaaagagattcgacgcctcaggacagagctgccaaacctcggta

SEQ ID NO: 659779 - DNA, 75 bp, synthetic construct
  source 1..75: mol_type = other DNA
ccgcacagtaaggcacctctggtgcgacgaaaaaagcactggcatcctgatgtgctgaaagagattcgacgcctc

SEQ ID NO: 659780 - DNA, 75 bp, synthetic construct
  source 1..75: mol_type = other DNA
gctctggcgctcacttttcagtggacgaccgaacaaagtggtacttatttaattttattcagcgccagggtaatg

SEQ ID NO: 659781 - DNA, 75 bp, synthetic construct
  source 1..75: mol_type = other DNA
gggctgaaaccctgatactccggcagtgtgcgggaaccatgcgggtgaaagacatcgggaagctgacggggcgta

SEQ ID NO: 659782 - DNA, 75 bp, synthetic construct
  source 1..75: mol_type = other DNA
acttatcggacgaactgaagcggcagtgagaacgaaggcacgggagctgggcatcagcatgatgttacgtggtga

SEQ ID NO: 659783 - DNA, 75 bp, synthetic construct
  source 1..75: mol_type = other DNA
cagcagtagtaggcgcaccttcccggacgattctggttaatccggtaccacaaccttcggtgccaacagatacag

SEQ ID NO: 659784 - DNA, 75 bp, synthetic construct
  source 1..75: mol_type = other DNA
ttctggtcggtgcgatgctggcgttcgatatgggcggccccatcaacaaaaccgcctggttcttctgcttctcac

SEQ ID NO: 659785 - DNA, 75 bp, synthetic construct
  source 1..75: mol_type = other DNA
aattttattcagcgccagtgatgccttgacgtataggaaattgaaaaaccagacgataccgctgtccacgcctta

SEQ ID NO: 659786 - DNA, 75 bp, synthetic construct
  source 1..75: mol_type = other DNA
tccaccttccagtgatgtggatgccattgaagctgaaaacttcgaaagtggcggcgcgctgaaagaaatttcgaa

SEQ ID NO: 659787 - DNA, 75 bp, synthetic construct
  source 1..75: mol_type = other DNA
gcgatggcaagaaagtggcggcgcatgtctggtcagcagatgaaaaattgcagctgaaggtctacaccaccgctc

SEQ ID NO: 659788 - DNA, 75 bp, synthetic construct
  source 1..75: mol_type = other DNA
tgaaaaattgcaactgaaggtctacaccaccgctccggctctgcaattttactccggcaacttccttggtggcac

SEQ ID NO: 659789 - DNA, 75 bp, synthetic construct
  source 1..75: mol_type = other DNA
tgttccagaaacaaaggagcagattgttgctgcaagcttcttaaataaaaatggaatgccattaaaaatttctga

SEQ ID NO: 659790 - DNA, 75 bp, synthetic construct
  source 1..75: mol_type = other DNA
ataaagatgtaaatagtgaaagaggtagtgaacaatttattgagctgggattcgaaaaagaagttttttcaagac

SEQ ID NO: 659791 - DNA, 75 bp, synthetic construct
  source 1..75: mol_type = other DNA
gtagtgcgctatcagcataaagtggcgagtctggtttcccgttatgtgccgtcgggtgatgttcccgatgtggta

SEQ ID NO: 659792 - DNA, 75 bp, synthetic construct
  source 1..75: mol_type = other DNA
atttcgaaataacaaactttttacaacttgtgctcacctggagtttgttaatcattctttcatgtggcgtcggct

SEQ ID NO: 659793 - DNA, 75 bp, synthetic construct
  source 1..75: mol_type = other DNA
gcactcaattccaaagcaatactggtcatatctactctggaacccactagtgcatgtcgtggagttaagccgtga

SEQ ID NO: 659794 - DNA, 75 bp, synthetic construct
  source 1..75: mol_type = other DNA
ccgatacttcttaagcccctttatttcatctcctgcatcatgttccctctgcactcaattccaaagcaatactgg

SEQ ID NO: 659795 - DNA, 75 bp, synthetic construct
  source 1..75: mol_type = other DNA
gccgactggcaagggctggcactggaaagcgagtttctgccggacagcccgaaccaccctgaatggccgcaaccg

SEQ ID NO: 659796 - DNA, 75 bp, synthetic construct
  source 1..75: mol_type = other DNA
tgaaaaattgcagctgaaggtctacaccaccgctccggctctgcaattttactccggcaacttcctcggcggcac

SEQ ID NO: 659797 - DNA, 75 bp, synthetic construct
  source 1..75: mol_type = other DNA
aggctgctgctcactttatgcttgctggtagtggttctgtagccaggtggctgaaggtctatgaagagcgcggag

SEQ ID NO: 659798 - DNA, 75 bp, synthetic construct
  source 1..75: mol_type = other DNA
atgaaaaaactaacttctgatatgacagaactacaatcaatgaatatcactgaagataatatctgtaagctcaaa

SEQ ID NO: 659799 - DNA, 75 bp, synthetic construct
  source 1..75: mol_type = other DNA
tcactgccaccgcagttaatactggctccagttctgcagactgctcgtactataaatcaggctcgttccgttaca

SEQ ID NO: 659800 - DNA, 75 bp, synthetic construct
  source 1..75: mol_type = other DNA
gttgaaggtaactcaatgaccgcaccaacaggttccaagcccagctttcctgacgggatgttaattctggttgac

SEQ ID NO: 659801 - DNA, 75 bp, synthetic construct
  source 1..75: mol_type = other DNA
agtcttgccgctatttttaaaatcacgtaactacgataaccagtttgcacttttcgcctctgataagaattttga

SEQ ID NO: 659802 - DNA, 75 bp, synthetic construct
  source 1..75: mol_type = other DNA
gcatattgaacaatataatcaggctgttcaggctgcgtatttgcatcgtcttaaaatctggttatccagtgcttt

SEQ ID NO: 659803 - DNA, 75 bp, synthetic construct
  source 1..75: mol_type = other DNA
tcgtcctgatttagcggacgaaaaaaaggcaattaatgcactggaacataatgttcactggttacgtaagcagtg

SEQ ID NO: 659804 - DNA, 75 bp, synthetic construct
  source 1..75: mol_type = other DNA
cgctgtcactaatcccccggtgtatgattttgctgattttcttaacgataatctggcaaaaatcgttggcgtcgc

SEQ ID NO: 659805 - DNA, 75 bp, synthetic construct
  source 1..75: mol_type = other DNA
gccgtgcaggtaaaaaggttagtgaagataatccagactggaatggtgacattgggttccgtgtatttaaacttg

SEQ ID NO: 659806 - DNA, 75 bp, synthetic construct
  source 1..75: mol_type = other DNA
ttttgaccgaagacggcgtgatttttatttctatggacgattcggaaatagataatttaaaaaagatttgtagtg

SEQ ID NO: 659807 - DNA, 75 bp, synthetic construct
  source 1..75: mol_type = other DNA
tagaagataatggtagtcggcgttttatattagttcaacttccagagccgatcgagagtataaaatataaaacca

SEQ ID NO: 659808 - DNA, 75 bp, synthetic construct
  source 1..75: mol_type = other DNA
gaactgcgcaatatgatggagcgactggcgctgtttttaagtgtggaaccgacgccggatttaacgccgcaattt

SEQ ID NO: 659809 - DNA, 75 bp, synthetic construct
  source 1..75: mol_type = other DNA
cgcgcgagtcggcgaagactcccattccaggcttgctgacagcacaacaggcactggagaaatttaatggcgata

SEQ ID NO: 659810 - DNA, 75 bp, synthetic construct
  source 1..75: mol_type = other DNA
gattatttaacaccccgctggcgctgcacccgagtaaagccgaagtcatcatggcatccgtaatggaccgatttg

SEQ ID NO: 659811 - DNA, 75 bp, synthetic construct
  source 1..75: mol_type = other DNA
atctttagcagtatcagcaatcgttctgtaggtgctattgaagcgaatcaggggttgtttaattatcgaccagta

SEQ ID NO: 659812 - DNA, 75 bp, synthetic construct
  source 1..75: mol_type = other DNA
ccgccgactcactggctgaatttgtctgggatctgtttaccgcctggctgactgcgggcgcgccgtcgaaagaga

SEQ ID NO: 659813 - DNA, 75 bp, synthetic construct
  source 1..75: mol_type = other DNA
tgccaccgttgggttggatattctcgctgctatcggtagtgatatcgccctgatgcagcttaacggcatcgccca

SEQ ID NO: 659814 - DNA, 75 bp, synthetic construct
  source 1..75: mol_type = other DNA
acaagaagccttgcccatcacgaattacttcgcagcgagtgagctggcacctgccgtcgcccgcgccttcaacaa

SEQ ID NO: 659815 - DNA, 75 bp, synthetic construct
  source 1..75: mol_type = other DNA
ggtcgttaatcatggaaatcgatgaaggctttgcggtaggcatgtcgccagccgaactcagcgctgagcagctct

SEQ ID NO: 659816 - DNA, 75 bp, synthetic construct
  source 1..75: mol_type = other DNA
gccgatctactgccagccgtagtagtctcccctccctggctttcgaaaaaagaaaaaatcgccgattccggtgct

SEQ ID NO: 659817 - DNA, 75 bp, synthetic construct
  source 1..75: mol_type = other DNA
tctcggtaacgatgacaccgcccgcaaactgacgccattaatccgcgcctggcctggtgaatcccagcataaacg

SEQ ID NO: 659818 - DNA, 75 bp, synthetic construct
  source 1..75: mol_type = other DNA
ggcggttgttacaggttatataagcgaggggggtaatttaaactatctcgctttatgttccctagttgctctttt

SEQ ID NO: 659819 - DNA, 75 bp, synthetic construct
  source 1..75: mol_type = other DNA
aaagcattatgccttcctgacgaaagcccaactaacagcaatgattaacactaaagaactgacagagatctgcta

SEQ ID NO: 659820 - DNA, 75 bp, synthetic construct
  source 1..75: mol_type = other DNA
tttggatatattatgcatagaactatgccagatatatcgttcccagtgtttcttctaaacggacttatcccttat

SEQ ID NO: 659821 - DNA, 75 bp, synthetic construct
  source 1..75: mol_type = other DNA
tcggcagcccggcgaaactgattcgtgagcttagtgagcaggagctggcatggaaaaagcagggtacgcatgagt

SEQ ID NO: 659822 - DNA, 75 bp, synthetic construct
  source 1..75: mol_type = other DNA
ccgcaatgcattagtgggaatgaacgcggtagtgatggacggcgcggtgattggcgagaacagcattgttggcgc

SEQ ID NO: 659823 - DNA, 75 bp, synthetic construct
  source 1..75: mol_type = other DNA
ctttatgttccctagttgctcttttcatagggctggctgtatatcgtaaccgtgaagaagcaatgttgacatcat

SEQ ID NO: 659824 - DNA, 75 bp, synthetic construct
  source 1..75: mol_type = other DNA
gattattgcaggtgaaagatgcctgtaccgccgactcactggctgaatttgcctgggatctgtttaccgcctggc

SEQ ID NO: 659825 - DNA, 75 bp, synthetic construct
  source 1..75: mol_type = other DNA
gacggaagcgggcgtcacgtcggtagttggcctgctgggcactgactctatctctcgccatccggaatccctact

SEQ ID NO: 659826 - DNA, 75 bp, synthetic construct
  source 1..75: mol_type = other DNA
gaaaacgtcgggatcagtaaacacatcctctatggattgctgagcagggctcaaagacgccctttgctcaagaaa

SEQ ID NO: 659827 - DNA, 75 bp, synthetic construct
  source 1..75: mol_type = other DNA
ataacagagcccgaaaagcaagaggaacaaccaaaaccggacttcgttccacaagaacaaaactccctgcaggac

SEQ ID NO: 659828 - DNA, 75 bp, synthetic construct
  source 1..75: mol_type = other DNA
tcatatctactctggaacccattagtgcatgtcgtggagttaagccgcgaggcagttatgcctggctatatcagc

SEQ ID NO: 659829 - DNA, 75 bp, synthetic construct
  source 1..75: mol_type = other DNA
tcagcagaacagcgtctggcggcaagaaaaaccagagccgcgccactgatgcagtcactgtatgactggatacag

SEQ ID NO: 659830 - DNA, 75 bp, synthetic construct
  source 1..75: mol_type = other DNA
aacagcgtctggcggcaagaaaagccagagccgcgccactgatgcagtcactgtatgactggatacagactcaga

SEQ ID NO: 659831 - DNA, 75 bp, synthetic construct
  source 1..75: mol_type = other DNA
gcggaactcaagctgattgcggagaaaacgaaaaagggggatgtggaacatgcggagaatgctacatcgaaacat

SEQ ID NO: 659832 - DNA, 75 bp, synthetic construct
  source 1..75: mol_type = other DNA
gctcttaagcaagctgtggttatgggaaggcaaagcggaatctatggctgggggagtaattcaacacaggaagcg

SEQ ID NO: 659833 - DNA, 75 bp, synthetic construct
  source 1..75: mol_type = other DNA
gatgatgaatcacaggcgaacgatgcggttaaccgctacaaattgctgaaaaaagatgcgcgtaccgtcgccgcc

SEQ ID NO: 659834 - DNA, 75 bp, synthetic construct
  source 1..75: mol_type = other DNA
cccttgtcgtgagtgggtttactggagttaatgctgatagccaaagtgagaagcggattgtcatcattacgccac

SEQ ID NO: 659835 - DNA, 75 bp, synthetic construct
  source 1..75: mol_type = other DNA
aaaaatcagaacgtgattttccgtagtgcattctttgatgacggtcaggcgatatcctccgaaacaatccgcaaa

SEQ ID NO: 659836 - DNA, 75 bp, synthetic construct
  source 1..75: mol_type = other DNA
gcgtgaggatgttatggatcagattattcaggaaggcggtctggaatatgctactgatgtaataatacatcttca

SEQ ID NO: 659837 - DNA, 75 bp, synthetic construct
  source 1..75: mol_type = other DNA
gggctatatgcaggcgttcgtgaagtatggactacgcaacctgaaagaaggggcgaagttccgtaaagggattga

SEQ ID NO: 659838 - DNA, 75 bp, synthetic construct
  source 1..75: mol_type = other DNA
atggaacgctatgtggttgtgatgctgaacaacgcattcgaacaggtggaggtggcgatagtcaaaggctttgat

SEQ ID NO: 659839 - DNA, 75 bp, synthetic construct
  source 1..75: mol_type = other DNA
gatgcattcaaatacggtcaattcatgatgaatgcaaaagaagatgaataccgtgatttcttcctgaaagtggtc

SEQ ID NO: 659840 - DNA, 75 bp, synthetic construct
  source 1..75: mol_type = other DNA
gctgcgttacaaccttgctgccatgattgcgcgcttcaacgaaacgggccgcagccaggtgctggcaaaacgtat

SEQ ID NO: 659841 - DNA, 75 bp, synthetic construct
  source 1..75: mol_type = other DNA
gtttgggcccctccattttgtgtgcacgccccgccattggcgacaacccatttgtcgtggtgctgccggacgttg

SEQ ID NO: 659842 - DNA, 75 bp, synthetic construct
  source 1..75: mol_type = other DNA
aacgtgcgtcagggcgaacctttaggtttgggccactccattttatgtgcacgacctgccattggtgacaaccca

SEQ ID NO: 659843 - DNA, 75 bp, synthetic construct
  source 1..75: mol_type = other DNA
gcagctggatgacgtggagctggtcaccgatcactgccatcctcatgccctgctgaaggaagtggaagcggtcta

SEQ ID NO: 659844 - DNA, 75 bp, synthetic construct
  source 1..75: mol_type = other DNA
tccgcgctatatcgactggcagagcgggctgtggatgagcccggagcagttgatacgccagttggccgcgcaggg

SEQ ID NO: 659845 - DNA, 75 bp, synthetic construct
  source 1..75: mol_type = other DNA
tctacccgacgcgctggccgcccgcctgcacagcgacgcccgtcctaaggtgctgctgatcgaccaggtggcggg

SEQ ID NO: 659846 - DNA, 75 bp, synthetic construct
  source 1..75: mol_type = other DNA
ccgtaatcaccctaatgcgcgtctattgttgcgaacacacccagatacacgctttagcaaaaaaagcggcgtgtt

SEQ ID NO: 659847 - DNA, 75 bp, synthetic construct
  source 1..75: mol_type = other DNA
tcagtgatccggattgaagatggttttatccgctccaacggattggggtctaatttatgtcgaccttcatcactc

SEQ ID NO: 659848 - DNA, 75 bp, synthetic construct
  source 1..75: mol_type = other DNA
attcatctattatctactcaaaaaaaagctacgacggcaggtgttaagtggtggcagcgttggcgaattaagtta

SEQ ID NO: 659849 - DNA, 75 bp, synthetic construct
  source 1..75: mol_type = other DNA
atgattcacctggttacacaacgcatacagcaacttgccgccaacgtccgttgcggttccgtgcgaatggttggt

SEQ ID NO: 659850 - DNA, 75 bp, synthetic construct
  source 1..75: mol_type = other DNA
agtcgagcggttcgttaacatttggagattgctacatatcacttaacgagttcaccgcccagcttcgcaaaggag

SEQ ID NO: 659851 - DNA, 75 bp, synthetic construct
  source 1..75: mol_type = other DNA
atgctgtaaacaccatcatgtataccgccaatcgaacgggtgttttatacacagagaaggcaattcaaatgtcct

SEQ ID NO: 659852 - DNA, 75 bp, synthetic construct
  source 1..75: mol_type = other DNA
cggagaatgcgagactgaaggcgatatgtgaggatcgccgcacgttcattatgaatggcgtgcagcttggtttta

SEQ ID NO: 659853 - DNA, 75 bp, synthetic construct
  source 1..75: mol_type = other DNA
tggatggatttctgaaaggtaaatgcatcccaagcgatttaaaggttaacgaaacaaacgctgaatatctggtgc

SEQ ID NO: 659854 - DNA, 75 bp, synthetic construct
  source 1..75: mol_type = other DNA
cgaagaaccgtccgcaggccgatgtgcaggtgatctacaacgtgcgttcgccgcaggatgttattttcgccgatg

SEQ ID NO: 659855 - DNA, 75 bp, synthetic construct
  source 1..75: mol_type = other DNA
aaccagcaccatgacgctgaccgaagcggaaatcgccgaaggttatgtgttggcctgctcctgccatccgcaagg

SEQ ID NO: 659856 - DNA, 75 bp, synthetic construct
  source 1..75: mol_type = other DNA
ttattcatgtggatcatacttacactgctgaagatatgatgcgggcaggtcgtgatgtcgagaaaaatgtattaa

SEQ ID NO: 659857 - DNA, 75 bp, synthetic construct
  source 1..75: mol_type = other DNA
ccgccgcctgcgtgccgctaacaaattcccggcaatcatctacggtggcaaagaagcgccgctggctatcgagct

SEQ ID NO: 659858 - DNA, 75 bp, synthetic construct
  source 1..75: mol_type = other DNA
ggtcatggcggtcatttttgcgtttgcctgcgcaggcttgctgatctctttcatcctgccgcaaaaatggaccag

SEQ ID NO: 659859 - DNA, 75 bp, synthetic construct
  source 1..75: mol_type = other DNA
taaagaggcgcattgcctcggcgatttgttgatgaaagccaattacggcggcctggatgtcgaaatcgcggcagt

SEQ ID NO: 659860 - DNA, 75 bp, synthetic construct
  source 1..75: mol_type = other DNA
cgcacggaactggaagggatttttaatgattccaccctgctggcagatctcgatagcgcattgccagaaggctcc

SEQ ID NO: 659861 - DNA, 75 bp, synthetic construct
  source 1..75: mol_type = other DNA
cgtgatgtcgagaaaaatgtattaagccgcgcgctttaccaggttttggcccagcgcgtttttgtttacggtaac

SEQ ID NO: 659862 - DNA, 75 bp, synthetic construct
  source 1..75: mol_type = other DNA
gacattgatatgaatactaagaaaatcaccatttcgcatgaagcaattccagcggtgggctggcctgcaatgacc

SEQ ID NO: 659863 - DNA, 75 bp, synthetic construct
  source 1..75: mol_type = other DNA
aacccgtttgtggtggtgctgccggatatcattctcgatggcggcactgcggacccgctgcgctataacctcgct

SEQ ID NO: 659864 - DNA, 75 bp, synthetic construct
  source 1..75: mol_type = other DNA
atcaaagagattgtcctggtgacgcactcctcgaagaatgcagtggaaaaccactttgatacctcctacgagctg

SEQ ID NO: 659865 - DNA, 75 bp, synthetic construct
  source 1..75: mol_type = other DNA
gttattcagactaaagagccgctgaccgtagaaggtaaggtgagccgtatcgtcgagtttatcgaaaaaccggat

SEQ ID NO: 659866 - DNA, 75 bp, synthetic construct
  source 1..75: mol_type = other DNA
gcgattaacgcgggtgttgtggcgctttccaccacgaataccggggtctggacgttagcgaaaaaattgctttga

SEQ ID NO: 659867 - DNA, 75 bp, synthetic construct
  source 1..75: mol_type = other DNA
gatgctaaaagcggcaagagcggaaggttttttctgtattcatcgcctgtttattgttgattcgatttcgtttca

SEQ ID NO: 659868 - DNA, 75 bp, synthetic construct
  source 1..75: mol_type = other DNA
ctgcgcccgcccggtagtcggggacaacccgtttgtggtggtcctgccggacatcatcctcgacgggggcaccgc

SEQ ID NO: 659869 - DNA, 75 bp, synthetic construct
  source 1..75: mol_type = other DNA
tgaagtctgtagcaaaatctataaatataaatcctagtataaaattaccaaaaaataaaatcgcaaagtatgttg

SEQ ID NO: 659870 - DNA, 75 bp, synthetic construct
  source 1..75: mol_type = other DNA
tgtttttggttttagccggggagcagcggcggcaaggcactttgccaatcgggttatggaacaggatcctgctat

SEQ ID NO: 659871 - DNA, 75 bp, synthetic construct
  source 1..75: mol_type = other DNA
ttcatattattattcagctttcacagttgttacatttcttttcagtaaagtcttaattgcagataacagcgttta

SEQ ID NO: 659872 - DNA, 75 bp, synthetic construct
  source 1..75: mol_type = other DNA
ggggtatatgcaggcgtttgtgcagtatgggttgcgcaacctgaaggaaggggctaagatcaggaaaagtattga

SEQ ID NO: 659873 - DNA, 75 bp, synthetic construct
  source 1..75: mol_type = other DNA
agagctacgactgcgggaagaagatggggtatatgcaggcgtttgtgcagtatgggttgcgcaacctgaaggaag

SEQ ID NO: 659874 - DNA, 75 bp, synthetic construct
  source 1..75: mol_type = other DNA
gaaatcgttctggtcacacacgcatcgaaaaactcggtggaaaaccacttcgatacctcgtatgaactggaagca

SEQ ID NO: 659875 - DNA, 75 bp, synthetic construct
  source 1..75: mol_type = other DNA
gtagccaagtgctggcaaaacgtatgccgggtgacctctctgaatactccgtcattcaaaccaaagagccgctgg

SEQ ID NO: 659876 - DNA, 75 bp, synthetic construct
  source 1..75: mol_type = other DNA
aggtcagtaagctgattaaatgcagtgatttaaggttgaatgatgtaacaacttcaacacgtgcagtgactcatc

SEQ ID NO: 659877 - DNA, 75 bp, synthetic construct
  source 1..75: mol_type = other DNA
aggtcagtaagctgattaaaagtagcgacttgacgttgcatgaactgacgacagcaacacgagcagttactcagc

SEQ ID NO: 659878 - DNA, 75 bp, synthetic construct
  source 1..75: mol_type = other DNA
gtgccatcaggaactgaggtgttccggcttcagctcggtagtcacggcggaagcagtgtctttttcaatcgtaat

SEQ ID NO: 659879 - DNA, 75 bp, synthetic construct
  source 1..75: mol_type = other DNA
aaaatgaagcttatcgacttgttagtgaaggagctgcctaagtgcggcgggtggcctgatggaatgagttattgt

SEQ ID NO: 659880 - DNA, 75 bp, synthetic construct
  source 1..75: mol_type = other DNA
atgagtttatttgataaaaagcatctggtttcccccgccgatgcccttcctggacgtaataccccgatgcccgta

SEQ ID NO: 659881 - DNA, 75 bp, synthetic construct
  source 1..75: mol_type = other DNA
ttgaagaggtatcaaccattcgtcaggtaatggacaaggtatttaaagtcaattttgattttttaacgatcgccg

SEQ ID NO: 659882 - DNA, 75 bp, synthetic construct
  source 1..75: mol_type = other DNA
ttgagcaagcagccatcgcgtattgctggctgagtaaagtcctgacgattgtcgatatagccagaattgatgcgg

SEQ ID NO: 659883 - DNA, 75 bp, synthetic construct
  source 1..75: mol_type = other DNA
gcgcacaggtctggttcatgtgatgaatgagattgttccctcggtgggaggggaacaggcgacagtaatcaatag

SEQ ID NO: 659884 - DNA, 75 bp, synthetic construct
  source 1..75: mol_type = other DNA
atgaatatcaacttaatttatcgtcatccgtgtgagctggaaattgaatcattgctgagtcgtgaagagctatat

SEQ ID NO: 659885 - DNA, 75 bp, synthetic construct
  source 1..75: mol_type = other DNA
tcggaaaggggaaacacggaaactggattatgcgttgctaggttgggcggtctcggcaaaccttggcagagaatg

SEQ ID NO: 659886 - DNA, 75 bp, synthetic construct
  source 1..75: mol_type = other DNA
cagtttgttggggcggagctattccggtggtggttctggcgctggtggcagtgcgggtggcggaggcggtggtgg

SEQ ID NO: 659887 - DNA, 75 bp, synthetic construct
  source 1..75: mol_type = other DNA
tggacttcgagattttatttactggcgtcctgatgctaccgggactggtgttgaagctgtctatgtgatgcttaa

SEQ ID NO: 659888 - DNA, 75 bp, synthetic construct
  source 1..75: mol_type = other DNA
ctgtttgtgaaaacggcagatatatcgcagttacgccgtcaggatacgttaactatcggggatgattctttcttt

SEQ ID NO: 659889 - DNA, 75 bp, synthetic construct
  source 1..75: mol_type = other DNA
gaagctaggcaaactgtaacctcgcttcgactcactagtgcagtaaggcgaaaattggtacctttatggccagac

SEQ ID NO: 659890 - DNA, 75 bp, synthetic construct
  source 1..75: mol_type = other DNA
cagaatgcactatcgggcaactctccggtaactccggatggttggataagctgtagtgagcgaatgccggacgac

SEQ ID NO: 659891 - DNA, 75 bp, synthetic construct
  source 1..75: mol_type = other DNA
gcgctgcgtatttacggctacgctgctacgcgaaaatgagcgcagtttaatggcgtcgcttggctgccgtagtga

SEQ ID NO: 659892 - DNA, 75 bp, synthetic construct
  source 1..75: mol_type = other DNA
tgctcgttatgctgacccgctgccgccagattttcccggtgttcgcgtagatgatgccgcattgaaaccgcgcga

SEQ ID NO: 659893 - DNA, 75 bp, synthetic construct
  source 1..75: mol_type = other DNA
tcgcgctgagaaaatcaatgcactggaaactgttaccatcgcgtctaaagctggcgacgaaggaaaactgttcgg

SEQ ID NO: 659894 - DNA, 75 bp, synthetic construct
  source 1..75: mol_type = other DNA
cttattcatcgctattcgacgaccgggcaaaataatacccgtgttgttccggacgatgtacgcaaggtctttgcc

SEQ ID NO: 659895 - DNA, 75 bp, synthetic construct
  source 1..75: mol_type = other DNA
ctgaagttctggcagcagctaatgctcgcgctgagaaaatcaatgcactggaaactgttaccatcgcgtctaaag

SEQ ID NO: 659896 - DNA, 75 bp, synthetic construct
  source 1..75: mol_type = other DNA
aggaagccttgctaatattggcaataactgttctatcttatatgtctgcaatttcatttgaatatggctatgcat

SEQ ID NO: 659897 - DNA, 75 bp, synthetic construct
  source 1..75: mol_type = other DNA
ggtaactacggatggctggataagctgtagtgagaaaccatgcgcttacgagcagtattcagatattcagagcgg

SEQ ID NO: 659898 - DNA, 75 bp, synthetic construct
  source 1..75: mol_type = other DNA
ctggaatctgttccagttgatgcatcgtaaagcacgcggcgatgaggttggtaaaaccaagtttggcgaaagaaa

SEQ ID NO: 659899 - DNA, 75 bp, synthetic construct
  source 1..75: mol_type = other DNA
agttccggatgaagtacgcaaggtttttgctgaatatcccaacgtgattaacgagattatcaatctctcgttacc

SEQ ID NO: 659900 - DNA, 75 bp, synthetic construct
  source 1..75: mol_type = other DNA
gaccatctatcagaccagcggcaacccgtatggccacattattatgcgtggcggcaaaaaaccgaattatcatgc

SEQ ID NO: 659901 - DNA, 75 bp, synthetic construct
  source 1..75: mol_type = other DNA
gcatctggtttccagcgccgttgctggtctgccgccgggaaacgtcactctggtggatcagggcggacatctgtt

SEQ ID NO: 659902 - DNA, 75 bp, synthetic construct
  source 1..75: mol_type = other DNA
ctgcccgtacctttctgatgatcagtatgcggaatcccccgcactgcttgacgcactgcagcgcacgggctgctg

SEQ ID NO: 659903 - DNA, 75 bp, synthetic construct
  source 1..75: mol_type = other DNA
gccgctctaccagcgtgcactggcccgcagtgtgggcgaccagatgtttggttttaacatgacccgggcctgtac

SEQ ID NO: 659904 - DNA, 75 bp, synthetic construct
  source 1..75: mol_type = other DNA
tggttggcgctttgctgtaaaagagtgttacaaggattctttggatataaaacttaccccagtaaaaacagagtt

SEQ ID NO: 659905 - DNA, 75 bp, synthetic construct
  source 1..75: mol_type = other DNA
ttgcatctgaaactgatttcagtcagtatattgccccccccccgaaaatcttcacccaaaaagaattcaatttca

SEQ ID NO: 659906 - DNA, 75 bp, synthetic construct
  source 1..75: mol_type = other DNA
taccgggagcgttgtcgaatcaaccggcacctgcgaataacgcgccaatcagccacgcctccggcaaatcaaaat

SEQ ID NO: 659907 - DNA, 75 bp, synthetic construct
  source 1..75: mol_type = other DNA
cgtggcttacagatgattccactatccatctatcggagaaaaagtctcaggaggccttaccttcccgacgttttc

SEQ ID NO: 659908 - DNA, 75 bp, synthetic construct
  source 1..75: mol_type = other DNA
aagcaggcgcacccgcaaaagagaactgggcatttacctcgctggggattctaggcaatgacgacaccgcgcgta

SEQ ID NO: 659909 - DNA, 75 bp, synthetic construct
  source 1..75: mol_type = other DNA
caaatctaccccttatggtgctctcgaacttgaaacagaacctttttcattaatttatggcgaaacggggtatag

SEQ ID NO: 659910 - DNA, 75 bp, synthetic construct
  source 1..75: mol_type = other DNA
tgctgatgcggcggcggcggaaaaagcggagctgaagttgattgcggagaaaacgaaaaagggctacgcagaaga

SEQ ID NO: 659911 - DNA, 75 bp, synthetic construct
  source 1..75: mol_type = other DNA
acgggcaaagccagataaaaagctttgctgatgcggcggcggcggaaaaagcggagctgaagttgattgcggaga

SEQ ID NO: 659912 - DNA, 75 bp, synthetic construct
  source 1..75: mol_type = other DNA
aggcgctgtatccgggattattgcaggtgaaagatgcctgtaccgccgactcactggctgaatttgcctgggatc

SEQ ID NO: 659913 - DNA, 75 bp, synthetic construct
  source 1..75: mol_type = other DNA
taggttgtatgacggtaaccttgtcgctaaagaagtgaatataaaagagcgcaagctagggagtgagatattata

SEQ ID NO: 659914 - DNA, 75 bp, synthetic construct
  source 1..75: mol_type = other DNA
aagcccgccgcaaaagtttacggacatgaatatattacgcggaaagttaagggggtaacgcagactaacgcaata

SEQ ID NO: 659915 - DNA, 75 bp, synthetic construct
  source 1..75: mol_type = other DNA
gcgaggcagaaaaggacaaggatttaccggagaaggtcgcggctgaaatccccgtgattatccgcagattgctgg

SEQ ID NO: 659916 - DNA, 75 bp, synthetic construct
  source 1..75: mol_type = other DNA
gtgtgcttaacctgaaaacgggggaattttctccgcactcgccggagcactggagcaccacgcacaatggcattg

SEQ ID NO: 659917 - DNA, 75 bp, synthetic construct
  source 1..75: mol_type = other DNA
ggtgatgaagcactggcgataaagcaacagacagatccggttattgagttttgccagttcctgaattttctggag

SEQ ID NO: 659918 - DNA, 75 bp, synthetic construct
  source 1..75: mol_type = other DNA
atatacaggcgaaggaacgggcatcaagaaaatcacgggcggcgaccccgtggaaattaacccgaaatatgaaaa

SEQ ID NO: 659919 - DNA, 75 bp, synthetic construct
  source 1..75: mol_type = other DNA
cataaatggcttgagcacgcagccggaaaagacccgcgcaagatgatgcgtatatgtgccgcgctgtacatgatt

SEQ ID NO: 659920 - DNA, 75 bp, synthetic construct
  source 1..75: mol_type = other DNA
gattccggcggcacaaactttcacgcaacaactggtgatggttggagactacattgctcagcaaggtactcaggt

SEQ ID NO: 659921 - DNA, 75 bp, synthetic construct
  source 1..75: mol_type = other DNA
gaatacagtgatgcgtagcggtgaacgtctaccaaccctgactgccgatcagaaaaaacagtttggtccttttgt

SEQ ID NO: 659922 - DNA, 75 bp, synthetic construct
  source 1..75: mol_type = other DNA
acaacgtctaaacgacagtaaccatactgtcaggctgaataacgagcaacggtcagcagtacgcgaacgtctctc

SEQ ID NO: 659923 - DNA, 75 bp, synthetic construct
  source 1..75: mol_type = other DNA
aaatctgtcgtcaaatttgcgctggtaactgttctgagaaagtcgaacatcataaatctggagtggcaacagatt

SEQ ID NO: 659924 - DNA, 75 bp, synthetic construct
  source 1..75: mol_type = other DNA
ggtgcgtgtgcatcgcggaaccggagccgggattatctctaacgggcgcatttttatcggtcgcaacggcaacgt

SEQ ID NO: 659925 - DNA, 75 bp, synthetic construct
  source 1..75: mol_type = other DNA
ttcccgacttcgcagcaggcaagtgaatataacaaactgattgcgccattaccggcacagcatcaggcgtttaat

SEQ ID NO: 659926 - DNA, 75 bp, synthetic construct
  source 1..75: mol_type = other DNA
aggccgaaaaagacagggagctaccggaaaagattgcggctgaaatccctgtcattatccgccgattgctggcga

SEQ ID NO: 659927 - DNA, 75 bp, synthetic construct
  source 1..75: mol_type = other DNA
gtaacgccattgaagcgttaaaagttattgccgaaccaatgggcgagccgtccggtgatttgctgccgttcgcta

SEQ ID NO: 659928 - DNA, 75 bp, synthetic construct
  source 1..75: mol_type = other DNA
aggacgaaaaagacaaggatttgccggagaaggtcgcggctgaaatccccgtaattatccgtcgcttgctggcta

SEQ ID NO: 659929 - DNA, 75 bp, synthetic construct
  source 1..75: mol_type = other DNA
gccactttcagcaagcgcgtaatcaataacgccgttgaagcgttaaaagttattgccgaaccaatgggcgagccg

SEQ ID NO: 659930 - DNA, 75 bp, synthetic construct
  source 1..75: mol_type = other DNA
atttggtctgcaacccttccccttattgccataatgacatttagtttcttaattggtttacaacaagcgtcatta

SEQ ID NO: 659931 - DNA, 75 bp, synthetic construct
  source 1..75: mol_type = other DNA
atcaccacgcacaacggcattgagtacacgccaccagcaccaggggagaacattcgcgacaacgcgccaaacttt

SEQ ID NO: 659932 - DNA, 75 bp, synthetic construct
  source 1..75: mol_type = other DNA
gctttgatggcgtttgtgtgcatccggaaagtgaaatcgttcacgtatggcgcggcggggtatggtgtccggtca

SEQ ID NO: 659933 - DNA, 75 bp, synthetic construct
  source 1..75: mol_type = other DNA
gatggggaatggtacgtggtttaccatccttgatatttcaggggtggaaaacctttttaatacccagaaaaccaa

SEQ ID NO: 659934 - DNA, 75 bp, synthetic construct
  source 1..75: mol_type = other DNA
tggaagttaacccgaaatatgaaaagcgtttcacggcggtaatcagggcggtggtgctggcgaccaacaacaacc

SEQ ID NO: 659935 - DNA, 75 bp, synthetic construct
  source 1..75: mol_type = other DNA
gacatcgcttgatgatgctggtggacgtgcgcaggttgtcgggagtcgtcttatcgtcctggctgaccagccgaa

SEQ ID NO: 659936 - DNA, 75 bp, synthetic construct
  source 1..75: mol_type = other DNA
gcgattcacgacggtaataagggcggtggtactggcgaccaacaacaacccgatgatattcaccgagcgggccgg

SEQ ID NO: 659937 - DNA, 75 bp, synthetic construct
  source 1..75: mol_type = other DNA
tgaaaagcgtttcacggcggtaatcagggcggtggtgctggcgaccaataacaatccgatgatattcaccgaacg

SEQ ID NO: 659938 - DNA, 75 bp, synthetic construct
  source 1..75: mol_type = other DNA
gtgaccgtcgagattgaagataaaggcgggaactgtggttcgattggcatgggaaatggtacgtggtttaccatc

SEQ ID NO: 659939 - DNA, 75 bp, synthetic construct
  source 1..75: mol_type = other DNA
tcggtgatcctgccagggcttgttgacccggacagcggcaaaattcattacatgccgcatattcaggtagaaaac

SEQ ID NO: 659940 - DNA, 75 bp, synthetic construct
  source 1..75: mol_type = other DNA
tgctggcagaagaacattacccgctgccggaacgtacccagcagacgctggaacatgccctgcttaacgccattg

SEQ ID NO: 659941 - DNA, 75 bp, synthetic construct
  source 1..75: mol_type = other DNA
tcgtgtccggtctgtatgaactgttcccggaaaacgggccggtacgagattcgcttgccgggctggctgcagcga

SEQ ID NO: 659942 - DNA, 75 bp, synthetic construct
  source 1..75: mol_type = other DNA
cggtcacgatatccgtagtctggcgctggcggagcactacttcggtgcaagtcaggattgcgaagactccatttt

SEQ ID NO: 659943 - DNA, 75 bp, synthetic construct
  source 1..75: mol_type = other DNA
gcaatcggcgcttttgcgctggtaaaacgcgccatgctcaacggtattttgctccagcatttgctggaaaattaa

SEQ ID NO: 659944 - DNA, 75 bp, synthetic construct
  source 1..75: mol_type = other DNA
gcaggcctccaccggaggccgccgcgctatctccatcgtcactgaaactcgtaatttccacgctatcggcgtacg

SEQ ID NO: 659945 - DNA, 75 bp, synthetic construct
  source 1..75: mol_type = other DNA
gaacatggacgaaaccgagtttcagcaggtttataaatctgtactgaatgtgctgtggaactggatcctgttccg

SEQ ID NO: 659946 - DNA, 75 bp, synthetic construct
  source 1..75: mol_type = other DNA
gctcgatgttctgtggcgatggatactctcccgatcatttcgcagttgtgaagaggcagaaaacgccgccgccca

SEQ ID NO: 659947 - DNA, 75 bp, synthetic construct
  source 1..75: mol_type = other DNA
tgcgctccagaacgccgcggagatgtatctctcttcggtcggtatttctcgttcccgcgatatagcgctgctgaa

SEQ ID NO: 659948 - DNA, 75 bp, synthetic construct
  source 1..75: mol_type = other DNA
atggcgcatatacaactggtcaaacaaacttcttctggtttacttctcccggcgacaccggagagttgtgatttt

SEQ ID NO: 659949 - DNA, 75 bp, synthetic construct
  source 1..75: mol_type = other DNA
cggtagccgcgggcgtcgggcgaagtccattgcttttgcgaatatggacgaaactgaatttcaacaggtttataa

SEQ ID NO: 659950 - DNA, 75 bp, synthetic construct
  source 1..75: mol_type = other DNA
tttacaccgagcatctttatcctgatggtagccgtgggcgtcgggcgaaatctatcgcgtttgcgaatatggacg

SEQ ID NO: 659951 - DNA, 75 bp, synthetic construct
  source 1..75: mol_type = other DNA
gaacatgccctgctgaatgccattgctcagtttattgatagctaccagcgcaagctgcgcgagctgatcgccatt

SEQ ID NO: 659952 - DNA, 75 bp, synthetic construct
  source 1..75: mol_type = other DNA
tggagatcacatcatctgcatcttcggctgtagtgagcgataccaacaatctggtatttacgttactgttgaaaa

SEQ ID NO: 659953 - DNA, 75 bp, synthetic construct
  source 1..75: mol_type = other DNA
cgaagtgccagcgcctgatggcgatgcgccgggaaagcaaccagcgcatggcggacttcgccgtcgccgatgtct

SEQ ID NO: 659954 - DNA, 75 bp, synthetic construct
  source 1..75: mol_type = other DNA
ctcacattctcgcttgagcataatgtggatgcggttccggcatacgtcatgaaacacctgaaaatgtgtttccac

SEQ ID NO: 659955 - DNA, 75 bp, synthetic construct
  source 1..75: mol_type = other DNA
tggtttccggcggtactgataaccacctgttcctggttgatctggttgataaaaacctgaccggtaaagaagctg

SEQ ID NO: 659956 - DNA, 75 bp, synthetic construct
  source 1..75: mol_type = other DNA
cgcgcggcggcctgatcctggcgaaaggtggtagcgaagatctgtacaaaaaactgaactctgctgtcttcccgg

SEQ ID NO: 659957 - DNA, 75 bp, synthetic construct
  source 1..75: mol_type = other DNA
cgctctgttctggctgctggttcgcaggctggtacggtacgtgtaactgcaaaagttcagggaaaaacatttact

SEQ ID NO: 659958 - DNA, 75 bp, synthetic construct
  source 1..75: mol_type = other DNA
gctcaaaggagcgatctgcctccggcgccgcgagagttagatgccggccagctggctgctcgcgatgcggtaact

SEQ ID NO: 659959 - DNA, 75 bp, synthetic construct
  source 1..75: mol_type = other DNA
catcagaaggagaaaccccatgcctgcttgtaagcttcgcccgactacgcagtacgacaccaacgcagtttacgc

SEQ ID NO: 659960 - DNA, 75 bp, synthetic construct
  source 1..75: mol_type = other DNA
tgctggcagaggaacattacccgttgcctgaacgcactcagcaaacgctggaacatgcactgctgaatgccattg

SEQ ID NO: 659961 - DNA, 75 bp, synthetic construct
  source 1..75: mol_type = other DNA
cccttgctttctttgctgaaccagctgctggaggcaagcctgccttcccgtgtggttttcattgaactgaaacaa

SEQ ID NO: 659962 - DNA, 75 bp, synthetic construct
  source 1..75: mol_type = other DNA
gtgctggaaggtgaaaacgccgttcagcgtcaccgcgatctgctgggcgcgaccaatccggcaaacgcactggcc

SEQ ID NO: 659963 - DNA, 75 bp, synthetic construct
  source 1..75: mol_type = other DNA
atggctattgaacgtactttttctatcatcaaaccgaacgcggtagcaaaaaacgtcattggtaatatctttgcg

SEQ ID NO: 659964 - DNA, 75 bp, synthetic construct
  source 1..75: mol_type = other DNA
cgctggcgatgcaaaaaccgggctgtgaagtgatcaccggcaccaatttgcaactgctactggaaatggtgctgg

SEQ ID NO: 659965 - DNA, 75 bp, synthetic construct
  source 1..75: mol_type = other DNA
attagtctcaccgccctggctttcgaaaaagaaaaaatctgtaatgccggtattggatttaacgccattaccgct

SEQ ID NO: 659966 - DNA, 75 bp, synthetic construct
  source 1..75: mol_type = other DNA
tatgctgatgacgatacttatctcgcaaccggcactagcagaacaggtcattccctggctctcgacgcccgcagt

SEQ ID NO: 659967 - DNA, 75 bp, synthetic construct
  source 1..75: mol_type = other DNA
atcaaaatagaaacgatcgaagtagatacaactggcgtggcagaaaccactgtcgtatttgaccaaagtatggtt

SEQ ID NO: 659968 - DNA, 75 bp, synthetic construct
  source 1..75: mol_type = other DNA
cgttctggaaatatcaccgacggatgctgccgcctttggtcagctttttgccgactacgaactgctaccaccgtt

SEQ ID NO: 659969 - DNA, 75 bp, synthetic construct
  source 1..75: mol_type = other DNA
gcgccctcctacgcctcggtgaaatgctccgcttccctcaggaagaggcactgtatccgggattattgcaggtga

SEQ ID NO: 659970 - DNA, 75 bp, synthetic construct
  source 1..75: mol_type = other DNA
tcgaccgctgggattggaacaaacatagaggctatattgatattccagaaatagcgttggatgcttggcagcgtg

SEQ ID NO: 659971 - DNA, 75 bp, synthetic construct
  source 1..75: mol_type = other DNA
tcctcacatcctggaaatatcgccgattgacgccgccgcctttggccagctttttgccgactatgaactgttgcc

SEQ ID NO: 659972 - DNA, 75 bp, synthetic construct
  source 1..75: mol_type = other DNA
taacaaaggagaaaaaaatagcattcagacatcaattagcggaattgccggaaaatataatcagttttcttatgg

SEQ ID NO: 659973 - DNA, 75 bp, synthetic construct
  source 1..75: mol_type = other DNA
aggagaaagctggaataatagttattctgcgggatatcagaatatagaaacaaatgtgacgcatgatattgctca

SEQ ID NO: 659974 - DNA, 75 bp, synthetic construct
  source 1..75: mol_type = other DNA
tcactggctgaatttgcctgggatctgtttaccgcctggcagaccgctggcgcaccgtctaaagaaagctgggca

SEQ ID NO: 659975 - DNA, 75 bp, synthetic construct
  source 1..75: mol_type = other DNA
gcccgtttcatcccttatgcttccggcgacacatgcggtgaagtgttgatgcatatcaaccacccgcaggcactt

SEQ ID NO: 659976 - DNA, 75 bp, synthetic construct
  source 1..75: mol_type = other DNA
actggttgcgctggaacaaggcttcaatcgtaacgatcacgaagagttaatggatcaaattgtccaggaaggtgg

SEQ ID NO: 659977 - DNA, 75 bp, synthetic construct
  source 1..75: mol_type = other DNA
gcccagaaactgaaattcaaagcattacaggagcgggcgaaagagaaaattgccgacattgccgaaagccgcgaa

SEQ ID NO: 659978 - DNA, 75 bp, synthetic construct
  source 1..75: mol_type = other DNA
ggctatgccgaatgccgctggcgttaggtcattggggaatctgttctgtctgctcccgcgccgcacgtacacata

SEQ ID NO: 659979 - DNA, 75 bp, synthetic construct
  source 1..75: mol_type = other DNA
ccgcttatccaccagcttaagttttcccggcgcagcgaaatcgccagcgccctgtcacgtctgttactattggaa

SEQ ID NO: 659980 - DNA, 75 bp, synthetic construct
  source 1..75: mol_type = other DNA
gctttcgcgtctgttactactggcggtcttacacgcccgccggaccagcgggctgcaactaccggatcgcctcgt

SEQ ID NO: 659981 - DNA, 75 bp, synthetic construct
  source 1..75: mol_type = other DNA
tttaatcgatacagtatggattttaggtgttgttttattctttatacattgtcgttttttttctaatctggaata

SEQ ID NO: 659982 - DNA, 75 bp, synthetic construct
  source 1..75: mol_type = other DNA
tgatactcagaataataatcaaaggtcatttggtgcgtcgggagcggtggtcgcacacccctatggagtgacatt

SEQ ID NO: 659983 - DNA, 75 bp, synthetic construct
  source 1..75: mol_type = other DNA
accctctacacactcacatcttccctgtggtcgctgtctgcaaaaaccgccgccgtggcaaagactgctcactgt

SEQ ID NO: 659984 - DNA, 75 bp, synthetic construct
  source 1..75: mol_type = other DNA
aggctctgtatccgggattattgcaggtgaaagacgcctgtaccgctgactctctggctgaatttgcctgggatc

SEQ ID NO: 659985 - DNA, 75 bp, synthetic construct
  source 1..75: mol_type = other DNA
tggcagcgctgcgccgacaaactgattgcagctctcggaaacatacccgcctggcatcagccgctggttgcgtta

SEQ ID NO: 659986 - DNA, 75 bp, synthetic construct
  source 1..75: mol_type = other DNA
actggaattatgatgcccacctcattacgtttaccccggataacaagctgcctggctatctgtcacgctttgctt

SEQ ID NO: 659987 - DNA, 75 bp, synthetic construct
  source 1..75: mol_type = other DNA
ggttgcaattgccggatcgcatcatcagcgttccgttatggcagcggcgtcactggcgtcggggatttaatcaga

SEQ ID NO: 659988 - DNA, 75 bp, synthetic construct
  source 1..75: mol_type = other DNA
gaaaatggtcatcagtcattactgcaagaaatcgcccggcgttataaccagccggaaataacagacgcgattaat

SEQ ID NO: 659989 - DNA, 75 bp, synthetic construct
  source 1..75: mol_type = other DNA
ttcactgcgttaggtgttctcggcaacgatgacaccgcccgcaaactgacgcctttgattcgcgcctggcctggt

SEQ ID NO: 659990 - DNA, 75 bp, synthetic construct
  source 1..75: mol_type = other DNA
ttgattcagttatcgcgggcaaacttaatatcacgcaacaacatgttgtaaatcgaagaaaagaacttggtattc

SEQ ID NO: 659991 - DNA, 75 bp, synthetic construct
  source 1..75: mol_type = other DNA
ggaaaatcagcaacgcaatcaggacggagaggccagacgtgaacagctacgcaacgatattgcaaagatgaatgc

SEQ ID NO: 659992 - DNA, 75 bp, synthetic construct
  source 1..75: mol_type = other DNA
ggcggtacggtgagccgtgtcgtggagtcgaatcatcctgattatcagcctggtgactgggtgctgggctacagt

SEQ ID NO: 659993 - DNA, 75 bp, synthetic construct
  source 1..75: mol_type = other DNA
cccagcgacctggaagtcctgcttaatcacagccagttaacgctggcgcagcagatgcgagctgaaaaattacgc

SEQ ID NO: 659994 - DNA, 75 bp, synthetic construct
  source 1..75: mol_type = other DNA
gtaaagtatgttaataccggtgagggaattaatccgggtacggtcaacggaatatcaacatttacgttttcctat

SEQ ID NO: 659995 - DNA, 75 bp, synthetic construct
  source 1..75: mol_type = other DNA
ctatccctttatgtaaaacctgtcattctgaaaagaagtactactgcttcttatgttatccctcagacgacaata

SEQ ID NO: 659996 - DNA, 75 bp, synthetic construct
  source 1..75: mol_type = other DNA
ggacaccaaccagcgcgttgccgccgatggcttctcaaaaattccggcgatgattgcgcctactctgcgcgaatg

SEQ ID NO: 659997 - DNA, 75 bp, synthetic construct
  source 1..75: mol_type = other DNA
cgtgtattttgtgtcgttttccatacccgaagaggggctgaaacggatgctgggcgaaacccggcactacggtat

SEQ ID NO: 659998 - DNA, 75 bp, synthetic construct
  source 1..75: mol_type = other DNA
cggccacgctgcggggcatggtgaacaacgacctgaaggccaccgctgacgccgtgttgtccctggtgaaagacg

SEQ ID NO: 659999 - DNA, 75 bp, synthetic construct
  source 1..75: mol_type = other DNA
gtgctgggctacagtggatggcaggactatgacatatccagtggtgatgatctggtgaaacttggcgatcatccg

SEQ ID NO: 660000 - DNA, 75 bp, synthetic construct
  source 1..75: mol_type = other DNA
gcgcattcccgtctgcggcttagtgagcagctataacgctacagagctaccacccggcccggatcgtttacctct

SEQ ID NO: 660001 - DNA, 75 bp, synthetic construct
  source 1..75: mol_type = other DNA
ggctgcgcaggcacgcagaacgcgccactgccagcgccgtcagtccggcttataccgcagacgctgaccataccg

SEQ ID NO: 660002 - DNA, 75 bp, synthetic construct
  source 1..75: mol_type = other DNA
gcagatgcgagctgaaaaattacgccagcgactggttgaaagcaaactgagcaaatacaacctaggggccgattt

SEQ ID NO: 660003 - DNA, 75 bp, synthetic construct
  source 1..75: mol_type = other DNA
atgctactttccttccactttctgcaattatggcccgagctggagttgaagggtgtcacaggagccactggtaaa

SEQ ID NO: 660004 - DNA, 75 bp, synthetic construct
  source 1..75: mol_type = other DNA
cgctgatgaaggagaaagggatatcgccaaaagggatcgccaaatccacgtttatgcaaaaaatatcagccgcat

SEQ ID NO: 660005 - DNA, 75 bp, synthetic construct
  source 1..75: mol_type = other DNA
ttatttcccggtttgccagtttattattggtgttgatgttaagcgcctgtagcgcactgcaaggtacgccacagc

SEQ ID NO: 660006 - DNA, 75 bp, synthetic construct
  source 1..75: mol_type = other DNA
ttctggcgttgctgctgttactgatggcaatagcagcggcgttgccgtttatcagttacgcacctaaccgattag

SEQ ID NO: 660007 - DNA, 75 bp, synthetic construct
  source 1..75: mol_type = other DNA
gcagtggtttctggctggctgcggcgctggcactgctggcctgtagcgatgccatccgccgaatctccacgcatc

SEQ ID NO: 660008 - DNA, 75 bp, synthetic construct
  source 1..75: mol_type = other DNA
atgtctaaacactcatataatagacttgggggaattttgtttaccattcaggctgcacgtgaagaggcgaataga

SEQ ID NO: 660009 - DNA, 75 bp, synthetic construct
  source 1..75: mol_type = other DNA
gcgagcgtaatccgcacgcctacattatttataaaccgcacccggatgtactggtggggaatcgcaagggcgata

SEQ ID NO: 660010 - DNA, 75 bp, synthetic construct
  source 1..75: mol_type = other DNA
atgcacaccatcgtgaccggggatttgtcgaaatataacctggcacctgcgtttgtggctgatgagtcagaacgt

SEQ ID NO: 660011 - DNA, 75 bp, synthetic construct
  source 1..75: mol_type = other DNA
cagatgaagtgcacaccatgacatcattgtccgggtttgaagcgttattacatggcaagcaagttcattgttacg

SEQ ID NO: 660012 - DNA, 75 bp, synthetic construct
  source 1..75: mol_type = other DNA
atggaatttcacgaaaacagagctaaagcaagatcggaagagcgtcgtgtagggaaagagtggacatttaatgat

SEQ ID NO: 660013 - DNA, 75 bp, synthetic construct
  source 1..75: mol_type = other DNA
tagcggatttgctatatcaggcgctgattgtttatccaacttatatccacccaacacggctacaacctattactg

SEQ ID NO: 660014 - DNA, 75 bp, synthetic construct
  source 1..75: mol_type = other DNA
cgggatctactatgacgccacgcgccccagcgacctggaagtgctgcttaatcatagccagctaacgctggcgca

SEQ ID NO: 660015 - DNA, 75 bp, synthetic construct
  source 1..75: mol_type = other DNA
atgaaccggaaaatatttgtactttttgctctgacagcagggatgcatcttgctgttcatgcttcagaaaatgtg

SEQ ID NO: 660016 - DNA, 75 bp, synthetic construct
  source 1..75: mol_type = other DNA
cgcggttctgtctctcgatgaacatcagaaagcgtggttgctgtggagttacagcgaaagtgttcgctgggagca

SEQ ID NO: 660017 - DNA, 75 bp, synthetic construct
  source 1..75: mol_type = other DNA
cagacgcaaaaaaatccggtaccgcgatgaagtaaccggaaaaatgataacgcgggataatccaccgatcccggg

SEQ ID NO: 660018 - DNA, 75 bp, synthetic construct
  source 1..75: mol_type = other DNA
tggctggcggcgcaggatgtcagggggaggattactgggcgtgacgtctaccagcgacaggaacttgccagactg

SEQ ID NO: 660019 - DNA, 75 bp, synthetic construct
  source 1..75: mol_type = other DNA
ctcgataccgaatctctgatttgcactgtgaaaaggagagctcaacaaaaagcggcatttttgcagcgagatatt

SEQ ID NO: 660020 - DNA, 75 bp, synthetic construct
  source 1..75: mol_type = other DNA
aagaatctcgatacagaatccttgatttccaccgtgaaaaagagatcgcaacaaaaagcgatcttttcacgatga

SEQ ID NO: 660021 - DNA, 75 bp, synthetic construct
  source 1..75: mol_type = other DNA
tgctgctggagtctgctggccatcgctttattcctcagcggtatgctctttgccgcctcctcattacctttgatg

SEQ ID NO: 660022 - DNA, 75 bp, synthetic construct
  source 1..75: mol_type = other DNA
atttctgattctgaacaacatgcttctgcccctcctgatacagaaaatattaagcctgttagcagagttttgtcc

SEQ ID NO: 660023 - DNA, 75 bp, synthetic construct
  source 1..75: mol_type = other DNA
acaaccgggcaccctccaccgatcactggctggcagccggatcgggtgtcagcggtgtgccgtttgaactgatct

SEQ ID NO: 660024 - DNA, 75 bp, synthetic construct
  source 1..75: mol_type = other DNA
cggcaaatttccgcaaggaagttaccaatactgcgctctggctgatgcagttcaatatccgtgtccagtgcttta

SEQ ID NO: 660025 - DNA, 75 bp, synthetic construct
  source 1..75: mol_type = other DNA
ctggctattggattaaccggaattgtggtttgtgcactcttcagtatcacggcagttctcgggtgtctggcgttt

SEQ ID NO: 660026 - DNA, 75 bp, synthetic construct
  source 1..75: mol_type = other DNA
atagccaagctttattgcttttaacgaaaacacgttcaaaacaaaagaccacattttcacagcaagatattgcaa

SEQ ID NO: 660027 - DNA, 75 bp, synthetic construct
  source 1..75: mol_type = other DNA
atgaacgcgaaacgctttaatcagctatatccgccagggactcgcttcatgcacattgcacatcgggcagtgcgt

SEQ ID NO: 660028 - DNA, 75 bp, synthetic construct
  source 1..75: mol_type = other DNA
cagacgcaaaaaaattcgttaccgcgatgaggtaaccggaaaaatgatcacgcgggataatcccccgatccaggg

SEQ ID NO: 660029 - DNA, 75 bp, synthetic construct
  source 1..75: mol_type = other DNA
tcccgaagaagggctgaaccgtatgctgccggaggcgcgggcgctcggtatccctgcgctggtcaatggacttat

SEQ ID NO: 660030 - DNA, 75 bp, synthetic construct
  source 1..75: mol_type = other DNA
ctgcaggggcatccggcggccgcacccgtcttaccgcagcagcaactggacctgattagccgcctgcagggcgat

SEQ ID NO: 660031 - DNA, 75 bp, synthetic construct
  source 1..75: mol_type = other DNA
cggccaggcgctggagaaagtggccgccacgggtgactgccggcaggtggctcatgatttactggcagggaaagg

SEQ ID NO: 660032 - DNA, 75 bp, synthetic construct
  source 1..75: mol_type = other DNA
gccaggcgctggagaaagtggccgccacgggtgactgccggcaggtggcccggacgttgctgaataaccccggag

SEQ ID NO: 660033 - DNA, 75 bp, synthetic construct
  source 1..75: mol_type = other DNA
cccgaagaggggctgaaacggatgctgggcgaaacccggcactacggtattccggccacactgcggggtatggtg

SEQ ID NO: 660034 - DNA, 75 bp, synthetic construct
  source 1..75: mol_type = other DNA
gtattacccgggagaaaaatacaggcggtgttcagatagacccgatgcagtttgcaaaatacggcatcacatccg

SEQ ID NO: 660035 - DNA, 75 bp, synthetic construct
  source 1..75: mol_type = other DNA
cagcaggaaacactgagtcagcagttgcgtgaaaatccggacacacaactgcaggcatgggcagaacagcaggtc

SEQ ID NO: 660036 - DNA, 75 bp, synthetic construct
  source 1..75: mol_type = other DNA
gaatatgaatatggaagacgtggatacagagacggccctgaaggttgcgggcattacagtggcagcaagtatact

SEQ ID NO: 660037 - DNA, 75 bp, synthetic construct
  source 1..75: mol_type = other DNA
caatatgtatcaggagtacaactacggaatgggaatcaaggatacggctattattacggattcatccgtgttgat

SEQ ID NO: 660038 - DNA, 75 bp, synthetic construct
  source 1..75: mol_type = other DNA
cggtgcgactgatggtgttcagatcgacccgatgttgttttcacagtatggcatccgcagcgtgccggctctggt

SEQ ID NO: 660039 - DNA, 75 bp, synthetic construct
  source 1..75: mol_type = other DNA
ttgccctgacagcagggctgtatatttctgcccatgcttctgaaaatatgaatacgcccgaaaaccgccagttcc

SEQ ID NO: 660040 - DNA, 75 bp, synthetic construct
  source 1..75: mol_type = other DNA
cagccataagctggaagttacaaaccctgatttagctgctgacctcaagggcgaatgtaaaaccatttatggtgt

SEQ ID NO: 660041 - DNA, 75 bp, synthetic construct
  source 1..75: mol_type = other DNA
gagagcacggccggctggatgcttgagcgtgccggacggggagaagcctcgttccgggtgaacggacgtcaggtc

SEQ ID NO: 660042 - DNA, 75 bp, synthetic construct
  source 1..75: mol_type = other DNA
tgttttaataaaagaatgcaatattttggtgattctgaaaagataaagtatgcatgctccgtgataaatcatatt

SEQ ID NO: 660043 - DNA, 75 bp, synthetic construct
  source 1..75: mol_type = other DNA
gctatttgatgatgttaaattggtttttgataaagtgcctctcagtattttagtgaatgatattttttttgaagg

SEQ ID NO: 660044 - DNA, 75 bp, synthetic construct
  source 1..75: mol_type = other DNA
tcactatcaccttgtccggccagaaccagaaggacacgttgttttattccccgaagggcatgcagaattctacgt

SEQ ID NO: 660045 - DNA, 75 bp, synthetic construct
  source 1..75: mol_type = other DNA
ataaactgcaccttcagatgtcagattatgtccaacatttggggtgcagttcactatcaccttgtccggccagaa

SEQ ID NO: 660046 - DNA, 75 bp, synthetic construct
  source 1..75: mol_type = other DNA
cgaatttcgatcctgaggattgttcatttgttcatgggttaagtgaagctggaaggaaagtgatttatttgaatg

SEQ ID NO: 660047 - DNA, 75 bp, synthetic construct
  source 1..75: mol_type = other DNA
ataaatccagcgaaatgctttacaactgggtagcaaaagacgttgaaccgccaaaatttaccgaagttaccgacg

SEQ ID NO: 660048 - DNA, 75 bp, synthetic construct
  source 1..75: mol_type = other DNA
agttttatacaatattcatcgggtaataaattcgctgcgttatctgcatttggtcgggcattcacggttaatttc

SEQ ID NO: 660049 - DNA, 75 bp, synthetic construct
  source 1..75: mol_type = other DNA
tcaagtttaagcaggagccgggcgtcgggtatgaaacactgacagtcagccaagcatcggcacttgatgcaaaaa

SEQ ID NO: 660050 - DNA, 75 bp, synthetic construct
  source 1..75: mol_type = other DNA
cattattgtcctggtaaggacaaagggttatacactagcagatgttcgtgacacgctaaaaaatgcagggtatga

SEQ ID NO: 660051 - DNA, 75 bp, synthetic construct
  source 1..75: mol_type = other DNA
agttaaataatctacagaagttaaataatatacaggagttaaataattcgcaggagttaaataattcgcaggagt

SEQ ID NO: 660052 - DNA, 75 bp, synthetic construct
  source 1..75: mol_type = other DNA
ctgccggattcccggaaaaacaaatttatcaggttcctaccaaatctaacgatatcccgggggcatttgacgccg

SEQ ID NO: 660053 - DNA, 75 bp, synthetic construct
  source 1..75: mol_type = other DNA
caggctggtctgaaaggtaaaattgagcaactcagcgataaagataaatccactattggcaacgtgattatcagc

SEQ ID NO: 660054 - DNA, 75 bp, synthetic construct
  source 1..75: mol_type = other DNA
taaaacgtccgggcgctgcgcttcagcttgcgggaaaggtaaatgagatttatgcgcctgaactggaaattgaag

SEQ ID NO: 660055 - DNA, 75 bp, synthetic construct
  source 1..75: mol_type = other DNA
tgatgcgattgctgattgtcgtcagtctcgcctggacgggatgggctattaccctggtcttttatctactgaccg

SEQ ID NO: 660056 - DNA, 75 bp, synthetic construct
  source 1..75: mol_type = other DNA
accctggtcttttatctgctgaccgttattgccttctggatcactcgtaaccagatggcgcaacaggtagcagca

SEQ ID NO: 660057 - DNA, 75 bp, synthetic construct
  source 1..75: mol_type = other DNA
cgtccggtgtctgggtagcctgtctgctgacatgggtggcaattccggtagcactggttgcgttaattaagaacg

SEQ ID NO: 660058 - DNA, 75 bp, synthetic construct
  source 1..75: mol_type = other DNA
atgaaaaagaaagtaatcagcgggctgtttctgatgttatggatagatctgttaatcgccgtaatggtgtatccg

SEQ ID NO: 660059 - DNA, 75 bp, synthetic construct
  source 1..75: mol_type = other DNA
gcactggcttcgttaattaagaatggcccgctctggcaggagttgagggcatctttactgaagacaattacccga

SEQ ID NO: 660060 - DNA, 75 bp, synthetic construct
  source 1..75: mol_type = other DNA
gaataaaacgcgcctgaggttagattacacaccagcaagtcctagtttgcgaggtgttcgacttcctgttcccga

SEQ ID NO: 660061 - DNA, 75 bp, synthetic construct
  source 1..75: mol_type = other DNA
cgcagaaaaaatattaagtgcattcaaacgctgggctgatgacgcgatccttagtaaagctggggtagtttcagt

SEQ ID NO: 660062 - DNA, 75 bp, synthetic construct
  source 1..75: mol_type = other DNA
agtttgcgaggtattcggcttcctgttcccgacttgcctgatccaagtgcattgaaaggccctgttcagaagctt

SEQ ID NO: 660063 - DNA, 75 bp, synthetic construct
  source 1..75: mol_type = other DNA
gttgatgctccagtactggacgatgccgatgatgatatctgggttgacctggaaattgccaaagaattagaggga

SEQ ID NO: 660064 - DNA, 75 bp, synthetic construct
  source 1..75: mol_type = other DNA
ttgccgatatatgtacagatgaacttgatgcttatagtcgctaccttggtaggaaaggtacgtcagtcaatgata

SEQ ID NO: 660065 - DNA, 75 bp, synthetic construct
  source 1..75: mol_type = other DNA
catagccaactttatcgcaggttgctggataaagaacaatggtccagaaaagaggcgacagagttgtgcagtaac

SEQ ID NO: 660066 - DNA, 75 bp, synthetic construct
  source 1..75: mol_type = other DNA
ataaattcgctgcgttatctgcatttggccgggcattcacggttaatttcaatggcagtaataccgcgattacgc

SEQ ID NO: 660067 - DNA, 75 bp, synthetic construct
  source 1..75: mol_type = other DNA
cggtggtacttctcgatgaagtggaaaaagcgcacccggatgtgctcaacctgttctaccaggcgtttgacaagg

SEQ ID NO: 660068 - DNA, 75 bp, synthetic construct
  source 1..75: mol_type = other DNA
aggccgcagcaacactgagcgagcgttatctctccgggcgtcagttgccggacaaagccattgatgtgctggata

SEQ ID NO: 660069 - DNA, 75 bp, synthetic construct
  source 1..75: mol_type = other DNA
gctgcttactctgctgcattcaccgctgcgctatattccacccgctgctgcccgtctgctgacggccataaaccg

SEQ ID NO: 660070 - DNA, 75 bp, synthetic construct
  source 1..75: mol_type = other DNA
cgtggaggatacgcagccagagtcagagtcagagtcagagtcagagtcagagtcagagtcagagtcagagtcaga

SEQ ID NO: 660071 - DNA, 75 bp, synthetic construct
  source 1..75: mol_type = other DNA
tgaccacccagagccaccagcagaaggcggaaatttgccagcttgagcgcgaacttcgcatcggactgcgtaccg

SEQ ID NO: 660072 - DNA, 75 bp, synthetic construct
  source 1..75: mol_type = other DNA
cccagctcactgccgaactggacgccctgcataacgaccggttctggtctccccgcacgtcgataaaaaacagat

SEQ ID NO: 660073 - DNA, 75 bp, synthetic construct
  source 1..75: mol_type = other DNA
cgccgaatctccacgcatccgctgtggcgctggttgttgcatatgcagattgccattattccgctgtggttgctg

SEQ ID NO: 660074 - DNA, 75 bp, synthetic construct
  source 1..75: mol_type = other DNA
tcccggtaattgttctggcggtgcttaccgacgcgctgttcgatttgcttatcgcactgctgaaggtgaaacgta

SEQ ID NO: 660075 - DNA, 75 bp, synthetic construct
  source 1..75: mol_type = other DNA
ggctgacagcctgttttattcccggtagaaaaggcagcatttttgcactcattctggcgcaattcgtcttcgtat

SEQ ID NO: 660076 - DNA, 75 bp, synthetic construct
  source 1..75: mol_type = other DNA
ccctgctgaactgcgataacgtgcggcataacggcgagcgtttccatgatggcctggtggagttcttacaactta

SEQ ID NO: 660077 - DNA, 75 bp, synthetic construct
  source 1..75: mol_type = other DNA
atggcggtggtagcggcgttaattggcgcaggcggcttcggagcgctggtttttcaagggttgctaagtagcgcc

SEQ ID NO: 660078 - DNA, 75 bp, synthetic construct
  source 1..75: mol_type = other DNA
acacggcgattgcccggattcgcctgtcggcgacagacggtgcatttacggcagatgtggaagatgttcgggacg

SEQ ID NO: 660079 - DNA, 75 bp, synthetic construct
  source 1..75: mol_type = other DNA
atttctttatattgggtgttttgtttatatttatatcattcctgacagatattatttacatagctattatattga

SEQ ID NO: 660080 - DNA, 75 bp, synthetic construct
  source 1..75: mol_type = other DNA
gaatgatacagctatcctccagcagggagtgatggctaacggcgatttctttgatgaacgccacggcctggactg

SEQ ID NO: 660081 - DNA, 75 bp, synthetic construct
  source 1..75: mol_type = other DNA
aataaaaccggcaaagatctcagcaacatcgggggttatgccagctatgaatcgccatggggaacgctagctggg

SEQ ID NO: 660082 - DNA, 75 bp, synthetic construct
  source 1..75: mol_type = other DNA
gtgcaacaggcacaacgtaatctctgtctggaaagttatgaccgtatagaacaaacgttaaaacattgtattgaa

SEQ ID NO: 660083 - DNA, 75 bp, synthetic construct
  source 1..75: mol_type = other DNA
ttgctatcgtaactttatctcaaactatatcaataggacctggtgttgcattggttataaacaacgccttttcac

SEQ ID NO: 660084 - DNA, 75 bp, synthetic construct
  source 1..75: mol_type = other DNA
cgataagggataaattaactccgtcattctcaaggtacataagtatatgtagctccatttttatattaggtacag

SEQ ID NO: 660085 - DNA, 75 bp, synthetic construct
  source 1..75: mol_type = other DNA
ggcgaatcaggcggtctatctggcgttgctgaagcccggcgacaaaattcttggcatgagcctgcaatgcggcgg

SEQ ID NO: 660086 - DNA, 75 bp, synthetic construct
  source 1..75: mol_type = other DNA
aacgcgaaatctttgcgtgacgacacctgggtaactctgcgtggcaatatcgttgagcgcatctctgacgatctg

SEQ ID NO: 660087 - DNA, 75 bp, synthetic construct
  source 1..75: mol_type = other DNA
tatagtgttaactcatataaaaagaaaaccgtcagttatagcagcatctaatgttctttctacgtactgggatta

SEQ ID NO: 660088 - DNA, 75 bp, synthetic construct
  source 1..75: mol_type = other DNA
aatcaggttacggtcagtattaaccaaccgctaaaatttgagaaaaaagattacggttcattttatctttccgga

SEQ ID NO: 660089 - DNA, 75 bp, synthetic construct
  source 1..75: mol_type = other DNA
acagtatcagtgctcaacgttcgttgaatgaagatggtcaaaccgacgatagcatttatctcagcttcacaattc

SEQ ID NO: 660090 - DNA, 75 bp, synthetic construct
  source 1..75: mol_type = other DNA
aaggaaatatacgaattacctggattgaagagggcaaaccagtcagttgttttgctcattaccaacaaaacacga

SEQ ID NO: 660091 - DNA, 75 bp, synthetic construct
  source 1..75: mol_type = other DNA
cctccggtattcgtgtaggtactccggcgattacccgtcgtggctttaaagaagccgaagcgaaagaactggctg

SEQ ID NO: 660092 - DNA, 75 bp, synthetic construct
  source 1..75: mol_type = other DNA
aacccagtcaaacagcagtggacgcgacctcaatgatatccagttaaaatatgccagcgatgttgaaagccgtat

SEQ ID NO: 660093 - DNA, 75 bp, synthetic construct
  source 1..75: mol_type = other DNA
caggtgaattaccaacgggcgctggaaggcgaactttctcgtaccatcgaaacgatcggtccggtaaaaggggcg

SEQ ID NO: 660094 - DNA, 75 bp, synthetic construct
  source 1..75: mol_type = other DNA
aagttccggcagataaagttcatgaattgcgcttgcgtctggcacagcaaggtttgccgaaaggcggcgcggttg

SEQ ID NO: 660095 - DNA, 75 bp, synthetic construct
  source 1..75: mol_type = other DNA
aaggtttccagtcgttctttgcctgtcagagtcgggtttgcgatttgggacgccgcgaatacagtaaacatatgt

SEQ ID NO: 660096 - DNA, 75 bp, synthetic construct
  source 1..75: mol_type = other DNA
ggcaatgaaagagatacatcttaacagtgacgaacaacatttatttggcagagctgcattgatggccaggtacga

SEQ ID NO: 660097 - DNA, 75 bp, synthetic construct
  source 1..75: mol_type = other DNA
actgctcgatcaggaaaagtttggtatcagccagttcagcgaacaggtgaattatcagcgggcgctggaaggcga

SEQ ID NO: 660098 - DNA, 75 bp, synthetic construct
  source 1..75: mol_type = other DNA
aagttccggccaataaagttcacgagctgcgtctgcgtctggcgcagcaaggcttgcctaaaggcggtgctgttg

SEQ ID NO: 660099 - DNA, 75 bp, synthetic construct
  source 1..75: mol_type = other DNA
catggggtaaaacctcagatgggaaagttatcaatgtgaatgatgctataagagataaaaattattattgcccgt

SEQ ID NO: 660100 - DNA, 75 bp, synthetic construct
  source 1..75: mol_type = other DNA
aaatgtggtggacagagtcattgaaagggcttacgaggtggtgggcgtttttgaccggatactgttcaatgccat

SEQ ID NO: 660101 - DNA, 75 bp, synthetic construct
  source 1..75: mol_type = other DNA
ctaacacgtcgcgctgaggcgatgaaagctgtacagcaacaggcgcaggcccgcgaggaagtggaagatgcggtg

SEQ ID NO: 660102 - DNA, 75 bp, synthetic construct
  source 1..75: mol_type = other DNA
aaagcggcggagaactgccgttctggcaacagcaagcgtttatcgatcagttactggctgccggtcgctggttgc

SEQ ID NO: 660103 - DNA, 75 bp, synthetic construct
  source 1..75: mol_type = other DNA
atgaagggcaaattagcgccattgtacatctggtttccagcgcggttgctggtctgccgccggggaacgtcacgc

SEQ ID NO: 660104 - DNA, 75 bp, synthetic construct
  source 1..75: mol_type = other DNA
gcaccggggaaatgtggtggataaagtgattgaaggggcttacgaggtggtgggcgtgtttgaccggattgagga

SEQ ID NO: 660105 - DNA, 75 bp, synthetic construct
  source 1..75: mol_type = other DNA
attctgctcaactcccatgacggtacctccagttatcagatgctgccgggttacttccgcttcgtctgccagaac

SEQ ID NO: 660106 - DNA, 75 bp, synthetic construct
  source 1..75: mol_type = other DNA
agtgacgagcaacatttatttggcagagctgcactgatggtcaggtaggaagatgaaaataaaacgccagtgacg

SEQ ID NO: 660107 - DNA, 75 bp, synthetic construct
  source 1..75: mol_type = other DNA
agtgacgatcaacatttatttggcagagctgcactgatgggcaggtaggaagatgaaaataaaacgccagtgacg

SEQ ID NO: 660108 - DNA, 75 bp, synthetic construct
  source 1..75: mol_type = other DNA
ctggaagagatgctggaaaaactctctgttatcgtggatgagcgccgtgaggaagaacatgcaatactcaaggaa

SEQ ID NO: 660109 - DNA, 75 bp, synthetic construct
  source 1..75: mol_type = other DNA
atgagtgaaactctcaaggcactgaataatatccgtacactccgcgcacaggctcgtgaaacagatctggcaact

SEQ ID NO: 660110 - DNA, 75 bp, synthetic construct
  source 1..75: mol_type = other DNA
caaatggcctggtgtgcggaaataattttggcgaaatccgtgttccacataaaggtgatattgtcgggcaggtta

SEQ ID NO: 660111 - DNA, 75 bp, synthetic construct
  source 1..75: mol_type = other DNA
gataatatggaggcgatgaaagaaattcatcttaacagtgacgagcaacatttatttggcagagctgcactgatg

SEQ ID NO: 660112 - DNA, 75 bp, synthetic construct
  source 1..75: mol_type = other DNA
gcaccggggaaatgtggtggatagagtaattgaaggggcttacgaggtggtgggcgtgtttgaccggattgagga

SEQ ID NO: 660113 - DNA, 75 bp, synthetic construct
  source 1..75: mol_type = other DNA
gcaccggggaaatgtggtggatatagttattgaaggggcttacgaggtggtgggcgtgtttgaccggattgagga

SEQ ID NO: 660114 - DNA, 75 bp, synthetic construct
  source 1..75: mol_type = other DNA
gtcatcattccattcgtcgcgaacgtcctctgaccgacgatgaattaatgcaggttgtgccgtcaatattttccg

SEQ ID NO: 660115 - DNA, 75 bp, synthetic construct
  source 1..75: mol_type = other DNA
agtgacgagcaacatctgtttggcagggctgcactgatggtcaggtatgaggatgagaataagacaccagtgacg

SEQ ID NO: 660116 - DNA, 75 bp, synthetic construct
  source 1..75: mol_type = other DNA
agatgaaaataaaacgccagtgacgcctgaacagataattactccccgtcgtcgggaggataaacagaacgatct

SEQ ID NO: 660117 - DNA, 75 bp, synthetic construct
  source 1..75: mol_type = other DNA
aatccctgttaacgccggtctcctccacgcgtgatttgcttgagcagtgcacctctgccgggcagatgttcggga

SEQ ID NO: 660118 - DNA, 75 bp, synthetic construct
  source 1..75: mol_type = other DNA
gcgttgccgagtttttaggcaccggactgttcctcttttttggcattggttgtttgtgcgccctgaaacttgctg

SEQ ID NO: 660119 - DNA, 75 bp, synthetic construct
  source 1..75: mol_type = other DNA
attcaacagttcaaaaagtgaaaagaattatatgcacggatttgtcaaaggcatggaaaataaaagatgtgtgtg

SEQ ID NO: 660120 - DNA, 75 bp, synthetic construct
  source 1..75: mol_type = other DNA
ttgcctactatctgtcgatttcatgtaaccactgcgaagatccggcttgtactaaagtctgcccgagcggtgcga

SEQ ID NO: 660121 - DNA, 75 bp, synthetic construct
  source 1..75: mol_type = other DNA
gccaaacgcggtaagcccgatacctggctgccgcaggcgatcctcgcctggctggagcgccaccatcttcgcggc

SEQ ID NO: 660122 - DNA, 75 bp, synthetic construct
  source 1..75: mol_type = other DNA
cggctggctgccggaaccgccggatactgatggctggttcctgggctctgtccatgataccggctacggacctgt

SEQ ID NO: 660123 - DNA, 75 bp, synthetic construct
  source 1..75: mol_type = other DNA
tggcatttggcgtgactggttcgggggacccgaagcacccactaatgcttggatattcgacaaaacttgtgccct

SEQ ID NO: 660124 - DNA, 75 bp, synthetic construct
  source 1..75: mol_type = other DNA
gagcaattaacagagcgcggcgtgtctgtgcatttccataaagaagactttaagacagggaagaactctcccgca

SEQ ID NO: 660125 - DNA, 75 bp, synthetic construct
  source 1..75: mol_type = other DNA
tatcgactgtgcaacaaaacacagaccgtcaattagctggagtaactcttgataaagtctttgaagataaagcgt

SEQ ID NO: 660126 - DNA, 75 bp, synthetic construct
  source 1..75: mol_type = other DNA
gcttgtcgccggactgctgttgtcggcggccctgacttctttcctgacgggcatcactgagcctattgagttctc

SEQ ID NO: 660127 - DNA, 75 bp, synthetic construct
  source 1..75: mol_type = other DNA
atgattaccccacaggaagcacgacagcgcacccgaacccttgttgaacactatgtcaacgagtgtgaatgccgc

SEQ ID NO: 660128 - DNA, 75 bp, synthetic construct
  source 1..75: mol_type = other DNA
ttgttacgtgattacagtgagttaaatgttgcacaggggcaagagatgattgcccaacggggaatgtctgggcgg

SEQ ID NO: 660129 - DNA, 75 bp, synthetic construct
  source 1..75: mol_type = other DNA
gggccgcgtggttatagcccatctcttgcgcgttcagtgcgggatgtcgatgaatttgtccgttttgctgccagc

SEQ ID NO: 660130 - DNA, 75 bp, synthetic construct
  source 1..75: mol_type = other DNA
acctgacgccaaccagtccggtgccacagtatgatcaggagctggagcgtgaacttagccgctggatacgcggtg

SEQ ID NO: 660131 - DNA, 75 bp, synthetic construct
  source 1..75: mol_type = other DNA
ctggctatgcctgtgaaaatccgcattgagtgccacatgccggatcgccgtcgccgtgacctggataatattctg

SEQ ID NO: 660132 - DNA, 75 bp, synthetic construct
  source 1..75: mol_type = other DNA
tcaggtcgttgattaccgtgttatgaagatgcccgttaccaaaggtgggaagctggagctgactatcaccgaact

SEQ ID NO: 660133 - DNA, 75 bp, synthetic construct
  source 1..75: mol_type = other DNA
tcaggtcgttgattaccgtgttgtgaagatgcccgttaccaaaggtgggaagctggagctgaccatcactgaact

SEQ ID NO: 660134 - DNA, 75 bp, synthetic construct
  source 1..75: mol_type = other DNA
ggctatcggcgtcacgggaaccgaggcgctggcaaatacctttagtcttgatcccttaggatcggtgcaatggcg

SEQ ID NO: 660135 - DNA, 75 bp, synthetic construct
  source 1..75: mol_type = other DNA
tctggtcgatcaactggagtcaatgcaacagcaactgcaacaaaaaatcacctcgaaatattcgactaacggcct

SEQ ID NO: 660136 - DNA, 75 bp, synthetic construct
  source 1..75: mol_type = other DNA
ccctgaagctaaacaagtcgttgccgccagcctggttaatcccgttgtaggcgctaacgtaatcccgctaccgat

SEQ ID NO: 660137 - DNA, 75 bp, synthetic construct
  source 1..75: mol_type = other DNA
cctgaactctttaccagatttgaacgagaagtaagatatcaaactgaatgcctgcatactaatattgtccaaata

SEQ ID NO: 660138 - DNA, 75 bp, synthetic construct
  source 1..75: mol_type = other DNA
accagcggcgatccggcttatgacgaagcgctcgacaggctgctaagccagtggatgcgcaatgtttccggcttg

SEQ ID NO: 660139 - DNA, 75 bp, synthetic construct
  source 1..75: mol_type = other DNA
atgggggaactcccattgagcaataacaccagcacagagcgcggctggctgacacccaccagcggcgatccggct

SEQ ID NO: 660140 - DNA, 75 bp, synthetic construct
  source 1..75: mol_type = other DNA
gatattgagtttggattctggctggattcggcagcgagcgacaaaaatgctctgtgtgctcactggctaactgag

SEQ ID NO: 660141 - DNA, 75 bp, synthetic construct
  source 1..75: mol_type = other DNA
aagataatttccgccagatagagcagtacaaaggaatatcggtggtacgtttctctgcaccctggtgtccgccct

SEQ ID NO: 660142 - DNA, 75 bp, synthetic construct
  source 1..75: mol_type = other DNA
cgtcgcatccggcatttattccgcaccaacgcaaaaaagcccagtcttccgactgagcctttcgctaaatttgat

SEQ ID NO: 660143 - DNA, 75 bp, synthetic construct
  source 1..75: mol_type = other DNA
cttctatcaaagaacaaatcgatgtagagaaattacgccgtgagcgtgctttggcagatgcagccgaacgagaga

SEQ ID NO: 660144 - DNA, 75 bp, synthetic construct
  source 1..75: mol_type = other DNA
gaggtaagtttgcaaaagcaaccagtgctgatgtcggtgcagctcagttgtacatcgtcaacccggcattccacg

SEQ ID NO: 660145 - DNA, 75 bp, synthetic construct
  source 1..75: mol_type = other DNA
tgaaccgccccgggtttcctggagagtgttttatctgtgaactcaggctgccagatcatcgtttccgatggaagc

SEQ ID NO: 660146 - DNA, 75 bp, synthetic construct
  source 1..75: mol_type = other DNA
gacctgaatgatattgaaaaaataacgtatataaaagcaggcaggaagtttctcgtgcaaatggagggaagacaa

SEQ ID NO: 660147 - DNA, 75 bp, synthetic construct
  source 1..75: mol_type = other DNA
tttgtgaaccgttaaataacaaaaaaatttcaacagacatcatgaacataaattgttcattaaaggaaatttata

SEQ ID NO: 660148 - DNA, 75 bp, synthetic construct
  source 1..75: mol_type = other DNA
tgcgtgattccggtcgtctgctgatggtggacgaagctgaactgctcccctatcgcgcactggaggttctgcgcc

SEQ ID NO: 660149 - DNA, 75 bp, synthetic construct
  source 1..75: mol_type = other DNA
atggttaatgccaatccttgcgcgcgccctgaatttatctggcgtttctattcctgtaaaaaacaccactatcac

SEQ ID NO: 660150 - DNA, 75 bp, synthetic construct
  source 1..75: mol_type = other DNA
accctgcattttctccgcccgtttttctactgattcgcgcaattctctcagttactggtgcctccctgttaacgc

SEQ ID NO: 660151 - DNA, 75 bp, synthetic construct
  source 1..75: mol_type = other DNA
accctgaatttatctggcgcttttactcctgccagaaacgtcactatcacttcgttatcgcaccaacagaagatg

SEQ ID NO: 660152 - DNA, 75 bp, synthetic construct
  source 1..75: mol_type = other DNA
tggtgtccagagatgatgaacttaatgaacaaaccactcgtcagcagactcccaggtatctttcagagtctcctg

SEQ ID NO: 660153 - DNA, 75 bp, synthetic construct
  source 1..75: mol_type = other DNA
tacgctgaaagcaatgcaaagagttcgaaaacttgaagcaccagcaaggaaaggaaaacttgagccaaaagattg

SEQ ID NO: 660154 - DNA, 75 bp, synthetic construct
  source 1..75: mol_type = other DNA
aggcccgctctcagcttcctgacgctccctgcattttctctgcccgcttttccactgattcgcgcaactctctca

SEQ ID NO: 660155 - DNA, 75 bp, synthetic construct
  source 1..75: mol_type = other DNA
gtagctaaagctatgcattgcgatatcgaacaggtggataaagaacttgtcatggggattttgctttcagtttct

SEQ ID NO: 660156 - DNA, 75 bp, synthetic construct
  source 1..75: mol_type = other DNA
gcaaagataaactggatgtgcccattaagttcatctggaactacgcgggaaataccctggttaatcagcattctg

SEQ ID NO: 660157 - DNA, 75 bp, synthetic construct
  source 1..75: mol_type = other DNA
cgttgatcaaccttttctcgataaatactgcgtcggctatgacgaaaaaaccttacccgcagatgcacccaaaaa

SEQ ID NO: 660158 - DNA, 75 bp, synthetic construct
  source 1..75: mol_type = other DNA
tagcaaagaagtcatgcgtgatgaagcgtgggatctgatgctctgcggtcatactcacggcggtcagatacacat

SEQ ID NO: 660159 - DNA, 75 bp, synthetic construct
  source 1..75: mol_type = other DNA
ctaaccttagtttaccatctgaaggagcggtaaacccacacataaaggttgccatattcgatggtggattgggga

SEQ ID NO: 660160 - DNA, 75 bp, synthetic construct
  source 1..75: mol_type = other DNA
cgatacgctgcactttgagcaatttgctattgaagacaaaaccggcgatgcatttaccctggtgcttgcccgttc

SEQ ID NO: 660161 - DNA, 75 bp, synthetic construct
  source 1..75: mol_type = other DNA
tctgattacaaaaagacatatcgaaacgctcgaaaagagtcagtttgctgatgcttgcttattgtgtagcgaaca

SEQ ID NO: 660162 - DNA, 75 bp, synthetic construct
  source 1..75: mol_type = other DNA
acctttctgttattgcgggactgattaaacaactttccgcaaatgtggcggtatggttaatgacggaggaggaaa

SEQ ID NO: 660163 - DNA, 75 bp, synthetic construct
  source 1..75: mol_type = other DNA
cctcactgaaagcgcaacagatcgaagtaatcagccgcatgattgaacgcatgattgaacgcaaccacgaagaaa

SEQ ID NO: 660164 - DNA, 75 bp, synthetic construct
  source 1..75: mol_type = other DNA
gtacacgtcggatttgccatgagcatcattgacgaagatgaagccaaagccacattagatgcgctgcgccaaatg

SEQ ID NO: 660165 - DNA, 75 bp, synthetic construct
  source 1..75: mol_type = other DNA
gcgaggcattaaaatcggcggggatcacggtgttatttaacgaagccatgctaatcaccactcaaaagcagcaat

SEQ ID NO: 660166 - DNA, 75 bp, synthetic construct
  source 1..75: mol_type = other DNA
cccggcgtaaacgacgctaatctgccacggctggtgctggcacataatcccgacagcaaagaaatcatgcgtgat

SEQ ID NO: 660167 - DNA, 75 bp, synthetic construct
  source 1..75: mol_type = other DNA
atgatttcacgccgccgatttttgcaggctactgccgcgacgatagccacgagctcaggtttcggttatatgcat

SEQ ID NO: 660168 - DNA, 75 bp, synthetic construct
  source 1..75: mol_type = other DNA
agagtatgcagacgtgggaattcacggaaaaactgtgtagtgtgttgataatatgtggcggtgtgcttctgattg

SEQ ID NO: 660169 - DNA, 75 bp, synthetic construct
  source 1..75: mol_type = other DNA
gatgagcgataacctgagcgccgccgaatcccaggcgttgaatcgcgatatcagtcaacttgaagctttaattga

SEQ ID NO: 660170 - DNA, 75 bp, synthetic construct
  source 1..75: mol_type = other DNA
atgaaaaaactgtttatccagttttatcttttactgtttgtctgctttctggtgatgtccctgctggttggactg

SEQ ID NO: 660171 - DNA, 75 bp, synthetic construct
  source 1..75: mol_type = other DNA
ttgccagcaaaaaacagcttatcgacggtatcacccacgaactgcgaacgccgttagtgcgcctgcgttatcgac

SEQ ID NO: 660172 - DNA, 75 bp, synthetic construct
  source 1..75: mol_type = other DNA
actcaggcggttttctggctggcatcggtacgcaaaatgagaatgcgccaaaggcaagcgacattaacgcaacgc

SEQ ID NO: 660173 - DNA, 75 bp, synthetic construct
  source 1..75: mol_type = other DNA
atgaagatgaaaataagacaccagtgacgcctgaacaaataattacccctcgtcgttgggaggataaacagaacg

SEQ ID NO: 660174 - DNA, 75 bp, synthetic construct
  source 1..75: mol_type = other DNA
ttcagggatttttctctgaaaataacagcgatattccagatgatgctttcgatattgaagatgctctttattatg

SEQ ID NO: 660175 - DNA, 75 bp, synthetic construct
  source 1..75: mol_type = other DNA
gtgtacaaatttaccgccgaacgcgcaggcaaacagtcgctggatgatttgatgaacagttcgctgtatctgatg

SEQ ID NO: 660176 - DNA, 75 bp, synthetic construct
  source 1..75: mol_type = other DNA
gcagctgttgttaaaggacacgtcccaaataactctattgcagcaggggttccagcaagagtaataaaaaaagac

SEQ ID NO: 660177 - DNA, 75 bp, synthetic construct
  source 1..75: mol_type = other DNA
ggacaggtcaaggccgcactcctaaagcaatcgctgctgctatcgaagctggtaaaacactggaagacttcgcgc

SEQ ID NO: 660178 - DNA, 75 bp, synthetic construct
  source 1..75: mol_type = other DNA
cagggatcgccccagaaaatcgcgaacacatctttgaaccttttgttcgcctcgaccccagccgcgaccgcgcaa

SEQ ID NO: 660179 - DNA, 75 bp, synthetic construct
  source 1..75: mol_type = other DNA
gatatcagtcaactggaagctttaattgaagaactgttgacctatgcccgactcgaccgtccacaaaatgagttg

SEQ ID NO: 660180 - DNA, 75 bp, synthetic construct
  source 1..75: mol_type = other DNA
gcaccgactgcgtggcggcgaaattgtcgccctggacgatcagtacacgtttttgcagcgtatcccgcgcagcca

SEQ ID NO: 660181 - DNA, 75 bp, synthetic construct
  source 1..75: mol_type = other DNA
gggactatttaagtttgcccaggaaaatccagcgtttgttgcacaggtacaacaggcgttttctggtcttaatga

SEQ ID NO: 660182 - DNA, 75 bp, synthetic construct
  source 1..75: mol_type = other DNA
cagtatcgcggcgacggttgcggatatagtggcggccctgtagctaccgataaagacgaatcaaccaacgatcca

SEQ ID NO: 660183 - DNA, 75 bp, synthetic construct
  source 1..75: mol_type = other DNA
tgagcggttgccgtttacgtttcccgcgcccgaatccgttaccaatttcatgtttcccaggatcgagcaaggtgg

SEQ ID NO: 660184 - DNA, 75 bp, synthetic construct
  source 1..75: mol_type = other DNA
taagcggttgtcgtttacgtttcccgcgtccagcagcgctaccgatcgcctgtttccctggttccagcaaggtag

SEQ ID NO: 660185 - DNA, 75 bp, synthetic construct
  source 1..75: mol_type = other DNA
ttaaggatgttaagaagagcacgagtgagagcatccagagacagaagagaatgcggaggttgtgacctttactac

SEQ ID NO: 660186 - DNA, 75 bp, synthetic construct
  source 1..75: mol_type = other DNA
ttcctgaattaattgcagcgtccgccattaagcttactgaagagatttactctcctcaaaagccttcacaaaatt

SEQ ID NO: 660187 - DNA, 75 bp, synthetic construct
  source 1..75: mol_type = other DNA
gatccatctatcgaggctgtatctttttacgtcgttgaggcgatgagcgaagaaacagccgaccaggtgcaatat

SEQ ID NO: 660188 - DNA, 75 bp, synthetic construct
  source 1..75: mol_type = other DNA
cgattttacccgactaaatgacccaatatatctgttagaacttgacagaagatattttcttacatgtggtgatgc

SEQ ID NO: 660189 - DNA, 75 bp, synthetic construct
  source 1..75: mol_type = other DNA
ttactgccgacgcacgttaaccgcaacgttcctttgtttgaacaggcgctggagttcgccctgaaaggcggcacc

SEQ ID NO: 660190 - DNA, 75 bp, synthetic construct
  source 1..75: mol_type = other DNA
tgggtagtgtcgctcaaacatatcaagccgcaaagcaacaggaagcggatgctgcattccaaaaagaatatgcgg

SEQ ID NO: 660191 - DNA, 75 bp, synthetic construct
  source 1..75: mol_type = other DNA
aatgaaaaacgagggcgtttattcgcggcctcaaatggttgtagctaatatcggcgggctaatcacagggatgaa

SEQ ID NO: 660192 - DNA, 75 bp, synthetic construct
  source 1..75: mol_type = other DNA
tgatgagaatgaagtgggaacccacctgcatgaatgggataaagaaagaataatttttgaacaaattacaaagtg

SEQ ID NO: 660193 - DNA, 75 bp, synthetic construct
  source 1..75: mol_type = other DNA
taactgaacatattttccagcgattacataatttaaatcttaatccccaacgtataacaagaggtaataaaacca

SEQ ID NO: 660194 - DNA, 75 bp, synthetic construct
  source 1..75: mol_type = other DNA
cttccggcagtcgtctgaaagacctgcccaaaccaaacaaaagcgatgatgaatcacaggcgaacgatgctgtta

SEQ ID NO: 660195 - DNA, 75 bp, synthetic construct
  source 1..75: mol_type = other DNA
catgccagcaacaactgacacagccctcaaaccatgccagcgccgatctactgccggccatagtagtctccccac

SEQ ID NO: 660196 - DNA, 75 bp, synthetic construct
  source 1..75: mol_type = other DNA
aaaaccagaaattgcacatgaaattgcccagcgtctactggggcaaaagaaattaccctcgcttgagtggctaaa

SEQ ID NO: 660197 - DNA, 75 bp, synthetic construct
  source 1..75: mol_type = other DNA
cggcaaagccgaaagataaaccgtaccggctgctcgacagcaatggcctttacctttatgtgccggttaccggaa

SEQ ID NO: 660198 - DNA, 75 bp, synthetic construct
  source 1..75: mol_type = other DNA
cttccggcagccgtctgaaagacctgcccaaaccgaacaaaaccgatgatgaaactctggctgaggaagcggtaa

SEQ ID NO: 660199 - DNA, 75 bp, synthetic construct
  source 1..75: mol_type = other DNA
ccagttcaccgttagctttgatgaaaccttaaaaccgtttgtacgtgacgcttccggcagccgcctgaaagattt

SEQ ID NO: 660200 - DNA, 75 bp, synthetic construct
  source 1..75: mol_type = other DNA
gggttatccggcaaccggcacgccgccgaccattcagcaaggggcgaatccgaccaatatttcgattccaaatac

SEQ ID NO: 660201 - DNA, 75 bp, synthetic construct
  source 1..75: mol_type = other DNA
ccaatggaaaacaacgagctgacgtcgcaattggcacaaatcagcacggtcagcgggattgaaaaactcaatacc

SEQ ID NO: 660202 - DNA, 75 bp, synthetic construct
  source 1..75: mol_type = other DNA
tttttacagccgtaatggacaatttaagctcgatgaaaatcgtaacctggtgaatatgcaaggattacagctgac

SEQ ID NO: 660203 - DNA, 75 bp, synthetic construct
  source 1..75: mol_type = other DNA
gcggaactgaagctgattgcggagaaggtgaagaagggatatgtggagcaagcgaaggataattctttgcaacct

SEQ ID NO: 660204 - DNA, 75 bp, synthetic construct
  source 1..75: mol_type = other DNA
gcaggtaaaaccgctgggaaataatagctggacgctggagcccgcgcccgcaccaaaagaagatgccctgaccgt

SEQ ID NO: 660205 - DNA, 75 bp, synthetic construct
  source 1..75: mol_type = other DNA
tccgaaggcgacaacgtctggtctgcgacgcaatcttctggcgtggcgctgttggggacagccgtgacggtaaaa

SEQ ID NO: 660206 - DNA, 75 bp, synthetic construct
  source 1..75: mol_type = other DNA
ccgccgattcacgcgctaaagcaagcgctgaatggcacgataactggataagtaaaagtggattgaaagcgcggt

SEQ ID NO: 660207 - DNA, 75 bp, synthetic construct
  source 1..75: mol_type = other DNA
aacactatttaaaaatcggcgtcagaaccgcacggcagaccattgccgcccgaatccgaaaactgacgcaggagt

SEQ ID NO: 660208 - DNA, 75 bp, synthetic construct
  source 1..75: mol_type = other DNA
ctggaactgttgcgcagcgaggatggccagaaaacagcggcgggcgtggatgatattgaaacgctggagaaagcc

SEQ ID NO: 660209 - DNA, 75 bp, synthetic construct
  source 1..75: mol_type = other DNA
aacactacttaaaaattggcgtaaagactacacggcagacgattgccgcccgtattcgacgcctcgaaaacggag

SEQ ID NO: 660210 - DNA, 75 bp, synthetic construct
  source 1..75: mol_type = other DNA
cagcacaggtgatgatcgatttcagccatgctaactcgtccaaacaattcaaaaaagcagatggatgtttgtgct

SEQ ID NO: 660211 - DNA, 75 bp, synthetic construct
  source 1..75: mol_type = other DNA
gatgcctgcattggctgggaagataccgactctctgttacgtcaactggcgaacgccgtaaaagcacgtcgcgga

SEQ ID NO: 660212 - DNA, 75 bp, synthetic construct
  source 1..75: mol_type = other DNA
gggcgcaggaaaccgcagggcgcggggaaagtgtggagccttatttcacccgcacgtttgagcgggtggcaaaca

SEQ ID NO: 660213 - DNA, 75 bp, synthetic construct
  source 1..75: mol_type = other DNA
tttacaaccatgctcagtatctcgataaacgcagagaaatgatgcagtggtgggcggactggcttgatgaaaagg

SEQ ID NO: 660214 - DNA, 75 bp, synthetic construct
  source 1..75: mol_type = other DNA
gaacttctcactacactaagctcaatcactaaaccagtatcagagtttgtttttgccgggcgaaacgataagaag

SEQ ID NO: 660215 - DNA, 75 bp, synthetic construct
  source 1..75: mol_type = other DNA
aagccagcaatcaccatcattgcgctggtaattggctatattgctatcttctcacgccagcatgcttcctggatt

SEQ ID NO: 660216 - DNA, 75 bp, synthetic construct
  source 1..75: mol_type = other DNA
ggtgatgcccgctttgccaatccggccctggtttactgcgtgatctggctgttcgatacgggggaaatgggcaag

SEQ ID NO: 660217 - DNA, 75 bp, synthetic construct
  source 1..75: mol_type = other DNA
aacttagatttagaatgatgcaactatctttaaatcgaaggttaatgtatcgccatatattgaccaacagcgttt

SEQ ID NO: 660218 - DNA, 75 bp, synthetic construct
  source 1..75: mol_type = other DNA
taatgaagagattatgaaaaatcaaccaaaagatgttattgaagaaaaacttaataatgaattaaaacttaggtt

SEQ ID NO: 660219 - DNA, 75 bp, synthetic construct
  source 1..75: mol_type = other DNA
ggcccgcagatggcagatctgaacctggcattcggtgtgaaaaacatcttcgaccaggactacttcatccgctct

SEQ ID NO: 660220 - DNA, 75 bp, synthetic construct
  source 1..75: mol_type = other DNA
tttgcccgttatcgggtacgtttgcaacaagacgaggttaccgatagtgagcgtcagcagctgatgcaaagcgtt

SEQ ID NO: 660221 - DNA, 75 bp, synthetic construct
  source 1..75: mol_type = other DNA
tcagcgcgcagcagaaagagaatgagaataagcgtactgaagccggaaaacgcctctctgcggcgattgctgcaa

SEQ ID NO: 660222 - DNA, 75 bp, synthetic construct
  source 1..75: mol_type = other DNA
acagggccatttcagaggcccggaataaactcagttcggtgacggaatcgcttaacacggcccgtaatgcattaa

SEQ ID NO: 660223 - DNA, 75 bp, synthetic construct
  source 1..75: mol_type = other DNA
cgcagtcactctcgtgcaggttttggggttgagtactggagagattatttcaggcttggtgtaaatacctatttt

SEQ ID NO: 660224 - DNA, 75 bp, synthetic construct
  source 1..75: mol_type = other DNA
aaggagtcgagtttgggactgtaacggaaaaagatggtgtctatagcgcaacagtaacttcaaaacgagcagata

SEQ ID NO: 660225 - DNA, 75 bp, synthetic construct
  source 1..75: mol_type = other DNA
taaacacagtaagcacacttatctccgctttggcagcattgctaacagcagttgctacatttttcttgtggagag

SEQ ID NO: 660226 - DNA, 75 bp, synthetic construct
  source 1..75: mol_type = other DNA
cctgttgaaggaaaaagagaatatccgtagccagcttgctgacatcaatcagaaaatagctgaagagaaaagaaa

SEQ ID NO: 660227 - DNA, 75 bp, synthetic construct
  source 1..75: mol_type = other DNA
gtcgttaatcgaacaggctgaaaaacggcagaaggatgcgcagaacgcagacaagaaggccgctgatatgcttgc

SEQ ID NO: 660228 - DNA, 75 bp, synthetic construct
  source 1..75: mol_type = other DNA
atgctgtttgctgatgctgattctcttcgtatatctccccgcgaggccaggtcgttaattaaacaggctgaaaaa

SEQ ID NO: 660229 - DNA, 75 bp, synthetic construct
  source 1..75: mol_type = other DNA
cgcttgacggcaaaacgatagtttcccctgaaaaattcccggggcgttcatcaacaaatcattctattgttgtga

SEQ ID NO: 660230 - DNA, 75 bp, synthetic construct
  source 1..75: mol_type = other DNA
agagctgcttcagcagttacagcatggacgttttccgtcatgctgggaacccctgtaggtattctgggttttgca

SEQ ID NO: 660231 - DNA, 75 bp, synthetic construct
  source 1..75: mol_type = other DNA
taacgtcagtgccagaacaaatgaacaaaagcatgcaaatgacgctcttaatgccctgttgaaggaaaaagagaa

SEQ ID NO: 660232 - DNA, 75 bp, synthetic construct
  source 1..75: mol_type = other DNA
tggtaataaagatgttacgcaaatttatgccagcgatgagcatgcaaataaagtggcctcatttgcagcaagtgc

SEQ ID NO: 660233 - DNA, 75 bp, synthetic construct
  source 1..75: mol_type = other DNA
gtcgcctggagccggtgagcaaaatgactgctggtgtttatttaggggcgtttccacgacatattccggcacaga

SEQ ID NO: 660234 - DNA, 75 bp, synthetic construct
  source 1..75: mol_type = other DNA
agtggtatgccatactgggcacaggggagtaccacagaaatgcgtcccaaaaacattgcattcaactacattgtt

SEQ ID NO: 660235 - DNA, 75 bp, synthetic construct
  source 1..75: mol_type = other DNA
gtgatgccggatttgataaatgcacacaacggattgatgagtggggtatttttacggtttcgatggcggtgcgtc

SEQ ID NO: 660236 - DNA, 75 bp, synthetic construct
  source 1..75: mol_type = other DNA
aacagatccatgcatctggtcgaagccaatggaacctgttcatggccgaattatggggtcattgcaatgagccga

SEQ ID NO: 660237 - DNA, 75 bp, synthetic construct
  source 1..75: mol_type = other DNA
ggcgatatcagcgcacgtaacggtacgttctctggcgcaatttcaggaaatacagccacaaccaacggtgatatc

SEQ ID NO: 660238 - DNA, 75 bp, synthetic construct
  source 1..75: mol_type = other DNA
ctgcgacagcaagtgactggaatcagccaattgccaccgcgacttgcccttcaggaaagaaagttacaggaggtg

SEQ ID NO: 660239 - DNA, 75 bp, synthetic construct
  source 1..75: mol_type = other DNA
tgtatcaaaacaggagattgtggccgatggcagtgaaaacgcaacagtaaacattcagttggttgatgcgaataa

SEQ ID NO: 660240 - DNA, 75 bp, synthetic construct
  source 1..75: mol_type = other DNA
gttctgactgctggttcgcaggctggtacggtacgtgtaactgcaaaagttcagggaaaaacctttactctgaat

SEQ ID NO: 660241 - DNA, 75 bp, synthetic construct
  source 1..75: mol_type = other DNA
aggtcagagcctggcgaataataatgcaagtagttttgctgtaaatactttatcaactcaggcgacaaaagaggt

SEQ ID NO: 660242 - DNA, 75 bp, synthetic construct
  source 1..75: mol_type = other DNA
gctttttcccgaaaatgagcaggtaaaaaactcactcgcaggtcttgccaatgccatcgaaccgggcggcattct

SEQ ID NO: 660243 - DNA, 75 bp, synthetic construct
  source 1..75: mol_type = other DNA
gatccagcaacaacggctggatctttccgccagtcgtcgtgactggctggaggcaacaggcgcttacgatcgtcg

SEQ ID NO: 660244 - DNA, 75 bp, synthetic construct
  source 1..75: mol_type = other DNA
aaaatattgatgccgtgacggatgtgaaggaggctgtgttggagatcacatcatctgcatcttcggctgtagtga

SEQ ID NO: 660245 - DNA, 75 bp, synthetic construct
  source 1..75: mol_type = other DNA
cggtgaggcgtgggtaaccgatactgaacggcagcgagccgcagagctggaggttgccagactgcaacgccagga

SEQ ID NO: 660246 - DNA, 75 bp, synthetic construct
  source 1..75: mol_type = other DNA
gcacatgccaacggcggatctgtgcgcggtatttacaaccacgctcagtatctcgataagcgcagagaaatgatg

SEQ ID NO: 660247 - DNA, 75 bp, synthetic construct
  source 1..75: mol_type = other DNA
cctgcagaccagatcccggcattcaacaaagcacttgcaacattttcaggaagtatcgtatcgctcattgcgacc

SEQ ID NO: 660248 - DNA, 75 bp, synthetic construct
  source 1..75: mol_type = other DNA
ccgcaaacggtcctggaataatgaagtatcagtttcctcgatccgtaacctcattacctcagaagaggtttccac

SEQ ID NO: 660249 - DNA, 75 bp, synthetic construct
  source 1..75: mol_type = other DNA
tcgagttaataaagtcacggaaagtgatgagaggatatgtgaattattattcaaaggaagcgtgaagtcttataa

SEQ ID NO: 660250 - DNA, 75 bp, synthetic construct
  source 1..75: mol_type = other DNA
aatttatcgctaccgtggctggggatatcatcgtctataactacaacggtgagacccgtgaatatcagtcctcat

SEQ ID NO: 660251 - DNA, 75 bp, synthetic construct
  source 1..75: mol_type = other DNA
ggaagtaatccgcagatttgaagatcgcggtgcaatggagcgagcaaataaagcccgcagaagatgcggcgaggt

SEQ ID NO: 660252 - DNA, 75 bp, synthetic construct
  source 1..75: mol_type = other DNA
gctaacagcggctccattcgtgggatatacaatcacgctcagtacatggataagcgccgggagatgatgcagtgg

SEQ ID NO: 660253 - DNA, 75 bp, synthetic construct
  source 1..75: mol_type = other DNA
tagcccttactgcggtcgaccgtctcactcaacccgtcaggcgcgcccgggaaatgaccggcgcgctttctgaat

SEQ ID NO: 660254 - DNA, 75 bp, synthetic construct
  source 1..75: mol_type = other DNA
cctgcagaccagatcccggcatttaacaaagcactggcaacattttcaggaagtatcgtatcgctcattgccacc

SEQ ID NO: 660255 - DNA, 75 bp, synthetic construct
  source 1..75: mol_type = other DNA
tttacaaccatgctcagtatctcgataagcgcagagaaatgatgcaatggtgggcggactggcttgatgggaagg

SEQ ID NO: 660256 - DNA, 75 bp, synthetic construct
  source 1..75: mol_type = other DNA
catgcgcagtatctcgataagcgcagagaaatgatgcagtggtgggcggactggcttgatgaaaagcctgagtga

SEQ ID NO: 660257 - DNA, 75 bp, synthetic construct
  source 1..75: mol_type = other DNA
tggtgtgatggtcgtcttgacccgatttcacactacgggaaggacactaaaatctggcgcctgcatgctgtcccg

SEQ ID NO: 660258 - DNA, 75 bp, synthetic construct
  source 1..75: mol_type = other DNA
ctgtgcatttccataaagaagactttaagacaggaaagaactctcccgcagggaatatgatgctcacagttcttg

SEQ ID NO: 660259 - DNA, 75 bp, synthetic construct
  source 1..75: mol_type = other DNA
acaggaaagcgccacggcgaaagcgcaaaaagcggtggacgatatcgccgttcagtgctggttgcggcacaaatt

SEQ ID NO: 660260 - DNA, 75 bp, synthetic construct
  source 1..75: mol_type = other DNA
aatcgctgaaaaacgtcagcgactacaaaggcaccttgcgcaaggtgatcgcctggcaggagcaggaaaaaacgc

SEQ ID NO: 660261 - DNA, 75 bp, synthetic construct
  source 1..75: mol_type = other DNA
gtggaatcgctgaaaaacgtcagcggctacaaaggcaccctgcgcaaggtaatcgcctggcaggagcaggaaaaa

SEQ ID NO: 660262 - DNA, 75 bp, synthetic construct
  source 1..75: mol_type = other DNA
gcaggaaagcgccaccgcgaaagcgcaaaaagcggtggatgacatcgccgtgcagtgctggctgcggcacaaatt

SEQ ID NO: 660263 - DNA, 75 bp, synthetic construct
  source 1..75: mol_type = other DNA
atggctaatattggatacatcagggtgtcgagtgtccaacaaaacacagaccgtcaattagctggagtaactctt

SEQ ID NO: 660264 - DNA, 75 bp, synthetic construct
  source 1..75: mol_type = other DNA
gggtaccgtaggtactgaagaactggaaagggtggcacggcaggcaatcgatcttgctcaggtcaccggcggtaa

SEQ ID NO: 660265 - DNA, 75 bp, synthetic construct
  source 1..75: mol_type = other DNA
gagaaaccgtggagtattagcctgcctcaaaacgaccattttcacgcgacgttgaaaataaaagaaatgatttaa

SEQ ID NO: 660266 - DNA, 75 bp, synthetic construct
  source 1..75: mol_type = other DNA
ttgattgggcagggaatctggttgctcatgagctcaccgcagatgcccagggccagctcaacagcatcctccccc

SEQ ID NO: 660267 - DNA, 75 bp, synthetic construct
  source 1..75: mol_type = other DNA
atcggtcaaagacaaaaccgtcgagctggcaaagcaaaaacagatttgtgcgggttatgacaacaatatcaaagc

SEQ ID NO: 660268 - DNA, 75 bp, synthetic construct
  source 1..75: mol_type = other DNA
agaagtcatcctacagcacagcatcacgttgcaatccgccgaccttatccgccaggtaatgactccaacttattg

SEQ ID NO: 660269 - DNA, 75 bp, synthetic construct
  source 1..75: mol_type = other DNA
atgcgtgatattcagatggttcttgagcgttggggggcatgggcggcgagtgatagttcaggcgttgattattca

SEQ ID NO: 660270 - DNA, 75 bp, synthetic construct
  source 1..75: mol_type = other DNA
aaccgttctctatcgagggagaggggcttaaaggggaaaaggttagtgatgtaatctcccgtgcgttgcaaaagg

SEQ ID NO: 660271 - DNA, 75 bp, synthetic construct
  source 1..75: mol_type = other DNA
ttctgcactctgaccagggatggcagtatcgtatgagaaggtatcaaaacatccttaaagaacaaggcattacac

SEQ ID NO: 660272 - DNA, 75 bp, synthetic construct
  source 1..75: mol_type = other DNA
tcatcgagaaggaaaacagattaaccataaagctgttcagcgcctgatgggaaccctctcacttaaagcagcgat

SEQ ID NO: 660273 - DNA, 75 bp, synthetic construct
  source 1..75: mol_type = other DNA
aactgccttgataatgcggtaatggagaacttctttggtcacctgaaagaagaaatgtactatcgccgggactac

SEQ ID NO: 660274 - DNA, 75 bp, synthetic construct
  source 1..75: mol_type = other DNA
gcatgggcgctatgtactggatgcgctggcaaacgagcctgccgtaagcgaaattttgttacgtgattacagtga

SEQ ID NO: 660275 - DNA, 75 bp, synthetic construct
  source 1..75: mol_type = other DNA
ttaaccgagtcaaacgatattgcacagtatttatggggaaaatcctgcggcagaagaaaagtggtccctaaagtc

SEQ ID NO: 660276 - DNA, 75 bp, synthetic construct
  source 1..75: mol_type = other DNA
ggtaaatgttgcacaggggcaagagatgattgcccaacggggaatgtctgggcgggtgcgttttgaacagggcga

SEQ ID NO: 660277 - DNA, 75 bp, synthetic construct
  source 1..75: mol_type = other DNA
aacggcgattgccatatcattctgcgcggcggtaaagagcctaattacagtgagaaacatgtcgcagaagtgaaa

SEQ ID NO: 660278 - DNA, 75 bp, synthetic construct
  source 1..75: mol_type = other DNA
caatatctcgctgacctgatgagctggggcgcaattggcgcacgtaccacggaatcgcaggtgcaccgcgaactg

SEQ ID NO: 660279 - DNA, 75 bp, synthetic construct
  source 1..75: mol_type = other DNA
acggtgggctggaaagggctgatcaacgatccgcatatggacaacagcttccagatcaacgacggtttgcgcatt

SEQ ID NO: 660280 - DNA, 75 bp, synthetic construct
  source 1..75: mol_type = other DNA
acctgaatgtattgaatcatttaggtatgagtctttactctaacacaccagctgttctaactgaaataatctcaa

SEQ ID NO: 660281 - DNA, 75 bp, synthetic construct
  source 1..75: mol_type = other DNA
ggggcgcaattggcgcacgtacaaccgaatcgcaggttcaccgtgaactggcgtctggtctttcttgcccggtag

SEQ ID NO: 660282 - DNA, 75 bp, synthetic construct
  source 1..75: mol_type = other DNA
gcagattgccggtggcgaaaaggccattattggcgtgatggtggaaagccatctggtggaaggcaatcagagcct

SEQ ID NO: 660283 - DNA, 75 bp, synthetic construct
  source 1..75: mol_type = other DNA
agctttttcccgaaaatgagcaggtaaaaaactccctcgcaggtcttgccaatgccatcgaaccgggtggcattc

SEQ ID NO: 660284 - DNA, 75 bp, synthetic construct
  source 1..75: mol_type = other DNA
gtttttgcctcgggaagatcgggatattgctgataatatcgcgacgattttacgcgatcagggcgtcgatataat

SEQ ID NO: 660285 - DNA, 75 bp, synthetic construct
  source 1..75: mol_type = other DNA
accaagacgctggttcatgatgcgcaacagcacctggattttgccagcgccatgcaacgtaaagatgccgtggtc

SEQ ID NO: 660286 - DNA, 75 bp, synthetic construct
  source 1..75: mol_type = other DNA
atgccaactggatcggcacgaaccagactttaaacctggtaataaatccaagcatacgcaaaaccgatgacggta

SEQ ID NO: 660287 - DNA, 75 bp, synthetic construct
  source 1..75: mol_type = other DNA
gagaaagcaaaggccgtttaacgctgatccacattctgcttggcatgatcccagcggtagtactggggctgttgt

SEQ ID NO: 660288 - DNA, 75 bp, synthetic construct
  source 1..75: mol_type = other DNA
aggattgacagaatttctgccggtatccagcacgggccatatgattattgtcggtcacttgttgggatttgaggg

SEQ ID NO: 660289 - DNA, 75 bp, synthetic construct
  source 1..75: mol_type = other DNA
aacgccgtgctggattatatcgacgagctgaacgcactggatatcagcacggcacctgaaatcagctggccggaa

SEQ ID NO: 660290 - DNA, 75 bp, synthetic construct
  source 1..75: mol_type = other DNA
gttttagtccgcgctttgcaaaaagcatatcccaataaacttattgattgcacagtcagcgacaacctggttttg

SEQ ID NO: 660291 - DNA, 75 bp, synthetic construct
  source 1..75: mol_type = other DNA
tttgctgtggtgatattgtcagtcttccagaaagaatgttttctggtacatcctccattttgatgtctgctatca

SEQ ID NO: 660292 - DNA, 75 bp, synthetic construct
  source 1..75: mol_type = other DNA
cttactggaatcaaaaaagaataaaactcagtcttgggggactcagcccggtagaataccggactgagtatcaaa

SEQ ID NO: 660293 - DNA, 75 bp, synthetic construct
  source 1..75: mol_type = other DNA
agaggagaggtagggcaaaccgcccctaatgttctccaaagagatttcaaggctacgcggccaaacgagaagtgg

SEQ ID NO: 660294 - DNA, 75 bp, synthetic construct
  source 1..75: mol_type = other DNA
tatatttcactggatgattaccgcattgtgcgcgatgagttactgggagaaggcagacgtagtactgatgatcgg

SEQ ID NO: 660295 - DNA, 75 bp, synthetic construct
  source 1..75: mol_type = other DNA
tgcataccggacacactcaactggcggtggatgtcctgttaattgcttccggtcgccagcctgctaccgcctcgt

SEQ ID NO: 660296 - DNA, 75 bp, synthetic construct
  source 1..75: mol_type = other DNA
cacagatgcacatattactccccctagagagtcatcactacctgatccttctgagaaagaaaacgaatctaatga

SEQ ID NO: 660297 - DNA, 75 bp, synthetic construct
  source 1..75: mol_type = other DNA
agtgccggatatctgccgggtttactgcgtattttcatgaaaggagatcactcaataacttccatcgagatcggg

SEQ ID NO: 660298 - DNA, 75 bp, synthetic construct
  source 1..75: mol_type = other DNA
catacgctgcagtaccgcacatatcacggaaaaggataacgcctggctgtactcgctgtcacaccagaccagtga

SEQ ID NO: 660299 - DNA, 75 bp, synthetic construct
  source 1..75: mol_type = other DNA
tgcagtaccgcgcatatcactgcaaaggacaacgcctggctgtactcgctgtcacatcagacgaatgacaccggc

SEQ ID NO: 660300 - DNA, 75 bp, synthetic construct
  source 1..75: mol_type = other DNA
gtcgatggtattgagcttgctgaactgattaacgtggtctgcgataacggtcactcccttcgtgttgttgatgaa

SEQ ID NO: 660301 - DNA, 75 bp, synthetic construct
  source 1..75: mol_type = other DNA
gtcgatggcattgagctcgctgaactgattaacaaagtcgctgaaaacggttattcactccgtgtggtggacgac

SEQ ID NO: 660302 - DNA, 75 bp, synthetic construct
  source 1..75: mol_type = other DNA
acggaaacggacaacacctggctgtactcgctgtcgcatcagacgaatgacaccggcgaatcagaatggattcat

SEQ ID NO: 660303 - DNA, 75 bp, synthetic construct
  source 1..75: mol_type = other DNA
gtactgatgcgtggtcgtacccggttctgcgacttaaacgcctgggcctgtcaaaaacgtttcgtcgtctggtcg

SEQ ID NO: 660304 - DNA, 75 bp, synthetic construct
  source 1..75: mol_type = other DNA
cgttatggcgtcagtctcattcatctggatgccagtgccggatgtctgccgggtttccccactttcgactggtaa

SEQ ID NO: 660305 - DNA, 75 bp, synthetic construct
  source 1..75: mol_type = other DNA
tggcatacgctgcagtaccgcgcatatcacggcaaaggacaacgcctggctgtactcgctgtcacatcagaccag

SEQ ID NO: 660306 - DNA, 75 bp, synthetic construct
  source 1..75: mol_type = other DNA
tcacacttatccgccgttatggcgtcagtctcattcatctggatgccagtgccagatgcctgccgggtttaccca

SEQ ID NO: 660307 - DNA, 75 bp, synthetic construct
  source 1..75: mol_type = other DNA
ccgacagcattaacgtgcaggcgctgaacatggggcgcattgtcgttgacatcgatggtattgagcttgccgaac

SEQ ID NO: 660308 - DNA, 75 bp, synthetic construct
  source 1..75: mol_type = other DNA
ctgtcaaaaacgtttcgtcgtatggtcgtaacgctcatccgccgttatggcgtcagtctcattcatctggatgcc

SEQ ID NO: 660309 - DNA, 75 bp, synthetic construct
  source 1..75: mol_type = other DNA
ctcatccggtgttatggtgtcagtctcattcatctggatgccagtgccggatatctgccgggtttacccactttc

SEQ ID NO: 660310 - DNA, 75 bp, synthetic construct
  source 1..75: mol_type = other DNA
ttaccgacatacgttcgttgcagtaccgcacatatcacggaaaaggacaacgcctggctgtactcactgtcacat

SEQ ID NO: 660311 - DNA, 75 bp, synthetic construct
  source 1..75: mol_type = other DNA
gaacatggggcgcattgtcgttgacgtcgatgatgttaatcttgctgaactgattaacgtggcctgcgacaatgg

SEQ ID NO: 660312 - DNA, 75 bp, synthetic construct
  source 1..75: mol_type = other DNA
tcaaaaacgttccgttgtctggttgtcacacttacccgacgttatggcgtcagtctcattcatctggatgccagc

SEQ ID NO: 660313 - DNA, 75 bp, synthetic construct
  source 1..75: mol_type = other DNA
tcgtctggttgtcacacttagccggggttatggcgtccgtctcattcatctggttgccagcgccgtatttctgcc

SEQ ID NO: 660314 - DNA, 75 bp, synthetic construct
  source 1..75: mol_type = other DNA
tcgtctggttgtcacacttagccggtgttatggcgtccgtctcattcatctggttgccagcgccggatttctgcc

SEQ ID NO: 660315 - DNA, 75 bp, synthetic construct
  source 1..75: mol_type = other DNA
tcgtctggttgtcactctcatccggtgttatggcgtcggtctcattcatctggctgccagtgcaggatgtctgcc

SEQ ID NO: 660316 - DNA, 75 bp, synthetic construct
  source 1..75: mol_type = other DNA
ccgtccgacttcatcaccgtagccagcaccgaaagctgcccgtttgccattatggctaacgaagaaaaacgcttc

SEQ ID NO: 660317 - DNA, 75 bp, synthetic construct
  source 1..75: mol_type = other DNA
ctggaagacgtgaagtggctggcgcagggcactatctaccctgacgttattgaatctgccgcatctgcaaccggt

SEQ ID NO: 660318 - DNA, 75 bp, synthetic construct
  source 1..75: mol_type = other DNA
tgactcacacccgccagggtatgcgcatgctggagcgttttgtgcgtgatatctgccagtgtgaagccctgtgga

SEQ ID NO: 660319 - DNA, 75 bp, synthetic construct
  source 1..75: mol_type = other DNA
gaacatggggcgcattgtcgttgacattgatggtgtaaatctcgctgaactgattaacgtggtctgcgataacgg

SEQ ID NO: 660320 - DNA, 75 bp, synthetic construct
  source 1..75: mol_type = other DNA
acgttatggcgtcagtctcattcatctggatgccagcgctgaatgtctgccggacctgcccactttcgactggta

SEQ ID NO: 660321 - DNA, 75 bp, synthetic construct
  source 1..75: mol_type = other DNA
gaaaccatcgactttatgaccgcacactggcacatctgccgtacgacttcctcggccgcgtttccaaccgcatta

SEQ ID NO: 660322 - DNA, 75 bp, synthetic construct
  source 1..75: mol_type = other DNA
cccggttctgcggcttaaacgcctggggctgtcaaaaacgttccgccgtctggttgtcacacttacccgacgtta

SEQ ID NO: 660323 - DNA, 75 bp, synthetic construct
  source 1..75: mol_type = other DNA
tctactctaatcttcatccggcactggcggataacgttgtctatgcagccgatcgcgctggtttggtaaaggcga

SEQ ID NO: 660324 - DNA, 75 bp, synthetic construct
  source 1..75: mol_type = other DNA
atcagcgccggcggcatgtactgcccggagtgtggcatggttcactggtcagacggagtcaccccgcccttctga

SEQ ID NO: 660325 - DNA, 75 bp, synthetic construct
  source 1..75: mol_type = other DNA
tgaaggtcaccggctggccgcactctggcaggcgctgccggaagaactccgcttaagtccgcatcgttatctggc

SEQ ID NO: 660326 - DNA, 75 bp, synthetic construct
  source 1..75: mol_type = other DNA
tagtcattgaggatttgaaggtcagcaacatgtcaaagtcagcaggggtacggtcagccagccggggcgcaatgt

SEQ ID NO: 660327 - DNA, 75 bp, synthetic construct
  source 1..75: mol_type = other DNA
tcatacccggttctgcggcttaaacgcctggggctgtcaaaaacgttccgtcgtctggtcgtcacactcatccgg

SEQ ID NO: 660328 - DNA, 75 bp, synthetic construct
  source 1..75: mol_type = other DNA
gacaattcctgccggtatcagcgccgacggcatgtattgccctgaatgcggtacggttcactggccggatggcgt

SEQ ID NO: 660329 - DNA, 75 bp, synthetic construct
  source 1..75: mol_type = other DNA
gtctggttctcacactaatccgacgttatggcgtcagtctcattcatctggatgccagcgctgaatgcctgccgg

SEQ ID NO: 660330 - DNA, 75 bp, synthetic construct
  source 1..75: mol_type = other DNA
gtctggttttcacactaacccaacgttatggcgtcagtctcattcatctggatgccagcgctgaatgcctgccgg

SEQ ID NO: 660331 - DNA, 75 bp, synthetic construct
  source 1..75: mol_type = other DNA
gtctggttttcacactaaacccacgttatggcgtcagtctcattcatctggatgccagcgctgaatgcctgccgg

SEQ ID NO: 660332 - DNA, 75 bp, synthetic construct
  source 1..75: mol_type = other DNA
cagaaccaggtactcgaagtttgtggcggagaaaacatctttaaagacagccgggttccctggccgcaagttagc

SEQ ID NO: 660333 - DNA, 75 bp, synthetic construct
  source 1..75: mol_type = other DNA
tggtttgaacgtgcaagcccacgtattatcctcgctgcacaacaactctgtaatgcgctttcacaggtagattag

SEQ ID NO: 660334 - DNA, 75 bp, synthetic construct
  source 1..75: mol_type = other DNA
gtctggttgtcacactaaccctacgttatggcgtcagtctcattcatctggatgccagcgctgaatgcctgccgg

SEQ ID NO: 660335 - DNA, 75 bp, synthetic construct
  source 1..75: mol_type = other DNA
atgtggatatacagcgaacgccgatgtaaatggcgctcgtaacattttagctgcggggcacgccgttcttgcctg

SEQ ID NO: 660336 - DNA, 75 bp, synthetic construct
  source 1..75: mol_type = other DNA
tgacgtcgatggtgttaatctcagtgaactgattaacaaagtccctgaaaacggttattcactccgggtggtcga

SEQ ID NO: 660337 - DNA, 75 bp, synthetic construct
  source 1..75: mol_type = other DNA
tgacgtcgatggtgttaatctcactgaactgattaacaaagtcgctgaaaacggttattcactccgggtggtcga

SEQ ID NO: 660338 - DNA, 75 bp, synthetic construct
  source 1..75: mol_type = other DNA
tgacgtcgatggtgttaatctcactgaactgattaacaaagtccctgaaaacggttattcactccgggtggtgga

SEQ ID NO: 660339 - DNA, 75 bp, synthetic construct
  source 1..75: mol_type = other DNA
caaccctttccggcatacgatgcagtaccgcacatatcacggaaacggacaacgcctggttgtactcgctgtcac

SEQ ID NO: 660340 - DNA, 75 bp, synthetic construct
  source 1..75: mol_type = other DNA
caaccctttcctgcatacgttgcagtaccgcacatatcacggaaacggacaacgcctggttgtactcgctgtcac

SEQ ID NO: 660341 - DNA, 75 bp, synthetic construct
  source 1..75: mol_type = other DNA
caaccctttccagcatacggtgcagtaccgcacatatcacggaaacggacaacgcctggttgtactcgctgtcac

SEQ ID NO: 660342 - DNA, 75 bp, synthetic construct
  source 1..75: mol_type = other DNA
gtaccgatgcgtggtcgtacccggttctgcggcttaaacgcctggggctgtcaaaaacgttccgccgtctggttg

SEQ ID NO: 660343 - DNA, 75 bp, synthetic construct
  source 1..75: mol_type = other DNA
gaccggcctgatgacccgcgacaattacagaacggtaaataacattaccctgggtaagtatccggaggcgaaatg

SEQ ID NO: 660344 - DNA, 75 bp, synthetic construct
  source 1..75: mol_type = other DNA
ccgacagaattaatgtgcaggcactgaacatggggcgaattgtcgttgacgtcgatggtgttaatctcactgaac

SEQ ID NO: 660345 - DNA, 75 bp, synthetic construct
  source 1..75: mol_type = other DNA
tctgaccagacctcagcagaatgcacgccaccatttgctacccttaccggcatacgctgcagtaccgcacatatc

SEQ ID NO: 660346 - DNA, 75 bp, synthetic construct
  source 1..75: mol_type = other DNA
ctactcccttcgtgttgttgatgaatctgaccggacctcaacagacagcacccccccctctgctgccctgagcgg

SEQ ID NO: 660347 - DNA, 75 bp, synthetic construct
  source 1..75: mol_type = other DNA
gtctggttgtcacacttacccgacgttatggcgtcagtctcattcatctggatgccagcgctgaatgcctgccgg

SEQ ID NO: 660348 - DNA, 75 bp, synthetic construct
  source 1..75: mol_type = other DNA
gtagggaacgatcaaatcagtaagataataggaaaagataccgaagaagtcgtgaaatcccaggatattaaagtt

SEQ ID NO: 660349 - DNA, 75 bp, synthetic construct
  source 1..75: mol_type = other DNA
ttgattttctgaacggagacccggaccagccgataatcatggggcggacctaccatgaggacaaccgctccccgg

SEQ ID NO: 660350 - DNA, 75 bp, synthetic construct
  source 1..75: mol_type = other DNA
gccatcgtgaccgggccgaagggcgaggagatattctgcgacgaacatggccgggtacgggtgaagtttcactgg

SEQ ID NO: 660351 - DNA, 75 bp, synthetic construct
  source 1..75: mol_type = other DNA
aacacgacgaccgggggaacgacggagtacatcagtgagtttcgttaccgtgcgcagataagcgtggcgtcggtg

SEQ ID NO: 660352 - DNA, 75 bp, synthetic construct
  source 1..75: mol_type = other DNA
gggtgacctggcggagaaggtgagtggcgcgctggggataaaggtggacggggatatcgtgctggagagcagcag

SEQ ID NO: 660353 - DNA, 75 bp, synthetic construct
  source 1..75: mol_type = other DNA
aacatttaccactgacagtgaacaaacgataaaagtcaggctactacatcagagcatcgatatgattgaaggcgg

SEQ ID NO: 660354 - DNA, 75 bp, synthetic construct
  source 1..75: mol_type = other DNA
atgtctgaacaattagtcacacctgaaaacgtcaccaccaaagatggaaaaatcaacctgctggatctcaaccgt

SEQ ID NO: 660355 - DNA, 75 bp, synthetic construct
  source 1..75: mol_type = other DNA
cgggagatgtcatcgaccgcactaaacgtactctgcgtaaacggatgcagggtgaaaccatcgacattaaaacgg

SEQ ID NO: 660356 - DNA, 75 bp, synthetic construct
  source 1..75: mol_type = other DNA
cgcctatcaactggaccaccaaagttgagcgtaaaaaagcaggcccgacctggacgccgaccgctaaaatgcacg

SEQ ID NO: 660357 - DNA, 75 bp, synthetic construct
  source 1..75: mol_type = other DNA
cgggcgatgttatcgaccgtacgaaacgtaccctgcgtaaacggatgcagggtgaggccatcgacattaaagcgg

SEQ ID NO: 660358 - DNA, 75 bp, synthetic construct
  source 1..75: mol_type = other DNA
ggcgctggataaactgggcgatatgatcgacgttgcgctggcaatttccctgcacgcgccgaacgacgaaattcg

SEQ ID NO: 660359 - DNA, 75 bp, synthetic construct
  source 1..75: mol_type = other DNA
cgggagatgtcatcgaccgtactaaacgtactctgcgtaaacggatgcagggtgaagccatcgatattaaaacgg

SEQ ID NO: 660360 - DNA, 75 bp, synthetic construct
  source 1..75: mol_type = other DNA
gtccggagcagaagctgacgctgtgcgacgatgtggcggggctgtcacaggcgggagagcttccgtttaacccgg

SEQ ID NO: 660361 - DNA, 75 bp, synthetic construct
  source 1..75: mol_type = other DNA
ggaagcggctttaatgaactgcggtttgaagacgccacgggcggtgaacaggtctatatccacgcgcagaagaac

SEQ ID NO: 660362 - DNA, 75 bp, synthetic construct
  source 1..75: mol_type = other DNA
agacccacggagaaacggatgaagaggggtatacagagcgtttttttgtatctagcaaacatgaaattaaagtga

SEQ ID NO: 660363 - DNA, 75 bp, synthetic construct
  source 1..75: mol_type = other DNA
acaatggctggcagatgcgttaccacctgtgtattgagccgccgttatggcggtgcgggctgcggcagaacttcc

SEQ ID NO: 660364 - DNA, 75 bp, synthetic construct
  source 1..75: mol_type = other DNA
acaaaaagagaaggtatgatggatgatgatgggtatacagaagtatttataaaagatattgaagaggaaataaaa

SEQ ID NO: 660365 - DNA, 75 bp, synthetic construct
  source 1..75: mol_type = other DNA
gcggaccggacgtggcgtccacggcagcaaagcaaaccgaaggtggacgggccacagagcgccattgtcaccggt

SEQ ID NO: 660366 - DNA, 75 bp, synthetic construct
  source 1..75: mol_type = other DNA
gccacagagcgccattgtcaccgggcctgcgggagaggaaatcttctgcgacgaacatggccgggtacgggtgaa

SEQ ID NO: 660367 - DNA, 75 bp, synthetic construct
  source 1..75: mol_type = other DNA
gggaaatcagttagaggtgataccggcggaccggacgtggcgtccacggctgcaaagcaaaccgaaggtggacgg

SEQ ID NO: 660368 - DNA, 75 bp, synthetic construct
  source 1..75: mol_type = other DNA
aatatgggggagaagtctatgatattgataatcttagagtaaacacacctaaaaaccacatacgattgcataaat

SEQ ID NO: 660369 - DNA, 75 bp, synthetic construct
  source 1..75: mol_type = other DNA
accagatggagagcctgcgcagtgatgcggaaaaggccacagggcagagtaattcaccgaagctgtggccgggaa

SEQ ID NO: 660370 - DNA, 75 bp, synthetic construct
  source 1..75: mol_type = other DNA
atgcgcccggtgatcctgaaagccgcagccgggagtggttcgatgtttgtggcgcattgcccgaaggaggataag

SEQ ID NO: 660371 - DNA, 75 bp, synthetic construct
  source 1..75: mol_type = other DNA
atgccagcgaactggaacgcattcattatgaaggcatggacgatgttattctgctggattttctgcccaaagagt

SEQ ID NO: 660372 - DNA, 75 bp, synthetic construct
  source 1..75: mol_type = other DNA
ggctggaggtgaaaggcgatctggcacagaaaataagcggcgcgctgggtatcagcgtacagggcgatattgttt

SEQ ID NO: 660373 - DNA, 75 bp, synthetic construct
  source 1..75: mol_type = other DNA
gagggaaagcacagcctggtggtgaagggggacctggcgaggaaggtgagtggcgcgctggggataaaggtggac

SEQ ID NO: 660374 - DNA, 75 bp, synthetic construct
  source 1..75: mol_type = other DNA
aacatcgctcttgaccagaaaggttcagaaaattttctgcgtgggtcattgaatcttgccgccgggagctggcag

SEQ ID NO: 660375 - DNA, 75 bp, synthetic construct
  source 1..75: mol_type = other DNA
tcaccgcaccgaacaaatttgaggcgctggcgacctgtgatgctctggttcaggcacatggagcgttgaaagggc

SEQ ID NO: 660376 - DNA, 75 bp, synthetic construct
  source 1..75: mol_type = other DNA
actggcgacctgtgatgcgctggttcaggcgcacggtgcgttaaaaggattggcggcgtcactgatgaaaattgc

SEQ ID NO: 660377 - DNA, 75 bp, synthetic construct
  source 1..75: mol_type = other DNA
tcgcttcctgtcagcgctggctggcgaaaacgatccggaagcaaaacgtaaaatcatcgggcgcgttttcgttga

SEQ ID NO: 660378 - DNA, 75 bp, synthetic construct
  source 1..75: mol_type = other DNA
atgtcatcgaaaaaccggccccgcagaacaacaacccgcaacatccgatttccaaaccagatgattgaacagatc

SEQ ID NO: 660379 - DNA, 75 bp, synthetic construct
  source 1..75: mol_type = other DNA
atgaaactgtccctgacactggaagccgacagcgttaacgtgcaggcactgaacatgggacgtattgtcgctgac

SEQ ID NO: 660380 - DNA, 75 bp, synthetic construct
  source 1..75: mol_type = other DNA
actgaacatggggcgcattgtcgttgacattgatggtgttaatctcgctgaactgattaacatggtctgcgataa

SEQ ID NO: 660381 - DNA, 75 bp, synthetic construct
  source 1..75: mol_type = other DNA
tcgtctggttgtcactcttagccggcgttatggcgtccgtctcattcatctggttgccagcgccgcatttctgcc

SEQ ID NO: 660382 - DNA, 75 bp, synthetic construct
  source 1..75: mol_type = other DNA
gggctatcttagcgaagccgagtttgacagctgggtacggccagaacagatggtcggtagcatgaaagcagggcg

SEQ ID NO: 660383 - DNA, 75 bp, synthetic construct
  source 1..75: mol_type = other DNA
gcactcaaactaatcagacagctttaccctcaggtacagtgggttcagtcgtttgcagatgagcgttgtggctgt

SEQ ID NO: 660384 - DNA, 75 bp, synthetic construct
  source 1..75: mol_type = other DNA
tctgaccggacctcagcagactgcatgccaccatttgctgccctgaccggcatacgctgcagtaccgcacatatc

SEQ ID NO: 660385 - DNA, 75 bp, synthetic construct
  source 1..75: mol_type = other DNA
agtgggcgctggaaacgttatttcgaaagcatgagtgttttcgcactgattataactgggagattgatgagcgcc

SEQ ID NO: 660386 - DNA, 75 bp, synthetic construct
  source 1..75: mol_type = other DNA
ggcccggatcagaaactgacattatgtgatgatgcagcaggtttgtcgccaataggaaccattaccttcaaccca

SEQ ID NO: 660387 - DNA, 75 bp, synthetic construct
  source 1..75: mol_type = other DNA
ccttcgtatccagccacctctgtggcgtagcggcctacgccagaatttccgtatttttcaacagcaagatattgc

SEQ ID NO: 660388 - DNA, 75 bp, synthetic construct
  source 1..75: mol_type = other DNA
gtgggtaaaaatgtcactgaatttgccccgggagaggatgttatggcggtgctaaacggtggttttgtccagtac

SEQ ID NO: 660389 - DNA, 75 bp, synthetic construct
  source 1..75: mol_type = other DNA
acaacggctggcagatgcgttaccacctgcgtattgagccgccgttatggcggtgcgggctgcggcagaacttcc

SEQ ID NO: 660390 - DNA, 75 bp, synthetic construct
  source 1..75: mol_type = other DNA
aggggaagcacagcctggaggtgaaaggcgacctagcgaggaagattagcggtgcgctgggaatgaaggtccggg

SEQ ID NO: 660391 - DNA, 75 bp, synthetic construct
  source 1..75: mol_type = other DNA
aggaagcggctttaatgaactgcggtttgaagacgccacgggcggtgaacaggtctatatccacgcgcagaagaa

SEQ ID NO: 660392 - DNA, 75 bp, synthetic construct
  source 1..75: mol_type = other DNA
tttgtccctgatccttttattcccggcggtatgatgtacaaaactggcgattatgcccggttgctggatgatggc

SEQ ID NO: 660393 - DNA, 75 bp, synthetic construct
  source 1..75: mol_type = other DNA
cagcaggcgcaggtacttcaaccctatctggaacgcatggcatgccgggattgggatagtcaatccaacgtcatc

SEQ ID NO: 660394 - DNA, 75 bp, synthetic construct
  source 1..75: mol_type = other DNA
tgtgagcaagaggaaatacgttttctactagctaatgatgacattatcattcctgtcccgcaggatgacggtatt

SEQ ID NO: 660395 - DNA, 75 bp, synthetic construct
  source 1..75: mol_type = other DNA
catgccagaggcagggcgacgcgtctgatggtagacgataatgttgtgtgcgatctcacggggctgatgcgcgag

SEQ ID NO: 660396 - DNA, 75 bp, synthetic construct
  source 1..75: mol_type = other DNA
ggcagtgaatacgatgtcttgcgtggactgcgcccattgatgacgggaacgttgctacaggcttataaacaacaa

SEQ ID NO: 660397 - DNA, 75 bp, synthetic construct
  source 1..75: mol_type = other DNA
acagcaccacgccgctggcgtccttaacagtattgacccatggtgcgtttcgcgtacaggaagaggataatcccg

SEQ ID NO: 660398 - DNA, 75 bp, synthetic construct
  source 1..75: mol_type = other DNA
ggcgaacaacctatgagttgcacctgattccggcaccgaactattcagccgccacagcacaacccacttttcact

SEQ ID NO: 660399 - DNA, 75 bp, synthetic construct
  source 1..75: mol_type = other DNA
cacatgacaaatccgcgtcactggctggcgatcaatgctgctttctggtgctgcgtgtatcgcgaagcggaaagc

SEQ ID NO: 660400 - DNA, 75 bp, synthetic construct
  source 1..75: mol_type = other DNA
tgatggcgctcttcaatgcggtgtccctgatgtccctgaatccggaaccgaaaaagaaagcgtatgaggtttttt

SEQ ID NO: 660401 - DNA, 75 bp, synthetic construct
  source 1..75: mol_type = other DNA
tgtgcatggggatacaacgactacccttgctgctactttagctgggtattaccaccaaataaaagtttgtcatgt

SEQ ID NO: 660402 - DNA, 75 bp, synthetic construct
  source 1..75: mol_type = other DNA
gtactaggcctgaagcaataaagatggcctctatcattgaattattaaaaaaagattgtagattcgaatataaaa

SEQ ID NO: 660403 - DNA, 75 bp, synthetic construct
  source 1..75: mol_type = other DNA
ggcggacaacgtacgagctgcaccttattccagcaccgaatcattccgcagtcactgtacaacccgcttttcact

SEQ ID NO: 660404 - DNA, 75 bp, synthetic construct
  source 1..75: mol_type = other DNA
tatctatgattacttaacaaattcaatctatggtatgggtattgatccatcattgattaataccgatacgtttgc

SEQ ID NO: 660405 - DNA, 75 bp, synthetic construct
  source 1..75: mol_type = other DNA
caagattcattagaaaataatattcttgttaatgatcaattcgctttaactgtagaaatgaaagggcaggtgatt

SEQ ID NO: 660406 - DNA, 75 bp, synthetic construct
  source 1..75: mol_type = other DNA
catccgggcaatgaccatttcgtccagaacgaccgaattgaacgtccccagggtggcggcggaggttccggcagt

SEQ ID NO: 660407 - DNA, 75 bp, synthetic construct
  source 1..75: mol_type = other DNA
ggccatcaaaaccaccgagcgcaaactggctgagggagtgctggtgcatggtggtcagccactgatggcctggtg

SEQ ID NO: 660408 - DNA, 75 bp, synthetic construct
  source 1..75: mol_type = other DNA
cctgacggtgcatcatccgcagacgaatgaactgctctggcagcatgagaccagacatgcgtacaacgcacaggg

SEQ ID NO: 660409 - DNA, 75 bp, synthetic construct
  source 1..75: mol_type = other DNA
tgtctggccagcgggctctatcagcacggcgactgaggcttatcaaaacgccgcgttttctaacggcttcgttaa

SEQ ID NO: 660410 - DNA, 75 bp, synthetic construct
  source 1..75: mol_type = other DNA
cgctggtgcaagccaatccggggattcatttcgacgtggacctggaagcgcaagaggtgaaagcgggtgataaaa

SEQ ID NO: 660411 - DNA, 75 bp, synthetic construct
  source 1..75: mol_type = other DNA
acgcactgattgatgcggtagagtcccattcccctgttttcagaaagaaagcgactgaactggaagcgcttttag

SEQ ID NO: 660412 - DNA, 75 bp, synthetic construct
  source 1..75: mol_type = other DNA
ataatttcgatttcctggcgcgtagttttgccagaatgcacgcagaaggtcgcccggtcgatattcttgccgtta

SEQ ID NO: 660413 - DNA, 75 bp, synthetic construct
  source 1..75: mol_type = other DNA
atggatcatagtcttaattctttaaataatttcgattttctcgcgcgtagttttgccagaatgcacgcagaaggt

SEQ ID NO: 660414 - DNA, 75 bp, synthetic construct
  source 1..75: mol_type = other DNA
tcggtagtggcaaattacgatgttgatcgccatgaagatgctgataaagccaatcaggcactgaaagatgcggta

SEQ ID NO: 660415 - DNA, 75 bp, synthetic construct
  source 1..75: mol_type = other DNA
tgctgacactgtttcgcaacgcgctggcggtggtaatcagtaccatcaccattatgattgtgttgtcggaaattg

SEQ ID NO: 660416 - DNA, 75 bp, synthetic construct
  source 1..75: mol_type = other DNA
tcagcaacgcccttacccatttttccatgctggccgttttagtgtttagtttttactggctggttcgcctgtgcg

SEQ ID NO: 660417 - DNA, 75 bp, synthetic construct
  source 1..75: mol_type = other DNA
cagtaccgagtacgggggtaagacgcagcttaatttaggtcacaatgtagacgcttccaggcagcttcgtggtga

SEQ ID NO: 660418 - DNA, 75 bp, synthetic construct
  source 1..75: mol_type = other DNA
cagtatttcaattaatgctgctaaagaacttatattgaattgtaatggtgcatatatcaaattgagtggaggcaa

SEQ ID NO: 660419 - DNA, 75 bp, synthetic construct
  source 1..75: mol_type = other DNA
gatgcagaagtggatgagctgtttgcgctggtgaaagccaatccggggattcattttgatgtagacctggaagcg

SEQ ID NO: 660420 - DNA, 75 bp, synthetic construct
  source 1..75: mol_type = other DNA
catgggtttttgaactatacgcccgctactttgaattgctggcaccaggtgaagaagcattaagcattgacgaat

SEQ ID NO: 660421 - DNA, 75 bp, synthetic construct
  source 1..75: mol_type = other DNA
acggctgacagtggctgctggtgaggctatcagcctgtttactcaaaaaatggggataaaaatttttgcagcccg

SEQ ID NO: 660422 - DNA, 75 bp, synthetic construct
  source 1..75: mol_type = other DNA
agaagatgggaccaacaagtcttgatattgcgtctgttgaaatgccgcgagggtttgggggcggttttattctta

SEQ ID NO: 660423 - DNA, 75 bp, synthetic construct
  source 1..75: mol_type = other DNA
cgttgttcgttattacagctatatcgaaattacccgtcgcgcgcatcagacactgtggcgagaatatgagcatct

SEQ ID NO: 660424 - DNA, 75 bp, synthetic construct
  source 1..75: mol_type = other DNA
tgattgaaaaatcgcaggcaacacaacttatcgccgggctgcaaaaatttgtagatggcacatttgagaacgatc

SEQ ID NO: 660425 - DNA, 75 bp, synthetic construct
  source 1..75: mol_type = other DNA
ctggctatcgctggcctgctggcgaaccacgcaatacagctctgttacctgtcggcgacgcagcaacctcaacta

SEQ ID NO: 660426 - DNA, 75 bp, synthetic construct
  source 1..75: mol_type = other DNA
taaagacgatgaaacgccgtggtgcgcagcatttgtcggtgcaatgctggaacgtgtaggcatccgctcaacaag

SEQ ID NO: 660427 - DNA, 75 bp, synthetic construct
  source 1..75: mol_type = other DNA
aggcaaagctctgctcgacagcgtgctgcatttaccactggtattgccgccagtggttgtcggctatttgctgtt

SEQ ID NO: 660428 - DNA, 75 bp, synthetic construct
  source 1..75: mol_type = other DNA
gtcatgtcgtttccgctgatggtgcgggcaattcgtctggcgctggaaggggttgatgtcaaactggaacaggcc

SEQ ID NO: 660429 - DNA, 75 bp, synthetic construct
  source 1..75: mol_type = other DNA
ccatgtataccctgatccagacccccggcggggaaagtggcgcggcgagactgtgcattatttctattgcgctgg

SEQ ID NO: 660430 - DNA, 75 bp, synthetic construct
  source 1..75: mol_type = other DNA
ttctgcgcgagaaaatcacccacttcgaccatgaacgtatcccggaacgtatcgttcacgcgcgtgggtcagccg

SEQ ID NO: 660431 - DNA, 75 bp, synthetic construct
  source 1..75: mol_type = other DNA
atgctccatcgaaagaggtacagtaatctttaccgtaaatatggtcggtggctatcctccagcccttatctgacg

SEQ ID NO: 660432 - DNA, 75 bp, synthetic construct
  source 1..75: mol_type = other DNA
agggcaatcacggtaccgggttcatgtgcatgaatgcagccattttctggatgtgttgcgttacagcgcggttga

SEQ ID NO: 660433 - DNA, 75 bp, synthetic construct
  source 1..75: mol_type = other DNA
ttcttttatcgcgttcgacggggtacgagaagctaccaatcagcaatcacaaacgggcggtgatcggcatgtttg

SEQ ID NO: 660434 - DNA, 75 bp, synthetic construct
  source 1..75: mol_type = other DNA
cgtgtggtagcgattttgcttaatgatgaagtgagatcggcagaccttctgtcaatcctcaaggcgctgaaagct

SEQ ID NO: 660435 - DNA, 75 bp, synthetic construct
  source 1..75: mol_type = other DNA
ggtttcagctttgagttaagcaaagttgtacgaccttatattcgtgaacgcgtcgttgaccagttggcgcatatt

SEQ ID NO: 660436 - DNA, 75 bp, synthetic construct
  source 1..75: mol_type = other DNA
agtttcgatgggacggcgcggatttatcggtgaacgtctgtatgactggtttggcattaccttcgcctttagctg

SEQ ID NO: 660437 - DNA, 75 bp, synthetic construct
  source 1..75: mol_type = other DNA
acagatcagtaccagcggcggcacagactacttcaatactgttgatgcgaagtacaccaatccagccagtatgta

SEQ ID NO: 660438 - DNA, 75 bp, synthetic construct
  source 1..75: mol_type = other DNA
tattgggtggtgtatcaactaaacttattgttggtaatctaaaaccggaatttaactttacattacccgctgtaa

SEQ ID NO: 660439 - DNA, 75 bp, synthetic construct
  source 1..75: mol_type = other DNA
cagtagcaacagaccagcagaacgtaggattctgtactgtaacttgtcttgaatatcctgatgcaatctttgacg

SEQ ID NO: 660440 - DNA, 75 bp, synthetic construct
  source 1..75: mol_type = other DNA
atccgcgaccaggatgatatttatccggtgttccgtgaactgtttcataaacaaaatgcaacagctaaagactaa

SEQ ID NO: 660441 - DNA, 75 bp, synthetic construct
  source 1..75: mol_type = other DNA
tatccgtcttgttgcttctcagggaacgagtaacaacagtgctatctatttcgcagcagataaatttattgtcag

SEQ ID NO: 660442 - DNA, 75 bp, synthetic construct
  source 1..75: mol_type = other DNA
gttaaggtcggattctttgatgtatttggacaggacaatattcagtactcggcagagcagacggtcagcattaac

SEQ ID NO: 660443 - DNA, 75 bp, synthetic construct
  source 1..75: mol_type = other DNA
ttttgcagctaataaattcgtgatcgcgggtactgatactgctagtactggtgctagtgcaccatttactattgt

SEQ ID NO: 660444 - DNA, 75 bp, synthetic construct
  source 1..75: mol_type = other DNA
gggataaccagcagaatctagtagttaagggtagaccattccgcgattactttaaaacatatattgttaatgtgt

SEQ ID NO: 660445 - DNA, 75 bp, synthetic construct
  source 1..75: mol_type = other DNA
atttagtggatggcagtattaaagcaagtagtaatccaccgtcaatcatctatgattacttaataaatacgacgt

SEQ ID NO: 660446 - DNA, 75 bp, synthetic construct
  source 1..75: mol_type = other DNA
aaagtaatgagtatactaatactaagattacaacagtacagaatagtattgatggtaacactgcaaagattacca

SEQ ID NO: 660447 - DNA, 75 bp, synthetic construct
  source 1..75: mol_type = other DNA
tggtacttcaactgctactgtaggtggtgcagcaccctttacggtgataggcggtattacttatctgaaaactgc

SEQ ID NO: 660448 - DNA, 75 bp, synthetic construct
  source 1..75: mol_type = other DNA
gtacagcctatattgcagatcttgcagtgactaacgctaaaatagcaaatcttgctgttaacgcagcaaaaatag

SEQ ID NO: 660449 - DNA, 75 bp, synthetic construct
  source 1..75: mol_type = other DNA
aactgacatcaccattcgctcatcagagaaaatacttatcgttgacgccaaatactataagagcattttttcacg

SEQ ID NO: 660450 - DNA, 75 bp, synthetic construct
  source 1..75: mol_type = other DNA
tgccaccggcagccggaaaaccatgacgtggagccgttacggccagttgctgagcttcaccgactgttccggtta

SEQ ID NO: 660451 - DNA, 75 bp, synthetic construct
  source 1..75: mol_type = other DNA
aggaagttagccgcaggttatctttgctagagttaaaactgcgacaagcaggtttgagcacagaatttttacatg

SEQ ID NO: 660452 - DNA, 75 bp, synthetic construct
  source 1..75: mol_type = other DNA
atgtttattctgtcgataccgataattttggcgacagcattgcgttgaccgatgcgttaattgaaagtgggcatc

SEQ ID NO: 660453 - DNA, 75 bp, synthetic construct
  source 1..75: mol_type = other DNA
cagacgtcgcacaacctggcagaagacttacaaaaatgtgaaagcaaaattaagcagaaaatgattaaaggcatt

SEQ ID NO: 660454 - DNA, 75 bp, synthetic construct
  source 1..75: mol_type = other DNA
taagcatgaaaagttaaattcaaccatcagagatgaagctcgttcactttatagaaaattaccgggcattagcac

SEQ ID NO: 660455 - DNA, 75 bp, synthetic construct
  source 1..75: mol_type = other DNA
cgtcccatatcatcccgcaactaaccaccagcgaaacggatttttgcatcgagctgggtaataagcgttggcaat

SEQ ID NO: 660456 - DNA, 75 bp, synthetic construct
  source 1..75: mol_type = other DNA
actgtcgtcgtcccctcaaactggcagatgcacggttacgatgcgcccatctacaccaacgtgacctatcccatt

SEQ ID NO: 660457 - DNA, 75 bp, synthetic construct
  source 1..75: mol_type = other DNA
ggtcaggtcatggatgagcagacgatggtgcaggatatcctgctgatgaagcagaacaactttaacgccgtgcgc

SEQ ID NO: 660458 - DNA, 75 bp, synthetic construct
  source 1..75: mol_type = other DNA
actggagttgaaactgcggcaagcaggtttgagcactgaatttttacgtggcgaatatgctgataagcttctgaa

SEQ ID NO: 660459 - DNA, 75 bp, synthetic construct
  source 1..75: mol_type = other DNA
ccgatgggataaggttgtctgattggtattataaatataagaagtcatcagagagtaacgtaaaggatttgccag

SEQ ID NO: 660460 - DNA, 75 bp, synthetic construct
  source 1..75: mol_type = other DNA
ccgatgtacgcgcgcgtggatgaagaccagcccttcccggctgtgccgaaatggtccatcaaaaaatggctttcg

SEQ ID NO: 660461 - DNA, 75 bp, synthetic construct
  source 1..75: mol_type = other DNA
ttgtcgacaacggcctgctgcgtctcaacgaagcagagcaggttctggatatgtttggcgatcgcttcggcctga

SEQ ID NO: 660462 - DNA, 75 bp, synthetic construct
  source 1..75: mol_type = other DNA
ccgacagcgttaacgtgcaggcgctgaacatggggcgaattgtcggtgacgtcgatggtgttaatctcactgaac

SEQ ID NO: 660463 - DNA, 75 bp, synthetic construct
  source 1..75: mol_type = other DNA
accatcgcggcctgccgctggcgctcatcagcacggcaggggcaacagcgtggtgcgcagaatatgatgaatggg

SEQ ID NO: 660464 - DNA, 75 bp, synthetic construct
  source 1..75: mol_type = other DNA
atcacggcaaaagacaacgcctggctgtactcgctgtcgcatcagacgaatgacacaggcgaatcagaatggatt

SEQ ID NO: 660465 - DNA, 75 bp, synthetic construct
  source 1..75: mol_type = other DNA
tctgcggcttaaacgcctggggctgtcaaaaacgttccgtcgtctggttctcacactaaacctacgttatggcgt

SEQ ID NO: 660466 - DNA, 75 bp, synthetic construct
  source 1..75: mol_type = other DNA
tctgcggcttaaacgcctggggctgtcaaaaacgttccgtcgtctggttatcacactcaacctacgttatggcgt

SEQ ID NO: 660467 - DNA, 75 bp, synthetic construct
  source 1..75: mol_type = other DNA
agtatggaatacgatgctgccggacgggtcatccgcctgaccagtgaaaacggcagccacaccaccttccgttac

SEQ ID NO: 660468 - DNA, 75 bp, synthetic construct
  source 1..75: mol_type = other DNA
gaccgtcgcctgtgcgctggcgttgtggtttgccggaatggatgcctttgatgccatcggccatagctttgcgac

SEQ ID NO: 660469 - DNA, 75 bp, synthetic construct
  source 1..75: mol_type = other DNA
tctatgctgtggtggccgaaccgcaaagagaagggcgaactgaaatcccgtgaggggtttctgatagtggtgctg

SEQ ID NO: 660470 - DNA, 75 bp, synthetic construct
  source 1..75: mol_type = other DNA
taatgggcgatggtcgtaagtatgattgggttgtttctctgcgtgctgtcgaaactatcgactttatgaccgcac

SEQ ID NO: 660471 - DNA, 75 bp, synthetic construct
  source 1..75: mol_type = other DNA
atagcccgaccattaacactatcattgctatcttcctgctgatctccggctgtaactacggtctgcacttctcgc

SEQ ID NO: 660472 - DNA, 75 bp, synthetic construct
  source 1..75: mol_type = other DNA
ttttccaggtggtgtcgatggcgacaaccgccgggtttacaactgacagcattgcccgctggccgctctttttgc

SEQ ID NO: 660473 - DNA, 75 bp, synthetic construct
  source 1..75: mol_type = other DNA
tgaggggtttctgatagtggtgctgttctggaccgtgctgggtagtgtcggtgcgctcccttttatcttctcgga

SEQ ID NO: 660474 - DNA, 75 bp, synthetic construct
  source 1..75: mol_type = other DNA
ggcgaaccatcgaagtgaccagcgaatacctgttccgtcatagcgataacgagctcctgcactggacggtggcgc

SEQ ID NO: 660475 - DNA, 75 bp, synthetic construct
  source 1..75: mol_type = other DNA
gtgaaaaccggttatgccgttaaaccgattgccgggcgctgtggtagcaacattgacctggtcagccatcatgaa

SEQ ID NO: 660476 - DNA, 75 bp, synthetic construct
  source 1..75: mol_type = other DNA
aatttgccgagcagaaaaacatttaccagcagttgtggtgtctgccaaaagtggacggtaaatacattcaggtat

SEQ ID NO: 660477 - DNA, 75 bp, synthetic construct
  source 1..75: mol_type = other DNA
cgattgccgggcgctgtggtagcaacattgacctggtcagccatcatgaagaggtgcttgatcagaccagtggta

SEQ ID NO: 660478 - DNA, 75 bp, synthetic construct
  source 1..75: mol_type = other DNA
ctgtggagcgccgaaatcccgaatctctatcgtgcggtggttgaactgcacaccgccgacggcacgctgattgaa

SEQ ID NO: 660479 - DNA, 75 bp, synthetic construct
  source 1..75: mol_type = other DNA
aacaactgctgacgccgctgcgcgatcagttcacccgtgcaccgctggataacgacattggcgtaagtgaagcga

SEQ ID NO: 660480 - DNA, 75 bp, synthetic construct
  source 1..75: mol_type = other DNA
gtgaaaaccggttatgccgtgaagccgattgccggtcgctgtggcagcaatattgacctcgtcagccatcatgaa

SEQ ID NO: 660481 - DNA, 75 bp, synthetic construct
  source 1..75: mol_type = other DNA
ataatcatgctgtgcatgaccgtctgggcgctctatctgatctttcgtaataaaaaagagatcacccagcatctg

SEQ ID NO: 660482 - DNA, 75 bp, synthetic construct
  source 1..75: mol_type = other DNA
gtatcgcagcatttgtttccggtatgttttcccgctggctggcgaaaaccatcaccctctcgccacatactcagc

SEQ ID NO: 660483 - DNA, 75 bp, synthetic construct
  source 1..75: mol_type = other DNA
gggattgttcgatttctggaactggctgcaaaacggcgcggggcagaaaaccgtagatatcctgatccgtatcgc

SEQ ID NO: 660484 - DNA, 75 bp, synthetic construct
  source 1..75: mol_type = other DNA
catgtttttcattcatacaatcaacatttataccattaaaaattaaagaattatttgaagagaaaagaaatataa

SEQ ID NO: 660485 - DNA, 75 bp, synthetic construct
  source 1..75: mol_type = other DNA
gccgggacctgcatggtcagataccgacggtgtacttgacggtctggcaccatcgcttgtgcgtgttcaccagcg

SEQ ID NO: 660486 - DNA, 75 bp, synthetic construct
  source 1..75: mol_type = other DNA
atgtttggcacatctttaacgcagaaatttgataaaggtggcttcaacgaattctccttcctggtcgcgaataac

SEQ ID NO: 660487 - DNA, 75 bp, synthetic construct
  source 1..75: mol_type = other DNA
actttaacgccgtgcgctgttcgcattatccgaaccatccgctgtggtacacgctgtgcgaccgctacggcctgt

SEQ ID NO: 660488 - DNA, 75 bp, synthetic construct
  source 1..75: mol_type = other DNA
tgaagtgcctctggatgttggcccgcaaggtaagcagttgattgaactgcctgaactgccgcagccggagagcgc

SEQ ID NO: 660489 - DNA, 75 bp, synthetic construct
  source 1..75: mol_type = other DNA
tttctttgtggcagggggaaacgcaggtcgccagcggcaccgcgcctttcggcggtgaaattatcgatgagcgtg

SEQ ID NO: 660490 - DNA, 75 bp, synthetic construct
  source 1..75: mol_type = other DNA
gggattggtggcgacgactcctggagcccgtcagtgtcggcggaattccagctgagcgccggtcgctaccattac

SEQ ID NO: 660491 - DNA, 75 bp, synthetic construct
  source 1..75: mol_type = other DNA
gcgaaaacggtctacgctgcggaacacgcgaattgaattatggcccacaccaatggcgcggcgacttccagttca

SEQ ID NO: 660492 - DNA, 75 bp, synthetic construct
  source 1..75: mol_type = other DNA
caactgctgaccccgctgcgcgatcagttcacccgagcgccgctggataatgacattggcgtaagcgaagcgact

SEQ ID NO: 660493 - DNA, 75 bp, synthetic construct
  source 1..75: mol_type = other DNA
gtagtgcaaccaaacgcgaccgcatggtcagaaggcggacacatcagcgcctggcagcaatggcgtctggcggaa

SEQ ID NO: 660494 - DNA, 75 bp, synthetic construct
  source 1..75: mol_type = other DNA
gagctcctgcactggatggtggcgctggatggcaagccgctggcaagcggtgaagtgcctctggatgtcgctcca

SEQ ID NO: 660495 - DNA, 75 bp, synthetic construct
  source 1..75: mol_type = other DNA
gcggattgaaaatggtctgctgctgctgaacggcaagccgttgctgattcgcggcgttaaccgtcacgagcatca

SEQ ID NO: 660496 - DNA, 75 bp, synthetic construct
  source 1..75: mol_type = other DNA
taaaccgaccacacaaatcagcgatttccatgttgccactcgctttaatgatgatttcagccgcgcggtactgga

SEQ ID NO: 660497 - DNA, 75 bp, synthetic construct
  source 1..75: mol_type = other DNA
ccgtcgtattacagcgtcgtgattgggaaaacccaggcgttacccaactcaatcgccttgcagcacatccccctt

SEQ ID NO: 660498 - DNA, 75 bp, synthetic construct
  source 1..75: mol_type = other DNA
ggtgctgattacgaccgctcacgcgtggcagcatcaggggaaaaccttatttatcagccggaaaacctaccggat

SEQ ID NO: 660499 - DNA, 75 bp, synthetic construct
  source 1..75: mol_type = other DNA
gtagtgcaaccgaacgcgaccgcatggtcagaagccggacacatcagcgcctggcagcagtggcgtctggcggaa

SEQ ID NO: 660500 - DNA, 75 bp, synthetic construct
  source 1..75: mol_type = other DNA
gcacggttcactggccggacggagtcaccccgccttctgatgcttccccgttttgccgatatttttcagcagggt

SEQ ID NO: 660501 - DNA, 75 bp, synthetic construct
  source 1..75: mol_type = other DNA
cctgatcgatgaagcggcatccagtatccgtatgcagattgactcaaaaccggaagagcttgaccgactcgatcg

SEQ ID NO: 660502 - DNA, 75 bp, synthetic construct
  source 1..75: mol_type = other DNA
gggcgcgctggtggctggggcgaaatatcgtggtgagtttgaagaacgtctgaaaggcgtgctgaacgatctgtc

SEQ ID NO: 660503 - DNA, 75 bp, synthetic construct
  source 1..75: mol_type = other DNA
aaaaacgcctggatatgctcaacgaagaactgagcgacaaagaacgtcagtactccgagttagaagaagagtgga

SEQ ID NO: 660504 - DNA, 75 bp, synthetic construct
  source 1..75: mol_type = other DNA
gggcgcgctggtggctggggcgaaatatcgcggtgagtttgaagaacgtttaaaaggcgtgcttaacgatctcgc

SEQ ID NO: 660505 - DNA, 75 bp, synthetic construct
  source 1..75: mol_type = other DNA
ggtactgcaacgtcgtactaaaaataacccggtgctgattggtgaacctggcgttggtaagactgccatcgttga

SEQ ID NO: 660506 - DNA, 75 bp, synthetic construct
  source 1..75: mol_type = other DNA
aatgcgtggaggtgaaagcgtgaacgatcaaggagccgaagaccaacgtcaggctttgaaaaaatacaccatcga

SEQ ID NO: 660507 - DNA, 75 bp, synthetic construct
  source 1..75: mol_type = other DNA
agaacaattaaacgtttcagggaaaacggtaaatctcaccgccgacgaattgctgaatattatcggtaaacaaat

SEQ ID NO: 660508 - DNA, 75 bp, synthetic construct
  source 1..75: mol_type = other DNA
ttaaatgagccggttacgaatgacatgaacatattaaaaaaaattatgcagcgtctgtgcggttgcggaaagcat

SEQ ID NO: 660509 - DNA, 75 bp, synthetic construct
  source 1..75: mol_type = other DNA
agcgtatgtgtggttgcggaaagcatgatggccgtgaacacgtgcagtcgcttacagcacagctgcgactgggac

SEQ ID NO: 660510 - DNA, 75 bp, synthetic construct
  source 1..75: mol_type = other DNA
tgttgaagacaccattgctattctgcgtggcctgaaagaacgttacgagctgcaccaccatgtgcaaattactga

SEQ ID NO: 660511 - DNA, 75 bp, synthetic construct
  source 1..75: mol_type = other DNA
ccttaccgaacgagccgaacagggcaaactcgatccggtgattggtcgtgatgaagaaattcgccgtaccattca

SEQ ID NO: 660512 - DNA, 75 bp, synthetic construct
  source 1..75: mol_type = other DNA
tcgctattgaacaggctcgccgtgtgggtgacctggcgcggatgtctgaactgcaatacggcaaaatcccggaac

SEQ ID NO: 660513 - DNA, 75 bp, synthetic construct
  source 1..75: mol_type = other DNA
aggtaagaaaaaagtagattccgcaatcagaatatttgactctgaggatagcattctttacccacattttttcaa

SEQ ID NO: 660514 - DNA, 75 bp, synthetic construct
  source 1..75: mol_type = other DNA
cctacttatggtaaaaaccaatatatatctaacatattaaactcagtacttagtagagaagaacaagctgtactg

SEQ ID NO: 660515 - DNA, 75 bp, synthetic construct
  source 1..75: mol_type = other DNA
gggattgacataattgtagtgaggggaatcggattcaaaaactatttggaaatagtaaaacacattgagataaaa

SEQ ID NO: 660516 - DNA, 75 bp, synthetic construct
  source 1..75: mol_type = other DNA
gcccccttcctttcatggctggaccctgcgcgtgttcttgcagtggatttgttccctgaccagcttaccgtgacc

SEQ ID NO: 660517 - DNA, 75 bp, synthetic construct
  source 1..75: mol_type = other DNA
ttgtcgacggccctgacggttgctcaggtttgcggcgtccagcggttatgtaactactattcggcgcgacttacg

SEQ ID NO: 660518 - DNA, 75 bp, synthetic construct
  source 1..75: mol_type = other DNA
gtgatccttgatgaaaaaacgctggcccccttcctttcatggctggaccctgcgcgtgttcttgcagcggagtta

SEQ ID NO: 660519 - DNA, 75 bp, synthetic construct
  source 1..75: mol_type = other DNA
acccatcaactgaccgatttactcaaccgcatggaggcgctgctgaacgatgtcgatgcctgcaacgtcaactaa

SEQ ID NO: 660520 - DNA, 75 bp, synthetic construct
  source 1..75: mol_type = other DNA
atgaaattcaaagtcacaggtgaatggaatggagagccattcgacagggttatcgaagcagaggacatcaacgac

SEQ ID NO: 660521 - DNA, 75 bp, synthetic construct
  source 1..75: mol_type = other DNA
atgcacttccgagtaacaggtgaatggaatggagagccattcaacagggttatcgaagcggagaacatcaacgac

SEQ ID NO: 660522 - DNA, 75 bp, synthetic construct
  source 1..75: mol_type = other DNA
ggcgtgttgcgcgcggactgaatacggcgcgtttttcccgcacgttaagcatcctcaccgccagcagtgttccgc

SEQ ID NO: 660523 - DNA, 75 bp, synthetic construct
  source 1..75: mol_type = other DNA
aaacccatcaactgaccgatttactcaaccgcatggaggcgctgctaaacgatgtcgatgcctgcaacgtcaact

SEQ ID NO: 660524 - DNA, 75 bp, synthetic construct
  source 1..75: mol_type = other DNA
atgaacatactaaaaaaacttatgcagcgtctgtgcggttgcggaaagcatgatggccgtgaacacgggcagtcg

SEQ ID NO: 660525 - DNA, 75 bp, synthetic construct
  source 1..75: mol_type = other DNA
attttcaggcgccagcaaaggtgctgaaattcccggaagtgcaaattcaggaaatcattagtaactgtgcgagag

SEQ ID NO: 660526 - DNA, 75 bp, synthetic construct
  source 1..75: mol_type = other DNA
tatgttggtgcgcataatgtacgactcgttatgttgaaaaggccgctgcgaaaatcgaatcccgcagcggcctct

SEQ ID NO: 660527 - DNA, 75 bp, synthetic construct
  source 1..75: mol_type = other DNA
cggcgaacagagcggcgaactggaaaccatgcttgagcaggccgcagtcaaccaggaacgggaatttgataccca

SEQ ID NO: 660528 - DNA, 75 bp, synthetic construct
  source 1..75: mol_type = other DNA
tttcaggcgccagcaaaggtgctgaaattaccggaagtgcatattcatgaaatcgttagtcactgtgcgagaatg

SEQ ID NO: 660529 - DNA, 75 bp, synthetic construct
  source 1..75: mol_type = other DNA
tttcaggcgccagcaaaggtgctgaaattaccggaagtgcaaattcatgaaatcgttagtcactttgcgagaatg

SEQ ID NO: 660530 - DNA, 75 bp, synthetic construct
  source 1..75: mol_type = other DNA
attttcaggcgccagcaaaggtgctgaaattcccggaagtgcaaattcaggaaatcatgagtaactgtgcgagat

SEQ ID NO: 660531 - DNA, 75 bp, synthetic construct
  source 1..75: mol_type = other DNA
ttttccggagaacgtggtgacggcagttgaaaccaatgtgttgaggttgcacggccggttaagccgagaatacgg

SEQ ID NO: 660532 - DNA, 75 bp, synthetic construct
  source 1..75: mol_type = other DNA
ttgattctctgttttgttcgatggtggctgccggagaaaaatccgggcatctcgacgtggtgctcaatcgactgg

SEQ ID NO: 660533 - DNA, 75 bp, synthetic construct
  source 1..75: mol_type = other DNA
ctgcttacaggcggtcagtgagcaaagtgaaaaactgcacgtgaaaagcctgggaatggcattacgcagccggat

SEQ ID NO: 660534 - DNA, 75 bp, synthetic construct
  source 1..75: mol_type = other DNA
acagtaagtggcaatggctatattacattcccagttgtaaatggcagcgagcaaggacaatatggtttagtagtt

SEQ ID NO: 660535 - DNA, 75 bp, synthetic construct
  source 1..75: mol_type = other DNA
tcagagtttattttctgtgatgatgcgaaactcaacgaaatagaagagaatatctggattgcgcgtaatattcgc

SEQ ID NO: 660536 - DNA, 75 bp, synthetic construct
  source 1..75: mol_type = other DNA
gaattcagacattttagtcagcgtgcgtcgctgaaggatgatttcttactgcatattaatgtttcgccctggcag

SEQ ID NO: 660537 - DNA, 75 bp, synthetic construct
  source 1..75: mol_type = other DNA
tttcaggcgccagcaaaggtgctgaaattaccggaagtgcacattcatgatatcgttagtcactatgcgagaatg

SEQ ID NO: 660538 - DNA, 75 bp, synthetic construct
  source 1..75: mol_type = other DNA
tcccgcctccccgcgataacgccccgccgccggtgctgtactggctttcgggattaacctgtaatgacgaaaatt

SEQ ID NO: 660539 - DNA, 75 bp, synthetic construct
  source 1..75: mol_type = other DNA
agtactggcagaagccgcgcgccagaaagcgtggccgatgacgctgcgtattcagccgggatatgatcacagtta

SEQ ID NO: 660540 - DNA, 75 bp, synthetic construct
  source 1..75: mol_type = other DNA
ctggtaatgccagacaccagcccgcgcggcgaacaggttgccaatgatgacggctacgatttaggccagggcgca

SEQ ID NO: 660541 - DNA, 75 bp, synthetic construct
  source 1..75: mol_type = other DNA
gacaaccgtttgatttattgtcagaaatagggcgagacagcgttggtgccgtgacgttaatacccgaagacgaaa

SEQ ID NO: 660542 - DNA, 75 bp, synthetic construct
  source 1..75: mol_type = other DNA
gaaaaaaattggcattaagcaggcgacaatttccaatttcgaaaacaaccattccgaaaggaataacgccgacga

SEQ ID NO: 660543 - DNA, 75 bp, synthetic construct
  source 1..75: mol_type = other DNA
actaaaaaaacttatgcagcgtctgtgtggttgcggaaagcatgatgaccgtgaacacggggagttacttacagc

SEQ ID NO: 660544 - DNA, 75 bp, synthetic construct
  source 1..75: mol_type = other DNA
atgaatatactaaaaaaacttatgcagcgtctgtgtggttgcggaaagcatgatgactgtgaacacgtacagtcg

SEQ ID NO: 660545 - DNA, 75 bp, synthetic construct
  source 1..75: mol_type = other DNA
agggtaatcacgcaggtggtgatactggatacagataaaaagcagatacagtgtgtggtaagaccgctgcaaatc

SEQ ID NO: 660546 - DNA, 75 bp, synthetic construct
  source 1..75: mol_type = other DNA
atgcagcgtctgtgcggttgcggaaagcatgatggccgtgaacacgggcagtcgcttacagtacaactgcgactg

SEQ ID NO: 660547 - DNA, 75 bp, synthetic construct
  source 1..75: mol_type = other DNA
ctggaacgacaacggcgaactcatccgcatcagcagcccgcgccagacccggagttacagctacagcaccaccgg

SEQ ID NO: 660548 - DNA, 75 bp, synthetic construct
  source 1..75: mol_type = other DNA
cttacagcacaactgcgactggggccggcagacatcctggagtccgatgagaatggtattatcccggagcaggac

SEQ ID NO: 660549 - DNA, 75 bp, synthetic construct
  source 1..75: mol_type = other DNA
atactaaaaaaacttatgcagcgtctgtgcgggcacggaaagcatgatgaccgtgaacacggggggttacttaca

SEQ ID NO: 660550 - DNA, 75 bp, synthetic construct
  source 1..75: mol_type = other DNA
gactcacgaaggcgaatacaagccagaagcccgggcatggcaaattaccaataatacctatggtttttccaatgg

SEQ ID NO: 660551 - DNA, 75 bp, synthetic construct
  source 1..75: mol_type = other DNA
atgaataaattatatcatagttctcttattgctctggcatttgctactgctactgttaacgcagcacagcaaagc

SEQ ID NO: 660552 - DNA, 75 bp, synthetic construct
  source 1..75: mol_type = other DNA
acgctgtcgtaaaactgacagcaatgaatgcacaaaacacagcaaatactcaggtaacatcttctaataccagta

SEQ ID NO: 660553 - DNA, 75 bp, synthetic construct
  source 1..75: mol_type = other DNA
accgttttctgaaattccgcgaaggggcttttacagacccggattcctattttcataactacgcgaaattaacta

SEQ ID NO: 660554 - DNA, 75 bp, synthetic construct
  source 1..75: mol_type = other DNA
atcgcaagaagtaacgccgccatcgccacctgatccagacccggacccaacacccgatcctgacccaacacccga

SEQ ID NO: 660555 - DNA, 75 bp, synthetic construct
  source 1..75: mol_type = other DNA
gcgtatgactacacgctggtggaagataacaacgactggtatctgcgatcgcaagaagtaacgccgccatcgcca

SEQ ID NO: 660556 - DNA, 75 bp, synthetic construct
  source 1..75: mol_type = other DNA
gcccaactgccggtgaatctatggggggaacaggggcgaatttgaatcagcaaggtggacataataatagtggtg

SEQ ID NO: 660557 - DNA, 75 bp, synthetic construct
  source 1..75: mol_type = other DNA
cggaagtcgtaatcatcaaacaatgtgcgggcagcatgacagttgaacgtatagggcagcttattggcagaaccg

SEQ ID NO: 660558 - DNA, 75 bp, synthetic construct
  source 1..75: mol_type = other DNA
agaaatattacatttgttctttcttcggataaaaaagtctcattcctcgttttacaaaagcggatctccgtgaat

SEQ ID NO: 660559 - DNA, 75 bp, synthetic construct
  source 1..75: mol_type = other DNA
ggccgcagccaacgggcgaacgttattgtgttaactctgcctctttacgctttaccgatggcgaaaacggcgaag

SEQ ID NO: 660560 - DNA, 75 bp, synthetic construct
  source 1..75: mol_type = other DNA
tcaggcgtgggctagaaaaaaaggtctttcccgcactctgaagcaacaaaatgaaagacatcttttgcgtttatc

SEQ ID NO: 660561 - DNA, 75 bp, synthetic construct
  source 1..75: mol_type = other DNA
cgatagaggaaattgtggctgcttgttgttatttccaccagcaggcggaggattatcaaatcaatatgtcccgca

SEQ ID NO: 660562 - DNA, 75 bp, synthetic construct
  source 1..75: mol_type = other DNA
gaaaagtacgaccgcccgtgtattacaggcgctattaagccgttggccggaacatcgccgtgttgagttgataac

SEQ ID NO: 660563 - DNA, 75 bp, synthetic construct
  source 1..75: mol_type = other DNA
tatagatagtaaagctttgcatgctaagtggggaaccatttcaccaataataaatcctaacggcgtttatatatc

SEQ ID NO: 660564 - DNA, 75 bp, synthetic construct
  source 1..75: mol_type = other DNA
tttaactgaactgaagagcaaagatatagccagacctctaatacatgcactgaaaattgctagaggtgaattatg

SEQ ID NO: 660565 - DNA, 75 bp, synthetic construct
  source 1..75: mol_type = other DNA
ttccggcatggaataacggactaaaactggcttatgaaagccgtcctaaagagattcgtgacggctggttgatgt

SEQ ID NO: 660566 - DNA, 75 bp, synthetic construct
  source 1..75: mol_type = other DNA
atcctggctgttgctggcgccgagaagatcatcgaacgttccgtggatgaagctgctaacagcgacatcgtggat

SEQ ID NO: 660567 - DNA, 75 bp, synthetic construct
  source 1..75: mol_type = other DNA
tggccgccattaatggcagccatcgaaaaacgtcaaaaagaaattgctgacggccttgcttccgcagaacgagca

SEQ ID NO: 660568 - DNA, 75 bp, synthetic construct
  source 1..75: mol_type = other DNA
gatgaaaatactttgaatgaattaactaatttattaaatgatgtcaatgataaggtaaaagaaataagctacgtc

SEQ ID NO: 660569 - DNA, 75 bp, synthetic construct
  source 1..75: mol_type = other DNA
ttaccgcgactttatatgccggtttgcaactgatcatgccgggcgaagtggcccccagccatcgccataaccagt

SEQ ID NO: 660570 - DNA, 75 bp, synthetic construct
  source 1..75: mol_type = other DNA
aaggtggcgggcaggtcactattggcaatgaaaccttcagctttagtgcaaaagatatcttcgtggtgccgacct

SEQ ID NO: 660571 - DNA, 75 bp, synthetic construct
  source 1..75: mol_type = other DNA
gcgtcgcgtactggtgctggaaaacccggcgctgcgcggtcagtcctctattaccgccaccttgtatgccggttt

SEQ ID NO: 660572 - DNA, 75 bp, synthetic construct
  source 1..75: mol_type = other DNA
gttcaaccgcgcgatgcgtgatgcgtattacaaccgcccgaaagagcagcgtgatgcttggctgctgtggattgg

SEQ ID NO: 660573 - DNA, 75 bp, synthetic construct
  source 1..75: mol_type = other DNA
gagttaatcggtaagaagcccgccacggttaagagcatgattgaagacggtaagttgccgatcatcccgtggaag

SEQ ID NO: 660574 - DNA, 75 bp, synthetic construct
  source 1..75: mol_type = other DNA
tgaccgcagccgcgaagtgctgcacgatttaacccgtctgggcgatgccgacgaatgggatggctacaaaatgcg

SEQ ID NO: 660575 - DNA, 75 bp, synthetic construct
  source 1..75: mol_type = other DNA
ggcgcgcgttgctgcggattctgccgtactcttgctctgtgctgccgccgtcgcactaccagctgcctcggtcgc

SEQ ID NO: 660576 - DNA, 75 bp, synthetic construct
  source 1..75: mol_type = other DNA
cgtgctgaagtggctgcttctgacgctttcgtggtcgcggtggatgcagaagtggctgctgattgttgtgacgct

SEQ ID NO: 660577 - DNA, 75 bp, synthetic construct
  source 1..75: mol_type = other DNA
ccgggctgaggaggctgcttctgacgctttcgtagtcgcggtggatgcagaagtggcggctgattgttgtgacgc

SEQ ID NO: 660578 - DNA, 75 bp, synthetic construct
  source 1..75: mol_type = other DNA
gccgtttcagaagacctggcgttcgtctcggacgtttttgccgccttcgcagaatttgctgccgccgttgccgag

SEQ ID NO: 660579 - DNA, 75 bp, synthetic construct
  source 1..75: mol_type = other DNA
caagcacggcaacacgtctggctcaagcgccatcctgttccactggtctcctttaccgtggttgcgcctgggccg

SEQ ID NO: 660580 - DNA, 75 bp, synthetic construct
  source 1..75: mol_type = other DNA
actctgcagcggcagcactttttgatgcttcagtggcctttgttgatgccgttcctgcgctggaagacgctgact

SEQ ID NO: 660581 - DNA, 75 bp, synthetic construct
  source 1..75: mol_type = other DNA
tcgccgttgccgaggaagctgcgctgctggcgctcgaggctgcgctcgtttctgatgattttgccgcctcttttg

SEQ ID NO: 660582 - DNA, 75 bp, synthetic construct
  source 1..75: mol_type = other DNA
ttagccaggtcatacgcggccttaacggcttttggcgttgccgcctgtgactcggaagtgctgttggtcgcactg

SEQ ID NO: 660583 - DNA, 75 bp, synthetic construct
  source 1..75: mol_type = other DNA
agtggcttcgccagccttcgttgtggctgttgaagcagacgatgcggcgctttctgccgattttccggcggcggt

SEQ ID NO: 660584 - DNA, 75 bp, synthetic construct
  source 1..75: mol_type = other DNA
ccaccctatttcactttcccttctcgaaaagttgttaaacagcacacgggtcaatacacagccggataatcagct

SEQ ID NO: 660585 - DNA, 75 bp, synthetic construct
  source 1..75: mol_type = other DNA
aagacctggcgttcgtctcggacgtttttgccgccttcgcggaatttcctgccgccgttgccgaggaagctgcgc

SEQ ID NO: 660586 - DNA, 75 bp, synthetic construct
  source 1..75: mol_type = other DNA
aggcgttcgtttctgatgattttgccgcctctttggaggccgccgcatctctggctgaagtggcggcttctgacg

SEQ ID NO: 660587 - DNA, 75 bp, synthetic construct
  source 1..75: mol_type = other DNA
cgccgcagcctggcggatgcgcttcagcagtccggcggcgaagacggtggcagtgtggtgttcccgccggtgctg

SEQ ID NO: 660588 - DNA, 75 bp, synthetic construct
  source 1..75: mol_type = other DNA
cccgccgcgactattcactgcgcctcgccgctgcctgttgtgcgagcaaagcgcagccgtctgcgcgcgtggaaa

SEQ ID NO: 660589 - DNA, 75 bp, synthetic construct
  source 1..75: mol_type = other DNA
caggctgaaatccaccaccggggacgctactgccatccgtacagcatggatatcactgttaccaggaacagtccg

SEQ ID NO: 660590 - DNA, 75 bp, synthetic construct
  source 1..75: mol_type = other DNA
cagacgccgatgatgccgatgacgccgccgaactggctgacgatgcggcagccgtttttgaggattctgcgctgg

SEQ ID NO: 660591 - DNA, 75 bp, synthetic construct
  source 1..75: mol_type = other DNA
gcgttttgaggactctgcagcagcggcactttttgatgcctcagtggcctttgctgatgccgtttctgcgccgga

SEQ ID NO: 660592 - DNA, 75 bp, synthetic construct
  source 1..75: mol_type = other DNA
gctgatgaatataataatgcaataaaaaattatgtggctgataaaaccagctcactctccagtaaaactatcacg

SEQ ID NO: 660593 - DNA, 75 bp, synthetic construct
  source 1..75: mol_type = other DNA
gcagatgaatataatattgctttaagaaattacattgcagataaaggtacatccctttcaagtggaaagataaca

SEQ ID NO: 660594 - DNA, 75 bp, synthetic construct
  source 1..75: mol_type = other DNA
gtggcactacctttcgctgctgacgcttgtctggtcgcctcatcttttgaagcagacgcagatgatgccgatgac

SEQ ID NO: 660595 - DNA, 75 bp, synthetic construct
  source 1..75: mol_type = other DNA
atcctgtgcggtgtatttcccgttagccaggtcatacgcggccttaacggcttttggtgttgccgccagtgactc

SEQ ID NO: 660596 - DNA, 75 bp, synthetic construct
  source 1..75: mol_type = other DNA
ggctgaggtggcagcttctgacgccttcgtggtcgcggcggatgcagaagtggctgctgattgttgtgacgctgc

SEQ ID NO: 660597 - DNA, 75 bp, synthetic construct
  source 1..75: mol_type = other DNA
ggcgctctgtcccgctgccgtttcagaagacctggcgtttgtctcggacgtctttgccgccttcgcggaattgcc

SEQ ID NO: 660598 - DNA, 75 bp, synthetic construct
  source 1..75: mol_type = other DNA
gcggtggcactggctgaggcctgcccggcacttgttgacgcggcgctggcagatgatgcagccgctgtttttgag

SEQ ID NO: 660599 - DNA, 75 bp, synthetic construct
  source 1..75: mol_type = other DNA
ttaatggacgcctcacgggccgatgatgcagctgttgtctcagagtctgccgcagctgaggcgctctgttccgct

SEQ ID NO: 660600 - DNA, 75 bp, synthetic construct
  source 1..75: mol_type = other DNA
tgagtcaaccctgcctctgcctgagaaccttggtgaagatatgactgcctttggttacggtatagattttaagtt

SEQ ID NO: 660601 - DNA, 75 bp, synthetic construct
  source 1..75: mol_type = other DNA
aggaagatagctaaagcgacaggaaaaaatccggtatggttagcattcggtgagtcaaccctgcctctgcctgag

SEQ ID NO: 660602 - DNA, 75 bp, synthetic construct
  source 1..75: mol_type = other DNA
gatgcagggatgtcgggggaacttatgattttggggttgcatctgtcagtggggtgaatattgaaatagacaggg

SEQ ID NO: 660603 - DNA, 75 bp, synthetic construct
  source 1..75: mol_type = other DNA
agtatcagatggggctttccaatatgatggaagcgaacccgggtgtggataccttcctgccgaaaggcggcaccg

SEQ ID NO: 660604 - DNA, 75 bp, synthetic construct
  source 1..75: mol_type = other DNA
tatccatggcaccaacgccaacttcggtatcggcctgcgtgtaagtcatggttgtgtgcgtctgcgtaacgaaga

SEQ ID NO: 660605 - DNA, 75 bp, synthetic construct
  source 1..75: mol_type = other DNA
tggacgccgaccgccaaaatgcacgcagagtaccgcgctgcgggcgaaccgcttccggctgtcgttccggcaggt

SEQ ID NO: 660606 - DNA, 75 bp, synthetic construct
  source 1..75: mol_type = other DNA
tacagaatagtaactaatcttgaacttgcaggtagtcaggagcctggagtgaaaactgtagtaacgccacctcaa

SEQ ID NO: 660607 - DNA, 75 bp, synthetic construct
  source 1..75: mol_type = other DNA
tggcaaagcctctcttcgccgccgtaaaaaagatcaagatttggatgtgagcagtaatggaacatcaagtgaatg

SEQ ID NO: 660608 - DNA, 75 bp, synthetic construct
  source 1..75: mol_type = other DNA
aaacatcgtctgcgtcgaaataaagtagagtatgagcagctctcattgtttggtgatgttgaggctgagcaagat

SEQ ID NO: 660609 - DNA, 75 bp, synthetic construct
  source 1..75: mol_type = other DNA
gcagacaacccctgacggactaaaatatcgaataaccagcgaactggaggtttcgggcactcaaactgcaggtgt

SEQ ID NO: 660610 - DNA, 75 bp, synthetic construct
  source 1..75: mol_type = other DNA
gaatatctttcttttctttactcccattatctgcagaagctgaaagctactgtaacctcctttgggcgaataata

SEQ ID NO: 660611 - DNA, 75 bp, synthetic construct
  source 1..75: mol_type = other DNA
actggatacagtatccggaggaatggcagacaacctctgacggactgaaataccgaataaccagcgaactggaag

SEQ ID NO: 660612 - DNA, 75 bp, synthetic construct
  source 1..75: mol_type = other DNA
tatccacggcaccaacgccaactttggtatcggcctgcgcgtaagccacggttgtgtgcgcctgcgtaacgaaga

SEQ ID NO: 660613 - DNA, 75 bp, synthetic construct
  source 1..75: mol_type = other DNA
gcgtgatggcatgatggcggcaggggttatcacgtcaggcgaatggctggacggcgtgaagggcaaacaggcatt

SEQ ID NO: 660614 - DNA, 75 bp, synthetic construct
  source 1..75: mol_type = other DNA
tggctggtacattaaacacgggggcgggtgagtatgtatcatcggggacagcggaatcactgcccgccgtcatga

SEQ ID NO: 660615 - DNA, 75 bp, synthetic construct
  source 1..75: mol_type = other DNA
tccttacccgccgcagtcggtgaacgtggagcagacaggtgatcataactggcgctactgcatcactgacgccta

SEQ ID NO: 660616 - DNA, 75 bp, synthetic construct
  source 1..75: mol_type = other DNA
aaagcgagcaacgtaacctgtccattgatgattttctggcgctgtccggcgtaccgaataccggatccggagaat

SEQ ID NO: 660617 - DNA, 75 bp, synthetic construct
  source 1..75: mol_type = other DNA
caggcgaatggctggacggcgtgaagggcaaacaggcattagccgcactggaacgctacaaaggggccagaaacg

SEQ ID NO: 660618 - DNA, 75 bp, synthetic construct
  source 1..75: mol_type = other DNA
cgccggggtgtgttgtaccggaacgcacaggcgcacacaaataccgatataccatcaccgaaccctatacaggaa

SEQ ID NO: 660619 - DNA, 75 bp, synthetic construct
  source 1..75: mol_type = other DNA
tggctggcgaactttgagcagcagattaaatccgcgttgctggtggcatcgcctgtacccggaatccgttatcag

SEQ ID NO: 660620 - DNA, 75 bp, synthetic construct
  source 1..75: mol_type = other DNA
tctttctggatgctggaaacaaaaagctggtcttctggtttgttcgtgtcgatgacgaagggtatccggaaatag

SEQ ID NO: 660621 - DNA, 75 bp, synthetic construct
  source 1..75: mol_type = other DNA
atttctcactatgacgatgcgcccgtggctggcgaactttgagcagcagataaaaaacgccctgctggtggcctc

SEQ ID NO: 660622 - DNA, 75 bp, synthetic construct
  source 1..75: mol_type = other DNA
acctacagcaatttcagcgaggcaagccgcgcgtttctgaccatgacgatgcgcccgtggctggcgaactttgag

SEQ ID NO: 660623 - DNA, 75 bp, synthetic construct
  source 1..75: mol_type = other DNA
tccttacccgccgcagtcggtgaacgtggagcagacaggagaacacaactggcgctattgcatcactgacgccta

SEQ ID NO: 660624 - DNA, 75 bp, synthetic construct
  source 1..75: mol_type = other DNA
ccgcgcactattaccgtcttcgcgattatggccttaaccatcctgaatgcagcgccatcatgcatatcaccgact

SEQ ID NO: 660625 - DNA, 75 bp, synthetic construct
  source 1..75: mol_type = other DNA
ggaatcagagttccctgagcggcccgaaatttttacttggcttctttcccttgataagaagaaaccaccgcacga

SEQ ID NO: 660626 - DNA, 75 bp, synthetic construct
  source 1..75: mol_type = other DNA
tatcttacttacggttttggtttggtttgcgaaaccgccgttacagcgaaaggcgttgggtgatgataaaaggag

SEQ ID NO: 660627 - DNA, 75 bp, synthetic construct
  source 1..75: mol_type = other DNA
gactgaccctgttagtgctcggtgttggtggcttgcaaataatgcttgataaagggcgcgatctggattggttca

SEQ ID NO: 660628 - DNA, 75 bp, synthetic construct
  source 1..75: mol_type = other DNA
atggcaatcactaaatcaactccggcaccattaaccggtgggacgttatggtgcgtcactattgcattgtcatta

SEQ ID NO: 660629 - DNA, 75 bp, synthetic construct
  source 1..75: mol_type = other DNA
aatggcaggtggtacagagtattctgtcaggggaccagccgcaggcgctgcacggcagccaggggagaggaacca

SEQ ID NO: 660630 - DNA, 75 bp, synthetic construct
  source 1..75: mol_type = other DNA
ctgaagcatggcgtgatgactatgaagcaggaaaaactccggttgaagcattctgtgacgagtggggtgaggacg

SEQ ID NO: 660631 - DNA, 75 bp, synthetic construct
  source 1..75: mol_type = other DNA
cagagaacccgattcttgatctcagtttgtttaagtcccgtaacttcaccattggtattgtgagtatcacatgcg

SEQ ID NO: 660632 - DNA, 75 bp, synthetic construct
  source 1..75: mol_type = other DNA
ccgcgcatcggccaggaagtgattgtagacttcctgaacggcgacccggaccagccgataatcatggggcggacg

SEQ ID NO: 660633 - DNA, 75 bp, synthetic construct
  source 1..75: mol_type = other DNA
tctcaaacgggtgaagttcataccacagggaatacagcagcaggttcccgcgaaacgtcaaaaccgcggctcccg

SEQ ID NO: 660634 - DNA, 75 bp, synthetic construct
  source 1..75: mol_type = other DNA
ccgcgggtgggccaggaggtgattgttgatttcctgaacggagacccggaccagccggtggtcatggggcggacg

SEQ ID NO: 660635 - DNA, 75 bp, synthetic construct
  source 1..75: mol_type = other DNA
ggataattcatcgcattggtgccaaaaataccctgcttgttgcggggggaattatgaccatccgcattaccggtt

SEQ ID NO: 660636 - DNA, 75 bp, synthetic construct
  source 1..75: mol_type = other DNA
gctggaagtgccgttcctgctggtaggggcctttaaatatatcaccggcgtatttgacgtccgcctgtctgcgac

SEQ ID NO: 660637 - DNA, 75 bp, synthetic construct
  source 1..75: mol_type = other DNA
tttttgaggaatacaccatgaacccgaccgtctgtacccataaaaacaaccccaatttctggattttcgggctgt

SEQ ID NO: 660638 - DNA, 75 bp, synthetic construct
  source 1..75: mol_type = other DNA
ccgggcgacctgccgggaacgaagacgcagatgaccatccggtcaaaaacctataaaggaagcggatttaacgag

SEQ ID NO: 660639 - DNA, 75 bp, synthetic construct
  source 1..75: mol_type = other DNA
ttgcgtatgcggagtgtctgctggaagccgatattaacccctccatgcatatgttcggcagttgtatcgatatcg

SEQ ID NO: 660640 - DNA, 75 bp, synthetic construct
  source 1..75: mol_type = other DNA
tgcggggctgccgggatgctgattgcgtatgcagagtgcctgctggaatcggatatgaacccttccatgcatatg

SEQ ID NO: 660641 - DNA, 75 bp, synthetic construct
  source 1..75: mol_type = other DNA
ctgtgagcgtgaagcggaaaacttatgatgagaccatgattaaggaagtagactggccccctgaatctccagaca

SEQ ID NO: 660642 - DNA, 75 bp, synthetic construct
  source 1..75: mol_type = other DNA
ataatccacgttccagtactttaaccaagcagcttgctgcttccgtgctggctcaatccaacaaaaaccgtaaat

SEQ ID NO: 660643 - DNA, 75 bp, synthetic construct
  source 1..75: mol_type = other DNA
ccagcagttccggctcatctgtgatgctgctgtccgtaaagcattcactgaggcaaaacaacgttatggtgcgta

SEQ ID NO: 660644 - DNA, 75 bp, synthetic construct
  source 1..75: mol_type = other DNA
agcgtgtttaaatccacggggcgacatctggggcgctgggaggtgttcagtgattttctgtcgctcgctgccagt

SEQ ID NO: 660645 - DNA, 75 bp, synthetic construct
  source 1..75: mol_type = other DNA
ccggaagaactggtgcccgttcagcgtgtcggcaaaatggtgctcaatcgcaatccggataacttctttgccgaa

SEQ ID NO: 660646 - DNA, 75 bp, synthetic construct
  source 1..75: mol_type = other DNA
atggactcactggcacctgaggacggatctcatcgtccagcggctgaaccaacaccgccaggtgcacaacctacc

SEQ ID NO: 660647 - DNA, 75 bp, synthetic construct
  source 1..75: mol_type = other DNA
ttaacgagctgcgctttgaggatgcgacggataaggaacaggtctatatccacgcgcagaagaacatggacacgg

SEQ ID NO: 660648 - DNA, 75 bp, synthetic construct
  source 1..75: mol_type = other DNA
aaggcctatctactatgcgccgcattcacgaatcgaacaaatcattccgctcttatatgtatccaagcaatgggc

SEQ ID NO: 660649 - DNA, 75 bp, synthetic construct
  source 1..75: mol_type = other DNA
aatatctgagctagtaaaccgagcatctaccaatttgatgcaatatacaggtactcttgcctctatactggaagc

SEQ ID NO: 660650 - DNA, 75 bp, synthetic construct
  source 1..75: mol_type = other DNA
acaacgtcagttttgaagcatggcgtgatgattatgaagcaggaaaaactccggtcgaagcatattgtgatgagt

SEQ ID NO: 660651 - DNA, 75 bp, synthetic construct
  source 1..75: mol_type = other DNA
accgtatgctgctgccggataccgtcggtaccggtggtgactcccatacccgtttcccgatcggtatctctttcc

SEQ ID NO: 660652 - DNA, 75 bp, synthetic construct
  source 1..75: mol_type = other DNA
ttggtccgattaagcaaatcgaagctctgcagcagaaaggtttcccgctggcgtacgtcggtgacgttgtgggta

SEQ ID NO: 660653 - DNA, 75 bp, synthetic construct
  source 1..75: mol_type = other DNA
acacgatggaagatgcgggtgcgctgccaatcgaagtggatgtctctaacctgaacatgggcgacgtaattgacg

SEQ ID NO: 660654 - DNA, 75 bp, synthetic construct
  source 1..75: mol_type = other DNA
tggcccgatcaagcagatcgaagccctgcaacagaaaggtttcccgctggcttatgtgggtgacgttgtgggtac

SEQ ID NO: 660655 - DNA, 75 bp, synthetic construct
  source 1..75: mol_type = other DNA
gatgacccgtgatgaactgaaagacctggcgtgcctgggcttctcggctgacctggtgatgcagtctttctgcca

SEQ ID NO: 660656 - DNA, 75 bp, synthetic construct
  source 1..75: mol_type = other DNA
ccggcccgatgacccgtgatgaactgaaagacctggcgtgcctgggcttctcggctgacctggtgatgcagtctt

SEQ ID NO: 660657 - DNA, 75 bp, synthetic construct
  source 1..75: mol_type = other DNA
ctggatatgccggaatccgttctggtacgcttcaaaggcaaaatgcagccgggtatcaccctgcgcgatctggta

SEQ ID NO: 660658 - DNA, 75 bp, synthetic construct
  source 1..75: mol_type = other DNA
tggatgcggataaaaagcagatacagtgcgtggtaagaccactgcaaatcctgcgtgctgacggggcatgggaaa

SEQ ID NO: 660659 - DNA, 75 bp, synthetic construct
  source 1..75: mol_type = other DNA
aaagccactggtatcacgaaacccaatccagcactctggaatacgacgttcagccgctggtgccaggcgcggcaa

SEQ ID NO: 660660 - DNA, 75 bp, synthetic construct
  source 1..75: mol_type = other DNA
gaaggctactacagcgtcttcggtaagagtggtgcgcgtatcgagatcccaggctgttccctgtgtatgggtaac

SEQ ID NO: 660661 - DNA, 75 bp, synthetic construct
  source 1..75: mol_type = other DNA
gctgagagcgatcgcggcttctcgctggcgcaaaaaatggtaggccgtgcctgtggcgtgaaaggcattcgtccg

SEQ ID NO: 660662 - DNA, 75 bp, synthetic construct
  source 1..75: mol_type = other DNA
cgtggcctgaccaccaaagcgcgtgaagcacttggtctgccgcacagtgatgtgttccgtcaggcgaaagatgtc

SEQ ID NO: 660663 - DNA, 75 bp, synthetic construct
  source 1..75: mol_type = other DNA
gaaaccaacaccgatgacctctctccggcaccggatgcgtggtcacgcccggatatcccactgcacgcgctggcg

SEQ ID NO: 660664 - DNA, 75 bp, synthetic construct
  source 1..75: mol_type = other DNA
tggcagagacgagcaagtttttaagttttgtcctccgacataaaccagaggcaattggcatcgtgctggaccgtg

SEQ ID NO: 660665 - DNA, 75 bp, synthetic construct
  source 1..75: mol_type = other DNA
ggaaaacggggtttggctgacatcaacggttgctgttgagtttcttgagtggccgtttatgtcggctgggataca

SEQ ID NO: 660666 - DNA, 75 bp, synthetic construct
  source 1..75: mol_type = other DNA
gcaatgctgaccagtaaaggaacgccggcgtctggctggacggtgaacttttactcttttcaggcggcagccagt

SEQ ID NO: 660667 - DNA, 75 bp, synthetic construct
  source 1..75: mol_type = other DNA
aacgaggaatacctttctggcaagcggaaaacggggtctggctgacatcaaccgttgcggttgagtttcttgact

SEQ ID NO: 660668 - DNA, 75 bp, synthetic construct
  source 1..75: mol_type = other DNA
accgtcaaagcacaggaaatggcgaaacgaggcatccctttctggcaagcggaaaacggggtctggctgacatca

SEQ ID NO: 660669 - DNA, 75 bp, synthetic construct
  source 1..75: mol_type = other DNA
accgtcaaagcacaggaaatggcgaaacgaggcatccctttctggcaagcggaaaacgggggtctggctgacatc

SEQ ID NO: 660670 - DNA, 75 bp, synthetic construct
  source 1..75: mol_type = other DNA
gccatgacggagcactattaccgcctgcgggattacgccctgcagcaccctgaatccagcgccattctgcgcatt

SEQ ID NO: 660671 - DNA, 75 bp, synthetic construct
  source 1..75: mol_type = other DNA
gcgtttatggctcccgatgctgacagtgatgataaatggcatctgctcaacagcatgaacgacaatgatgcggaa

SEQ ID NO: 660672 - DNA, 75 bp, synthetic construct
  source 1..75: mol_type = other DNA
atttgagctgaccgatgcgtctgccgagcgttctgctgccggttgtaccattaagctgaacaaagaaccgatcat

SEQ ID NO: 660673 - DNA, 75 bp, synthetic construct
  source 1..75: mol_type = other DNA
tcaaccggcgattgcggcatgtcataaacagagtgaagagtgttatgaagtgccgattcagcagaaacgagattt

SEQ ID NO: 660674 - DNA, 75 bp, synthetic construct
  source 1..75: mol_type = other DNA
acctgggtcggtcagttggcagattacgaactgctcgaacagacctggacgaaagataaaccggtaaaattctcg

SEQ ID NO: 660675 - DNA, 75 bp, synthetic construct
  source 1..75: mol_type = other DNA
gtgcccattcagcagaaacgggattttgatatcaatgaacagcggcgacagacttttctacaatcagaaaaactc

SEQ ID NO: 660676 - DNA, 75 bp, synthetic construct
  source 1..75: mol_type = other DNA
caactggctggcgtgcctgctacgaagtggagaaatctccgcaagagcaagagatgaatgctcaccgacagttac

SEQ ID NO: 660677 - DNA, 75 bp, synthetic construct
  source 1..75: mol_type = other DNA
gcttgactcactttgagtacccgctgtgcgcctttatggccaacaagcctatctacatgattggccacagcgttg

SEQ ID NO: 660678 - DNA, 75 bp, synthetic construct
  source 1..75: mol_type = other DNA
gcgtggtgggcgatattctcaaccagcttccggcgctgggcgagaaagtcgccgcggcggtggagggggaacgcc

SEQ ID NO: 660679 - DNA, 75 bp, synthetic construct
  source 1..75: mol_type = other DNA
ggtgaccggcgaaggcaaactgcacaactttgaaattgcgccagagtttcatgagtttgtgcgcttccttggcaa

SEQ ID NO: 660680 - DNA, 75 bp, synthetic construct
  source 1..75: mol_type = other DNA
aggatgtgttagagaattttgcctctcttatcatccaggagaaacacacaagaacaggaggggcatcatttatag

SEQ ID NO: 660681 - DNA, 75 bp, synthetic construct
  source 1..75: mol_type = other DNA
ccggggttatgcagcagctgggactaccggagatggcaattgatatccgtcatttattagacggcagcctgcaag

SEQ ID NO: 660682 - DNA, 75 bp, synthetic construct
  source 1..75: mol_type = other DNA
cggagcactattatcgcctgcgggactataccctgctgcacccggactgccacgcaattatgcgtatcattgatt

SEQ ID NO: 660683 - DNA, 75 bp, synthetic construct
  source 1..75: mol_type = other DNA
aaacatattcaggacccgtcgcgctatcacgtggtgatggatgagcttaacgatctggaaatgggcaaactgctg

SEQ ID NO: 660684 - DNA, 75 bp, synthetic construct
  source 1..75: mol_type = other DNA
aaaaagcgtttgcgggcgtagtcaaccgtattatcgccagcggctggcaggtgatggcgctctctacctgtacgg

SEQ ID NO: 660685 - DNA, 75 bp, synthetic construct
  source 1..75: mol_type = other DNA
tgtcgccgatttttcttcaggaatacagcaacagcacctacagcaatttcagtgaggcaagccgcgcgtttctga

SEQ ID NO: 660686 - DNA, 75 bp, synthetic construct
  source 1..75: mol_type = other DNA
gatgaacttcggcacgccggcgattgccattaactacgagcacaaatcagcgggcattatgcagcagctgggtat

SEQ ID NO: 660687 - DNA, 75 bp, synthetic construct
  source 1..75: mol_type = other DNA
gaagcggctgtgaggcgtgagcgggaaaaaggacttgcgatgatcgagtctgttttgtcacggatcctggagggt

SEQ ID NO: 660688 - DNA, 75 bp, synthetic construct
  source 1..75: mol_type = other DNA
ctatgacgccatcattcaggtgggcggttcgttctttgtcgatctctacggcgtgccgcagtttgagcatgcgct

SEQ ID NO: 660689 - DNA, 75 bp, synthetic construct
  source 1..75: mol_type = other DNA
atgattaaacatacaaaacctttcttaggaatagattatgacttactagcaatcacttccctagtgattaacggc

SEQ ID NO: 660690 - DNA, 75 bp, synthetic construct
  source 1..75: mol_type = other DNA
gctttgcaccaatgactctagatttaactgaggggcattatggtgaatatgctggcttgctggtgggctattcct

SEQ ID NO: 660691 - DNA, 75 bp, synthetic construct
  source 1..75: mol_type = other DNA
gcgacgctggcggcgtttgatctcgccttctaatgcggctgttacaaactgccctgtactttcgccgtcttcttt

SEQ ID NO: 660692 - DNA, 75 bp, synthetic construct
  source 1..75: mol_type = other DNA
aggcatttttaccgcctcaacattgttcataacttcatgcggaacccttgccgcaactgtttgtgattttgcgtt

SEQ ID NO: 660693 - DNA, 75 bp, synthetic construct
  source 1..75: mol_type = other DNA
ttatgcaactactattccgcgcgtctgacaccgcttcccggacctgactcctccagggaaagcaatcatcgactg

SEQ ID NO: 660694 - DNA, 75 bp, synthetic construct
  source 1..75: mol_type = other DNA
gcaatcgaatcagatccaaagaaaccaatgttgattactttatcatcaaataaagtatacgttggaataataaat

SEQ ID NO: 660695 - DNA, 75 bp, synthetic construct
  source 1..75: mol_type = other DNA
gctttatccaggctgcaagagaatcatcgccgtcctgttgttgtgctttttccatcttttcccgtaagtcaggat

SEQ ID NO: 660696 - DNA, 75 bp, synthetic construct
  source 1..75: mol_type = other DNA
agctatgagaaatcataccacacacccgcaagggcgggactcgcacaacctgaataaatacatctggcgttttat

SEQ ID NO: 660697 - DNA, 75 bp, synthetic construct
  source 1..75: mol_type = other DNA
ataagcttaaataacatcaatatatataatgtccctgctttaggttgtaaaaaaacgagctttttaaattttttc

SEQ ID NO: 660698 - DNA, 75 bp, synthetic construct
  source 1..75: mol_type = other DNA
caatattgaattttttagaaatgaattattgaatgttattcatgaagcatataatattaagaattcaaatcatga

SEQ ID NO: 660699 - DNA, 75 bp, synthetic construct
  source 1..75: mol_type = other DNA
atcagtctggctcgattcgctgccatgcctgcaatgagcgtattttcctagaatactctttaaggtacttctcaa

SEQ ID NO: 660700 - DNA, 75 bp, synthetic construct
  source 1..75: mol_type = other DNA
aacaggaagcacgccagcaatctcctgatggctgcgtgatggtattcactgcccgtattcgccaggaggtggagc

SEQ ID NO: 660701 - DNA, 75 bp, synthetic construct
  source 1..75: mol_type = other DNA
cgtggatgctgagtgcagttatcttccccggcccggatcaactctggccgctgcgcaaagtgagtgaaaaaattg

SEQ ID NO: 660702 - DNA, 75 bp, synthetic construct
  source 1..75: mol_type = other DNA
acaaaatctgtaagcgcggcgagtcttccggcccggacgtttcccgtgaaggcgttcagcgtgacctgctgccgc

SEQ ID NO: 660703 - DNA, 75 bp, synthetic construct
  source 1..75: mol_type = other DNA
gactacggcctgaaagagttcaaattcttcccggcggaagctaatggcggcgtgaaagcactgcaggcgatcgca

SEQ ID NO: 660704 - DNA, 75 bp, synthetic construct
  source 1..75: mol_type = other DNA
gatgcgctggaagcgggcgattacgaccgtattactaagctggcgcgtgaagctgtagaaggcgctaagctgtaa

SEQ ID NO: 660705 - DNA, 75 bp, synthetic construct
  source 1..75: mol_type = other DNA
gaaaaaccgttaccgcgcagaagaactggcagaagaacgtattctcgacgtgctgattccgccgccaaaaaacaa

SEQ ID NO: 660706 - DNA, 75 bp, synthetic construct
  source 1..75: mol_type = other DNA
cgctgaccaccagcgacttcgagcgcattctgaccgaaccgaatgcctctatcaccgtgcagtacaaagcactga

SEQ ID NO: 660707 - DNA, 75 bp, synthetic construct
  source 1..75: mol_type = other DNA
cacattctgtttatcgcttctggtgcattccaggtagcgaaaccgtctgacctgatcccggaactgcaaggtcgt

SEQ ID NO: 660708 - DNA, 75 bp, synthetic construct
  source 1..75: mol_type = other DNA
ccttctggcacgatttagcggctccggtcattgctggcattctcgccagtctgatcgtgagctggctgaataagc

SEQ ID NO: 660709 - DNA, 75 bp, synthetic construct
  source 1..75: mol_type = other DNA
gccttctggcatgatttagcggctccggtcattgctggcattcttgccagtatgatcgtgaactggctgaataag

SEQ ID NO: 660710 - DNA, 75 bp, synthetic construct
  source 1..75: mol_type = other DNA
acgaaagaactgaacaaaaaccgggaatcatgggctgcatttcagggggttccattacctgcggccaaagagact

SEQ ID NO: 660711 - DNA, 75 bp, synthetic construct
  source 1..75: mol_type = other DNA
tgatgctaccggtaaaaaactgtttagcggtatgcagcgtaaagacggtaatttgaacttaaccggccaggcacc

SEQ ID NO: 660712 - DNA, 75 bp, synthetic construct
  source 1..75: mol_type = other DNA
ccaacggcaacaacgccagatggcgctgcgccgctaccaaccgatcaggctggcgtgactacgccggcggctgat

SEQ ID NO: 660713 - DNA, 75 bp, synthetic construct
  source 1..75: mol_type = other DNA
ctgcgccgttgccaaccgatcaggctggcgtgaccacgccggcggctgatccgaatgcgctggtgatgaacttta

SEQ ID NO: 660714 - DNA, 75 bp, synthetic construct
  source 1..75: mol_type = other DNA
gaagagggttgaatcgattgttaattgtcaaactgacggtttgtatcacctgaacataaccaaatctcctagcac

SEQ ID NO: 660715 - DNA, 75 bp, synthetic construct
  source 1..75: mol_type = other DNA
gataagagcgattatctagaagaacagcgtaaagcttacttggcatggtgggagaggattgaatcgataattact

SEQ ID NO: 660716 - DNA, 75 bp, synthetic construct
  source 1..75: mol_type = other DNA
gacaagagcaattatctagaagaacagcgtaaagcctaccaagcgtggtgggagagggttgaatcactcgttact

SEQ ID NO: 660717 - DNA, 75 bp, synthetic construct
  source 1..75: mol_type = other DNA
gattttgatttcattaataaggtatggactgtaccgccagaacgacataagacaggggatataacaggcgaaccg

SEQ ID NO: 660718 - DNA, 75 bp, synthetic construct
  source 1..75: mol_type = other DNA
aactgtttgaacgtaagctggaaatgcatcagggccatctggtcaaagccgccgttgagctggcgaaagactggc

SEQ ID NO: 660719 - DNA, 75 bp, synthetic construct
  source 1..75: mol_type = other DNA
gcaaaatcaattattgaattcaaaaaaagatataaacatctgttagtgcaacatcattatatctcaggactcatt

SEQ ID NO: 660720 - DNA, 75 bp, synthetic construct
  source 1..75: mol_type = other DNA
gcgtataagagaaagctcattgaaactcgcccgctgtcggatatcacgggtaaagatatggatatccgtaaaggt

SEQ ID NO: 660721 - DNA, 75 bp, synthetic construct
  source 1..75: mol_type = other DNA
gtggccgcattgtggtacgaaatgaaaaaaaaccagaatctcgcccacaatacgatcaaggacatctggcgctcg

SEQ ID NO: 660722 - DNA, 75 bp, synthetic construct
  source 1..75: mol_type = other DNA
tgctggtgtctcatggattacgcgccatattcagcacagcagcgaacgaggaaggattcgagccggacgtaatag

SEQ ID NO: 660723 - DNA, 75 bp, synthetic construct
  source 1..75: mol_type = other DNA
atgaaattaaaattctttatgctgcgatcgatggttctcgaatggttcccaaataccgggccttcattaaactat

SEQ ID NO: 660724 - DNA, 75 bp, synthetic construct
  source 1..75: mol_type = other DNA
ttaacgcgccaagcgttaagaacatgccagcaatacgccctgaagaactccccgaatttatgcagaagctggcaa

SEQ ID NO: 660725 - DNA, 75 bp, synthetic construct
  source 1..75: mol_type = other DNA
ccggcatcagagataagcaaggcatttaacgcgccaagcgttaagaacatgccagcaatacgccctgaagaactc

SEQ ID NO: 660726 - DNA, 75 bp, synthetic construct
  source 1..75: mol_type = other DNA
acctggaaacactgaaacgcgttttacagcgcatcaatgaagtgatggattttgctgccaacagtggaatgattg

SEQ ID NO: 660727 - DNA, 75 bp, synthetic construct
  source 1..75: mol_type = other DNA
gatgttctggtgttttgtcggtctggaagcatttgcccatcttgcctcggaatttaaaaatccagagcgtgattt

SEQ ID NO: 660728 - DNA, 75 bp, synthetic construct
  source 1..75: mol_type = other DNA
gtggcgatgtctcactgccagccgtagggcagggaacatggtatatgggcgaagacgccagtcagcgcaaaaccg

SEQ ID NO: 660729 - DNA, 75 bp, synthetic construct
  source 1..75: mol_type = other DNA
tccaaaagcggccacgattgcccatgtccaacagaatgcggctgtgcttgaggtcgaactttcgtcagcggaatt

SEQ ID NO: 660730 - DNA, 75 bp, synthetic construct
  source 1..75: mol_type = other DNA
gtgccgaaaaggtggttggggaagcattaaccggtctgcgtgagaacgtctttctcgtctctaaagtctatccgt

SEQ ID NO: 660731 - DNA, 75 bp, synthetic construct
  source 1..75: mol_type = other DNA
ctgaacgagcagttgcatgagcgccatgacgccagtgatttcgagacgaatacggaagataagcgtcaggggtaa

SEQ ID NO: 660732 - DNA, 75 bp, synthetic construct
  source 1..75: mol_type = other DNA
tgtcgaagtgaacccaaactcgaagatcccggcgctgcgcgatcatacgcataatccgccgatccgcgtgtttga

SEQ ID NO: 660733 - DNA, 75 bp, synthetic construct
  source 1..75: mol_type = other DNA
actgctcggaagggattctgagtgccgccacaagggatctgcgtcacatttttcacaattcatgtttttcaaata

SEQ ID NO: 660734 - DNA, 75 bp, synthetic construct
  source 1..75: mol_type = other DNA
gctgggggcgattgaagcgctgcagagtcagggtgtgcaaccgggtgaaatcctggtcaccggttttgatgcggt

SEQ ID NO: 660735 - DNA, 75 bp, synthetic construct
  source 1..75: mol_type = other DNA
acccagccactgcgtaaagagattgcccgtctggaaaaagagatggagaagctgaacgcgcaactggcgcaggca

SEQ ID NO: 660736 - DNA, 75 bp, synthetic construct
  source 1..75: mol_type = other DNA
tattgtcactaccgtaccgctgttgtgttttaccgccgctgccacgcgcttgcgtctctcaacgttaggcttttt

SEQ ID NO: 660737 - DNA, 75 bp, synthetic construct
  source 1..75: mol_type = other DNA
ggaatgctggcggacaaaaagcgattaatgcctgcgaagccagcttacgccgtcttaataccgattatctcgatc

SEQ ID NO: 660738 - DNA, 75 bp, synthetic construct
  source 1..75: mol_type = other DNA
cgcttaatgaaatgcgtatatctccacgcccgacattaatacatatgattttgtccagtatggaggataaagcaa

SEQ ID NO: 660739 - DNA, 75 bp, synthetic construct
  source 1..75: mol_type = other DNA
atgagtattgaattaagatcgtcttatgaatatcgtaaaattctcatcgccggaggcatgaaaccggaagatgct

SEQ ID NO: 660740 - DNA, 75 bp, synthetic construct
  source 1..75: mol_type = other DNA
gatgccgcagagtttcttgatgcgggcagttataagcatgtacaacgctgggcgaaagaagtgggcgaacgtccg

SEQ ID NO: 660741 - DNA, 75 bp, synthetic construct
  source 1..75: mol_type = other DNA
ctcagccgtagtggcatggacgacggtcaggccatctggatgaaaaacccactccagtcgcatttcttcaacacc

SEQ ID NO: 660742 - DNA, 75 bp, synthetic construct
  source 1..75: mol_type = other DNA
aatcatatcttctatctctaaatgaggataagccaatatctaagcaaaagctaacacaagaaaataaagatattc

SEQ ID NO: 660743 - DNA, 75 bp, synthetic construct
  source 1..75: mol_type = other DNA
atttttacagaaacagtatcaggcggcttttcccagtgatgcaaatgagcatattcaaataattaaaaatcaagc

SEQ ID NO: 660744 - DNA, 75 bp, synthetic construct
  source 1..75: mol_type = other DNA
gccggtgtctggtgggggctacattactggctgaacgtgctggtggatgaactgctgccgcaaagtctgcgttaa

SEQ ID NO: 660745 - DNA, 75 bp, synthetic construct
  source 1..75: mol_type = other DNA
tcgcgccatttggcgtactgccggaaacggcggtactgaacgtgccgttatccacccgtcagcaccctttgctgc

SEQ ID NO: 660746 - DNA, 75 bp, synthetic construct
  source 1..75: mol_type = other DNA
aacggcggtactgaacgtgccgttatccacccgtcagcaccctttgctgcattcgccgtttttctggctggtaac

SEQ ID NO: 660747 - DNA, 75 bp, synthetic construct
  source 1..75: mol_type = other DNA
gtgcaggagatactaaagtacctgcggcaaaatgtaactcacaagatagattcaaacaatgaaataaaagaatta

SEQ ID NO: 660748 - DNA, 75 bp, synthetic construct
  source 1..75: mol_type = other DNA
cacagaaattaagtgggaagatctcaatggttttaggtttataactggtgataacgtaagattacatgtcagtcc

SEQ ID NO: 660749 - DNA, 75 bp, synthetic construct
  source 1..75: mol_type = other DNA
acgacctgaaacgcatagcggccagtcttgacgatgctggcgcgattgttgaccgcgacacggacgggaaacgcc

SEQ ID NO: 660750 - DNA, 75 bp, synthetic construct
  source 1..75: mol_type = other DNA
tcaaagtttgttgattcatttaaagagcttccttatcctctgcaatggttactaatggttatattttctcaagtt

SEQ ID NO: 660751 - DNA, 75 bp, synthetic construct
  source 1..75: mol_type = other DNA
cattacgaaaacagcttgaggtgcttaataagcaagctggtttaaataacatgcaagcgatacttaaagaattac

SEQ ID NO: 660752 - DNA, 75 bp, synthetic construct
  source 1..75: mol_type = other DNA
ctattttagataagaaagatcgtcaatggctttacgtgcaggttaaatcaggggatgagtttattactggttgga

SEQ ID NO: 660753 - DNA, 75 bp, synthetic construct
  source 1..75: mol_type = other DNA
cttcaatgtctgaaattgtcagggacctttcacgactgggctggacagatgaccgaattggaacagaggctgggc

SEQ ID NO: 660754 - DNA, 75 bp, synthetic construct
  source 1..75: mol_type = other DNA
cttcaatgtctgaaattgtcagggacctatcacgtctgggctggacagatgaacgaattggaacagaggctgggc

SEQ ID NO: 660755 - DNA, 75 bp, synthetic construct
  source 1..75: mol_type = other DNA
cgcgccagggggaaacaccagataacgtcaatgtctgaaattgtcagggacctttcccgtctgggctggacagat

SEQ ID NO: 660756 - DNA, 75 bp, synthetic construct
  source 1..75: mol_type = other DNA
ggtaatccgaatctgaatcctgagaaaagcaaacaatgggaaggcgcgtttgaaggcttaactgctggggttggt

SEQ ID NO: 660757 - DNA, 75 bp, synthetic construct
  source 1..75: mol_type = other DNA
cggaacggaaatttcagcagggtggggaagcaatagttatcagaactatgatgtctctacgcagcaacaactggg

SEQ ID NO: 660758 - DNA, 75 bp, synthetic construct
  source 1..75: mol_type = other DNA
cttcaatgtctgaaattgtcagggacctctcacgactgggctggacagatgatcgaattggaacagaggctgggc

SEQ ID NO: 660759 - DNA, 75 bp, synthetic construct
  source 1..75: mol_type = other DNA
gctgcgagaggtgatcctgccgttgctggacgagtccgatgagccgttcgatgacgacaacctaattgattacgg

SEQ ID NO: 660760 - DNA, 75 bp, synthetic construct
  source 1..75: mol_type = other DNA
gagcgtattggcacagagttgggcatggaccaggatgaagtgctgaggctgaaacagattagcgggctgacagag

SEQ ID NO: 660761 - DNA, 75 bp, synthetic construct
  source 1..75: mol_type = other DNA
ctcatcccggaagggggtatccgcacggatgatgagcggacccaccggtaccattacgacagtcagcaccggctg

SEQ ID NO: 660762 - DNA, 75 bp, synthetic construct
  source 1..75: mol_type = other DNA
cgcgccagggggaaacaccagataacgtcaatgtctgaaattgtcagggacctttcccgactgggctggactgat

SEQ ID NO: 660763 - DNA, 75 bp, synthetic construct
  source 1..75: mol_type = other DNA
cgtgccagggggaaacaccagataacgtcaatgtctgaaattgtcagggacctttcccgcctgggctggaccgat

SEQ ID NO: 660764 - DNA, 75 bp, synthetic construct
  source 1..75: mol_type = other DNA
taatccatgatatgcaagactattttgtcagcttctggggcgagaactgcccgatgatggagcaggtgatcgcga

SEQ ID NO: 660765 - DNA, 75 bp, synthetic construct
  source 1..75: mol_type = other DNA
gtagactgtgtgctgtgggtgaaagcggatgaggtggtagccaacgattataaccccaatgtcatggcaccaagt

SEQ ID NO: 660766 - DNA, 75 bp, synthetic construct
  source 1..75: mol_type = other DNA
gaagcggggagtaaagaggcgtttattcatgccgattacacgctggtagtggataccgcattaaccgggcggcgg

SEQ ID NO: 660767 - DNA, 75 bp, synthetic construct
  source 1..75: mol_type = other DNA
gcgtcgtgaaaacgaactggaagaggcggtaatgagcgaccgtgatactggcgctgcggctgaaccgcgtgcacc

SEQ ID NO: 660768 - DNA, 75 bp, synthetic construct
  source 1..75: mol_type = other DNA
gcggtaaaggcggaaaacgtaaaggttcttcgctgcagcaaggcttccagaagccagctcaggccgttaaccgtg

SEQ ID NO: 660769 - DNA, 75 bp, synthetic construct
  source 1..75: mol_type = other DNA
atcggtatcgagctgggaatggacagggatgaagttctcagactgaaacagattagtggactgtcggagctgttt

SEQ ID NO: 660770 - DNA, 75 bp, synthetic construct
  source 1..75: mol_type = other DNA
agttactgggcagggaagcaggtacgggaaaacgtctgaagggctggttgccagtgacctgtattaatccggaaa

SEQ ID NO: 660771 - DNA, 75 bp, synthetic construct
  source 1..75: mol_type = other DNA
cgcgctggcgcaggtcaccgatcccatcgacattgtgttttgttgtctcggcaccacgcggcgagaagcggggag

SEQ ID NO: 660772 - DNA, 75 bp, synthetic construct
  source 1..75: mol_type = other DNA
acacgctgaatcaaaagctgatcgtgaagaagcacgcgcagcagtacgtggcggtaagggcggaaaacgtaaagg

SEQ ID NO: 660773 - DNA, 75 bp, synthetic construct
  source 1..75: mol_type = other DNA
tcgtgaggcagaagaatcggccaaacgtgaggcgcaacaaaaagctgaacgtgaggccgcagaacaagctaagcg

SEQ ID NO: 660774 - DNA, 75 bp, synthetic construct
  source 1..75: mol_type = other DNA
cctgaaggcagacgtacagggttctgtggaagcaatttccgactccttgctgaaactgtctactgacgaagttaa

SEQ ID NO: 660775 - DNA, 75 bp, synthetic construct
  source 1..75: mol_type = other DNA
tcctgcgtcgtgaaaacgagctggaagaggcggtaatgagcgaccgtgacacgggtgctgcggctgaaccgcgcg

SEQ ID NO: 660776 - DNA, 75 bp, synthetic construct
  source 1..75: mol_type = other DNA
caggctgaagtgctggaactgaaagcggtacgtaaaggtatggcgagcggcgcggttatcgaatccttccttgat

SEQ ID NO: 660777 - DNA, 75 bp, synthetic construct
  source 1..75: mol_type = other DNA
gtgagcaggaagctgcagagctcaagcgtaaagctgaagaagaagcgcgtcgtaaactcgaagaagaagcacgtc

SEQ ID NO: 660778 - DNA, 75 bp, synthetic construct
  source 1..75: mol_type = other DNA
atcgtcagttactgggcagggaagcaggtacgggagaacgtctgaagggctggttgccagtgacctgtattaatc

SEQ ID NO: 660779 - DNA, 75 bp, synthetic construct
  source 1..75: mol_type = other DNA
ccatgaacaactgaaaacggccatgcttcatgcgccggatggtcgtctccgtctgcgtaatgtgctccagcatcc

SEQ ID NO: 660780 - DNA, 75 bp, synthetic construct
  source 1..75: mol_type = other DNA
aaactcgaatacgaagcgccaaacggcttgtttgagttgttaatgcaactgaccgatctctccctgccagatact

SEQ ID NO: 660781 - DNA, 75 bp, synthetic construct
  source 1..75: mol_type = other DNA
cagcttgacctgtgaactctttcctgagtggaaaccggcgtttgacgggttgctggaaaacggaggaattcgtca

SEQ ID NO: 660782 - DNA, 75 bp, synthetic construct
  source 1..75: mol_type = other DNA
attgatcgcaggcatacaatcaagttctgcctgtctgcgaagcagcgcccatacccgacgataaccatacgtggg

SEQ ID NO: 660783 - DNA, 75 bp, synthetic construct
  source 1..75: mol_type = other DNA
ccgtatcatcagtgtgacgactgcggcggccatccatccagtcatcggttcgtctgagaatgacgtgcaactgcg

SEQ ID NO: 660784 - DNA, 75 bp, synthetic construct
  source 1..75: mol_type = other DNA
gcctgtctgcgaagcagcgcccatacccgacgataaccatatgtgggcagctctccgataacatggtgtatacgg

SEQ ID NO: 660785 - DNA, 75 bp, synthetic construct
  source 1..75: mol_type = other DNA
taagaatcacactttatagaataaatactgataatcttcagtgcctgccttgtacacaagtctggtcaagagcaa

SEQ ID NO: 660786 - DNA, 75 bp, synthetic construct
  source 1..75: mol_type = other DNA
acacagcggactatctgaagaccgaggctgatattacggcctatctggatgctgtgatggaggacggcgccccat

SEQ ID NO: 660787 - DNA, 75 bp, synthetic construct
  source 1..75: mol_type = other DNA
acagatagtagcgctcccggcgctaatgttgatttatttaccaaagaagttagcgctagtaattccccagcatta

SEQ ID NO: 660788 - DNA, 75 bp, synthetic construct
  source 1..75: mol_type = other DNA
tctggcctgtgaactgttgccggagtggcgtgcgttttttgatgctctgctggaaaacggagggaaaagcctgtg

SEQ ID NO: 660789 - DNA, 75 bp, synthetic construct
  source 1..75: mol_type = other DNA
tgctgatagacggagaccatgcccagcccacggcaagcaatatctttccgctggcgtatgaagcgccggccggtc

SEQ ID NO: 660790 - DNA, 75 bp, synthetic construct
  source 1..75: mol_type = other DNA
tgtacacaggtctggtcaagagcaatgtacttccgtttatttgcatttcaattattgggtttaacgcttgatcgt

SEQ ID NO: 660791 - DNA, 75 bp, synthetic construct
  source 1..75: mol_type = other DNA
ttgactgggggataacttatcaatatatgggatcgcgatacgattcggactactcatcctggccctataagtcag

SEQ ID NO: 660792 - DNA, 75 bp, synthetic construct
  source 1..75: mol_type = other DNA
caccgcgtgacggctttatcgttccggcagagccggacagtaagggccggggggttccggtgacgatgttgatgc

SEQ ID NO: 660793 - DNA, 75 bp, synthetic construct
  source 1..75: mol_type = other DNA
tcatcagtgatgagcagatcggccgctaccggccgaaaatcatcctcgccgatcaacagacagacaccaccggtg

SEQ ID NO: 660794 - DNA, 75 bp, synthetic construct
  source 1..75: mol_type = other DNA
gcgcgatgatgaaacagataaagtgctgtaccgtcgggcaaaacagcaggttaagtacgagttgactggacaagc

SEQ ID NO: 660795 - DNA, 75 bp, synthetic construct
  source 1..75: mol_type = other DNA
agcgacgtaaatcgcaaactggattatctttttgaccgtgcttcagatgcggattttggcccactgcgcgatgag

SEQ ID NO: 660796 - DNA, 75 bp, synthetic construct
  source 1..75: mol_type = other DNA
cggacgaagaaaaagagcttatcgacaggctggccggaacgaacagatcggactatatgcgccgttgtttgttgg

SEQ ID NO: 660797 - DNA, 75 bp, synthetic construct
  source 1..75: mol_type = other DNA
acggctccccgcaccggagtggaagagcgtgatcttcttgtctgtcaggtggagttttcgctggatgcaaatcac

SEQ ID NO: 660798 - DNA, 75 bp, synthetic construct
  source 1..75: mol_type = other DNA
cgagaagatatagatcgctggcaggtttcttctgtaaatgatgttctgcgtcgtttgcctggcgttgcaatttct

SEQ ID NO: 660799 - DNA, 75 bp, synthetic construct
  source 1..75: mol_type = other DNA
tggaccgctggtgcataccgttagctacgattatacggatgccagaaatgccttaactgacaaaccgttagaacg

SEQ ID NO: 660800 - DNA, 75 bp, synthetic construct
  source 1..75: mol_type = other DNA
atggaactgcatttaaagcgccaaatctcggtcagttatatggttacaaaggtaatccgaatctcgatccagaaa

SEQ ID NO: 660801 - DNA, 75 bp, synthetic construct
  source 1..75: mol_type = other DNA
gacggagtgccgatggctcgtgccggtatcgacaatgcaattgatattagccagttcccggtatcacttgtacag

SEQ ID NO: 660802 - DNA, 75 bp, synthetic construct
  source 1..75: mol_type = other DNA
gatggaattccagtagcacgccctggtatatcgaatagctcagacattgaccagatcccagtctcgctggtccag

SEQ ID NO: 660803 - DNA, 75 bp, synthetic construct
  source 1..75: mol_type = other DNA
actcatctgcaacttggtgaaaatacccgtgtaacacttcttggtgattatacctatactagggggtttgatgct

SEQ ID NO: 660804 - DNA, 75 bp, synthetic construct
  source 1..75: mol_type = other DNA
gacgacaagtaaagccggtacatttacgccagcaaatccattatttggtggttcacaaaccgggaaaaatgaacg

SEQ ID NO: 660805 - DNA, 75 bp, synthetic construct
  source 1..75: mol_type = other DNA
ggataatggtcggattgtattctatctgactgaaaccagaacgtatccacttcatatgctgaacaccaaaaccag

SEQ ID NO: 660806 - DNA, 75 bp, synthetic construct
  source 1..75: mol_type = other DNA
cctttcgatcagcgaattaatgcgcttaacgattttatgaagcacttttcgccagatatcgcgctggcattgttg

SEQ ID NO: 660807 - DNA, 75 bp, synthetic construct
  source 1..75: mol_type = other DNA
gacgcagagccaaacttcgatgtaaatggcaactctccggttactcctgatggttggattggctgtagtgagcga

SEQ ID NO: 660808 - DNA, 75 bp, synthetic construct
  source 1..75: mol_type = other DNA
gcctgaacaaccaggtcttgttgaaactttgcgttcaaaaagtcgtggttctgcactaatagggatcttccaaaa

SEQ ID NO: 660809 - DNA, 75 bp, synthetic construct
  source 1..75: mol_type = other DNA
cgggcatgatcaccaccggattcaatatgaccctgctgcctttaattcagaaaacgggcaatctccagttgcaga

SEQ ID NO: 660810 - DNA, 75 bp, synthetic construct
  source 1..75: mol_type = other DNA
tttcggctctcacggctggagcggcggtgcggtggatcgtctttccacacgcctgcaggatgcaggtttcgaaat

SEQ ID NO: 660811 - DNA, 75 bp, synthetic construct
  source 1..75: mol_type = other DNA
agcatgatgacttacctgacaggcgacgcggtgctgttcagtaacgatgctttcggtcagcactactgcgacgag

SEQ ID NO: 660812 - DNA, 75 bp, synthetic construct
  source 1..75: mol_type = other DNA
ttccagggctatgtttctgatttcccgttcgacttccaggctaatacggtcgtacaaacctcagcaactattcag

SEQ ID NO: 660813 - DNA, 75 bp, synthetic construct
  source 1..75: mol_type = other DNA
gcccacgcggtggtgatttttgctacagcgacggtgagtttgccgccattcttgaggatgtgcgcacggtccgcg

SEQ ID NO: 660814 - DNA, 75 bp, synthetic construct
  source 1..75: mol_type = other DNA
ttatgaagactagggacgctgagttaaaagcagtgtcaaaactctcgtcaggaatatttgatcatattctaccaa

SEQ ID NO: 660815 - DNA, 75 bp, synthetic construct
  source 1..75: mol_type = other DNA
ttcattgggtgggtcaacgtgactgggaagtacgtgattttcacggcacggaatataaaacgctgcgcggcagca

SEQ ID NO: 660816 - DNA, 75 bp, synthetic construct
  source 1..75: mol_type = other DNA
ttccatgacgaaatggttgagcagtacggtcgggttaaacgttttcttccggcggtgttgcgggacctgcatttc

SEQ ID NO: 660817 - DNA, 75 bp, synthetic construct
  source 1..75: mol_type = other DNA
atgacgcaaactctgttagcgattgaaaatttgtcggtgggttttcgccatcagcaaactgttcgtaccgtagtg

SEQ ID NO: 660818 - DNA, 75 bp, synthetic construct
  source 1..75: mol_type = other DNA
actgcgtggagcaaaataacgccactgcgctatttgcctcccctgctcattcttacacgcaaaagctactcaaca

SEQ ID NO: 660819 - DNA, 75 bp, synthetic construct
  source 1..75: mol_type = other DNA
tgcgatggcgctgttaacgcgaccggaattattaattgccgatgaaccgaccaccgcactggacgtctctgtcca

SEQ ID NO: 660820 - DNA, 75 bp, synthetic construct
  source 1..75: mol_type = other DNA
ctggaatacgagacgcgcttctcggaactctttttcgattacttgcactgcattcagtctctggcaggtgccact

SEQ ID NO: 660821 - DNA, 75 bp, synthetic construct
  source 1..75: mol_type = other DNA
ggttcctgaacaagcgagcaaggaagcgactaaatactaatctattcaggattcagccatacccaaaaagcagtt

SEQ ID NO: 660822 - DNA, 75 bp, synthetic construct
  source 1..75: mol_type = other DNA
ggttcaaaggagctgcgcgttgaaaccatatcctgctggctggcccgcacaattattcagacaaagcactattcc

SEQ ID NO: 660823 - DNA, 75 bp, synthetic construct
  source 1..75: mol_type = other DNA
atgtcaaagccaaaatacccttttgaaaagcgccttgaagtcgtgaatcactacttcacaactgatgatggttat

SEQ ID NO: 660824 - DNA, 75 bp, synthetic construct
  source 1..75: mol_type = other DNA
atgcaaacttataacaccaatcccgcttacgaaatggctccccagctcctgacacactttaaccagcatctggat

SEQ ID NO: 660825 - DNA, 75 bp, synthetic construct
  source 1..75: mol_type = other DNA
ctaaacaggatcagaaagaacacggtattattctgggccgtagcaggcttcccgaaaaaagcaaccgcggccgac

SEQ ID NO: 660826 - DNA, 75 bp, synthetic construct
  source 1..75: mol_type = other DNA
gcggcgaacgccagcgggtgatgattgcgatggcgctgttaacgcgaccggaattattaattgccgatgaaccga

SEQ ID NO: 660827 - DNA, 75 bp, synthetic construct
  source 1..75: mol_type = other DNA
atgtggcatcatcctgaaatgcagcgggcttcctgaaaaaagtaatcggggtcgactgtcaacgacggatgaaaa

SEQ ID NO: 660828 - DNA, 75 bp, synthetic construct
  source 1..75: mol_type = other DNA
agcgggcttcctgaaaaaagtaatcggggtcgaccgcgactgggcagccccctgccggagacttattctctggtg

SEQ ID NO: 660829 - DNA, 75 bp, synthetic construct
  source 1..75: mol_type = other DNA
tggctggtcagatggaaccagtatcccgacagccgccgctcctggcgctgaggatgctgttgatggcctggtgct

SEQ ID NO: 660830 - DNA, 75 bp, synthetic construct
  source 1..75: mol_type = other DNA
tgctacccgctggatttaagggtgctcgtgatgcccgttacgccatgtgggtttctatgttgagcatgtggggtt

SEQ ID NO: 660831 - DNA, 75 bp, synthetic construct
  source 1..75: mol_type = other DNA
ttatcctatggaagaggggtcgggacggttagacatagtccctggcgatttttggttgaacaacctttcagacgc

SEQ ID NO: 660832 - DNA, 75 bp, synthetic construct
  source 1..75: mol_type = other DNA
tctaataagccaaaaaggttcacctaaatttgcaggttgggtcttcaacggatttgataaaagaaagaatccagg

SEQ ID NO: 660833 - DNA, 75 bp, synthetic construct
  source 1..75: mol_type = other DNA
attgagtcacgcattgttgttccgcaccataccattttcttgcagtttttttcactctatatcctgccggtcatt

SEQ ID NO: 660834 - DNA, 75 bp, synthetic construct
  source 1..75: mol_type = other DNA
aaaaagtgacctaccgtattcactttaaacgcattgttaaccgtcgcttgatcatgggtctggcagacggcgaag

SEQ ID NO: 660835 - DNA, 75 bp, synthetic construct
  source 1..75: mol_type = other DNA
atggccattacgttggctgaactggtttattccgaactgatcggacttgttcggcgtacacgtgttagctatcct

SEQ ID NO: 660836 - DNA, 75 bp, synthetic construct
  source 1..75: mol_type = other DNA
agattgaggaaagggcaggtagcacaaatgcttatattgtccttccttatgaacaagaagcccagacacaacaag

SEQ ID NO: 660837 - DNA, 75 bp, synthetic construct
  source 1..75: mol_type = other DNA
gtagctaatgataatgaggaggatgtgttagaaaattttgcctctcttattatcaagcagaaacacactagaaca

SEQ ID NO: 660838 - DNA, 75 bp, synthetic construct
  source 1..75: mol_type = other DNA
agaatttgcaaattcactagcttatagacacgggctaaaacgaccaaatggtattgaggcatatttttctaagaa

SEQ ID NO: 660839 - DNA, 75 bp, synthetic construct
  source 1..75: mol_type = other DNA
acaaaggcggggtaggaaaaacgaccctgacttggaacttaagtgtatctctatcggcaaagggaaaatctgttt

SEQ ID NO: 660840 - DNA, 75 bp, synthetic construct
  source 1..75: mol_type = other DNA
caaactatgccgcatctgttatggggggatctccaagcggaggggtaactggtgtcggcggacttcttagcaaag

SEQ ID NO: 660841 - DNA, 75 bp, synthetic construct
  source 1..75: mol_type = other DNA
ttgctggtagttgggccgatatttatcgcattgtccttattccctgccactcggcaatatttttggggatgggtt

SEQ ID NO: 660842 - DNA, 75 bp, synthetic construct
  source 1..75: mol_type = other DNA
ttcgaccaccgcgtgatcgacggtgctgatggtgcccgtttcattaccatcattaacaacacgctgtctgacatt

SEQ ID NO: 660843 - DNA, 75 bp, synthetic construct
  source 1..75: mol_type = other DNA
gcgcaaaccggcatgttaatcgaaaccatgtggctgctgcccgtggcggcaatttacctgtttgctattgccgac

SEQ ID NO: 660844 - DNA, 75 bp, synthetic construct
  source 1..75: mol_type = other DNA
gccgccagcaacgctgagaagatcgcccgtaaaggtggtctgtctgcggagtccgtgcaggcgctacgccgcgag

SEQ ID NO: 660845 - DNA, 75 bp, synthetic construct
  source 1..75: mol_type = other DNA
tattctcactatggcgattcaatcgttgataaaaaaataacagaaaacgaaacatacagttattcacgcatactt

SEQ ID NO: 660846 - DNA, 75 bp, synthetic construct
  source 1..75: mol_type = other DNA
caaaccggcatgttaatcgaaactatgtggttgctgcccgtggcggcgatttacctgtttgctattgccgacagc

SEQ ID NO: 660847 - DNA, 75 bp, synthetic construct
  source 1..75: mol_type = other DNA
ttctggcgatatgtggcgtgttggtccagctgtggacttttggttcactaccgattatcgcgctggggctggcgt

SEQ ID NO: 660848 - DNA, 75 bp, synthetic construct
  source 1..75: mol_type = other DNA
gatcgccgccggtattgtcactaccgtaccgctgttgtgttttaccgccgctgccacgcgcttgcgtctctcaac

SEQ ID NO: 660849 - DNA, 75 bp, synthetic construct
  source 1..75: mol_type = other DNA
caacctggcggcaatccggtgatttaccccggtatgccagaagctgccaaccgggaacgcaatgcgaagatgatt

SEQ ID NO: 660850 - DNA, 75 bp, synthetic construct
  source 1..75: mol_type = other DNA
gcatcagcagctggcgtgaaagaagttaacgttccggatatcggcggtgacgaagttgaagtgaccgaagtgatg

SEQ ID NO: 660851 - DNA, 75 bp, synthetic construct
  source 1..75: mol_type = other DNA
gtatcctgcgcgaagacgttcaggcttacgtgaaagaagctatcaaacgtgcagaagcagctccggcggcgactg

SEQ ID NO: 660852 - DNA, 75 bp, synthetic construct
  source 1..75: mol_type = other DNA
ctggcaactgcattttgggttctggttgctgttttcgcatggcaaggggcgcttgctggcatcctgttttatggc

SEQ ID NO: 660853 - DNA, 75 bp, synthetic construct
  source 1..75: mol_type = other DNA
gaaaatcagggttcaacaaagccccagcgccattgcaatgatgaaagcactcggtggtgtcgctaccccgatggc

SEQ ID NO: 660854 - DNA, 75 bp, synthetic construct
  source 1..75: mol_type = other DNA
acgatcccggtgtcattctggtcctgggtggttgaacattacgcccgtaaaggcatcaatctgggcctgcataca

SEQ ID NO: 660855 - DNA, 75 bp, synthetic construct
  source 1..75: mol_type = other DNA
ccgccagatagcattcgagggagccggttcgcttggcggaacagtagtgaaattatctccggagctgaacaccct

SEQ ID NO: 660856 - DNA, 75 bp, synthetic construct
  source 1..75: mol_type = other DNA
tttccgcatcgcgtcagcggagagaaaccggccctgacccacagccatatccgccagatagcattcgagggcgcc

SEQ ID NO: 660857 - DNA, 75 bp, synthetic construct
  source 1..75: mol_type = other DNA
tatcagatagttcgcattttcggtcaggagccgcaggtcatttttgacggccaggtccggcacggggtggcgcta

SEQ ID NO: 660858 - DNA, 75 bp, synthetic construct
  source 1..75: mol_type = other DNA
cgacagctttcatccggatgtgtcgcagttcgtccgtcagctgcgcggtaaaagcgatgatgccatgtaccttgg

SEQ ID NO: 660859 - DNA, 75 bp, synthetic construct
  source 1..75: mol_type = other DNA
ccttgtacaacagcacatcatttctgtgatggagggcgggcgtgaggcctttgaacggcgcagggaagtttacgg

SEQ ID NO: 660860 - DNA, 75 bp, synthetic construct
  source 1..75: mol_type = other DNA
aacgcctggccgccgtgcggaacaaaatccggcaacagaatgcagtcgtcctcaacaggttacgcgagtttcgtc

SEQ ID NO: 660861 - DNA, 75 bp, synthetic construct
  source 1..75: mol_type = other DNA
ttgtgttcctgttgtccttagttgtaagtgggcaagcgatggcagcttttgtgttgaatggaactcgttttatct

SEQ ID NO: 660862 - DNA, 75 bp, synthetic construct
  source 1..75: mol_type = other DNA
gtgcgtcgccacaatcgtgtagtacgtggcgaggccgtctatcgctgcgttcgctgcggtgaacaactggttgct

SEQ ID NO: 660863 - DNA, 75 bp, synthetic construct
  source 1..75: mol_type = other DNA
atgcgtcgcctgcgggaaaaactcgcccaggccaacctgaagctagggcgtaactacccggagccaaaactctct

SEQ ID NO: 660864 - DNA, 75 bp, synthetic construct
  source 1..75: mol_type = other DNA
tgggctgatacaggcaacatcaataattcttacatttaatggaacaagatcacatgctccattaggattcagttt

SEQ ID NO: 660865 - DNA, 75 bp, synthetic construct
  source 1..75: mol_type = other DNA
cgctttaattcaaggaacttctataattctaactttcaatggcacacgttcctcagcaccgctaggattcagttt

SEQ ID NO: 660866 - DNA, 75 bp, synthetic construct
  source 1..75: mol_type = other DNA
atataacaaatgcacattggtatttgtcattatatgtatcaatgatcctgatagctcgcaatccaagttcaaaat

SEQ ID NO: 660867 - DNA, 75 bp, synthetic construct
  source 1..75: mol_type = other DNA
aatatcgtctgattacgcgttggcagcccaattatacaagtccggttacgcttttaaaaagttgagcgggttggt

SEQ ID NO: 660868 - DNA, 75 bp, synthetic construct
  source 1..75: mol_type = other DNA
taacggtatctacgacgccatgaacaaaggcattgcgatggcacaaggcaagttcgcgttgtttctcaactcggg

SEQ ID NO: 660869 - DNA, 75 bp, synthetic construct
  source 1..75: mol_type = other DNA
aataaaaaaggggatacatctctttacgaccgtagtgataatacttcggagcataataataacggggctggaatt

SEQ ID NO: 660870 - DNA, 75 bp, synthetic construct
  source 1..75: mol_type = other DNA
cagcatgattcatgatgcacgggaaaaggccggtgagctgggcaaagagcaggtcatggtgcctgtcctgaacac

SEQ ID NO: 660871 - DNA, 75 bp, synthetic construct
  source 1..75: mol_type = other DNA
cctgacgctaatcgaaagcgtacagaaccaaaagttctcccgccatatcccggaagattttgccaccctgctgac

SEQ ID NO: 660872 - DNA, 75 bp, synthetic construct
  source 1..75: mol_type = other DNA
cggatgggcgacatcatgaccatcggcaataaccggctggtgctgtttttgtcgttttgccggatcaatgacctc

SEQ ID NO: 660873 - DNA, 75 bp, synthetic construct
  source 1..75: mol_type = other DNA
gaagttatcattcagacagcggcagttctggtggcggctcaagtggcggcggatttagcggaggtggcggttctt

SEQ ID NO: 660874 - DNA, 75 bp, synthetic construct
  source 1..75: mol_type = other DNA
aacgaacttattgcgatagatcgtaactcttctttgacggatttagagcagggacttaagcaggcagatttcatt

SEQ ID NO: 660875 - DNA, 75 bp, synthetic construct
  source 1..75: mol_type = other DNA
tggaaggagcgaacgaaactggttacaggacattcggtccaatttattctgttactgttggtgaagtggcacaat

SEQ ID NO: 660876 - DNA, 75 bp, synthetic construct
  source 1..75: mol_type = other DNA
gttactgttggtgaagtggcacaattaatttaccggtttaaagaaagtcgccaaacattaatcaccgaagatgta

SEQ ID NO: 660877 - DNA, 75 bp, synthetic construct
  source 1..75: mol_type = other DNA
acagttttaatgctacaggaggaacttatatttacagtgagaatggtggtttccggaatgaaacgggagcgttac

SEQ ID NO: 660878 - DNA, 75 bp, synthetic construct
  source 1..75: mol_type = other DNA
ggtgccgcctccagacaggactttttgctgaaaacagaaaaaatagtcattgaagtgaagaaaactcgtaagtct

SEQ ID NO: 660879 - DNA, 75 bp, synthetic construct
  source 1..75: mol_type = other DNA
tatattggcgtggtgccgccgcagattatggggtgggataaagccaatttgtccggcaaagtcaccgttaacgat

SEQ ID NO: 660880 - DNA, 75 bp, synthetic construct
  source 1..75: mol_type = other DNA
aaaacctacggtggtcaggtgtggattgataacaccaaccaaggaaacggagtctacatggttccacagccaccg

SEQ ID NO: 660881 - DNA, 75 bp, synthetic construct
  source 1..75: mol_type = other DNA
tgttcaccgacaatatggtgttaatttgccgcgagggaaatctgatcttacccagcaatagtggacacgcggcta

SEQ ID NO: 660882 - DNA, 75 bp, synthetic construct
  source 1..75: mol_type = other DNA
tcatctatcgggcgattaaaactcactatccgcagcttttactgcgcaacccgcccatcagcgacgcggaaaacc

SEQ ID NO: 660883 - DNA, 75 bp, synthetic construct
  source 1..75: mol_type = other DNA
aagggttgatcctccagctggcgaaaggtggttaccgtgccgaagcggtggcgattctggaaaaacagggtgcta

SEQ ID NO: 660884 - DNA, 75 bp, synthetic construct
  source 1..75: mol_type = other DNA
tcgcggcggcgatcctgataagcgggtgtaaagaagaaaagctggcggtcggggcaccggccccggcgctggcgg

SEQ ID NO: 660885 - DNA, 75 bp, synthetic construct
  source 1..75: mol_type = other DNA
tccaatagagtatctgaatggattgccagcgaaagactttgttaaagtttgtcaaaaggtacagaattttttgct

SEQ ID NO: 660886 - DNA, 75 bp, synthetic construct
  source 1..75: mol_type = other DNA
cagggacttgagtccattcttggcgcgctggatatcgaaggaagctatgataagcaacggacgataactattgcg

SEQ ID NO: 660887 - DNA, 75 bp, synthetic construct
  source 1..75: mol_type = other DNA
aacgctgcgcagtgctgaagccgtctcgctggcactgccgctaagcggtatcacgctttacagcgggctttacat

SEQ ID NO: 660888 - DNA, 75 bp, synthetic construct
  source 1..75: mol_type = other DNA
tggcggtaaacctttaaagagcagggaactgttccggcagtttatgcctaagcgaacggtgaaaacacattatga

SEQ ID NO: 660889 - DNA, 75 bp, synthetic construct
  source 1..75: mol_type = other DNA
gctatggagcccgaatgaagaggaagaccggcagctacgcgaagactgggaagaattaatggatatgattgttct

SEQ ID NO: 660890 - DNA, 75 bp, synthetic construct
  source 1..75: mol_type = other DNA
caaacgggtgttatggataccggttgaaggcgagcgcagcatcccactggcgcagcgtcgcgtaggagcaccgtt

SEQ ID NO: 660891 - DNA, 75 bp, synthetic construct
  source 1..75: mol_type = other DNA
ggatatgcccttaaccccaactcagggcgtcgggtcgtgcttgaaacggataaccggggctatatggaactgaac

SEQ ID NO: 660892 - DNA, 75 bp, synthetic construct
  source 1..75: mol_type = other DNA
aacggtcaggatcaacgatctgctggcaaaacatcagataacctatccggtggtgcgcgatcagctcaacattac

SEQ ID NO: 660893 - DNA, 75 bp, synthetic construct
  source 1..75: mol_type = other DNA
cactccctactatatggcaattgtcggtgtgcaaactaatggcagggagctgaaactcagcgataaggttacaaa

SEQ ID NO: 660894 - DNA, 75 bp, synthetic construct
  source 1..75: mol_type = other DNA
cagatgtatggggggcaggtatgggtggataataccagtgagggaaacagtatctacatggttcctcagccacct

SEQ ID NO: 660895 - DNA, 75 bp, synthetic construct
  source 1..75: mol_type = other DNA
agcgaggagcagacctacggcggccaggtgtggatagacaacgtgtcccagaacggcgatgacgtgtttatcgtg

SEQ ID NO: 660896 - DNA, 75 bp, synthetic construct
  source 1..75: mol_type = other DNA
atccacgccatatgctggtcttcggcccgaacagcctgttccaggaaattctcgatgagtacggcatcccaaatg

SEQ ID NO: 660897 - DNA, 75 bp, synthetic construct
  source 1..75: mol_type = other DNA
caccagaaatgctggctcgtattgcgccggggcgcggatttaacttcagcgacggcaaacagccgctggcgatgg

SEQ ID NO: 660898 - DNA, 75 bp, synthetic construct
  source 1..75: mol_type = other DNA
aactgatttatcgtccgtcatccgttaaagatggccgtaaggatgcggaaaaacaactgaaacttgagcagcgtg

SEQ ID NO: 660899 - DNA, 75 bp, synthetic construct
  source 1..75: mol_type = other DNA
aaaacggtgagcgggcaaatcagcgtggatgctgtaaatgactggggcggagttcagagctatgagattaactaa

SEQ ID NO: 660900 - DNA, 75 bp, synthetic construct
  source 1..75: mol_type = other DNA
accgtttcgtcgtcattagtgaccagtttcaatttattttgaaggaaaagaaaaccgcaaaatcaggaaagaacg

SEQ ID NO: 660901 - DNA, 75 bp, synthetic construct
  source 1..75: mol_type = other DNA
ctggaagcgctgagcaaaaaatggggcgataaagtggtggttgtggcggtcaataccgaccctgaaacggtcagg

SEQ ID NO: 660902 - DNA, 75 bp, synthetic construct
  source 1..75: mol_type = other DNA
agcaacgtgagcctaggtaaaaatgtaagcggaaaaatcagtgtggatgccgtaaatgactggggcggggtgcag

SEQ ID NO: 660903 - DNA, 75 bp, synthetic construct
  source 1..75: mol_type = other DNA
tggttaccctcctttctctctctttctgcggccagtccatggcggcatttgtactaaacggcacccgtttcattt

SEQ ID NO: 660904 - DNA, 75 bp, synthetic construct
  source 1..75: mol_type = other DNA
agctgatttaccgcccggcatccattaaggacggccgcaaggatgcggagaagcaggtgaagctggagcagcgtg

SEQ ID NO: 660905 - DNA, 75 bp, synthetic construct
  source 1..75: mol_type = other DNA
tactgagcaacatgattcgtcagtacttcagccaggaacgaccagaagaagaggccatacaggccctgaatcatc

SEQ ID NO: 660906 - DNA, 75 bp, synthetic construct
  source 1..75: mol_type = other DNA
agcgtatggagctgattgccccggcgcacgttgacaacccgtttcgttttagcttccgcgcgccggaaagcctgc

SEQ ID NO: 660907 - DNA, 75 bp, synthetic construct
  source 1..75: mol_type = other DNA
attattctcgattcgataaaactgaatctggtaccgggttcgcgcattggtctgttaggccgcaacggcgcaggt

SEQ ID NO: 660908 - DNA, 75 bp, synthetic construct
  source 1..75: mol_type = other DNA
gtgggtgaatcaggaaacgccggcgctaccgcaagcggcactggaatatgtcattgatggcgaccgcgaatatcg

SEQ ID NO: 660909 - DNA, 75 bp, synthetic construct
  source 1..75: mol_type = other DNA
gcccgtgaacagtttaccggtgcggtggaccggatatttgacacggcggagagcgtctgtattgcctctgttgca

SEQ ID NO: 660910 - DNA, 75 bp, synthetic construct
  source 1..75: mol_type = other DNA
attattctcgactcgattaaactgaatctggtgccgggttcgcgcattggtctgttaggccgcaacggcgcgggt

SEQ ID NO: 660911 - DNA, 75 bp, synthetic construct
  source 1..75: mol_type = other DNA
agcttccgcgcgccggaaagcctgcctaatccgttattaaagatggaaaaagtcagcgcaggctatggtgatcgc

SEQ ID NO: 660912 - DNA, 75 bp, synthetic construct
  source 1..75: mol_type = other DNA
tccggtggctggcgtatgcgtcttaaccttgcccaggcgctgatttgccgttcagacttgctgctgctcgacgaa

SEQ ID NO: 660913 - DNA, 75 bp, synthetic construct
  source 1..75: mol_type = other DNA
gcgtctgtgttgcctctgttgttcgtacggccctgcgcgctgttcgtgacaccgtggtctctgttgcccgcgcgg

SEQ ID NO: 660914 - DNA, 75 bp, synthetic construct
  source 1..75: mol_type = other DNA
tgacgcagtatggcggtagcattgttcagggttcagccggggtacgtattggtgcccccaccggcgtggcctgtt

SEQ ID NO: 660915 - DNA, 75 bp, synthetic construct
  source 1..75: mol_type = other DNA
ttgctgaaaaatgaaatcagcgccgacggcggcagctacaccttcccgggaagctggcaactggcgtgggtgaat

SEQ ID NO: 660916 - DNA, 75 bp, synthetic construct
  source 1..75: mol_type = other DNA
ttcagacttgctgctgctcgacgaaccgactaaccacctcgatctcgatgccgttatctggctggaaaaatggct

SEQ ID NO: 660917 - DNA, 75 bp, synthetic construct
  source 1..75: mol_type = other DNA
tgcaaagttatatcgaccgtttccgtgccaaagccaccaaagcgaagcaggcccagagccgcattaagatgctcg

SEQ ID NO: 660918 - DNA, 75 bp, synthetic construct
  source 1..75: mol_type = other DNA
ctgatgacccgcctgcaggacgagctgcgcacggaatctgtccgcgctcaggcccgtgaacagtttaccggtgcg

SEQ ID NO: 660919 - DNA, 75 bp, synthetic construct
  source 1..75: mol_type = other DNA
gacggcggtgcaccgcgaggaaggcctgagccagtaccacgcatacgacagccgtggacagttaactgcggtgaa

SEQ ID NO: 660920 - DNA, 75 bp, synthetic construct
  source 1..75: mol_type = other DNA
atttctggcgacacatcctgcagtacggacatcagcaggtgctgtttgttgtgacgcaggccgataaaacggagc

SEQ ID NO: 660921 - DNA, 75 bp, synthetic construct
  source 1..75: mol_type = other DNA
gaccggatatttgatacagcggagagcgtctgtgttgccactgttgcacgcgcggttctgcgtgctgttcgtgac

SEQ ID NO: 660922 - DNA, 75 bp, synthetic construct
  source 1..75: mol_type = other DNA
ggccggatggtggcgcaccgtcacacgggccgaccggaaatccgttaccgttacgacagcgacgggcgggtgaca

SEQ ID NO: 660923 - DNA, 75 bp, synthetic construct
  source 1..75: mol_type = other DNA
gctaacccggattatctgcgtactattgttgatcaggagctactgccgtatgtgcaggtgaaatacgctggtgca

SEQ ID NO: 660924 - DNA, 75 bp, synthetic construct
  source 1..75: mol_type = other DNA
tcagattgcgccagaacaaccgctgggtgataaaaccattgtgcctattcgcgttaccattattgacccgaatgg

SEQ ID NO: 660925 - DNA, 75 bp, synthetic construct
  source 1..75: mol_type = other DNA
gcaaactcaccagtcacgaacccgtgattggcattatggggaaaagcggggccggtaaatcctcactctgtaatg

SEQ ID NO: 660926 - DNA, 75 bp, synthetic construct
  source 1..75: mol_type = other DNA
tatttgacacggcggagagcgtctgtgttgcctctgttgcccgtacggttctgcgtgccgtccgtgacacggtgg

SEQ ID NO: 660927 - DNA, 75 bp, synthetic construct
  source 1..75: mol_type = other DNA
atgaatccgtctgatgccattgaagcaattgaaaaaccgctctcctccctgccttactcactttcccgtcacatc

SEQ ID NO: 660928 - DNA, 75 bp, synthetic construct
  source 1..75: mol_type = other DNA
ttagtgaacagataattgataactcagaaccagtaaaatgcaaaagacgcaccacgctgggaaaatcgctgctat

SEQ ID NO: 660929 - DNA, 75 bp, synthetic construct
  source 1..75: mol_type = other DNA
ccggtcagtgatgttcacgccggcacccgggaagtgcggcgcttccgtctgagtggccacggtcacagcatggtt

SEQ ID NO: 660930 - DNA, 75 bp, synthetic construct
  source 1..75: mol_type = other DNA
gggtaaaagcggggccggtaaatcctcactctgtaatgcgctgtttcagggagaggtcaccccggtcagtgatgt

SEQ ID NO: 660931 - DNA, 75 bp, synthetic construct
  source 1..75: mol_type = other DNA
ccgtacggccctgcgcgcagttcgtgacacggtggtctctgttgcccgcgcggtatggaactggattttcttctg

SEQ ID NO: 660932 - DNA, 75 bp, synthetic construct
  source 1..75: mol_type = other DNA
gattgccgctggcgaaagctatgtgcgtaaaccgatctactcacgcgagggcggtaacgtcaccattttcgatgg

SEQ ID NO: 660933 - DNA, 75 bp, synthetic construct
  source 1..75: mol_type = other DNA
tcctaaccttcttgcatcctggtttgagggtgaaaaaccgcagattgccgctggcgaaagctatgtgcgtaaacc

SEQ ID NO: 660934 - DNA, 75 bp, synthetic construct
  source 1..75: mol_type = other DNA
cagtacaatgccattcaggaacgcctgatctcgcgctttagcgagctttatagccgggagccgttttatttttgc

SEQ ID NO: 660935 - DNA, 75 bp, synthetic construct
  source 1..75: mol_type = other DNA
accggggacatcagcgggtactgtttgtggtgacgcaggccgacaaaacggagccctgccatgaatgggatatgg

SEQ ID NO: 660936 - DNA, 75 bp, synthetic construct
  source 1..75: mol_type = other DNA
ggcgacacatcctgcagtgcggacatcagcaggtgctgtttgtggtgacgcaggctgacaaaacggaaccctgcc

SEQ ID NO: 660937 - DNA, 75 bp, synthetic construct
  source 1..75: mol_type = other DNA
ggcaggcgctgccggaagatctacgcgtaagtccgcatcgttatctggcgacgaacagtccgcaggggccgtggt

SEQ ID NO: 660938 - DNA, 75 bp, synthetic construct
  source 1..75: mol_type = other DNA
tcggtttgggcgtcggcggtgtactgaccgatcttgatgataatgtcatccagcgtgcatttaagctgtatccgc

SEQ ID NO: 660939 - DNA, 75 bp, synthetic construct
  source 1..75: mol_type = other DNA
gcaagcgtcgtgagcaatgggtggagccgttatggaaaagtatcttgagtaataaagggctaatgccgctgcttt

SEQ ID NO: 660940 - DNA, 75 bp, synthetic construct
  source 1..75: mol_type = other DNA
cgcacggttctgcgggccgtccgtgactcggtggtctctgttgcccgcgctgtatggaactggattttcttctga

SEQ ID NO: 660941 - DNA, 75 bp, synthetic construct
  source 1..75: mol_type = other DNA
cggtcctctgctgcgcaagcgccgtgagcaatgggtggagccgctatggaaaagcatattgagcaataaagggtt

SEQ ID NO: 660942 - DNA, 75 bp, synthetic construct
  source 1..75: mol_type = other DNA
cctggttcgatggcgagaaaccgcagattgccgctggcgaaagctatgtgcgtaaaccaatctattcgcgcgaag

SEQ ID NO: 660943 - DNA, 75 bp, synthetic construct
  source 1..75: mol_type = other DNA
agcaggcagggcaggagtcgcggtttatctacattgaagatctcggtttgggcgtcggcggcgtactgaccgatc

SEQ ID NO: 660944 - DNA, 75 bp, synthetic construct
  source 1..75: mol_type = other DNA
ccctgccttactcactttcccgtcacatcctggaacatctgcgcaaactcaccagtcacgaacccgtgattggca

SEQ ID NO: 660945 - DNA, 75 bp, synthetic construct
  source 1..75: mol_type = other DNA
gcgtctgtgcgtattttcatgaaaggagatcactcaataacttccatcgagatcgggtaataacatttgaacaga

SEQ ID NO: 660946 - DNA, 75 bp, synthetic construct
  source 1..75: mol_type = other DNA
gtatatcactcaggatccgattgggctgaaggggggatggaacctgtatacaatatccgttgagtccggtgaata

SEQ ID NO: 660947 - DNA, 75 bp, synthetic construct
  source 1..75: mol_type = other DNA
ccgtgaacagtttaccggtgcggtggaccggatatttgacacggcggagagcgtctgtgcgtattttcatgaaag

SEQ ID NO: 660948 - DNA, 75 bp, synthetic construct
  source 1..75: mol_type = other DNA
tgcgcacggagtctgtccgcactcagacccgtgaacagtttaccggtgcggtggaccggatatttgacacggcgg

SEQ ID NO: 660949 - DNA, 75 bp, synthetic construct
  source 1..75: mol_type = other DNA
caattgaaaaaccgctctcctccctgccttactcactttcccgtcacatccaggaacatctgcgcaaactcacca

SEQ ID NO: 660950 - DNA, 75 bp, synthetic construct
  source 1..75: mol_type = other DNA
agtgcgctcatgacagcacttcccgaccatgccgccagtcccctgatgacccgcctgcaggacgagctgcgcacg

SEQ ID NO: 660951 - DNA, 75 bp, synthetic construct
  source 1..75: mol_type = other DNA
ctgttgtccgtacggccctgcgcgctgttcgtgacacggtggtctctgttgcccgcgctgtatggaactggattt

SEQ ID NO: 660952 - DNA, 75 bp, synthetic construct
  source 1..75: mol_type = other DNA
ggcaggcgctgccggaagaactacgcttaagtccgcatcgttatctggcgacgaacagtccgcaggggccgtggt

SEQ ID NO: 660953 - DNA, 75 bp, synthetic construct
  source 1..75: mol_type = other DNA
ggcaggcgctgccggaagaacttcgcataagtccgcatcgttatctggcgacgaacagtccgcaggggccgtggt

SEQ ID NO: 660954 - DNA, 75 bp, synthetic construct
  source 1..75: mol_type = other DNA
tctttgtggatgcgggaaacaaaaagcaggtcttctggtttgtacgtgttgatgacgaagggtatccggaaatcg

SEQ ID NO: 660955 - DNA, 75 bp, synthetic construct
  source 1..75: mol_type = other DNA
gggtaaaagcggggccggtaaatcctcactctgtaatgccctgtttcagggggaggtcacaccggtcagtgatgt

SEQ ID NO: 660956 - DNA, 75 bp, synthetic construct
  source 1..75: mol_type = other DNA
atctttacgacccgctgggccgcagggtggcaaaacgggtgtggcgacgtgaacgggacctgacgggctggatgt

SEQ ID NO: 660957 - DNA, 75 bp, synthetic construct
  source 1..75: mol_type = other DNA
tttgtctaagaattgctcgccatggtgagtttattgccgcaacttttgaaaaggtgattagcgatgccagcaaca

SEQ ID NO: 660958 - DNA, 75 bp, synthetic construct
  source 1..75: mol_type = other DNA
atacccactgcgcggtcggaattgaacccaaccgtgagcgtatcggtcagttgcttaatgagtcattaatgctgg

SEQ ID NO: 660959 - DNA, 75 bp, synthetic construct
  source 1..75: mol_type = other DNA
agataaaaatactggcgagcaaaaggaattgactgaatggcatcgtgttgctgtatccgggaaactggctgaggt

SEQ ID NO: 660960 - DNA, 75 bp, synthetic construct
  source 1..75: mol_type = other DNA
cgtccatgtgctgcgtttggggcttccatgtgcggtaactgaaatcatcaatgcctacgatacgccggatatgat

SEQ ID NO: 660961 - DNA, 75 bp, synthetic construct
  source 1..75: mol_type = other DNA
tcatgcacagtatctcgatggtcgccgtgaaatgatgcaatggtatgctgactacattgattcactttctgagca

SEQ ID NO: 660962 - DNA, 75 bp, synthetic construct
  source 1..75: mol_type = other DNA
agagtttttggttctcttgatggtgtcatcgatactgtaaaatatgatgtaaaaagtgacgcagaatctacaagt

SEQ ID NO: 660963 - DNA, 75 bp, synthetic construct
  source 1..75: mol_type = other DNA
tgaggcttgcagcagaaaataagacattgaacaagttattgaacccggcaacatctgagggggatttcgtttatg

SEQ ID NO: 660964 - DNA, 75 bp, synthetic construct
  source 1..75: mol_type = other DNA
ggcggcagcaatggctgcttatgatgtctggcatgttgaacacggacataaggccaatcagccttattctaatga

SEQ ID NO: 660965 - DNA, 75 bp, synthetic construct
  source 1..75: mol_type = other DNA
tacgactcgagggagtatttgcttgatggtggcattgttcaggatctgcatttgagctactcgacagcagacaca

SEQ ID NO: 660966 - DNA, 75 bp, synthetic construct
  source 1..75: mol_type = other DNA
cccggaagcgctgccggggtgtcgttccatttctgatgatgacctgtgcgcctggtgtacccgtctgctttaccg

SEQ ID NO: 660967 - DNA, 75 bp, synthetic construct
  source 1..75: mol_type = other DNA
tacactgatcgcatgagcaaaagcgagccagccccgattacaccgccgaacaataaaccatttttattcctcgtt

SEQ ID NO: 660968 - DNA, 75 bp, synthetic construct
  source 1..75: mol_type = other DNA
tttgtcttttttcaccgggaatacatgtatgaatccgtctgatgccattgaggcaattgaaaaaccgctctcctc

SEQ ID NO: 660969 - DNA, 75 bp, synthetic construct
  source 1..75: mol_type = other DNA
ttggcacagtctgtcgcggataatcttgggataaaattgagccaggagcaactgaagcatccactaccaggcccc

SEQ ID NO: 660970 - DNA, 75 bp, synthetic construct
  source 1..75: mol_type = other DNA
caggcggccccggacggtacgtcgtgggagccgcgcaagcgtggcaaagggaagatgctaaaagggctgcccaaa

SEQ ID NO: 660971 - DNA, 75 bp, synthetic construct
  source 1..75: mol_type = other DNA
ttacttgcagggtggcggctaccggaacggggaaacgcctgtacccgctggcacggtgggctattcgcagcaaaa

SEQ ID NO: 660972 - DNA, 75 bp, synthetic construct
  source 1..75: mol_type = other DNA
tcacaggggcggcatgtgccgcagttcaccaccaccacgaccctgcgtatcgacggtcgcgtgctggcgtatgac

SEQ ID NO: 660973 - DNA, 75 bp, synthetic construct
  source 1..75: mol_type = other DNA
tctggcgcaaatctccccaacgaagcacctggtttcagcctgacggatatcactcaggaaaataaaatcagcagt

SEQ ID NO: 660974 - DNA, 75 bp, synthetic construct
  source 1..75: mol_type = other DNA
aaccttatgccggtgatacgtacggtttccactcaccgcttatcgacggaactgaagtggccattgtatttgacg

SEQ ID NO: 660975 - DNA, 75 bp, synthetic construct
  source 1..75: mol_type = other DNA
gactacaactaccgtgaagcgctgaaacctcaggacagtgccgaaagtattttcagtaaggaagggatcaccacc

SEQ ID NO: 660976 - DNA, 75 bp, synthetic construct
  source 1..75: mol_type = other DNA
gcgaactgctgggactggatgccctcaactttgccaacgaaggcaagctggtgatcgccgtagagcgtaacgcgg

SEQ ID NO: 660977 - DNA, 75 bp, synthetic construct
  source 1..75: mol_type = other DNA
tcggcgaccacggggcgactatccttaacctgcgtgagcagctggggctggatggcgaactggtcagcgactgcg

SEQ ID NO: 660978 - DNA, 75 bp, synthetic construct
  source 1..75: mol_type = other DNA
gaagaaggattgccgatggagacactgaaagccgtagtgaccagcatggcagaaaccgcccgcgcggcaggcatt

SEQ ID NO: 660979 - DNA, 75 bp, synthetic construct
  source 1..75: mol_type = other DNA
gtcaaaaagttaattgctggggacgccgttttcatctgcgacgagtgtgtggatgtgtgcaacagaattatccgg

SEQ ID NO: 660980 - DNA, 75 bp, synthetic construct
  source 1..75: mol_type = other DNA
gttaaaaagttaattgctggggacaacgctttcatctgcaacgagtgcgtgaaagattgcaacaacattatccag

SEQ ID NO: 660981 - DNA, 75 bp, synthetic construct
  source 1..75: mol_type = other DNA
aatcccagcacaccgttaaaaagttaattgctggggacgccgttttcatctgcgacgagtgtgtggatgcgtgca

SEQ ID NO: 660982 - DNA, 75 bp, synthetic construct
  source 1..75: mol_type = other DNA
ttaacactgttgaaaactatcttggcagatgtgttgataattatgagttaaaggaaatacctttatttattgatg

SEQ ID NO: 660983 - DNA, 75 bp, synthetic construct
  source 1..75: mol_type = other DNA
gtgacattctgctcgaactggacctggtactgtggctgattaaagccgatgaccgtgccctgtctgtggatgagt

SEQ ID NO: 660984 - DNA, 75 bp, synthetic construct
  source 1..75: mol_type = other DNA
gtagattaaaccattgttcactgctggtaattaatcctggaaataataacgataaacaattttcattgttgttgg

SEQ ID NO: 660985 - DNA, 75 bp, synthetic construct
  source 1..75: mol_type = other DNA
cccaataattacctgttcattcttgtttgcgcaaataacgcatggcaaaacattcctgccgagcgccttcgccta

SEQ ID NO: 660986 - DNA, 75 bp, synthetic construct
  source 1..75: mol_type = other DNA
cctaatgttttcaaaacattcttcagagcattaagcccttacgactacacactgtattgcaggaagtgggtaaaa

SEQ ID NO: 660987 - DNA, 75 bp, synthetic construct
  source 1..75: mol_type = other DNA
gcgtctgtattgcctctgttgcacgcacggttctgcgtgccgtccgtgacacggtggtctctgttgcccgcgcgg

SEQ ID NO: 660988 - DNA, 75 bp, synthetic construct
  source 1..75: mol_type = other DNA
ctgttccggcccgtacatccggttgttgccgtatcggcccgcaccggctgggaactggatacgctggtcagtgcg

SEQ ID NO: 660989 - DNA, 75 bp, synthetic construct
  source 1..75: mol_type = other DNA
caatgccgaacacgatggtcgcaactggcgacgcatacctgaaccactgcgattattggatgatgctgtggagcg

SEQ ID NO: 660990 - DNA, 75 bp, synthetic construct
  source 1..75: mol_type = other DNA
gccaaattggcctcgacagggctaacacatgcccgtatggatggacacaccgacaactatggtgaagacagttac

SEQ ID NO: 660991 - DNA, 75 bp, synthetic construct
  source 1..75: mol_type = other DNA
aaaaatatcccgttgccagtaacaagaccgcacagggtcgcgccgagaaccgccgcgtcgctgtggtgataaaca

SEQ ID NO: 660992 - DNA, 75 bp, synthetic construct
  source 1..75: mol_type = other DNA
caatgccgagcacgacggtcgcaactggcgacgcaaaccggaacctctgcggctattaggtgatgcagtggagca

SEQ ID NO: 660993 - DNA, 75 bp, synthetic construct
  source 1..75: mol_type = other DNA
ggtaattaatcccggaaataataacgataaacaattttcattgttgcttgaggaataccgttcactttttggtct

SEQ ID NO: 660994 - DNA, 75 bp, synthetic construct
  source 1..75: mol_type = other DNA
tggtttaacgtcgatcgccatgaagatgctatcagtctggcgaatcaaacaattgcatcccaggctgcaaccgca

SEQ ID NO: 660995 - DNA, 75 bp, synthetic construct
  source 1..75: mol_type = other DNA
agtatttctggcgacacatcctgctatgcggacatcagcaggtgctgtttgtggtgatgcaggccgataaaacgg

SEQ ID NO: 660996 - DNA, 75 bp, synthetic construct
  source 1..75: mol_type = other DNA
acaaagccgatgtttgttgggcagggcgatcagatattcatgaacgaagtgttcctgaaatatctgacggctccc

SEQ ID NO: 660997 - DNA, 75 bp, synthetic construct
  source 1..75: mol_type = other DNA
atgtgggctgtgaagctgcagcagatgcaggacggacgcctttatatcgcgggtattggtgccggtattgagaat

SEQ ID NO: 660998 - DNA, 75 bp, synthetic construct
  source 1..75: mol_type = other DNA
ctgtttgtggtgacgcaggccgacaaaacggagccctgccatgaatgggatatggccggtattcagccttctccc

SEQ ID NO: 660999 - DNA, 75 bp, synthetic construct
  source 1..75: mol_type = other DNA
agttgtgctgctatgattcctatcccatgctatacatgtatttattttaagccttgggtagatgcaccccatcaa

SEQ ID NO: 661000 - DNA, 75 bp, synthetic construct
  source 1..75: mol_type = other DNA
ttatgacaacggaagttataaagtatgtgaatgcatttaaagggcatattataaataaaagtgatgctcaaaaga

SEQ ID NO: 661001 - DNA, 75 bp, synthetic construct
  source 1..75: mol_type = other DNA
atcgtagaaatacatttattacgtcaaacagtcattacgaattcttcaaaaacgaagacatatggattttagata

SEQ ID NO: 661002 - DNA, 75 bp, synthetic construct
  source 1..75: mol_type = other DNA
cgtagccatgttgctgattttggtatctgcgttgactcgcgctggaagaatcgcggcgtcgccagcgctctgatg

SEQ ID NO: 661003 - DNA, 75 bp, synthetic construct
  source 1..75: mol_type = other DNA
cacaccgctggtggagtacacccgcgaccgcctgcaccgggaaacgctgcgcagcttcggccgttatgaactcac

SEQ ID NO: 661004 - DNA, 75 bp, synthetic construct
  source 1..75: mol_type = other DNA
tattcagccttctcccgcacaggcacagaatattcgcgaaaaaacggaggcggtattccgtctgttccggcccgt

SEQ ID NO: 661005 - DNA, 75 bp, synthetic construct
  source 1..75: mol_type = other DNA
gtcacgaacccgtgattggcattatgggtaaaagcggggccggtaaatcctcactctgtaatgccctgtttcagg

SEQ ID NO: 661006 - DNA, 75 bp, synthetic construct
  source 1..75: mol_type = other DNA
gcccagccggaggtgtattgcaacacactacaggtgcctcatccttccgatcatatgtggcaggagcgactcgcc

SEQ ID NO: 661007 - DNA, 75 bp, synthetic construct
  source 1..75: mol_type = other DNA
aataatcattctcattcgcacttgtccaacactttttgcaaaaaatgcatttgactcgcatttgaaagtcaatga

SEQ ID NO: 661008 - DNA, 75 bp, synthetic construct
  source 1..75: mol_type = other DNA
ggcgaaaccgcggataccctggcgggcctgcgtctgtcgaaagagctgggttaccttggttcgctggcaatctgt

SEQ ID NO: 661009 - DNA, 75 bp, synthetic construct
  source 1..75: mol_type = other DNA
tatctatcaggaatggagaaatcttttttgtttcgcattcaatacaggccttcgaagctcagaattatgtgcatt

SEQ ID NO: 661010 - DNA, 75 bp, synthetic construct
  source 1..75: mol_type = other DNA
aaatataaaatcttacctggatgaatacctaattatctgccagaaccgtaacctgtcaccatcgacaattaaagg

SEQ ID NO: 661011 - DNA, 75 bp, synthetic construct
  source 1..75: mol_type = other DNA
tgcttaataacagaaggattttgtgtttatctgagagccctataatcactcctatgtggaatcactatgccgata

SEQ ID NO: 661012 - DNA, 75 bp, synthetic construct
  source 1..75: mol_type = other DNA
aaagtcatttcctttaggcatacccgcaggattaattgaaagatttcaagaaatggtaaacattccaccagttgg

SEQ ID NO: 661013 - DNA, 75 bp, synthetic construct
  source 1..75: mol_type = other DNA
gcgtccaccaaagcattcaccactcagttaaccgtgttgttgatgctggtggcgaagctgtctcgcctgaaaggt

SEQ ID NO: 661014 - DNA, 75 bp, synthetic construct
  source 1..75: mol_type = other DNA
gcaactacacatattcgttttgtgctgttgtgccagcctcacgaaaacgttcgcgaactggaggtcatgacgggg

SEQ ID NO: 661015 - DNA, 75 bp, synthetic construct
  source 1..75: mol_type = other DNA
gctcagaaatgagcatacttcggcaaaccgcgaaggggtggcttcttttgtgattattgtaaaccaggcgcctgg

SEQ ID NO: 661016 - DNA, 75 bp, synthetic construct
  source 1..75: mol_type = other DNA
cagcgaagagcgagaactagtcaggagattgaaattaatccgcagggacattcattcactgctcgcgtctgttga

SEQ ID NO: 661017 - DNA, 75 bp, synthetic construct
  source 1..75: mol_type = other DNA
cgcgcggcaggtcatggtaaaaagataggcgttgtgcagtttattaaaggcacctggcctaacggcgagcggaat

SEQ ID NO: 661018 - DNA, 75 bp, synthetic construct
  source 1..75: mol_type = other DNA
agatgctcgtgtggcccaggcccaggatgaacgcggtattatcatcgtctttaccggcaatggaaaaggcaaaac

SEQ ID NO: 661019 - DNA, 75 bp, synthetic construct
  source 1..75: mol_type = other DNA
tgtaaacgatatcggaggatttgccaccgctatgggatacgagcagctacgggcttacactggtggtcttcccct

SEQ ID NO: 661020 - DNA, 75 bp, synthetic construct
  source 1..75: mol_type = other DNA
tacttggtcctctttttgatgccagcgagttcgatgaagtcgcatcactagttaagatgtatccaagagcgaaat

SEQ ID NO: 661021 - DNA, 75 bp, synthetic construct
  source 1..75: mol_type = other DNA
ggcgtatcagcgaaaaacctgatcccgccaaccatgtggggctataacgacgacgttcaggactacacctacgat

SEQ ID NO: 661022 - DNA, 75 bp, synthetic construct
  source 1..75: mol_type = other DNA
aggaagctgatgcatgccattatgatatttatgagggcgcgttttttgaacgtgtagtagctgtgcagacacaat

SEQ ID NO: 661023 - DNA, 75 bp, synthetic construct
  source 1..75: mol_type = other DNA
ctacattgcgctgtttacctctatcaatgtggagttatcgctgaaaaacctgctgcaaaagccagttttttatca

SEQ ID NO: 661024 - DNA, 75 bp, synthetic construct
  source 1..75: mol_type = other DNA
acctacgcggtgaacaaagacgcgatcatcaaagcggtttatcagggcgcgggcgtggcagcgaaaaacctgatc

SEQ ID NO: 661025 - DNA, 75 bp, synthetic construct
  source 1..75: mol_type = other DNA
aaaaaaccactggatgacgtgaaagttcgccaggctctgacctacgcggtgaacaaagacgcgatcatcaaagcg

SEQ ID NO: 661026 - DNA, 75 bp, synthetic construct
  source 1..75: mol_type = other DNA
gactacacctacgatcctgaaaaagcgaaagccttgctgaaagaagcgggcctggaaaaaggtttctccatcgac

SEQ ID NO: 661027 - DNA, 75 bp, synthetic construct
  source 1..75: mol_type = other DNA
aatgttgttggtgctaatggtggtgattggcatcatcgccaacccaaacacagtgccacagaagatcgacggttt

SEQ ID NO: 661028 - DNA, 75 bp, synthetic construct
  source 1..75: mol_type = other DNA
attatatgatgctgttgcttctggtactaaggaattatacgaggaagctgatgcatgccattatgatatttatga

SEQ ID NO: 661029 - DNA, 75 bp, synthetic construct
  source 1..75: mol_type = other DNA
gggcgtcacttccggctggtactgaccacgcaggcgcagcgggcagaagaagcccggcagcaggccatttccggc

SEQ ID NO: 661030 - DNA, 75 bp, synthetic construct
  source 1..75: mol_type = other DNA
ggtatatacgggttccacgcattgattatccatgcactgcgtacccgggggattgagcttaaaaactggccaata

SEQ ID NO: 661031 - DNA, 75 bp, synthetic construct
  source 1..75: mol_type = other DNA
cgtgtcagcgtgccgctatttttcatgatttccggctatctcttttttggcgaacgtagcgcccaaccgcgtcat

SEQ ID NO: 661032 - DNA, 75 bp, synthetic construct
  source 1..75: mol_type = other DNA
atacgcgtaccattcgcggacttggcttaatctcccgccattcgttgggtatatacggattccacgccttgatta

SEQ ID NO: 661033 - DNA, 75 bp, synthetic construct
  source 1..75: mol_type = other DNA
acggcattaccgcccctatcgatgtgcatttgatggtgaaaccggtcgatcgcattgtgccggatttcgccgccg

SEQ ID NO: 661034 - DNA, 75 bp, synthetic construct
  source 1..75: mol_type = other DNA
tcgcaaaaagggcaattcgttctgcctcctgctcgttatgtgcgttcctatgcacctgcacagcaaagtgttgcg

SEQ ID NO: 661035 - DNA, 75 bp, synthetic construct
  source 1..75: mol_type = other DNA
gcctcctgctcgttatatgcgttcctatgcacctgcacagcaaagtgttgcggcagggagcgaatggaccaggat

SEQ ID NO: 661036 - DNA, 75 bp, synthetic construct
  source 1..75: mol_type = other DNA
gctcgttatgtgcgttcctatgcacctgcgcagcaaagtgttgcggcagggagtgaatggaccgggatgcaggtg

SEQ ID NO: 661037 - DNA, 75 bp, synthetic construct
  source 1..75: mol_type = other DNA
agtgtctaccggctcgctgattatggtcttcgaagtcgcgggtgaagcaggcgcggcagctccggcggctaaaca

SEQ ID NO: 661038 - DNA, 75 bp, synthetic construct
  source 1..75: mol_type = other DNA
tttcccgttgatcaagtgtacgacaatgcctggcattatttccaaccggcaaaaaagatctcccctgatcgcccg

SEQ ID NO: 661039 - DNA, 75 bp, synthetic construct
  source 1..75: mol_type = other DNA
gttttttattactggaatgtgaggaactgcgtacagcgcgacgatggggtgaatgccatgaatcagacagcattt

SEQ ID NO: 661040 - DNA, 75 bp, synthetic construct
  source 1..75: mol_type = other DNA
ggtgtcagaggagaagaatcatttccttgtggtggatggttttcatcgtcagttactgggcagggagggcgatac

SEQ ID NO: 661041 - DNA, 75 bp, synthetic construct
  source 1..75: mol_type = other DNA
tttgtgctgtgggtgaaaacggatgaggtggtggctaacgattacaatcccaatgtcatggcgccaggggagaaa

SEQ ID NO: 661042 - DNA, 75 bp, synthetic construct
  source 1..75: mol_type = other DNA
ggtgtcagaggaaaaggagcattacctggtggtggacggttatcaccgtcagttactgggacgcgggaggaatgc

SEQ ID NO: 661043 - DNA, 75 bp, synthetic construct
  source 1..75: mol_type = other DNA
gctcatgatgttcaccaccatgtgccttcccctgctgttacgcccgctgtccgtgttctttcgcaaaatatgcag

SEQ ID NO: 661044 - DNA, 75 bp, synthetic construct
  source 1..75: mol_type = other DNA
tgaaaaaagatggcttcacacaaccattggtggtgtcagaagagaagagtcattatctggtggtggatggttttc

SEQ ID NO: 661045 - DNA, 75 bp, synthetic construct
  source 1..75: mol_type = other DNA
agtgtcagaggagaagagccattacctggtggtggatggttttcatcgtcagttactgggcagggaagcgggcac

SEQ ID NO: 661046 - DNA, 75 bp, synthetic construct
  source 1..75: mol_type = other DNA
agtggctatcctcggcgtttccaagtccgcgatggagccggtgtggaatggtaaagagttcgtgccgcgtctgat

SEQ ID NO: 661047 - DNA, 75 bp, synthetic construct
  source 1..75: mol_type = other DNA
tgcaccgcctttgagtaatgaaggaatgaaacagaatctttctaatctcgttcctgatcaatataaaggcgctgg

SEQ ID NO: 661048 - DNA, 75 bp, synthetic construct
  source 1..75: mol_type = other DNA
ctgggcggtgtagacgttaaccagatgaacaatattgagcaatgggcctacaaaaacggcgttgattcaatgatg

SEQ ID NO: 661049 - DNA, 75 bp, synthetic construct
  source 1..75: mol_type = other DNA
ttacagaatgggcgtatagaaacggcgttgactctatgatgggtgatcaaggggctaggaaatacctggatcaga

SEQ ID NO: 661050 - DNA, 75 bp, synthetic construct
  source 1..75: mol_type = other DNA
agggatggcttttcgatgataatgcttcttctgtgtcagatgtaaaaatgtcagtcagcgaagcaccgataacca

SEQ ID NO: 661051 - DNA, 75 bp, synthetic construct
  source 1..75: mol_type = other DNA
aatccaacgtgcaaggcttggcggtgtagacgttaaccagatgtacaacgttacagaatgggcctatagacacgg

SEQ ID NO: 661052 - DNA, 75 bp, synthetic construct
  source 1..75: mol_type = other DNA
caaagtgaaaactggctcgctgattatgatcttcgaagttgaaggcgcagcacctgcggcagctcctgcgaaaca

SEQ ID NO: 661053 - DNA, 75 bp, synthetic construct
  source 1..75: mol_type = other DNA
cagcgacgaagttgaagtgaccgaaatcctggtgaaagttggcgataaagttgaagctgaacagtcgctgatcac

SEQ ID NO: 661054 - DNA, 75 bp, synthetic construct
  source 1..75: mol_type = other DNA
tccaagtccgcgatggaacctgtgtggaatggtaaagagttcgtgccgcgtctgatgctgccgatttctctctcc

SEQ ID NO: 661055 - DNA, 75 bp, synthetic construct
  source 1..75: mol_type = other DNA
gacttcgaggcgcatttccgctacgactggaacgaccccggccccggcgactggtcgcactggcgggtgcggcgg

SEQ ID NO: 661056 - DNA, 75 bp, synthetic construct
  source 1..75: mol_type = other DNA
ccaatatttcgtatggactctaaatcaggacaaacagtcagaattgtatatacaggcgagtcactaccgaaagac

SEQ ID NO: 661057 - DNA, 75 bp, synthetic construct
  source 1..75: mol_type = other DNA
agtgtctaccggctcgctgattatgatcttcgaagttgcgggtgaagcaggtgcggcagctccggctccggcggc

SEQ ID NO: 661058 - DNA, 75 bp, synthetic construct
  source 1..75: mol_type = other DNA
taatgattgtgttatggtcaggcattatctcgcatggacgaaataagctccttgaactggcaggaaaatgccata

SEQ ID NO: 661059 - DNA, 75 bp, synthetic construct
  source 1..75: mol_type = other DNA
ataaattagattttcagcacgaagccaggatattaaacggcatatggctcattaccgctttgggtatggtggcaa

SEQ ID NO: 661060 - DNA, 75 bp, synthetic construct
  source 1..75: mol_type = other DNA
aggttaatccagaaccagtcttatccgtttgtactgaatgtggatgttgccagcgactcttttatgcagacggca

SEQ ID NO: 661061 - DNA, 75 bp, synthetic construct
  source 1..75: mol_type = other DNA
ctctggcgatccgcttgggttgaagggattaagcggtaagcgccagccatttgattaccagaatagcgaggtgcg

SEQ ID NO: 661062 - DNA, 75 bp, synthetic construct
  source 1..75: mol_type = other DNA
ggctaccgcgagcagatggcactgcttgaggaccagttcaataagtggatcaagacgcacgatcgctacgatgag

SEQ ID NO: 661063 - DNA, 75 bp, synthetic construct
  source 1..75: mol_type = other DNA
aatgagacaaaaccggttggtacggtgatgaccgcgactgagatcagcagtgtttccggtcgtataaaccagttg

SEQ ID NO: 661064 - DNA, 75 bp, synthetic construct
  source 1..75: mol_type = other DNA
aaatgggaaagtaacaccgccatcgcaccagcacagtgaggagctcattgaatttgccattgattacctgaagaa

SEQ ID NO: 661065 - DNA, 75 bp, synthetic construct
  source 1..75: mol_type = other DNA
ctgatctggttaaccatgcgagtgagttccttgttatcggcgatcgctcatggcgtgtaggccaatactacgatt

SEQ ID NO: 661066 - DNA, 75 bp, synthetic construct
  source 1..75: mol_type = other DNA
ttattggccagcacccctggtattgcggtttcaccgtatggcgggattgttccgttcgcccgcgccaccagcggc

SEQ ID NO: 661067 - DNA, 75 bp, synthetic construct
  source 1..75: mol_type = other DNA
tgagccaatgcgagcagcggagccgttgaactggaggcagaaagagtatctgcgagggctgattaacgatatagc

SEQ ID NO: 661068 - DNA, 75 bp, synthetic construct
  source 1..75: mol_type = other DNA
atcatcactgcctgaaaattattaatctcgctatcagatgcctgaaagacgaaaacaccagagttatgaaacgca

SEQ ID NO: 661069 - DNA, 75 bp, synthetic construct
  source 1..75: mol_type = other DNA
tgacaagcgatgactggaatatcacgatcagtaaagatggaaaagtaacaccagcatcgcaccagcacagtgagg

SEQ ID NO: 661070 - DNA, 75 bp, synthetic construct
  source 1..75: mol_type = other DNA
cgtattgaggttcgtgccgacgggcagattgataaccaggctcttaaagcgaagctgattcatcgtttcgaaagc

SEQ ID NO: 661071 - DNA, 75 bp, synthetic construct
  source 1..75: mol_type = other DNA
ggcaggcgctgccggaagaccttcgcctaagtccgcatcgttatctggcgacgaacagtccgcaggggccgtggt

SEQ ID NO: 661072 - DNA, 75 bp, synthetic construct
  source 1..75: mol_type = other DNA
ggcaggcgctgccggaagacctccgcttaagtccgcatcgttatctggcgacgaacagtccgcaggggccgtggt

SEQ ID NO: 661073 - DNA, 75 bp, synthetic construct
  source 1..75: mol_type = other DNA
gtcgttgtacccacccaataccacattgctaccgctgctctgtatcgtcatgcttccggcatggctgttattagc

SEQ ID NO: 661074 - DNA, 75 bp, synthetic construct
  source 1..75: mol_type = other DNA
ggcaggcgctgccggaagatcttcgcttaagtccgcatcgttatctggcgacgaacagtccgcaggggccgtggt

SEQ ID NO: 661075 - DNA, 75 bp, synthetic construct
  source 1..75: mol_type = other DNA
ggcaggcgctgccggaagatctgcgcataagtccgcatcgttatctggcgacgaacagtccgcaggggccgtggt

SEQ ID NO: 661076 - DNA, 75 bp, synthetic construct
  source 1..75: mol_type = other DNA
gacagcacttcccgaccatgccgccagtcccctgatgacccgcctgcaggacgagctgcgcacggaatctgtccg

SEQ ID NO: 661077 - DNA, 75 bp, synthetic construct
  source 1..75: mol_type = other DNA
aggttgagcatattcagatcctcgcctgtggtacttcttataactccggtatggtttcccgctactggtttgaat

SEQ ID NO: 661078 - DNA, 75 bp, synthetic construct
  source 1..75: mol_type = other DNA
ttgaagaagttcgcgcgcgtggcggccaattgtatgtcttcgccgatcaggatgcgggttttgtaagtagcgata

SEQ ID NO: 661079 - DNA, 75 bp, synthetic construct
  source 1..75: mol_type = other DNA
gcaccattggcatttacagcaataaagacgagatcaagcaggcaatggacgcagcaagtgcgcgcattgcagcag

SEQ ID NO: 661080 - DNA, 75 bp, synthetic construct
  source 1..75: mol_type = other DNA
atcggctctttgcaccgttaatggcggcggcgactggtgctctgaccacaagtctattttttcatcctcattttt

SEQ ID NO: 661081 - DNA, 75 bp, synthetic construct
  source 1..75: mol_type = other DNA
tccggcatggctgttattagcaggtaagccgatgatgatggtcaatcgtccgaagcaacagccaccccacgataa

SEQ ID NO: 661082 - DNA, 75 bp, synthetic construct
  source 1..75: mol_type = other DNA
tgttgttattatcgcttcccgccgtggcggttgggattgcgtccagtcttattctgattacggtgatgaaaatcg

SEQ ID NO: 661083 - DNA, 75 bp, synthetic construct
  source 1..75: mol_type = other DNA
aatgagacaaaaccggttggtacggtgatgactgcgactgagatcagcagtgtttccggtcgtataaaccagctg

SEQ ID NO: 661084 - DNA, 75 bp, synthetic construct
  source 1..75: mol_type = other DNA
caggttgatttaagcgagctgggaccgaacgccgacgaactgctgtcgaaggttgagcatattcagatccttgcc

SEQ ID NO: 661085 - DNA, 75 bp, synthetic construct
  source 1..75: mol_type = other DNA
aaagagatcctgaataagctgcgtatcggcgcgtctaataacgagatcgctcgttcgttgttcatcagcgaaaat

SEQ ID NO: 661086 - DNA, 75 bp, synthetic construct
  source 1..75: mol_type = other DNA
atgatcgattcgaatgccaaactgcgatcgattcagatgccattttgcacaggctctattattcttctggatatg

SEQ ID NO: 661087 - DNA, 75 bp, synthetic construct
  source 1..75: mol_type = other DNA
taccttcgtttctgaaaccgacacagaagtgattgctcacctggtgaactgggaactgaaacagggcggcactct

SEQ ID NO: 661088 - DNA, 75 bp, synthetic construct
  source 1..75: mol_type = other DNA
ttctacaccgttccgctgcaactgctggcttaccacgttgcgctgatcaaaggcaccgacgttgaccagccgcgt

SEQ ID NO: 661089 - DNA, 75 bp, synthetic construct
  source 1..75: mol_type = other DNA
ggcgagctgaaacacggcccgctggcgctgattgacgcggatatgccggttatcgtcgttgcaccgaacaacgaa

SEQ ID NO: 661090 - DNA, 75 bp, synthetic construct
  source 1..75: mol_type = other DNA
cctttccttacggtcatggaaacgttgcaatataaaccggcagagagcgcagccaaagtacagtgcccagttttg

SEQ ID NO: 661091 - DNA, 75 bp, synthetic construct
  source 1..75: mol_type = other DNA
gaacaaagacgcgatcatcaaagcggtttatcagggcgcgggcgtatcagcgaaaaacctgatcccgccaaccat

SEQ ID NO: 661092 - DNA, 75 bp, synthetic construct
  source 1..75: mol_type = other DNA
cttcgaaggcatgggcttgccagagctgatcagtgaagtgaaaaaggtggacgacaacaccgttcagtttgtgct

SEQ ID NO: 661093 - DNA, 75 bp, synthetic construct
  source 1..75: mol_type = other DNA
tctcccagacaaaaacctgtaagtcaatcctgtactattgatcctataactcaacaacctgttggtaggtttata

SEQ ID NO: 661094 - DNA, 75 bp, synthetic construct
  source 1..75: mol_type = other DNA
gggttatggctgtttctgccaaaacgaaaaacgccggaaaatggcataaccacatcatccggcgtttcgacatta

SEQ ID NO: 661095 - DNA, 75 bp, synthetic construct
  source 1..75: mol_type = other DNA
cgtgtatgcattgatcatgctggcggggctgtggttgttcctgccgaaacgaaaaacgccggaaaatggcataac

SEQ ID NO: 661096 - DNA, 75 bp, synthetic construct
  source 1..75: mol_type = other DNA
ttgaagaagttcgcgcgcgtggcggccaattgtatgtcttcgccgatcaggatgctggttttgtggggagcgata

SEQ ID NO: 661097 - DNA, 75 bp, synthetic construct
  source 1..75: mol_type = other DNA
ggcaggcgctgccggaagagcttcgcgtaagtccgcatcgttatctggcgacgaacagtccgcaggggccgtggt

SEQ ID NO: 661098 - DNA, 75 bp, synthetic construct
  source 1..75: mol_type = other DNA
aaacaggccgacgctgatcggataaacctggcccttggcaacatcacggaggaagaaattgccgccagaaacgag

SEQ ID NO: 661099 - DNA, 75 bp, synthetic construct
  source 1..75: mol_type = other DNA
aatctgtgggttgagcgtctcgatgtgctggctggaaatcatgaaaatattgttatgctgaaggtggctaaatga

SEQ ID NO: 661100 - DNA, 75 bp, synthetic construct
  source 1..75: mol_type = other DNA
gtggcggagtgggaagaaataaaacaaatgacactaattgagatggatggttttctgaaaggtaaatgcatccca

SEQ ID NO: 661101 - DNA, 75 bp, synthetic construct
  source 1..75: mol_type = other DNA
ggaagatgatattactgaaacccaagccaccgatgcttttctggctgaagtacgggcgcagggcgtggagatgtt

SEQ ID NO: 661102 - DNA, 75 bp, synthetic construct
  source 1..75: mol_type = other DNA
agctagtgaggcttaaatatgcgacggacgccctgctgcattgtgcagaccaacttcgcaagggagtgcattcat

SEQ ID NO: 661103 - DNA, 75 bp, synthetic construct
  source 1..75: mol_type = other DNA
cctgatgatcaccttgtcacagtccggcgagaccgcagataccctggctggcctgcgtctgtcaaaagagctggg

SEQ ID NO: 661104 - DNA, 75 bp, synthetic construct
  source 1..75: mol_type = other DNA
ccgcatatcgtggagcacatcacagcgcatcagatgcccggtcagcaaaaaacctataaccattcacgctattta

SEQ ID NO: 661105 - DNA, 75 bp, synthetic construct
  source 1..75: mol_type = other DNA
ggcaggcgctgccggaagagctgcgcttaagtccgcatcgttatctggcgacgaacagtccgcaggggccgtggt

SEQ ID NO: 661106 - DNA, 75 bp, synthetic construct
  source 1..75: mol_type = other DNA
gaagatttaatgccgctacaggcgttcctctcccatgcggcgctcgaagcaggtgaagggcaggcggatacctgg

SEQ ID NO: 661107 - DNA, 75 bp, synthetic construct
  source 1..75: mol_type = other DNA
agcggtttatggaactgattgacgccttagcgcaagaaactgccgatatgccgctgcatgtacagactgaccggg

SEQ ID NO: 661108 - DNA, 75 bp, synthetic construct
  source 1..75: mol_type = other DNA
caacggcggggcgctcgctgagtgcgccattctctaccgtagcaacgcccagtcgcgtgtactggaagaagcctt

SEQ ID NO: 661109 - DNA, 75 bp, synthetic construct
  source 1..75: mol_type = other DNA
tgcccgcgcggtatggaactggattttcttctgaacccggtggtgatgcaccagactcttgttacagatttttaa

SEQ ID NO: 661110 - DNA, 75 bp, synthetic construct
  source 1..75: mol_type = other DNA
cagtcaatctacggctggcgcggggcgcaggtcgagaatattcagcgtttcctcaatgatttccccggtgctgaa

SEQ ID NO: 661111 - DNA, 75 bp, synthetic construct
  source 1..75: mol_type = other DNA
cgcgcgatcgccagttaacactctggcaggcatgtcgtgaactgttgcaggaaaaagccctcgccggacgtgctg

SEQ ID NO: 661112 - DNA, 75 bp, synthetic construct
  source 1..75: mol_type = other DNA
cccgcaggtatttatcgtcggtatggaagagggaatgttccccagccagatgtcgctggatgaaggtgggcgtct

SEQ ID NO: 661113 - DNA, 75 bp, synthetic construct
  source 1..75: mol_type = other DNA
gggcgaagggcaggcggatacctggcaggacgcggtgcagttgatgacgctacactcggcgaaaggtctggagtt

SEQ ID NO: 661114 - DNA, 75 bp, synthetic construct
  source 1..75: mol_type = other DNA
catatggtttcttattgttattttttctagatataagatataggcttaagatcaaatggttgttgttagtagcta

SEQ ID NO: 661115 - DNA, 75 bp, synthetic construct
  source 1..75: mol_type = other DNA
attgcttcgcgcccacgaactgtggcttaacaagccacatatccttcaacactaccgcgaacgttttaccaacat

SEQ ID NO: 661116 - DNA, 75 bp, synthetic construct
  source 1..75: mol_type = other DNA
gctgctgcgcgcccacgaactgtggcttaacaagccgcatatcctgcaacactaccgcgaacgttttaccaatat

SEQ ID NO: 661117 - DNA, 75 bp, synthetic construct
  source 1..75: mol_type = other DNA
taattaaagactccggcctgcgcaccatgtacgagcaggagaagggcgaaaaaggccagacgcgtatcgaaaact

SEQ ID NO: 661118 - DNA, 75 bp, synthetic construct
  source 1..75: mol_type = other DNA
gtcttccgttgcgaaggctgcctatcatgctcgtacacgtataacagatgaaagaacaggtgatacgtatgatta

SEQ ID NO: 661119 - DNA, 75 bp, synthetic construct
  source 1..75: mol_type = other DNA
cacctgctcatattattgaaagatcctcagcactctggaatgaagttgaaagagtggaacgccagaacaacggtc

SEQ ID NO: 661120 - DNA, 75 bp, synthetic construct
  source 1..75: mol_type = other DNA
aaacaggtgtttcagtggaaagatgaccaggaaattctcggtcagcagcgtcccgttgtctgggtgaatcttcgt

SEQ ID NO: 661121 - DNA, 75 bp, synthetic construct
  source 1..75: mol_type = other DNA
ggaagtggttgaaacgacgcatcctgaagtgattgccgccgcggtaactgaacagccgcaggtgattaccgagtc

SEQ ID NO: 661122 - DNA, 75 bp, synthetic construct
  source 1..75: mol_type = other DNA
tctcacaccttcaatgccaccagaacacatgaggcaaggaagcgcgccaaaacttagtccaccgagccataagaa

SEQ ID NO: 661123 - DNA, 75 bp, synthetic construct
  source 1..75: mol_type = other DNA
agcgtatcgcagaaaactatatctttgatgaagtgttgggtgtcaatgttccacgttcagagtttgaaaaacgag

SEQ ID NO: 661124 - DNA, 75 bp, synthetic construct
  source 1..75: mol_type = other DNA
gaaacagattaagccgcgtcagagtagtttgtttaagcgtttcacactactggtggtaggatatataagagagag

SEQ ID NO: 661125 - DNA, 75 bp, synthetic construct
  source 1..75: mol_type = other DNA
aagtctacaaaacattcagtgaacttgaccttgaaattgttgttgatgtcagaagcttcaccgtgtctgttcttg

SEQ ID NO: 661126 - DNA, 75 bp, synthetic construct
  source 1..75: mol_type = other DNA
cacttcatattagctccagctaatgcaccagaacacatcgtaaaagattctacagcattgtggaatgaagtggaa

SEQ ID NO: 661127 - DNA, 75 bp, synthetic construct
  source 1..75: mol_type = other DNA
agccgctgaaacaaaccgtcctccaatgaagcgtatccatagtgctaaatggcgtagtaaagcagcacaagagca

SEQ ID NO: 661128 - DNA, 75 bp, synthetic construct
  source 1..75: mol_type = other DNA
atttactgagagcgatttcatggcatgaatcccgtaacagggttaatgctatcggcattaaccctgttacgggat

SEQ ID NO: 661129 - DNA, 75 bp, synthetic construct
  source 1..75: mol_type = other DNA
aaaaactaaattgattaaaaaaggcagtaagattaagctgctggggatggttattttaccgtctcagatagtctc

SEQ ID NO: 661130 - DNA, 75 bp, synthetic construct
  source 1..75: mol_type = other DNA
ccaagccgtgcggttaaaccagctcaacttgatagcgatctcgactacagacctactccggcgaccagaaaaaaa

SEQ ID NO: 661131 - DNA, 75 bp, synthetic construct
  source 1..75: mol_type = other DNA
gaattaactgaaatactgacaaaaatatcttttcctgagaaatccgggagcaatccggttaagccggaagaggac

SEQ ID NO: 661132 - DNA, 75 bp, synthetic construct
  source 1..75: mol_type = other DNA
tctggatgtcgccgattggccttattaccgcgctggcggcggggattgcccttctgtgggaggactatcagacct

SEQ ID NO: 661133 - DNA, 75 bp, synthetic construct
  source 1..75: mol_type = other DNA
ggcgatgcgccggggtgttggcggtttctccgggcagtacagcgcaatggcgaaggctatcggcttcaatgctga

SEQ ID NO: 661134 - DNA, 75 bp, synthetic construct
  source 1..75: mol_type = other DNA
gcgcgaggctgcccgtttgactgttgaccgtcaaaagggtgtgaactcacagttaacccagcaactcaccgcagg

SEQ ID NO: 661135 - DNA, 75 bp, synthetic construct
  source 1..75: mol_type = other DNA
cgacggggcccgcggctctctcgaaaatcttgctaggttcatgcgtaacaatcccggcgctgagggttttctgaa

SEQ ID NO: 661136 - DNA, 75 bp, synthetic construct
  source 1..75: mol_type = other DNA
cagcattaaacctgtccgaccccaatacgatggctatgctcatgcagtctatggcccgcaaagaggggtattcga

SEQ ID NO: 661137 - DNA, 75 bp, synthetic construct
  source 1..75: mol_type = other DNA
gcgttctgtcggtaccgaggtcgagcgtcggcagcagtcggcaaacgcccaggtcatgcgcggtaatcaaacgaa

SEQ ID NO: 661138 - DNA, 75 bp, synthetic construct
  source 1..75: mol_type = other DNA
atgtcagtgaggtccgtgaatggcctgcgtggatggactggttgcacgggggacccggtaaagttatccggcagg

SEQ ID NO: 661139 - DNA, 75 bp, synthetic construct
  source 1..75: mol_type = other DNA
gccctggttaatgaaaccatcaaagaaaaaaccggctcccagattacgaccaattatcagggcgtggccctgtcc

SEQ ID NO: 661140 - DNA, 75 bp, synthetic construct
  source 1..75: mol_type = other DNA
caatgtgcgcctgaatgcgtcatggaataacggcggcgataccagtatcggcgccgggtttgcggtgggctggta

SEQ ID NO: 661141 - DNA, 75 bp, synthetic construct
  source 1..75: mol_type = other DNA
tcggggacattatcgggcggctattcttccggcttattgaggggacatccagccttatcaactggtggcaatcgc

SEQ ID NO: 661142 - DNA, 75 bp, synthetic construct
  source 1..75: mol_type = other DNA
tctaccggccgggaagtggcagaccgccaatcaggtgttaattctcgcctcacacagcaacttcaaccgagggtc

SEQ ID NO: 661143 - DNA, 75 bp, synthetic construct
  source 1..75: mol_type = other DNA
ggggattcgatcctcgcagcgtgggccgaacggtgcgcggctggttcggtgatgatgagcctgaacagctcggcc

SEQ ID NO: 661144 - DNA, 75 bp, synthetic construct
  source 1..75: mol_type = other DNA
cagtggatgaggcctttctgtaccgggagtaccgtaaagcccgggaggctggtgaggaagcatttcgtggcttca

SEQ ID NO: 661145 - DNA, 75 bp, synthetic construct
  source 1..75: mol_type = other DNA
tcatgtactttattaattctctcaggcataaggaattaactgaaatactgacaaaaatatcttttcctgaaaaat

SEQ ID NO: 661146 - DNA, 75 bp, synthetic construct
  source 1..75: mol_type = other DNA
tcgctggataagcaaacgcgggagctcatctcgctgtttggcgcgctgacgattgcgctgcgcattctgaacagt

SEQ ID NO: 661147 - DNA, 75 bp, synthetic construct
  source 1..75: mol_type = other DNA
agcctctcccggtttattcgtatcaatcccggggcagagggatttctgaatcgcctgggggtacagacacgggat

SEQ ID NO: 661148 - DNA, 75 bp, synthetic construct
  source 1..75: mol_type = other DNA
tccgcttaagccggaagagggccgctgtaatttgttgtccctgtgtgtgctggcccgggtattctgtactcccaa

SEQ ID NO: 661149 - DNA, 75 bp, synthetic construct
  source 1..75: mol_type = other DNA
tttttactggtgcaaaaaaaagagactatattccggcgtcggaaatatatgaatatttcccggccgggaagggta

SEQ ID NO: 661150 - DNA, 75 bp, synthetic construct
  source 1..75: mol_type = other DNA
acacccagaaagctggctgaagtttccagggagatcatcgtggcgagtgcgcaggaaattgcatggacgccgggg

SEQ ID NO: 661151 - DNA, 75 bp, synthetic construct
  source 1..75: mol_type = other DNA
tgggcattgacgaaaatacccttatggcgatgcgccggggtgtgggtggcttctccgggcagtacagcgcaatgg

SEQ ID NO: 661152 - DNA, 75 bp, synthetic construct
  source 1..75: mol_type = other DNA
tgctgggcattgacgaaaataccctcatggcgatgcgccggggtgtgggtgatttctccgggcagtacagcgcaa

SEQ ID NO: 661153 - DNA, 75 bp, synthetic construct
  source 1..75: mol_type = other DNA
tgctggccccggtattctgtacccccaaaaaactggcagaagtctccagacagatcatcgtgaccagtgcgaagg

SEQ ID NO: 661154 - DNA, 75 bp, synthetic construct
  source 1..75: mol_type = other DNA
atcccggcgcggaaggcttcctgaatcgcctgggcgtacagacccgtgacgccagcggtaacatgcgtgacatgg

SEQ ID NO: 661155 - DNA, 75 bp, synthetic construct
  source 1..75: mol_type = other DNA
cagtacgttctggatgtcgccggttggcctcattaccgcgctggcggcggggattgccctcctgtgggaggacta

SEQ ID NO: 661156 - DNA, 75 bp, synthetic construct
  source 1..75: mol_type = other DNA
ttgcgggggggcttgcgggttcgttggacaccctgcgccgccatatcttggacaacttccctcgtatcgagcaga

SEQ ID NO: 661157 - DNA, 75 bp, synthetic construct
  source 1..75: mol_type = other DNA
cccgcaaaatgagtcagggaaaacgacacaatcaggcgcttatcgccctggcgagacgacgctgcgacgttctgt

SEQ ID NO: 661158 - DNA, 75 bp, synthetic construct
  source 1..75: mol_type = other DNA
caatccaggtcgttattggcgttgatgtaggtaaagacacccatcacgccgttgccgttaatcgttcaggtaaac

SEQ ID NO: 661159 - DNA, 75 bp, synthetic construct
  source 1..75: mol_type = other DNA
ccgataacccggcgttccggctcgtcaattcgtggcgaacacctgtcaagacggggcaataaaaccctcaagggg

SEQ ID NO: 661160 - DNA, 75 bp, synthetic construct
  source 1..75: mol_type = other DNA
gccgcccacactggagagcaaaattatcctcgtgcagggcagtatcccggagatgcagaaagtgctggacagccg

SEQ ID NO: 661161 - DNA, 75 bp, synthetic construct
  source 1..75: mol_type = other DNA
ccactgatggcgctcttcaatgcggtgtccctgatgtccctgaatccggaaccgaaaaagaaagcgtatgaggtt

SEQ ID NO: 661162 - DNA, 75 bp, synthetic construct
  source 1..75: mol_type = other DNA
gttgagtgggggaaaaccgccaacgaccgttctatttcagacagagcatggaacgcagccgcaatggatggcagc

SEQ ID NO: 661163 - DNA, 75 bp, synthetic construct
  source 1..75: mol_type = other DNA
gatggcgacagcgatcttattcaggataactcgttgctgggcggagacttagcaacgcaatatctgatcgataaa

SEQ ID NO: 661164 - DNA, 75 bp, synthetic construct
  source 1..75: mol_type = other DNA
acgccttgcagcagacatagctcaggcactgaccgaacaaaccgtcgtcgttcccggcacgaatgccgctgccgt

SEQ ID NO: 661165 - DNA, 75 bp, synthetic construct
  source 1..75: mol_type = other DNA
gcgcttatcgccctggcgagacgacgctgcgacgttctgttcgccatgatgcgcgacgggactttttataccccg

SEQ ID NO: 661166 - DNA, 75 bp, synthetic construct
  source 1..75: mol_type = other DNA
agtgcgacgcatcgccgacttgcacgccggtgaagctaaaaacgatgcccgcgatgcggctgccatcgccgaagc

SEQ ID NO: 661167 - DNA, 75 bp, synthetic construct
  source 1..75: mol_type = other DNA
gcaccgaaacgcatcaaccttcgcgtgaaatcatgcaacgttatccgacagtgcctactgtgatgatggactggg

SEQ ID NO: 661168 - DNA, 75 bp, synthetic construct
  source 1..75: mol_type = other DNA
tgcaacgttatccgacagtccctactgtgatgatggactgggcgccctttgatggcgatagcgatctcattcagg

SEQ ID NO: 661169 - DNA, 75 bp, synthetic construct
  source 1..75: mol_type = other DNA
actgattttcgggctgtttgccctgaaaaatggcccggaagcctgggcgggattcgtcgactttttacaaaaccc

SEQ ID NO: 661170 - DNA, 75 bp, synthetic construct
  source 1..75: mol_type = other DNA
ttgagtattttcaataaacacgcacaccatgaaccgcccccggaaatcctggagactaaactccctgagaaagag

SEQ ID NO: 661171 - DNA, 75 bp, synthetic construct
  source 1..75: mol_type = other DNA
ctattattgaagccggtcgtgtgagtgttgatggcaaaattgctaaactcggcgatcgcgttgaagttacccctg

SEQ ID NO: 661172 - DNA, 75 bp, synthetic construct
  source 1..75: mol_type = other DNA
gattcgtcgtgcagttaagcgtcacagtcagatgagcggcgggcgccgttctggtggacgtaataataacggtta

SEQ ID NO: 661173 - DNA, 75 bp, synthetic construct
  source 1..75: mol_type = other DNA
taaccccagcggggcaggaaattatccgcatcgctcgtgaagttctgtcaaaagtggacgccattaaatctgttg

SEQ ID NO: 661174 - DNA, 75 bp, synthetic construct
  source 1..75: mol_type = other DNA
acgtgaaaatcgtgaactgcgccgcagcaacaatatccttcgccaggcttccgcttattttgcgaaggcggagtt

SEQ ID NO: 661175 - DNA, 75 bp, synthetic construct
  source 1..75: mol_type = other DNA
ttgaacaggctgaagccctgctgaaacaacgcgagcaggaaagcgatcgttacagtgggcgtgaggatgtgaacc

SEQ ID NO: 661176 - DNA, 75 bp, synthetic construct
  source 1..75: mol_type = other DNA
ctttatgccgctgtatgcgctgggcttcatgggcatgacccgtcgtttgagccagcagattgacccgcagttcca

SEQ ID NO: 661177 - DNA, 75 bp, synthetic construct
  source 1..75: mol_type = other DNA
gaacgtaaacgccttctttggtatcaccacgatgattatcgccatccctaccggggtgaagatcttcaactggct

SEQ ID NO: 661178 - DNA, 75 bp, synthetic construct
  source 1..75: mol_type = other DNA
gacgaaaaaatgggaccagagccaattatcaaaagtctctgggcggtaactgtggttgccaccatcgtaatcctg

SEQ ID NO: 661179 - DNA, 75 bp, synthetic construct
  source 1..75: mol_type = other DNA
acagaacgccccgtgtcacagccagtaccaaccgcacagataaccagtcagatggccggaaatatccgggcatta

SEQ ID NO: 661180 - DNA, 75 bp, synthetic construct
  source 1..75: mol_type = other DNA
ggttggccgaatggccggaagaaggagctgcgccagccaagaataatattcagagtaaatatgccagcacacctg

SEQ ID NO: 661181 - DNA, 75 bp, synthetic construct
  source 1..75: mol_type = other DNA
tttcgttatcggtctgatgaacttggtggttccgctgcagatcggcgcgcgtgacgttgcgttcccgttcctcaa

SEQ ID NO: 661182 - DNA, 75 bp, synthetic construct
  source 1..75: mol_type = other DNA
gtgtatgcaatggctggcatgggggttgcaaaagtcaccactgacttgaaaattaacgacaatcttaatcatggt

SEQ ID NO: 661183 - DNA, 75 bp, synthetic construct
  source 1..75: mol_type = other DNA
ctggtttcacctgccgtggttcagggcgcgcccgatgtgacccgcaacatccagcacgacattgcccgccggatg

SEQ ID NO: 661184 - DNA, 75 bp, synthetic construct
  source 1..75: mol_type = other DNA
gcctgatccgtgtacgttatggcgacattcctctgccaaaagggctgccgcgcggcggctggacggagctggacc

SEQ ID NO: 661185 - DNA, 75 bp, synthetic construct
  source 1..75: mol_type = other DNA
tggattaataaaatcaattggaaatataattttattaatgactggaacgaatgatctcatcaatgaaaattggac

SEQ ID NO: 661186 - DNA, 75 bp, synthetic construct
  source 1..75: mol_type = other DNA
tcacgcaatacaatggcaaatatatcctcgcagtagaaggtaatccgccgctgggcgagcaggggatgttctgta

SEQ ID NO: 661187 - DNA, 75 bp, synthetic construct
  source 1..75: mol_type = other DNA
tcctgctataattccaaaaacagaaagcgaattatccatatatacgcatcatttatttaaaatcagcatcaatga

SEQ ID NO: 661188 - DNA, 75 bp, synthetic construct
  source 1..75: mol_type = other DNA
tgtttacccgacgtgcccttatcactggcgggctgatggttgccattcttgccgccaatgccgtggtgacccgga

SEQ ID NO: 661189 - DNA, 75 bp, synthetic construct
  source 1..75: mol_type = other DNA
cacctgctcatattgttgaaagctcctcaacactctggaatgaagttgaaagagtcgagcgtcaacaaaatggtc

SEQ ID NO: 661190 - DNA, 75 bp, synthetic construct
  source 1..75: mol_type = other DNA
atggcgatttttcatctggattttaaaattgtgaaacgaagcgaaggcatgacttccgttgcgaaagctgcctac

SEQ ID NO: 661191 - DNA, 75 bp, synthetic construct
  source 1..75: mol_type = other DNA
cccctgttctggttgcacctgaaccaaataaatccactaaactgaaaaacccttcttctcaaaacaccagagcga

SEQ ID NO: 661192 - DNA, 75 bp, synthetic construct
  source 1..75: mol_type = other DNA
accactggagatcgtggttgatgtcagaagctttacgattacacatcttgctgaacccgaagagatcattatccc

SEQ ID NO: 661193 - DNA, 75 bp, synthetic construct
  source 1..75: mol_type = other DNA
gatctcacaccatcaagcccctcagagtattcaggaaagtcccatgtttcaaagttgagaccactggcatatcgt

SEQ ID NO: 661194 - DNA, 75 bp, synthetic construct
  source 1..75: mol_type = other DNA
ccactgatgctgaccatgataagcgtatcgcagagaactatgtctatgatgaagtgctgggtgtcaatgttccac

SEQ ID NO: 661195 - DNA, 75 bp, synthetic construct
  source 1..75: mol_type = other DNA
cctggggctgcgtgcaggccgcgcgacccaatccgacgcaggcaacgcctatcgacaaagtcatcaccgacaaac

SEQ ID NO: 661196 - DNA, 75 bp, synthetic construct
  source 1..75: mol_type = other DNA
caggcagatctgacgaatctgcgcgcggcgggttacgataaaccgttcaaaaccgttgccgaaggcgtaacggaa

SEQ ID NO: 661197 - DNA, 75 bp, synthetic construct
  source 1..75: mol_type = other DNA
gtgccaacattattcagaaaagaatatccgcgaagaagtcgaataacagaactcctgtttctcattctgtttatc

SEQ ID NO: 661198 - DNA, 75 bp, synthetic construct
  source 1..75: mol_type = other DNA
gctgaatggcagacagtcagttaccagcgccttatcagtcagcgccatgtgattagtaaggaatgcatgattgcg

SEQ ID NO: 661199 - DNA, 75 bp, synthetic construct
  source 1..75: mol_type = other DNA
gactttattgaatcccgtgaatacgaaaaaccgctgaacgtctacggttattcgaagttcctgtttgatgaatat

SEQ ID NO: 661200 - DNA, 75 bp, synthetic construct
  source 1..75: mol_type = other DNA
cttcaacgtttatggaccacgtgaaggccataagggcagcatggcgagcgtggctttccatctcaacacccagct

SEQ ID NO: 661201 - DNA, 75 bp, synthetic construct
  source 1..75: mol_type = other DNA
gcgcggcgggttacgataaaccgttcaaaaccgttgccgaaggtgtaacggaatacatggcctggctgaatcgcg

SEQ ID NO: 661202 - DNA, 75 bp, synthetic construct
  source 1..75: mol_type = other DNA
agtgcgtggtaaaagcgctgatattcattatctggttaatgtggactgtaaagcgggaatggcggattaccagcg

SEQ ID NO: 661203 - DNA, 75 bp, synthetic construct
  source 1..75: mol_type = other DNA
agtgtgaaggtctggatgctgccggaattgccgcgagcgtaaaacgtgattatcaacaaaatcgcgtggcgcgct

SEQ ID NO: 661204 - DNA, 75 bp, synthetic construct
  source 1..75: mol_type = other DNA
tcacgcaatacaacggcaaatatatccttgcagtagaaggtaacccgccgctgggcgagcaggggatgttttgta

SEQ ID NO: 661205 - DNA, 75 bp, synthetic construct
  source 1..75: mol_type = other DNA
gttattgttgatgggcaaattattggtgcggtgggcgtttctggtttaaccggagcacaagatgcgcaggtcgcg

SEQ ID NO: 661206 - DNA, 75 bp, synthetic construct
  source 1..75: mol_type = other DNA
gtgccgtgggcgtttctggtttaaccggagcacaggatgcgcaggtcgcgaaagcggcagcagcggtgttggcga

SEQ ID NO: 661207 - DNA, 75 bp, synthetic construct
  source 1..75: mol_type = other DNA
tatagttggatcgaagtaccactgaggttgacagcaagagggcatgattttattgctgacttacgtcaaaaggag

SEQ ID NO: 661208 - DNA, 75 bp, synthetic construct
  source 1..75: mol_type = other DNA
gattatggaccgcatgaccatgaacggtggtagatgggtgacgtttaactgggatagctggcgtccaaatgtcag

SEQ ID NO: 661209 - DNA, 75 bp, synthetic construct
  source 1..75: mol_type = other DNA
taacgaaggcctggggggatgtggtggtatcgaaagatatcaatctcgacatccacgaaggtgagttcgtggtgt

SEQ ID NO: 661210 - DNA, 75 bp, synthetic construct
  source 1..75: mol_type = other DNA
gagccaagcgtgtttttactcgatgaaccgctttctaaccttgacgccgcgctgcgtgtacagatgcgtatcgaa

SEQ ID NO: 661211 - DNA, 75 bp, synthetic construct
  source 1..75: mol_type = other DNA
gtgaactggataacgtgctggtgaagtttccgcacgtcaaatatctgttgtgcggacatatccatcaggaactcg

SEQ ID NO: 661212 - DNA, 75 bp, synthetic construct
  source 1..75: mol_type = other DNA
gatggcacgctgactaccgaagtgcaccgtctggcggatacccgttttcaacctgataccgcttcagaaggctac

SEQ ID NO: 661213 - DNA, 75 bp, synthetic construct
  source 1..75: mol_type = other DNA
tgtcaaaacatgccaatgtggaaattggtcttgccctgcgttctgaccgctgggcgggggcggatttctgggagc

SEQ ID NO: 661214 - DNA, 75 bp, synthetic construct
  source 1..75: mol_type = other DNA
ctggcgaaaggtcgcagcgtgattgtgataacggtggctgatgtgatgctggcgttacacaacagctacgacaac

SEQ ID NO: 661215 - DNA, 75 bp, synthetic construct
  source 1..75: mol_type = other DNA
atggcgaaggggggaagcgtgattatcgtcaccgtgtccgatgtcatgagcgtgttgcatgacggctacgacaac

SEQ ID NO: 661216 - DNA, 75 bp, synthetic construct
  source 1..75: mol_type = other DNA
gattatggatcgcatgaccatgaacggcggacgctgggtgaattttaactgggagagctggcgtacgaatgtcgt

SEQ ID NO: 661217 - DNA, 75 bp, synthetic construct
  source 1..75: mol_type = other DNA
accgctggagctgtaccactatccggcagaccgttttgtcgccggatttatcggttcgccaaagatgaacttcct

SEQ ID NO: 661218 - DNA, 75 bp, synthetic construct
  source 1..75: mol_type = other DNA
aaatcctgaaccgttcgggcatccagccgctgcaccgcaaatgttcgttcgcgaattaccaggtgcggaacgacg

SEQ ID NO: 661219 - DNA, 75 bp, synthetic construct
  source 1..75: mol_type = other DNA
tcgtcaccgtgtccgatgtcatgagcgtgttgcatgacggctacgacaacggccagtccggggaaaaatttttac

SEQ ID NO: 661220 - DNA, 75 bp, synthetic construct
  source 1..75: mol_type = other DNA
ctgaaggccggtaaatccgtgatagtggtcaccgtggcggatgtgatgagcgcgttacatgccagctatgacgac

SEQ ID NO: 661221 - DNA, 75 bp, synthetic construct
  source 1..75: mol_type = other DNA
ggcggcagccatcggcaaccatcttctggcgaaaggtcgcagcgtgattgtggtgacggtggcggatgtgatgct

SEQ ID NO: 661222 - DNA, 75 bp, synthetic construct
  source 1..75: mol_type = other DNA
tgcacaaattttgtgttcagcggtaagccgggtaccggaaaaaatcacctggcggcagccatcggcaaccatctt

SEQ ID NO: 661223 - DNA, 75 bp, synthetic construct
  source 1..75: mol_type = other DNA
ttcttgagcgtatccgtaagctggccccgcagcatgtaaccgcgccgtaccggacagtggacgagtggcgagagt

SEQ ID NO: 661224 - DNA, 75 bp, synthetic construct
  source 1..75: mol_type = other DNA
ccgtgtccgatgtcatgagcgtgttgcatgacggctacgacaacggccagtccggggaaaaatttttacaggagc

SEQ ID NO: 661225 - DNA, 75 bp, synthetic construct
  source 1..75: mol_type = other DNA
gtgcagaacgacggtcagcgccatgctctgagccaggcgaaatccattgccgatgaattgatgaccggatgtaca

SEQ ID NO: 661226 - DNA, 75 bp, synthetic construct
  source 1..75: mol_type = other DNA
tcacgcagcgatgagcacactcctcggagatcgggtgatggaccgtatgaccatgaatggtggtcgttgggtgaa

SEQ ID NO: 661227 - DNA, 75 bp, synthetic construct
  source 1..75: mol_type = other DNA
cccaccacatgtaaccgccccattcagaacggtagcggagtggcgcgagtggcaacttgctgaaggccagaaacg

SEQ ID NO: 661228 - DNA, 75 bp, synthetic construct
  source 1..75: mol_type = other DNA
gcaccgcaaatgctcgttttcgaattaccaggtgcagaacgacggccagcgatacgcgttgagccaggcgaaatt

SEQ ID NO: 661229 - DNA, 75 bp, synthetic construct
  source 1..75: mol_type = other DNA
gcaccgtaaatgctcgtttgcgaattaccaggtgctgaacgacggccagcgatacgcgttaagccaggcgaaatc

SEQ ID NO: 661230 - DNA, 75 bp, synthetic construct
  source 1..75: mol_type = other DNA
cgggatacgcgtaacgaacaggtcacactgaaccagatagtcgatcgcagaacagcctcgatgcacagcgtcggg

SEQ ID NO: 661231 - DNA, 75 bp, synthetic construct
  source 1..75: mol_type = other DNA
tgctgcaccagattgttgatcgccggacagcgtcgatgcgcagcgtggggatgctgacaaacctgaattatgagg

SEQ ID NO: 661232 - DNA, 75 bp, synthetic construct
  source 1..75: mol_type = other DNA
gcaccgcaaatgctcgttttcgaattaccaggtgcagaacgaagggcagcgatacgcgttgagtcaggcgaaatc

SEQ ID NO: 661233 - DNA, 75 bp, synthetic construct
  source 1..75: mol_type = other DNA
gacagcgtcgatgcgcagcgtgggaatgctgacaaacctgaactatgaggccatgaaaacattgctcggcgagcg

SEQ ID NO: 661234 - DNA, 75 bp, synthetic construct
  source 1..75: mol_type = other DNA
agaccagctacgcctgcttaagcgtctgatcaaagccatgaacctcgacgagaagcagtggccgccgcgccaggc

SEQ ID NO: 661235 - DNA, 75 bp, synthetic construct
  source 1..75: mol_type = other DNA
cctcaatgatttccccggtgccgaaactatccgtctggagcaaaactaccgctctaccagcaatatcctgagcgc

SEQ ID NO: 661236 - DNA, 75 bp, synthetic construct
  source 1..75: mol_type = other DNA
gcctgctggcgggcgacaccggcaaagtgatgatcgttggcgatgacgaccagtcaatctacggctggcgcgggg

SEQ ID NO: 661237 - DNA, 75 bp, synthetic construct
  source 1..75: mol_type = other DNA
ttcaaagctacggtaatccggtggagcagacctggcagaaggtgtatcaggcgtatcaggaagcgtgtgaccgcg

SEQ ID NO: 661238 - DNA, 75 bp, synthetic construct
  source 1..75: mol_type = other DNA
gcaccatcgtcaatatggaaggcagcggtgaacatagccgtttgcaggtggcattccagggccagggtattaaat

SEQ ID NO: 661239 - DNA, 75 bp, synthetic construct
  source 1..75: mol_type = other DNA
cgtttgcaggtggcattccagggccagggtattaaatggctggtggcggcttacgcccggttggagacggtgtga

SEQ ID NO: 661240 - DNA, 75 bp, synthetic construct
  source 1..75: mol_type = other DNA
atgaaataccgggggctgattgccctgctggtatgggggcagagtgtggctgcagctgatcttggcacctggggg

SEQ ID NO: 661241 - DNA, 75 bp, synthetic construct
  source 1..75: mol_type = other DNA
agattacacggagagcaaatagttcataacagaatcacgtttctggaaaccaaaaacggcaggaaaagaacggtg

SEQ ID NO: 661242 - DNA, 75 bp, synthetic construct
  source 1..75: mol_type = other DNA
tacgcaacgtgtgggccagtattctgaaagacagcattggcgtatttaataacaccatcgccagcctccagttcg

SEQ ID NO: 661243 - DNA, 75 bp, synthetic construct
  source 1..75: mol_type = other DNA
ctctgccagcgcctcggcatcgatcaggtcccggcacgggtgatcgccgttcccggcgatcgcttactgaaagtg

SEQ ID NO: 661244 - DNA, 75 bp, synthetic construct
  source 1..75: mol_type = other DNA
gccatgccctgagtcaggcgaaatccattgcggcagagctggaaggcggctgtacgaattttgttttcagtggca

SEQ ID NO: 661245 - DNA, 75 bp, synthetic construct
  source 1..75: mol_type = other DNA
atgagcatctccaccacgaaacgccgcaatgaagaagtcaatgttggtctttctgatcgccggaaagcagagatt

SEQ ID NO: 661246 - DNA, 75 bp, synthetic construct
  source 1..75: mol_type = other DNA
gcctgctagcgggcgataccggcaaagtgatgatcgttggcgatgacgatcagtcaatctacggctggcgcggag

SEQ ID NO: 661247 - DNA, 75 bp, synthetic construct
  source 1..75: mol_type = other DNA
tggtggggataagccagggctggaagctgggcggggccatcaaaaccaccgagcgcaaactggctgaaggggtgc

SEQ ID NO: 661248 - DNA, 75 bp, synthetic construct
  source 1..75: mol_type = other DNA
ccgctgatggcgctcttcaatgcggtctccctgatgtccctgaatccggagccaaaaaagaaagaatatgcggtt

SEQ ID NO: 661249 - DNA, 75 bp, synthetic construct
  source 1..75: mol_type = other DNA
cattgccgatgaattgatgaccggttatacaaacttcgtgttcagcgggaatccgggaaccggaaaaaatcatct

SEQ ID NO: 661250 - DNA, 75 bp, synthetic construct
  source 1..75: mol_type = other DNA
ttcagcgggagacgaaaaacgagcaggtggtattgcaccagataattgatcgccggacagcatcactgtgcagtg

SEQ ID NO: 661251 - DNA, 75 bp, synthetic construct
  source 1..75: mol_type = other DNA
ggttcttgatgaaattggcattcagcgggagacgaaaaacgagcaggtggtgctgcaccagatgttgatcgccgg

SEQ ID NO: 661252 - DNA, 75 bp, synthetic construct
  source 1..75: mol_type = other DNA
ttcttgaacgcatccgtaagctggctccgcagcatgtaaccgcgccataccgaacagtggacgagtggcgcgagt

SEQ ID NO: 661253 - DNA, 75 bp, synthetic construct
  source 1..75: mol_type = other DNA
tgtttactttgatcagaacggcgtgatctgccagcgtctcggcattgatcaggtgccggcacgggtgagtgctgt

SEQ ID NO: 661254 - DNA, 75 bp, synthetic construct
  source 1..75: mol_type = other DNA
tccaccgcacgttacagcaccgttccggacgaccgacgagtggctggaatggcaactggctgagggccggaagcg

SEQ ID NO: 661255 - DNA, 75 bp, synthetic construct
  source 1..75: mol_type = other DNA
tccacgggctggcgcaccgtttgctgcgtgcgcaccatatggacgccaatctgccgcaggatttccagatcctcg

SEQ ID NO: 661256 - DNA, 75 bp, synthetic construct
  source 1..75: mol_type = other DNA
tcgcactgtcgatactcacatcaaaacgctgcgcgccaaactgcgcgctataaatcccgacctttcgccaattaa

SEQ ID NO: 661257 - DNA, 75 bp, synthetic construct
  source 1..75: mol_type = other DNA
atcattctcgatgttggcttacctgatatcagcggctttgaattgtgtcgccagttgttggctatccatccggcg

SEQ ID NO: 661258 - DNA, 75 bp, synthetic construct
  source 1..75: mol_type = other DNA
tggaagacgagcaagggatagccgacacgctggtctacatgttgcagcaggaaggttttgccgtcgagttctttg

SEQ ID NO: 661259 - DNA, 75 bp, synthetic construct
  source 1..75: mol_type = other DNA
ggacgatcccctacgggggacctatccactgcagttaacgggcttccactacaaagcgcgtacccactccagtta

SEQ ID NO: 661260 - DNA, 75 bp, synthetic construct
  source 1..75: mol_type = other DNA
atgaaaatccataccacagaggcgctcataaaggctgaaatcagccgtagaagtctgatgaaaacctccgcactt

SEQ ID NO: 661261 - DNA, 75 bp, synthetic construct
  source 1..75: mol_type = other DNA
agtgaaattgcgaaacgtttaggaccagacgtttatcaaaccttcactgaaggtcgtagccaacatgaatggatc

SEQ ID NO: 661262 - DNA, 75 bp, synthetic construct
  source 1..75: mol_type = other DNA
ggtgtctgctgaggagatcgccgccgccagcgaacgcctgagcgacgagctaaaacaggcgatggcggtggcagt

SEQ ID NO: 661263 - DNA, 75 bp, synthetic construct
  source 1..75: mol_type = other DNA
cattaatagccttttgttttcattcatcagcgatagtattattaccaataacgcaatatcttctgacaaaaagga

SEQ ID NO: 661264 - DNA, 75 bp, synthetic construct
  source 1..75: mol_type = other DNA
taatcaacatggcgacatcaatcacacccatgaagtacttcaggatgacagcaagtgcgagatgattgtcggcat

SEQ ID NO: 661265 - DNA, 75 bp, synthetic construct
  source 1..75: mol_type = other DNA
tatacgtcgataatgtagaagtcagtaccgcattttatgaatctattttgggcaaggggccgatcgaatctttcc

SEQ ID NO: 661266 - DNA, 75 bp, synthetic construct
  source 1..75: mol_type = other DNA
tgtatgttgataatgtagagaccagcactgcgttttacgaagctatttttggtgaagggccaatagaggctttcc

SEQ ID NO: 661267 - DNA, 75 bp, synthetic construct
  source 1..75: mol_type = other DNA
tggtggctacggcgagagggcatatattcaatgatgccaataagcgtaccgcgctaaacagtgcgctgctatttc

SEQ ID NO: 661268 - DNA, 75 bp, synthetic construct
  source 1..75: mol_type = other DNA
acaggcgtagatggcggaaacatcaccaactcaaacgtcccgtaccgtctgatgaactcttgcggtggttttctc

SEQ ID NO: 661269 - DNA, 75 bp, synthetic construct
  source 1..75: mol_type = other DNA
atatgtttggcgaccaggtcgatcacggcggctgtattaacattctgacctcccaccgcccttcaccgctggcaa

SEQ ID NO: 661270 - DNA, 75 bp, synthetic construct
  source 1..75: mol_type = other DNA
agtgaaatcgcgaaacgtttagggccagacgtttatcaaaccttcactgaaggccgtagccagcatgaatggatc

SEQ ID NO: 661271 - DNA, 75 bp, synthetic construct
  source 1..75: mol_type = other DNA
caggcaacgcctttgtcaccgaggcaaaacgccaggtaagccagcgtcttgacggtgcggcgatcgatatgcccg

SEQ ID NO: 661272 - DNA, 75 bp, synthetic construct
  source 1..75: mol_type = other DNA
gagcacctgatcattcagacccgcaacgcccgtgaactggtcgatagcatcaccagtgccggttcggtatttctt

SEQ ID NO: 661273 - DNA, 75 bp, synthetic construct
  source 1..75: mol_type = other DNA
ctgcgggaatacagcgcgaagtttgataaaaccacggttaccgcgctgaaggtgtctgctgaggaaatcgccgcc

SEQ ID NO: 661274 - DNA, 75 bp, synthetic construct
  source 1..75: mol_type = other DNA
gcactgagcgccagccgcctgatcgtgaccaacgatttagcacagtgcgtagagatctccaaccagtacggcccg

SEQ ID NO: 661275 - DNA, 75 bp, synthetic construct
  source 1..75: mol_type = other DNA
atgaaaacgacgggaattaaagtaacgcttttggcgctggctgtcagttattcctgcgctttgcaggctaaaaac

SEQ ID NO: 661276 - DNA, 75 bp, synthetic construct
  source 1..75: mol_type = other DNA
ttatcaggaagagctggccaaaatcgccctgatcacctctgcggacgggaaaaagaatctgtatcaggcttatca

SEQ ID NO: 661277 - DNA, 75 bp, synthetic construct
  source 1..75: mol_type = other DNA
gccgcgtgccgaaaccgcccgtcaggcactgaacgccagccgcctgatcgtgactaaagatttagcgcagtgcgt

SEQ ID NO: 661278 - DNA, 75 bp, synthetic construct
  source 1..75: mol_type = other DNA
ggtgactggtcaccggaatcggcaggtgattacgcctccggcaccaaccacgtgctgccgacttacggttacacc

SEQ ID NO: 661279 - DNA, 75 bp, synthetic construct
  source 1..75: mol_type = other DNA
gccgagagctgaaaccgcccgccaggcactgagcgccagccgcctgattgtgactaaagatttagcgcagtgcgt

SEQ ID NO: 661280 - DNA, 75 bp, synthetic construct
  source 1..75: mol_type = other DNA
gccgccgccgagcgcctgaccgcccataaaaatgccgttactttgcgtgttaacgcccttaaggagcaagcatga

SEQ ID NO: 661281 - DNA, 75 bp, synthetic construct
  source 1..75: mol_type = other DNA
aggctgagcacggcccggattcacaggtgatcttactgacgcccgacgccgatatggcacgccgcgttgccgaag

SEQ ID NO: 661282 - DNA, 75 bp, synthetic construct
  source 1..75: mol_type = other DNA
caagcgccaggtcagccagcgtcttgatggcgcggctattgatatgcccgcgggtccgtcggaagtgctggtgat

SEQ ID NO: 661283 - DNA, 75 bp, synthetic construct
  source 1..75: mol_type = other DNA
ctgcgggaatacagcgcgaagtttgataaaacggaagtcggtgcgttaaaggtaaccgggcaggagatcgccgag

SEQ ID NO: 661284 - DNA, 75 bp, synthetic construct
  source 1..75: mol_type = other DNA
ggtaaaacagctgcttaatgacacctgggatatcgactatccgggcgtggttgcggtgcatctgaccggaaaacc

SEQ ID NO: 661285 - DNA, 75 bp, synthetic construct
  source 1..75: mol_type = other DNA
tgacaactggtcgacctacgccagctatacctctattttccagccgcaaaatgatcgtgacagttcaggcaaata

SEQ ID NO: 661286 - DNA, 75 bp, synthetic construct
  source 1..75: mol_type = other DNA
agcgtattgatgttaatagcccaacctggggtggtttaccgcgctggaatactgatggcagcagcaacagttacg

SEQ ID NO: 661287 - DNA, 75 bp, synthetic construct
  source 1..75: mol_type = other DNA
accggtgcggtggtcatgctacgctcgacgattcgtatggggcgtcagttgcaaaatgtagctgcgcaggatgtc

SEQ ID NO: 661288 - DNA, 75 bp, synthetic construct
  source 1..75: mol_type = other DNA
ctgaatactgtaggtatcgatctcgccctggatagccaacgcctgaaactgaaaaaattcaataaagcccgcgta

SEQ ID NO: 661289 - DNA, 75 bp, synthetic construct
  source 1..75: mol_type = other DNA
tacaacttccgcatcatgtccgctgagggtctgcaaatcacccgtgacatggaaggtcgttcaggagtggtctac

SEQ ID NO: 661290 - DNA, 75 bp, synthetic construct
  source 1..75: mol_type = other DNA
ccgttcgctccggttggtgagattcgccagagctatgcattgtccggcaacgagttcattgcttatcagcgcagc

SEQ ID NO: 661291 - DNA, 75 bp, synthetic construct
  source 1..75: mol_type = other DNA
tgatccaaaagaccgcctttccagcctgaaacaggtggaagaggcgctggatatgcttatctccagccacgggga

SEQ ID NO: 661292 - DNA, 75 bp, synthetic construct
  source 1..75: mol_type = other DNA
aacgcgcattggcgcatcactggcggttacggcagaacctgctgggacaggccgtcacggagctgaatttccagt

SEQ ID NO: 661293 - DNA, 75 bp, synthetic construct
  source 1..75: mol_type = other DNA
agcctgcccgctgccgctcacgattgacgtacaggccgaactgtttcctgaagtcatgcacacccgaacgggtcg

SEQ ID NO: 661294 - DNA, 75 bp, synthetic construct
  source 1..75: mol_type = other DNA
gcaaactggcaaaacgtctgggcgtttcacataccgcgattgccaacaaattgcgtgaatacggcctgagccaga

SEQ ID NO: 661295 - DNA, 75 bp, synthetic construct
  source 1..75: mol_type = other DNA
gcaaactggcaaaacgtctgggtgtttcccataccgcgattgccaacaaattgcgtgaatacggcctgagtcaga

SEQ ID NO: 661296 - DNA, 75 bp, synthetic construct
  source 1..75: mol_type = other DNA
aagtccttcatacccgaacagtacgcaggctaaaacgtcaggactttgccttcacccgaaaaatgcgccgtgaag

SEQ ID NO: 661297 - DNA, 75 bp, synthetic construct
  source 1..75: mol_type = other DNA
cgatgtcatgtgggtatcccctgaaatcatggctaacctggctgcgcctcacatcgttaatggcgctgttgttgg

SEQ ID NO: 661298 - DNA, 75 bp, synthetic construct
  source 1..75: mol_type = other DNA
ccgtaatccggtcaaagacaggatttctcacatcagttgtttttgatgaaggtgaggctgttatcagtgcaaagg

SEQ ID NO: 661299 - DNA, 75 bp, synthetic construct
  source 1..75: mol_type = other DNA
tgtttgaaataagagaagaacttctgttattgaaagaaaaggataaaagtttaataggaaagggggctgtaaaat

SEQ ID NO: 661300 - DNA, 75 bp, synthetic construct
  source 1..75: mol_type = other DNA
ggctttatgtgctcaatggttgctggttgggggctattacttacagtttattcgattatgaacaggagaatgtct

SEQ ID NO: 661301 - DNA, 75 bp, synthetic construct
  source 1..75: mol_type = other DNA
ggtggttatttaacctctgcaagtgaattggactgctgggacatcgtgccggagtatgccttcgatgtcacgctg

SEQ ID NO: 661302 - DNA, 75 bp, synthetic construct
  source 1..75: mol_type = other DNA
ttgtgaaaggggcgacccagcaaccgctgatttacggaccgaacattaaagactggccggaattgggtgcgctga

SEQ ID NO: 661303 - DNA, 75 bp, synthetic construct
  source 1..75: mol_type = other DNA
gatggtcaggaacagacacttgcttttaatgtggaaacaaaaggcaagtataaaattatggttatccacaacgtt

SEQ ID NO: 661304 - DNA, 75 bp, synthetic construct
  source 1..75: mol_type = other DNA
catgaccgctgacatcctggcatgtaatgccgttggcggcttcgatcaggagttctggaaagctgtcgataacca

SEQ ID NO: 661305 - DNA, 75 bp, synthetic construct
  source 1..75: mol_type = other DNA
cctgatcgacttcttcaccattggcgagttcggcgtactggcacgtaataacttcgttgctaagtatgatcgtct

SEQ ID NO: 661306 - DNA, 75 bp, synthetic construct
  source 1..75: mol_type = other DNA
tacgagctgggtctgaaatcggactggatgaatagccgtctgaccaccacgttagccatcttccgtattgagcag

SEQ ID NO: 661307 - DNA, 75 bp, synthetic construct
  source 1..75: mol_type = other DNA
ctgattttaaaaaaggtggtcctcaaacaggcgtgattagtgatgattttatttcacttctggccgattctaaaa

SEQ ID NO: 661308 - DNA, 75 bp, synthetic construct
  source 1..75: mol_type = other DNA
gaccgccgctgacatgaccgcgatctttgcattcttcggtaaaggcgcattcggtaccaccgcacgcacgaacaa

SEQ ID NO: 661309 - DNA, 75 bp, synthetic construct
  source 1..75: mol_type = other DNA
ttccggtgttcactgctggttacggtgttaactggcgtcatgctgctggcctgaactctgttggcattgatctgg

SEQ ID NO: 661310 - DNA, 75 bp, synthetic construct
  source 1..75: mol_type = other DNA
accgcatttaacccgcgatgtcgttgatgccgccgtagcactgcgttccaatgaagaaattgagatcatgtttaa

SEQ ID NO: 661311 - DNA, 75 bp, synthetic construct
  source 1..75: mol_type = other DNA
atcaaagttaacctgtctcatattcttattgattccttagatgatgcaaaagttaaccttgcaccggtcatcgat

SEQ ID NO: 661312 - DNA, 75 bp, synthetic construct
  source 1..75: mol_type = other DNA
gtcaatgattttaatttaagtaatcaagaaaaatcgcgcttaatactaaggctatttgatgatgttaaattggtt

SEQ ID NO: 661313 - DNA, 75 bp, synthetic construct
  source 1..75: mol_type = other DNA
taatgatgtaagaatactggattggtgttttaataaaagcatgcaatattttggtgattcagcaaagataaagca

SEQ ID NO: 661314 - DNA, 75 bp, synthetic construct
  source 1..75: mol_type = other DNA
gcttaattgttgttatgccaacaggcggttgcaccgttgatagtcgtaatgtcaccgtgaatctcccggactttc

SEQ ID NO: 661315 - DNA, 75 bp, synthetic construct
  source 1..75: mol_type = other DNA
ttaagcgcaacctatggacaaacaggaaacaaggtttcagccggaaccgtccaatcagtcattggtgtcactttt

SEQ ID NO: 661316 - DNA, 75 bp, synthetic construct
  source 1..75: mol_type = other DNA
ttgcggatatcatgatcagggctgactgctatctgacagtcactgaaattaccactctcgccaaagaaaaatacc

SEQ ID NO: 661317 - DNA, 75 bp, synthetic construct
  source 1..75: mol_type = other DNA
ttgcctggatcaccggtaacgatttccgcgatctcgcccaacgtaataatattgaggcaccatacgcgttgaacg

SEQ ID NO: 661318 - DNA, 75 bp, synthetic construct
  source 1..75: mol_type = other DNA
agctcagcagccggtacagatggaaaacggacgcatcgtctataaccgtcagtatgggaacattccgaaaggcag

SEQ ID NO: 661319 - DNA, 75 bp, synthetic construct
  source 1..75: mol_type = other DNA
taataatctggatgtttacagcaggagcgaaggtgataaccgttacctgcgcagggaccagaatggcgcggatat

SEQ ID NO: 661320 - DNA, 75 bp, synthetic construct
  source 1..75: mol_type = other DNA
aagtcagatgcgttttacggggctgaagcggggttaccgactggcagagctggtcctgatacatgagcgactggc

SEQ ID NO: 661321 - DNA, 75 bp, synthetic construct
  source 1..75: mol_type = other DNA
aagtcagatgcgatttacggggctgaagaggggctaccgtctggcagagctggtcgggatgcatgagccactggc

SEQ ID NO: 661322 - DNA, 75 bp, synthetic construct
  source 1..75: mol_type = other DNA
cctggcgctggccaactgagggcaaagtgattgaaacctttggcgcttctgaggggggcaataaggggattgata

SEQ ID NO: 661323 - DNA, 75 bp, synthetic construct
  source 1..75: mol_type = other DNA
aacaggagaaaatgtctccctggggacagtaaataaaagcaaagtacctctgggtttaagcgcaacctatggaca

SEQ ID NO: 661324 - DNA, 75 bp, synthetic construct
  source 1..75: mol_type = other DNA
aagcacaaccgagccaactgcaagcagttcgtccaacagtgccgctatttctgcatggctctggccgacgagtgg

SEQ ID NO: 661325 - DNA, 75 bp, synthetic construct
  source 1..75: mol_type = other DNA
ttgattacgccgccgccgaaaatggggacgacatctacagcgcaacagccgcaaattcagccaatacagcagcca

SEQ ID NO: 661326 - DNA, 75 bp, synthetic construct
  source 1..75: mol_type = other DNA
ccgtcatattgtcgatgcgatgttgcactgccatgaacgcagcacctttatcccgattctggcgaatatcttcgc

SEQ ID NO: 661327 - DNA, 75 bp, synthetic construct
  source 1..75: mol_type = other DNA
gatcccgaaattcaacaactggcggaagagaccggcggctgcatttccgattcgctggaaatggctcgttttggt

SEQ ID NO: 661328 - DNA, 75 bp, synthetic construct
  source 1..75: mol_type = other DNA
gactgggtggtgacttcaagtattgctgttgaactcattgatcatctggatagtctgggtgaaaaactcatctgg

SEQ ID NO: 661329 - DNA, 75 bp, synthetic construct
  source 1..75: mol_type = other DNA
ccacaaattcaatctgcacaacaaccgcaaatccagccagtgcagccagtagctcagcagccggtacagatggaa

SEQ ID NO: 661330 - DNA, 75 bp, synthetic construct
  source 1..75: mol_type = other DNA
gcaaaatatgcaaggaatggtttcacccggcattctcaaatcagtggtggtgctgcccggaacacggaactcaat

SEQ ID NO: 661331 - DNA, 75 bp, synthetic construct
  source 1..75: mol_type = other DNA
aaaccataaccgccatcgctggactgccgaagagtgcaagaccatcaaggcggagtatcaacagaaacttaaaaa

SEQ ID NO: 661332 - DNA, 75 bp, synthetic construct
  source 1..75: mol_type = other DNA
ttatggcgggattcagtcacgttaccggcgacttaattattacccttgatgccgatctccagaatccgccagaag

SEQ ID NO: 661333 - DNA, 75 bp, synthetic construct
  source 1..75: mol_type = other DNA
gattgctcggtgaatatatcggcaggatctacaccgatgtccgcgcccgcccccgctattttgttcagcaagtta

SEQ ID NO: 661334 - DNA, 75 bp, synthetic construct
  source 1..75: mol_type = other DNA
gcggtactactggtaattttgcgcctgacgttcggcccgcaatgggcggcagaaggtgtatttatgctgtttgcc

SEQ ID NO: 661335 - DNA, 75 bp, synthetic construct
  source 1..75: mol_type = other DNA
tattaacgtgcaggaaaccggctcccggtctgcggacaatatcggtggggtctattatcgcccggttcagattta

SEQ ID NO: 661336 - DNA, 75 bp, synthetic construct
  source 1..75: mol_type = other DNA
ttatgggtactcaccgcgaagccgatctgtcgctcaagcgcgtgaaaacgctgctcaacgacaaaggctatcagg

SEQ ID NO: 661337 - DNA, 75 bp, synthetic construct
  source 1..75: mol_type = other DNA
ttgagttccgtgcagaagcgaatccggcactgcatccggggcaatccgcagcgatttatctgaaaggtgaacgta

SEQ ID NO: 661338 - DNA, 75 bp, synthetic construct
  source 1..75: mol_type = other DNA
gcgaatgggtgaacccggcgattgatagcgatgcgctggcgaatcaaatcactatggcgggcctggaagttgacg

SEQ ID NO: 661339 - DNA, 75 bp, synthetic construct
  source 1..75: mol_type = other DNA
tacctgaaacttgatgacaacactatcgaaatcagcgttacgccaaaccgtgccgactgcttaggcatcattggt

SEQ ID NO: 661340 - DNA, 75 bp, synthetic construct
  source 1..75: mol_type = other DNA
accctggtcattgccgaccacaacaaggcgctggcgatgggcggcatcttcggtggcgaacactctggcgtaaat

SEQ ID NO: 661341 - DNA, 75 bp, synthetic construct
  source 1..75: mol_type = other DNA
tatcaccggtcgtgctcgtcgtcatggcctgcataccgatgcgtctcaccgttatgagcgtggcgttgatccggc

SEQ ID NO: 661342 - DNA, 75 bp, synthetic construct
  source 1..75: mol_type = other DNA
gctgaatgtcgaaaactttaaaaccgacaaaccacagccggttaacgcgctgctgaaagaagccgaaaaacgcaa

SEQ ID NO: 661343 - DNA, 75 bp, synthetic construct
  source 1..75: mol_type = other DNA
atgcagcagaaaaaatattcctttaattatctgatttttaagcagggtttcataaaaagaagaatgcttgttaat

SEQ ID NO: 661344 - DNA, 75 bp, synthetic construct
  source 1..75: mol_type = other DNA
gccgcagtaacaatatccttcgccaggcttccgcttattttgcgaaggcggagttcgaccgcctctggaaaaaat

SEQ ID NO: 661345 - DNA, 75 bp, synthetic construct
  source 1..75: mol_type = other DNA
gctgctaatcgaaaacggccggcttgttgccgatacgctacgccacttagctgataacgaaatcgactctgatta

SEQ ID NO: 661346 - DNA, 75 bp, synthetic construct
  source 1..75: mol_type = other DNA
tttttgaagtttttgttaacaattgggttcctggtatcttcaccttctttttaggtatctgttattcaaatttcg

SEQ ID NO: 661347 - DNA, 75 bp, synthetic construct
  source 1..75: mol_type = other DNA
atgagcgaatacatcacagaccctattgatgtactcacggaaatcatgaacgacaagcagcagccaaccgaaata

SEQ ID NO: 661348 - DNA, 75 bp, synthetic construct
  source 1..75: mol_type = other DNA
gtcggcaatgcgtctttctctgtggactggcctgctggcaaccgtggtgtacaaccagaaccgtcagcaaaaccg

SEQ ID NO: 661349 - DNA, 75 bp, synthetic construct
  source 1..75: mol_type = other DNA
cggagactgggaaatgcgtggtggtgatgaccgtgtttattacagacagatacaatattgtattaatgggcattg

SEQ ID NO: 661350 - DNA, 75 bp, synthetic construct
  source 1..75: mol_type = other DNA
aacctcggtttacgggaaacggtaaacagggctgcaaatgccctgccatcgaatggtacagccgtagcggcaaac

SEQ ID NO: 661351 - DNA, 75 bp, synthetic construct
  source 1..75: mol_type = other DNA
cgcacccaggcgggcattgttcagcgactggcagcggataacgccagtgtgaagcagagtggacagctaatcgaa

SEQ ID NO: 661352 - DNA, 75 bp, synthetic construct
  source 1..75: mol_type = other DNA
gcaaggatcagaatggcgcagatgttgctgacaaaagcacctttatcgataacctcggtttacgggaaacggtaa

SEQ ID NO: 661353 - DNA, 75 bp, synthetic construct
  source 1..75: mol_type = other DNA
tggtgatggtaatgcaacggtaaccgcatattatcgccctgttcagtttctggtaaatggttcgtggaaaacagc

SEQ ID NO: 661354 - DNA, 75 bp, synthetic construct
  source 1..75: mol_type = other DNA
atgtacagaatgtccagcttggggcacagagctaccattcacccggaggcaatgaaatgtcatggaattacagtg

SEQ ID NO: 661355 - DNA, 75 bp, synthetic construct
  source 1..75: mol_type = other DNA
acgagggagtaatcgcggatggaagtaagcgcatagcagaactggaggagcgggaaatactgctcccggaacgta

SEQ ID NO: 661356 - DNA, 75 bp, synthetic construct
  source 1..75: mol_type = other DNA
gtcgtagcaaactggatcgcctgatcggccatcatattgctgatgaacaggtaactgacattctgcgtcgtctcg

SEQ ID NO: 661357 - DNA, 75 bp, synthetic construct
  source 1..75: mol_type = other DNA
ggcaatgcgtctttctttgtggactggtttgctggcaactgtggtgtataaccagaatcgccaacaaaaccgtgt

SEQ ID NO: 661358 - DNA, 75 bp, synthetic construct
  source 1..75: mol_type = other DNA
tagaaccaattggaaatggggaaaacgaaatattaatatcctgatgctcgcaatcgtttatcgtggaatagcgat

SEQ ID NO: 661359 - DNA, 75 bp, synthetic construct
  source 1..75: mol_type = other DNA
tgcttaccacaatcattttatcgacgtatgcagcgcttctttgcaggtcagtattttgattatcgtcaaatttct

SEQ ID NO: 661360 - DNA, 75 bp, synthetic construct
  source 1..75: mol_type = other DNA
aagccaactgcgaccacggtcacagcgcctgtaacggtaccaacagcaagcacaaccgagccgactgtcagcagt

SEQ ID NO: 661361 - DNA, 75 bp, synthetic construct
  source 1..75: mol_type = other DNA
gtggtcgagcagatggcaaccggcaaggaaattttgcagccatcggatgatcctatcgccgccacacgcatcact

SEQ ID NO: 661362 - DNA, 75 bp, synthetic construct
  source 1..75: mol_type = other DNA
tgctcatgagcaaaatcaaccattagcgactattcatgcactcaccgataatgcacgtattatgctgaaaaaaga

SEQ ID NO: 661363 - DNA, 75 bp, synthetic construct
  source 1..75: mol_type = other DNA
ttaagaacaaatggcgatttcacattacaagcatttcactttttcttatcatgctcgcggtttcaatcgcttttt

SEQ ID NO: 661364 - DNA, 75 bp, synthetic construct
  source 1..75: mol_type = other DNA
tcagccgccgattgtggcagtggacaccaacgtggcggcgagtgatttctttggcagcaatttagacgtgctcaa

SEQ ID NO: 661365 - DNA, 75 bp, synthetic construct
  source 1..75: mol_type = other DNA
caggagtcgattcttgatggcgtcaacaatagcctgctggcggtgcgcgatgacctgctggaagcggcgaacggc

SEQ ID NO: 661366 - DNA, 75 bp, synthetic construct
  source 1..75: mol_type = other DNA
cagttgaaccgccagcagtcggcgattgagcagtatcagagcaatatcgactccgcatcagcgggtttaagccag

SEQ ID NO: 661367 - DNA, 75 bp, synthetic construct
  source 1..75: mol_type = other DNA
gggcataaagagctgactatcgtcgataacgtcctgcctgaccttgaccatccaacccctttggccgcgcgtcag

SEQ ID NO: 661368 - DNA, 75 bp, synthetic construct
  source 1..75: mol_type = other DNA
ttcatgctgatcgacatgggtggcgcaaccaccgatgtctattccgcctgtgccaacacgctctcgcccgacacc

SEQ ID NO: 661369 - DNA, 75 bp, synthetic construct
  source 1..75: mol_type = other DNA
ggatttaacctggaatggtgccttcacgcacgactggggatttgaggtcagcgtttactataaccgggtgagtga

SEQ ID NO: 661370 - DNA, 75 bp, synthetic construct
  source 1..75: mol_type = other DNA
ttcttcgcctctgcgttcaccaaagtgttcaccctgctggcgctgttttctatcttgatccatgcctggatcggc

SEQ ID NO: 661371 - DNA, 75 bp, synthetic construct
  source 1..75: mol_type = other DNA
cacaggggctatttccactgctggcaaacgttgccagagtagacccgcaagccgccgcgctcaccagtattcaat

SEQ ID NO: 661372 - DNA, 75 bp, synthetic construct
  source 1..75: mol_type = other DNA
accttaccaccgtgcacaaagtcatcggctccggtggatggctgtcgcgcgccagccagtttgatattcatcact

SEQ ID NO: 661373 - DNA, 75 bp, synthetic construct
  source 1..75: mol_type = other DNA
acaacagcctgctggcggtgcgtgacgacctgctggaagcggcgaacggcaccaataccgccgattcgctcgcaa

SEQ ID NO: 661374 - DNA, 75 bp, synthetic construct
  source 1..75: mol_type = other DNA
ggttattcgtctggggcgttcgcctgtacagcgttgtgtgaatcacatttctgaaccggataccgaaattccgcc

SEQ ID NO: 661375 - DNA, 75 bp, synthetic construct
  source 1..75: mol_type = other DNA
cgcggttgtgttcagtgcgaaaaaacgccagtggggcagccaggaagatttggcgtgtgcgcagtggttctgggg

SEQ ID NO: 661376 - DNA, 75 bp, synthetic construct
  source 1..75: mol_type = other DNA
gctgccagcgatgatggcgagatcgcgcgaccgaaagaacccaactggaccgcgtgggccaatgacgtgcgcaca

SEQ ID NO: 661377 - DNA, 75 bp, synthetic construct
  source 1..75: mol_type = other DNA
gtggcggaagaactggtcaatatgattcaggtgcaacgcgcttacgaaatcaacagtaaagcggtgtccaccacc

SEQ ID NO: 661378 - DNA, 75 bp, synthetic construct
  source 1..75: mol_type = other DNA
aatcggcacgggggtacgcccggtcgccactgaacgcttacacagccagggaaacctgtcgcagaccaacaacag

SEQ ID NO: 661379 - DNA, 75 bp, synthetic construct
  source 1..75: mol_type = other DNA
ctggcaaacgtcagtaccaacggttttaagcgtcagcgcgcggtgtttgaagatctgctttatcaaaccattcgc

SEQ ID NO: 661380 - DNA, 75 bp, synthetic construct
  source 1..75: mol_type = other DNA
tggatctggggacgaatcgtgagtctttacgagcaggcggccagctatgatggcgagatcactagaccgaaagaa

SEQ ID NO: 661381 - DNA, 75 bp, synthetic construct
  source 1..75: mol_type = other DNA
tgacatgactaatttttacacgattaattacgagagtgagcttttagatggtggcaaagtgagcgaatccatcag

SEQ ID NO: 661382 - DNA, 75 bp, synthetic construct
  source 1..75: mol_type = other DNA
accaataccgccgattcgctcgcaagcctcgggcaggatattgagtcgctcaccgaatcgatggtcgcggcgctc

SEQ ID NO: 661383 - DNA, 75 bp, synthetic construct
  source 1..75: mol_type = other DNA
aaatgggacgaactggcaattcgtttgtggcgcggttctgcgcagcgttgtgtgaatcacatttctgaaccggac

SEQ ID NO: 661384 - DNA, 75 bp, synthetic construct
  source 1..75: mol_type = other DNA
atgacgtgcgcatgatgcggatgctggatggcagaactcacaggcaaatttgcgaaatgttcagccgggcgcagc

SEQ ID NO: 661385 - DNA, 75 bp, synthetic construct
  source 1..75: mol_type = other DNA
tggcagaactcacagacaaatttgtgaaatgtttgggcgtctccagcgggattcgttctgggtaaaaaacatcat

SEQ ID NO: 661386 - DNA, 75 bp, synthetic construct
  source 1..75: mol_type = other DNA
atgacaatagaacataataacgcccttcacagcattgcccgtcaggctaattgtgaaatcaaaaaagccagacag

SEQ ID NO: 661387 - DNA, 75 bp, synthetic construct
  source 1..75: mol_type = other DNA
ttgatcgtgacgccggtaatgccaaaaacaagctgctcaaaagcgtagccgaccgagtgggaatcttcttcttct

SEQ ID NO: 661388 - DNA, 75 bp, synthetic construct
  source 1..75: mol_type = other DNA
agcgagcggtgataaagacaactttgtgccaccggaacaactcatgaagtacatccgggacaaattacaggagaa

SEQ ID NO: 661389 - DNA, 75 bp, synthetic construct
  source 1..75: mol_type = other DNA
atgtctgcggaagagttgaagtttatctccgaaaatggtgcggtggtcgatatggatcacaaaaagccaggcggt

SEQ ID NO: 661390 - DNA, 75 bp, synthetic construct
  source 1..75: mol_type = other DNA
atgccccatcaggctctgcaggaccttcagcggtataccggcatacagcatgtgcatcgcataggaatggcggaa

SEQ ID NO: 661391 - DNA, 75 bp, synthetic construct
  source 1..75: mol_type = other DNA
ggcagcctgagttcacagataaaacactctccaggaaaaccggggcggttcagcctaagcctgctgctccgcttc

SEQ ID NO: 661392 - DNA, 75 bp, synthetic construct
  source 1..75: mol_type = other DNA
aaacgcaacggctgggtcacagacgaagagttcaatcgtacacgcccggtactcaacctagaaaacaacatagcc

SEQ ID NO: 661393 - DNA, 75 bp, synthetic construct
  source 1..75: mol_type = other DNA
cgggcaacacaccccggattttattgtttttattcttttttgttgtttctgcaataaccacaattgcatgcggat

SEQ ID NO: 661394 - DNA, 75 bp, synthetic construct
  source 1..75: mol_type = other DNA
cacaagtcagttgatcaatgctgcgaaaacattgccgcatcaacggcttattgtggcgacggatcgggggatctt

SEQ ID NO: 661395 - DNA, 75 bp, synthetic construct
  source 1..75: mol_type = other DNA
ggcaaccgatcggggcattttctacaaaatgcagcaggcggtgccagataaagagttactggaagcaccaaccgc

SEQ ID NO: 661396 - DNA, 75 bp, synthetic construct
  source 1..75: mol_type = other DNA
tgacagcaaaatgatgtatgtcgatgcctatgtaaacaaagcggatggtatgctggttgggccatacagtaatta

SEQ ID NO: 661397 - DNA, 75 bp, synthetic construct
  source 1..75: mol_type = other DNA
gaccgcggagaattttggtgatgcattggaagatccgtcattcctcgcgatgctcgcggcactagtcaatagcgg

SEQ ID NO: 661398 - DNA, 75 bp, synthetic construct
  source 1..75: mol_type = other DNA
gaccgccgagaattttggcgatgcgctggaagatccatcgttcctcgcgatgctcgcggcgctggtcaatagcgg

SEQ ID NO: 661399 - DNA, 75 bp, synthetic construct
  source 1..75: mol_type = other DNA
cggcaaccgcctccccaatccaggtcctgaccgttctgtccgtcacttcccagatcctcgctttctctgtcctgc

SEQ ID NO: 661400 - DNA, 75 bp, synthetic construct
  source 1..75: mol_type = other DNA
ttgcaggcatcgatgacgctgtccgactgggagcgcgtgtacggtgttattcctcgtgaaggggcaacacaacag

SEQ ID NO: 661401 - DNA, 75 bp, synthetic construct
  source 1..75: mol_type = other DNA
attggcgtaataaaagatgggcaaaaaaatggcgacgggtggagcaaaacgatgtgctggagaatggctggacaa

SEQ ID NO: 661402 - DNA, 75 bp, synthetic construct
  source 1..75: mol_type = other DNA
caggtattgccttgtgccttttaaccggtatgcgtgacccttttaagccgccggaagatctatgccggattagcg

SEQ ID NO: 661403 - DNA, 75 bp, synthetic construct
  source 1..75: mol_type = other DNA
ttgcaggcatcgatgacgctgtccgactgggagcgcgtgtacggtgttgtcccccgtgaaggggcaacacaacag

SEQ ID NO: 661404 - DNA, 75 bp, synthetic construct
  source 1..75: mol_type = other DNA
caattccctattttaaaaatctggccgcaagcctgggatacaccataacgataaccgaaccgcgagcctttcgca

SEQ ID NO: 661405 - DNA, 75 bp, synthetic construct
  source 1..75: mol_type = other DNA
tcaggcgggaaacctgagtcaggaaccattgctgattaacagaatgcaactattgtcggagcggcgaactattga

SEQ ID NO: 661406 - DNA, 75 bp, synthetic construct
  source 1..75: mol_type = other DNA
gatatctgacgggctggaagccaaagcggggacggtttctgccgatttcagtcgttatatgacgtggaaaactgc

SEQ ID NO: 661407 - DNA, 75 bp, synthetic construct
  source 1..75: mol_type = other DNA
ccattagtcgttatcgaacttaaaaatgccgctgacgaaaatgcaacggtaacaggtgcctataatcagattaaa

SEQ ID NO: 661408 - DNA, 75 bp, synthetic construct
  source 1..75: mol_type = other DNA
ttgtcagacagaaccaatattgtcgttatcgctgatgaagcccaccgttcacaatacggtttcagcgccaaagaa

SEQ ID NO: 661409 - DNA, 75 bp, synthetic construct
  source 1..75: mol_type = other DNA
gctgtatatcgacaaaccaatgaaaggccacaaccttatgcaggcaattgcccgtgtgaaccgtgtgtataaaga

SEQ ID NO: 661410 - DNA, 75 bp, synthetic construct
  source 1..75: mol_type = other DNA
aggtttgattggcagttcaaaacgtattaaagctattgcggcggatatggttcagcactttgaacagcgcttaaa

SEQ ID NO: 661411 - DNA, 75 bp, synthetic construct
  source 1..75: mol_type = other DNA
ctactattcaaaaattccagcctgatgatggcagcaatatctatgagttgctgtcagacagaactaatattgtcg

SEQ ID NO: 661412 - DNA, 75 bp, synthetic construct
  source 1..75: mol_type = other DNA
gtaaaagaaaaattaacagatgatattattgaactcatatctggaattaaacgcaaccaggaaaaaacaacaaat

SEQ ID NO: 661413 - DNA, 75 bp, synthetic construct
  source 1..75: mol_type = other DNA
aaaacagcctgaaaaggctgtttccagtgaagatattgataattttattgttgatgtattcaaggagacagggca

SEQ ID NO: 661414 - DNA, 75 bp, synthetic construct
  source 1..75: mol_type = other DNA
tggtgatcttgataacgaaataaaagaagccatagagcatggcaaaaatgaaatcaatgatacagcagtcttagc

SEQ ID NO: 661415 - DNA, 75 bp, synthetic construct
  source 1..75: mol_type = other DNA
aatgaaattatgaattacgctgtaaattgtggagcattgaaaacgaatccattacttaagataaaaactgcattc

SEQ ID NO: 661416 - DNA, 75 bp, synthetic construct
  source 1..75: mol_type = other DNA
cgtgaacatgttgtgcccctgtcatcacaggccattagcatcctcagaacaatgcaggaaattaaaagagggcgt

SEQ ID NO: 661417 - DNA, 75 bp, synthetic construct
  source 1..75: mol_type = other DNA
tatcaataccccaattgctgccagcaagttcaaagggattgtaacgttacacggttttcgttcgatgtggagtac

SEQ ID NO: 661418 - DNA, 75 bp, synthetic construct
  source 1..75: mol_type = other DNA
ggccgacattatcgaccgttttaatgtgctggaaacccgccatcagcaggaccgccagaaaatcacgtcactgac

SEQ ID NO: 661419 - DNA, 75 bp, synthetic construct
  source 1..75: mol_type = other DNA
caacgccaggaagaaggcacccagtggtttaaccgcgtaatggggattattggccgtggccgcaaagcggatgac

SEQ ID NO: 661420 - DNA, 75 bp, synthetic construct
  source 1..75: mol_type = other DNA
gcgttagccgtgggctttcccctgtgctgccgccgaagatggccgagcggatgcgcgaacgtgaacggcacgaga

SEQ ID NO: 661421 - DNA, 75 bp, synthetic construct
  source 1..75: mol_type = other DNA
ccgaaagggctgttcatgaagcagaagaccagataaatgattttgttgttgatgttttcaagaaaacaggggtaa

SEQ ID NO: 661422 - DNA, 75 bp, synthetic construct
  source 1..75: mol_type = other DNA
gcgcatagcaaaatatctttttgataaaggcggataccggcgaaagattgcaggaaaaatagaacgcttcattct

SEQ ID NO: 661423 - DNA, 75 bp, synthetic construct
  source 1..75: mol_type = other DNA
cagaaaacgatgaaacgctctgcttttgatgcactggatgttgcaggtaagcaaaacgcactgaaagacggtatc

SEQ ID NO: 661424 - DNA, 75 bp, synthetic construct
  source 1..75: mol_type = other DNA
gggatctgaattgcggaaacctacgctgtataatatcgaatatgaagtatacaaatatcttgttcctttctttgg

SEQ ID NO: 661425 - DNA, 75 bp, synthetic construct
  source 1..75: mol_type = other DNA
ttgtattgaaggcacgctgtgtgaacacgtagcactggctgtgcaggccttcgtcgaggccaaaactcagcaagc

SEQ ID NO: 661426 - DNA, 75 bp, synthetic construct
  source 1..75: mol_type = other DNA
cagcaattaagtcaggcattatggctgggcgggatcagccaaccgtcaatccactacgaggccgctttcagccgc

SEQ ID NO: 661427 - DNA, 75 bp, synthetic construct
  source 1..75: mol_type = other DNA
ccattacgaggccgctttcagccgcgcacagcagacggcggaacgctgcaactggcgatgggtgagtgaatcgct

SEQ ID NO: 661428 - DNA, 75 bp, synthetic construct
  source 1..75: mol_type = other DNA
ttttgccagatgcgacattgatgggagatgcccacttaattgagctgaacaaaacatacacaaaaaatatagatc

SEQ ID NO: 661429 - DNA, 75 bp, synthetic construct
  source 1..75: mol_type = other DNA
caaatagctcacaatgcacttttattccagatattgacaatggtcaggccaggtgaggcgattaaagcagagtga

SEQ ID NO: 661430 - DNA, 75 bp, synthetic construct
  source 1..75: mol_type = other DNA
gcaccagtagctattaatgctctggatgccgtatccgataagaatgcgttgcaaaaaaaattaatatcaagatta

SEQ ID NO: 661431 - DNA, 75 bp, synthetic construct
  source 1..75: mol_type = other DNA
ctggggagcaatagcgatggcatgacgagtgcagcagattcaatttctttatccgctgaactgcccggcgagcgc

SEQ ID NO: 661432 - DNA, 75 bp, synthetic construct
  source 1..75: mol_type = other DNA
cgcagacaggcagaacttgatggtatgcctgcgatcaatgccaaacgtgtttaccggatcatgtgtcagcgccag

SEQ ID NO: 661433 - DNA, 75 bp, synthetic construct
  source 1..75: mol_type = other DNA
atgagaaaaaacaaaggacgattgacttattatcttgaaataattgataaaaaatatcattttgtaaaaaaaata

SEQ ID NO: 661434 - DNA, 75 bp, synthetic construct
  source 1..75: mol_type = other DNA
cactgcggccgttattgtattcccgcatatcttcttcccgcagggcgatccggcggcggcgacactacagtcgct

SEQ ID NO: 661435 - DNA, 75 bp, synthetic construct
  source 1..75: mol_type = other DNA
ggcctgacgctggccccgatatgtctggtgttctggcactatctcgccaataacacctggctgccgctcggcccg

SEQ ID NO: 661436 - DNA, 75 bp, synthetic construct
  source 1..75: mol_type = other DNA
cggacgcatgaagaaactgctggatgacggcaaaaagatttatgccagcatcgagctttacccgcagtcattcat

SEQ ID NO: 661437 - DNA, 75 bp, synthetic construct
  source 1..75: mol_type = other DNA
ggcgctgctgccggagctgtttccgacggaagtccgttataccggagcatcgttctcctataacgtatcgtcgat

SEQ ID NO: 661438 - DNA, 75 bp, synthetic construct
  source 1..75: mol_type = other DNA
acgcttatcattctgtttgccctgtttgcctttaacccactgttgggttctggtaatccagcattggtgtttgtt

SEQ ID NO: 661439 - DNA, 75 bp, synthetic construct
  source 1..75: mol_type = other DNA
gttgcgccgtatatcgcagcctggttgcagactaactacgggttaggtgcggtggggttatatctggcggcgatg

SEQ ID NO: 661440 - DNA, 75 bp, synthetic construct
  source 1..75: mol_type = other DNA
tcagaccattactgctattcgaactcaagcgggcattgttcagcggctggcggcggataacgccagcgtgaaaca

SEQ ID NO: 661441 - DNA, 75 bp, synthetic construct
  source 1..75: mol_type = other DNA
atacggccctcgctgtacgcttacgaaataacgccggatgagcagaaagaacctgtggcggccattgcgccgtct

SEQ ID NO: 661442 - DNA, 75 bp, synthetic construct
  source 1..75: mol_type = other DNA
atgaaattacaacaacttcgctatattgttgaggtcgtcaatcataacctgaacgtctcatcaacggctgaagga

SEQ ID NO: 661443 - DNA, 75 bp, synthetic construct
  source 1..75: mol_type = other DNA
agcaggacagccagaaaatcactttactgaccacagagctggcagcactgaaggaaaaactgcgcacgcaggacg

SEQ ID NO: 661444 - DNA, 75 bp, synthetic construct
  source 1..75: mol_type = other DNA
cgatcatgccgacctgctcgaccgcttcagcgctcttgagaagaaacacgccagcggacaggaaacactgaaaaa

SEQ ID NO: 661445 - DNA, 75 bp, synthetic construct
  source 1..75: mol_type = other DNA
ccgccaccagttataacccgtccgtttatggtgcacgtgtgaatattgagcacatcctgtcaccactccccggca

SEQ ID NO: 661446 - DNA, 75 bp, synthetic construct
  source 1..75: mol_type = other DNA
tgccatttatcttctcggcggtgctggtcattatcggcctgtatgttcgcgtgtcgctgcatgagtcgccggtgt

SEQ ID NO: 661447 - DNA, 75 bp, synthetic construct
  source 1..75: mol_type = other DNA
cgagacgctggcgattgtcggggaatctggttccggcaagtcagtcactgcgctggcgctgatgcgtctgcttga

SEQ ID NO: 661448 - DNA, 75 bp, synthetic construct
  source 1..75: mol_type = other DNA
gatggtcgaggcgaagcggatgctggatcaggtacgcattccggaggcacaaaccattctttcacgttatccgca

SEQ ID NO: 661449 - DNA, 75 bp, synthetic construct
  source 1..75: mol_type = other DNA
gttacccgcatgagttttctggtggtcagcgtcagcgcatctgcattgcccgtgcgttggcgctgaatccgaaag

SEQ ID NO: 661450 - DNA, 75 bp, synthetic construct
  source 1..75: mol_type = other DNA
ttgtccaatttattgatcagaaaaggggccgagttactaaccattttacttgatactgatattcaaaagctgcac

SEQ ID NO: 661451 - DNA, 75 bp, synthetic construct
  source 1..75: mol_type = other DNA
agaaacaatcagccaccaccacagccaagaaagcaccatctccagaacattgctgaaaaagaacatgtatcaatg

SEQ ID NO: 661452 - DNA, 75 bp, synthetic construct
  source 1..75: mol_type = other DNA
cgctactgttaaccgcctgtagtaccgaccagaaaacactgctgccggtggatgaaaacaccactatgctgaaca

SEQ ID NO: 661453 - DNA, 75 bp, synthetic construct
  source 1..75: mol_type = other DNA
gctgtatcagctattgatattctgaagccagctatttttgtattactgggcgttattaccgttgccgggtggtac

SEQ ID NO: 661454 - DNA, 75 bp, synthetic construct
  source 1..75: mol_type = other DNA
caagcctgggcactgagcgcctgaaattcacggcacagcaacgtcaggcggtgatgacgttcaacagtgtccagg

SEQ ID NO: 661455 - DNA, 75 bp, synthetic construct
  source 1..75: mol_type = other DNA
aaggaaaaactgcgcacgcaggacggcgatccgcagaaccgcttcaccgcaacgggcgcagcctccgaccagctg

SEQ ID NO: 661456 - DNA, 75 bp, synthetic construct
  source 1..75: mol_type = other DNA
gtctcgttgcaatgcgtcgggccggggcattacgtcgcacaaccacaatcagaatacgcattcatgcgtagataa

SEQ ID NO: 661457 - DNA, 75 bp, synthetic construct
  source 1..75: mol_type = other DNA
tccggttccggcaagtcagttacagcactggcgttgatgcgtctgctggaacaggcgggcggtttggtacagtgc

SEQ ID NO: 661458 - DNA, 75 bp, synthetic construct
  source 1..75: mol_type = other DNA
ccagaccattggcgattcgattatggaaccactgcgtattcacggcttaatgcgggatgaaaaagctgccgcacg

SEQ ID NO: 661459 - DNA, 75 bp, synthetic construct
  source 1..75: mol_type = other DNA
gcgacggtgttagtgaagtcccgcccatgccctggcgcacggtcgtcggtgcaggcattgccggagaagcaaagc

SEQ ID NO: 661460 - DNA, 75 bp, synthetic construct
  source 1..75: mol_type = other DNA
ggctctgggtgaaacattaaacaactgcgttttactctgcgaacagttgttactgatgcttgagcaacaaggggg

SEQ ID NO: 661461 - DNA, 75 bp, synthetic construct
  source 1..75: mol_type = other DNA
cctccggttcacaggcattttcatccccccgtctgaaagaaatctttggtattcagccacagctttcagcacgcg

SEQ ID NO: 661462 - DNA, 75 bp, synthetic construct
  source 1..75: mol_type = other DNA
gggtttttatcggctggcacatgtgttgggacaatttcgtaatacagaaagcgaggcacgggtagaagcaatgaa

SEQ ID NO: 661463 - DNA, 75 bp, synthetic construct
  source 1..75: mol_type = other DNA
taataaggttctgaagtgttaccaaagtgaagctaacaagaaaatagcgcgtctattaaataataatcagaagtt

SEQ ID NO: 661464 - DNA, 75 bp, synthetic construct
  source 1..75: mol_type = other DNA
tcagcgcggtgatatggtggtgatttatgaccgttcaggggaatttgttaaaagttactatgatccctccatcga

SEQ ID NO: 661465 - DNA, 75 bp, synthetic construct
  source 1..75: mol_type = other DNA
atgaattcactacgtccggaattattagaactgacaccgcaggcactgacggcgttaagcaatgccggttttgtt

SEQ ID NO: 661466 - DNA, 75 bp, synthetic construct
  source 1..75: mol_type = other DNA
tggcgaacggccaggcactgaaagaggctcagtgcagctgcggggccagcggtatgtgccgtcatcgcgtgatgc

SEQ ID NO: 661467 - DNA, 75 bp, synthetic construct
  source 1..75: mol_type = other DNA
cggggggaagcatctccgatgtgaaggcgggccagaacatccccggaaccacttatcacgtggaaaaaatcacgc

SEQ ID NO: 661468 - DNA, 75 bp, synthetic construct
  source 1..75: mol_type = other DNA
tcacaaacaagctgggcatgcatgcccggcctgccatgaaactctttgaattaatgcagggttttgacgctgaag

SEQ ID NO: 661469 - DNA, 75 bp, synthetic construct
  source 1..75: mol_type = other DNA
tatggttctggaaagtcaggacgaatatgactcacaatgggcgccaatttgttccattgctccaaagactggctg

SEQ ID NO: 661470 - DNA, 63 bp, synthetic construct
  source 1..63: mol_type = other DNA
atgaaaacattccgctggaaagtgaagccggatatggaggtgaactcgcagccatcggtgcgt

SEQ ID NO: 661471 - DNA, 75 bp, synthetic construct
  source 1..75: mol_type = other DNA
gttcgccagcatgagcgggatgccgggggcggtgatggtgggctcaccagcgctgaacgtcagcgtctgaaagag

SEQ ID NO: 661472 - DNA, 75 bp, synthetic construct
  source 1..75: mol_type = other DNA
cgcgttcctaataacgtcatgcaaataaaagccattcaggcgatgggggcaacaccaactcccatgccattaggc

SEQ ID NO: 661473 - DNA, 75 bp, synthetic construct
  source 1..75: mol_type = other DNA
acttgcgctctatcccagctcccaattgggatcaaaacaggatgtcaccgagcaagccataatgggcatgaatgt

SEQ ID NO: 661474 - DNA, 75 bp, synthetic construct
  source 1..75: mol_type = other DNA
gcaaccgatcaaagcagaagagaaaccggggcgtaacgatccttgtccgtgcggcagtggtaagaaatttaagca

SEQ ID NO: 661475 - DNA, 75 bp, synthetic construct
  source 1..75: mol_type = other DNA
gcaaccgatcaaagcagaagaaaagccgggccgtaacgatccttgtccgtgcggcagtggtaagaaatttaagca

SEQ ID NO: 661476 - DNA, 75 bp, synthetic construct
  source 1..75: mol_type = other DNA
cgcagaggccggacgtcagcaggaaagcatttccgcagttacaacaaatgtacaggcattaccatccccccgcct

SEQ ID NO: 661477 - DNA, 75 bp, synthetic construct
  source 1..75: mol_type = other DNA
gccacgctgggtcgcgtgctgcgcatgaagccgggcacccgcattcttgacctcggcagcggctcgggcgagatg

SEQ ID NO: 661478 - DNA, 75 bp, synthetic construct
  source 1..75: mol_type = other DNA
tgattgcgacgttgatgaatgccattgcactgattgccagccagacatggcgcgatcatccggtagatttattgc

SEQ ID NO: 661479 - DNA, 75 bp, synthetic construct
  source 1..75: mol_type = other DNA
cacctgccggagcccaaaccccgcctgccatcttccgaaggcaactggtcacatgtattccaggatgtgacgtgg

SEQ ID NO: 661480 - DNA, 75 bp, synthetic construct
  source 1..75: mol_type = other DNA
accccggcgggaaaggtaagttatcttactttttaaaagatgttattgaaaaaaactcgttgaatgatggagcat

SEQ ID NO: 661481 - DNA, 75 bp, synthetic construct
  source 1..75: mol_type = other DNA
cagttaatacgcaataatacgacgatagcatacgggagtattgtaaaaatcaacgaagatttttattttactgtt

SEQ ID NO: 661482 - DNA, 75 bp, synthetic construct
  source 1..75: mol_type = other DNA
ttgatgatgttcaatttacgatgctaaataaagatatttatccggtaatagaaaataataatggagaaaacagac

SEQ ID NO: 661483 - DNA, 75 bp, synthetic construct
  source 1..75: mol_type = other DNA
gtgcctgtcagcattttagtaaatgacatttttttgaagggttttttcataaaacaccctgattttgctaagtgg

SEQ ID NO: 661484 - DNA, 75 bp, synthetic construct
  source 1..75: mol_type = other DNA
ttaatgaaaaacagttagaaaaattaaatcctccggaaaatttacgagcagtaatagaaaaatgggggtggaaga

SEQ ID NO: 661485 - DNA, 75 bp, synthetic construct
  source 1..75: mol_type = other DNA
tatcttaatgagttaggatatgtttatggtgatgaagaaaaaacaaaagaaattgtaaataaacttccgggttat

SEQ ID NO: 661486 - DNA, 75 bp, synthetic construct
  source 1..75: mol_type = other DNA
ggcatgtgccgtcatcgcgtgatgctggtgttaagttatcaacgactttgtgctaccgcccagcccacggaaaaa

SEQ ID NO: 661487 - DNA, 75 bp, synthetic construct
  source 1..75: mol_type = other DNA
cataccgtggcgcacggtcgttggcgcaggcattgctggcgaagcaaagcttgatcatttgcggctggtgtcact

SEQ ID NO: 661488 - DNA, 75 bp, synthetic construct
  source 1..75: mol_type = other DNA
atcactagttggtccggtaataactaaagcagtttcactaatgatcacaaccgctggaattattacggtattccc

SEQ ID NO: 661489 - DNA, 75 bp, synthetic construct
  source 1..75: mol_type = other DNA
ttacttacagcatttttctgttttgttgataatgggaaaactataaaacttagagaggcttttattattggtcat

SEQ ID NO: 661490 - DNA, 75 bp, synthetic construct
  source 1..75: mol_type = other DNA
gcgtattcttatgctatagtaatgtctatgattggtggggtgggtgtcggaactgtaataatcaagtatggttct

SEQ ID NO: 661491 - DNA, 75 bp, synthetic construct
  source 1..75: mol_type = other DNA
ggttgtatatgtcaatgattttaatttaagtaatcaagaaaaatcgcgcttaatactaaggctatttgatgatgt

SEQ ID NO: 661492 - DNA, 75 bp, synthetic construct
  source 1..75: mol_type = other DNA
atattctgatgatgctaaaaagataaaacatgcatgctccgtaataaatcatattaatcttcgcagcgatcagtc

SEQ ID NO: 661493 - DNA, 75 bp, synthetic construct
  source 1..75: mol_type = other DNA
gggcgaacagctgtatcttaatgagttaggatatgtttatggtaatgaagaaaaaacaaatgaaattgtaaaaaa

SEQ ID NO: 661494 - DNA, 75 bp, synthetic construct
  source 1..75: mol_type = other DNA
aacattgtgaaacatgccgatgccagtgcggtcacgctgcaaggctggcagcaggatgagcgattaatgctggtg

SEQ ID NO: 661495 - DNA, 75 bp, synthetic construct
  source 1..75: mol_type = other DNA
atggctggtgatgaagacgttgttctcccgtttaattaccgttattgcctgcttttttatcttctctgcgcatgg

SEQ ID NO: 661496 - DNA, 75 bp, synthetic construct
  source 1..75: mol_type = other DNA
atccagaatcgcacagccatttgaacaggctgattttctctgtctgcataacattcgatatccgcgccattacct

SEQ ID NO: 661497 - DNA, 75 bp, synthetic construct
  source 1..75: mol_type = other DNA
gcgcattaggcggactggctgggctgctggtcgcaaataaatcagcacgtaaacttcttacgaaatatggcacca

SEQ ID NO: 661498 - DNA, 75 bp, synthetic construct
  source 1..75: mol_type = other DNA
gcaatgaagaagaggcgctggaaatctatttcctgagctgcgcggctattgatattgaccattttatggaacgca

SEQ ID NO: 661499 - DNA, 75 bp, synthetic construct
  source 1..75: mol_type = other DNA
gctaagtggtacttctatcaattacttaagaattatgagggcgaacagctgtatcttaatgagttaggatatgtt

SEQ ID NO: 661500 - DNA, 75 bp, synthetic construct
  source 1..75: mol_type = other DNA
atctaaaatagctgagaccttatttttcaatctcgataaagaaccctataaaaatagccgtgaattacaggaatt

SEQ ID NO: 661501 - DNA, 75 bp, synthetic construct
  source 1..75: mol_type = other DNA
gaaccctataaaaacagccctgagttacaggaattgatttgggagaagttggttgtatatgtcaatgattttaat

SEQ ID NO: 661502 - DNA, 75 bp, synthetic construct
  source 1..75: mol_type = other DNA
agtaaaaagagcaggtattgacttgccagagggccagtgcacgcatgtattgcgccatacattcgctagtcactt

SEQ ID NO: 661503 - DNA, 75 bp, synthetic construct
  source 1..75: mol_type = other DNA
ctaggacactggtcagcaccaaacccgctggcaggacttccgaccttcaaaattaccgaaggtgagctggctttt

SEQ ID NO: 661504 - DNA, 75 bp, synthetic construct
  source 1..75: mol_type = other DNA
acctgcttggaatcaccaccagcgtccactgtgtcgcaggcgtggtggattacgtagtgaaaatcattgagcgtg

SEQ ID NO: 661505 - DNA, 75 bp, synthetic construct
  source 1..75: mol_type = other DNA
attgccggaagctccgccattacatacgctaccgctggcaaccaaagtgccagcccccttaccgccgctggaagg

SEQ ID NO: 661506 - DNA, 75 bp, synthetic construct
  source 1..75: mol_type = other DNA
tcgcgagcagtcatatctacatgctgtttttgccgaactgaagcgccttggggagtggtctggtgaaaaccccct

SEQ ID NO: 661507 - DNA, 75 bp, synthetic construct
  source 1..75: mol_type = other DNA
aggatgttgttttagtgcggcagccgcgccacctgcgccgccgcccgtctcgtatggcgtggaggaggatgtctt

SEQ ID NO: 661508 - DNA, 75 bp, synthetic construct
  source 1..75: mol_type = other DNA
caaagtcgtgcagcccgcgtttaaactggcacgcgatggttttatcgttaacgatgctttggcagacgatctcaa

SEQ ID NO: 661509 - DNA, 75 bp, synthetic construct
  source 1..75: mol_type = other DNA
gtggttgccggacgagctgcgtgttgaaaagggtttagtccggatacgctcaagctgctggaagcaaaaggtcag

SEQ ID NO: 661510 - DNA, 75 bp, synthetic construct
  source 1..75: mol_type = other DNA
gatcaaccctatagatgcgcagaaacgtgggattgccaacggcgatatggtgcgggtgtttaaccatcgtggcga

SEQ ID NO: 661511 - DNA, 75 bp, synthetic construct
  source 1..75: mol_type = other DNA
gggtattgtcgcgggcaagagcggtattttgctcaataaccagatggatgatttctccgctaaaccgggtgtacc

SEQ ID NO: 661512 - DNA, 75 bp, synthetic construct
  source 1..75: mol_type = other DNA
gatcagggcaacccggacagcaaaaaatcactcacttcgcatctggcttccggcacacccggtacggtagcgggt

SEQ ID NO: 661513 - DNA, 75 bp, synthetic construct
  source 1..75: mol_type = other DNA
acgctccggcggcggtggtgcctattcgtactattcacaacatttcgcttaacccaaactttggcggtgaggtga

SEQ ID NO: 661514 - DNA, 75 bp, synthetic construct
  source 1..75: mol_type = other DNA
tcacggcccttatgtgctggcgggttggtcgtatggcgcgtttcttgcggcgggcccgcacagcgcctgtacgcc

SEQ ID NO: 661515 - DNA, 75 bp, synthetic construct
  source 1..75: mol_type = other DNA
aattcgccgactacgattttgtgaagtatagcgagctggatctcgaaaaagaggcgcagtctcagggtttccagg

SEQ ID NO: 661516 - DNA, 75 bp, synthetic construct
  source 1..75: mol_type = other DNA
ggctataccgccccttccgtcgccgggcaacaggcagtcatcgaagaggcgttaatgctggcggccatcgacgac

SEQ ID NO: 661517 - DNA, 75 bp, synthetic construct
  source 1..75: mol_type = other DNA
cccccgtcgccgccccggagtggctgggggagggtcgcttaagctggcaaaacaaagccttttcccgcggtcaga

SEQ ID NO: 661518 - DNA, 75 bp, synthetic construct
  source 1..75: mol_type = other DNA
ggcgcgctaatgcagcagtgcgcaagcggcgcgctaatgcagcagtgcgcaagcggcgcgatggtggcggtattt

SEQ ID NO: 661519 - DNA, 75 bp, synthetic construct
  source 1..75: mol_type = other DNA
ggagaatgcggatgccagctctctggccttcacggccctgcacgcgcgccgtctcgatcttcccttccgcctggc

SEQ ID NO: 661520 - DNA, 75 bp, synthetic construct
  source 1..75: mol_type = other DNA
ctcggccatacggatataaaaatgaccatgcgatatgcgcactttgccccagaccacttggaagatgcagttaaa

SEQ ID NO: 661521 - DNA, 75 bp, synthetic construct
  source 1..75: mol_type = other DNA
aagcgcgattgttgaagtgctgtcacccggtcagcgtccgaccaaacgcggattaatttacgccgcgacgccagc

SEQ ID NO: 661522 - DNA, 75 bp, synthetic construct
  source 1..75: mol_type = other DNA
caaattaaatcaacggcagcgagaaacctgtccagcttcagaactggttgtcggtatgcagtgcggcggcagcga

SEQ ID NO: 661523 - DNA, 75 bp, synthetic construct
  source 1..75: mol_type = other DNA
gcccgacagccagcttgccgactttatcggcctcgctaaaacggccggtatggtgtcgcaaaacctgacgctgca

SEQ ID NO: 661524 - DNA, 75 bp, synthetic construct
  source 1..75: mol_type = other DNA
ccgcgccggtgctgaaggccacgcggcagtcgtaccacttcacggacgtctccgcgcagttcctcaatgacgcca

SEQ ID NO: 661525 - DNA, 75 bp, synthetic construct
  source 1..75: mol_type = other DNA
gaggcgctcagcgcctgggccggtgagaaatcgggggcgctggtttacagcggccacggcgccagcggcaagcag

SEQ ID NO: 661526 - DNA, 75 bp, synthetic construct
  source 1..75: mol_type = other DNA
cggtaacgcatccgcaggcggggaatctgggcggcggtggttttatgctgatccgcactaaagatggcaacacca

SEQ ID NO: 661527 - DNA, 75 bp, synthetic construct
  source 1..75: mol_type = other DNA
gatctgaaaaccaacgaagtggtgtggaagaaacgcattggtactccgcaggacagtatgccgttcccgatgccg

SEQ ID NO: 661528 - DNA, 75 bp, synthetic construct
  source 1..75: mol_type = other DNA
gcaacgcgttgccagtcgggttattggtgcaattattggtgtattcgcgctacgcctgatttacgaaggggtgac

SEQ ID NO: 661529 - DNA, 75 bp, synthetic construct
  source 1..75: mol_type = other DNA
agcaggtcgccagtcggattattggtatggttattggtctatttgcgctacggctgatttatgaaggggtgacgc

SEQ ID NO: 661530 - DNA, 75 bp, synthetic construct
  source 1..75: mol_type = other DNA
gggcgggatttccgttgatccgaatcgtgaagtggcaattgccaacccaatggcactgccgtttgtttcgaaact

SEQ ID NO: 661531 - DNA, 75 bp, synthetic construct
  source 1..75: mol_type = other DNA
gatcgtcgtaatggtgaactggtggttcctgccccggaaaaaccggttccccaaggtgctgccaaaggcgattac

SEQ ID NO: 661532 - DNA, 75 bp, synthetic construct
  source 1..75: mol_type = other DNA
acgatccgggcgaaatcaccaatgaagtgacgccgattaaagtgggcgacaccctttacctgtgtaccgctcacc

SEQ ID NO: 661533 - DNA, 75 bp, synthetic construct
  source 1..75: mol_type = other DNA
ctgtggctgatttttgtcggtatgatgcttttctccagcggattttttgccgctcactctgttgccagtagctgg

SEQ ID NO: 661534 - DNA, 75 bp, synthetic construct
  source 1..75: mol_type = other DNA
ctttggctcatttttatcggtatgatgcttttctcaagcggattttttgccgctcattctgttgccagtagctgg

SEQ ID NO: 661535 - DNA, 75 bp, synthetic construct
  source 1..75: mol_type = other DNA
gcgcaaaacgcgctaaaggccaggcctcctcgctgtatctgttcagttactatctggggtcgagtattgccggga

SEQ ID NO: 661536 - DNA, 75 bp, synthetic construct
  source 1..75: mol_type = other DNA
cgcagaattaccgcaggcgacggaatgccagcttgggcagatgttcctccaccaacacgtgaagaacaaattgca

SEQ ID NO: 661537 - DNA, 75 bp, synthetic construct
  source 1..75: mol_type = other DNA
catgaacagtaagcaatggcccggtaaagccgctattggtcgtctgaaaggcgaagaactggcgcaatataattt

SEQ ID NO: 661538 - DNA, 75 bp, synthetic construct
  source 1..75: mol_type = other DNA
gtctctttatgttgaaaaaggtgaatggcctgaagaaaaaggtgttgatatagacgaagtaattttcagggaata

SEQ ID NO: 661539 - DNA, 75 bp, synthetic construct
  source 1..75: mol_type = other DNA
tgtggtgatctccgcaggcggtcacggttcatttggtacgaagatgggcgactatattgtggcttatgcgctgcc

SEQ ID NO: 661540 - DNA, 75 bp, synthetic construct
  source 1..75: mol_type = other DNA
caaagcattatggttgggccggacggcgagttgtacggcgcatctgacccgcgctcggtggatgatttaacggcg

SEQ ID NO: 661541 - DNA, 75 bp, synthetic construct
  source 1..75: mol_type = other DNA
ctttggcagtgccgacgcgatgcaaatcatggcagaagctgagaaatacgcctacgccgaccgctcggaatatct

SEQ ID NO: 661542 - DNA, 75 bp, synthetic construct
  source 1..75: mol_type = other DNA
ttccaccatcagtggttgccggacgagctgcgtgtcgaaaaagggtttagcccggatacgctcaagctgctggaa

SEQ ID NO: 661543 - DNA, 75 bp, synthetic construct
  source 1..75: mol_type = other DNA
gatgctaacgctgtcgggccgaataaacgtccgctgtcatcgatgtcaccaaccattgtggtgaaagacggtaaa

SEQ ID NO: 661544 - DNA, 75 bp, synthetic construct
  source 1..75: mol_type = other DNA
gctgaaagaggcgatgggcagtacacaaagcattatggttgggccggacggtgagttgtacggcgcatccgatcc

SEQ ID NO: 661545 - DNA, 75 bp, synthetic construct
  source 1..75: mol_type = other DNA
atgctgatccgcactaaggatggcaatacaaccgctatcgatttccgcgaaatggcacccgccaaagcgacccgc

SEQ ID NO: 661546 - DNA, 75 bp, synthetic construct
  source 1..75: mol_type = other DNA
atgcatcttctgttatccgcgaattgagtccggtcaaccgaccgtttgctcagaaacctgcgtgggtcgtattcg

SEQ ID NO: 661547 - DNA, 75 bp, synthetic construct
  source 1..75: mol_type = other DNA
gcgaacactgcctgaacccggcatgtgtggcgacctgcccgagcggtgcgatttacaagcgtgaagaagatggca

SEQ ID NO: 661548 - DNA, 75 bp, synthetic construct
  source 1..75: mol_type = other DNA
ctcggcgtcgcctggatgctgtggcgcagtaaacgcgccgcgctttggctgtacgcagccctgctgctcggcact

SEQ ID NO: 661549 - DNA, 75 bp, synthetic construct
  source 1..75: mol_type = other DNA
gatgccaacgccgtcgggccgaacaaacgcccgctgtcatcgatgtcaccaaccattgtggtgaaagacggtaaa

SEQ ID NO: 661550 - DNA, 75 bp, synthetic construct
  source 1..75: mol_type = other DNA
atccgctcgaaaaatggcaataccaccgctatcgatttccgcgaaatggcacccgccaaagcgacccgcgatatg

SEQ ID NO: 661551 - DNA, 75 bp, synthetic construct
  source 1..75: mol_type = other DNA
ctcaatattctggaaaacttcgatatgcagaagtacggctttggcagcgccgacgcgatgcaaatcatggcagaa

SEQ ID NO: 661552 - DNA, 75 bp, synthetic construct
  source 1..75: mol_type = other DNA
acctgaagggcattaacgtgaaataccgttatgaatttacggacacgctggggctggtgacgtcattcagttatg

SEQ ID NO: 661553 - DNA, 75 bp, synthetic construct
  source 1..75: mol_type = other DNA
tatatttcaagaggttggttatcaaatgtctggatagaaagctcatcattaaattcctctactataagtttggca

SEQ ID NO: 661554 - DNA, 75 bp, synthetic construct
  source 1..75: mol_type = other DNA
ttgaaacattgcttccattaataatgttatttttaataatgacatttgtcaggtattttttcgttctagacggac

SEQ ID NO: 661555 - DNA, 75 bp, synthetic construct
  source 1..75: mol_type = other DNA
cgcgaatggctgggctggggccatgcctgggcgcatgaaaccgcggtggtccgacggaagagcgaggcgtcccgg

SEQ ID NO: 661556 - DNA, 75 bp, synthetic construct
  source 1..75: mol_type = other DNA
gtacacaaccacccagtcgaatgaaccgcctgccggggtgttcaggcagaaactgcagtacgcccgggatgtgcg

SEQ ID NO: 661557 - DNA, 75 bp, synthetic construct
  source 1..75: mol_type = other DNA
cctcattttcataggaataaaaatcagtgggaaatgtttattgtgcttaacggaatatttgaattaactaaatat

SEQ ID NO: 661558 - DNA, 75 bp, synthetic construct
  source 1..75: mol_type = other DNA
attttgacaaaaaagcagaagattatttcttcaataagtttctgttgtcttttgatccctcaacacagcaatgga

SEQ ID NO: 661559 - DNA, 75 bp, synthetic construct
  source 1..75: mol_type = other DNA
caccgcagcagcaatatcagcagccgcaacagccggttgcaccacagccgcaatatcagcagccgcaacagccag

SEQ ID NO: 661560 - DNA, 75 bp, synthetic construct
  source 1..75: mol_type = other DNA
caacaaccggttgcaccacagccgcaatatcagcagccgcaacagccagttgcgccgcagccgcaggataccctg

SEQ ID NO: 661561 - DNA, 75 bp, synthetic construct
  source 1..75: mol_type = other DNA
gctattgcccgtgcgctgatgatggagccgcaggtactgctgtttgatgaaccgactgccgcgctggatccggaa

SEQ ID NO: 661562 - DNA, 75 bp, synthetic construct
  source 1..75: mol_type = other DNA
cggtgctgaaaaaagaaccgtacattgtggtgttggtggacgaatttgccgacctgatgatgacggtaggtaaaa

SEQ ID NO: 661563 - DNA, 75 bp, synthetic construct
  source 1..75: mol_type = other DNA
ggatttggccgaccctgccgagctggctggtctcaacgatgtccttgaagggcgtccccttgtgatcgctcagaa

SEQ ID NO: 661564 - DNA, 75 bp, synthetic construct
  source 1..75: mol_type = other DNA
tgacatctaccggcgtggccgcctgcggcccgattagctttattggtctcgtggtgccgcatatgatgcgtagca

SEQ ID NO: 661565 - DNA, 75 bp, synthetic construct
  source 1..75: mol_type = other DNA
aaagccagtgacgttatcagcatcaacggagaataagaaagctgaagtgaaaaagagtcataatgtgggtaactc

SEQ ID NO: 661566 - DNA, 75 bp, synthetic construct
  source 1..75: mol_type = other DNA
taaagaaaatatcgaaagtacatcaaggcttaacttacagaaattaaatcgtggtaatattgatatatttaaagg

SEQ ID NO: 661567 - DNA, 75 bp, synthetic construct
  source 1..75: mol_type = other DNA
atcaggactctgaatgaaacaaatatcgatatgtttttggaggaatatggaattaataaaaatagtatatcagaa

SEQ ID NO: 661568 - DNA, 75 bp, synthetic construct
  source 1..75: mol_type = other DNA
gaggttacgcattttctttgaaaccaaccttgttcgttatgccgcaaaaaaagcctctgaagaggatatcaacag

SEQ ID NO: 661569 - DNA, 75 bp, synthetic construct
  source 1..75: mol_type = other DNA
ggtatcttcagacccatactgatatgcccggcaacgatgacctgaagggcattaacgtgaaataccgttatgaat

SEQ ID NO: 661570 - DNA, 75 bp, synthetic construct
  source 1..75: mol_type = other DNA
caggggaacgaaccggggaatggcgatctggagcagtacattttcgaaattgagccagccattcaataccgcgtg

SEQ ID NO: 661571 - DNA, 75 bp, synthetic construct
  source 1..75: mol_type = other DNA
ccccacgatttacaagatgattaacagtggtaagttaagttacacctctgttgtaaagcacgggaaggctattaa

SEQ ID NO: 661572 - DNA, 75 bp, synthetic construct
  source 1..75: mol_type = other DNA
tgccctgcgttctgaccgctgggcgggtgcggatttctgggagcagcagggcaggcgcgtcagcctggacgatat

SEQ ID NO: 661573 - DNA, 75 bp, synthetic construct
  source 1..75: mol_type = other DNA
actggagctcccggttggcgtgctgaccgccattatcggtgcgccgtggtttgtctggttgcttgtgagaatgcg

SEQ ID NO: 661574 - DNA, 75 bp, synthetic construct
  source 1..75: mol_type = other DNA
tcgtaaccgctggttcagcgtaatggcggggccatctgtgcgcgtgaatgaatggttcagagcgtatgcgatggc

SEQ ID NO: 661575 - DNA, 75 bp, synthetic construct
  source 1..75: mol_type = other DNA
atacccgctggcatgaagattccgttcgtaaccgctggttcagcgtaatggcggggccatctgtgcgcgtgaatg

SEQ ID NO: 661576 - DNA, 75 bp, synthetic construct
  source 1..75: mol_type = other DNA
tttctgaaaaggggttactaatggaggttaaagaaggcccatttaatcctttagaggcaaaagaatacttggtaa

SEQ ID NO: 661577 - DNA, 75 bp, synthetic construct
  source 1..75: mol_type = other DNA
cccacagtatgttgatggcatcacctccgacagtgaaagcgaaggtggcgcgggcggtttcgatggcgctgaaga

SEQ ID NO: 661578 - DNA, 75 bp, synthetic construct
  source 1..75: mol_type = other DNA
acttcgaggccatgcaaaaggagatgtacgggcagtttgaaaacaccttcatgatgtacctaccgcgcctgtgcg

SEQ ID NO: 661579 - DNA, 75 bp, synthetic construct
  source 1..75: mol_type = other DNA
gacaatgcgccctggctgggtgaagggaaggacaaacgaactttaatagacctgatcacaatgtggtatgaacgc

SEQ ID NO: 661580 - DNA, 75 bp, synthetic construct
  source 1..75: mol_type = other DNA
tggctgggtgaatcggtagatcgccgaactctgaaagacgtcgttgaactctggttcaaactgcacggcaaatct

SEQ ID NO: 661581 - DNA, 75 bp, synthetic construct
  source 1..75: mol_type = other DNA
aacttgttcgcaccttccctaagggtgaagcattggcttttgagcgtcacacgatggaagaaaccgaagcaaaac

SEQ ID NO: 661582 - DNA, 75 bp, synthetic construct
  source 1..75: mol_type = other DNA
gaacactgaaagacgtagttgagctatggttcaaactacatggtaaagctctaaccgctgggcagcatgtctatg

SEQ ID NO: 661583 - DNA, 75 bp, synthetic construct
  source 1..75: mol_type = other DNA
tgtttttagcgaactatcccgcctgggcgaatggtcatatccaaacccactggagaacatgcgaaaattcaccat

SEQ ID NO: 661584 - DNA, 75 bp, synthetic construct
  source 1..75: mol_type = other DNA
atgtcgcctgttaagccccgcacggtaaatcttgaacaacgcaacctgtcatcggtttttggcacactgaaaaag

SEQ ID NO: 661585 - DNA, 75 bp, synthetic construct
  source 1..75: mol_type = other DNA
agaaaaaccgaaccgtgccaatatctcagaaactgcacgatgaactccccaaaaacagagggaagctattcaccc

SEQ ID NO: 661586 - DNA, 75 bp, synthetic construct
  source 1..75: mol_type = other DNA
cggatggtgttaatcgatcccgtgccgacaggatttctgttgcgaaaaccgggcggccctgctgcgcctgttagc

SEQ ID NO: 661587 - DNA, 75 bp, synthetic construct
  source 1..75: mol_type = other DNA
atggcagtacgaaaactcaccacaggaaaatggctttgcgaatgttatcccgccggacgtagtggacgtcgtgtg

SEQ ID NO: 661588 - DNA, 75 bp, synthetic construct
  source 1..75: mol_type = other DNA
tggctgggtgatgctgttgatcggcgctctctaaaagacatagtgaacctctggtataagcttcacggcatatct

SEQ ID NO: 661589 - DNA, 75 bp, synthetic construct
  source 1..75: mol_type = other DNA
cgcccacttcgcacccgaccacctggaagatgcagtgacaaaaaacccgcttcacaatctcaactggaaccgtta

SEQ ID NO: 661590 - DNA, 75 bp, synthetic construct
  source 1..75: mol_type = other DNA
taacttgtcacgggaccttgcccgttcactttcgacggtggcggtgcgtgtcgttgaagttattcctggcaaacc

SEQ ID NO: 661591 - DNA, 75 bp, synthetic construct
  source 1..75: mol_type = other DNA
gtgatgtcgtgctggtgtccggtattcagcacagaacgccggaaatcgtaggccgttatgacagcctcggcaacc

SEQ ID NO: 661592 - DNA, 75 bp, synthetic construct
  source 1..75: mol_type = other DNA
aagcagtgcagtggtgctctgttttcgcacgcagatttttgtcacccgtagcgatgtggtgctggtgtccggtat

SEQ ID NO: 661593 - DNA, 75 bp, synthetic construct
  source 1..75: mol_type = other DNA
gctggcattaggctacagcggcattgtggcggtggattacaaagaggcgcgagtcatgcgccgcgctggtttgcc

SEQ ID NO: 661594 - DNA, 75 bp, synthetic construct
  source 1..75: mol_type = other DNA
tagatacctttgcgcttgaacaaatggcgcgcctggtggaagcgcgtctggctgatttccgtattaaagccgatg

SEQ ID NO: 661595 - DNA, 75 bp, synthetic construct
  source 1..75: mol_type = other DNA
gccatgctttggctgagcgaaatttcccatcacttccgtggcgacagctactgctacggcggcggttattaccgt

SEQ ID NO: 661596 - DNA, 75 bp, synthetic construct
  source 1..75: mol_type = other DNA
tacccaaaatacgctgcatgacattgtcgctgaaatccaaaaactaccaggactacatttagcgggacttaccca

SEQ ID NO: 661597 - DNA, 75 bp, synthetic construct
  source 1..75: mol_type = other DNA
ttcatggtgcttttgttcgcgatcaggaagttcatgccgtggtgcaggactggaaagcgcgtggtcgcccacagt

SEQ ID NO: 661598 - DNA, 75 bp, synthetic construct
  source 1..75: mol_type = other DNA
acaaccggttgcaccgcagcagcaatatcagcagccacaacagccggttgcacagcagccgcagtatcagcagcc

SEQ ID NO: 661599 - DNA, 75 bp, synthetic construct
  source 1..75: mol_type = other DNA
agccgcaacaaccggttgcgccacagcagcaatatcagcagccgcaacagccggttgcgccgcagcagcagtatc

SEQ ID NO: 661600 - DNA, 75 bp, synthetic construct
  source 1..75: mol_type = other DNA
agccgcaacaaccggttgcgccacagccgcaatatcagcagccgcaacaaccagttgcgccgcagccgcagtatc

SEQ ID NO: 661601 - DNA, 75 bp, synthetic construct
  source 1..75: mol_type = other DNA
ctggtggaagcgcgtctggctgatttccgtattaaagccgatgtcgtcaattactctccggggccagttatcact

SEQ ID NO: 661602 - DNA, 75 bp, synthetic construct
  source 1..75: mol_type = other DNA
atgatcgacccgaaaatgctggagctttcggtttatgaaggcattccgcatctgttaacggaagtcgttactgat

SEQ ID NO: 661603 - DNA, 75 bp, synthetic construct
  source 1..75: mol_type = other DNA
actctacatcaaccggaaagcgtgggatgaagcctgcgatcgactcactgaaaacgcaccgcaagaatggcacga

SEQ ID NO: 661604 - DNA, 75 bp, synthetic construct
  source 1..75: mol_type = other DNA
cgcctggcgcaacaacgcggctggcaaaactacctgctgctggaagatgacgcggttattctcaagcaggagaaa

SEQ ID NO: 661605 - DNA, 75 bp, synthetic construct
  source 1..75: mol_type = other DNA
gaaaagctactccacgccggagagcgccgaccagcgaatccgcgaaatattgccggtggctcatgacatggcgga

SEQ ID NO: 661606 - DNA, 75 bp, synthetic construct
  source 1..75: mol_type = other DNA
tggtttgagcatgatttacatgccctgagtgagcaacagaagggtaagcgtgcagcaagaaccgtattgacgggg

SEQ ID NO: 661607 - DNA, 75 bp, synthetic construct
  source 1..75: mol_type = other DNA
caatgcgtggcacctctttggttttcacgcaacgtattgtcaacgctgagaatactctgctgaatgaagccgagg

SEQ ID NO: 661608 - DNA, 75 bp, synthetic construct
  source 1..75: mol_type = other DNA
cggttcgtgtctattatgaagatactgatgccggtggtgtggtgtaccatgccagttacatcgctttttatgaaa

SEQ ID NO: 661609 - DNA, 75 bp, synthetic construct
  source 1..75: mol_type = other DNA
aataagttacccgtagccaccaagccatctacattacctatcgccgataccatcggcttttttatggaaacctca

SEQ ID NO: 661610 - DNA, 75 bp, synthetic construct
  source 1..75: mol_type = other DNA
tgaacctgatttgcaaactgcaccacggcacctgctcgcgcccagaagaaactgcatcgctggcactcgcgcgca

SEQ ID NO: 661611 - DNA, 75 bp, synthetic construct
  source 1..75: mol_type = other DNA
tttcagcgtaaacccgctgcaactgcccggcgagcgcacgattctgtgtatctcgcacagccacaacacctttga

SEQ ID NO: 661612 - DNA, 75 bp, synthetic construct
  source 1..75: mol_type = other DNA
taaagactttattctcggggccagcacgccagtaaacgcggcgcttacggatatcgtccgcgatccgctgctccg

SEQ ID NO: 661613 - DNA, 75 bp, synthetic construct
  source 1..75: mol_type = other DNA
gttatcagcgaccgggctttagcgatatcgagaaaaaagcgactgataacattaaccactacttcaataagttac

SEQ ID NO: 661614 - DNA, 75 bp, synthetic construct
  source 1..75: mol_type = other DNA
gcgcttatctggtgaacagccgctactacccgcaactggcgcagcagatgagcaacgatgagcactcgctggaag

SEQ ID NO: 661615 - DNA, 75 bp, synthetic construct
  source 1..75: mol_type = other DNA
ccagcattgtcagtttgcaggatgaaaagcatgtcggttttcagtccatggtcgaggatattttgcaggtcgccg

SEQ ID NO: 661616 - DNA, 75 bp, synthetic construct
  source 1..75: mol_type = other DNA
gcaattgttgaagtgctgtcgcccggtcaacacccgactaaacgcgcattaatttacgccgcgacgccagccagg

SEQ ID NO: 661617 - DNA, 75 bp, synthetic construct
  source 1..75: mol_type = other DNA
tctcaatatgggaaaaaccgaccgcagcgccaacccttcgccgggcaacgacaaaggcggtctcgcaaacgtggt

SEQ ID NO: 661618 - DNA, 75 bp, synthetic construct
  source 1..75: mol_type = other DNA
tctcaatatgggaaaaaccgaccgcagcgccaacccttcgccgggcaacgataagggcggactcgcaaacgtggt

SEQ ID NO: 661619 - DNA, 75 bp, synthetic construct
  source 1..75: mol_type = other DNA
ccgactctgatttttttcaaaaagttgatgaaaaaatattatcaccataccgcggttttttagaaaaaaatacag

SEQ ID NO: 661620 - DNA, 75 bp, synthetic construct
  source 1..75: mol_type = other DNA
gtcattaaaatggcgacccgcaccgagctggcgaaccgctggtttgatttaatggatattaacgcgggcactatc

SEQ ID NO: 661621 - DNA, 75 bp, synthetic construct
  source 1..75: mol_type = other DNA
gattaatttacgccgcgacgccagccagcgattttgtctgtggcacgcaacaggtggcttcgggtatcaccgtgc

SEQ ID NO: 661622 - DNA, 75 bp, synthetic construct
  source 1..75: mol_type = other DNA
gcggcaatgccggttggcgtggcgttacttcgcacgctgattgatcaacataatctgacctatgcggatttgaag

SEQ ID NO: 661623 - DNA, 75 bp, synthetic construct
  source 1..75: mol_type = other DNA
agcgccaacggcgggatgttatttcttgatgagattggcgaattgggcgcagacgaacaggcaatgctgctgaaa

SEQ ID NO: 661624 - DNA, 75 bp, synthetic construct
  source 1..75: mol_type = other DNA
gcgaactttctgccagcgtcacgcggatggccacctttgccactagcggacgcatcactctggacgtggttgaag

SEQ ID NO: 661625 - DNA, 75 bp, synthetic construct
  source 1..75: mol_type = other DNA
tctcaatatgggaaaaaccgaccgcagcgccaacccttcgccgggcaacgaaaatggcggactcgcaaacgtggt

SEQ ID NO: 661626 - DNA, 75 bp, synthetic construct
  source 1..75: mol_type = other DNA
caaactgaatcaacggcagcgagaaacctgtccggcttcagaactggttgtcggcatgcagtgcgcggtagcgat

SEQ ID NO: 661627 - DNA, 75 bp, synthetic construct
  source 1..75: mol_type = other DNA
ggcaatgctgggtgtacaaggggcgcaaatgttggagcggctgctggaacccggcgatatcatcggtttttcctg

SEQ ID NO: 661628 - DNA, 75 bp, synthetic construct
  source 1..75: mol_type = other DNA
gcgctgctggcaaaagccgattacgtgctgaccgataacagcgggtttattttcgatgctatccacgttgataag

SEQ ID NO: 661629 - DNA, 75 bp, synthetic construct
  source 1..75: mol_type = other DNA
ccatgacatggtcgaatcttccgctgctgcatggcgggatgaaatgagcaggaaggggttccgtgggcatttctg

SEQ ID NO: 661630 - DNA, 75 bp, synthetic construct
  source 1..75: mol_type = other DNA
ctttcccatgacatggtcgaatcttctgctgctgcatggcgggatgaaatgagcaggaaggtcgccggtaaatga

SEQ ID NO: 661631 - DNA, 75 bp, synthetic construct
  source 1..75: mol_type = other DNA
aaaaagcatggaccgtaatggctctcagttaatccgggattttatgcgccagaccgtggaacggcagcataatac

SEQ ID NO: 661632 - DNA, 75 bp, synthetic construct
  source 1..75: mol_type = other DNA
attcaaagatatgaaagcgtcactacgcgccagttatcagcataataccgagaacggtcgactctacctctccgg

SEQ ID NO: 661633 - DNA, 75 bp, synthetic construct
  source 1..75: mol_type = other DNA
ttttcgactctttccatttttctggcatttcgttgaaaagcgatgagaatatgttaccgccagacctacgtggtt

SEQ ID NO: 661634 - DNA, 75 bp, synthetic construct
  source 1..75: mol_type = other DNA
gaattatcgcggtgatccacagtgaaaaagaacgtgaatccgcagagccagaagaactggttgaaccgttcctga

SEQ ID NO: 661635 - DNA, 75 bp, synthetic construct
  source 1..75: mol_type = other DNA
gaccgaacagggctggagtgctggcggaggtaaagcggaaattgttgccgatgaaggtgcaacaggtggtaccgc

SEQ ID NO: 661636 - DNA, 75 bp, synthetic construct
  source 1..75: mol_type = other DNA
agagacccggagtattactttgttgtggttctggcggggcagtcaaacagcatggcatatggtgaaggtcttccg

SEQ ID NO: 661637 - DNA, 75 bp, synthetic construct
  source 1..75: mol_type = other DNA
tgataaattccgtgcagacctgacggatatggcaggtcagtgcgtcggtggctctgctggcggtgttccctggat

SEQ ID NO: 661638 - DNA, 75 bp, synthetic construct
  source 1..75: mol_type = other DNA
agttaatccgggattttatgcgccagaccgttgaacggcagcataatacctggttccgtgaccaggttgaggcag

SEQ ID NO: 661639 - DNA, 75 bp, synthetic construct
  source 1..75: mol_type = other DNA
aactggggatgacgttccctgaactgtacgacgacagccatccggaagccctggcccgtaatacacagaaaatat

SEQ ID NO: 661640 - DNA, 75 bp, synthetic construct
  source 1..75: mol_type = other DNA
tgcattgttatcgatgtcatcagatgaacgaaaaaaactggcgaacgaagatgctgcaaccatccgccaggcatt

SEQ ID NO: 661641 - DNA, 75 bp, synthetic construct
  source 1..75: mol_type = other DNA
aactcgagcgcggcgatgtgcttccccatgacatggtcgaatcttctgccgctgcatggcgggatgaaatgagca

SEQ ID NO: 661642 - DNA, 75 bp, synthetic construct
  source 1..75: mol_type = other DNA
gccgaccagcggattcgcgaaatattgccggtggctcataatgtcgcggaactgcgttatttgctgtcagaggcg

SEQ ID NO: 661643 - DNA, 75 bp, synthetic construct
  source 1..75: mol_type = other DNA
cgtgaatctggataaacgcccggatcgcttacagcagatccgtgaagaactggcactgctgcatattccgcctga

SEQ ID NO: 661644 - DNA, 75 bp, synthetic construct
  source 1..75: mol_type = other DNA
cgctctaccgcccaatcatcaccgccttacaggcacaggggaagagctgcacgctggtgatcaacgaccgcgtgt

SEQ ID NO: 661645 - DNA, 75 bp, synthetic construct
  source 1..75: mol_type = other DNA
acccatcgccgacaccatcggcttttttatggaaacctcattccactacacgctgtatcgcccaatcatcaccgc

SEQ ID NO: 661646 - DNA, 75 bp, synthetic construct
  source 1..75: mol_type = other DNA
ggccagcacgccagtaaacgcggcgcttacggatatcgtccgcgatccgctgctgcgcaatgcttatctgagtct

SEQ ID NO: 661647 - DNA, 75 bp, synthetic construct
  source 1..75: mol_type = other DNA
tttaacatccgctacatccatcacccggaaaaactgccgctgggcaaaaaacgcaacatgctcaacgaactggcg

SEQ ID NO: 661648 - DNA, 75 bp, synthetic construct
  source 1..75: mol_type = other DNA
gtcatttttactcgtttatcatgccagattacccgtcatatcagcgtttcgccgttggcacggaagatgcaatac

SEQ ID NO: 661649 - DNA, 75 bp, synthetic construct
  source 1..75: mol_type = other DNA
cgtgaaactggtcgctccggcgggtgatttctttatggatgtcgcgaatgacacgccggtgacactgatctctgc

SEQ ID NO: 661650 - DNA, 75 bp, synthetic construct
  source 1..75: mol_type = other DNA
acaatcacgccaatgttggcgatgtcgtgaagctggtggctccggcgggtgatttctttatggatgtgacaaacg

SEQ ID NO: 661651 - DNA, 75 bp, synthetic construct
  source 1..75: mol_type = other DNA
ttcgatgctatccacgttgataagcgggtgatcctgctcgactttccgggcatgacggaactgctcgacggcgag

SEQ ID NO: 661652 - DNA, 75 bp, synthetic construct
  source 1..75: mol_type = other DNA
cctggaatacataagtcttaaaaagggtgaggctatcgagcatgtattgaacggcgataagtggttgcatattgc

SEQ ID NO: 661653 - DNA, 75 bp, synthetic construct
  source 1..75: mol_type = other DNA
cctggaatacataagccttaaaaagggtgaggctattgagcattgtattgaacggcgacaagtggttgtatgctg

SEQ ID NO: 661654 - DNA, 75 bp, synthetic construct
  source 1..75: mol_type = other DNA
atgcgtaaaacagtggcttttggctttgtcggaaccgtactggattatgccggacgcggcagccaacgctggtca

SEQ ID NO: 661655 - DNA, 75 bp, synthetic construct
  source 1..75: mol_type = other DNA
tttcagccagaaaaagaagactatttaattcacatcaccaccggtacccacgtcgcgcagatttgctggtttctg

SEQ ID NO: 661656 - DNA, 75 bp, synthetic construct
  source 1..75: mol_type = other DNA
atgtttaaaagagttgcaatattagaaacgacagataaaggccgtaagaccaatttttgggatattaataatggt

SEQ ID NO: 661657 - DNA, 75 bp, synthetic construct
  source 1..75: mol_type = other DNA
gaactgggcgcagacgaacaggcaatgctgctaaaagccattgaagagaaaaccttttacccgtttggcagcgat

SEQ ID NO: 661658 - DNA, 75 bp, synthetic construct
  source 1..75: mol_type = other DNA
aagaagactatttaattcacatcaccaccggtacccacgtcgcgcagatttgctggtttctgctggcagaagcgc

SEQ ID NO: 661659 - DNA, 75 bp, synthetic construct
  source 1..75: mol_type = other DNA
cttcaaccgcatgattgagcagatcgaaaaagtggcgattaaatcccgcgcaccgatcctgcttaacggcccgac

SEQ ID NO: 661660 - DNA, 75 bp, synthetic construct
  source 1..75: mol_type = other DNA
attcttacacgccgtgcgcgatgaactggtttgcagtcaggaaaacggcaccgtacaaattaaaggtgaaacagt

SEQ ID NO: 661661 - DNA, 75 bp, synthetic construct
  source 1..75: mol_type = other DNA
gccgtcgaggaagatgtgtatagcaaaatcctgatgatgaatgaggggcatcggttggttagaaaggcatcttaa

SEQ ID NO: 661662 - DNA, 75 bp, synthetic construct
  source 1..75: mol_type = other DNA
agctgggggcgattctcggcaaagaagatgatcacgtcagcgaagccgattgcaaaacggaaccggaaaaggtga

SEQ ID NO: 661663 - DNA, 75 bp, synthetic construct
  source 1..75: mol_type = other DNA
accgttcagcggggtatagtgccagtgatgaaatattgaaaggtctggctaatcaggggctgcttgatgtttctc

SEQ ID NO: 661664 - DNA, 75 bp, synthetic construct
  source 1..75: mol_type = other DNA
cccctacttccttcatccagtaatgttctgcttttgcctggccgggaggagaaacaaagatggttaaaaggtaag

SEQ ID NO: 661665 - DNA, 75 bp, synthetic construct
  source 1..75: mol_type = other DNA
ttacaaggtgactgacgttatcgacgtcactattgccgaagtccgcatagaaacccgcagcattattgctcgccc

SEQ ID NO: 661666 - DNA, 75 bp, synthetic construct
  source 1..75: mol_type = other DNA
tttcagggatgaaacgagtgaatatcgatagcattctgaatgttcttacaagtttggtgaaaaagggaggcggga

SEQ ID NO: 661667 - DNA, 75 bp, synthetic construct
  source 1..75: mol_type = other DNA
tggctattttttctatgcagtcgccgaacgcgtgacgataccttttggtttaaatcacctggtgacgtcagtttt

SEQ ID NO: 661668 - DNA, 75 bp, synthetic construct
  source 1..75: mol_type = other DNA
attatatgcagggttatcttattggtaagccgcaaccgttaattgatacgctgaatgaaatcgaacccattcgcg

SEQ ID NO: 661669 - DNA, 75 bp, synthetic construct
  source 1..75: mol_type = other DNA
ccgctggatttggcggggaaaatggaacagggcaaactgatgattcagtatggtctggctggtgccgcgctggcg

SEQ ID NO: 661670 - DNA, 75 bp, synthetic construct
  source 1..75: mol_type = other DNA
tcgcccgacttcgctgcgccctaagacgttatttatcaactttcgtctgcactggcgtgaccggggattaccgtt

SEQ ID NO: 661671 - DNA, 75 bp, synthetic construct
  source 1..75: mol_type = other DNA
tctggcggcaatcggttgtttcgcgctagcctcggcgttgatgttctggaaaatcctcccggaatcacgccattt

SEQ ID NO: 661672 - DNA, 75 bp, synthetic construct
  source 1..75: mol_type = other DNA
tatttccggggtgcttacggtgattattggcggcgtcagcgaaccgattgagtttctgttcttatttgtcagtcc

SEQ ID NO: 661673 - DNA, 75 bp, synthetic construct
  source 1..75: mol_type = other DNA
tctcccctggcggcgttactccatcgcgagttgataaaccgtgcgtattttcatgaaaggagatcactcaataac

SEQ ID NO: 661674 - DNA, 75 bp, synthetic construct
  source 1..75: mol_type = other DNA
gtcagttcgatggctgacatggttggcgcggcgggtgccgcattatctcccctggcggcgttactccatcgcgag

SEQ ID NO: 661675 - DNA, 75 bp, synthetic construct
  source 1..75: mol_type = other DNA
tctctgtatccggcgttaattgttaactggttaacgtcacctggaggcaccaggcactgcatcacaaaattcatt

SEQ ID NO: 661676 - DNA, 75 bp, synthetic construct
  source 1..75: mol_type = other DNA
ttttttcgcagatgaacaatcgtacatattacgtgaaaagttttttaattcagggaggattgattgcataaatta

SEQ ID NO: 661677 - DNA, 75 bp, synthetic construct
  source 1..75: mol_type = other DNA
ttttctgccgccattggagcaaatgcttttatacaaaaggcacttttttgctctccattgaaacaaatgcttttc

SEQ ID NO: 661678 - DNA, 75 bp, synthetic construct
  source 1..75: mol_type = other DNA
tcctggttctgcttaccggtatgttgcttggtggatgcgaaagcaaacccggtatcaaacctttacagcagacga

SEQ ID NO: 661679 - DNA, 75 bp, synthetic construct
  source 1..75: mol_type = other DNA
gacgagaaaggtgaactgctggttccggaacgtaaaatcgcctatgacaccctggtaatggcgctgggtagcacc

SEQ ID NO: 661680 - DNA, 75 bp, synthetic construct
  source 1..75: mol_type = other DNA
caattaacaggtgctcgcttgtttgatcgtggacggcaaggcgcgcaactcaccttacctggcgaacaattttta

SEQ ID NO: 661681 - DNA, 75 bp, synthetic construct
  source 1..75: mol_type = other DNA
tttcagcatcgctttcgcgtcagcttacggttgaatatgactatgtgtggtttgtcccttctggcgcagtaaaag

SEQ ID NO: 661682 - DNA, 75 bp, synthetic construct
  source 1..75: mol_type = other DNA
ggaatactgccggagggttttttctggacggatgcggagaataacgacgtcccgatgacggctggggagctgatg

SEQ ID NO: 661683 - DNA, 75 bp, synthetic construct
  source 1..75: mol_type = other DNA
cgacgtggcgtgtctctccgagcgatcgtttattaaacgatctccgtggcctcattggttcggagcaggtggaac

SEQ ID NO: 661684 - DNA, 75 bp, synthetic construct
  source 1..75: mol_type = other DNA
catgctgcaacgctcggaaaccacggcggtattccagcttgaatcgcgcggcatgaaagacctgatcaagcgtct

SEQ ID NO: 661685 - DNA, 75 bp, synthetic construct
  source 1..75: mol_type = other DNA
gcatggatgcacgcaaataatcctattggaataccggcgataacaagaagtaaagatgttgcagacagctggcgc

SEQ ID NO: 661686 - DNA, 75 bp, synthetic construct
  source 1..75: mol_type = other DNA
acatcgggtacagcaaatcgctggagattaatacgcggtggacgtgaagttcgtgttcgcatggaaggtcagctt

SEQ ID NO: 661687 - DNA, 75 bp, synthetic construct
  source 1..75: mol_type = other DNA
atgccattctatttcaggaaggagtgtccgttaaactcaggctacctcatccgtctgggtggggagatggataaa

SEQ ID NO: 661688 - DNA, 75 bp, synthetic construct
  source 1..75: mol_type = other DNA
gatatccaaagtactctttttttattcgtgatgttataaacaaaagtataagagaaatcatagaaaagacagaga

SEQ ID NO: 661689 - DNA, 75 bp, synthetic construct
  source 1..75: mol_type = other DNA
gaactctggcaggcactgaactcaggtcaatatggtcaaatcgcgccgtatactcaaccggaagatgcggtggaa

SEQ ID NO: 661690 - DNA, 75 bp, synthetic construct
  source 1..75: mol_type = other DNA
catgacatagattcagccctggcatccctgagcgatctgcagaaccgcccatccgggacaatacgtattactact

SEQ ID NO: 661691 - DNA, 75 bp, synthetic construct
  source 1..75: mol_type = other DNA
ctgcaattgatgggcatggattggcgtatctaccttatgatcaggttgagcgggctattaaagaaaaaaaaactg

SEQ ID NO: 661692 - DNA, 75 bp, synthetic construct
  source 1..75: mol_type = other DNA
attttacaaacggattttagcctgaaagatggcgccgtctcggcgatgaaaggggtcgctttcggcgttgaccat

SEQ ID NO: 661693 - DNA, 75 bp, synthetic construct
  source 1..75: mol_type = other DNA
tgaagtactctgctaatttgggcgccaatggcaaagtgaacattgcgattgtcggcggcggcgctactggcgtgg

SEQ ID NO: 661694 - DNA, 75 bp, synthetic construct
  source 1..75: mol_type = other DNA
gtttggcagcgatcgccaggtgagcagtgattttcagcttatcgccggaacggtgcgtgatttgcgccagctggt

SEQ ID NO: 661695 - DNA, 75 bp, synthetic construct
  source 1..75: mol_type = other DNA
gcatgttgtttcttgatgagattggcgaactgggcgcagacgaacaggcgatgttgctgaaagccattgaagaga

SEQ ID NO: 661696 - DNA, 75 bp, synthetic construct
  source 1..75: mol_type = other DNA
gctgtcgaacttttccaccgtcggtagcctgatgggtaacctgacgcgcggctcaatgatgattgaaggacgaat

SEQ ID NO: 661697 - DNA, 75 bp, synthetic construct
  source 1..75: mol_type = other DNA
ggtttcgagttccagctaggttctgtggttgatatcgatcgtgaagcgaaaacaatcactattgctgagctgcgc

SEQ ID NO: 661698 - DNA, 75 bp, synthetic construct
  source 1..75: mol_type = other DNA
atggttactttaaaaccggattaatgatgctggtggggagtattaaccgcgttatccgtccgcgtttgaagttgc

SEQ ID NO: 661699 - DNA, 75 bp, synthetic construct
  source 1..75: mol_type = other DNA
tcactgattgaacgtaactataatcgtgcgcgtcagttgctgaatgacaacctggatatcctgcatgcaatgaaa

SEQ ID NO: 661700 - DNA, 75 bp, synthetic construct
  source 1..75: mol_type = other DNA
acgataacggtattctgtttatcgaaaacgtcggcaacctcgtgtgcccggccagcttcgatctcggtgaaaaac

SEQ ID NO: 661701 - DNA, 75 bp, synthetic construct
  source 1..75: mol_type = other DNA
gatcacgttcgagcaggtggggccagagcttcctgcaaaagttgtcgaactttcttatcagaaagcaaaagcaac

SEQ ID NO: 661702 - DNA, 75 bp, synthetic construct
  source 1..75: mol_type = other DNA
gccagaaacagaagtggtgagcgttgagattgaactgcataacccgtgggatttcgaagaggtctacgcctgcct

SEQ ID NO: 661703 - DNA, 75 bp, synthetic construct
  source 1..75: mol_type = other DNA
gccagcaagaatcgttggtcatcgatcgactggaattattgcatgacgcccgctcgcgctcgctatttgaaacgc

SEQ ID NO: 661704 - DNA, 75 bp, synthetic construct
  source 1..75: mol_type = other DNA
ggtgaacgaagcagcactgttcgctgcacgtggcaataaacgtgttgtttcgatggttgagttcgagaaagcgaa

SEQ ID NO: 661705 - DNA, 75 bp, synthetic construct
  source 1..75: mol_type = other DNA
aaccttgttcgttatgccgcaaaaaaagcctctgaagaggatatcaacagacttaaaaatattcttgctgtgcac

SEQ ID NO: 661706 - DNA, 75 bp, synthetic construct
  source 1..75: mol_type = other DNA
actttttccggggattaccttcgcgtaactgacaacaaggggaaaacgcacgatgtgctgaccggaagtgatgac

SEQ ID NO: 661707 - DNA, 75 bp, synthetic construct
  source 1..75: mol_type = other DNA
aagtgatgacggtcgccacagcaacacgtctctggcgtggggagctggcgtgcagtttaacccgaccgaatccgt

SEQ ID NO: 661708 - DNA, 75 bp, synthetic construct
  source 1..75: mol_type = other DNA
atccgtggccattgatgtcgcttatgaaggctccggcagtggtgactggcgcactgacgggttcatcgtgggtgt

SEQ ID NO: 661709 - DNA, 75 bp, synthetic construct
  source 1..75: mol_type = other DNA
tgattctgttcggcagcttccaggttgtcccggtgattaccgttatctctacctttgggctggtctttgcatctg

SEQ ID NO: 661710 - DNA, 75 bp, synthetic construct
  source 1..75: mol_type = other DNA
cagacgtaaaagatatttcggctgttcccggtgcgacaagctacggccctgaacatattgatttagctgaaattg

SEQ ID NO: 661711 - DNA, 75 bp, synthetic construct
  source 1..75: mol_type = other DNA
ccgaatccgtggccattgatattgcttatgaagggtccgggagtggtgactggcgcactgacggtttcatcgtgg

SEQ ID NO: 661712 - DNA, 75 bp, synthetic construct
  source 1..75: mol_type = other DNA
ccgaattcgtggccattgatattgcttatgaagggtccgggagtggcgactggcgcactgacggtttcatcgtgg

SEQ ID NO: 661713 - DNA, 75 bp, synthetic construct
  source 1..75: mol_type = other DNA
ttctgttcttcgttgacatgaggttcagcgcgtatgcgatggcgggtgtggcttacagccgtgtgtcgactttct

SEQ ID NO: 661714 - DNA, 75 bp, synthetic construct
  source 1..75: mol_type = other DNA
gagcagcaggccacgctgagcgcggggtatcttcatgcccggacgagcgctcccggtagcgataatcttaacggg

SEQ ID NO: 661715 - DNA, 75 bp, synthetic construct
  source 1..75: mol_type = other DNA
taacccggccgaatccgtggccgttgatgtcgcttatgaaggctccggcagtggcgactggcgcactgacgggtt

SEQ ID NO: 661716 - DNA, 75 bp, synthetic construct
  source 1..75: mol_type = other DNA
cgtggggggctggcgtgcagtttaacccgaccgaatccgtggccattgatattgcttatgaaggttctggcagtg

SEQ ID NO: 661717 - DNA, 75 bp, synthetic construct
  source 1..75: mol_type = other DNA
ggcgtgtacccgtcttactgggaagaatggaaaaaagtcagggaggtggtaaaagttgcctgtccggagtgtggc

SEQ ID NO: 661718 - DNA, 75 bp, synthetic construct
  source 1..75: mol_type = other DNA
atgactattgctgaacggctacggcaggaaggacatcaaattggctggcaggaaggtaaaattgaaggctggcaa

SEQ ID NO: 661719 - DNA, 75 bp, synthetic construct
  source 1..75: mol_type = other DNA
ggtgtgtatccgtcttactgggaagaatggaaaaaaattcgggaggtggtgaaagtttcttgtcctgaatgtaaa

SEQ ID NO: 661720 - DNA, 75 bp, synthetic construct
  source 1..75: mol_type = other DNA
taaagggctgcccaacagtaattatctctctgccagtaaggcaaaagtgtttgtttatgtagggagctccctggt

SEQ ID NO: 661721 - DNA, 75 bp, synthetic construct
  source 1..75: mol_type = other DNA
tttaacaccagaacagcaaatcctttggcgactggggtttaaggaatggcgtagaaccggagaagaacaatacga

SEQ ID NO: 661722 - DNA, 75 bp, synthetic construct
  source 1..75: mol_type = other DNA
ttgatttaccggtacttcccatccctgccgtcactgatatcacaccaggaattacagagttaatcagtcatactg

SEQ ID NO: 661723 - DNA, 75 bp, synthetic construct
  source 1..75: mol_type = other DNA
ggtgtgtatccgtcttactgggaagaatggaaaaaaatccgggaggtggtgaaagtttcctgtcctgaatgtaaa

SEQ ID NO: 661724 - DNA, 75 bp, synthetic construct
  source 1..75: mol_type = other DNA
agctgctgaatacgccgatgtctaacggcgtggaatacctgttgatgctgggcttcttcatcgccttcgcagtga

SEQ ID NO: 661725 - DNA, 75 bp, synthetic construct
  source 1..75: mol_type = other DNA
ggtatatctattcatctcgccattgacgggctgtcgctgctgatggtcgtgctgaccggtttgcttggcgtgctg

SEQ ID NO: 661726 - DNA, 75 bp, synthetic construct
  source 1..75: mol_type = other DNA
agaccgtgctgagatgggattttctgcgttcctggggaaaatgggcatcagtatgaatgaccgggagcgggcaac

SEQ ID NO: 661727 - DNA, 75 bp, synthetic construct
  source 1..75: mol_type = other DNA
cactctccggtgccggagggtggcttggtacggtcggcggatggatttcgggggcagtggcaaacgcaaaaggtg

SEQ ID NO: 661728 - DNA, 75 bp, synthetic construct
  source 1..75: mol_type = other DNA
atgtggagtatccggcaggcgtttgagcagaaaaataacgagctgctgagacagtatcaggccggagaaattgaa

SEQ ID NO: 661729 - DNA, 75 bp, synthetic construct
  source 1..75: mol_type = other DNA
caaagcagataacacgcgcgtcatgggaaaaaactgttaagcaattctatgacacgctggtgattaagtttgata

SEQ ID NO: 661730 - DNA, 75 bp, synthetic construct
  source 1..75: mol_type = other DNA
gcgtgcagtttaacccgaccgaatccgtgaccattgaccttgcttatgaaggttccggtagtggcgactggcgaa

SEQ ID NO: 661731 - DNA, 75 bp, synthetic construct
  source 1..75: mol_type = other DNA
ggtatcttcatgcccgtacgaacgtccccggcagcgataatctgaacgggattaacgtgaaataccgttatgaat

SEQ ID NO: 661732 - DNA, 75 bp, synthetic construct
  source 1..75: mol_type = other DNA
gatatcttcatgccagtacggacgctcccggcagcgatgatctgaacgggattaacgtgaaataccgttatgagt

SEQ ID NO: 661733 - DNA, 75 bp, synthetic construct
  source 1..75: mol_type = other DNA
cgtggggagctggcgtgcagtttaacccgaccgaatccgtggccattgaccttgcttatgaaggttccggcagtg

SEQ ID NO: 661734 - DNA, 75 bp, synthetic construct
  source 1..75: mol_type = other DNA
gctatgcaggagacaagaatcgccagctgacccattacagcgatacccgctggcatgaagattccgttcgtaacc

SEQ ID NO: 661735 - DNA, 75 bp, synthetic construct
  source 1..75: mol_type = other DNA
accgaatccgtggccattgatgtcgcttatgaaggctccggcagtggtgactggcgcactgacgggttcatcgtg

SEQ ID NO: 661736 - DNA, 75 bp, synthetic construct
  source 1..75: mol_type = other DNA
cgaatccgtggccattgatattgcttatgaaggttccggcagtggcgactggcgcactgacggtttcatcgtggg

SEQ ID NO: 661737 - DNA, 75 bp, synthetic construct
  source 1..75: mol_type = other DNA
gttgaacaattccactatacgttcatcacgatggggattattactgttgcttccgcagcaatattcatgcttctg

SEQ ID NO: 661738 - DNA, 75 bp, synthetic construct
  source 1..75: mol_type = other DNA
ggctgtatgatggcgccaacggcgttaggttccattattgcgaaatcgatggttacacagattttacggcgtctg

SEQ ID NO: 661739 - DNA, 75 bp, synthetic construct
  source 1..75: mol_type = other DNA
gtctgttcacattgggttctctggcctgcgcactttctaattcgctaccacagctggttgtcttccgggttattc

SEQ ID NO: 661740 - DNA, 75 bp, synthetic construct
  source 1..75: mol_type = other DNA
ctggcagaccgaacgctttggcgtcaaggtgccgcgctggatcgcgctgatcaccatgggattgacgctggcgct

SEQ ID NO: 661741 - DNA, 75 bp, synthetic construct
  source 1..75: mol_type = other DNA
gcgtaaccgctggttcagcgtaatggcggggccgtctgtgcgcgtgaatgaatggttcagtgcgtatgcgatggc

SEQ ID NO: 661742 - DNA, 75 bp, synthetic construct
  source 1..75: mol_type = other DNA
tggcgggattaccgtggattgcggcaatggccttctttatgcaggctcttgatgccaccattctgaataccgcct

SEQ ID NO: 661743 - DNA, 75 bp, synthetic construct
  source 1..75: mol_type = other DNA
gaagatcagtccacgctgagcgcggggtatcttcatgccttgacgaacgttcccggcagcgatgatcttaacggg

SEQ ID NO: 661744 - DNA, 75 bp, synthetic construct
  source 1..75: mol_type = other DNA
tgatgtgctgaccggaagtgatgacggtcgccacagcaacacgtctctggcgtggggagctggcgtgcagtttaa

SEQ ID NO: 661745 - DNA, 75 bp, synthetic construct
  source 1..75: mol_type = other DNA
gccacagcgacacgtctctggcgtggggagctggcgtgcagtttaacccgaccgaatccgtggccattgatattg

SEQ ID NO: 661746 - DNA, 75 bp, synthetic construct
  source 1..75: mol_type = other DNA
gccacagcaacacgtctctggcgtggggggctggcgtgcagtttaacccgaccgaatccgtggccattgatattg

SEQ ID NO: 661747 - DNA, 75 bp, synthetic construct
  source 1..75: mol_type = other DNA
tgtccacagtagtctggctggtcgccgctggtacgccagcgagcgcagcagagcatcagtccacactaagcgccg

SEQ ID NO: 661748 - DNA, 75 bp, synthetic construct
  source 1..75: mol_type = other DNA
ttacggacacactggggctggtgacgtcattcagctatgccaatgctgaggatgacccaaaaacgcgctacagcg

SEQ ID NO: 661749 - DNA, 75 bp, synthetic construct
  source 1..75: mol_type = other DNA
tgtcggtagtgatgatctgaacgggattaacgtgaaataccgttatgagtttacggacacgctggggctggtgac

SEQ ID NO: 661750 - DNA, 75 bp, synthetic construct
  source 1..75: mol_type = other DNA
accgaatccgtggccattgatattgcttatgaaggctccggcagtggcgactggcgcactgacggttttcatcgt

SEQ ID NO: 661751 - DNA, 75 bp, synthetic construct
  source 1..75: mol_type = other DNA
gcgtaaccgctggttcagcgtgatggcggggccgtctgtgcgcgtgaatgaatggttcagcgcgtatgcgatggt

SEQ ID NO: 661752 - DNA, 75 bp, synthetic construct
  source 1..75: mol_type = other DNA
tcccggcagcgatgatcttaacgggattaacgtgaaataccgttatgagtttacggacacgctggggatggtgac

SEQ ID NO: 661753 - DNA, 75 bp, synthetic construct
  source 1..75: mol_type = other DNA
gccagcttacccgttacagcgatacccgctggcatgaagattccgtgcgtaaccgctggttcagcgtgatggcgg

SEQ ID NO: 661754 - DNA, 75 bp, synthetic construct
  source 1..75: mol_type = other DNA
cgaatccgtggccattgatattgcttatgaaggctccggcagtggtgactggcgcactgacggtttcatcgtggg

SEQ ID NO: 661755 - DNA, 75 bp, synthetic construct
  source 1..75: mol_type = other DNA
gtggggagctggcgtgcagtttaacccgaccgaatccgtggccattgatattgcttatgaaggctccggcagtgg

SEQ ID NO: 661756 - DNA, 75 bp, synthetic construct
  source 1..75: mol_type = other DNA
tcatggtgtttttgccggtccgtttcctccgcccggcatgtcccttcctgaatactggggagaagaacacgtatg

SEQ ID NO: 661757 - DNA, 75 bp, synthetic construct
  source 1..75: mol_type = other DNA
atgttacgacgcatgatcctttcggtactgtttctctggtgtgcagtggctcaggctctgccatcaggttctttt

SEQ ID NO: 661758 - DNA, 75 bp, synthetic construct
  source 1..75: mol_type = other DNA
aatcacgccactccgggatttgcagaacagcccagaaggtcccgagaaaaaattccgtctgcggttgcgtaactg

SEQ ID NO: 661759 - DNA, 75 bp, synthetic construct
  source 1..75: mol_type = other DNA
gattaaaaaacctgatatatatattagcatcatcccctttgattatgataattaccgcatatcttttatattata

SEQ ID NO: 661760 - DNA, 75 bp, synthetic construct
  source 1..75: mol_type = other DNA
ttttctttttttgctgtgtgtttgttcatggtgtttttgccggtccgtttcctccgcccggcatgtcccttcctg

SEQ ID NO: 661761 - DNA, 75 bp, synthetic construct
  source 1..75: mol_type = other DNA
atatgggggaaaccccggttcgggatttacagaatggtttttccggacctgaaagaaaattcagcctccggctca

SEQ ID NO: 661762 - DNA, 75 bp, synthetic construct
  source 1..75: mol_type = other DNA
tgcccgggcagggaaagtaatgcctgcaataccattgacgggtaatgaagaagcgctggattacaccctcagaat

SEQ ID NO: 661763 - DNA, 75 bp, synthetic construct
  source 1..75: mol_type = other DNA
agggtaagaatgctctagctggtgccgcaggcgcagccaccggcgaggtggtgggaatgatagccacacagatgt

SEQ ID NO: 661764 - DNA, 75 bp, synthetic construct
  source 1..75: mol_type = other DNA
ccagataatgaagaaaaagcccgtcatcaggaggttcagcaacaacgatttgatgaactgagtaaaatatatgat

SEQ ID NO: 661765 - DNA, 75 bp, synthetic construct
  source 1..75: mol_type = other DNA
gattataccttacggcttgttcgcaacgaatacccactaaaagctggaagtttttattctgtattgcggtttaag

SEQ ID NO: 661766 - DNA, 75 bp, synthetic construct
  source 1..75: mol_type = other DNA
tccctcctccggggatgacactgccggaatattggggggaagagcacgtatggtggcatggtcgtgcaaatttta

SEQ ID NO: 661767 - DNA, 75 bp, synthetic construct
  source 1..75: mol_type = other DNA
tggcgtccggggtgaaacgccggataagtttaatttatccggtcaggcaaaaggcattaatctgcagatagctga

SEQ ID NO: 661768 - DNA, 75 bp, synthetic construct
  source 1..75: mol_type = other DNA
agagggattatcccccaattgagagattataattttcatgtttcctctcatgatgattatttttataaaaataat

SEQ ID NO: 661769 - DNA, 75 bp, synthetic construct
  source 1..75: mol_type = other DNA
ctcaaaatggcagtcaggggaacaaggtagaaaaggacagtgtgacgctgaattttaaagcgttcgttcaggcta

SEQ ID NO: 661770 - DNA, 75 bp, synthetic construct
  source 1..75: mol_type = other DNA
cattaggctcggattctcacaccgcgtttaccatgggggaatttgaagagtgtcttaaaatcctcgacgcggtag

SEQ ID NO: 661771 - DNA, 75 bp, synthetic construct
  source 1..75: mol_type = other DNA
tgtttctccgcgccgcttactgaacttccttgaatctcgcggtatggcaccgattgcggaatttgcagaccttta

SEQ ID NO: 661772 - DNA, 75 bp, synthetic construct
  source 1..75: mol_type = other DNA
gaaaaccatcgaagcaggaatggtcatccgtgaacacgcgttagaagcaactggccacgtcagcatgcttattgc

SEQ ID NO: 661773 - DNA, 75 bp, synthetic construct
  source 1..75: mol_type = other DNA
caaagtatctttttttgaaccaccaaccgatgctcgtccacaagaaggtaggataacaaaaattcatgaacatcc

SEQ ID NO: 661774 - DNA, 75 bp, synthetic construct
  source 1..75: mol_type = other DNA
tcagtaccctgctgtcagtgacatttttgtccgctcccggctttgcttcggagcttgctttcagcggtaatttgt

SEQ ID NO: 661775 - DNA, 75 bp, synthetic construct
  source 1..75: mol_type = other DNA
gcggatattaccttcgacaatgacggtgagaaatgtgttatccctgcacattcaaaggaagcaaaccttctgaga

SEQ ID NO: 661776 - DNA, 75 bp, synthetic construct
  source 1..75: mol_type = other DNA
gtcgaagactttggctactttatagggaaagttattagtactaaaaacaggtatggtgttaaagttgctcaaact

SEQ ID NO: 661777 - DNA, 75 bp, synthetic construct
  source 1..75: mol_type = other DNA
actaaataaaacgttgctttggagtagagggattatcccccaattgagagattataattttcatgtttcctctca

SEQ ID NO: 661778 - DNA, 75 bp, synthetic construct
  source 1..75: mol_type = other DNA
gtacgtgacgctggaggttgggtggcattaggctcggattctcacaccgcgtttaccatgggtgaatttgaagag

SEQ ID NO: 661779 - DNA, 75 bp, synthetic construct
  source 1..75: mol_type = other DNA
cctgacaacagaacgggggctaatcttgaaccagaacaattcaagaatagccgcaaaatgttgtcattacaacaa

SEQ ID NO: 661780 - DNA, 75 bp, synthetic construct
  source 1..75: mol_type = other DNA
tggttgctggaaagagaaaacccccgcacgttgagaggtcaaacctgacaacagaacgggggctaatcttgaacc

SEQ ID NO: 661781 - DNA, 75 bp, synthetic construct
  source 1..75: mol_type = other DNA
gatacgcagagccagaaacaggatgtggcagacctgaaccgtgacgcagcacatgcaaaccagacgctgtccccc

SEQ ID NO: 661782 - DNA, 75 bp, synthetic construct
  source 1..75: mol_type = other DNA
tcaggtttccgtgtcagatgcggtgtctacatatctgtttaacagccagttgttgagccgtaatgatggttccat

SEQ ID NO: 661783 - DNA, 75 bp, synthetic construct
  source 1..75: mol_type = other DNA
actttttgtttacgggcgagaggagggcaatgatacccgaccgtcccgctatccggcgcggcagacccgtgaagc

SEQ ID NO: 661784 - DNA, 75 bp, synthetic construct
  source 1..75: mol_type = other DNA
cgtctcggcggtcattacggtgaaccgggtattcaactttttgtctacgggcgagaagagggcaatgatacccgg

SEQ ID NO: 661785 - DNA, 75 bp, synthetic construct
  source 1..75: mol_type = other DNA
ggagcgcggcgagcaaaaaacagtgcccatgctgtcacggaaaaaaatttattgaaagcgagatttttacaaaca

SEQ ID NO: 661786 - DNA, 75 bp, synthetic construct
  source 1..75: mol_type = other DNA
taacccgatcagtgaactgaaagtttttgatttacgcgaaagtatggcaaacggtggcggccctgcgtgcctgcg

SEQ ID NO: 661787 - DNA, 75 bp, synthetic construct
  source 1..75: mol_type = other DNA
gcgtgaagggcgagaagcgctggatatgctaactcgtttgctggatctcggttcggtttatccgttccagcgcga

SEQ ID NO: 661788 - DNA, 75 bp, synthetic construct
  source 1..75: mol_type = other DNA
atctcaatgaattgcttgctgccgataacccaataagctcactaaaagtttttgatttacgtgaaagcatggcga

SEQ ID NO: 661789 - DNA, 75 bp, synthetic construct
  source 1..75: mol_type = other DNA
tatgtggcgcgcccggcgatctcggagcagcgtctggcgctgacaagagacggccgggtacgttacgaactcaag

SEQ ID NO: 661790 - DNA, 75 bp, synthetic construct
  source 1..75: mol_type = other DNA
cccacccggccagctccgacgccgaccaggagcacatcccggtgttggtcgtgcagatgccgtccgagccgtccg

SEQ ID NO: 661791 - DNA, 75 bp, synthetic construct
  source 1..75: mol_type = other DNA
gggcgggaagcactggatgtattgagccaattactgaatctcggttcggtttatccgttccagcgcgagggaggg

SEQ ID NO: 661792 - DNA, 75 bp, synthetic construct
  source 1..75: mol_type = other DNA
ttaggctttagcggcaacgatgaacagatactggaaaaggttgcccgccaggcaccgcactggctttccatcgtc

SEQ ID NO: 661793 - DNA, 75 bp, synthetic construct
  source 1..75: mol_type = other DNA
ttgggattcagtggtagcgatgagcaggtactggaaaaggttgcacgccaggcaccgcactggctttccagcgtc

SEQ ID NO: 661794 - DNA, 75 bp, synthetic construct
  source 1..75: mol_type = other DNA
atgactattgctgaacggctacggcaggaaggacaccaaattggctggcaggaaggtatgcatgaacaagccatt

SEQ ID NO: 661795 - DNA, 75 bp, synthetic construct
  source 1..75: mol_type = other DNA
tgcagagcttgagactaatctcgcggcgctggtggcggagaatgcggggcttaaggccttcaaaaccgccgttta

SEQ ID NO: 661796 - DNA, 75 bp, synthetic construct
  source 1..75: mol_type = other DNA
ggtctggcgtatcagaaaaatggcaacatagcggaagcaatttgggcaaatcgtaaagcgatctcgttagccagt

SEQ ID NO: 661797 - DNA, 75 bp, synthetic construct
  source 1..75: mol_type = other DNA
tgctgaagcattgcagcattatcaactggcgtatacggaaaaaaataagcttcttatgaagaagctattgcacgt

SEQ ID NO: 661798 - DNA, 75 bp, synthetic construct
  source 1..75: mol_type = other DNA
aagccgcactgctggcggcaacgattgccggtggcggtgtgggtggttatcaggaaatgacccgtcagtctctga

SEQ ID NO: 661799 - DNA, 75 bp, synthetic construct
  source 1..75: mol_type = other DNA
gattggcgtactggcaagtataattatgtggctaagtggttatgctttagagaacaaagggatacatttaagacc

SEQ ID NO: 661800 - DNA, 75 bp, synthetic construct
  source 1..75: mol_type = other DNA
atgagcgtcgaacagtacgtttccgagtttcgcaaatgcctggctgaagtgcgggcgcagggattggatgctgct

SEQ ID NO: 661801 - DNA, 75 bp, synthetic construct
  source 1..75: mol_type = other DNA
tgtgctcaccgccgccgattgccgatgagatcctttatgcggcgcagctgtgcggcgtgcaggacgtgtttaacg

SEQ ID NO: 661802 - DNA, 75 bp, synthetic construct
  source 1..75: mol_type = other DNA
tcagtgggtttgtatattcctggcggctccgccccgctcttctcaacggtattaatgctggcaactccggcgcgt

SEQ ID NO: 661803 - DNA, 75 bp, synthetic construct
  source 1..75: mol_type = other DNA
tgctgacagcggcgctacgccggatttcgtggcttctgatttgctttctcaggctgaacacggcccggactctca

SEQ ID NO: 661804 - DNA, 75 bp, synthetic construct
  source 1..75: mol_type = other DNA
atgatcaagatgctctattaatcgtcaaaaaagaggggtattccaatctggtggtcaaatgtccgtgcgctggca

SEQ ID NO: 661805 - DNA, 75 bp, synthetic construct
  source 1..75: mol_type = other DNA
tgacttatgcgattagtccggcaatgactagtctggatggcatgcgtgtagttttgagctggggcgaaaagcctt

SEQ ID NO: 661806 - DNA, 75 bp, synthetic construct
  source 1..75: mol_type = other DNA
caccacattaggcgtcagggatttagccactgtgataatgcctgcgacggtggatttgcccctatatttccagac

SEQ ID NO: 661807 - DNA, 75 bp, synthetic construct
  source 1..75: mol_type = other DNA
tgaaacgcttgaggattttgatgaactgctggcagctcaggaaagcgaaaatgccttattaccgcaggaagccgg

SEQ ID NO: 661808 - DNA, 75 bp, synthetic construct
  source 1..75: mol_type = other DNA
aagaagccctgaaacaaggtatcccgcaaaacgtgattgaggcagctcagcgttcgcctgtttacaaaatggcga

SEQ ID NO: 661809 - DNA, 75 bp, synthetic construct
  source 1..75: mol_type = other DNA
aggaagagtggcaaggcggctgggtccgcgatgtcaacggcaagatccgtccgcgtctgggcagcaaaatggggg

SEQ ID NO: 661810 - DNA, 75 bp, synthetic construct
  source 1..75: mol_type = other DNA
atgactatcccagaacaaaataataaccaaactcctgacatatctatccctgcagcaacgttaaaggcgcttgag

SEQ ID NO: 661811 - DNA, 75 bp, synthetic construct
  source 1..75: mol_type = other DNA
agtcagggcgtagtctcaaaggaaatgaaaaaactgcgtacggaaattgcgctggggcgtgaaacgcttgaggat

SEQ ID NO: 661812 - DNA, 75 bp, synthetic construct
  source 1..75: mol_type = other DNA
ggcccttgctgatttccgcaaactcccgtcaccagctgcccttcataaaatgaaggtccttcaggaggttgcgga

SEQ ID NO: 661813 - DNA, 75 bp, synthetic construct
  source 1..75: mol_type = other DNA
ctgaaagcgctggagcagaagtattcagggaaggtgaagtgtatatttatcgacccaccgtataacacaggtagc

SEQ ID NO: 661814 - DNA, 75 bp, synthetic construct
  source 1..75: mol_type = other DNA
agtggcccgccgtacgcagctcgctttcggtgaagccagtgagccgccttctgatgacaaggcagacaacacgga

SEQ ID NO: 661815 - DNA, 75 bp, synthetic construct
  source 1..75: mol_type = other DNA
agcaggcagaaggtcatggtggtgaggatttatcaccggttcttgatgcgatgaatgccgtgccggtgctgaaaa

SEQ ID NO: 661816 - DNA, 75 bp, synthetic construct
  source 1..75: mol_type = other DNA
accacatccacaccaaagaaacgcggaaaatcaaacgcgccgccctgatcctgcacgacgtcggcagcaagcagg

SEQ ID NO: 661817 - DNA, 75 bp, synthetic construct
  source 1..75: mol_type = other DNA
actatagctttacgctaaatgtactctctgattcagaacaacctgacgatattgactacgacgaagatactgaag

SEQ ID NO: 661818 - DNA, 75 bp, synthetic construct
  source 1..75: mol_type = other DNA
actatagctttacgctaaacgtactttctgattcagaacaacctgacgatgttgactacgacgaagatactgaag

SEQ ID NO: 661819 - DNA, 75 bp, synthetic construct
  source 1..75: mol_type = other DNA
cagacgggcgagctggaccgccttcgcaaagaggcaacggaaagagtgaaggagcatgcggtacgtccgacacct

SEQ ID NO: 661820 - DNA, 75 bp, synthetic construct
  source 1..75: mol_type = other DNA
ataacgttcgattctatgttcatggtgaacgttggactgctagccaatctggaggttggggcgatcaatggggat

SEQ ID NO: 661821 - DNA, 75 bp, synthetic construct
  source 1..75: mol_type = other DNA
tcggaaaaggctgttatttgggcgaccgatgaaggtattttacatattcgcaataaccacggtggaccatttagt

SEQ ID NO: 661822 - DNA, 75 bp, synthetic construct
  source 1..75: mol_type = other DNA
tataacgtcgggatgaatggacaagccaatattatcgaattggtgatccgatgcggcaacaatagcccgaaaggt

SEQ ID NO: 661823 - DNA, 75 bp, synthetic construct
  source 1..75: mol_type = other DNA
tacggccgccaggcaaattctgttttatcagaccgaactttaacctaaaaagtggtgctgatacccagagtcgaa

SEQ ID NO: 661824 - DNA, 75 bp, synthetic construct
  source 1..75: mol_type = other DNA
tgaatacgctcttatccgtggtgaggtttctggtggtgcatgggatgactggcgcaaccgtcctgctggtattct

SEQ ID NO: 661825 - DNA, 75 bp, synthetic construct
  source 1..75: mol_type = other DNA
caagtggagaatttcatgccactggtaacggaaactttaacgatgtgtatattcgttctgaccgtcgtctgaaaa

SEQ ID NO: 661826 - DNA, 75 bp, synthetic construct
  source 1..75: mol_type = other DNA
gataacccagaagaaattttaacaatttcaaactccgcagtgaacgcgcttttaattaaagcggtccaagaaatg

SEQ ID NO: 661827 - DNA, 75 bp, synthetic construct
  source 1..75: mol_type = other DNA
tttgatgatctcgccgggggcgaccaacccggaactgactcaacgcggttatcaacacatcatgcggactgccgg

SEQ ID NO: 661828 - DNA, 75 bp, synthetic construct
  source 1..75: mol_type = other DNA
ttcgattggtgtttatcaaagggaacacaggaagagtgttaccttattgtcaaactttattatgcaaaaaataag

SEQ ID NO: 661829 - DNA, 75 bp, synthetic construct
  source 1..75: mol_type = other DNA
tggatatgtattttctttatgagtgggaataaaatcgcatcctgcgataaattaaacctagtaaaaacaaaatgt

SEQ ID NO: 661830 - DNA, 75 bp, synthetic construct
  source 1..75: mol_type = other DNA
aaagttaaaacctacgataaagttaaatctcttaatgaccgagaagttataggtcatgagattggtattatcgca

SEQ ID NO: 661831 - DNA, 75 bp, synthetic construct
  source 1..75: mol_type = other DNA
cttcccataccgaaattgaagcagccatgcgaggcatgacggacgctgaaattgacgcaattctggaaaaactcg

SEQ ID NO: 661832 - DNA, 75 bp, synthetic construct
  source 1..75: mol_type = other DNA
caattcagtcagtcgagctgtcgtgtaatttgtatttgctgcgggagtttgcagctgatcagtacggactgaaat

SEQ ID NO: 661833 - DNA, 75 bp, synthetic construct
  source 1..75: mol_type = other DNA
ggtcccggaactaaaccggcaaaattcagcgacgcggaaccgtgtgactggattaaaaacgggcagtcagtcggt

SEQ ID NO: 661834 - DNA, 75 bp, synthetic construct
  source 1..75: mol_type = other DNA
cgcagaatgcagcgctctatatgacgagctggatcaatgggcgaatgttcggtcccggaactaaaccggcaaaat

SEQ ID NO: 661835 - DNA, 75 bp, synthetic construct
  source 1..75: mol_type = other DNA
tcttttgcaattccactcttgattagtaaggcaggaataaaccaggaggtacttagcagcgttataaataatgag

SEQ ID NO: 661836 - DNA, 75 bp, synthetic construct
  source 1..75: mol_type = other DNA
atttgatgtttttgatgatgcaaattcaagtacgggaatctataaaacaagcagtgcagatatttttaacgaaaa

SEQ ID NO: 661837 - DNA, 75 bp, synthetic construct
  source 1..75: mol_type = other DNA
tattgcttatgaaggttctggcagtggtgactggcgcactgacggtttcatcgtgggtgtcggttataagttctg

SEQ ID NO: 661838 - DNA, 75 bp, synthetic construct
  source 1..75: mol_type = other DNA
ccgaagtcttttactgcaagcccgcggatgactatttaccccagcctggagcagtattaattaccggtattaccc

SEQ ID NO: 661839 - DNA, 75 bp, synthetic construct
  source 1..75: mol_type = other DNA
agcaatgaaaattgtgctggaaaccgagccgcgtaatttaccggcactggatatcacttttgttgataaacggat

SEQ ID NO: 661840 - DNA, 75 bp, synthetic construct
  source 1..75: mol_type = other DNA
tggcccaggcgaatacgctacgcccggaagacgctgagcgtttagggattgctcgtcaacactgcctggataacc

SEQ ID NO: 661841 - DNA, 75 bp, synthetic construct
  source 1..75: mol_type = other DNA
cgctggctggagcaccgccgccaggtattcacacccgagtttttacaaggctatgcagaagagattcagatgctg

SEQ ID NO: 661842 - DNA, 75 bp, synthetic construct
  source 1..75: mol_type = other DNA
tgattatggttgatctggcaggtgatatttcgccgttactggagctggacagcgacaccctgcgcgaacgcctgt

SEQ ID NO: 661843 - DNA, 75 bp, synthetic construct
  source 1..75: mol_type = other DNA
gatggcaaagctggtaaaaacgcgtcagccacgcctgtttgattatctctttacccatcgcaataaacacaaact

SEQ ID NO: 661844 - DNA, 75 bp, synthetic construct
  source 1..75: mol_type = other DNA
cttgaaattcatagtgtaaaatgtataagtgatgttgccgttatgcttgagattaaagagggcccatttgatgaa

SEQ ID NO: 661845 - DNA, 75 bp, synthetic construct
  source 1..75: mol_type = other DNA
tgcatttgatgatttcatgtgggggaaaaaaagtaagaatgaatctgaaaatttaacatttgatgattgttataa

SEQ ID NO: 661846 - DNA, 75 bp, synthetic construct
  source 1..75: mol_type = other DNA
gtggatgttaaaaaactagatacttatctggtagaaaagaaaaaagctgatgcatttgatgatttcatgtggggg

SEQ ID NO: 661847 - DNA, 75 bp, synthetic construct
  source 1..75: mol_type = other DNA
atcaaatgggcccttggcttgccagcattagcatttgctgtatataaaatctacggattgctctctggagtctca

SEQ ID NO: 661848 - DNA, 75 bp, synthetic construct
  source 1..75: mol_type = other DNA
tgctggtatgggggcagagtgtggccgcagccgatcttggcacctggggagatttgtggccggtaaaggagccgg

SEQ ID NO: 661849 - DNA, 75 bp, synthetic construct
  source 1..75: mol_type = other DNA
aatcgccagcttacccgttacagcgatacccgctggcatgaagattctgtgcgtaaccgctggttcagcgtcatg

SEQ ID NO: 661850 - DNA, 75 bp, synthetic construct
  source 1..75: mol_type = other DNA
accggtcgtagcggtatgcaccaggacgtgccaaaagaagacgttatcattgaaagcgtgaccgttagcgagtaa

SEQ ID NO: 661851 - DNA, 75 bp, synthetic construct
  source 1..75: mol_type = other DNA
atttgtcagcgcctcggcattgatcaggttccggcacgggtgagcgcggtccccggcgatcgcttcctgaaggtg

SEQ ID NO: 661852 - DNA, 75 bp, synthetic construct
  source 1..75: mol_type = other DNA
ggtatcttcatgcctcgacgaacgttcccggcagtgatgatctgaacgggattaacgtgaaataccgttatgagt

SEQ ID NO: 661853 - DNA, 75 bp, synthetic construct
  source 1..75: mol_type = other DNA
gatcaggtcccggcacgggtgagcgccgttcccggcgatcgcttcctgaaggtggaatttattccggcagaggag

SEQ ID NO: 661854 - DNA, 75 bp, synthetic construct
  source 1..75: mol_type = other DNA
ggcgtgaactaatggcttcagatataaaggagatgaagcatttagttgttactcagcacgaacaaatcaacagtc

SEQ ID NO: 661855 - DNA, 75 bp, synthetic construct
  source 1..75: mol_type = other DNA
gagatgggccggaaaatggatgcgtttaaggagcgggtgatccgcaacagcctgcggcctcctgccgtgcccggt

SEQ ID NO: 661856 - DNA, 75 bp, synthetic construct
  source 1..75: mol_type = other DNA
ggtatcttcatgcccggacgaacgctcccggcagcgataatcttaacgggattaacgtgaaataccgttatgagt

SEQ ID NO: 661857 - DNA, 75 bp, synthetic construct
  source 1..75: mol_type = other DNA
tctctggcgtggggagctggcgtgcagtttaacccgaccgaatccgtggccattgaccttgcttatgaaggttcc

SEQ ID NO: 661858 - DNA, 75 bp, synthetic construct
  source 1..75: mol_type = other DNA
tggcttacagccgtgtgtcgactttctccggggattatctccgcgtaactgacaacaaggggaaaacgcacgacg

SEQ ID NO: 661859 - DNA, 75 bp, synthetic construct
  source 1..75: mol_type = other DNA
tgtccgcagccatctgtctgtccgtatccggtgcgcctgcatgggcgtctgaatatcagtccacactgagcgcgg

SEQ ID NO: 661860 - DNA, 75 bp, synthetic construct
  source 1..75: mol_type = other DNA
gatgtcgcttatgaaggctccggcagcggtgactggcgtaccaacagtttcatcgttggtgtcggttataaattc

SEQ ID NO: 661861 - DNA, 75 bp, synthetic construct
  source 1..75: mol_type = other DNA
cgtggggggctggcgtgcagtttaacccgaccgaatccgtggccattgatgtcgcttatgaaggttccggcagtg

SEQ ID NO: 661862 - DNA, 75 bp, synthetic construct
  source 1..75: mol_type = other DNA
cgtgaccattgatattgcttatgaaggttccggtagtggcgactggcgaacggatgcatttattgttggtatcgg

SEQ ID NO: 661863 - DNA, 75 bp, synthetic construct
  source 1..75: mol_type = other DNA
tgtccgcagccatctgtctggccgtatccggtgcgcctgcatgggcatctgaacatcagtccacgctgagcgcgg

SEQ ID NO: 661864 - DNA, 75 bp, synthetic construct
  source 1..75: mol_type = other DNA
cgtggggagctggcgtgcagtttaacccgaccgaatccgtggccattgatattgcttatgaaggctccgggcagt

SEQ ID NO: 661865 - DNA, 75 bp, synthetic construct
  source 1..75: mol_type = other DNA
tgtcgactttctccggggattatctccgcgtaactgacaacaaggggaaaaagcacgatgtgctgaccggaagtg

SEQ ID NO: 661866 - DNA, 75 bp, synthetic construct
  source 1..75: mol_type = other DNA
cccgaccgaatccgtggccattgatattgattatgaaggctccggcagtggcgactggcgcactgacggtttcat

SEQ ID NO: 661867 - DNA, 75 bp, synthetic construct
  source 1..75: mol_type = other DNA
cggcagcgatgaatctgaacgggattaacgtgaaataccgttatgagtttacggatacgctggggctggtgacgt

SEQ ID NO: 661868 - DNA, 75 bp, synthetic construct
  source 1..75: mol_type = other DNA
taactgacaacaaggggaaaacgcacgatgtgctgaccggaagtgatgacggtcgccacagcaatacgtctctgg

SEQ ID NO: 661869 - DNA, 75 bp, synthetic construct
  source 1..75: mol_type = other DNA
aatcgccagctgacccgttacagcgatacccgctggcatgaagattccgtgcgtaaccgctggttcagcgtaatg

SEQ ID NO: 661870 - DNA, 75 bp, synthetic construct
  source 1..75: mol_type = other DNA
tgtccgcagccatttgtctggccgtatccggggcgcctgcatgggcgtctgagcagcaggccacgctgagcgcgg

SEQ ID NO: 661871 - DNA, 75 bp, synthetic construct
  source 1..75: mol_type = other DNA
ggtatcttcatgtctcgacgaacgttcctggcagcgatgatcttaacgggattaacgtgaaataccgttatgagt

SEQ ID NO: 661872 - DNA, 75 bp, synthetic construct
  source 1..75: mol_type = other DNA
gcaatggcgatatggatgctgatcttgccgttgtttatattagggatggctatgtcgacgcagtttaccgcgatg

SEQ ID NO: 661873 - DNA, 75 bp, synthetic construct
  source 1..75: mol_type = other DNA
tccgcaggaaatcaacggcaccttaagcgccgatgccacacctgccgaagctatctcacccgttgccgatcagga

SEQ ID NO: 661874 - DNA, 75 bp, synthetic construct
  source 1..75: mol_type = other DNA
gcgcagcgatattctggtcttcttcggcatctggctgatcctgccgtttgtctggcatcgactggtcattccttc

SEQ ID NO: 661875 - DNA, 75 bp, synthetic construct
  source 1..75: mol_type = other DNA
tcccggtagtgatgatctgaacgggattaacgtgaaataccgttatgagtttacggacacgctggggctgattac

SEQ ID NO: 661876 - DNA, 75 bp, synthetic construct
  source 1..75: mol_type = other DNA
aggggaaaacgcacgacgtgctgaccggaagtgatgacggtcgccacagcaacacgtctctggcgtggggagctg

SEQ ID NO: 661877 - DNA, 75 bp, synthetic construct
  source 1..75: mol_type = other DNA
gagctggcgtgcagtttaacccgaccgaatccgtggccattgatattgcttatgaaggctccggcagtggcgact

SEQ ID NO: 661878 - DNA, 75 bp, synthetic construct
  source 1..75: mol_type = other DNA
gaacatcagtccacgctgagcgcggggtatcttcatgtctcgacgaacgttcccggcagcgatgaactgaacggg

SEQ ID NO: 661879 - DNA, 75 bp, synthetic construct
  source 1..75: mol_type = other DNA
tgcgaaggctacgtttacaactccatcggtatcgttacttatctcaacccattcatcggccaccacaacggcgac

SEQ ID NO: 661880 - DNA, 75 bp, synthetic construct
  source 1..75: mol_type = other DNA
gaacaacagaccacgctgagcgcgggatatcttcatgccaagacgaacgataccggaagcgataatctaaacggg

SEQ ID NO: 661881 - DNA, 75 bp, synthetic construct
  source 1..75: mol_type = other DNA
cgaatccgtggccattgatgtcgcttatgaaggctccggcagtggcgactggcgcactgacgggttcatcgttgg

SEQ ID NO: 661882 - DNA, 75 bp, synthetic construct
  source 1..75: mol_type = other DNA
tatcgccttaaagcggcggtgtctaacgatgccagcacagtcagtgtgcaggacggcaaagcgacggtgaaacac

SEQ ID NO: 661883 - DNA, 75 bp, synthetic construct
  source 1..75: mol_type = other DNA
atacccgctggcatgaagattccgtgcgtaaccgctggttcagcgtgatggcggggccgtctgtaagcgtgcagc

SEQ ID NO: 661884 - DNA, 75 bp, synthetic construct
  source 1..75: mol_type = other DNA
cggtcgccacagcaacacgtctctggcgtggggggctggcgtgcagtttaacccgaccgaatccgtggccattga

SEQ ID NO: 661885 - DNA, 75 bp, synthetic construct
  source 1..75: mol_type = other DNA
tgtccgcagtagtctggctggttgccgctggtacgccagtgagcgcagcagagcatcagtccacactgagcgccg

SEQ ID NO: 661886 - DNA, 75 bp, synthetic construct
  source 1..75: mol_type = other DNA
cgcgtcagagcaacagcgtcgatctcgacaaagcccgcctggtggtcagcgtcggtcgcggtattggcagcaaag

SEQ ID NO: 661887 - DNA, 75 bp, synthetic construct
  source 1..75: mol_type = other DNA
ggcctgttctcgtccggtggcggaaaacgaaaaatggatggagcacgaacgctatgtcggtatctccaacctgat

SEQ ID NO: 661888 - DNA, 75 bp, synthetic construct
  source 1..75: mol_type = other DNA
tttcgacgttctccggggattatctccgcgtaactgacaacaaggggaaaacgcacgatgtgctgaccggaagtg

SEQ ID NO: 661889 - DNA, 75 bp, synthetic construct
  source 1..75: mol_type = other DNA
gcggaacttgacgatattttctccgtacagaatctgatgcacccggcttacaaagcaaaacgctatactgatgaa

SEQ ID NO: 661890 - DNA, 75 bp, synthetic construct
  source 1..75: mol_type = other DNA
cgtttacggcagacaagttgcgcgtgaccgatatcactaaaaatgcgacttacccggtactgattgacagtatcg

SEQ ID NO: 661891 - DNA, 75 bp, synthetic construct
  source 1..75: mol_type = other DNA
gcgatacccgctggcatgaagattccgtgcgtaaccgctggttcagcgtgatggcggggccctctgtgcgcgtga

SEQ ID NO: 661892 - DNA, 75 bp, synthetic construct
  source 1..75: mol_type = other DNA
cgcagtatgaaacgctttcataaacgctcgccctatcgtgtcacgatgaattacgcatttggtcaggttattgaa

SEQ ID NO: 661893 - DNA, 75 bp, synthetic construct
  source 1..75: mol_type = other DNA
aggtcccggcacgggtgagcgccgttcccggcgttcgcttcctgaaagtggaatttattccggcagaggagggca

SEQ ID NO: 661894 - DNA, 75 bp, synthetic construct
  source 1..75: mol_type = other DNA
tttacggacacactggggctggtgacgtcattcagctatgcaggagacaagaatcgccagcttacccgttacagc

SEQ ID NO: 661895 - DNA, 75 bp, synthetic construct
  source 1..75: mol_type = other DNA
ttaggctttctccgcgaaaaaggatgcgattattgccatacgccttcggcagaattacccgcctattattatatt

SEQ ID NO: 661896 - DNA, 75 bp, synthetic construct
  source 1..75: mol_type = other DNA
gatggtcgtgcggcaacattgcaggatcaggcaggtggaccgccgttgaacccgattgaaatggcgtcgaaatcc

SEQ ID NO: 661897 - DNA, 75 bp, synthetic construct
  source 1..75: mol_type = other DNA
atggcgggtatggcttacagccgtgtttcgactttttccggggattaccttcgcgtaactgacaacaaggggaaa

SEQ ID NO: 661898 - DNA, 75 bp, synthetic construct
  source 1..75: mol_type = other DNA
gcaacacgtctctggcgtggggagctggcgtgcagtttaacccgaccgaatccgtggccattgatgtcgcttatg

SEQ ID NO: 661899 - DNA, 75 bp, synthetic construct
  source 1..75: mol_type = other DNA
atccggtgcgcctgcatgggcgtctgaacatcagtccacactgagcgcggggtatcttcatgcccggacgaacgc

SEQ ID NO: 661900 - DNA, 75 bp, synthetic construct
  source 1..75: mol_type = other DNA
cctcaacctgatgtggatcctaggcggcgttatcggcgtgttccttgccatcgacatgttcctgttcttcttctt

SEQ ID NO: 661901 - DNA, 75 bp, synthetic construct
  source 1..75: mol_type = other DNA
actttctccggggattatctccgcgtaattgacaacaaggggaaaacgcacgatgtgctgaccggaagtgatgac

SEQ ID NO: 661902 - DNA, 75 bp, synthetic construct
  source 1..75: mol_type = other DNA
gttatgagtttacggacacactggggctggtgacgtcattcagctatgcaggagacaagaatcgccagctgaccc

SEQ ID NO: 661903 - DNA, 75 bp, synthetic construct
  source 1..75: mol_type = other DNA
gtcgttcagctatgcaggagacaagaatcgccagattacccgttacagcgatattggtgcacacacgcactccgt

SEQ ID NO: 661904 - DNA, 75 bp, synthetic construct
  source 1..75: mol_type = other DNA
ccccggcagcgatgatctgaacgggattaacgtgaaataccgttatgagtttacggacacactggggctggtgac

SEQ ID NO: 661905 - DNA, 75 bp, synthetic construct
  source 1..75: mol_type = other DNA
atccggtgcgcctgcatgggcgtctgaacatcagtccacgctgagcgcggggtatcttcatgcctcgtacgaacg

SEQ ID NO: 661906 - DNA, 75 bp, synthetic construct
  source 1..75: mol_type = other DNA
ggcgtctggaccttcaattatgaagagctgctgaatacgccgatgtctaacggcgtggaatacctgctgatgctg

SEQ ID NO: 661907 - DNA, 75 bp, synthetic construct
  source 1..75: mol_type = other DNA
aatcggcacgggggtacgcccggtcgccacggaacgcttacacagccagggcaacctgtcgcaaaccaataacag

SEQ ID NO: 661908 - DNA, 75 bp, synthetic construct
  source 1..75: mol_type = other DNA
tttaccccacaagcaaaattcagcacgcccgtctggataagccaggcgcaaggcatccgtgctggccctcaacgc

SEQ ID NO: 661909 - DNA, 75 bp, synthetic construct
  source 1..75: mol_type = other DNA
gcattttagtccacaagcgacattcagcacacccgtctggataagccaggcgcaaggtattcgcgctggtcctca

SEQ ID NO: 661910 - DNA, 75 bp, synthetic construct
  source 1..75: mol_type = other DNA
gtgttaacgggaaaatactgcgaacatctgccactgtatcgtcagagtgaaatctttgcccgccagggtgtcgaa

SEQ ID NO: 661911 - DNA, 75 bp, synthetic construct
  source 1..75: mol_type = other DNA
ctgaaggcaaaaccccatccggaactggcttatcgtgcagttctggggctgctggcacttcagaaagaaagtgat

SEQ ID NO: 661912 - DNA, 75 bp, synthetic construct
  source 1..75: mol_type = other DNA
cgccgaaagatccacgatgtgcacgtccgcatcccgtcagcactgacggaagaagccctagagcagatcggtcag

SEQ ID NO: 661913 - DNA, 75 bp, synthetic construct
  source 1..75: mol_type = other DNA
cgttcgcaccccgtcagccctgacggaggaagccctgaaacggatccgcgagttgtatgccatcgaggcggaaat

SEQ ID NO: 661914 - DNA, 75 bp, synthetic construct
  source 1..75: mol_type = other DNA
tactacgcgggtccggccaaaacgccggaaggttatgcctccggttctcttggcccaacgaccgccggacggatg

SEQ ID NO: 661915 - DNA, 75 bp, synthetic construct
  source 1..75: mol_type = other DNA
ctccggtcgcggaaccttcttccaccgtcacgcagtgattcacaaccagtccaacggctccacttatacgccgct

SEQ ID NO: 661916 - DNA, 75 bp, synthetic construct
  source 1..75: mol_type = other DNA
aagatttatggtgatcgccaggcgatggcggccggtgaaaaactgtttgactggggcggcgcggaaaaccttgct

SEQ ID NO: 661917 - DNA, 75 bp, synthetic construct
  source 1..75: mol_type = other DNA
ggatgtacgttttgtgtcaaccaatggcaatctggaagtgatcctcgaaggggaagatgtcagcggcgaaattcg

SEQ ID NO: 661918 - DNA, 75 bp, synthetic construct
  source 1..75: mol_type = other DNA
gtcggtcagcgtctgtcactgaaggcggggcagtcggtggtacagctctggcacaaggggcagtgtgtggcgcaa

SEQ ID NO: 661919 - DNA, 75 bp, synthetic construct
  source 1..75: mol_type = other DNA
atgcctgacatgttgtacttcgatacggaaatgagaaaaccaggtgtgacgcggcaactgttgtggatggaatac

SEQ ID NO: 661920 - DNA, 75 bp, synthetic construct
  source 1..75: mol_type = other DNA
gagccagaaagctacctccgctatgtccttgacgtcatagccgactggccgataaaccgggtcggcgaactgctc

SEQ ID NO: 661921 - DNA, 75 bp, synthetic construct
  source 1..75: mol_type = other DNA
gagcggggtatcgccggaccggggctgctggcccgcgtgctgacctcgaagtatgcagagcacaccccgctgtat

SEQ ID NO: 661922 - DNA, 75 bp, synthetic construct
  source 1..75: mol_type = other DNA
actgagctatctgggcgaggataccgccgaacagctggagttgatgcgtagcgccttccgggttatccggacggt

SEQ ID NO: 661923 - DNA, 75 bp, synthetic construct
  source 1..75: mol_type = other DNA
gtcagcgttggcacctgcagtgtggttcgcttacaggccggacagaaaaggcatccatccgcagactcatcttgc

SEQ ID NO: 661924 - DNA, 75 bp, synthetic construct
  source 1..75: mol_type = other DNA
ctggggatggggctgctgatttccacgattacccgcaaccagttcaatgccgctcaggtcgccctgaacgcggct

SEQ ID NO: 661925 - DNA, 75 bp, synthetic construct
  source 1..75: mol_type = other DNA
gacgtgcaaactgaaaggagtggagccagaaagctacctccgctatgtccttgacgtcattgctgactggccggt

SEQ ID NO: 661926 - DNA, 75 bp, synthetic construct
  source 1..75: mol_type = other DNA
ctgctgtcgggctgggtggatgcatgctgccggctgctgtctccgctggaagaggcgcttcatggctatgtcatg

SEQ ID NO: 661927 - DNA, 75 bp, synthetic construct
  source 1..75: mol_type = other DNA
tggagctgagtcgttcactgctgtcgggctgggtggatgcatgctgccggctgctgtctccgctggaagaggcgc

SEQ ID NO: 661928 - DNA, 75 bp, synthetic construct
  source 1..75: mol_type = other DNA
tacagcctgatcgggacgtgcaaactgaacggagtggagccagaaagctacctccgctatgccttgacgtcatag

SEQ ID NO: 661929 - DNA, 75 bp, synthetic construct
  source 1..75: mol_type = other DNA
gcgaacactgcctgaacccggcatgtgtggcgacctgtccaagcggggctatctacaagcgtgaagaagatggca

SEQ ID NO: 661930 - DNA, 75 bp, synthetic construct
  source 1..75: mol_type = other DNA
gaagtgcatcttctgctatccgcgtattgaagcgggtcagccgaccgtgtgctcagaaacctgtgtcggtcgtat

SEQ ID NO: 661931 - DNA, 75 bp, synthetic construct
  source 1..75: mol_type = other DNA
ctaccttcgtcatgtgcttgacgtcatagctgactggacagtcaatcgggtcagggtcagcggggaaaaccatat

SEQ ID NO: 661932 - DNA, 75 bp, synthetic construct
  source 1..75: mol_type = other DNA
tcggtgacttcgccaacggtgcgcaggtggttatcgaccagttcatctcctctggcgaacagaaatggggccgga

SEQ ID NO: 661933 - DNA, 75 bp, synthetic construct
  source 1..75: mol_type = other DNA
cttccagatgctgaaatcgctggcagatcactataagttcgacgtcgaagcgccgtggggcagcctgagcgcgaa

SEQ ID NO: 661934 - DNA, 75 bp, synthetic construct
  source 1..75: mol_type = other DNA
tccttaaagagatcggcgatcgtttgaaattcctcgttaacgtcggcctgaattacctgacgctttcccgctcgg

SEQ ID NO: 661935 - DNA, 75 bp, synthetic construct
  source 1..75: mol_type = other DNA
cccgcacccataatctcaaaaacatcaacctcgttatcccccgcgacaagctcattgtcgtgaccgggctttcgg

SEQ ID NO: 661936 - DNA, 75 bp, synthetic construct
  source 1..75: mol_type = other DNA
ggaagagctgctgttttccgcgaatttcgcctgcccgatctgcggctacagtatgcgcgaactggaaccgcgtct

SEQ ID NO: 661937 - DNA, 75 bp, synthetic construct
  source 1..75: mol_type = other DNA
cctgacgtacattcgcctggggcagtccgcaaccacactttctggtggtgaagcccagcgcgtgaagctggcgcg

SEQ ID NO: 661938 - DNA, 75 bp, synthetic construct
  source 1..75: mol_type = other DNA
gcgatctttccgatccgccaaaactggaattgcaaaagaaacacactattgaagtcgtggttgatcgcttcaaag

SEQ ID NO: 661939 - DNA, 75 bp, synthetic construct
  source 1..75: mol_type = other DNA
ggcgggatgcgccagtccggcattctggctgccgccgggatgtatgcgctgaaaaataacgtcgcacggttgcag

SEQ ID NO: 661940 - DNA, 75 bp, synthetic construct
  source 1..75: mol_type = other DNA
caacccatcgacgcggctgccgacggcacgctaccgctggataaagtggcgatgaaaatcaaacccgacgatatc

SEQ ID NO: 661941 - DNA, 75 bp, synthetic construct
  source 1..75: mol_type = other DNA
tggtgacccatcttgacgtctcgcgtgaacaactggcggaagttgccgcccactggcgtgcgttcctggcgcgtt

SEQ ID NO: 661942 - DNA, 75 bp, synthetic construct
  source 1..75: mol_type = other DNA
cattcgctggcgaaaaatgaccggcggcggcatgcgtcaatccgggattctggctgctgccgggatgtatgcgct

SEQ ID NO: 661943 - DNA, 75 bp, synthetic construct
  source 1..75: mol_type = other DNA
gaagcatgggaatttacccgcgagcgcaatctggcgctgcatgttgacggtgcacgcatctttaatgccgtggtg

SEQ ID NO: 661944 - DNA, 75 bp, synthetic construct
  source 1..75: mol_type = other DNA
acgccagtcggttcattactcgtcggtaatcgtgattacattaaacgtgccattcgctggcggaaaatgaccggt

SEQ ID NO: 661945 - DNA, 75 bp, synthetic construct
  source 1..75: mol_type = other DNA
gttataaagagacggaatccagtgcggtacgtgaagaattagccaagtttatcagcaatcgcccgtgcgccagct

SEQ ID NO: 661946 - DNA, 75 bp, synthetic construct
  source 1..75: mol_type = other DNA
tctcccgccgtatcgcacaaatggaagccgatctgaaccggcttcataaagagagcgatacgctgactggtaggg

SEQ ID NO: 661947 - DNA, 75 bp, synthetic construct
  source 1..75: mol_type = other DNA
aacgagcgtgaacgcgaaatagaccatctgcaggcgcagctggataaactccgccggatgaacttcggcagtcgt

SEQ ID NO: 661948 - DNA, 75 bp, synthetic construct
  source 1..75: mol_type = other DNA
ccgccgaacagctggagttgatgcgcagcgccttccgggttatccggactgtacgtgaaaagcatgcctgtactc

SEQ ID NO: 661949 - DNA, 75 bp, synthetic construct
  source 1..75: mol_type = other DNA
ataaagaacacctcggcacgggtgacgtgaaataccacatgggcttctcgtctgacttccagaccgatggcggcc

SEQ ID NO: 661950 - DNA, 75 bp, synthetic construct
  source 1..75: mol_type = other DNA
ctccggcggtagggtatatgtccgttcaccagaaacagcaacaagatctggttaatgacgcgctgaacgtcgaat

SEQ ID NO: 661951 - DNA, 75 bp, synthetic construct
  source 1..75: mol_type = other DNA
caggcacctgcaccttcgcggcccatcgagcggggtatcgccagaccggggctgctggcccgtgtgctgacctcg

SEQ ID NO: 661952 - DNA, 75 bp, synthetic construct
  source 1..75: mol_type = other DNA
ggtatagcaggaccggggctggctggcccgcgtactgacctcaaagtatgcagagcacacaccgctgtatcgcca

SEQ ID NO: 661953 - DNA, 75 bp, synthetic construct
  source 1..75: mol_type = other DNA
ccgaagaaacgcgtccctgcgaatccggaaaaagtgctgaaactgacaggcgcacgcggcaacaacctgaaagat

SEQ ID NO: 661954 - DNA, 75 bp, synthetic construct
  source 1..75: mol_type = other DNA
cgattgaacagaaatcgacgtcccacaacccgcgctccacggtggggacaatcaccgaaatccacgactatttgc

SEQ ID NO: 661955 - DNA, 75 bp, synthetic construct
  source 1..75: mol_type = other DNA
tgcaccttcgcggcccatcgagcggggtatcgccggaccggggctgctggcccgtgtgctgacctcgaagtatgc

SEQ ID NO: 661956 - DNA, 75 bp, synthetic construct
  source 1..75: mol_type = other DNA
gcgccgtgctgcccgaactgcggcggttcactgagctatctgggcgaggataccgccgaacagctggagttgatg

SEQ ID NO: 661957 - DNA, 75 bp, synthetic construct
  source 1..75: mol_type = other DNA
gggctgggtggatgcatgctgccggctactgtctccgctggaagaggcgcttcatggctatgtgctgactgacgg

SEQ ID NO: 661958 - DNA, 75 bp, synthetic construct
  source 1..75: mol_type = other DNA
accgtaacgccgggtcaacgctggcgccggcggtgttgttcgcttacagcccggacagaaaaggcatccatccgc

SEQ ID NO: 661959 - DNA, 75 bp, synthetic construct
  source 1..75: mol_type = other DNA
ggaatgccggcagagcagcggcttgctgaacgtcagcgaaaaacgaaaccgttgttgaaatccctggaaagctgg

SEQ ID NO: 661960 - DNA, 75 bp, synthetic construct
  source 1..75: mol_type = other DNA
aacagcgtctggcggcaagaaaagccagagctgcgccactgatgcagtcactgtatgactggatacagactcaga

SEQ ID NO: 661961 - DNA, 75 bp, synthetic construct
  source 1..75: mol_type = other DNA
gaggaagccctgaaacggatcggcgagttgtatgccatcgaggcggaaataaggggaatgccggcagtacagcgc

SEQ ID NO: 661962 - DNA, 75 bp, synthetic construct
  source 1..75: mol_type = other DNA
gaaagcgatacgctgactggccgggtggatgacccggcagtacagcgcccgctgcgtcagacccgcacccgcaaa

SEQ ID NO: 661963 - DNA, 75 bp, synthetic construct
  source 1..75: mol_type = other DNA
aacttcggcagccgctccgaaaaagtctcccgccgtatcgcgaagatggaagccgaccttaagcagttgcagaaa

SEQ ID NO: 661964 - DNA, 75 bp, synthetic construct
  source 1..75: mol_type = other DNA
cgcgaaagtcgggagattgatggcggaagggaaaatcacggctgacatgatgttaacccatcgctatccgttcgc

SEQ ID NO: 661965 - DNA, 75 bp, synthetic construct
  source 1..75: mol_type = other DNA
catccaacgacagtaacgggagaagcgctccgtcgtatcggagaactgtacgctatcgaggctgagatccgcggc

SEQ ID NO: 661966 - DNA, 75 bp, synthetic construct
  source 1..75: mol_type = other DNA
gtgaaggtggtgcactgacagaagttgcgtgctgggcccatgcccggcgaaaaatccacgatgtatacatcagca

SEQ ID NO: 661967 - DNA, 75 bp, synthetic construct
  source 1..75: mol_type = other DNA
aaaaaagaaacgacgatgatgggcagccgcaacgccacgccggaagattttgctaaagtcggtcgactgatggcg

SEQ ID NO: 661968 - DNA, 75 bp, synthetic construct
  source 1..75: mol_type = other DNA
cccggacagaaaaggtatccaccctcagacccatcttgcaggcttcagtggcgtactgcaggctgatgcctacgc

SEQ ID NO: 661969 - DNA, 75 bp, synthetic construct
  source 1..75: mol_type = other DNA
ggctgctggcccgagtgctgacctcaaagtatgcagagcacacaccgctgtatcgccagtcggagatctatgccc

SEQ ID NO: 661970 - DNA, 75 bp, synthetic construct
  source 1..75: mol_type = other DNA
ctttatcgcaatggtgggataacggaagctgcctgctgggctcatgccgccgaaagatccacgatgtgcacgtcc

SEQ ID NO: 661971 - DNA, 75 bp, synthetic construct
  source 1..75: mol_type = other DNA
ccgctgacgttgacacctccgcactgcccggcggcaaagccagtgatgccgcacaagattttctcgcgttgttga

SEQ ID NO: 661972 - DNA, 75 bp, synthetic construct
  source 1..75: mol_type = other DNA
ctgaatgaagacgtcaccgcaagcctgagcgccctttttgcgatgttgccgggttttgacaatacgcccaaagtg

SEQ ID NO: 661973 - DNA, 75 bp, synthetic construct
  source 1..75: mol_type = other DNA
ttttcgcaatgttgccgggttttgacaatacgcccaaagtaactgacacaccatcaaccgtgttaccgacagaaa

SEQ ID NO: 661974 - DNA, 75 bp, synthetic construct
  source 1..75: mol_type = other DNA
tggcaggggcggaagtatgaggcgtacccgattgagggcagcggctttgagatgaacggaaagggctgcagtgcc

SEQ ID NO: 661975 - DNA, 75 bp, synthetic construct
  source 1..75: mol_type = other DNA
cgttgatttggtgatgaacaacggcaaagtgctgcgctacaccgatccgcgccgctttggcgcctggctgtggac

SEQ ID NO: 661976 - DNA, 75 bp, synthetic construct
  source 1..75: mol_type = other DNA
ctcagccagtaacaccgctggtagcagaggcccagagtaaagcggaagtcatcagcacaccttcgccggtgaccg

SEQ ID NO: 661977 - DNA, 75 bp, synthetic construct
  source 1..75: mol_type = other DNA
caggccgtagagaaagggttagttgacgaaattaacaccagtgacgatgttattcttaacctgatggaaggtcgc

SEQ ID NO: 661978 - DNA, 75 bp, synthetic construct
  source 1..75: mol_type = other DNA
gttcacttacaccgcctctctgcccggtacacaccagaaaattattgatatggccatgaatggcgtcggatgccg

SEQ ID NO: 661979 - DNA, 75 bp, synthetic construct
  source 1..75: mol_type = other DNA
cagttgcgcctggtgagcaagtgctggtggtcggggcggggccaatcggtttgggagctgcggcaatcgctaaag

SEQ ID NO: 661980 - DNA, 75 bp, synthetic construct
  source 1..75: mol_type = other DNA
ttttgatgcccagttgcgtaaacagtttggcggttccctggcgcagaaggtgatcgatgcgacaggtaatcaaca

SEQ ID NO: 661981 - DNA, 75 bp, synthetic construct
  source 1..75: mol_type = other DNA
caacgtttgcgcgataaaaagattccgttaactgtcacggtagacaaagtggctgccagcggcggttatatgatg

SEQ ID NO: 661982 - DNA, 75 bp, synthetic construct
  source 1..75: mol_type = other DNA
caccggcagtgcggcagagagcgccgaccgattgttgctacgctggtggcaacgcgggcaaaagccgttgatgta

SEQ ID NO: 661983 - DNA, 75 bp, synthetic construct
  source 1..75: mol_type = other DNA
ggttcagtggtgtcctgcaagcggatgcgtacgccgggttcaacgagctgtatcgcaatggtgggataacggaag

SEQ ID NO: 661984 - DNA, 75 bp, synthetic construct
  source 1..75: mol_type = other DNA
aaaacgcctgccggttatccatcaggttcacttggcccaaccaccgcaggtcgtatggactcctacgtggatctg

SEQ ID NO: 661985 - DNA, 75 bp, synthetic construct
  source 1..75: mol_type = other DNA
ttacagtgggcgtgaggatgacccgctggttccccgccagttgcgacagtcgcgccatcgtcgtccgttaccggc

SEQ ID NO: 661986 - DNA, 75 bp, synthetic construct
  source 1..75: mol_type = other DNA
cttgctgaacgtcagcgaaaaacgaaaccgctgttgaaatccctggaaagctggttgcgtaaaaagatgaagacc

SEQ ID NO: 661987 - DNA, 75 bp, synthetic construct
  source 1..75: mol_type = other DNA
cgagctgtatcgcaatggtcggataacggaagctgcctgctgggctcatgcccgccgaaagatcccacgatgtgc

SEQ ID NO: 661988 - DNA, 75 bp, synthetic construct
  source 1..75: mol_type = other DNA
tacagcccggacaggaaaggcatccatccgcagactcatcttgcctgcttcagcggtgtgctgcaagcggatgcg

SEQ ID NO: 661989 - DNA, 75 bp, synthetic construct
  source 1..75: mol_type = other DNA
cgcgtgctgccagttaatgacaccggtgaatgatgccctgtaccgttatgtaatgaatacccgcaaggttcacac

SEQ ID NO: 661990 - DNA, 75 bp, synthetic construct
  source 1..75: mol_type = other DNA
aacgcgaaatagaccatctgcaggcacagctggataagctgcgccggatgaacctcggcagctgctccgaaaaag

SEQ ID NO: 661991 - DNA, 75 bp, synthetic construct
  source 1..75: mol_type = other DNA
aacgcgaaatagaccatctgcaggcacagctggataagctgcgccggatgaacatcggcagcggctctgaaaaag

SEQ ID NO: 661992 - DNA, 75 bp, synthetic construct
  source 1..75: mol_type = other DNA
aacgcgaaatagaccatctgcaggcacagctggataagctgcgccggatgaacatcggcagctgctcagaaaaag

SEQ ID NO: 661993 - DNA, 75 bp, synthetic construct
  source 1..75: mol_type = other DNA
aaacagcgcctggccgaacaggaagcgctgatccacgccctgcaggaaaagctgagcaaccgggagcgcgaaata

SEQ ID NO: 661994 - DNA, 75 bp, synthetic construct
  source 1..75: mol_type = other DNA
aacgcgaaatagaccatctgcaggcacagctggataagctgcgccggatgaacgtcggcagctgctcggaaaaag

SEQ ID NO: 661995 - DNA, 75 bp, synthetic construct
  source 1..75: mol_type = other DNA
aacgcgaaatagaccatctgcaggcacagctggataagctgcgccggatgaacgtcggcagcagctctgaaaaag

SEQ ID NO: 661996 - DNA, 75 bp, synthetic construct
  source 1..75: mol_type = other DNA
aagcggatgcgtacgccgggttcaacgagctgtatcgcaatggtgggataacggaagctgcctgctggcttcatg

SEQ ID NO: 661997 - DNA, 75 bp, synthetic construct
  source 1..75: mol_type = other DNA
cagcccggacagaaaaggtatccaccctcagacccatcttgcaggcttcagtggcgtactgcaggctgatgccta

SEQ ID NO: 661998 - DNA, 75 bp, synthetic construct
  source 1..75: mol_type = other DNA
attggctatattggcccggtgccggaacgtgcgctgcaactgggtattgaggccagcaacatcaacccgaaaggg

SEQ ID NO: 661999 - DNA, 75 bp, synthetic construct
  source 1..75: mol_type = other DNA
cctgcgctgcacccgtattctccagccgggcatggtgttaaccatcgaaccgggtatctacttcattgaatcgct

SEQ ID NO: 662000 - DNA, 75 bp, synthetic construct
  source 1..75: mol_type = other DNA
ggttcagaggtgtcctgcatgcggatgcgtacgccgggttcaacgagctgtatcgcaatggtgggataacggaag

SEQ ID NO: 662001 - DNA, 75 bp, synthetic construct
  source 1..75: mol_type = other DNA
gtttcaggggtgtcctgcacgcggatgcgtacgccgggttcaacgagctgtatcgcaatggtgggataacggaag

SEQ ID NO: 662002 - DNA, 75 bp, synthetic construct
  source 1..75: mol_type = other DNA
gtttcagcggtgtcctgcaggcggatgcgtacgccgggttcaacgagctgtatcgcaatggtgggataacggaag

SEQ ID NO: 662003 - DNA, 75 bp, synthetic construct
  source 1..75: mol_type = other DNA
agacccatcttgcggggttcagtggtgtactgcaggcggatgcatacgccgggttcaacgagctgtaccgggatg

SEQ ID NO: 662004 - DNA, 75 bp, synthetic construct
  source 1..75: mol_type = other DNA
gcacgtccgtaccccgtcagtcctgacggaggaggcgctgaaacggatcggcgagctgtatgccatcgagtcgga

SEQ ID NO: 662005 - DNA, 75 bp, synthetic construct
  source 1..75: mol_type = other DNA
cagaaaaggtatccaccctcagacccatcttgcaggcttcagtggcgtactgcaggctgatgcctacgccgggtt

SEQ ID NO: 662006 - DNA, 75 bp, synthetic construct
  source 1..75: mol_type = other DNA
cagcgccttccgggtgatccggaccgtacgggaaaaacatgcctgcacaaaatgtgatgccatcgtgcaggcccc

SEQ ID NO: 662007 - DNA, 75 bp, synthetic construct
  source 1..75: mol_type = other DNA
caccctcagacccatcttgcaggcttcagtggcgtactgcaggctgatgcctacgccgggttcaacgagctctac

SEQ ID NO: 662008 - DNA, 75 bp, synthetic construct
  source 1..75: mol_type = other DNA
cttgatgtcatcgccgactggcctgtgaaccgggtgggtgctctgctcccgtggcgggttactctgcctgcctga

SEQ ID NO: 662009 - DNA, 75 bp, synthetic construct
  source 1..75: mol_type = other DNA
gaagaggaattatatcacgctggaaaaaggaaaactcattccgacagataccggatatgcgcttattgatgctct

SEQ ID NO: 662010 - DNA, 75 bp, synthetic construct
  source 1..75: mol_type = other DNA
acgcactcagcaccgacgagcgcaatgtttaccttgcgatcgcacaacactatcttgttcagttcatgcctgaaa

SEQ ID NO: 662011 - DNA, 75 bp, synthetic construct
  source 1..75: mol_type = other DNA
taagggaaaagagggcgaatatggcggcattggtacacctgcaacgcgaggtacaatactggaaaccttgaagaa

SEQ ID NO: 662012 - DNA, 75 bp, synthetic construct
  source 1..75: mol_type = other DNA
tatcttgttcagttcatgcctgaaaaggcataccaggaagtatcggttgccattcagtgtggtgatgagtcgttc

SEQ ID NO: 662013 - DNA, 75 bp, synthetic construct
  source 1..75: mol_type = other DNA
aattgtataaggaagtctctgttgccattcagtgtggcgatgagtcgttttatgcccgtgccagaaaaacaactg

SEQ ID NO: 662014 - DNA, 75 bp, synthetic construct
  source 1..75: mol_type = other DNA
aactgcagtatgcccgggatgtccgtgacggcaaaattcatgatccgcactttctgccggtgatttttgagcatc

SEQ ID NO: 662015 - DNA, 75 bp, synthetic construct
  source 1..75: mol_type = other DNA
gaacggataccgaagtggggaaaaccgtcgccagttgtgcacttttacaagccgcgaaggcagtaggttatcgga

SEQ ID NO: 662016 - DNA, 75 bp, synthetic construct
  source 1..75: mol_type = other DNA
tctggagcttaaggttccccagcgtaaagcctctgaggcgcgtaatgctttctctacggagcaggtaggacaact

SEQ ID NO: 662017 - DNA, 75 bp, synthetic construct
  source 1..75: mol_type = other DNA
gggtctggagcttaaagtccctcagcgtaaagcctcaggggcccgtaacgccttctctacggagcaggtggggca

SEQ ID NO: 662018 - DNA, 75 bp, synthetic construct
  source 1..75: mol_type = other DNA
ggaaaacttattccgacagataccgggtatgcgcttattgatgctctgccggatatagctgttaatccagatatg

SEQ ID NO: 662019 - DNA, 75 bp, synthetic construct
  source 1..75: mol_type = other DNA
ctaaccagaaccacaaatccagtttctactacaccatgaccggagtctttcagcgtggaactgatgttatcaggg

SEQ ID NO: 662020 - DNA, 75 bp, synthetic construct
  source 1..75: mol_type = other DNA
atgagattatttatcgcagagaaacccgcagtagcaaatgatattgttaaggcattaggtggaaattttacacgt

SEQ ID NO: 662021 - DNA, 75 bp, synthetic construct
  source 1..75: mol_type = other DNA
ggataaagacaaaaaagatgaacatggtggcattggtacgccagctacccgcgcagccattctggaaacactgaa

SEQ ID NO: 662022 - DNA, 75 bp, synthetic construct
  source 1..75: mol_type = other DNA
aattacactggagcagcctgaaaaaggtatttttgtgaagaattcagatggttcagatgtatgtactttatttga

SEQ ID NO: 662023 - DNA, 75 bp, synthetic construct
  source 1..75: mol_type = other DNA
caataaacaatcccagccttcgtacaagattgcagtgcttgacatgcctgaattacgtaaggaatttttcaagca

SEQ ID NO: 662024 - DNA, 75 bp, synthetic construct
  source 1..75: mol_type = other DNA
tgtttaccttgcgatcgcacaacactatcttgttcagttcatgcctgaaaaagcataccaggaagtatcggttgc

SEQ ID NO: 662025 - DNA, 75 bp, synthetic construct
  source 1..75: mol_type = other DNA
gtggtgaaactgtcagtattgtgtatgattctattaatgggcgcttttcatccagtggcggtaatggcggattgc

SEQ ID NO: 662026 - DNA, 75 bp, synthetic construct
  source 1..75: mol_type = other DNA
tgcatttgaacatttagttcgtgaagacttacctcatccattgacacgagaggaaataacggaatcaatgattgt

SEQ ID NO: 662027 - DNA, 75 bp, synthetic construct
  source 1..75: mol_type = other DNA
tccagcggcggcagtggaggattgctttctgagttattgcttttggggtttaatagtggtcctcaagctcttagc

SEQ ID NO: 662028 - DNA, 75 bp, synthetic construct
  source 1..75: mol_type = other DNA
ggaatatgcaggcaacacaaaacccgttaagcgcgttctgattaacgacaacacgcttccggcagtgaaaaaggc

SEQ ID NO: 662029 - DNA, 75 bp, synthetic construct
  source 1..75: mol_type = other DNA
acgtatgatgcagttcttgtccttgaggataagaaaacagggaagctgggttttccggcaagggctaagaagtga

SEQ ID NO: 662030 - DNA, 75 bp, synthetic construct
  source 1..75: mol_type = other DNA
gatatgacggcattatgggcggaaaaacagacactcattgaaaacggagaaatgaccatcgaacagttcgttgac

SEQ ID NO: 662031 - DNA, 75 bp, synthetic construct
  source 1..75: mol_type = other DNA
ggcctgattgtgaatcgtactcgtgccaaccagaatcataaatccagtttttactacaccatgaccggacatttt

SEQ ID NO: 662032 - DNA, 75 bp, synthetic construct
  source 1..75: mol_type = other DNA
cagtgctgaaataaaagtttcccccagcgcgccgtctggtcagtcacaacgcctgtcctctccttgtccttcctg

SEQ ID NO: 662033 - DNA, 75 bp, synthetic construct
  source 1..75: mol_type = other DNA
tgttcagtgtggggatgagtctttttatacccgcgcaagaaaaataacagacagcggatttgaagcatttcttgg

SEQ ID NO: 662034 - DNA, 75 bp, synthetic construct
  source 1..75: mol_type = other DNA
gcctgcaaccttaagggaaaacaaagcgtcacacgctgcgttaatcgaaatattcgaccatctgggtctcaatgc

SEQ ID NO: 662035 - DNA, 75 bp, synthetic construct
  source 1..75: mol_type = other DNA
tcattattaatgcgacatccagtggtattagtggcgatgttccggcgattccggaatcactcattcatccaggaa

SEQ ID NO: 662036 - DNA, 75 bp, synthetic construct
  source 1..75: mol_type = other DNA
gtaatccgatagcccacagcaaatcgccattcattcatcagcaatttgcacagcaactgaatattgaacatccct

SEQ ID NO: 662037 - DNA, 75 bp, synthetic construct
  source 1..75: mol_type = other DNA
tttgctgcgggtggcaaaggtgcgaatgttactgtgccttttaaagaggaagcatttgccagagcggatgagctc

SEQ ID NO: 662038 - DNA, 75 bp, synthetic construct
  source 1..75: mol_type = other DNA
tcattggaaaatactccgagccattatcacttaataaaagaataggcatctggtcagatgaaataaaaatacatt

SEQ ID NO: 662039 - DNA, 75 bp, synthetic construct
  source 1..75: mol_type = other DNA
acccgccgcaacgacggagagcgcgtgcgcgaaacggcgttgcgccttacatcccggcgtcgttttgccgggatg

SEQ ID NO: 662040 - DNA, 75 bp, synthetic construct
  source 1..75: mol_type = other DNA
ccgccgcaacgacgtgaagcgcggtttgcgaaacggcgttgccccttacatcccggcggccttttgccgggatgc

SEQ ID NO: 662041 - DNA, 75 bp, synthetic construct
  source 1..75: mol_type = other DNA
ttaccagcgtcagctggacgtgttcctcgatccgaacgatccgaaagtcatcgagcaggcgattaaagacggtat

SEQ ID NO: 662042 - DNA, 75 bp, synthetic construct
  source 1..75: mol_type = other DNA
aacaatttgacgttgcaaccagtttctatacaagtgacacactctacgacgatacccatctggaaatgggaaatg

SEQ ID NO: 662043 - DNA, 75 bp, synthetic construct
  source 1..75: mol_type = other DNA
ttaacacaaaaacctggcgaatcgcttagattcggccccttccagaaagacttgattgtaaaaataaactatcac

SEQ ID NO: 662044 - DNA, 75 bp, synthetic construct
  source 1..75: mol_type = other DNA
ctaaattgtttgcgcacactggcagtattcaggcgttgggtatggacgaactggaaggtcatgagtttgatctca

SEQ ID NO: 662045 - DNA, 75 bp, synthetic construct
  source 1..75: mol_type = other DNA
acgcatctggaaatgggtaatggtttgttaatgcgtattactgatcaaaaaacacaagaagacattaagtttaat

SEQ ID NO: 662046 - DNA, 75 bp, synthetic construct
  source 1..75: mol_type = other DNA
tgtaaaaacgtctggaccagccgtgaaggcgtggaatacgcgtggttcaacaacgtggaaaccaagcctggccag

SEQ ID NO: 662047 - DNA, 75 bp, synthetic construct
  source 1..75: mol_type = other DNA
cgaaaacgacgctgaattgttcgacattcaggaagctgccagcgcgggtgcgccgagtgatgccagtacgccgcc

SEQ ID NO: 662048 - DNA, 75 bp, synthetic construct
  source 1..75: mol_type = other DNA
acatggctggcccggaaatcatcagtgggtggttacggttgcaaaaccgttcagggcaaacaaacaggctgaatg

SEQ ID NO: 662049 - DNA, 75 bp, synthetic construct
  source 1..75: mol_type = other DNA
ccaggcctgcggctgcgatattctccttgatcctcgtctgcgtgaattaaatatgggtgtactggaaacaagaaa

SEQ ID NO: 662050 - DNA, 75 bp, synthetic construct
  source 1..75: mol_type = other DNA
ggtatcgcgctgggatgcctggtgagtaccattctgggcttaccggcatgggcagaacgccgcttacgtctgcgt

SEQ ID NO: 662051 - DNA, 75 bp, synthetic construct
  source 1..75: mol_type = other DNA
atgccaatggagtttgaatgggatgcaaacaaggccaaaagtaatcgggtgaaacatggcatccgctttgaagat

SEQ ID NO: 662052 - DNA, 75 bp, synthetic construct
  source 1..75: mol_type = other DNA
gaaacatggcatccgctttgaagatgcggtgttagtgtttgatgatccacaacatttgtcacagcaagaacgcat

SEQ ID NO: 662053 - DNA, 75 bp, synthetic construct
  source 1..75: mol_type = other DNA
tcgccgctaaagcgtactctcagaagacctcaggtaagccctaccactattacgtcactgctctggcggcaatca

SEQ ID NO: 662054 - DNA, 75 bp, synthetic construct
  source 1..75: mol_type = other DNA
tgatgatgcaagaatgttaaaaatgaatctgccattaacgccaaataatcagtgtatattccgcgattattttat

SEQ ID NO: 662055 - DNA, 75 bp, synthetic construct
  source 1..75: mol_type = other DNA
aaatgccaggttgcatcagggggttaatggtcagagcaacaggccgctggcgctgggaggggataacgatggctt

SEQ ID NO: 662056 - DNA, 75 bp, synthetic construct
  source 1..75: mol_type = other DNA
cccccagtaatgctgtgatttcgccgcgctatatgcatgttctgtgtagtctggtcagcaatgccttcggggttg

SEQ ID NO: 662057 - DNA, 75 bp, synthetic construct
  source 1..75: mol_type = other DNA
aatcttgtcgggatttaccgcagggaagtcgaccgctgctggtgagtcacggtattgcgctggggtgtctggtga

SEQ ID NO: 662058 - DNA, 75 bp, synthetic construct
  source 1..75: mol_type = other DNA
attatcagtagcgatttaggtcgcacccggcgtacagcggaaatcatcgcccaggcttgcggttgtgacatcatc

SEQ ID NO: 662059 - DNA, 75 bp, synthetic construct
  source 1..75: mol_type = other DNA
atgatgcggaatgtcagacacccgaaaacacacagggaactgtgtgaactggcctgtcgttttcttcgcaaccac

SEQ ID NO: 662060 - DNA, 75 bp, synthetic construct
  source 1..75: mol_type = other DNA
agatagcgaaagaaatttttgatgaaccttcatcctatgaatctattttagcgaaggccacaaatgtaatcgaaa

SEQ ID NO: 662061 - DNA, 75 bp, synthetic construct
  source 1..75: mol_type = other DNA
tgtcacttcatcatctacagatacgatcatgaggcattaattggtataagcattttgtctgcaggtggaattttg

SEQ ID NO: 662062 - DNA, 75 bp, synthetic construct
  source 1..75: mol_type = other DNA
acggaagccgcctgttgggctcacgcccgccgtaaaatccacgatgtgcacgttcgcaccccgtcagccctgacg

SEQ ID NO: 662063 - DNA, 75 bp, synthetic construct
  source 1..75: mol_type = other DNA
aagcaaagcgttactgacgtcgctgcatgaatggatggtggagaagaatggcacgctgtcgaaaaaatccagact

SEQ ID NO: 662064 - DNA, 75 bp, synthetic construct
  source 1..75: mol_type = other DNA
tactgggagtggcaaacccaggcggcgttaaacactgtcttgcagcaaatcgaaaaagagcagaacaccattatc

SEQ ID NO: 662065 - DNA, 75 bp, synthetic construct
  source 1..75: mol_type = other DNA
gcagctggataaactccgccggatgaacttcggcagtcgttccgaaaaaggtaagcgtaaaccgatcgccgtatg

SEQ ID NO: 662066 - DNA, 75 bp, synthetic construct
  source 1..75: mol_type = other DNA
gcccgccgaaagatccacgatatgcacgtccgcatcccgtcagcactgacggaagaagccctggagcagatcggt

SEQ ID NO: 662067 - DNA, 75 bp, synthetic construct
  source 1..75: mol_type = other DNA
atggtggtgagcggggagcgctactgtacgggctgatcggcacctgccgactgaacggtatcgatccggaagcgt

SEQ ID NO: 662068 - DNA, 75 bp, synthetic construct
  source 1..75: mol_type = other DNA
tgcctaaagcagtgctggagatgccgcgtcttggctgtatcaacgttcatggttcactgctgccacgctggcgcg

SEQ ID NO: 662069 - DNA, 75 bp, synthetic construct
  source 1..75: mol_type = other DNA
tactgctgccgggtaataagaagacgaagaccgggcggttgtgggcgtatgttcgtgatgaccgcaatgccgggt

SEQ ID NO: 662070 - DNA, 75 bp, synthetic construct
  source 1..75: mol_type = other DNA
gtgtcagaatcactacgtattatttttgcgggtacacctgactttgcagcgcgtcatctcgacgcgctgttgtct

SEQ ID NO: 662071 - DNA, 75 bp, synthetic construct
  source 1..75: mol_type = other DNA
cgaagggatctggcagatctggcaaatgcagcgggcggaggacaacgggcagacctttgagccgcttattgatgt

SEQ ID NO: 662072 - DNA, 75 bp, synthetic construct
  source 1..75: mol_type = other DNA
aaggtgtcgaaaccgatatcaatgccagcaaaacccggcaacagctcaacgatgtcgcggggaaaatgaaaatta

SEQ ID NO: 662073 - DNA, 75 bp, synthetic construct
  source 1..75: mol_type = other DNA
gaacgtcagcgaaaaacgaaaccgttgttgaaatccctggaaagctggttgcgtgaaaagatgaagaccctgtcg

SEQ ID NO: 662074 - DNA, 75 bp, synthetic construct
  source 1..75: mol_type = other DNA
ggctcactgagctatctgggtgaggatgccgccgaacagctggagttgatgcgcagcgccttccgggttatccgg

SEQ ID NO: 662075 - DNA, 75 bp, synthetic construct
  source 1..75: mol_type = other DNA
aagattttgtgaagcgtatgcgtccgtctctggatattgaacaggtggcaacgggtgaacactggtacggacaac

SEQ ID NO: 662076 - DNA, 75 bp, synthetic construct
  source 1..75: mol_type = other DNA
cgaagcgatgatggccgccccggttggggacgacgtttacggagacgaccctaccgttaatgctctgcaggacta

SEQ ID NO: 662077 - DNA, 75 bp, synthetic construct
  source 1..75: mol_type = other DNA
gaaagctggttgcgtgaaaagatgaagacccctgtcgcgacactcagagttggcgaaggcgttcgcgtacgcact

SEQ ID NO: 662078 - DNA, 75 bp, synthetic construct
  source 1..75: mol_type = other DNA
tgaaacggatcggcgagttgtatgccatcgaggcggaaataaggggaatgccggcagtacagcgccttaccgaac

SEQ ID NO: 662079 - DNA, 75 bp, synthetic construct
  source 1..75: mol_type = other DNA
tggagccagaagaaagctgttgcccggagtgtggcggtgagctggattatctgggggaagtcagcgctgaacaga

SEQ ID NO: 662080 - DNA, 75 bp, synthetic construct
  source 1..75: mol_type = other DNA
tcagaaatatacggccggcaaggtgtggagctgaggcgttcactgctgtcgggctggtggatgcatgctgccggc

SEQ ID NO: 662081 - DNA, 75 bp, synthetic construct
  source 1..75: mol_type = other DNA
tgccgaaagtggcaagccagcttcctgatgaactggggtactccttactggcccggcgggcagatttgcaggcgg

SEQ ID NO: 662082 - DNA, 75 bp, synthetic construct
  source 1..75: mol_type = other DNA
gtggaattgttgtctgaatatggtttgtttttggcgaaaatcgttaccgttgtgctagcgattgcggcgattgcc

SEQ ID NO: 662083 - DNA, 75 bp, synthetic construct
  source 1..75: mol_type = other DNA
tgcagagtgtttcaaccatcgaactgccttatgaagcagttaatcctatcgcgttaagcgaagaagaaagtagcg

SEQ ID NO: 662084 - DNA, 75 bp, synthetic construct
  source 1..75: mol_type = other DNA
cttcggcagtcgttccgaaaaagtctcccgccgtatcgcacaaatggaagccgatctgaaccggcttcagaaaga

SEQ ID NO: 662085 - DNA, 75 bp, synthetic construct
  source 1..75: mol_type = other DNA
attagcacattactatattattagctggaataatggaacgtcatcgaatttacttgaatatttctcattaatatc

SEQ ID NO: 662086 - DNA, 75 bp, synthetic construct
  source 1..75: mol_type = other DNA
catgattgctcaggctttacgcctgcatcagacaacgattgatcaccatatcagcgaattcctgaataaaggaaa

SEQ ID NO: 662087 - DNA, 75 bp, synthetic construct
  source 1..75: mol_type = other DNA
aagcgggccccgatatacaggtaactctgtccactatccactaaagataatcttcgtactgtttcagtggaagta

SEQ ID NO: 662088 - DNA, 75 bp, synthetic construct
  source 1..75: mol_type = other DNA
tgaatctactggccgcgaaacgcctgttacagatgctgggggcgctggatggcgaacgcctaaagcgcgcaaggg

SEQ ID NO: 662089 - DNA, 75 bp, synthetic construct
  source 1..75: mol_type = other DNA
cggcggcaaatgcaggcccgacgggtgttacagcagatgagtgatgaacggttgagggatagtgggttaagctgg

SEQ ID NO: 662090 - DNA, 75 bp, synthetic construct
  source 1..75: mol_type = other DNA
cggcggcaaatgcaggcccgacgggtgttacagcagatgagtgatgaacggttgagggatattgggttatgctgg

SEQ ID NO: 662091 - DNA, 75 bp, synthetic construct
  source 1..75: mol_type = other DNA
cggcggcaaatgcaggcccgacgggtgttacagcagatgagtgatgaacggttgagggataatgggttaggctgg

SEQ ID NO: 662092 - DNA, 75 bp, synthetic construct
  source 1..75: mol_type = other DNA
atgccattaacctcaggtattaattcatcttcgttcagccttggaatggaggttcttcgtgctcaagttgcagtc

SEQ ID NO: 662093 - DNA, 75 bp, synthetic construct
  source 1..75: mol_type = other DNA
gtgctcaagttgcagccactgggcgtggagaatttacaatgggtggtgaaactgtcagaattgaatatagcccaa

SEQ ID NO: 662094 - DNA, 75 bp, synthetic construct
  source 1..75: mol_type = other DNA
tggtgatattgaggggaaaatatcacaatataagttttcggttaatacgcagagccttcagtgcccatccgaggc

SEQ ID NO: 662095 - DNA, 75 bp, synthetic construct
  source 1..75: mol_type = other DNA
tggcgcgttgtcgctgaacgatcagcgaaaagcgatcctcccggcaccgcaagggatgcgcaaagtggtgctggc

SEQ ID NO: 662096 - DNA, 75 bp, synthetic construct
  source 1..75: mol_type = other DNA
tccagtggcggtaatggcggattgctttctgagttattgattttgggatttaataatggtcctcgagcccttggt

SEQ ID NO: 662097 - DNA, 75 bp, synthetic construct
  source 1..75: mol_type = other DNA
tcaaaaattcagatagttcagcagtatgcactttatttgatgttgatgcactttctcgcgtggttaatgacggtt

SEQ ID NO: 662098 - DNA, 75 bp, synthetic construct
  source 1..75: mol_type = other DNA
actctggcaggcggtgaggcgttggcggcggcaaatgcagacccgacgagtgttacagcagatgagtgatgaacg

SEQ ID NO: 662099 - DNA, 75 bp, synthetic construct
  source 1..75: mol_type = other DNA
aagctacctacgcaatgtacttgacgtcatagccgactggccggtgaaccgggtcagcgaactgctcccatggcg

SEQ ID NO: 662100 - DNA, 75 bp, synthetic construct
  source 1..75: mol_type = other DNA
aagctacctacgcaatgtacttgacgtcatagcagactggccggtgaaccgggtcagcgaactgctcccctggcg

SEQ ID NO: 662101 - DNA, 75 bp, synthetic construct
  source 1..75: mol_type = other DNA
aactgggttgacgcgtgctgccagttaatgactccgctaaatgatgccctgtaccgttacgtgatgaacacccgc

SEQ ID NO: 662102 - DNA, 75 bp, synthetic construct
  source 1..75: mol_type = other DNA
agaacgccttacggggtgtggctgtaggccggaaaaactggctgttcgcaggttccgacagcggtggcgaacatg

SEQ ID NO: 662103 - DNA, 75 bp, synthetic construct
  source 1..75: mol_type = other DNA
aagaagccctgaagcgaatcagtgaactgtacgccatcgaggatgaaatacggggattaccggagtcagagcgtc

SEQ ID NO: 662104 - DNA, 75 bp, synthetic construct
  source 1..75: mol_type = other DNA
aagctacctacgcaatgtacttgacgtcatagcggactggccgatgaaccgggtcagcgaactgctcccgtggcg

SEQ ID NO: 662105 - DNA, 75 bp, synthetic construct
  source 1..75: mol_type = other DNA
agaaaacgaagaccgggcggttgtgggtgtatgttcgtgacgaccgtaacgccgggtcaacgctggcgccggcgg

SEQ ID NO: 662106 - DNA, 75 bp, synthetic construct
  source 1..75: mol_type = other DNA
ggagactaaaggtcacatttttagagctgttgaaaatgcgttacagcaacctcttgatatgaatggggcacaatc

SEQ ID NO: 662107 - DNA, 75 bp, synthetic construct
  source 1..75: mol_type = other DNA
atggaatttcacgaaaacagagccaaaacgccgtttattggtttcgtacaactctggcaggcggtgaggcgttgg

SEQ ID NO: 662108 - DNA, 75 bp, synthetic construct
  source 1..75: mol_type = other DNA
agccaatcctctcaatactaccatcatttaatcccattacagagcatagatacatgggttttatattttgttgtc

SEQ ID NO: 662109 - DNA, 75 bp, synthetic construct
  source 1..75: mol_type = other DNA
aacgcgccgtcagctggatgatatccggagccacctgaacggaatgatgacacagaaaagcgtcaccgaatcctc

SEQ ID NO: 662110 - DNA, 75 bp, synthetic construct
  source 1..75: mol_type = other DNA
ggtaaaaagtcagggcgcattctggtcgatgagctttggttgtttggcaagcgagctaatgccgaagccatgttt

SEQ ID NO: 662111 - DNA, 75 bp, synthetic construct
  source 1..75: mol_type = other DNA
cgtatcatgctggcgaacacctgtatgtggacctaccgctctgatgagtgtggttacacgggcggggctgtggcg

SEQ ID NO: 662112 - DNA, 75 bp, synthetic construct
  source 1..75: mol_type = other DNA
attgatctgacagaggtcggcggagatcattatttcttctgtaatgagcagaacgaaaaaggtgaaccagtcacc

SEQ ID NO: 662113 - DNA, 75 bp, synthetic construct
  source 1..75: mol_type = other DNA
tgtttggccttgtcaccgggatggcggaggatttgcagagtctggtgggtgccacggtggtccgtcgccgggtgt

SEQ ID NO: 662114 - DNA, 75 bp, synthetic construct
  source 1..75: mol_type = other DNA
ctcaacgagctggacgcggacgaacaggcagacatctgcgaatcacttcacgaccacgccgacgaactctaccgt

SEQ ID NO: 662115 - DNA, 75 bp, synthetic construct
  source 1..75: mol_type = other DNA
aggcagatatctgtgaatcgcttcacgaccacgccgatgagctttaccgcagctgcctcgcacgcttcggggatg

SEQ ID NO: 662116 - DNA, 75 bp, synthetic construct
  source 1..75: mol_type = other DNA
gctggcgcatcgaacagtgcagcgaactgagcgcggtcagtacctcttttgtgctgtccacaccgacggaaacgg

SEQ ID NO: 662117 - DNA, 75 bp, synthetic construct
  source 1..75: mol_type = other DNA
aagggcagcagtgcctggccgtcgctgacggtgtcgaatctgttgggtctggtcaccggtatggcggaggacctg

SEQ ID NO: 662118 - DNA, 75 bp, synthetic construct
  source 1..75: mol_type = other DNA
aagggcagcagtgcctgcccgtcgctgacggtgtcgaatctgttcggtctggtcaccggtatggcggaggacctg

SEQ ID NO: 662119 - DNA, 75 bp, synthetic construct
  source 1..75: mol_type = other DNA
ggtcgtggttatcgggcggcagaggtaaaaagaataaaaaaatcccgcagagttgcggggacagacaaagattaa

SEQ ID NO: 662120 - DNA, 75 bp, synthetic construct
  source 1..75: mol_type = other DNA
ggaatggcggaggacctgcagagtctggtgggggccacggtggtccgccgccgggtgtatgcccgttttctggat

SEQ ID NO: 662121 - DNA, 75 bp, synthetic construct
  source 1..75: mol_type = other DNA
ttaacatggcgcgctttatcagaagccagacattaacactgctggaaaagctcaacgaactggacgcggatgaac

SEQ ID NO: 662122 - DNA, 75 bp, synthetic construct
  source 1..75: mol_type = other DNA
gacgaatgccacctggagtgagatcaacttcagcgaagcgctctggacgatccccaaagaaaggatgaagcggcg

SEQ ID NO: 662123 - DNA, 75 bp, synthetic construct
  source 1..75: mol_type = other DNA
tggcggtggtggtatccctgttattcgtgaaggtaaccatctgcgtggtgccagcgcggttatcgataaagactg

SEQ ID NO: 662124 - DNA, 75 bp, synthetic construct
  source 1..75: mol_type = other DNA
cgtcaggcaggtgaaggcgaagcagtgaaagtcgaccttaaccgcccgatgaaagagatccttgcccagctttcg

SEQ ID NO: 662125 - DNA, 75 bp, synthetic construct
  source 1..75: mol_type = other DNA
tcgagcactgacgcccgaggaaattggcttgatgtaccagtacatggagcgtatcggcaccacaccttcaattcg

SEQ ID NO: 662126 - DNA, 75 bp, synthetic construct
  source 1..75: mol_type = other DNA
cgaacgcggacagaaggttgagaacccggccgatttggtgcgcccgtcaactatcgccaagtttgagccgcgaga

SEQ ID NO: 662127 - DNA, 75 bp, synthetic construct
  source 1..75: mol_type = other DNA
catcgtcacacacggtaatggaccgcaggtgggtatgattaaccaggcattcgaagctgccgcgaagactgaagc

SEQ ID NO: 662128 - DNA, 75 bp, synthetic construct
  source 1..75: mol_type = other DNA
tcctcagtttttcctcaatggcagggaaaccacagcgcctgccggactgactggcgccctgaatatgagcctgca

SEQ ID NO: 662129 - DNA, 75 bp, synthetic construct
  source 1..75: mol_type = other DNA
atcgattttaccagggcaacgtctggcaaatgagatgacaccggatgttccccgtatcccctcgcctgaaatcct

SEQ ID NO: 662130 - DNA, 75 bp, synthetic construct
  source 1..75: mol_type = other DNA
ccagacattaacgctgctggaaaagctcaacgaactggacgcggatcgagtaggcagcctggcggctgcggcttg

SEQ ID NO: 662131 - DNA, 75 bp, synthetic construct
  source 1..75: mol_type = other DNA
tgaagacttacgcgcattaaccgataacattgtcgagagaggggcaccggcgacagctgtgcacgccagagagat

SEQ ID NO: 662132 - DNA, 75 bp, synthetic construct
  source 1..75: mol_type = other DNA
aatatctggttcctggtcgttacaatttccggaagccattatctaatgccgcgctgaactctctgatcgacagaa

SEQ ID NO: 662133 - DNA, 75 bp, synthetic construct
  source 1..75: mol_type = other DNA
aggtctccgatcgtgacgggctgtatgtagctgttcttacgtcaggcacggtctcgtttcgctacgactaccgta

SEQ ID NO: 662134 - DNA, 75 bp, synthetic construct
  source 1..75: mol_type = other DNA
aagggcagcagtgcctgtccgtcgctgacggtgtcgaatctgtttggtctggtcaccggtatggcggaggacctg

SEQ ID NO: 662135 - DNA, 75 bp, synthetic construct
  source 1..75: mol_type = other DNA
acaaatgcagcaagtgtatgcgcgggtgtgagttgcgcaacaataccggtaatttcggcggtttcctttccatca

SEQ ID NO: 662136 - DNA, 75 bp, synthetic construct
  source 1..75: mol_type = other DNA
cgtaaaggtgaacacccatctttaaaagcctttctggaacggcacggtggcgtccgcgcatttcagtggacgcca

SEQ ID NO: 662137 - DNA, 75 bp, synthetic construct
  source 1..75: mol_type = other DNA
atcatgagacgacacgcctcactcagtcaccgcgggtggtgctctgggaaattgacctgacggtgcagggcggtg

SEQ ID NO: 662138 - DNA, 75 bp, synthetic construct
  source 1..75: mol_type = other DNA
cttctgagttgcttcgtgctaaggcagcccagctgggggtaagcagtgctgcagaagtgtatatccgcaaaatgg

SEQ ID NO: 662139 - DNA, 75 bp, synthetic construct
  source 1..75: mol_type = other DNA
ttcccgacctaccctgacggtttctaacctgtacggtatggtcaccgggatggcggaagagctgcagagtctggt

SEQ ID NO: 662140 - DNA, 75 bp, synthetic construct
  source 1..75: mol_type = other DNA
ttcccggcccaccctgacggtttctaacctgaacggtatggtcaccgggatggcggaagagctgcagagtctggt

SEQ ID NO: 662141 - DNA, 75 bp, synthetic construct
  source 1..75: mol_type = other DNA
ttcccgtcctaccctgacggtttctaacctggacggtatggtcaccgggatggcggaagagctgcagagtctggt

SEQ ID NO: 662142 - DNA, 75 bp, synthetic construct
  source 1..75: mol_type = other DNA
cgtccgacactgacggtttctaacctgcacggcatggtgaccgggatggcggaagacctgcagagtctggtcgga

SEQ ID NO: 662143 - DNA, 75 bp, synthetic construct
  source 1..75: mol_type = other DNA
atccgcgctggtcgtgctctgggaaattgatctgacagaggtcggcggagatcgttatttcttctgtaatgagca

SEQ ID NO: 662144 - DNA, 75 bp, synthetic construct
  source 1..75: mol_type = other DNA
aagggcagcagtgcctgaccgtcgctgacggtgtcgaatctgttaggtctggtcaccggtatggcggaggacctg

SEQ ID NO: 662145 - DNA, 75 bp, synthetic construct
  source 1..75: mol_type = other DNA
aatgaacgggaaaggcagcagtgccagaccgtcgctgacggtgtccaatctgttcggccttgtcaccgggatggc

SEQ ID NO: 662146 - DNA, 75 bp, synthetic construct
  source 1..75: mol_type = other DNA
ttttgtggcaggcaatccggaggcggacccggagcaggagctgacggaccgctgggtggtggagcagatgtcagc

SEQ ID NO: 662147 - DNA, 75 bp, synthetic construct
  source 1..75: mol_type = other DNA
aacacctgtatgtggacctaccgctctgatgagtgtggttacacgggcggggctgtggcggatgagttcgataaa

SEQ ID NO: 662148 - DNA, 75 bp, synthetic construct
  source 1..75: mol_type = other DNA
tgggggccacggtggtccgccgccgggtgtatgcccgttttctggatgcggtgaatttggtggcgggcaatccgg

SEQ ID NO: 662149 - DNA, 75 bp, synthetic construct
  source 1..75: mol_type = other DNA
cccaccacggatatccgtaaggacagatgcagcaagtgcatgcgcgggtgtgaactgcgcaggaatgtcggcaat

SEQ ID NO: 662150 - DNA, 75 bp, synthetic construct
  source 1..75: mol_type = other DNA
ggaccagcaagatcgctactcaacggaaattgtggttagcatgaacggcgttatgcagatgctgggtggtcgcca

SEQ ID NO: 662151 - DNA, 75 bp, synthetic construct
  source 1..75: mol_type = other DNA
caacagttcagcgggcagcctcagccgcaaccgccggagggtgacgattacgggttttcagacgatatcccgttc

SEQ ID NO: 662152 - DNA, 75 bp, synthetic construct
  source 1..75: mol_type = other DNA
cgcacaacccggaaatgcgctttgttttctctaacaccaccgaagcgggtatcagctaccatgcgggcgataaat

SEQ ID NO: 662153 - DNA, 75 bp, synthetic construct
  source 1..75: mol_type = other DNA
agcagtttgcccgaaaaagggctgaacactgccaccggcgctgccggggaagggggtaacgaaaaaagcagcctt

SEQ ID NO: 662154 - DNA, 75 bp, synthetic construct
  source 1..75: mol_type = other DNA
tgcaggtaaaaaatctaacactgctccgcagcaaccaccttcgcagcctgatccgggtcacgattttgacgatga

SEQ ID NO: 662155 - DNA, 75 bp, synthetic construct
  source 1..75: mol_type = other DNA
tcactctggtcggcaatctgggacaggatccggaaattcgttatatgccgcaaggcggcgcagtggccaatatca

SEQ ID NO: 662156 - DNA, 75 bp, synthetic construct
  source 1..75: mol_type = other DNA
cctgatacccgatgacggagataaagttcccacgtttaagcaactgggctttatcccggagcaaatccggttgct

SEQ ID NO: 662157 - DNA, 75 bp, synthetic construct
  source 1..75: mol_type = other DNA
gagaatattcggtgaactgcaaactgtagatgaagatcaacctgcgttgggttattcactttgcgcaacagccat

SEQ ID NO: 662158 - DNA, 75 bp, synthetic construct
  source 1..75: mol_type = other DNA
gtgaacaggtactggaaatcgtcgccgaagaggcgaaaggcaagattaaactcattgcccacgtaggttgcgtca

SEQ ID NO: 662159 - DNA, 75 bp, synthetic construct
  source 1..75: mol_type = other DNA
tatctggggggacaccgttgtcgagtgtgttcttaacaaactctgcccgtcgcatacctgcgtaatttttaaata

SEQ ID NO: 662160 - DNA, 75 bp, synthetic construct
  source 1..75: mol_type = other DNA
tatctggggggacaccgttatcgagtgcgtgcttaacaaactctgcccgtcgcatacctacgtaatttttaaata

SEQ ID NO: 662161 - DNA, 75 bp, synthetic construct
  source 1..75: mol_type = other DNA
gtttaaacaactgggctttatcccggaacaaatccggttgctgaacataatgctgcgccgcccggaaggaaaaat

SEQ ID NO: 662162 - DNA, 75 bp, synthetic construct
  source 1..75: mol_type = other DNA
tgccgaatcaggcgcttacaatgtcgcccgctctggcgacagctatattctggttaacttctataccggagtcgg

SEQ ID NO: 662163 - DNA, 75 bp, synthetic construct
  source 1..75: mol_type = other DNA
acgcaataacaacggtggtgaattacgcgagtttatttgcgcccggaaagttgatgattgtggtgaaaagactta

SEQ ID NO: 662164 - DNA, 75 bp, synthetic construct
  source 1..75: mol_type = other DNA
cctgattactttcgaccattacagcatctgtgcgcgttattgcggcgaaagcatatcccgcgccattgcatttgg

SEQ ID NO: 662165 - DNA, 75 bp, synthetic construct
  source 1..75: mol_type = other DNA
gcttaatcccgcctttaagccgatccccattgatggcaattgccgcattgtaggaaaagttgttcagataacgca

SEQ ID NO: 662166 - DNA, 75 bp, synthetic construct
  source 1..75: mol_type = other DNA
aacgcgtggtattcctggagttgtattaacaattttagccttttcagcaatactcatatatgccttaagaactgc

SEQ ID NO: 662167 - DNA, 75 bp, synthetic construct
  source 1..75: mol_type = other DNA
catcgttaacatcctgatatgcgccgccgtgctatgggctcggggaaacgtggcgcgtcttattgatgctctgag

SEQ ID NO: 662168 - DNA, 75 bp, synthetic construct
  source 1..75: mol_type = other DNA
cccttccgttatgtgttcggtctttatcaagaatcccactggctggtggttattggaaatctgattatctgcatc

SEQ ID NO: 662169 - DNA, 75 bp, synthetic construct
  source 1..75: mol_type = other DNA
ctcaaaaaatttgttgaggactggccgaacaggtatctcgtcccactaaatcctaactataaaactattgaatgc

SEQ ID NO: 662170 - DNA, 75 bp, synthetic construct
  source 1..75: mol_type = other DNA
atgggaaatagggtaaaaagtcaggaagttcgatacctctacagcgaatattttgctgatgatacttccctttgc

SEQ ID NO: 662171 - DNA, 75 bp, synthetic construct
  source 1..75: mol_type = other DNA
acaaaatcatccgttttatggaagagagtaatgcatccgaatcaccgttgaaaacgcgtgaaatagcggatggtt

SEQ ID NO: 662172 - DNA, 75 bp, synthetic construct
  source 1..75: mol_type = other DNA
acttaaccctgcctttaaacccatcccgatagacggtaattgccggattgttgggagagtggttcagattaccca

SEQ ID NO: 662173 - DNA, 75 bp, synthetic construct
  source 1..75: mol_type = other DNA
ggacgcagggggcgtattcttcccttgccctgaaagcagttcagttatcgttgcggcatattccggcatcactgc

SEQ ID NO: 662174 - DNA, 75 bp, synthetic construct
  source 1..75: mol_type = other DNA
tttctctaacaccaccgaagcgggtatcagctaccatgcgggcgataaattcgatgacgcgccagcggtaagtta

SEQ ID NO: 662175 - DNA, 75 bp, synthetic construct
  source 1..75: mol_type = other DNA
cagatccgtcgtgaacatcctgatctggtgctctacaacggttacgacgaaatctttgcttccggcctgctggcg

SEQ ID NO: 662176 - DNA, 75 bp, synthetic construct
  source 1..75: mol_type = other DNA
agaggcggctttactccttttcataataatactttaaatatcgcccctaatgaaaaaaaatttatttccctaata

SEQ ID NO: 662177 - DNA, 75 bp, synthetic construct
  source 1..75: mol_type = other DNA
actcaggaagtaaaactataaccattcacattactgatgaaagtagcgattatgatacttttgacttccgcaata

SEQ ID NO: 662178 - DNA, 75 bp, synthetic construct
  source 1..75: mol_type = other DNA
ttcactatatgggggttattgatatcccattatgcagaaaaccattcagtgatgttaaagaagaatatatacctg

SEQ ID NO: 662179 - DNA, 75 bp, synthetic construct
  source 1..75: mol_type = other DNA
tcaagttgacattgaagccaataaattaacgtatacaattttatttcctgatacggagttacctgttcaacttaa

SEQ ID NO: 662180 - DNA, 75 bp, synthetic construct
  source 1..75: mol_type = other DNA
agaatatcatggacatcagttaaccaatgctatgacagttgcttcagtggttaagccatatgactttagtaatct

SEQ ID NO: 662181 - DNA, 75 bp, synthetic construct
  source 1..75: mol_type = other DNA
attcatttccttcttcatattcacatgatttatttggtttggttgaagcatatagaaatccagtgtattcgtatt

SEQ ID NO: 662182 - DNA, 75 bp, synthetic construct
  source 1..75: mol_type = other DNA
ccgcactgaacaggctgatcaatgtcactgtcgaatcggtgaatgaggctggcgggcatctggatgacttctctg

SEQ ID NO: 662183 - DNA, 75 bp, synthetic construct
  source 1..75: mol_type = other DNA
ctactttaaaccgggttttgaccttgacgtatcgcctggcacagaaagaaggggagtcattgccgaagtttggtc

SEQ ID NO: 662184 - DNA, 75 bp, synthetic construct
  source 1..75: mol_type = other DNA
taccttgctccatgaagctggttacaacaccgactggattgagaaatgcctggcgcatgagcaaaagggtgtgag

SEQ ID NO: 662185 - DNA, 75 bp, synthetic construct
  source 1..75: mol_type = other DNA
agcagaaacttagtgagattacacatgaagacttacgcgcattaaccgataacattgtcgagagaggggcaccag

SEQ ID NO: 662186 - DNA, 75 bp, synthetic construct
  source 1..75: mol_type = other DNA
caccttgctacatgaggccgggtacaatactgactggattgagaagagccttgcccatgaacaaaaaggggtacg

SEQ ID NO: 662187 - DNA, 75 bp, synthetic construct
  source 1..75: mol_type = other DNA
tggattgacggggagcatacggatctgattccgttctccccgtcgaagtttgagaagtggatggcgggggaataa

SEQ ID NO: 662188 - DNA, 75 bp, synthetic construct
  source 1..75: mol_type = other DNA
actcaggaagtaaagctataaccattcacattactgatgaaagtggcgattatgatacttttgacttccgcaata

SEQ ID NO: 662189 - DNA, 75 bp, synthetic construct
  source 1..75: mol_type = other DNA
atctgagcaagcacgcctttattgcatttttaggtgccatgctgttcctcatggcagctgaacctgctctggcgt

SEQ ID NO: 662190 - DNA, 75 bp, synthetic construct
  source 1..75: mol_type = other DNA
ggtcggtgcaggcgcgatgttgatcttcggcggtgatatgaacgggttccttcgtactctgattttcatcgttct

SEQ ID NO: 662191 - DNA, 75 bp, synthetic construct
  source 1..75: mol_type = other DNA
atgaaaacaggtttattccacttcaatctgagcaagcacgcctttattgcatttttaggtgccatgctgttcctc

SEQ ID NO: 662192 - DNA, 75 bp, synthetic construct
  source 1..75: mol_type = other DNA
atgaatggattcagaaacagttcacggaacggtcaggtctggcgctggcagcgtgcggaagccgggccgttattc

SEQ ID NO: 662193 - DNA, 75 bp, synthetic construct
  source 1..75: mol_type = other DNA
tactgagtgcgctgcttccaccagggcctgcatggtcagtagacgatgttgcgataagtggcatagctccatctt

SEQ ID NO: 662194 - DNA, 75 bp, synthetic construct
  source 1..75: mol_type = other DNA
aaagtgccagaattattgcgtccggataagagattaccttgtgaaacggtaacagacagtaatagcaccgctaca

SEQ ID NO: 662195 - DNA, 75 bp, synthetic construct
  source 1..75: mol_type = other DNA
atattatgggacatttagtgcctgtcagttttatttatgacattggaggagtctctaatggcaacagaataagtg

SEQ ID NO: 662196 - DNA, 75 bp, synthetic construct
  source 1..75: mol_type = other DNA
tttttatatttcagatatctataaaatgtccagaggaagaaaatcggttaaattgaatgtagaaaagaaaccgga

SEQ ID NO: 662197 - DNA, 75 bp, synthetic construct
  source 1..75: mol_type = other DNA
tagaaatcctagaattgaaggaccctgtactaactgaaggcatattataccagcgtcgaatatcatctcttttaa

SEQ ID NO: 662198 - DNA, 75 bp, synthetic construct
  source 1..75: mol_type = other DNA
agcgcacttcaggaagggctaccttacgaatcccgtcttgccgaaagcatcgttgaaaagtgcctcgaaaaatat

SEQ ID NO: 662199 - DNA, 75 bp, synthetic construct
  source 1..75: mol_type = other DNA
gcaagttaccgccccccattccgtagccagcctgcgtcagcgaatgggacgctccggtcggcgcgactcgcctgc

SEQ ID NO: 662200 - DNA, 75 bp, synthetic construct
  source 1..75: mol_type = other DNA
taattcttttagtaaagatgtctgtcgtgaacaaaatggtgatatatataaaatattttttagaattgcgtcttt

SEQ ID NO: 662201 - DNA, 75 bp, synthetic construct
  source 1..75: mol_type = other DNA
gtactgtccacgccgacggaaacggacggcgctgtttttccggggcgcatcatgctggctaatacctgcacctgg

SEQ ID NO: 662202 - DNA, 75 bp, synthetic construct
  source 1..75: mol_type = other DNA
tggcaggggcgacagtatcaggcgtatcccattcaggggagcggttttgaactgaacggcaagggcagtgctgcc

SEQ ID NO: 662203 - DNA, 75 bp, synthetic construct
  source 1..75: mol_type = other DNA
tatctatgccatagacataaatcgttataatctatccgcaatagtttcagtaataggtttgtttaaaaaagagtc

SEQ ID NO: 662204 - DNA, 75 bp, synthetic construct
  source 1..75: mol_type = other DNA
attcagagatgagtcgaaaattatatcttttatgtatgataagaacaaaacttatatcttgtcatttttgattgc

SEQ ID NO: 662205 - DNA, 75 bp, synthetic construct
  source 1..75: mol_type = other DNA
atgcctgattttttctcttttattaacaatgtactatggggatcagtgatgatctacctgctcttcggtgcaggt

SEQ ID NO: 662206 - DNA, 75 bp, synthetic construct
  source 1..75: mol_type = other DNA
gatattactggcgggtaacggcacaacctacatgccactggaaggtattcagcttatccagaaggcgatgcgggt

SEQ ID NO: 662207 - DNA, 75 bp, synthetic construct
  source 1..75: mol_type = other DNA
taacggttttcagcgcagtatgttttccaatgaggcgggaatggggtcgacgccaaacgcggcagcggcagcggc

SEQ ID NO: 662208 - DNA, 75 bp, synthetic construct
  source 1..75: mol_type = other DNA
ttttcggccttgtcaccgggatggcggaggatttgcagagcctggtgggtgccacggtggtccgccgccgggtgt

SEQ ID NO: 662209 - DNA, 75 bp, synthetic construct
  source 1..75: mol_type = other DNA
ttctgatgaagataagttgcaggcgctacagttacgcgcgcgtttgcgtggttttgaactgccggaagatgtggg

SEQ ID NO: 662210 - DNA, 75 bp, synthetic construct
  source 1..75: mol_type = other DNA
atcggcatggcgacctcttttgcagaatgttcccttgcccagctttataaagaacgtgacgctaatgggcagttt

SEQ ID NO: 662211 - DNA, 75 bp, synthetic construct
  source 1..75: mol_type = other DNA
ttcacgacccaccctgacggtttctaacctggacggtatggtcaccggaatggcggaagatttgcagagtctggt

SEQ ID NO: 662212 - DNA, 75 bp, synthetic construct
  source 1..75: mol_type = other DNA
ttcacgacctacgctgacggtttctaacctggacggtatggtcaccggaatggcggaagatgtgcagagtctggt

SEQ ID NO: 662213 - DNA, 75 bp, synthetic construct
  source 1..75: mol_type = other DNA
ttcacgacctaccctgacggtttctaacctggacggtatggtcaccggaatggcggaagatctgcagagtctggt

SEQ ID NO: 662214 - DNA, 75 bp, synthetic construct
  source 1..75: mol_type = other DNA
tattttatgtattataagagcaaaacttatatcttgttgtttttgattgctttttcaatggtttcatttgcccat

SEQ ID NO: 662215 - DNA, 75 bp, synthetic construct
  source 1..75: mol_type = other DNA
ttcacgaccgacgctgacggtttctaacctggacggtatggtcaccggaatggcggaagatttgcagagtctggt

SEQ ID NO: 662216 - DNA, 75 bp, synthetic construct
  source 1..75: mol_type = other DNA
ttcacgaccgactctgacggtttctaacctggacggtatggtcaccggaatggcggaagatatgcagagtctggt

SEQ ID NO: 662217 - DNA, 75 bp, synthetic construct
  source 1..75: mol_type = other DNA
ttcacgaccaacactgacggtttctaacctggacggtatggtcaccggaatggcggaagatttgcagagtctggt

SEQ ID NO: 662218 - DNA, 75 bp, synthetic construct
  source 1..75: mol_type = other DNA
ttcacgacctactctgacggtttctaacctggacggtatggtcaccggaatggcggaagatttgcagagtctggt

SEQ ID NO: 662219 - DNA, 75 bp, synthetic construct
  source 1..75: mol_type = other DNA
ttcacgacctacactgacggtttctaacctggacggtatggtcaccggaatggcggaagatatgcagagtctggt

SEQ ID NO: 662220 - DNA, 75 bp, synthetic construct
  source 1..75: mol_type = other DNA
ttcacgaccaactctgacggtttctaacctggacggtatggtcaccggaatggcggaagatgtgcagagtctggt

SEQ ID NO: 662221 - DNA, 75 bp, synthetic construct
  source 1..75: mol_type = other DNA
tttcctccgctggtgacaggcattattctcgctgtctttgctctgctggcaatcactcgcggtcttcatggcgtc

SEQ ID NO: 662222 - DNA, 75 bp, synthetic construct
  source 1..75: mol_type = other DNA
accagaagcatctggcaaaggcaacggctggacgccgccggaagtagatggagcacctccccgcccccaaatctc

SEQ ID NO: 662223 - DNA, 75 bp, synthetic construct
  source 1..75: mol_type = other DNA
acgaaggataaatgcagcaaatgcctgagcggctgtaagtttcgcaatccgatatcacgaaggataaatgcagca

SEQ ID NO: 662224 - DNA, 75 bp, synthetic construct
  source 1..75: mol_type = other DNA
ccaggccctgcgtgaagcgcgcgaaaccaacgcagctcagcaacaggtgcttgccggaaaggacgaaaaaatcaa

SEQ ID NO: 662225 - DNA, 75 bp, synthetic construct
  source 1..75: mol_type = other DNA
attcaatctttttcgcgctttgtgtgaatttggcatcaaaggagtcctagaacacctacaacaacccaccaggca

SEQ ID NO: 662226 - DNA, 75 bp, synthetic construct
  source 1..75: mol_type = other DNA
gaattgttgaatctcatatacgaccacaatcgccgggtgatcagaccgatgtcacaccggagcaagaaacaaaat

SEQ ID NO: 662227 - DNA, 75 bp, synthetic construct
  source 1..75: mol_type = other DNA
acatcagggaatcgcttaaagacgctatttgcatggcattggctggtaatgaagaaactgataaagagattttgc

SEQ ID NO: 662228 - DNA, 75 bp, synthetic construct
  source 1..75: mol_type = other DNA
catgctggccaacacctgcacctggatctatcgcggtgatgagtgcggttataatggcccagctgtcgctgatga

SEQ ID NO: 662229 - DNA, 75 bp, synthetic construct
  source 1..75: mol_type = other DNA
cgtccgacactgacggtttctaacctgcacggaatggtcaccgggatggcggaagacctgcagagtctggtcggc

SEQ ID NO: 662230 - DNA, 75 bp, synthetic construct
  source 1..75: mol_type = other DNA
ctgaagatgatgaatctctcgctgaactggctgatggtggcactgtagcgggtctgaaactagatgatgtcgacc

SEQ ID NO: 662231 - DNA, 75 bp, synthetic construct
  source 1..75: mol_type = other DNA
acctaccgctctgatgagtgtggttacacgggcggggctgtggcggatgagttcgataaacccaccaccgatatc

SEQ ID NO: 662232 - DNA, 75 bp, synthetic construct
  source 1..75: mol_type = other DNA
ggaggatttgcagagcctggtgggggccacggtggtccgtcgccgggtgtatgcgcgttttctggatgcggtgaa

SEQ ID NO: 662233 - DNA, 75 bp, synthetic construct
  source 1..75: mol_type = other DNA
agaagacgttaaccgcccaaacacaagtattgtcgatgaaatactaaggcgagctactccagaagatagagaacg

SEQ ID NO: 662234 - DNA, 75 bp, synthetic construct
  source 1..75: mol_type = other DNA
ggcaagctgctgatggagtttgtaaaaacgctggcctttgaaacgtccatgtcgatggcagaagacgacaaacct

SEQ ID NO: 662235 - DNA, 75 bp, synthetic construct
  source 1..75: mol_type = other DNA
cagcccatccgggaatgctggctacagcagaagcagagcgcgaatactggttgagcctgcagaaagcagcggtaa

SEQ ID NO: 662236 - DNA, 75 bp, synthetic construct
  source 1..75: mol_type = other DNA
atgcaggatattccacaggaaacacatcatgagacgacacgccttactcagtcagcccaggtggtgctctgggaa

SEQ ID NO: 662237 - DNA, 75 bp, synthetic construct
  source 1..75: mol_type = other DNA
ctcatcgcctatggcataattttcagcggagttcaggcgaacgccgttgcccgcgccctaagtttttcttttgat

SEQ ID NO: 662238 - DNA, 75 bp, synthetic construct
  source 1..75: mol_type = other DNA
tatgttttctaatgaggcgggaatgggttcgacaccaaacgcagcagcggcagcggcatcctggccgccgcatcc

SEQ ID NO: 662239 - DNA, 75 bp, synthetic construct
  source 1..75: mol_type = other DNA
gctctatcttattgatataagtcgttataaattatctgggattgttgcagttatacaatcattgaaaaaagagtc

SEQ ID NO: 662240 - DNA, 75 bp, synthetic construct
  source 1..75: mol_type = other DNA
ctcttatgaagccagaaaacccggctttaaggagctgatcgttgaaatggcgcataatggcacaggggccgtgat

SEQ ID NO: 662241 - DNA, 75 bp, synthetic construct
  source 1..75: mol_type = other DNA
ggtaagcaatgtttaacatttgagcaacttgttcagggtgggagctataccctgagagatcccctcataatttcc

SEQ ID NO: 662242 - DNA, 75 bp, synthetic construct
  source 1..75: mol_type = other DNA
aatcccagcagaaatttttagtgctagcaaagaaatacgtaccggtgttttaactggccttctcgagacagatgg

SEQ ID NO: 662243 - DNA, 75 bp, synthetic construct
  source 1..75: mol_type = other DNA
caacattgagtgtattgccggcgatgagttgtgggagatggcgattttcgatctctacaatcgaattctggaatc

SEQ ID NO: 662244 - DNA, 75 bp, synthetic construct
  source 1..75: mol_type = other DNA
acatatgtacgttttaacagcgggttaaatttacaggagtggcaactgcattctgatgccagtttcagtaaaaca

SEQ ID NO: 662245 - DNA, 75 bp, synthetic construct
  source 1..75: mol_type = other DNA
tggaagagctggaaagtggctatgttccaccagaaaactgggagcggggtattaatgcgttttatacctcttatt

SEQ ID NO: 662246 - DNA, 75 bp, synthetic construct
  source 1..75: mol_type = other DNA
tgctggttttcaaagtgcatggttccgtcatatcaaatcacagggatgggattttattggtcgtatcaggggggt

SEQ ID NO: 662247 - DNA, 75 bp, synthetic construct
  source 1..75: mol_type = other DNA
caatgaaaagggcgagcctgtcacctggcaggggcgtcagtatcaggcgtacccgatagagggcagcggctttga

SEQ ID NO: 662248 - DNA, 75 bp, synthetic construct
  source 1..75: mol_type = other DNA
cgcccgtcgctgacggtgtccaatctgttcggccttgtcaccgggatggcggaggatttgcagagcctggtgggt

SEQ ID NO: 662249 - DNA, 75 bp, synthetic construct
  source 1..75: mol_type = other DNA
ttctgatgagtgtggttacacgggcagggcagtggctgacgagttcgacaaaccaacgacggatatccggaagga

SEQ ID NO: 662250 - DNA, 75 bp, synthetic construct
  source 1..75: mol_type = other DNA
gttacggatgctgggggcgctggatggcgaacggctaagcgcgcaagggcaaaaaatggcggcgctgggtaacga

SEQ ID NO: 662251 - DNA, 75 bp, synthetic construct
  source 1..75: mol_type = other DNA
agcgatgctggacaccgatgatgccttaagccgccatgaatggctggtagcaccgttattattgcagggcagcgc

SEQ ID NO: 662252 - DNA, 75 bp, synthetic construct
  source 1..75: mol_type = other DNA
tatcgcgaagtgcaaaaagagatgaaagggcgttatcccaaacatgtctggccggacgaccccgccaacaccgcg

SEQ ID NO: 662253 - DNA, 75 bp, synthetic construct
  source 1..75: mol_type = other DNA
tggcaggggcgacagtatcaggcgtatcccattcaggggagtggttttgaactgaatggcaagggcagtgctgcc

SEQ ID NO: 662254 - DNA, 75 bp, synthetic construct
  source 1..75: mol_type = other DNA
ccgaactggtgccggatgcgccgctggacgccgaactgaacgtcggactgaatgcgctggcggaacaccgcattg

SEQ ID NO: 662255 - DNA, 75 bp, synthetic construct
  source 1..75: mol_type = other DNA
gatgcaatcctgccatcgttcaaacatctgaagctgatgaagagccgcatttctgctcgtgcagaatttgaggat

SEQ ID NO: 662256 - DNA, 75 bp, synthetic construct
  source 1..75: mol_type = other DNA
gtgctggcaacaccgacggagacggacggagcgctgtttcccggtcgcattatgctggcgaatacctgtatgtgg

SEQ ID NO: 662257 - DNA, 75 bp, synthetic construct
  source 1..75: mol_type = other DNA
gtgcagaaattggagaggcgatggctcgagcggtcgtaaaacctgcatcccgtgcgcgtcggcgtctttcgtttg

SEQ ID NO: 662258 - DNA, 75 bp, synthetic construct
  source 1..75: mol_type = other DNA
cctttcgttcagggacttacggcatgtgcagaaattggtgaggcgatggctcgggcggtcgtaaaacctgcatcc

SEQ ID NO: 662259 - DNA, 75 bp, synthetic construct
  source 1..75: mol_type = other DNA
ggaggacctgcagagtctggtgggggccacggtggtccgccgccgggtgtatgcgcgttttctggatgcggtgaa

SEQ ID NO: 662260 - DNA, 75 bp, synthetic construct
  source 1..75: mol_type = other DNA
cgatcgccagtttttaccgcgtattctgctgggtgagtattttcgcaattgctttttacaattagttgaacaagc

SEQ ID NO: 662261 - DNA, 75 bp, synthetic construct
  source 1..75: mol_type = other DNA
gatttctattgccctattccctacgagcccttacacatcgtcactgatcaggcattaaatgctgagattcaaaaa

SEQ ID NO: 662262 - DNA, 75 bp, synthetic construct
  source 1..75: mol_type = other DNA
ctggcaacaccgacggagacggacggagcgctgtttcccggtcgcattatgctggcgaatacctgtatgtgggct

SEQ ID NO: 662263 - DNA, 75 bp, synthetic construct
  source 1..75: mol_type = other DNA
ttctcgccctcggtgaggactacgagatggaaaacaacgaaacgcgcacaattctgaaaacagcggataacagct

SEQ ID NO: 662264 - DNA, 75 bp, synthetic construct
  source 1..75: mol_type = other DNA
gaatgaacacgaccataagcgattcagtaaaggtcttgccagagtctttatcgataattatgcggcaatcccttc

SEQ ID NO: 662265 - DNA, 75 bp, synthetic construct
  source 1..75: mol_type = other DNA
tatgtcattctgcgcctgcatgaagcagtacaggaaattgttccacatctgaatgaactaaacggttcagtaaag

SEQ ID NO: 662266 - DNA, 75 bp, synthetic construct
  source 1..75: mol_type = other DNA
tctgaaggacgttcttatccggttgaacgccgctatttgccgctgcctgctcatcaacgctttgacgaggccgtt

SEQ ID NO: 662267 - DNA, 75 bp, synthetic construct
  source 1..75: mol_type = other DNA
tcagagcagtcaccgcgggtggtgctctgggaaatcgacctgacggtgcagggcggtgagcggtattttttctga

SEQ ID NO: 662268 - DNA, 75 bp, synthetic construct
  source 1..75: mol_type = other DNA
ggggttcaaacatcatgggattctgtggtaaacttctcgcgattttgtgaaatcctggttgaggtatctctgaac

SEQ ID NO: 662269 - DNA, 75 bp, synthetic construct
  source 1..75: mol_type = other DNA
tgtttggtctggtcaccgggatggcggaggacctgcagagcctggtggggggccacggtggtccgccgccgggtg

SEQ ID NO: 662270 - DNA, 75 bp, synthetic construct
  source 1..75: mol_type = other DNA
gctgacagccatgacggcctcgtttgtgctggcaacaccgaccgagacggagggggcgctgtttcccggtcggat

SEQ ID NO: 662271 - DNA, 75 bp, synthetic construct
  source 1..75: mol_type = other DNA
gtggtggagcagatgtcagagctgacggccatgacagcctcgtttgtgctggcaacaccgacggagacggacgga

SEQ ID NO: 662272 - DNA, 75 bp, synthetic construct
  source 1..75: mol_type = other DNA
gctggcgcatcgagcagtgcagcgaactgagtgcggtcagtgcctcctttgtactgtccacaccgacggaaacgg

SEQ ID NO: 662273 - DNA, 75 bp, synthetic construct
  source 1..75: mol_type = other DNA
ttacatctatctctgggcacgcgaaggcgcggggcgcagccatctgctgcacgcggcttgcgcggaattgtcgca

SEQ ID NO: 662274 - DNA, 75 bp, synthetic construct
  source 1..75: mol_type = other DNA
gacagatgcagcaagtgcatgcgcgggtgtgaactgcgcaggaatgtcggcaattttggcggtttcctttccatt

SEQ ID NO: 662275 - DNA, 75 bp, synthetic construct
  source 1..75: mol_type = other DNA
atgcaggatattccacaggaaacacatcatgagacgacacgcctcactcagtcagctcaggtggtgctctgggaa

SEQ ID NO: 662276 - DNA, 75 bp, synthetic construct
  source 1..75: mol_type = other DNA
gctgacagccatgacggcctcgtttgtgctggccacaccgaccgagacggatggggcgctgtttcccggtcgtat

SEQ ID NO: 662277 - DNA, 75 bp, synthetic construct
  source 1..75: mol_type = other DNA
gacgcagcgtgccgggcgcgccgggcgactggagccgggcatttgcctgcatttgatcgccaaagagcaggcgga

SEQ ID NO: 662278 - DNA, 75 bp, synthetic construct
  source 1..75: mol_type = other DNA
agcgccgctatttgccgctgcctacacatcaacgttttgacgaagccgttgctgtcgccaccgccgaattgctac

SEQ ID NO: 662279 - DNA, 75 bp, synthetic construct
  source 1..75: mol_type = other DNA
catccgtgataaaggtttaagcgtgctcaactggacggcggaagcggaacagctacgcttgcgtttgttatgcgc

SEQ ID NO: 662280 - DNA, 75 bp, synthetic construct
  source 1..75: mol_type = other DNA
tctcgaagagccaccacggatggggaatagcgatctgggtgtggcgttttcgcgcaatcaaccggcctggcagca

SEQ ID NO: 662281 - DNA, 75 bp, synthetic construct
  source 1..75: mol_type = other DNA
tccgaaggacgttcgtatccagtagaacgtcgctatttgccgttgtccacacatcaacgctttgacgaggctgtc

SEQ ID NO: 662282 - DNA, 75 bp, synthetic construct
  source 1..75: mol_type = other DNA
tcttacctgaattacttaccgctctcgattgtgcgccgcaggtattattaagtgcgccgaccggggccgggaaat

SEQ ID NO: 662283 - DNA, 75 bp, synthetic construct
  source 1..75: mol_type = other DNA
tgaacgagtcggttaagtcagagccgtcactgcgggtggtgctctgggaaatcgacctgacggttcagggcggtg

SEQ ID NO: 662284 - DNA, 75 bp, synthetic construct
  source 1..75: mol_type = other DNA
gctgacagccatgacggcctcgtttgtgctggcgacaccgaccgagacggacggggcgctgtttcccggtcgaat

SEQ ID NO: 662285 - DNA, 75 bp, synthetic construct
  source 1..75: mol_type = other DNA
gctgacagccatgacggcctcgtttgtgctggcgacaccgaccgagacggaaggggcgctgtttcccggtcgcat

SEQ ID NO: 662286 - DNA, 75 bp, synthetic construct
  source 1..75: mol_type = other DNA
tggcgttggcgctgttactcgatgtgcaacaaggtctgcgtgatgaccttaaactgctgattatgtcggctacgc

SEQ ID NO: 662287 - DNA, 75 bp, synthetic construct
  source 1..75: mol_type = other DNA
gcatcagcgttttgacgaagccgtcgcggttgccaccgccgaaatgctgcgtcaggaaagtggatcattactgtt

SEQ ID NO: 662288 - DNA, 75 bp, synthetic construct
  source 1..75: mol_type = other DNA
attatcctgctggagccgcgtcgtctggcggcgcgtaacgtcgcgcaacggctggcggagctgcttaacgaaaag

SEQ ID NO: 662289 - DNA, 75 bp, synthetic construct
  source 1..75: mol_type = other DNA
atctggcaaacgcccgtaaactgggggatcgcttaattgttgcagtgaacagcgatgcttcaacgaaacggctga

SEQ ID NO: 662290 - DNA, 75 bp, synthetic construct
  source 1..75: mol_type = other DNA
ggcggcgcggctaacgtggcaatgaacatcgcttctctcggtgccaatgctcgcctggtcgggctgacgggcatt

SEQ ID NO: 662291 - DNA, 75 bp, synthetic construct
  source 1..75: mol_type = other DNA
cagatattaaaatgactatgatttatgcacatttttcccctgatcatttagaagatgcagtaactaaaaatccac

SEQ ID NO: 662292 - DNA, 75 bp, synthetic construct
  source 1..75: mol_type = other DNA
tatgcgttacggcgaatggaccagtggcgggttgagtacattagtctacaaggtgatgacgtgggtgattacatc

SEQ ID NO: 662293 - DNA, 75 bp, synthetic construct
  source 1..75: mol_type = other DNA
ccgcctggatttcgaagaaggttttgaaggggttgatccgcagccgctgcacgagcggattaatcaggcactgag

SEQ ID NO: 662294 - DNA, 75 bp, synthetic construct
  source 1..75: mol_type = other DNA
atgcgacttcgtttctgtaccgacgcatccgaccatcaccaaattacgggtactttcccgcaaccaacagctgat

SEQ ID NO: 662295 - DNA, 75 bp, synthetic construct
  source 1..75: mol_type = other DNA
taaaccttgaacagcgtaacttatcatccgtttttggcacccttaagaagttgggccactggtcagcgcctaacc

SEQ ID NO: 662296 - DNA, 75 bp, synthetic construct
  source 1..75: mol_type = other DNA
cctaggcgatcccgtcgcctctgaattaaccgccggtgactttacgaaatatcgtgaagcacggttgaaaggaga

SEQ ID NO: 662297 - DNA, 75 bp, synthetic construct
  source 1..75: mol_type = other DNA
agaaaaaccgcaccgtgccgatatctcaagatctgtatgacgaactccccaagaacagagggaagctattcaccc

SEQ ID NO: 662298 - DNA, 75 bp, synthetic construct
  source 1..75: mol_type = other DNA
gccatacgtttgcggcgcacttcatgatgtcgggtggaaacatcttggccttacaaaaaattctcggacaccacg

SEQ ID NO: 662299 - DNA, 75 bp, synthetic construct
  source 1..75: mol_type = other DNA
aagcgcttgggtgagtggagtctgccaaatcctctcgaaggtgtgcgagttttcaaagaagccgaaaaagaaatg

SEQ ID NO: 662300 - DNA, 75 bp, synthetic construct
  source 1..75: mol_type = other DNA
gttttacgtcacacctttggcgcgcattttatgatgaatggcggcaatatccttgtactccagaagatactcggt

SEQ ID NO: 662301 - DNA, 75 bp, synthetic construct
  source 1..75: mol_type = other DNA
ggagccgcagtaccaccagcttgagttcgacacccggctgtggctaacgcagttgtcgcttgggcaggacaaaat

SEQ ID NO: 662302 - DNA, 75 bp, synthetic construct
  source 1..75: mol_type = other DNA
acgattattgcagccacggtattgagcgtaattgggggcgtttgcgggaaggggcggaatcctacgctaaggctt

SEQ ID NO: 662303 - DNA, 75 bp, synthetic construct
  source 1..75: mol_type = other DNA
tgcggatatattgaggcgcttgcttacgatctggacttcgaacaagaaaaggaatggtttgattttaaaatttac

SEQ ID NO: 662304 - DNA, 75 bp, synthetic construct
  source 1..75: mol_type = other DNA
atacattgaggcgcttgcttacgacctggattttgagcaggaaaaagaatggttcgatttcaggatctaccggaa

SEQ ID NO: 662305 - DNA, 75 bp, synthetic construct
  source 1..75: mol_type = other DNA
actttcacggcacaccgtctgcggaagacttcaaagccttcatggcatggtgtgccacacaacaggtatccgata

SEQ ID NO: 662306 - DNA, 75 bp, synthetic construct
  source 1..75: mol_type = other DNA
aggcgctgtgttaaagcgcctacccgaaggcagcaccttgccctggcaccgggtggttaatcgccatggcacaat

SEQ ID NO: 662307 - DNA, 75 bp, synthetic construct
  source 1..75: mol_type = other DNA
tattcccgaaggctatgtcaccacttacggtgatgtggcgaaactggcgggatcgccccgcgccgcgcgccaggt

SEQ ID NO: 662308 - DNA, 75 bp, synthetic construct
  source 1..75: mol_type = other DNA
ttttacctgttacaggctcaggtacagccatatatatttccccctctcaaacatacatcaaagcactcgatctgg

SEQ ID NO: 662309 - DNA, 75 bp, synthetic construct
  source 1..75: mol_type = other DNA
aaatcacgaacagcactctaagagcattcaaatttagccctacaatgattagtcgatacctggaatttgctgctg

SEQ ID NO: 662310 - DNA, 75 bp, synthetic construct
  source 1..75: mol_type = other DNA
atcagaaaggttttagcctttttcgtgaaaatcgaactgccttgcagactgatacgaattctaaaacaatcaaat

SEQ ID NO: 662311 - DNA, 75 bp, synthetic construct
  source 1..75: mol_type = other DNA
acgcaaaccaacgcgcgacgagcgccacgctatccgggattttttaatcagtattgaacgttgggagacagatta

SEQ ID NO: 662312 - DNA, 75 bp, synthetic construct
  source 1..75: mol_type = other DNA
tatctatgaacacaagcgggataaaacccgcttttttgttcgtgctggcgtggcgtaccagtatcacgaatgcgg

SEQ ID NO: 662313 - DNA, 75 bp, synthetic construct
  source 1..75: mol_type = other DNA
ccacttgcacccttacatttaaaacagtagattacctgaactatgatatctttaatgaattaatgaaaaaaacac

SEQ ID NO: 662314 - DNA, 75 bp, synthetic construct
  source 1..75: mol_type = other DNA
ccgatataaaaatgacgatgatttacgctcactttgcccctaatcatcttgaagatgcggtgacaaaaaacccac

SEQ ID NO: 662315 - DNA, 75 bp, synthetic construct
  source 1..75: mol_type = other DNA
ttataatggggtgttagccagccagacccggcatgattactgcccccagtcgtccatgatccggggggtgatgtc

SEQ ID NO: 662316 - DNA, 75 bp, synthetic construct
  source 1..75: mol_type = other DNA
ggattgttgcgtgtacgcggtagtacaacacgacattatcattcacaagaatgtggagtgatcttacccagcaat

SEQ ID NO: 662317 - DNA, 75 bp, synthetic construct
  source 1..75: mol_type = other DNA
gatttaagttcggtaacagctatctacattgggattaacaataaagacattgacaaaatcattaagaaaagcagt

SEQ ID NO: 662318 - DNA, 75 bp, synthetic construct
  source 1..75: mol_type = other DNA
ccgtcagcgccgacgatatggcaaaacacctgcccatcagcgcctatccggtgctgattaccgacaaggggctgg

SEQ ID NO: 662319 - DNA, 75 bp, synthetic construct
  source 1..75: mol_type = other DNA
ggcgcggttgaatgccctgcgggccatcgctccagtgttaacgctgctgcccgtcagcgccgacgatatggcaaa

SEQ ID NO: 662320 - DNA, 75 bp, synthetic construct
  source 1..75: mol_type = other DNA
ggggcagatcaaacagctgctcgggtcacggatgatgatcggcgtttatatcggtcagtactgtatcaacgccct

SEQ ID NO: 662321 - DNA, 75 bp, synthetic construct
  source 1..75: mol_type = other DNA
aggagatcctcgctgcgctgggtacgggtgatgcgctggcgtcgaagtatcgccgccagttatatgcgttgttgt

SEQ ID NO: 662322 - DNA, 75 bp, synthetic construct
  source 1..75: mol_type = other DNA
cttccaggggccgcaaccggaagaggcgatccgcgccctgctggataaagtgctgccgcgtgaagaagagctgaa

SEQ ID NO: 662323 - DNA, 75 bp, synthetic construct
  source 1..75: mol_type = other DNA
gctgaagcaggcggcagatacgccggaaattcaacagctgcaacagcaggtggcagagaatccagaagatgccgc

SEQ ID NO: 662324 - DNA, 75 bp, synthetic construct
  source 1..75: mol_type = other DNA
tcattaccctgtccctggcctgtgccggaatgtctcatagtgcgctggcagcagctcctgcggcgaaaccggcag

SEQ ID NO: 662325 - DNA, 75 bp, synthetic construct
  source 1..75: mol_type = other DNA
cggtagaaaccaaagcggaagctcctgcagcacaaagtaaagcagcagtaccggcgaaagccagtgacgaagaag

SEQ ID NO: 662326 - DNA, 75 bp, synthetic construct
  source 1..75: mol_type = other DNA
tccagaacgggcaaccggtagacggcttccaggggccgcaaccggaagaggcgatccgcgccctgctggataaag

SEQ ID NO: 662327 - DNA, 75 bp, synthetic construct
  source 1..75: mol_type = other DNA
tggtgtccgtatggggggattcattgcattaaatgccgccgctgagtacggtgacagagtctgtgggatgattgt

SEQ ID NO: 662328 - DNA, 75 bp, synthetic construct
  source 1..75: mol_type = other DNA
tgccgctgctgaaagacgcctggcagttgtcgaatcagaacggggaaatcggtctgctactggcagaaacgctga

SEQ ID NO: 662329 - DNA, 75 bp, synthetic construct
  source 1..75: mol_type = other DNA
gacggtcagacacgtaaaaccttccaggagatcctcgctgcgctggggaccggtgatgcgctggcgtcgaagtat

SEQ ID NO: 662330 - DNA, 75 bp, synthetic construct
  source 1..75: mol_type = other DNA
cagtacaacgggcaatttattctggcaaaactggactgcgacgcggagcagatgattgccgcccagtttggtttg

SEQ ID NO: 662331 - DNA, 75 bp, synthetic construct
  source 1..75: mol_type = other DNA
atgtcgcccgttaagccccgcacggtaaaccttgaacagcgcaatctatcatctgtgttcggtacattaaaaaaa

SEQ ID NO: 662332 - DNA, 75 bp, synthetic construct
  source 1..75: mol_type = other DNA
atgctgccgacgattaatcaggccgttttgtcacaggtgatacaggccctgaaggacggcaatgtccgctattgc

SEQ ID NO: 662333 - DNA, 75 bp, synthetic construct
  source 1..75: mol_type = other DNA
acaaatagccccggctctcgcacacattgggcaagactcaacaatcttgcaccactcagaccaaaagactggctg

SEQ ID NO: 662334 - DNA, 75 bp, synthetic construct
  source 1..75: mol_type = other DNA
ttaacgtgatcggcgtgaccgaccagaaaggcgaaaaaatcctcctggacaccaccgggccgattgcgcgcacga

SEQ ID NO: 662335 - DNA, 75 bp, synthetic construct
  source 1..75: mol_type = other DNA
atctggttgtactgatgggacgcgacctgttcaatacgctgcgcctgccgatgattaatgccatcagcaccacca

SEQ ID NO: 662336 - DNA, 75 bp, synthetic construct
  source 1..75: mol_type = other DNA
gtcggtggtcttcagacgtatcttgcgccgtacttcccgaaagacgccatgctcatcacgtcgctgaaaaacctg

SEQ ID NO: 662337 - DNA, 75 bp, synthetic construct
  source 1..75: mol_type = other DNA
cggacagctgattacagcctcccgcaccattggcgcgctgccaaccttctttgcgccgtacttcccggacgatgc

SEQ ID NO: 662338 - DNA, 75 bp, synthetic construct
  source 1..75: mol_type = other DNA
gatggacgaatggtacaaagattcgcccaatctggtggtgatcaccggtcgtaatctgacggttagccgttcgtt

SEQ ID NO: 662339 - DNA, 75 bp, synthetic construct
  source 1..75: mol_type = other DNA
gcaaacgcgccgcaacgtgtcatgaaagatatcaccgtgaccagccgcgacgattccaaccaggtgattgctaaa

SEQ ID NO: 662340 - DNA, 75 bp, synthetic construct
  source 1..75: mol_type = other DNA
gagcgcccggcagaggctcgccccctggcctggcgcccgtctgtccctctggaatgcagacacgctggcggcgca

SEQ ID NO: 662341 - DNA, 75 bp, synthetic construct
  source 1..75: mol_type = other DNA
gcacttcagcggacatgatttaacgttatcgcaaattcttcgcggtgcccgtaacgaactgtcgttactgaacga

SEQ ID NO: 662342 - DNA, 75 bp, synthetic construct
  source 1..75: mol_type = other DNA
gaaagcgcgctcagccagctggcgggggtgaaacaagcaaccgttctggcgatcggcgaaaaagaaaaaacgctg

SEQ ID NO: 662343 - DNA, 75 bp, synthetic construct
  source 1..75: mol_type = other DNA
cgaatggccgaggatgaaagcggctggcaactgccgctcgccgcgctggtgcctcccgttaaacacgcagggcaa

SEQ ID NO: 662344 - DNA, 75 bp, synthetic construct
  source 1..75: mol_type = other DNA
cccgtcgtctttaccagcgcactgggctttgagcaggataacttcctcgcccggcgtaatctgctcaaaccggtc

SEQ ID NO: 662345 - DNA, 75 bp, synthetic construct
  source 1..75: mol_type = other DNA
cggagctggagcacggctaccgctacccgcaacagctgcttccgccgctgcccgtcaccttcagggattatctgc

SEQ ID NO: 662346 - DNA, 75 bp, synthetic construct
  source 1..75: mol_type = other DNA
cgtaccgttgattgtcgcggggggcacggtgctggcggtcgcggtattactgtcgcaaatcttcgggctacaaga

SEQ ID NO: 662347 - DNA, 75 bp, synthetic construct
  source 1..75: mol_type = other DNA
attgctcacacctacatggctgcggagtatctggaaaaagccggacgcaaactcggcgtgaatgtctacgttgaa

SEQ ID NO: 662348 - DNA, 75 bp, synthetic construct
  source 1..75: mol_type = other DNA
atttggctgtccgtttattggcgagaccagccgtgaaacgctgatggatatgatcaagtttgccgatgatctcgg

SEQ ID NO: 662349 - DNA, 75 bp, synthetic construct
  source 1..75: mol_type = other DNA
tgaccgaaagtacccccttcccattgacgccagtacagcacgcctacctgacgggccgcatgccggggcagacgc

SEQ ID NO: 662350 - DNA, 75 bp, synthetic construct
  source 1..75: mol_type = other DNA
tacgactgggcagaaaacgcgcgtaaggatgaagtaaagttccagttaagtctggcgtttccgctttggcgtggg

SEQ ID NO: 662351 - DNA, 75 bp, synthetic construct
  source 1..75: mol_type = other DNA
accctttatccttatgacaccaactacatcatctatacccaaaccagcgatctgaataaagaagcgattgccagt

SEQ ID NO: 662352 - DNA, 75 bp, synthetic construct
  source 1..75: mol_type = other DNA
gcatttcagcggacatgacttaacgttatcgcaaattcttcgcggcgcccgcgacgaactgtcgttactgaacga

SEQ ID NO: 662353 - DNA, 75 bp, synthetic construct
  source 1..75: mol_type = other DNA
gcctatctttcacaacagcagacgccgccgtttgcaatgccggtctggcactacctgacactgcatcagcacgat

SEQ ID NO: 662354 - DNA, 75 bp, synthetic construct
  source 1..75: mol_type = other DNA
acaggcagagatctcctggcgtgtgggttatgaaaatgtcgatcactttgccaaactgtttttgcgccatgtcgg

SEQ ID NO: 662355 - DNA, 75 bp, synthetic construct
  source 1..75: mol_type = other DNA
tgaaaccgagctgatttacgtcaagaaaggggttgcaaggtttaccatcgattcttcgttatatgtcgcacatgc

SEQ ID NO: 662356 - DNA, 75 bp, synthetic construct
  source 1..75: mol_type = other DNA
gccgctgaaggattctctgggggcgaccctacaagaactccagctcgacggcgatgtgaatgctcgcttacatct

SEQ ID NO: 662357 - DNA, 75 bp, synthetic construct
  source 1..75: mol_type = other DNA
aatctgggcggtgtgcgcgccagtaacctcactgcggtgatccctgactactcgaaagaaaagttgcttattgac

SEQ ID NO: 662358 - DNA, 75 bp, synthetic construct
  source 1..75: mol_type = other DNA
caactttccggcggtgaatggcaacgcgtacgtcttgctgcggtggtgttgcaaatcacaccacaagccaatccc

SEQ ID NO: 662359 - DNA, 75 bp, synthetic construct
  source 1..75: mol_type = other DNA
ggtacatcgtttagcagatgacgcgctgaatggcgtaactggtctggttgaataccacgatcatttcaatcgctt

SEQ ID NO: 662360 - DNA, 75 bp, synthetic construct
  source 1..75: mol_type = other DNA
tatggcgtgacgccgacaatggcactggcgacctgtttttctgccgtgctgactcgctggggcggcctgacgcgt

SEQ ID NO: 662361 - DNA, 75 bp, synthetic construct
  source 1..75: mol_type = other DNA
tgctgcaccagcagaagattaatcaaccactgagagacgacgcgctcgcttactggctggcgaaagcatcgacgc

SEQ ID NO: 662362 - DNA, 75 bp, synthetic construct
  source 1..75: mol_type = other DNA
tacctgtgcgctgtacggttttcagtttcagggcgcagaggaaaatcagttactgcaaccccactcctgtccggt

SEQ ID NO: 662363 - DNA, 75 bp, synthetic construct
  source 1..75: mol_type = other DNA
aagggagtggcaaggtttaccattgactcttcattatatgtcgcccatgccgatgacattgtggtaatagaatgc

SEQ ID NO: 662364 - DNA, 75 bp, synthetic construct
  source 1..75: mol_type = other DNA
ttctttactacgaaaattttaaaaatgcgtatcgttcggagcaggggtatattaaaaaagatgttctgataaaag

SEQ ID NO: 662365 - DNA, 75 bp, synthetic construct
  source 1..75: mol_type = other DNA
ctgatccgcagcacgattgagccgacgttgttgagcagtctttcacgtgccagaacctacagtgaatttgatttt

SEQ ID NO: 662366 - DNA, 75 bp, synthetic construct
  source 1..75: mol_type = other DNA
cacccggcgctgaacgtgatgtattaattgaagattttaaagcccagcgttttcgctatctggtcaacgttgcgg

SEQ ID NO: 662367 - DNA, 75 bp, synthetic construct
  source 1..75: mol_type = other DNA
gcgcctggcccccggcaagactgattgcttaattcttgattatgcgggtaaccctcacgatctctacgcgccgga

SEQ ID NO: 662368 - DNA, 75 bp, synthetic construct
  source 1..75: mol_type = other DNA
aacaacgtattacgccgcacatcatcagccagattatggagttcgccgcaacgcgcaaaggggtgatgattttcg

SEQ ID NO: 662369 - DNA, 75 bp, synthetic construct
  source 1..75: mol_type = other DNA
ttaaggagcgggtgatccgaaacagtctgcggccccctgccgtgcccggtatcggacgcacggagaaatacggga

SEQ ID NO: 662370 - DNA, 75 bp, synthetic construct
  source 1..75: mol_type = other DNA
caatcaaagcaataaacgcccacggcgacagtatgaaaggcacaatagaccctgaagacttggtatttgtagatg

SEQ ID NO: 662371 - DNA, 75 bp, synthetic construct
  source 1..75: mol_type = other DNA
acgacggacatcgcgaacagtgtgacttccgtttccgttttaaaaattgcccgcaatgtaacgcagaaaatgata

SEQ ID NO: 662372 - DNA, 75 bp, synthetic construct
  source 1..75: mol_type = other DNA
taccggtcagcgtgcggacggttaccacacgctgcagacgttatttcaatttcttgattacggcgacactatcag

SEQ ID NO: 662373 - DNA, 75 bp, synthetic construct
  source 1..75: mol_type = other DNA
cgggttcgctcatccgtaaatccccttccgtcctccatcatgatggcactgagtgatgagctgtttgggcgggag

SEQ ID NO: 662374 - DNA, 75 bp, synthetic construct
  source 1..75: mol_type = other DNA
cgtcatgacatcacccgtgaggaggcctgtctgttcatccctcatcacgagtggtcacgactgcccgacgcgtga

SEQ ID NO: 662375 - DNA, 75 bp, synthetic construct
  source 1..75: mol_type = other DNA
caaaacttaatctgtttttatacattaccggtcagcgtgcggacggttaccacacgctgcaaacgctgtttcagt

SEQ ID NO: 662376 - DNA, 75 bp, synthetic construct
  source 1..75: mol_type = other DNA
ctaagcatggatgagctggcggaaatggggctgacgctgggcgcagatgttcctgtctttgttcgtggtcatgcc

SEQ ID NO: 662377 - DNA, 75 bp, synthetic construct
  source 1..75: mol_type = other DNA
attcgtctgttaacgcccgttgaaggcgtggaacatgaagataacctgatcgttcgcgcagcgcggttgttgatg

SEQ ID NO: 662378 - DNA, 75 bp, synthetic construct
  source 1..75: mol_type = other DNA
ggctcatcgttcgccccccgtaagccccagctacgcagtaaaaaaggaaagatccgccgccagatgttccgtaag

SEQ ID NO: 662379 - DNA, 75 bp, synthetic construct
  source 1..75: mol_type = other DNA
ataccagcgccgtcttcgttactacctgtctgattgctgcattcggcagtattatgatgggactgtttgctaatc

SEQ ID NO: 662380 - DNA, 75 bp, synthetic construct
  source 1..75: mol_type = other DNA
tgagtcctcttctggtgtttccgttggcggtcgtaccggtctgacggcagtggttgtcggcctgctattcctgct

SEQ ID NO: 662381 - DNA, 75 bp, synthetic construct
  source 1..75: mol_type = other DNA
ctgtctgattgctgcatttggcagcatcctgatgggggtgtttgcaaacctgcccgttgcgcttgccccggcaat

SEQ ID NO: 662382 - DNA, 75 bp, synthetic construct
  source 1..75: mol_type = other DNA
atggacacctcacttgctcatgagaatccccgcctgcgggcactgttgcagacgcaacaggacaccatccgccag

SEQ ID NO: 662383 - DNA, 75 bp, synthetic construct
  source 1..75: mol_type = other DNA
cgtggcaggtcgggatgggcgcaatcttctggggcgcgatgggtctattgttactgacagttttccgcattcgct

SEQ ID NO: 662384 - DNA, 75 bp, synthetic construct
  source 1..75: mol_type = other DNA
acgacggctcggaccgaagtgatcgccggttttaccaccttcctgacgatggtttacatcgtttttgttaacccg

SEQ ID NO: 662385 - DNA, 75 bp, synthetic construct
  source 1..75: mol_type = other DNA
cgcagaagctcaaaccatgctactgtttccgggtagtgtgttggcggctcaaatatggggaaaatggtcgctcag

SEQ ID NO: 662386 - DNA, 75 bp, synthetic construct
  source 1..75: mol_type = other DNA
ctcaggtttacagtggttacggcgaatcgctcatcgactataacttcaaccagacccgcgttggtgtgggagtta

SEQ ID NO: 662387 - DNA, 75 bp, synthetic construct
  source 1..75: mol_type = other DNA
ccaaatatatgggttactaccagcttaaaatcggctatcacctcggtgatgcggtgctcagtgcgaaaggacagt

SEQ ID NO: 662388 - DNA, 75 bp, synthetic construct
  source 1..75: mol_type = other DNA
atgagtcaacaacacacaacccaggcttctggccaggggatgctggaacgtgtgtttaaactgcgcgaacatggc

SEQ ID NO: 662389 - DNA, 75 bp, synthetic construct
  source 1..75: mol_type = other DNA
ctgtctgattgctgctttcggtagcattatgatgggattgtttgcaaaccttccggtggcgctggctcctgcgat

SEQ ID NO: 662390 - DNA, 75 bp, synthetic construct
  source 1..75: mol_type = other DNA
actacggcacgaactgaagtgattgccgggttcaccaccttcctgacgatggtctacatcgtatttgttaaccca

SEQ ID NO: 662391 - DNA, 75 bp, synthetic construct
  source 1..75: mol_type = other DNA
tttatgtacggcgacgctgattgcacccaatctggcattaacggcaggacactgtttattgacgccgccaaaggg

SEQ ID NO: 662392 - DNA, 75 bp, synthetic construct
  source 1..75: mol_type = other DNA
tgcgaagtaactggctgggcgcaaacgtcggtgatgtcgcatcagtgcgatactttgccgggtgatagcggttcg

SEQ ID NO: 662393 - DNA, 75 bp, synthetic construct
  source 1..75: mol_type = other DNA
ttttaagtgattgttacgtctattgctccgggctggaaggtaatgactccaacttactgatagtgttttatgttc

SEQ ID NO: 662394 - DNA, 75 bp, synthetic construct
  source 1..75: mol_type = other DNA
tgggtgcaattagtctgacgtctgcatttgtgtttgcggataaaccggacgatcctaaatcggctcatgatgagg

SEQ ID NO: 662395 - DNA, 75 bp, synthetic construct
  source 1..75: mol_type = other DNA
acccaatcaccgtgggatgcggttgggcaactggaaacggccagcggcaatttatgtacggcgacgctgattgca

SEQ ID NO: 662396 - DNA, 75 bp, synthetic construct
  source 1..75: mol_type = other DNA
caagcccgataaagccattgcactgcgttttgtgtcaaataaaggcctctggcgctatgagatccacgacattga

SEQ ID NO: 662397 - DNA, 75 bp, synthetic construct
  source 1..75: mol_type = other DNA
gcaaagtcgaaagggatccgctttctggcatttgaagaaggatatttacgcccgcaatttattaccgttgaagaa

SEQ ID NO: 662398 - DNA, 75 bp, synthetic construct
  source 1..75: mol_type = other DNA
ttaatgcagtttattatgggggaaggttttttgaaaacagaatgatggtggaaaataaaacacatctcgcaataa

SEQ ID NO: 662399 - DNA, 75 bp, synthetic construct
  source 1..75: mol_type = other DNA
gccaccacaaatcattttccccctggtatgaggctcgttgctgggttcgtgcatactggcgcaagcaactttaca

SEQ ID NO: 662400 - DNA, 75 bp, synthetic construct
  source 1..75: mol_type = other DNA
tattttgtgtgaaaatctcggtaatgactccaacttactgatagtgttttatgttcagataatgcccgatgacct

SEQ ID NO: 662401 - DNA, 75 bp, synthetic construct
  source 1..75: mol_type = other DNA
tgaattgggtttattatggggattttatttctgaatacgagagtaaggataataactttacatttataccacaaa

SEQ ID NO: 662402 - DNA, 75 bp, synthetic construct
  source 1..75: mol_type = other DNA
aggcggggtatcccgaagatcatcttgataccttatacagccatcaaaattgcgaagtgactggctgggcgcaaa

SEQ ID NO: 662403 - DNA, 75 bp, synthetic construct
  source 1..75: mol_type = other DNA
tgaagaaagcattgagggtaatgactccaacttattgatagtgttttatgttcagataatgcccgatgactttgt

SEQ ID NO: 662404 - DNA, 75 bp, synthetic construct
  source 1..75: mol_type = other DNA
gcaaatcaggaagatcttctgatgcggtgcagctttgccgatgacgttaatggttttttcgatagtaaagaaacg

SEQ ID NO: 662405 - DNA, 75 bp, synthetic construct
  source 1..75: mol_type = other DNA
aacttgttcgcaccttccctaaatttcagttgcttgcagtttgttatccaaaatgtaaggatgatgaagtgatgc

SEQ ID NO: 662406 - DNA, 75 bp, synthetic construct
  source 1..75: mol_type = other DNA
ggcacccgtgaccgtcggggatggtggggagacagtttccgggagcgccccgttggctcccgtctctggctgtta

SEQ ID NO: 662407 - DNA, 75 bp, synthetic construct
  source 1..75: mol_type = other DNA
atcagggatgcggttcgctgcaactgaacggtgcagacctgctgacagatgacagtctgatgacagcggttctga

SEQ ID NO: 662408 - DNA, 75 bp, synthetic construct
  source 1..75: mol_type = other DNA
ggggagacagttttcgcccgcgtcccattggctcccgtctgtggcttctcagccgggaaaaaacgctggcctccg

SEQ ID NO: 662409 - DNA, 75 bp, synthetic construct
  source 1..75: mol_type = other DNA
gagcattacttgctctgccgttttgctacgccttttctgcggcaggagaagaagcaggtaatgactccaacttat

SEQ ID NO: 662410 - DNA, 75 bp, synthetic construct
  source 1..75: mol_type = other DNA
gtttaaactaaaatttggtaatgactccaacttattgatagtgttttatgttcagataatgcccgatgactttgt

SEQ ID NO: 662411 - DNA, 75 bp, synthetic construct
  source 1..75: mol_type = other DNA
agcaacgcggctatagcgaagatctattgccgaaaacgggtaatgactccaacttattgatagtgttttatgttc

SEQ ID NO: 662412 - DNA, 75 bp, synthetic construct
  source 1..75: mol_type = other DNA
ttaagagattgcaaagacattaagggtgaagaggaaaagaaagaaggctgcgttaaacacagggaaagatcatca

SEQ ID NO: 662413 - DNA, 75 bp, synthetic construct
  source 1..75: mol_type = other DNA
ttaatgcggtttattatggggagttgatttttaacaagataaaaatagaaaaaaagattgtattatgctatcaaa

SEQ ID NO: 662414 - DNA, 75 bp, synthetic construct
  source 1..75: mol_type = other DNA
atgaataacgaacagatgcttatcaaatgcaaagatccccgtaaatgtcggttttatgccgaatatctgaatcac

SEQ ID NO: 662415 - DNA, 75 bp, synthetic construct
  source 1..75: mol_type = other DNA
tagatattgtaaaggattcatggctatttgatgagcatttcaagggaatcactggacctctaattgtagcagttt

SEQ ID NO: 662416 - DNA, 75 bp, synthetic construct
  source 1..75: mol_type = other DNA
aagcttttttcagaacgataccaatcagtgttgctttattaggctgcaattcattgattgcatggaggaaatttt

SEQ ID NO: 662417 - DNA, 75 bp, synthetic construct
  source 1..75: mol_type = other DNA
acctgatagcccggcaccagccgttcagcaggtatccgcacgcacttccaccagtaacggtcataaccctttccg

SEQ ID NO: 662418 - DNA, 75 bp, synthetic construct
  source 1..75: mol_type = other DNA
ctgaaagcgctggggcttttgcgtagcgaaaagctcaataaatcgaagcgtgacatgactaatttttacacaatt

SEQ ID NO: 662419 - DNA, 75 bp, synthetic construct
  source 1..75: mol_type = other DNA
ggtgattcgactgtggcgtggtcccgcgcagcgttgcgtgaatcacatttccgagccggacaccgaaattccgcc

SEQ ID NO: 662420 - DNA, 75 bp, synthetic construct
  source 1..75: mol_type = other DNA
ttcaggtgcagccagcgatcaccattccggcgaatgcgttaagtatcaccattggtcgtgatggcgtggtcagcg

SEQ ID NO: 662421 - DNA, 75 bp, synthetic construct
  source 1..75: mol_type = other DNA
atggctcatcagcctatacccgtgacggctctttccaggtggatcagaacgggcaactggtgacggccggtggct

SEQ ID NO: 662422 - DNA, 75 bp, synthetic construct
  source 1..75: mol_type = other DNA
aatcggtactggtgtgcgtccggttgccactgaacgcctacacagtcagggcaacctgtcgcaaaccaataacag

SEQ ID NO: 662423 - DNA, 75 bp, synthetic construct
  source 1..75: mol_type = other DNA
gtggttactcacgacctgcaactggcaaaacgcatgagccgccagttagaaatgcgtgatggacgtctgacggcg

SEQ ID NO: 662424 - DNA, 75 bp, synthetic construct
  source 1..75: mol_type = other DNA
atacgccaacctccggcgatgtgatttttaatggtcagccaatgagcaaactgtcgtcggcagcgaaagctgaac

SEQ ID NO: 662425 - DNA, 75 bp, synthetic construct
  source 1..75: mol_type = other DNA
acaacctgtgcaaacgctatcaggaaggcagtgtgcaaaccgatgtgctgcacaatgtcagtttcagcgtcggtg

SEQ ID NO: 662426 - DNA, 75 bp, synthetic construct
  source 1..75: mol_type = other DNA
cgtgggcctggtggcgatcaccgacgtgcagaacgcccgcgcacagtacgataccgtgctggcgaacgaagtgac

SEQ ID NO: 662427 - DNA, 75 bp, synthetic construct
  source 1..75: mol_type = other DNA
gggtatttattggttaagacgcaggttaatgcggtttattatggggagatgatttttaacaagataaaaaaatat

SEQ ID NO: 662428 - DNA, 75 bp, synthetic construct
  source 1..75: mol_type = other DNA
ttaatggggtttattatggggagatgatttttaacaagataaaaaagataaaaaagataaaaaagataaaaagat

SEQ ID NO: 662429 - DNA, 75 bp, synthetic construct
  source 1..75: mol_type = other DNA
ggccaccgatatcttcaccctgaacaagggagagcatgccggtgagcagcgcgtcagtctgaaagcccgcctgat

SEQ ID NO: 662430 - DNA, 75 bp, synthetic construct
  source 1..75: mol_type = other DNA
gggtatttattggttaagacgcaggttaatgcggtttattatggggaggagggttttaaaagtagaaaatgtgcg

SEQ ID NO: 662431 - DNA, 75 bp, synthetic construct
  source 1..75: mol_type = other DNA
ttaatgcggtttattatggggatagagtaagaaaacaaataaaagtaaaaaaaattataactatgaacgatataa

SEQ ID NO: 662432 - DNA, 75 bp, synthetic construct
  source 1..75: mol_type = other DNA
ttaatgcggtttattatggggggaacacaaaaaaaaacgccaacataatacatattaaatttcaagtcaatattt

SEQ ID NO: 662433 - DNA, 75 bp, synthetic construct
  source 1..75: mol_type = other DNA
cgtggtcgagcggtctcattgaactgggttacgtcctgccggaaggtgcattgccgatagttgccggaaagcctg

SEQ ID NO: 662434 - DNA, 75 bp, synthetic construct
  source 1..75: mol_type = other DNA
ttctgcttgcatctctgggcgcactgtacgtaggcgcgaaggcatttgctttttccttcatcgttctcgctaaag

SEQ ID NO: 662435 - DNA, 75 bp, synthetic construct
  source 1..75: mol_type = other DNA
gccgcaagctctaccaggtaactgcttcaatgaagaactctggtttcttcgagcctcataaggactgcgagcact

SEQ ID NO: 662436 - DNA, 75 bp, synthetic construct
  source 1..75: mol_type = other DNA
tgtcacggtgtcgggtaaacagaccacttctttaatcagacgctgccagaatgcagtgaatgaagagaaaaaggt

SEQ ID NO: 662437 - DNA, 75 bp, synthetic construct
  source 1..75: mol_type = other DNA
ccgctaaacctaaaaaaagcagtgccagcaagaaagccccggctccagttcctgctgaatcagtaaattcggttc

SEQ ID NO: 662438 - DNA, 75 bp, synthetic construct
  source 1..75: mol_type = other DNA
gtttataaggctgaaaaatcagactccctgccgccgcaaaacggcaccatgcaacagcaatacgcagaaaactct

SEQ ID NO: 662439 - DNA, 75 bp, synthetic construct
  source 1..75: mol_type = other DNA
aactgcactgtatgaagccatgctggcaagagaaaaggtgcgacatgaactcagaaccctggagcagggagaacc

SEQ ID NO: 662440 - DNA, 75 bp, synthetic construct
  source 1..75: mol_type = other DNA
ttaaggagcgggtgatccggaacagtctgcggccccctgccgtgcccggtatcggacgcaccgagaaatacggaa

SEQ ID NO: 662441 - DNA, 75 bp, synthetic construct
  source 1..75: mol_type = other DNA
gggcagctatctcggtaactatctggggggatggctgactgaagcctggcagaaattacggggcagtgatgatga

SEQ ID NO: 662442 - DNA, 75 bp, synthetic construct
  source 1..75: mol_type = other DNA
ggtaatgaacctgccgagcctgatgagaaacaacggaagatgtgttcccgagaagatcggtatcaatcaagcatc

SEQ ID NO: 662443 - DNA, 75 bp, synthetic construct
  source 1..75: mol_type = other DNA
tatgtcgggcgttgaattttttggtgaccctatatcacgagtcgattattccgttgattataaaactgtttcgct

SEQ ID NO: 662444 - DNA, 75 bp, synthetic construct
  source 1..75: mol_type = other DNA
ccagctgacagagatatccggagttcacccccagataaccgccaggatacaactgccgggcggacaaactgctga

SEQ ID NO: 662445 - DNA, 75 bp, synthetic construct
  source 1..75: mol_type = other DNA
taccgggccattcagaaagtcagggaaacgcttcaggcattgcgtgacgctggttatggcgatgcgctggatcgc

SEQ ID NO: 662446 - DNA, 75 bp, synthetic construct
  source 1..75: mol_type = other DNA
ccaccgttccgggcacgcagccaggacgcggccagcgttttatgaactttcttaccggggtaaatcctgctgccg

SEQ ID NO: 662447 - DNA, 75 bp, synthetic construct
  source 1..75: mol_type = other DNA
gtcagagtatccaggcggaagatgcaaatattcttacggattacgggatcaacgtttaccagttgctggctgata

SEQ ID NO: 662448 - DNA, 75 bp, synthetic construct
  source 1..75: mol_type = other DNA
ctgtgccaccgtcgccctcttctggtgggtcagggttctgggggcgcatgatggggcgcgccggtgggttgcttt

SEQ ID NO: 662449 - DNA, 75 bp, synthetic construct
  source 1..75: mol_type = other DNA
acctctcctttccgcaaaccacaaactaccgtaccgggaacgccgccaggacgcggccagcgctttataaacttt

SEQ ID NO: 662450 - DNA, 75 bp, synthetic construct
  source 1..75: mol_type = other DNA
attggtcagggtgcgcagaccgccgcaaagtacctgatgtatatgtatctcgcctcccgtgcgctgaaggtgctc

SEQ ID NO: 662451 - DNA, 75 bp, synthetic construct
  source 1..75: mol_type = other DNA
gggtgaggtggctgtctatgacgatcaggggcagtccgtgacgctggcccgggaggggatcgtggtggacggtgc

SEQ ID NO: 662452 - DNA, 75 bp, synthetic construct
  source 1..75: mol_type = other DNA
tgggctagttatcttaaaaatgaatatataaccgttagacgttttggtggttcaggggatcttggtattgatatc

SEQ ID NO: 662453 - DNA, 75 bp, synthetic construct
  source 1..75: mol_type = other DNA
ggtaaattccccaatatgaataaggcgctgtatgttgatagcatcagttcggtggcgggtgcgtttatcggtacc

SEQ ID NO: 662454 - DNA, 75 bp, synthetic construct
  source 1..75: mol_type = other DNA
gatattctggggcgcagttgggctatttttgctcacgctgtttcgtatccggtactggatgatctccaacattcc

SEQ ID NO: 662455 - DNA, 75 bp, synthetic construct
  source 1..75: mol_type = other DNA
tgctgccgcgcgaagaagaactgaaagcacagcaggcgatgcaactgatgcaagaaggcaattacaccgacgccc

SEQ ID NO: 662456 - DNA, 75 bp, synthetic construct
  source 1..75: mol_type = other DNA
tggctggacagccttacaccagaagcccgcaaaagcggccaacgcgtagcttttctggccgggctggcacttctg

SEQ ID NO: 662457 - DNA, 75 bp, synthetic construct
  source 1..75: mol_type = other DNA
cccgcaaaagcggccaacgcgtggcttttctggccgggctggcacttctgaaaatgaatccagcagaggcttacc

SEQ ID NO: 662458 - DNA, 75 bp, synthetic construct
  source 1..75: mol_type = other DNA
ttactgtatgaacaaaacagagttgtaccggttattgagggaaaaacgttgtgtgtcgcacctaactttgacctc

SEQ ID NO: 662459 - DNA, 75 bp, synthetic construct
  source 1..75: mol_type = other DNA
gggaaaacctgagtgcgccggccaaaaccgaacaaactcaaccagctgctccggctaagccgaccagcgatatcc

SEQ ID NO: 662460 - DNA, 75 bp, synthetic construct
  source 1..75: mol_type = other DNA
ggccgtggtgaaaagcatcagtgccgccacgaaatgtcagaccgtggatgtgtccctgattgccggtgaacccaa

SEQ ID NO: 662461 - DNA, 75 bp, synthetic construct
  source 1..75: mol_type = other DNA
agcgtcatgaggtttcgcaggggtatttttctggtgcgctgaggcgttttcagatgattaatcaggctgtgatta

SEQ ID NO: 662462 - DNA, 75 bp, synthetic construct
  source 1..75: mol_type = other DNA
caggtcgatctcattggtgatgttgtttattcccagataaaaggaactcgttctgtcagacagcttcacatgtca

SEQ ID NO: 662463 - DNA, 75 bp, synthetic construct
  source 1..75: mol_type = other DNA
ttaaggagcgggtgatccggaacagtctgcggccccctgccgtgcccggtatcggacgcacagagaaatacggca

SEQ ID NO: 662464 - DNA, 75 bp, synthetic construct
  source 1..75: mol_type = other DNA
agagtatgttgctggcttcatgtatggcgggaatggcgttttccagcgccgggctggggttgtgtcatgcaatgg

SEQ ID NO: 662465 - DNA, 75 bp, synthetic construct
  source 1..75: mol_type = other DNA
ggagccacatattcgcgcgctggatggtctgggcattgcactgacggcaccggcggatagcacacgttacatcaa

SEQ ID NO: 662466 - DNA, 75 bp, synthetic construct
  source 1..75: mol_type = other DNA
ttttgtgggaattgcgtctcatcgcccgtgcacacgaggaagcagcaaaagttgtcgcagctgctggaagaccag

SEQ ID NO: 662467 - DNA, 75 bp, synthetic construct
  source 1..75: mol_type = other DNA
gtggtgttgctggcgattccccccaatgaagcgggtactacgcacatgcaactgctgacagcgctgaccacgcgc

SEQ ID NO: 662468 - DNA, 75 bp, synthetic construct
  source 1..75: mol_type = other DNA
acgcaatcagataattatggaaatagaattaatactgatgcattccagacaaaaattattgaagaaaatcaaaag

SEQ ID NO: 662469 - DNA, 75 bp, synthetic construct
  source 1..75: mol_type = other DNA
agaaaacgccgcagtttgaacgggcacgtgactactggcgcgcccgcatcgaaactctgccgccggggccacgat

SEQ ID NO: 662470 - DNA, 75 bp, synthetic construct
  source 1..75: mol_type = other DNA
cgcggcacagcatgttgcgtgcaattgtcaacgatgacggtatgcagcagatattgccaaacgtgccggaatatc

SEQ ID NO: 662471 - DNA, 75 bp, synthetic construct
  source 1..75: mol_type = other DNA
atggattcctgactttttatctctacccggtgctcggtacgttgggagcgggcagtctgatgctgtttgtggtgg

SEQ ID NO: 662472 - DNA, 75 bp, synthetic construct
  source 1..75: mol_type = other DNA
cgtgccgttgattgtcgcggggggtacggtgctggcggttgcggtattactgtcgcaaatcttcgggctacaaga

SEQ ID NO: 662473 - DNA, 75 bp, synthetic construct
  source 1..75: mol_type = other DNA
cggcctgacctacgccaagctgtcctggtctgcaagcctggcacatccgcgacgaaacctattcggcggccttgg

SEQ ID NO: 662474 - DNA, 75 bp, synthetic construct
  source 1..75: mol_type = other DNA
taggtgaagggctggctgtgccgcatggcaaaactgctgcggtaaaagaagcggcgtttgcggtcgccacactca

SEQ ID NO: 662475 - DNA, 75 bp, synthetic construct
  source 1..75: mol_type = other DNA
aaaccgttcgatagtctttggccttaagacgtttcggaatcaccatttcttttcttctgtcgaaagtaacttttt

SEQ ID NO: 662476 - DNA, 75 bp, synthetic construct
  source 1..75: mol_type = other DNA
tagtgcaaccgcctgtatttttgcggctgaagtcgccatcaaggagagtgagcgttttaacggcattcccgcgct

SEQ ID NO: 662477 - DNA, 75 bp, synthetic construct
  source 1..75: mol_type = other DNA
agcaaaaccagattgttagagatattttatccgacataaatattcgtgggtcaattatctttgataatgataagt

SEQ ID NO: 662478 - DNA, 75 bp, synthetic construct
  source 1..75: mol_type = other DNA
gaaccggctctgaaaccaccaacgtaacggtgattatcgacgcggtgagcgggcgcaagcaggtgttagcccatg

SEQ ID NO: 662479 - DNA, 75 bp, synthetic construct
  source 1..75: mol_type = other DNA
tattccgcacggtctggcgaacgccatgttgctgccaacggtgatggaatttaaccggatggtttgtcgtgaacg

SEQ ID NO: 662480 - DNA, 75 bp, synthetic construct
  source 1..75: mol_type = other DNA
cgggctgacgcgcagcctggctgttaaaggcatcgccatgacgctctggccatgtccggtgggcgaaccgtgcat

SEQ ID NO: 662481 - DNA, 75 bp, synthetic construct
  source 1..75: mol_type = other DNA
gattgaggcttacagctcgctgaatgcgacaccgtttactgacagtctggcgattggcgctattgcgatgatggg

SEQ ID NO: 662482 - DNA, 75 bp, synthetic construct
  source 1..75: mol_type = other DNA
gcgttgctggtgacgaaccccgatagcacgctggcagaaatgtcagaaaccagcgttctgcaaccgcgcctgccg

SEQ ID NO: 662483 - DNA, 75 bp, synthetic construct
  source 1..75: mol_type = other DNA
ggccgcactggaagatatttgtctgcgcagtaatccgcgtaccgccagcctggaacagattgtcggcctgtacgc

SEQ ID NO: 662484 - DNA, 75 bp, synthetic construct
  source 1..75: mol_type = other DNA
gccgaaggcgtcgaacagagtactctggacaacccggcctatgtacgggccaagccctatatcgagggcatatgc

SEQ ID NO: 662485 - DNA, 75 bp, synthetic construct
  source 1..75: mol_type = other DNA
gaagggcgggtgtttgcccgtcagggtgaagtgatgaatccgctgcagtatgttccttttaaccagacgctgtat

SEQ ID NO: 662486 - DNA, 75 bp, synthetic construct
  source 1..75: mol_type = other DNA
aacgatgattggtaatgctgttccccctataattggccaagtaatagggagaacgtttgttaggcatgttgaggg

SEQ ID NO: 662487 - DNA, 75 bp, synthetic construct
  source 1..75: mol_type = other DNA
atgcaaaatgaattgcagaccgcgctctttcaggcgttcgataccctgaatctgcaacgggtaaaaacatttagc

SEQ ID NO: 662488 - DNA, 75 bp, synthetic construct
  source 1..75: mol_type = other DNA
catcgctggataacctaatgcccgacgctccttggggcctacactgtccagatctacgtactacgaacgattgta

SEQ ID NO: 662489 - DNA, 75 bp, synthetic construct
  source 1..75: mol_type = other DNA
atactgtgcactaggggctgtaaaggcgaatattggccacacccacgcggcggcgggcgtggctgggttaatcaa

SEQ ID NO: 662490 - DNA, 75 bp, synthetic construct
  source 1..75: mol_type = other DNA
ctcgatcgtgctatttgggcggcagacagtaaaacgctcccgccgttgccggaacaaagtggcgttgaactcaat

SEQ ID NO: 662491 - DNA, 75 bp, synthetic construct
  source 1..75: mol_type = other DNA
aaacctccggctatgccggaggatatttatttgggggagagggaagtcatgaaaaaactaacctttgaaattcga

SEQ ID NO: 662492 - DNA, 75 bp, synthetic construct
  source 1..75: mol_type = other DNA
actatacctatcatttcgagaaaggtaatgacctggtgctcggctcccacatgctggaagtctgtccgtcgatcg

SEQ ID NO: 662493 - DNA, 75 bp, synthetic construct
  source 1..75: mol_type = other DNA
accgtcttcagccatgcgctgaacctcaacgatatgcgccagtttgccgagatgcacgacattgaaatcacggtg

SEQ ID NO: 662494 - DNA, 75 bp, synthetic construct
  source 1..75: mol_type = other DNA
cgatgaatggcctgacgtatgggatgaagaggtgataactgaagagagcacagatcctgatacaggtgagaaaat

SEQ ID NO: 662495 - DNA, 75 bp, synthetic construct
  source 1..75: mol_type = other DNA
cgcatggtgcgcagcctggtgatttcgctacgccagcgcgagtttgtactggcgtcacggctttctggcgcgggc

SEQ ID NO: 662496 - DNA, 75 bp, synthetic construct
  source 1..75: mol_type = other DNA
gctggtgctggcaacgctggatatcggccatatgatgctacacgtcgcggggatgtccttcctcggcctcggcgt

SEQ ID NO: 662497 - DNA, 75 bp, synthetic construct
  source 1..75: mol_type = other DNA
ttaatgacgctgtgaaagaaaatgctatcaggcagataagggaaatacagcctgatagcaaaagcccgctgataa

SEQ ID NO: 662498 - DNA, 75 bp, synthetic construct
  source 1..75: mol_type = other DNA
gaaactgccctgcaaactggtgctgaaaccgctgggcaccacgccggatgaaatcaccgctatttgccgcgacgc

SEQ ID NO: 662499 - DNA, 75 bp, synthetic construct
  source 1..75: mol_type = other DNA
agctgtatgagtttcgcagacgccagcaggtgctgggatatgcctcgctggcagaggttccgtcggagcagctgg

SEQ ID NO: 662500 - DNA, 75 bp, synthetic construct
  source 1..75: mol_type = other DNA
gcagatgctggggtatgcctcgctggaagaggttccggcagaacagctggacgggaaaagtgagcgcattcagca

SEQ ID NO: 662501 - DNA, 75 bp, synthetic construct
  source 1..75: mol_type = other DNA
aggttttgttgtgctgggtacgtcaaccagccggatgagtaaggctgaatttagcgaattaatcgaactgatcta

SEQ ID NO: 662502 - DNA, 75 bp, synthetic construct
  source 1..75: mol_type = other DNA
cgtggtatatggcgcgctacaccagcggtaagatgaaagcgtttttttacattgcggtaatgttgccgatgtggg

SEQ ID NO: 662503 - DNA, 75 bp, synthetic construct
  source 1..75: mol_type = other DNA
cggcgtgaagcgaggggaagaactggcggaggccagcggtgatctgtggcgtgatgcccgttgggctatcagccg

SEQ ID NO: 662504 - DNA, 75 bp, synthetic construct
  source 1..75: mol_type = other DNA
accaggattatgacgccacggcatccggtgtgaagcggggcgaagaactggcagaagccagcggtgatttgtggc

SEQ ID NO: 662505 - DNA, 75 bp, synthetic construct
  source 1..75: mol_type = other DNA
gcctgaaacagcttccaggtcttgctgtacagcgtctgatgcagcagggttacggctttgcaggcgaaggtgact

SEQ ID NO: 662506 - DNA, 75 bp, synthetic construct
  source 1..75: mol_type = other DNA
aaagacgatcctgcccgcctgatcttcaatacccaaactggtccggcgattgtcgccagcttgattgatctcggc

SEQ ID NO: 662507 - DNA, 75 bp, synthetic construct
  source 1..75: mol_type = other DNA
tttaccgcagcattaaagcagctgaaccgccccgggtttcctggagagtgttttatctgtgaactcaggctgcca

SEQ ID NO: 662508 - DNA, 75 bp, synthetic construct
  source 1..75: mol_type = other DNA
gccctcacccgtttgccaacacggacatttggtacgctgatgagcatggaaccggcgctggctgccgtttccggg

SEQ ID NO: 662509 - DNA, 75 bp, synthetic construct
  source 1..75: mol_type = other DNA
actcacctgccttcctgaaaaatttgtggttgattttgcaaacggtatcgatgttgcacaggagcatatccgcac

SEQ ID NO: 662510 - DNA, 75 bp, synthetic construct
  source 1..75: mol_type = other DNA
acgtcagggcgaaacaagccaggttaaccagttactggatattctcagacataaagcattaacgcagatggcaca

SEQ ID NO: 662511 - DNA, 75 bp, synthetic construct
  source 1..75: mol_type = other DNA
cgcagatacgcgggagcagttactcaccctggccgatcaggttcaccagaaactgaatcatcttgaagaaaaact

SEQ ID NO: 662512 - DNA, 75 bp, synthetic construct
  source 1..75: mol_type = other DNA
ggcataagcatcgccctccccctttccgttgccggtttgagtagcgccacgctggtgaatgaactgcttgagcag

SEQ ID NO: 662513 - DNA, 75 bp, synthetic construct
  source 1..75: mol_type = other DNA
gttcgcatgcctcgtctctgctctgcagatcgtctctctgaaagtatggtcgatgaaatatttctgaagggggct

SEQ ID NO: 662514 - DNA, 75 bp, synthetic construct
  source 1..75: mol_type = other DNA
aaccagttactggatattctcagacataaagcattaacgcagatggcacaggagagtggcggtagcgcaacagtg

SEQ ID NO: 662515 - DNA, 75 bp, synthetic construct
  source 1..75: mol_type = other DNA
catgagtacagaaatgaaaacggggctggtgctgtccggtggcggggcggtgggcgcttatcaggcgggagtggt

SEQ ID NO: 662516 - DNA, 75 bp, synthetic construct
  source 1..75: mol_type = other DNA
cattcttaatgagaaagaagattttgccctgatcgaaaaagtgtcatcgctgaaagatgaacttctggatttcag

SEQ ID NO: 662517 - DNA, 75 bp, synthetic construct
  source 1..75: mol_type = other DNA
ctgctggtagcccgtctggcctgcaaaggtaaattcagcttcagccagcaaaacaacaacgtcgagcgaaaacag

SEQ ID NO: 662518 - DNA, 75 bp, synthetic construct
  source 1..75: mol_type = other DNA
actatcgcattttcaatgctgatggcagtgaagtggcgcagtgcggcaacggcgcgcgctgctttgcccgttttg

SEQ ID NO: 662519 - DNA, 75 bp, synthetic construct
  source 1..75: mol_type = other DNA
cgcggtaacgcagaatgtctttttttcaccggagctgattcgtcgcctggcggatcggcacctggggatagggtt

SEQ ID NO: 662520 - DNA, 75 bp, synthetic construct
  source 1..75: mol_type = other DNA
cgccaacgtgcagggtaatttgatggatgagatgctgattacgattattcaggggcacgctcagcgactcgggat

SEQ ID NO: 662521 - DNA, 75 bp, synthetic construct
  source 1..75: mol_type = other DNA
catattcgtttacgcgtttatgagcgtggggcaggagaaacccaggcctgcggcagcggcgcatgtgcggcggtt

SEQ ID NO: 662522 - DNA, 75 bp, synthetic construct
  source 1..75: mol_type = other DNA
gcagcgtcagattaatgagaatcatgaggaaatgaagcgggcagcagcccagtcagcagcgctggccggtctttt

SEQ ID NO: 662523 - DNA, 75 bp, synthetic construct
  source 1..75: mol_type = other DNA
cgcatgagcgtcgtatgaacagtcagcagcgtcagattaatgagaatcatgaggaaatgaagcgggcagcagccc

SEQ ID NO: 662524 - DNA, 75 bp, synthetic construct
  source 1..75: mol_type = other DNA
atgtttattctgaatgggttatacgcaatagcctgtactggatgacttcgcttactcagtggaagctttgtgaag

SEQ ID NO: 662525 - DNA, 75 bp, synthetic construct
  source 1..75: mol_type = other DNA
gagctggaatgtattaaggagacgggtaatgactccaacttattgatagtgttttatgttcagataatgcccgat

SEQ ID NO: 662526 - DNA, 75 bp, synthetic construct
  source 1..75: mol_type = other DNA
atgaaaggcttcccaattgcacatatttttcacccttcaatcccgccaatgcacgcagtggttaacaatcacaat

SEQ ID NO: 662527 - DNA, 75 bp, synthetic construct
  source 1..75: mol_type = other DNA
ccggcagtcttccgtgcgctgacgcgggtagggctggtgttacgcccgttgttgccagaacaggccagagcaaaa

SEQ ID NO: 662528 - DNA, 75 bp, synthetic construct
  source 1..75: mol_type = other DNA
tgatttctggctttgctctggcgtgtctgaccccgccgtgcatttgtgccatttataaggggctttctttcacca

SEQ ID NO: 662529 - DNA, 75 bp, synthetic construct
  source 1..75: mol_type = other DNA
ttatttctggctttgcactggcgtttctgaccccgccctgcatttatgccatttacaagggtctttctttcacta

SEQ ID NO: 662530 - DNA, 75 bp, synthetic construct
  source 1..75: mol_type = other DNA
ctttatcgcttatttcctttctgattgccggtgctccggcgtttgcgcaggatgacagttcctgggcgtctccgg

SEQ ID NO: 662531 - DNA, 75 bp, synthetic construct
  source 1..75: mol_type = other DNA
gccactgctgttggttcaggagtgcatgcctggtcagaccagcccacatcactgggaaccgcggcatatgttggc

SEQ ID NO: 662532 - DNA, 75 bp, synthetic construct
  source 1..75: mol_type = other DNA
aagtaggcctggtgctacgaccgtttttgccagagcagattagagcaaaactccccgccgggatcgtgaaagcca

SEQ ID NO: 662533 - DNA, 75 bp, synthetic construct
  source 1..75: mol_type = other DNA
tggcaaacgttggatctttataataatgccttacctgtatgtaacgtgaaattaaatgttttgcaaaataatgtt

SEQ ID NO: 662534 - DNA, 75 bp, synthetic construct
  source 1..75: mol_type = other DNA
ttacctgctcaggaacaaaactcacagcttaagaatgaaaatcaactccaggtggctgtacgtaataggatgaaa

SEQ ID NO: 662535 - DNA, 75 bp, synthetic construct
  source 1..75: mol_type = other DNA
tcccggcgaaacacatggcctccttgcgtgaacaattcgatctgattgtaattgattctcccccgagcgaaggga

SEQ ID NO: 662536 - DNA, 75 bp, synthetic construct
  source 1..75: mol_type = other DNA
ctggctgatcctgaatggttcctcgaactaacacggcaggtacacaagcgtcgttttgttgctacggggggagcg

SEQ ID NO: 662537 - DNA, 75 bp, synthetic construct
  source 1..75: mol_type = other DNA
ccagttcaaaacttatcaagaaagaaaaataatttttatgggtttagcaaaaaagaactatctcgagtagatcaa

SEQ ID NO: 662538 - DNA, 75 bp, synthetic construct
  source 1..75: mol_type = other DNA
gcgagctccatcatgacgcgcagaaggcctctgagctctcatcctattactcccacttcgatacaaaggtagaag

SEQ ID NO: 662539 - DNA, 75 bp, synthetic construct
  source 1..75: mol_type = other DNA
cggattactccaggggctggtttgctacttgctgataacctggcttgccggaaaaaataacagttggattgtcta

SEQ ID NO: 662540 - DNA, 75 bp, synthetic construct
  source 1..75: mol_type = other DNA
gtaaaaataacagttggatagtttatggcgtacctgcgaccgtggcgctttcatccgttttgttattttctgtag

SEQ ID NO: 662541 - DNA, 75 bp, synthetic construct
  source 1..75: mol_type = other DNA
ttaggtctggttaccgcactggcggtgattctcgcgcgcacacagtcacgtttaatcgactctattcaaaagttg

SEQ ID NO: 662542 - DNA, 75 bp, synthetic construct
  source 1..75: mol_type = other DNA
acccagcagtggtttcaaaagtttcaaaaatcagtgaagccgtattaaaggccattagggcaaaatgtcctgtca

SEQ ID NO: 662543 - DNA, 75 bp, synthetic construct
  source 1..75: mol_type = other DNA
actcactgctgcgaaggagggaaaactggggacgaagcctaaagcgtggcgcgatcttacggtggatggtgaaac

SEQ ID NO: 662544 - DNA, 75 bp, synthetic construct
  source 1..75: mol_type = other DNA
attctggtcggcagtgatgaaaaatctctataacgcgatgatatgtattgaaaaagacgcctgtgtactggttga

SEQ ID NO: 662545 - DNA, 75 bp, synthetic construct
  source 1..75: mol_type = other DNA
ctatcaggctttctcagaaataaaacagcaatggatcaatttcagtgtggagcttattgattgggcaaaagagcg

SEQ ID NO: 662546 - DNA, 75 bp, synthetic construct
  source 1..75: mol_type = other DNA
gctttggttttgatccggacgcttacttcggcacgatggtacgcctgaatcaagaaattaaagagagcgaagccg

SEQ ID NO: 662547 - DNA, 75 bp, synthetic construct
  source 1..75: mol_type = other DNA
aactaagtgaagtcatgccaggagctggcggacgttcctgcctggaacgctacgaatatgccaaacacggtgcct

SEQ ID NO: 662548 - DNA, 75 bp, synthetic construct
  source 1..75: mol_type = other DNA
gaactgaccaatgaagcttccgctttgctgtcagatgacagtaccgaatgggcaaagttcgctaagccaggtaaa

SEQ ID NO: 662549 - DNA, 75 bp, synthetic construct
  source 1..75: mol_type = other DNA
atgtcgcaaccagtttctacactgatgatacattatatgataatacacacttagaaatgggaaacggtcttataa

SEQ ID NO: 662550 - DNA, 75 bp, synthetic construct
  source 1..75: mol_type = other DNA
aagttaccaggcgaagctaacgacagaaccaggtgcaacactggtttatggcccatttcaaaaggacctgattgt

SEQ ID NO: 662551 - DNA, 75 bp, synthetic construct
  source 1..75: mol_type = other DNA
caacacgatcgaaatcgtaacgaacgagatgaatgtcgcctgcaaaccgaaacgaccaacaaagctgattttttg

SEQ ID NO: 662552 - DNA, 75 bp, synthetic construct
  source 1..75: mol_type = other DNA
gaattggggcaagttcgaagatgccaccgacaagtatgtgcaacagcgtataagcgataagggcggagaccaagt

SEQ ID NO: 662553 - DNA, 75 bp, synthetic construct
  source 1..75: mol_type = other DNA
gacggtagagaatgttaacactgctgttaaacaatatctttctcatccggtgaatacctataccggagtattatt

SEQ ID NO: 662554 - DNA, 75 bp, synthetic construct
  source 1..75: mol_type = other DNA
agcttattgattgggcaaaagagcgaattccttcagatatgcatgaaagatttaatgaatataaagaagagttta

SEQ ID NO: 662555 - DNA, 75 bp, synthetic construct
  source 1..75: mol_type = other DNA
acagtcatgccagtgcagaattgctgaagcttgagtttttgtcaacgttgcagggagagatagctcagttggaac

SEQ ID NO: 662556 - DNA, 75 bp, synthetic construct
  source 1..75: mol_type = other DNA
gttagcgaatgaagtgatggttaagcgtctggccaaagggattagtgagcaagaactgaacgaataccagcaaaa

SEQ ID NO: 662557 - DNA, 75 bp, synthetic construct
  source 1..75: mol_type = other DNA
tgaggatgcagaaaaccaagttacagataccctggcaaacctggctgaacagttaacactgctggaggcggactt

SEQ ID NO: 662558 - DNA, 75 bp, synthetic construct
  source 1..75: mol_type = other DNA
tgggattttggctgctatctgctgttgatggcaatgttgttgctaccgtggatacaacaaagccttcgcatccgc

SEQ ID NO: 662559 - DNA, 75 bp, synthetic construct
  source 1..75: mol_type = other DNA
atggtgccatcgagatgaccgaagagcgcgatgggtggctcaaaatttatagcgatgatccagatgcctttggtc

SEQ ID NO: 662560 - DNA, 75 bp, synthetic construct
  source 1..75: mol_type = other DNA
aagcggcaccgcatcttacttgcattgatgcgacgcccgacgagctgcgcaccattgcacgcgactactggaata

SEQ ID NO: 662561 - DNA, 75 bp, synthetic construct
  source 1..75: mol_type = other DNA
ctcaggccaacctggtcgctctgctcagtcactgcgaacgcggcgaagagtatatcgtcggtcaggccgcgcata

SEQ ID NO: 662562 - DNA, 75 bp, synthetic construct
  source 1..75: mol_type = other DNA
ccatggtgcacattgtggcgcttatgagccccggtcccgatttcttttttgtctctcagaccgctgtcagtcgtt

SEQ ID NO: 662563 - DNA, 75 bp, synthetic construct
  source 1..75: mol_type = other DNA
aggagtgaaagatttccacttctatacgcttaaccgcgctgaaatgagttacgcgatttgccatacgctgggggt

SEQ ID NO: 662564 - DNA, 75 bp, synthetic construct
  source 1..75: mol_type = other DNA
ttattaggtgccgcaggtgggcaaatagcgtttaacctcggtagcgccgtcggcgcatattgcggtggtatgatg

SEQ ID NO: 662565 - DNA, 75 bp, synthetic construct
  source 1..75: mol_type = other DNA
ttcaccctggtgccgattgttctcatcgcactgtacctggcgttcgtgaaacgtctgggagcgttcgatgcactc

SEQ ID NO: 662566 - DNA, 75 bp, synthetic construct
  source 1..75: mol_type = other DNA
agccgggtctatttttaccttctcgctaacgctgggcgattttattgtcccgcaactggttggtccgccggggta

SEQ ID NO: 662567 - DNA, 75 bp, synthetic construct
  source 1..75: mol_type = other DNA
ggcggcaatacgttatcaacttccgggctgggtcgctttctggtatttctctatatctggctgccgtttatgatt

SEQ ID NO: 662568 - DNA, 75 bp, synthetic construct
  source 1..75: mol_type = other DNA
cctatggcgcaaattccggcgagcgcgaccgcacgcacagtattattaaaggcattaaagatcgtactggtctgg

SEQ ID NO: 662569 - DNA, 75 bp, synthetic construct
  source 1..75: mol_type = other DNA
atggcgatgaacgtattgcaatcaccttcacgtccaggtctggggaaggtgtccggtttcttttggcgtaatccg

SEQ ID NO: 662570 - DNA, 75 bp, synthetic construct
  source 1..75: mol_type = other DNA
ttgacgatttcaccatgtcggtaacgccagaactgacgctggcgaatatccgtgcgctgtttaatccggcgaatt

SEQ ID NO: 662571 - DNA, 75 bp, synthetic construct
  source 1..75: mol_type = other DNA
ggatgggttaccagatgctgcgcggcgcactgaaaaaagagacggtttccgcgcctgcaccacaggtggaactgg

SEQ ID NO: 662572 - DNA, 75 bp, synthetic construct
  source 1..75: mol_type = other DNA
tgggcgggtgcggattctgggagcagcagggcaggcgcgtcagcctggacgatatcctgcagcgcgctgatgtgg

SEQ ID NO: 662573 - DNA, 75 bp, synthetic construct
  source 1..75: mol_type = other DNA
atggcgaaatacaaccgcctgctctcacagcgggtggcggcttatgcttccgaaatcaaccggctgaaggcgctg

SEQ ID NO: 662574 - DNA, 75 bp, synthetic construct
  source 1..75: mol_type = other DNA
cctctgtatatagagctgaatgactatgttctggaggcaggaaaggtgcacacagatgacacgccggtgaaagtg

SEQ ID NO: 662575 - DNA, 75 bp, synthetic construct
  source 1..75: mol_type = other DNA
tggcgttagatggagagcaacatcttcagcaacagatatcggaaaaagtattagccgaaaatgtgttaattgccc

SEQ ID NO: 662576 - DNA, 75 bp, synthetic construct
  source 1..75: mol_type = other DNA
ggcaaagtgaaccttgcggtttcgttattggtgttggtaatactggtgcttcttaattcgccggtgctggacagt

SEQ ID NO: 662577 - DNA, 75 bp, synthetic construct
  source 1..75: mol_type = other DNA
taactactgtgtgggttttgagcagttcctgccgtacctgctgggtgagaaagacggtcagccgaaagatgccgc

SEQ ID NO: 662578 - DNA, 75 bp, synthetic construct
  source 1..75: mol_type = other DNA
tgggcgggcgcggatttctgggagcagcaggcaggcgcgtcagcctggacgatatcctgcagcgcgctgatgtgg

SEQ ID NO: 662579 - DNA, 75 bp, synthetic construct
  source 1..75: mol_type = other DNA
atgaacaatgaactccccgacgatattgagctgcttaaagccatgttgcgtaagcaacagagtcggcttcgccag

SEQ ID NO: 662580 - DNA, 75 bp, synthetic construct
  source 1..75: mol_type = other DNA
ggatgggttaccagatgctgcgtggcgcgctgaaaaaagaggcggtttctgcacctgcgccacaggtcgagctgg

SEQ ID NO: 662581 - DNA, 75 bp, synthetic construct
  source 1..75: mol_type = other DNA
ccagtaagccagaatccccgtgtcgtaaatcttcacgaaaaccgctgccggcagaacttccccgggagacacatc

SEQ ID NO: 662582 - DNA, 75 bp, synthetic construct
  source 1..75: mol_type = other DNA
taagcaacagagtcggcttcgccagtatgcctgtcaggtcgcgggctatgagcaggaaattgaacggctgaaagc

SEQ ID NO: 662583 - DNA, 75 bp, synthetic construct
  source 1..75: mol_type = other DNA
gccttacggggagtggccgtaggccggaaaaactggctcttcgcgggttccgacagcggtggcgagcatgcggcg

SEQ ID NO: 662584 - DNA, 75 bp, synthetic construct
  source 1..75: mol_type = other DNA
tttgatttcagcggcacgccagcgaatcacacggctcagtttggcgcactggtggataaataccgtgcggacctt

SEQ ID NO: 662585 - DNA, 75 bp, synthetic construct
  source 1..75: mol_type = other DNA
atactggtgcgagccgggcgtttgctgccgttcctgagcgggcagtctgcaccgctggcgaccacgccagcctcc

SEQ ID NO: 662586 - DNA, 75 bp, synthetic construct
  source 1..75: mol_type = other DNA
ttgtgtctggtgtatgaacatcgcagcggtgtttatcactatcgggtaagccaggcgtttcatttaacggcggat

SEQ ID NO: 662587 - DNA, 75 bp, synthetic construct
  source 1..75: mol_type = other DNA
tgcaagaatgcaaaactgaagataaatggggtgatcaaggttttatcggtagtgttactaagccagacttatggc

SEQ ID NO: 662588 - DNA, 75 bp, synthetic construct
  source 1..75: mol_type = other DNA
cttccaggttggtggtctaagattgagctttttaatccaaaccatccggtaataggtgataaggatctgctttat

SEQ ID NO: 662589 - DNA, 75 bp, synthetic construct
  source 1..75: mol_type = other DNA
cggtttcttcaggcggaggcgtatcgcaaccagcacaggagagtggcgatactcagcctgaagccgttgtcccga

SEQ ID NO: 662590 - DNA, 75 bp, synthetic construct
  source 1..75: mol_type = other DNA
atgaccatctataccttatctcacggggcgctaaagctggacgtttctgaccagggaggtgtcatagaaggtttc

SEQ ID NO: 662591 - DNA, 75 bp, synthetic construct
  source 1..75: mol_type = other DNA
ggtcgctaaagctggacgtttctgaccagggcggcgtaatcgaaggcttctggcgcgatacgacgccgctcttac

SEQ ID NO: 662592 - DNA, 75 bp, synthetic construct
  source 1..75: mol_type = other DNA
gataccggcatggaaaatcagcgctggatgcaatagcagtcaccagaaaacgttgctggcaatacgactggtgtc

SEQ ID NO: 662593 - DNA, 75 bp, synthetic construct
  source 1..75: mol_type = other DNA
tgagtatcaattgcaaccgaatgttgaatgggatgcgcactatctgcacggcgacggctggctggggcagtggca

SEQ ID NO: 662594 - DNA, 75 bp, synthetic construct
  source 1..75: mol_type = other DNA
tactggctggagcgggagcagtggctggcgggtgagttttgcgagcagctaccgcaggaactggattttaaccag

SEQ ID NO: 662595 - DNA, 75 bp, synthetic construct
  source 1..75: mol_type = other DNA
cggatgatcatcatcgcccggaagggggtgatcttcttgcgcttgcaccaggtgaatcaacaacttcagagatgt

SEQ ID NO: 662596 - DNA, 75 bp, synthetic construct
  source 1..75: mol_type = other DNA
agttagtggcgtgggcatggcttttgattgtggcatcgacgacataaaaatcattggccgcgtagttctgacgat

SEQ ID NO: 662597 - DNA, 75 bp, synthetic construct
  source 1..75: mol_type = other DNA
tgctgaccattgccacaaaactggcgatcgccggagtccaggaggcgcggctactttctgaaaatttcgaactgc

SEQ ID NO: 662598 - DNA, 75 bp, synthetic construct
  source 1..75: mol_type = other DNA
tggtggtgattgacgttccccgcgcccctgctgaactggaacgcatcgaggaggccgggaacaagacggaaaatc

SEQ ID NO: 662599 - DNA, 75 bp, synthetic construct
  source 1..75: mol_type = other DNA
gaagcacttccggcgctggctgtccaagctggaaaaagacggcgtgatttgtgtcgatggggatgatgtttaccc

SEQ ID NO: 662600 - DNA, 75 bp, synthetic construct
  source 1..75: mol_type = other DNA
gagcgcggggaaatacttactgacgagcaatacagccagcgaaaaaccacgctaccaatgagtattggatctgca

SEQ ID NO: 662601 - DNA, 75 bp, synthetic construct
  source 1..75: mol_type = other DNA
aatacagccagcgaaaaaccacgctaccaatgagcattggatcggaaggatacgattcacagcttagctatgtgg

SEQ ID NO: 662602 - DNA, 75 bp, synthetic construct
  source 1..75: mol_type = other DNA
aaacggggcagccggttcgcctgattgtcatagatactctagcgcggtgctttggtggtaacgatgaaaacgatg

SEQ ID NO: 662603 - DNA, 75 bp, synthetic construct
  source 1..75: mol_type = other DNA
tcatcatatttcatttatggacggatttagtgtagagcccattcctggcggttttctggagcgtattggggagcg

SEQ ID NO: 662604 - DNA, 75 bp, synthetic construct
  source 1..75: mol_type = other DNA
ccataagtaatcagaaattatcagctatgcaaaaactaggtgttaaaaccgacatagcattatataaaaaattta

SEQ ID NO: 662605 - DNA, 75 bp, synthetic construct
  source 1..75: mol_type = other DNA
ttaatcgcggtactcagctacctggtgctggtgggcgatatcaagcgtattgagctgaaacctgtcgcggggcaa

SEQ ID NO: 662606 - DNA, 75 bp, synthetic construct
  source 1..75: mol_type = other DNA
tgaatgccatcgtattggtgacgatgaagagagccagtatcagcaaatcctcactcacctgacaaaagtgaatcc

SEQ ID NO: 662607 - DNA, 75 bp, synthetic construct
  source 1..75: mol_type = other DNA
aacgcaaagctttaagactcgctcaaaagctatcaacagaaaattctttcgaagcaatatgtcgagaatggtata

SEQ ID NO: 662608 - DNA, 75 bp, synthetic construct
  source 1..75: mol_type = other DNA
ccttcccaatcagaaaaaaacaaaggcgtcataatagaagtaaacacagatagtttatgtaagaaaaaactaaac

SEQ ID NO: 662609 - DNA, 75 bp, synthetic construct
  source 1..75: mol_type = other DNA
cttcgtcttgaaaaaccagaaaatggtcttgcacagaaaaagacctggaaagtatcgcacgcaattgatgccggt

SEQ ID NO: 662610 - DNA, 75 bp, synthetic construct
  source 1..75: mol_type = other DNA
accgtggcagccagatgaggcgacgttgaatggcatcattcatactcaactgggcaaaggcgaaattaccgaaat

SEQ ID NO: 662611 - DNA, 75 bp, synthetic construct
  source 1..75: mol_type = other DNA
ggagtaaggtctccattttgcgctatcgcatttctggtccgctggatgctccgcaaatcaacgaagtgttgcgtc

SEQ ID NO: 662612 - DNA, 75 bp, synthetic construct
  source 1..75: mol_type = other DNA
cggagcgcattaacttccgtggctggccggacgcacaaatacgatgcgcagagtgctggttctgggggcaaaaat

SEQ ID NO: 662613 - DNA, 75 bp, synthetic construct
  source 1..75: mol_type = other DNA
atcttgtcgttgctattgtttattgtttcttccattttgtgcgcgacaacgaacaatatttactggctggtggtc

SEQ ID NO: 662614 - DNA, 75 bp, synthetic construct
  source 1..75: mol_type = other DNA
ccacgtagacaccgtgcggaaggtcaggtaagtctctccagtctgaccggacaacacggcgtgatgcaggtgcgc

SEQ ID NO: 662615 - DNA, 75 bp, synthetic construct
  source 1..75: mol_type = other DNA
ggcatcagtaccgatgatggttcacaagcctggcgctatttcccggaaaacctgatgggtaaagacctggttgat

SEQ ID NO: 662616 - DNA, 75 bp, synthetic construct
  source 1..75: mol_type = other DNA
ggagcaaagtctccattttgcgctatcacatttcgggtccgctggacgatccgcaaatcaacgaagtgttgcgcc

SEQ ID NO: 662617 - DNA, 75 bp, synthetic construct
  source 1..75: mol_type = other DNA
tattttgactccattcgcagcaccgcgtggattaaagacggcgttatgcacactgacgacacgctggtggatggc

SEQ ID NO: 662618 - DNA, 75 bp, synthetic construct
  source 1..75: mol_type = other DNA
gtataacgtagagctgaacggcgatctgaagaatgtgagcagtcacttaccttcaccgttagccaaacctgcggg

SEQ ID NO: 662619 - DNA, 75 bp, synthetic construct
  source 1..75: mol_type = other DNA
tgcgtaacaacagtctgtttatcaaaccgcttgatagcactctgaaaaatttgagcggcaaattcagctttatca

SEQ ID NO: 662620 - DNA, 75 bp, synthetic construct
  source 1..75: mol_type = other DNA
acgctggcctggataccggaacaggacgttggcggcaaagacaataaacgcagtgacgaactccggattcgcgcc

SEQ ID NO: 662621 - DNA, 75 bp, synthetic construct
  source 1..75: mol_type = other DNA
atggatttgcgcgatgatgaggggttgttaagcaatggtcgcgtctggctccaggcggatgacatcgacctgaag

SEQ ID NO: 662622 - DNA, 75 bp, synthetic construct
  source 1..75: mol_type = other DNA
cgagcatttaagtggcctgttttatattcaggaagccagttcaatgttgcctgttgccgccttgtttgctgacgg

SEQ ID NO: 662623 - DNA, 75 bp, synthetic construct
  source 1..75: mol_type = other DNA
cattgcaaagttaacaatcttccaacaaatattctccttggttcgaatgattcaagcacccttaaaagtgatgtt

SEQ ID NO: 662624 - DNA, 75 bp, synthetic construct
  source 1..75: mol_type = other DNA
ggtgtgcagctctcgacctgcggagagcagagacgccgctgcgtgagggtgaacccggaagcgggacggttcgga

SEQ ID NO: 662625 - DNA, 75 bp, synthetic construct
  source 1..75: mol_type = other DNA
tgagcgaggcgatggagaaaaaccggcggagcgtactgcggactgccgggcggacatggctcaccatcctgatgg

SEQ ID NO: 662626 - DNA, 75 bp, synthetic construct
  source 1..75: mol_type = other DNA
accgtctggcaacagccattcttctgcatgtgggcagagtggcagattttgtttccgggaaagtgacaaaagccg

SEQ ID NO: 662627 - DNA, 75 bp, synthetic construct
  source 1..75: mol_type = other DNA
agctggggcccatgcgcctgcgtaccgcactgcaggtgatggctggcccggcctggcaactggaggttgatgatg

SEQ ID NO: 662628 - DNA, 75 bp, synthetic construct
  source 1..75: mol_type = other DNA
tcaggtcccggcacgggtgagcgccgttcccggcgatcgcttcctgaaggtggaatttattccggcagaggaggg

SEQ ID NO: 662629 - DNA, 75 bp, synthetic construct
  source 1..75: mol_type = other DNA
caagagtggtctacctgacgattaccgaactggcgcgtgaaagcgacaccagcgaggcgagcgtcacacgtctgt

SEQ ID NO: 662630 - DNA, 75 bp, synthetic construct
  source 1..75: mol_type = other DNA
cgcgcttgcactgcatcaggctcagtcagtgcagatttatggcgtagcagccagtgccattctgggggagtattt

SEQ ID NO: 662631 - DNA, 75 bp, synthetic construct
  source 1..75: mol_type = other DNA
gcagcccgttagcgtcgctgagtgatattcaactggtcgcggccaaaccagaaggtccgttgagtgccggcgcgc

SEQ ID NO: 662632 - DNA, 75 bp, synthetic construct
  source 1..75: mol_type = other DNA
tgaattgacacatatcgctgcgacacatactgccggaatattattgtgtacgttatgtttactgcaatttattgt

SEQ ID NO: 662633 - DNA, 75 bp, synthetic construct
  source 1..75: mol_type = other DNA
gtacagcggtgcggtgaactacctgagcgtgccggaattccggacgacagtaaacctgttcaacaaagtcgctca

SEQ ID NO: 662634 - DNA, 75 bp, synthetic construct
  source 1..75: mol_type = other DNA
aattgcaggatatcctgcaaaatcaatacagtgcactgatcaccaatatcggcaaaggcgatcacaccacctttg

SEQ ID NO: 662635 - DNA, 75 bp, synthetic construct
  source 1..75: mol_type = other DNA
agggatctacagcaaggcacgaccttatggagaactgcatcggattatcccgctgattgaaaccgttgaaaccat

SEQ ID NO: 662636 - DNA, 75 bp, synthetic construct
  source 1..75: mol_type = other DNA
ctggatcagcatgagtattgatactcacaagccagtttatctgcgagacattctcaccacgtttggccgtcgccc

SEQ ID NO: 662637 - DNA, 75 bp, synthetic construct
  source 1..75: mol_type = other DNA
cgacagattgaagccagccttaatcgtctgcaggctgagatgctgatctcgcgtattgatgacaaatttgttttt

SEQ ID NO: 662638 - DNA, 75 bp, synthetic construct
  source 1..75: mol_type = other DNA
gcgcaaaaaaaaacgactgagagtgtaatgagtcagctaccgggacaggaactcccggttacccgtgaagtccgt

SEQ ID NO: 662639 - DNA, 75 bp, synthetic construct
  source 1..75: mol_type = other DNA
gacggcggtacggggaacacagcaggttgaatatagctttgacgggcggcgggtggtgctggaaatcaccgcagg

SEQ ID NO: 662640 - DNA, 75 bp, synthetic construct
  source 1..75: mol_type = other DNA
ggtggccggggaaattaaagctgatttgcgcaccgtcagcaatattgtcacccgcgccatccggcaactaaaaca

SEQ ID NO: 662641 - DNA, 75 bp, synthetic construct
  source 1..75: mol_type = other DNA
caaaacctgctcctcagcctgggattatcgaccccgtagttaagcctgaacccaagctgaaaaaaaccatctacg

SEQ ID NO: 662642 - DNA, 75 bp, synthetic construct
  source 1..75: mol_type = other DNA
atatgatttacgtgtggtggagctttttaccgacactgacggggagttaatcacgtcgctggtggttgtggataa

SEQ ID NO: 662643 - DNA, 75 bp, synthetic construct
  source 1..75: mol_type = other DNA
ccctcccgttgaactggagcgcatcgaggaggcagggaacaagacggaaaaccataccgcgctatgggggtgcat

SEQ ID NO: 662644 - DNA, 75 bp, synthetic construct
  source 1..75: mol_type = other DNA
aacttgataagaacttcccattggatatcaaaaatttctgtacgtgggtgaaagagtggctcgacagccatggta

SEQ ID NO: 662645 - DNA, 75 bp, synthetic construct
  source 1..75: mol_type = other DNA
ggacattacagggtctcgctgggaagacgaacgtgatgtttatctgatgataaacgatcagatggctcaggcact

SEQ ID NO: 662646 - DNA, 75 bp, synthetic construct
  source 1..75: mol_type = other DNA
cgtgagctcgataagcgtggacaatttgatacctttagggcagccttcgcggacattacagggtctcgctgggaa

SEQ ID NO: 662647 - DNA, 75 bp, synthetic construct
  source 1..75: mol_type = other DNA
caatccgtggcgttacaaaccgaccgaaggcaacatgacgctgcacgggccagatctggtgccgtttcaggaggc

SEQ ID NO: 662648 - DNA, 75 bp, synthetic construct
  source 1..75: mol_type = other DNA
gaacctgaattttcatatcgtcttcagtctttaatgatcgatgatgtttatcgaaacaaaatacaaagtatggcc

SEQ ID NO: 662649 - DNA, 75 bp, synthetic construct
  source 1..75: mol_type = other DNA
ggataccgatgtcaaagactataccggaaaccccgcgatgcagccggttccggcattattgaaccaggcacgagc

SEQ ID NO: 662650 - DNA, 75 bp, synthetic construct
  source 1..75: mol_type = other DNA
aggcgcaggcagacgcggtggccgatcagacaggcatctggcagcgttttgtccgggcgatcaaagggaaggcag

SEQ ID NO: 662651 - DNA, 75 bp, synthetic construct
  source 1..75: mol_type = other DNA
gtgcattatccgactgaagtcattctgttcaatattgattcgcgtgccaacgtagatgacaaagaagatgccatt

SEQ ID NO: 662652 - DNA, 75 bp, synthetic construct
  source 1..75: mol_type = other DNA
atcagatggctgcttaaaaaaagaacaaatggtagtgtccgctattgccagtacacctcacaatcccttcaatac

SEQ ID NO: 662653 - DNA, 75 bp, synthetic construct
  source 1..75: mol_type = other DNA
gtccgtgggaagtcggttagtcaccatcgttctgttactgatgttcctcgcactgtggctggttaactggtctat

SEQ ID NO: 662654 - DNA, 75 bp, synthetic construct
  source 1..75: mol_type = other DNA
atgcaaaaatttctcagtatgctgttttcccgccgcgcgctggccattgttggcgtggtaatgctggcgttgctg

SEQ ID NO: 662655 - DNA, 75 bp, synthetic construct
  source 1..75: mol_type = other DNA
cctgggcgatgcaggtccgcgtcgtggatatggacccggccatcaccgaactggtgattgacattgacggccagg

SEQ ID NO: 662656 - DNA, 75 bp, synthetic construct
  source 1..75: mol_type = other DNA
aggcgcaggcagacgcggtggccgatcagacgggcatctggcagcgctttgtccgggcgatcaaagggaaagtgg

SEQ ID NO: 662657 - DNA, 75 bp, synthetic construct
  source 1..75: mol_type = other DNA
gcgcagtccccggcggaacgactggctgcctgtgcggctttgcgtgcgcggctggctgaactgcgtgagacgctg

SEQ ID NO: 662658 - DNA, 75 bp, synthetic construct
  source 1..75: mol_type = other DNA
ggttatcggcagccccggtgatggtaaaaccaccgcgctgcttaacaccgggctacagtttccgctggcggaaca

SEQ ID NO: 662659 - DNA, 75 bp, synthetic construct
  source 1..75: mol_type = other DNA
atgaaactggcaccgaacgtaaaactattaccgaaagataaatacaccgatgcgattatttttgcgggtattgat

SEQ ID NO: 662660 - DNA, 75 bp, synthetic construct
  source 1..75: mol_type = other DNA
gtcacgtatacagcatggtgataaatgcacgatcccgctgctacgtgatgacatgaaaaagctgggatatgacac

SEQ ID NO: 662661 - DNA, 75 bp, synthetic construct
  source 1..75: mol_type = other DNA
caggccacaggggccacggtactggtggttcaccattccggcaaggatgaaacaaagggggcgcgaggttccagc

SEQ ID NO: 662662 - DNA, 75 bp, synthetic construct
  source 1..75: mol_type = other DNA
ataaagcacttccggcgctggctgggcaagctggaaaaagacggcgttatctatgttgacggcgatgatgtaggg

SEQ ID NO: 662663 - DNA, 75 bp, synthetic construct
  source 1..75: mol_type = other DNA
taatttgtgagttttcatcttcaagcgaagttattccgtctgtttccattgagaatatccttgctcgtgcagaat

SEQ ID NO: 662664 - DNA, 75 bp, synthetic construct
  source 1..75: mol_type = other DNA
gcgcgttgctttggcggcaatgatgaaaatgactcccgcgacatggggggatttatccgtggttgtgacgagctt

SEQ ID NO: 662665 - DNA, 75 bp, synthetic construct
  source 1..75: mol_type = other DNA
tggtggtgattgacatcccacgcgaaccggcagaactggagcgcatcgaggaggcagggaacaagacggaaaacc

SEQ ID NO: 662666 - DNA, 75 bp, synthetic construct
  source 1..75: mol_type = other DNA
ctgaataccggatacgcagggaggacgcaggaagcgaagcgctggttatctcatgcaccaaaatgaaggacgcgg

SEQ ID NO: 662667 - DNA, 75 bp, synthetic construct
  source 1..75: mol_type = other DNA
gagttaataacgtcgctggtggtggtggataagccgcggcatcccgttgaactggagcgcatcgaggaggcaggc

SEQ ID NO: 662668 - DNA, 75 bp, synthetic construct
  source 1..75: mol_type = other DNA
cgaagcgctggttatctcatgtaccaaaatgaaggacgcggaggaactcaaagaagcagcatatgacttacgcgt

SEQ ID NO: 662669 - DNA, 75 bp, synthetic construct
  source 1..75: mol_type = other DNA
gccgctggctctatctttaccttctcactcacgctgggcgattttattgtcccgcagctggttggccctccatga

SEQ ID NO: 662670 - DNA, 75 bp, synthetic construct
  source 1..75: mol_type = other DNA
ctgttatggcagggcttttatacctttgacgatttcaccatgtcggtaacgccggaactgacgctggccaatatc

SEQ ID NO: 662671 - DNA, 75 bp, synthetic construct
  source 1..75: mol_type = other DNA
aataaagcacttccggcgctggctgggcaagctggaaaaagacggcgttatctatgttgacggcgatgatgtagg

SEQ ID NO: 662672 - DNA, 75 bp, synthetic construct
  source 1..75: mol_type = other DNA
atggtcacacctgatgaatgaaacaggtatgaaaaccttaatgagtacacagcagattagcgaatgggaaaagca

SEQ ID NO: 662673 - DNA, 75 bp, synthetic construct
  source 1..75: mol_type = other DNA
ttttgaaaggtaatcgtgcctatcgatacccgattaataagcaagactttgcggtgagccgtttttgcaatggtc

SEQ ID NO: 662674 - DNA, 75 bp, synthetic construct
  source 1..75: mol_type = other DNA
cgttgttaaagcggaacagaaagacaatgacagtgtgtatgtcgagcttgatgagtatgttgttacccgagagct

SEQ ID NO: 662675 - DNA, 75 bp, synthetic construct
  source 1..75: mol_type = other DNA
cggcgaagtggaaaaagtgttgcttcgtcttggatttaccttaacggacgttcccgacagccatctgtgctgcgg

SEQ ID NO: 662676 - DNA, 75 bp, synthetic construct
  source 1..75: mol_type = other DNA
tgtcccccgccgtatcaaggcatgggaaatcgttaatgatgaacgggtggaaaatctgtacctggtaaaccgccc

SEQ ID NO: 662677 - DNA, 75 bp, synthetic construct
  source 1..75: mol_type = other DNA
atatgcgggagaactggcgcgaatacctggaacgggtgcgcgggaaagagccggcggaagaaaaaaaacaccagc

SEQ ID NO: 662678 - DNA, 75 bp, synthetic construct
  source 1..75: mol_type = other DNA
atgaattactggcttggaatgaaaagcttaaatcattcagaaccaagtcacagacaggccatttcccaggtaaat

SEQ ID NO: 662679 - DNA, 75 bp, synthetic construct
  source 1..75: mol_type = other DNA
ggttacccgctatgctaaggagcgcgaacagaatcgtatccctgttgaaattgctgcgggccagcaaataaccct

SEQ ID NO: 662680 - DNA, 75 bp, synthetic construct
  source 1..75: mol_type = other DNA
cttaggcctgcccagagcgcagcagaatgagcgttctgctttgtgtttgctggcactcctgaacctcacaccggg

SEQ ID NO: 662681 - DNA, 75 bp, synthetic construct
  source 1..75: mol_type = other DNA
acatgccatctcaacaaacacatggaaacttatagaggctgaactgaaaacatcaaggattttagcatggcgtga

SEQ ID NO: 662682 - DNA, 75 bp, synthetic construct
  source 1..75: mol_type = other DNA
gtgatcgcacctaacgatatccgcctgatgcgtgaacgtgacggacgtaaccaccgcgacatgtgcgtgctgttc

SEQ ID NO: 662683 - DNA, 75 bp, synthetic construct
  source 1..75: mol_type = other DNA
acagctaaatccaacgattaacttccaagccagtgatctggagaaaatacccgtaatttatcctgagaactctca

SEQ ID NO: 662684 - DNA, 75 bp, synthetic construct
  source 1..75: mol_type = other DNA
tttattgggctttagtaataccaatatggttcgctctctacttgagagtatatctcctaccttaaattttgaagc

SEQ ID NO: 662685 - DNA, 75 bp, synthetic construct
  source 1..75: mol_type = other DNA
tttgctaagaaacaatacccaaatagtaaatcagacttgtttgccatttttatggagcgagcatttaaattgctt

SEQ ID NO: 662686 - DNA, 75 bp, synthetic construct
  source 1..75: mol_type = other DNA
tatcgacccttccccgccgcgaacggctggtaaaacgcgcccgtgagcagggttttgaggtgctggttgagcact

SEQ ID NO: 662687 - DNA, 75 bp, synthetic construct
  source 1..75: mol_type = other DNA
gccaataccgacagcgcggaatataagctactgatgcgtactctggcattgttcactagtgcaaaaacgctggga

SEQ ID NO: 662688 - DNA, 75 bp, synthetic construct
  source 1..75: mol_type = other DNA
aaaccgaaaaaatctgaatcagctcttgagacgatccgccgctatttatcgactcagttctataaagaccacctg

SEQ ID NO: 662689 - DNA, 75 bp, synthetic construct
  source 1..75: mol_type = other DNA
cctggatgcgctgtatcgcctggaacaggaaggcgatttccagcagaaggccgcagcgaaagcgtttattccgtt

SEQ ID NO: 662690 - DNA, 75 bp, synthetic construct
  source 1..75: mol_type = other DNA
ttaacacaaaccgacagcgcagaatatcagctgctgctgcgcacgctgaaacgctttgtgaatgccaaaacgctg

SEQ ID NO: 662691 - DNA, 75 bp, synthetic construct
  source 1..75: mol_type = other DNA
atgccgcgtcacgcctcgacccggagacgtataaaaaagtgcatgatgccggtttccgctgggcaccaaaacagg

SEQ ID NO: 662692 - DNA, 75 bp, synthetic construct
  source 1..75: mol_type = other DNA
ggcaagatttactcaagccaagacctttggttcattgattgatgtaccaagcgatgaccatgaacagctaaaaga

SEQ ID NO: 662693 - DNA, 75 bp, synthetic construct
  source 1..75: mol_type = other DNA
acaacgccaccttgataaaagctcaggaaattgaaaatgaaattaataaaatattcattagaaattataatctag

SEQ ID NO: 662694 - DNA, 75 bp, synthetic construct
  source 1..75: mol_type = other DNA
ttatggaaatgatcaatatgtaattaactggagtgatgaagcgaagctttactatgactcgcatggtggcctttc

SEQ ID NO: 662695 - DNA, 75 bp, synthetic construct
  source 1..75: mol_type = other DNA
taccattgctattaatgttggagaaatcgctaagattccattacataacaatctaatgaataataaaaataatat

SEQ ID NO: 662696 - DNA, 75 bp, synthetic construct
  source 1..75: mol_type = other DNA
aaaatggagtactacattgagcctgcggagcaaacgccggaagtgcaggcgcagctggcggcgattaccccggcc

SEQ ID NO: 662697 - DNA, 75 bp, synthetic construct
  source 1..75: mol_type = other DNA
attcagtcaaatatctggtgaagttgttcaaacaacagcctgggtggcattaaacgaacatatagatatgtttaa

SEQ ID NO: 662698 - DNA, 75 bp, synthetic construct
  source 1..75: mol_type = other DNA
cacggttatcttgatcacggcttccgtatgttatcccacccggaaaccccggccgcgtttgaggtgctggatcat

SEQ ID NO: 662699 - DNA, 75 bp, synthetic construct
  source 1..75: mol_type = other DNA
atatcaattgataaattttcattttttgatccttcaactgaaagctcaaggaaatggtttccatataataaaggt

SEQ ID NO: 662700 - DNA, 75 bp, synthetic construct
  source 1..75: mol_type = other DNA
ttattaaataataaaacatttatcacaatggctcatttaggagctcgagcttttgggcaaatttcaggtgaggtt

SEQ ID NO: 662701 - DNA, 75 bp, synthetic construct
  source 1..75: mol_type = other DNA
caggaaggcgatttccagcaaaaagcggcggcgaaagcgtttattccgtttattcagcaggcgtggattttagcg

SEQ ID NO: 662702 - DNA, 75 bp, synthetic construct
  source 1..75: mol_type = other DNA
ctaactatcgcaagtggttcgagaagagtaaacaaacaacggaaagtatgctttccttagagaaggaaaacgacc

SEQ ID NO: 662703 - DNA, 75 bp, synthetic construct
  source 1..75: mol_type = other DNA
tcaaagtatgggctaaacgcacaaataaacatgcaatcttggatgtttctatcaagcttcgagacgatgcgggag

SEQ ID NO: 662704 - DNA, 75 bp, synthetic construct
  source 1..75: mol_type = other DNA
atgtataaaaagcgtccaatctactggctgttcagctccggtaaagagaaagccttcgagtgcctggtgtatctg

SEQ ID NO: 662705 - DNA, 75 bp, synthetic construct
  source 1..75: mol_type = other DNA
gaaaatgtacaaaaaacgcccgatttactggctattcagctccggcaaagagaaagcctttgagtgtctggtgta

SEQ ID NO: 662706 - DNA, 75 bp, synthetic construct
  source 1..75: mol_type = other DNA
tctagatcacgaaggtcttgtttacgcccacgaaggaaacaaaggtttcgctgatttagttgccgaaggtgccta

SEQ ID NO: 662707 - DNA, 75 bp, synthetic construct
  source 1..75: mol_type = other DNA
ttaagctcgttcaatgcagacaaacgctaccaacttctgaagcgaacgttggtaaggttcactcaagccaagacc

SEQ ID NO: 662708 - DNA, 75 bp, synthetic construct
  source 1..75: mol_type = other DNA
gtaccggcatgtcgacttcaaccatgattgcacacaagctgcaagagttcctgactgaacagggcatttcagcca

SEQ ID NO: 662709 - DNA, 75 bp, synthetic construct
  source 1..75: mol_type = other DNA
ggtttactggcgatgaccgactgttcaacgccggaagacggcctggcttgccaaaagctgggagccgaaattatt

SEQ ID NO: 662710 - DNA, 75 bp, synthetic construct
  source 1..75: mol_type = other DNA
tgctcgatacgaatcttacattgccagaattattggatcttgataatggtattctggctgatttatttacaagag

SEQ ID NO: 662711 - DNA, 75 bp, synthetic construct
  source 1..75: mol_type = other DNA
tttcggataataataactcatctagattatataaagttttgagtgttggagtaaataaaaaacatgatttggaaa

SEQ ID NO: 662712 - DNA, 75 bp, synthetic construct
  source 1..75: mol_type = other DNA
agccaacagcgtgaaaccctcagcgaactcagcgtcgaagaggtgttcaatcgccgtctggcactggaagaactg

SEQ ID NO: 662713 - DNA, 75 bp, synthetic construct
  source 1..75: mol_type = other DNA
cgcgtgacattattaccagccaggcggggcttaacggtattgaaaaacagcagcatttactggcagcgattaccg

SEQ ID NO: 662714 - DNA, 75 bp, synthetic construct
  source 1..75: mol_type = other DNA
gccgctgccggacatcacacaggagcgttttttgcgtcttccggaagtgatgcacctgtgcggcctgtcacgctc

SEQ ID NO: 662715 - DNA, 75 bp, synthetic construct
  source 1..75: mol_type = other DNA
gcggctgagcaggatattctggccggcgtgccggcactgcatgatgcggccgctcagctgattatcgtgacctca

SEQ ID NO: 662716 - DNA, 75 bp, synthetic construct
  source 1..75: mol_type = other DNA
tgtatcttgacccgatcaaagtcaccctgctgactccggggatggaaaaagacggcaccatgagcgactttggta

SEQ ID NO: 662717 - DNA, 75 bp, synthetic construct
  source 1..75: mol_type = other DNA
tctcaatgaactatgaaagagtcagacaaactgctccttccgtttctttaaaaagtattctttattctattgaat

SEQ ID NO: 662718 - DNA, 75 bp, synthetic construct
  source 1..75: mol_type = other DNA
tgagcgattttataatgattccaaaaactggaaaagtcatgatgactatgacacattagttaaagcggtatctga

SEQ ID NO: 662719 - DNA, 75 bp, synthetic construct
  source 1..75: mol_type = other DNA
atagcatcacaaacagatgcctacccacagatattacttaataaagagtatttaattccttttacagccaaggtt

SEQ ID NO: 662720 - DNA, 75 bp, synthetic construct
  source 1..75: mol_type = other DNA
agttaggcatcacaaagtacagcatcgtgaccaacagcaacgattccgtcacactgcgcctcatgactgagcatg

SEQ ID NO: 662721 - DNA, 75 bp, synthetic construct
  source 1..75: mol_type = other DNA
cgtcccccactgccgcgcacccgatgccggtttcagccccgactcaggaacgttttttacgtctcccggaagtca

SEQ ID NO: 662722 - DNA, 75 bp, synthetic construct
  source 1..75: mol_type = other DNA
gccggtctctgatgccgttcaggagcgctttatccgcctgcctgaagtgatgcatctgtgcggcctgtcccggtc

SEQ ID NO: 662723 - DNA, 75 bp, synthetic construct
  source 1..75: mol_type = other DNA
gtgagtcttggcggtaaaaatgtggcctggctgcactctgaagtcaccgcatggatggccgggcgcattgccgga

SEQ ID NO: 662724 - DNA, 75 bp, synthetic construct
  source 1..75: mol_type = other DNA
tcataccttgcagtcgggcattgaaacggcgcgtgtaccgctggacgaacttacgccacatgccgaaaaactcgc

SEQ ID NO: 662725 - DNA, 75 bp, synthetic construct
  source 1..75: mol_type = other DNA
tattaatatgcgtgaaaagtgggttcccctcattcatcagataggtgataccggcttagatggcttaactacttg

SEQ ID NO: 662726 - DNA, 75 bp, synthetic construct
  source 1..75: mol_type = other DNA
aatcctactggttacaatgctcaagtaaatatgcaagcatggatgtttctatcaaattataagaaatttagatca

SEQ ID NO: 662727 - DNA, 75 bp, synthetic construct
  source 1..75: mol_type = other DNA
cccgtccgctttgcgctggataaagtcccaggcgatgtcacgttggtgtcgggcaccacctgtagcattgccgta

SEQ ID NO: 662728 - DNA, 75 bp, synthetic construct
  source 1..75: mol_type = other DNA
tggttcgttgacttactggcagagcgtttgcgcgctccgctgcgcgaagaggctaaattctttggttatacttcg

SEQ ID NO: 662729 - DNA, 75 bp, synthetic construct
  source 1..75: mol_type = other DNA
atgcacaccgctttttcttccccgtcttctgcccctgccgcgccgctgatgccggtttctgatgccgttcaggag

SEQ ID NO: 662730 - DNA, 75 bp, synthetic construct
  source 1..75: mol_type = other DNA
atgggtcacgaaacaaaggcccagctaaaagattatgtcgagttaaaaatcatgaaaatcaaaaccactgttgct

SEQ ID NO: 662731 - DNA, 75 bp, synthetic construct
  source 1..75: mol_type = other DNA
cattacgagaaaagctgccactggcccctgattgtgaaatcactatcgaaggccgggtactgaattttgacgctg

SEQ ID NO: 662732 - DNA, 75 bp, synthetic construct
  source 1..75: mol_type = other DNA
tgttgatctctacgcgctcaatgtccttcccaatacgccactgggcaaagccgtggaaaatgggcgcactatcgt

SEQ ID NO: 662733 - DNA, 75 bp, synthetic construct
  source 1..75: mol_type = other DNA
tgggcggcaaaaacgtggcgtgggcgcagtctgaaatcacggcatggatggcggatcgtattgccgaacgcaacc

SEQ ID NO: 662734 - DNA, 75 bp, synthetic construct
  source 1..75: mol_type = other DNA
tttgcctctgtagaaagcaaggtttttgcttctcttcctgctgatgttgaatgcggagacttgatcaccagcact

SEQ ID NO: 662735 - DNA, 75 bp, synthetic construct
  source 1..75: mol_type = other DNA
atgcggagacttgatcaccagcactggcgctaaatatgaatcaggagatgatatctatgttgttatgagtgagtt

SEQ ID NO: 662736 - DNA, 75 bp, synthetic construct
  source 1..75: mol_type = other DNA
accagattgttaaccatctgatttaccccattcccgacccggcaatgccatttttgggcgtgcatctcacccgaa

SEQ ID NO: 662737 - DNA, 75 bp, synthetic construct
  source 1..75: mol_type = other DNA
aaaagaataggggtatatgaacattctagtgcgggacgcgatttatatgctcctctttttaatcaattgggtgca

SEQ ID NO: 662738 - DNA, 75 bp, synthetic construct
  source 1..75: mol_type = other DNA
gcgttgccctttaaccagtggccgttgatggataaagcgttaatgatgacgcatttcgatgagatgaataccgca

SEQ ID NO: 662739 - DNA, 75 bp, synthetic construct
  source 1..75: mol_type = other DNA
gaggttgcgctcgcaatagataatcgcccaagcagctatgctatggcacaagcttgcgcagcagcattgttggaa

SEQ ID NO: 662740 - DNA, 75 bp, synthetic construct
  source 1..75: mol_type = other DNA
ctccggtgtggcacatgaacgaaccagatgagcgatttattcgtctgtgccatgagtttccccgcgtctgcatcg

SEQ ID NO: 662741 - DNA, 75 bp, synthetic construct
  source 1..75: mol_type = other DNA
cattgatgccaccggcctcaaggtctatggcgaaggcgaatggaaaattcgcaaacacggcaaggagaagcgacg

SEQ ID NO: 662742 - DNA, 75 bp, synthetic construct
  source 1..75: mol_type = other DNA
tggtttttaacggagagaggaatgtactggcagacagtctgaaaccacagcctctgattcttccggtcaagggaa

SEQ ID NO: 662743 - DNA, 75 bp, synthetic construct
  source 1..75: mol_type = other DNA
gtggttaaacgccgtggaactgcgcgagcgcgaaccgaatatcaccgggcttggcggcatttttgtgccgtccag

SEQ ID NO: 662744 - DNA, 75 bp, synthetic construct
  source 1..75: mol_type = other DNA
gagcgcgaaccaaatatcaccgggctgggcggtatttttgtgccgtccagcggcattgtcagctaccgcgaagtg

SEQ ID NO: 662745 - DNA, 75 bp, synthetic construct
  source 1..75: mol_type = other DNA
gttctgtatatcgctacctcgcaaatccttgatgatgagatggctgcacggatagaacatcatcggcaaggccgc

SEQ ID NO: 662746 - DNA, 75 bp, synthetic construct
  source 1..75: mol_type = other DNA
tggcaaggaattaaaatcgttacctacacgagatgctgtgttaccagcattaatgctcttaatagcttctcgcaa

SEQ ID NO: 662747 - DNA, 75 bp, synthetic construct
  source 1..75: mol_type = other DNA
atgatttaaatgaagatgcggaatttgatgagaacggagttgaggtttttgacgaaaaggccttagtagacctta

SEQ ID NO: 662748 - DNA, 75 bp, synthetic construct
  source 1..75: mol_type = other DNA
cggatgcgcgcgttgtgggaacgcacagcggcaaacggtattgagcgcgagtggttaaacgctgaggaactgcgc

SEQ ID NO: 662749 - DNA, 75 bp, synthetic construct
  source 1..75: mol_type = other DNA
gatagtttaaagcatgctgagtcgcttgtgcagaaagttttaaatgatgctaaatttttatcaggcatatcaatg

SEQ ID NO: 662750 - DNA, 75 bp, synthetic construct
  source 1..75: mol_type = other DNA
tatatggttatcccgagccaaccacaccatggctgaatacggctcccggtttatttattgacggttatacatcgg

SEQ ID NO: 662751 - DNA, 75 bp, synthetic construct
  source 1..75: mol_type = other DNA
cggacactgatttatgactatgagcagaaccctgactccggcaacaacgtggtggcgctggcagcaaaagcagga

SEQ ID NO: 662752 - DNA, 75 bp, synthetic construct
  source 1..75: mol_type = other DNA
agagttggagaaagtttagatatttttaaagaagcttttattaattcattaaaatcattgcttgggaaaaagtat

SEQ ID NO: 662753 - DNA, 75 bp, synthetic construct
  source 1..75: mol_type = other DNA
aaaagaataggagtatatgagcattctagtgcaggacgagatctatatgcacctctttttaatcaattgggggct

SEQ ID NO: 662754 - DNA, 75 bp, synthetic construct
  source 1..75: mol_type = other DNA
cagatagagttaaaaacttcccttcagattcaagtcaacaaattataaaaaatgccatatcatcacccaataatt

SEQ ID NO: 662755 - DNA, 75 bp, synthetic construct
  source 1..75: mol_type = other DNA
taagaggcgatattctgggattacttactgctattgaacttaatatcaaggcgttggctattccagtgagttgta

SEQ ID NO: 662756 - DNA, 75 bp, synthetic construct
  source 1..75: mol_type = other DNA
agcaactcgtgatgcgctgttgcctgcacttgctgtattatcattagcatatcaaaattatagaaatataaatga

SEQ ID NO: 662757 - DNA, 75 bp, synthetic construct
  source 1..75: mol_type = other DNA
ttctgcattaccaacgcgcgatgccgttcttccgttattaatgctattttctgccacgaaaacatcatgtatctc

SEQ ID NO: 662758 - DNA, 75 bp, synthetic construct
  source 1..75: mol_type = other DNA
actctggtattgaatttggaactagtggtgctagaggtttggttattgattttactcatagtaccactgttgcct

SEQ ID NO: 662759 - DNA, 75 bp, synthetic construct
  source 1..75: mol_type = other DNA
tctcgcccgtttgcggagtgatgccgggcaatggcaggtctgcctgaccggtgactccgactggttcgataatgc

SEQ ID NO: 662760 - DNA, 75 bp, synthetic construct
  source 1..75: mol_type = other DNA
ttttctgatggcaagataaatattgatagagaccaggatatgatgactcagatggcattgtgcatggggtattat

SEQ ID NO: 662761 - DNA, 75 bp, synthetic construct
  source 1..75: mol_type = other DNA
aagagtccggcccggcctgtcatcagacgggccacaatagcggcgtgatccatgccggggtctattacacacccg

SEQ ID NO: 662762 - DNA, 75 bp, synthetic construct
  source 1..75: mol_type = other DNA
atccagaccgacgtgtcgtcatcaaccatcaaccgtaaagattacgaaggcatgggcaacaaccagatggtggcg

SEQ ID NO: 662763 - DNA, 75 bp, synthetic construct
  source 1..75: mol_type = other DNA
agtccaataacaggtaaagataaacagatcttgataggccattatcctgtgaccactctggctgatgcccgcgtt

SEQ ID NO: 662764 - DNA, 75 bp, synthetic construct
  source 1..75: mol_type = other DNA
attcttgcacacagaaatacccttacatccattacagctctgttatttctgttctgttgtgcactgtatgcacct

SEQ ID NO: 662765 - DNA, 75 bp, synthetic construct
  source 1..75: mol_type = other DNA
attatgctcagtaaacagctggccgttacggatggttaaaggaacagttgtgggaacaactgacacattgcgtga

SEQ ID NO: 662766 - DNA, 75 bp, synthetic construct
  source 1..75: mol_type = other DNA
ttattaaataataaggcatttatcacaatggctcaccttggtgctcgggcgttcgggcaaatatccggggaggtt

SEQ ID NO: 662767 - DNA, 75 bp, synthetic construct
  source 1..75: mol_type = other DNA
ctgatcgaaaacaaaacgtttgttaacatgattcacctcggatctcgagcatttgcggagatttcaggcgaagtc

SEQ ID NO: 662768 - DNA, 75 bp, synthetic construct
  source 1..75: mol_type = other DNA
aataataaaaataatattgaaaatctaactttagagattattgaccttcacaaaaaagattgggatgaaaaagaa

SEQ ID NO: 662769 - DNA, 75 bp, synthetic construct
  source 1..75: mol_type = other DNA
atggatacgccacgcccacagctattagattttcaatttcatcagaataacgacagttttactctacgttttcaa

SEQ ID NO: 662770 - DNA, 75 bp, synthetic construct
  source 1..75: mol_type = other DNA
ataaggatttattttcagcctttatagtcagaaacttagaactttcaaaacaaggggctcaacttggattcatga

SEQ ID NO: 662771 - DNA, 75 bp, synthetic construct
  source 1..75: mol_type = other DNA
tgttaactgggaatatgatggtattgaaataaaaaactgcgtcgatgaaaatggtaagctacgctcacgccagca

SEQ ID NO: 662772 - DNA, 75 bp, synthetic construct
  source 1..75: mol_type = other DNA
gtgtttaatggcgagaaaaatgttcctgcagacagccttaagtcacagagacttatttatcctgacagtaataat

SEQ ID NO: 662773 - DNA, 75 bp, synthetic construct
  source 1..75: mol_type = other DNA
gggcaatggcaggtctgcctgaccggtgactccgactggttcgataatgctcctgctgcaagtctgtataacggc

SEQ ID NO: 662774 - DNA, 75 bp, synthetic construct
  source 1..75: mol_type = other DNA
ggcaacaacgtggtggcgctggcagcaaaagcaggatacagcacatggtggatatccaatcagggaaagctgggg

SEQ ID NO: 662775 - DNA, 75 bp, synthetic construct
  source 1..75: mol_type = other DNA
ctattggtgcgcatattgtcagcaaggtacaaacgctgttggcaagccagagtaaccccggacgcacgctgcgag

SEQ ID NO: 662776 - DNA, 75 bp, synthetic construct
  source 1..75: mol_type = other DNA
acgtcactacagaggttgaattcgttttaaagacctcctgtggctacctgttagctgatatcccttcgcttcctt

SEQ ID NO: 662777 - DNA, 75 bp, synthetic construct
  source 1..75: mol_type = other DNA
actggagtctctcatcccaacggacaggtatatcgtgcgggtgtacagcaacgtcactacagaggttgaattcgt

SEQ ID NO: 662778 - DNA, 75 bp, synthetic construct
  source 1..75: mol_type = other DNA
gcgcatacggactcgctacagtgtaggagccaaaatatttctactgttctgggctgcaggattgggaggcacgct

SEQ ID NO: 662779 - DNA, 75 bp, synthetic construct
  source 1..75: mol_type = other DNA
tttaacggagagaggaatgtactggcagacagtctgaaaccacagcctctgattcttccggtcaagggaaaataa

SEQ ID NO: 662780 - DNA, 75 bp, synthetic construct
  source 1..75: mol_type = other DNA
tcccggtttatttattgacggctatacatcggcagcagccagtactgtgccttccctgagccggacactgattta

SEQ ID NO: 662781 - DNA, 75 bp, synthetic construct
  source 1..75: mol_type = other DNA
tatatggttatcccgtgccaaccacaccgtggctgaatacggctcccggtttatttattgacggctatacatcgg

SEQ ID NO: 662782 - DNA, 75 bp, synthetic construct
  source 1..75: mol_type = other DNA
acggcaaatgcgtcacaccggagagtattaaccagattgcgttactacaagttcgctataacgatacgctgcgcc

SEQ ID NO: 662783 - DNA, 75 bp, synthetic construct
  source 1..75: mol_type = other DNA
aaactgtatgcgatacaaccagaagaaacgctaacgctggacgttaaaacgcaacgtttcaaccgtcagggttaa

SEQ ID NO: 662784 - DNA, 75 bp, synthetic construct
  source 1..75: mol_type = other DNA
ccgtcatttcgcaggtatttttcagtggatgaccggtatttgtactgaaaatataccgccattcaatccgctgac

SEQ ID NO: 662785 - DNA, 75 bp, synthetic construct
  source 1..75: mol_type = other DNA
cggttcggtggcagcgtttggtcatctctattttccgcgaatgcatcgcgctggttatgtcgcgcctaatctcgg

SEQ ID NO: 662786 - DNA, 75 bp, synthetic construct
  source 1..75: mol_type = other DNA
aagccattgcccatgccattctcggtggtgtgacagcagcccttcagggcaacagtgcggcagcaggcgcaattg

SEQ ID NO: 662787 - DNA, 75 bp, synthetic construct
  source 1..75: mol_type = other DNA
aagtatctcagttcgttgcatgataagtacggttccggggctgcctcgaatccgaatatcggtaaagatctgacc

SEQ ID NO: 662788 - DNA, 75 bp, synthetic construct
  source 1..75: mol_type = other DNA
tccactgcgtctggggcgcgataacagtgagctggagtggcgcgagcatggctttaaaaacggtgtgttttttgc

SEQ ID NO: 662789 - DNA, 75 bp, synthetic construct
  source 1..75: mol_type = other DNA
ctatcgttaatgcccgtctgaaaccgcatcccgactaccgcccgccgctcaagtgggtttctattgatattgaaa

SEQ ID NO: 662790 - DNA, 75 bp, synthetic construct
  source 1..75: mol_type = other DNA
gcgacggacaacgggccgttgcacgttacgcttgcgccgcaagaatccgtggcgtttattcccaccgatcaggtt

SEQ ID NO: 662791 - DNA, 75 bp, synthetic construct
  source 1..75: mol_type = other DNA
gtggataaatccggcgcagtcacagcagcacagactattacctcacatggtgaaaaaagactcctgacaggttcg

SEQ ID NO: 662792 - DNA, 75 bp, synthetic construct
  source 1..75: mol_type = other DNA
attaaatgttaaacatttcaatgataacccgtggttatttgtttcccgaacaggaaaaccattatcgagacaacg

SEQ ID NO: 662793 - DNA, 75 bp, synthetic construct
  source 1..75: mol_type = other DNA
aggaaaatcgccagtcttacaacagcgttgtgacattatttgatataagaatccagcaccttcagaacaacgtcc

SEQ ID NO: 662794 - DNA, 75 bp, synthetic construct
  source 1..75: mol_type = other DNA
ttcatcgtgaccgacccggagtttgtgaaaatcaacggcgttccagtgttatctgccgacgatgtacgcaatctg

SEQ ID NO: 662795 - DNA, 75 bp, synthetic construct
  source 1..75: mol_type = other DNA
cgctacactactacccggcaattcggaagttgtgctggtcgcaatgttactttctggggtgagtcatccctgggt

SEQ ID NO: 662796 - DNA, 75 bp, synthetic construct
  source 1..75: mol_type = other DNA
tctctgccaccgactgactataaagccgactggaacgactatcaccaacaacacgggctggcggcagccacagca

SEQ ID NO: 662797 - DNA, 75 bp, synthetic construct
  source 1..75: mol_type = other DNA
ctctattttccccggatgcatcgcgctggttatgtcgcgcctaatctcggcgaagtgccgccgcacgccagccct

SEQ ID NO: 662798 - DNA, 75 bp, synthetic construct
  source 1..75: mol_type = other DNA
gaatccagcgttgttagcaaaatccagcttacgacagaccagaatcaagctcacaaatggacgtggaacacgagt

SEQ ID NO: 662799 - DNA, 75 bp, synthetic construct
  source 1..75: mol_type = other DNA
aagattgcgaactggtgacgcaaatcttccacaaaaccgaaatcatgccgtttttactcgaacgggcgacggtga

SEQ ID NO: 662800 - DNA, 75 bp, synthetic construct
  source 1..75: mol_type = other DNA
ggcgtttattcctgccgatcaagttccccgcgctcagcacattttgcacggtgaacaaggctttcgtctgacgcc

SEQ ID NO: 662801 - DNA, 75 bp, synthetic construct
  source 1..75: mol_type = other DNA
gttaagcaaccggtaaaaattgcttaccacggctccagctcgcaccaggccgaaaagtactggctgcgtgaggtg

SEQ ID NO: 662802 - DNA, 75 bp, synthetic construct
  source 1..75: mol_type = other DNA
aacagcaggagcgctttttctgcgaagcattaactgaaccgacgctgacatgggctaaggaaagtcagtttgcaa

SEQ ID NO: 662803 - DNA, 75 bp, synthetic construct
  source 1..75: mol_type = other DNA
ccgcacaaatcagaggaagatatccgcgaagatgaacggaaacgccagcaggaaataacggataaagcacaactt

SEQ ID NO: 662804 - DNA, 75 bp, synthetic construct
  source 1..75: mol_type = other DNA
gacggtatcgaggcgctgaaatccgcgttctggaatttctcttcattctcgctggaaaccgtcgcccaggaattg

SEQ ID NO: 662805 - DNA, 75 bp, synthetic construct
  source 1..75: mol_type = other DNA
ctatcgttaatgcccgtctgaaaccgcatcccgactatcgtccgccgctcaagtgggtttctattgatattgaaa

SEQ ID NO: 662806 - DNA, 75 bp, synthetic construct
  source 1..75: mol_type = other DNA
ttgaagcgcagggctacgacgtgatctacggcgataccgactcaacgtttgtctggctgaaaggcgcacattcgg

SEQ ID NO: 662807 - DNA, 75 bp, synthetic construct
  source 1..75: mol_type = other DNA
gcgacggacaacgggccgttgcaggttacgcttgcgccgcaagagtccgtggcgtttattcccgccgatcaggtt

SEQ ID NO: 662808 - DNA, 75 bp, synthetic construct
  source 1..75: mol_type = other DNA
accgctggcccagcagtttcagcaggagctatacctacgtatcttccgcaacgagccatatcaggaatacgttcg

SEQ ID NO: 662809 - DNA, 75 bp, synthetic construct
  source 1..75: mol_type = other DNA
ggcggctatgtgatggattcgcggcctgggctttatgattcggtactggtgctggactacaaaagcctgtacccc

SEQ ID NO: 662810 - DNA, 75 bp, synthetic construct
  source 1..75: mol_type = other DNA
atgaatatccgaaatcaatataatgaagccttaaataaattagatgttgatgttaatgatggtttgagagattta

SEQ ID NO: 662811 - DNA, 75 bp, synthetic construct
  source 1..75: mol_type = other DNA
gagagaacttagaaaggcgggtgcagaagcgcaagttgttgctttttacctgatgacatcccctcacgcaaatat

SEQ ID NO: 662812 - DNA, 75 bp, synthetic construct
  source 1..75: mol_type = other DNA
tcgcggtgttgtgcctggtggtgagcgcgtgcctccgcatattgccgttcgtcaccctcccctgagtaattgtgc

SEQ ID NO: 662813 - DNA, 75 bp, synthetic construct
  source 1..75: mol_type = other DNA
ccgatttcgcgcgttgacgccaagagcggccagacgctgcgtattaagctcggcagcagcgccggtctggcgaaa

SEQ ID NO: 662814 - DNA, 75 bp, synthetic construct
  source 1..75: mol_type = other DNA
accaggcaggggatgttcagaacgtcaatcctggtcagccagcaggcacgacaccggaagccgattcgggcgctg

SEQ ID NO: 662815 - DNA, 75 bp, synthetic construct
  source 1..75: mol_type = other DNA
ttggtctggaaggggcttcaaaggggcttaaaagggctgttgaagctggtttttgtagctatgaccatgatgccg

SEQ ID NO: 662816 - DNA, 75 bp, synthetic construct
  source 1..75: mol_type = other DNA
ttgtaccttgctcatgaaaccgggcttggtccggaaggggcttcgaaggggcttcgaagggctgtcgaagtgggt

SEQ ID NO: 662817 - DNA, 75 bp, synthetic construct
  source 1..75: mol_type = other DNA
aactggatgtgacggaaattgctagggctgcaaagaccgtccaggagcggatggggctgagtcatccgtatgggg

SEQ ID NO: 662818 - DNA, 75 bp, synthetic construct
  source 1..75: mol_type = other DNA
gtaaagcccatcagcatcctagagaaactggatgtgacggaaattgctagggctgcaaagaccgtccaggagcgg

SEQ ID NO: 662819 - DNA, 75 bp, synthetic construct
  source 1..75: mol_type = other DNA
gagtgtcgggaatatcagcgttactgtaatcttggttgggaaacaggactgaaccgccccgggtttcctggagag

SEQ ID NO: 662820 - DNA, 75 bp, synthetic construct
  source 1..75: mol_type = other DNA
gccgtggtgaggctttaatcgtcaataatatcaatgactatggtgctgacgttgcagttaaagtcaccgtcaaat

SEQ ID NO: 662821 - DNA, 75 bp, synthetic construct
  source 1..75: mol_type = other DNA
gcacaggtctggctggataacggcaatccggatgccacacccgatacgataaccacgccttttatcatcacgccg

SEQ ID NO: 662822 - DNA, 75 bp, synthetic construct
  source 1..75: mol_type = other DNA
gcaaagaccgtccaggagcggatggggctgagtcatccgtatggggtagctttcaggttgaaagacgaaaaataa

SEQ ID NO: 662823 - DNA, 75 bp, synthetic construct
  source 1..75: mol_type = other DNA
caggagaaagaacaggaacaggacaaaaacactatggttcatggcaaaaaaaacaccacgaaccaggcaggggat

SEQ ID NO: 662824 - DNA, 75 bp, synthetic construct
  source 1..75: mol_type = other DNA
gcgcaagggtttgattaaaggcaaaggatatatccttaccgagcaggattactgtgtggttgtgggtgcaatcaa

SEQ ID NO: 662825 - DNA, 75 bp, synthetic construct
  source 1..75: mol_type = other DNA
attactattcgcgaaccaaaattacgcgaccgcattatgttcagtaacgataaaagtggtcttgaagagcggaca

SEQ ID NO: 662826 - DNA, 75 bp, synthetic construct
  source 1..75: mol_type = other DNA
tggatgatgcgaaacatggctttaccgtggatgagttagcgctggtgatggcggcgtttgatacgcacccggagg

SEQ ID NO: 662827 - DNA, 75 bp, synthetic construct
  source 1..75: mol_type = other DNA
atggttttatggcgggcctggtgtatagctttctggaaggaagtaattttcgcgagagcgcccgttttgccatgg

SEQ ID NO: 662828 - DNA, 75 bp, synthetic construct
  source 1..75: mol_type = other DNA
aaagtgaaaacctggtacagccggatccacactctgaaaccaacacaaaatgaactggaaattttgtggggtcag

SEQ ID NO: 662829 - DNA, 75 bp, synthetic construct
  source 1..75: mol_type = other DNA
acagtagacagttttggtgctgacgatggttttatggcgggccacggtttatttgtttgcggatcaatgggcgaa

SEQ ID NO: 662830 - DNA, 75 bp, synthetic construct
  source 1..75: mol_type = other DNA
gaactgggacgcttactgatggacagtcatcgcaatgatatcttgctggtcgagcagatagaccgcttgacccgt

SEQ ID NO: 662831 - DNA, 75 bp, synthetic construct
  source 1..75: mol_type = other DNA
catgtgcagccctgtcgcgtgccagtgccagcatcaataacccaacactttccgttaataacgcgcaatatctgt

SEQ ID NO: 662832 - DNA, 75 bp, synthetic construct
  source 1..75: mol_type = other DNA
ggctatatcctgactgagcaggcctattgcgttgtgctgggggctgttaacatggatatccgcggcatggcagat

SEQ ID NO: 662833 - DNA, 75 bp, synthetic construct
  source 1..75: mol_type = other DNA
taagcaacgttttctgcctctgacgcctcttttaatggtctcagatgtcctttggtcaccagttctgccagcgtg

SEQ ID NO: 662834 - DNA, 75 bp, synthetic construct
  source 1..75: mol_type = other DNA
attaatcggttgctcgatagcggtagttcttggagccaggttcagaaaattatggcctgtagtcgagggacaatt

SEQ ID NO: 662835 - DNA, 75 bp, synthetic construct
  source 1..75: mol_type = other DNA
tggctgcaatgtcgcataaagactggctgagtcgtcgtcaacgacaaaaacagggaattgaacgtgcccatactt

SEQ ID NO: 662836 - DNA, 75 bp, synthetic construct
  source 1..75: mol_type = other DNA
gcatcggaatcggtcatccgggcgataaaaataaagttgtcggttttgtgttaggcaaaccgcctgttagtgaac

SEQ ID NO: 662837 - DNA, 75 bp, synthetic construct
  source 1..75: mol_type = other DNA
gttattgatttagttaacggtgttattgctcgaggtgcaaatgttcaggctggcaatgtgttgcgcgaattgtcg

SEQ ID NO: 662838 - DNA, 75 bp, synthetic construct
  source 1..75: mol_type = other DNA
ttacgcgacgtgcagctcattgggcataattcctacgaacaaatccgcgcaacattattatcaatgattgactgg

SEQ ID NO: 662839 - DNA, 75 bp, synthetic construct
  source 1..75: mol_type = other DNA
tggttcgttgacttactggcggagcgtttgcgcgctcccttgcgcgaagaagctaaattctttggttatacctcg

SEQ ID NO: 662840 - DNA, 75 bp, synthetic construct
  source 1..75: mol_type = other DNA
aatgcgagcagagtgccaacattaatgcctactgggagccgaatactttacgctgcctggatcgtcgtactggtc

SEQ ID NO: 662841 - DNA, 75 bp, synthetic construct
  source 1..75: mol_type = other DNA
tttacccgcaatttcataccgggtacttatcacatctatggtgactccctgcgtggttattacatcacccttgat

SEQ ID NO: 662842 - DNA, 75 bp, synthetic construct
  source 1..75: mol_type = other DNA
atggttttatggcgggactggtgtatagctttctggaaggaagcagttttcgcgatagcgcccgttttgcgatgg

SEQ ID NO: 662843 - DNA, 75 bp, synthetic construct
  source 1..75: mol_type = other DNA
atgtcagttttacgcgtggcaatcgctgcatcttcgataatatttccctgaccgtgccgcgagggaagatcacgg

SEQ ID NO: 662844 - DNA, 75 bp, synthetic construct
  source 1..75: mol_type = other DNA
gtattttctggcaacatgaaatgcctcttcctccactatatgagcaagagagaatcgttgctattctcgataaat

SEQ ID NO: 662845 - DNA, 75 bp, synthetic construct
  source 1..75: mol_type = other DNA
aaccgtattgatatttactgagaggtcagatcaactttccagggcaacagatcgcgtacccggtttgccggccaa

SEQ ID NO: 662846 - DNA, 75 bp, synthetic construct
  source 1..75: mol_type = other DNA
tttgctgactgcgccagcgcatacgacggtagacagttttggtgctgacgatggttttatggcgggcctggtata

SEQ ID NO: 662847 - DNA, 75 bp, synthetic construct
  source 1..75: mol_type = other DNA
gaaattttatggggacaggcgatcaccagcgatgctgaccgtaatgccgcagtgaatgcattgcatcagcaaggt

SEQ ID NO: 662848 - DNA, 75 bp, synthetic construct
  source 1..75: mol_type = other DNA
acctgaaaattgaagttgtcaacggcaaggccgttattttctccctgcatgttgcctgccactttaagcgcatgc

SEQ ID NO: 662849 - DNA, 75 bp, synthetic construct
  source 1..75: mol_type = other DNA
gggtgccggtggtggaatcgttacgtcagtccagcgagcaaaatctctctgttccggcggcggtcgaagctgcca

SEQ ID NO: 662850 - DNA, 75 bp, synthetic construct
  source 1..75: mol_type = other DNA
aacctggcagatagcgcaaaaaaactgattgaacttgtgcaatccgggcgtttcgatcttgataagaaaacgttc

SEQ ID NO: 662851 - DNA, 75 bp, synthetic construct
  source 1..75: mol_type = other DNA
aagccttttattatcaacctgttttatgtacggtacaggcaaaatcaaccctgaccgtggaagaagaacaagaac

SEQ ID NO: 662852 - DNA, 75 bp, synthetic construct
  source 1..75: mol_type = other DNA
catccggacgatggtgtttttactgatattattagaattaaacagtcaaaaatattatcatatttgaacgtatta

SEQ ID NO: 662853 - DNA, 75 bp, synthetic construct
  source 1..75: mol_type = other DNA
tggtggtgatcgattacgaatttataaaatatgtcaagaactatctaaacattatgagttgactctattgtcatt

SEQ ID NO: 662854 - DNA, 75 bp, synthetic construct
  source 1..75: mol_type = other DNA
aaagaacttagccagcaataccaacaactggatgatgaatatctacaggctcgctatatcgatgtggacgatctt

SEQ ID NO: 662855 - DNA, 75 bp, synthetic construct
  source 1..75: mol_type = other DNA
cgagagctgcattgaagcattccatgaggctgaagccgtccagggtcactccgtgttccgtcgtaatcaacggga

SEQ ID NO: 662856 - DNA, 75 bp, synthetic construct
  source 1..75: mol_type = other DNA
tccattgcatacggaggctgccatcatggctacagtcccaacttccccatacctgaaaatcgaagtcgtcaacgg

SEQ ID NO: 662857 - DNA, 75 bp, synthetic construct
  source 1..75: mol_type = other DNA
ggcctgatgatgcttcagcttgggttaagtctgcgcacaatgcggtactacgagagctgcattgaagcattccat

SEQ ID NO: 662858 - DNA, 75 bp, synthetic construct
  source 1..75: mol_type = other DNA
cctgttcagttcaccacccatgagtttcgcagctccggtggtggaagtttttcaccgatcaaggaggctgccatc

SEQ ID NO: 662859 - DNA, 75 bp, synthetic construct
  source 1..75: mol_type = other DNA
caggggagctgaaaggctcgccggtttccttgagcgccggtagttccaaccctgtccagtccgccaccagtgaga

SEQ ID NO: 662860 - DNA, 75 bp, synthetic construct
  source 1..75: mol_type = other DNA
cgagagctgcattgaagcattccatgaggctgaaaccagcctgaatcacactgctttccgccgtaatcaatggga

SEQ ID NO: 662861 - DNA, 75 bp, synthetic construct
  source 1..75: mol_type = other DNA
aaagagcaatggaatgacacgcgtaatctgcgccagaaagtgaataaacgcactgaaaaagagtgggataaagcc

SEQ ID NO: 662862 - DNA, 75 bp, synthetic construct
  source 1..75: mol_type = other DNA
tatataaagggaaacgcaaggtcaacggtcttgagatttcagagtggtggaataaacagcatgataattatagtt

SEQ ID NO: 662863 - DNA, 75 bp, synthetic construct
  source 1..75: mol_type = other DNA
gcctttgctgagtattcacgatcggcggctaccagcgcaacatgccatagttgcaatggtaccggactaacaacc

SEQ ID NO: 662864 - DNA, 75 bp, synthetic construct
  source 1..75: mol_type = other DNA
gaatcagggcttgagtttaaaataatgaatctattagaatgttgcgatcaggttcttttctatcaagaacaacca

SEQ ID NO: 662865 - DNA, 75 bp, synthetic construct
  source 1..75: mol_type = other DNA
cgcgaacagattacccgcaaggtttcgtacccatggggtaaagctccatactgggcctgccgctctcgtgctgtt

SEQ ID NO: 662866 - DNA, 75 bp, synthetic construct
  source 1..75: mol_type = other DNA
gcgttcttcggtaaagcgggaatcagcaaaacggatgaacagctcgcagttcaggcgctggcgcgatatgcgatg

SEQ ID NO: 662867 - DNA, 75 bp, synthetic construct
  source 1..75: mol_type = other DNA
catacccatggggtaaagcaccatattgggccagtcgatcccgcgctgttcgaccgtcagactgggagaaatgga

SEQ ID NO: 662868 - DNA, 75 bp, synthetic construct
  source 1..75: mol_type = other DNA
tttattaatggtcaatatcgtaatgccattcgcatgtgcatattccagcatcagtatctggcagagcacaaaaca

SEQ ID NO: 662869 - DNA, 75 bp, synthetic construct
  source 1..75: mol_type = other DNA
ctgtctgtcagctggtggataccttaaccacgccggctatcgaagtggataaaggggcagccatcgtggtcattc

SEQ ID NO: 662870 - DNA, 75 bp, synthetic construct
  source 1..75: mol_type = other DNA
tactggagtcggaatttaatatggcgcgcgggccggtaaaattttatgatttcgtgcgcatgggcgcggtggggg

SEQ ID NO: 662871 - DNA, 75 bp, synthetic construct
  source 1..75: mol_type = other DNA
gcggttcgtctcgatggtacgcagttccagttgaaatggatgtggcaaatgttacgtaactgcgacaccagccac

SEQ ID NO: 662872 - DNA, 75 bp, synthetic construct
  source 1..75: mol_type = other DNA
aaatgccgggcaaatttctcctggatatgccgcgccgtgggcggcgccaggcgtgcctttaaaagcgattaaatg

SEQ ID NO: 662873 - DNA, 75 bp, synthetic construct
  source 1..75: mol_type = other DNA
ggagtccagccgcctggctgaagtggaaccggcactggcagaggtcgcgcacaaactgacgggcggtctgcaact

SEQ ID NO: 662874 - DNA, 75 bp, synthetic construct
  source 1..75: mol_type = other DNA
actagcccagtgaccaataagctgtcacaggtaaaaattggaagctttccgcaaacctctctcgcaatggcccgc

SEQ ID NO: 662875 - DNA, 75 bp, synthetic construct
  source 1..75: mol_type = other DNA
cgtcatatgagcggagatattgataatttcccccgcgatgtcgcagagttggtggactggtttgacgcccgcgat

SEQ ID NO: 662876 - DNA, 75 bp, synthetic construct
  source 1..75: mol_type = other DNA
gcagcaagcctttgtgaagctgcgccgtggcgaaaccgggcaactgccgccgccgattcagaatatggatcagtt

SEQ ID NO: 662877 - DNA, 75 bp, synthetic construct
  source 1..75: mol_type = other DNA
ccagcgaaccatgatggctctacgtcgtcatatgagcggggatattgataatttcccccgcgatgtcgcggagct

SEQ ID NO: 662878 - DNA, 75 bp, synthetic construct
  source 1..75: mol_type = other DNA
atttaattaactcaccttttagtagaaaattaatcgcacagcagattaaaacctctgccggacaacacacaatta

SEQ ID NO: 662879 - DNA, 75 bp, synthetic construct
  source 1..75: mol_type = other DNA
aagatgctgttgaacgtcagatgagccatcaggagcgtaataacgttcgcgctgcttacatccaccttgctgaac

SEQ ID NO: 662880 - DNA, 75 bp, synthetic construct
  source 1..75: mol_type = other DNA
atggctctcactgatgtcaaggtaaaaaatgccaagcccgccgacaagcctgtaaagctcactgacggcaacggc

SEQ ID NO: 662881 - DNA, 75 bp, synthetic construct
  source 1..75: mol_type = other DNA
ccaaaagctgggagccgaaattattggtactacgctttctggctataccacacctgaaacgccagaagagcccga

SEQ ID NO: 662882 - DNA, 75 bp, synthetic construct
  source 1..75: mol_type = other DNA
ggattgctggcgatgaccgactgctcaacgccggaagacggcctggcttgccaaaaactgggtgctgagattatt

SEQ ID NO: 662883 - DNA, 75 bp, synthetic construct
  source 1..75: mol_type = other DNA
cgcatcgaaggtgtggcaaatctgaaggccacacgtgcggtagtgagtgtgccgattatcgggattgtgaaacgc

SEQ ID NO: 662884 - DNA, 75 bp, synthetic construct
  source 1..75: mol_type = other DNA
ggagtatcaggggaaaggtctggcaacccgtgccgccaaattagcaatggactatggctttaccgttctcaatct

SEQ ID NO: 662885 - DNA, 75 bp, synthetic construct
  source 1..75: mol_type = other DNA
gatgagtttgtcagcatgtacaacagcgccgcagccggtaccgagcgtgcgttatcaggaaaacctgaaaactaa

SEQ ID NO: 662886 - DNA, 75 bp, synthetic construct
  source 1..75: mol_type = other DNA
tggcgtacttggacttggggggattattcaggaacatgggaaatttggtaactcaaccacaaatgacttctatct

SEQ ID NO: 662887 - DNA, 75 bp, synthetic construct
  source 1..75: mol_type = other DNA
tattaccgccagtgatataacctctcatcagtccctcagcagaaaaatcagtgcccgtcatttcacaggtatttt

SEQ ID NO: 662888 - DNA, 75 bp, synthetic construct
  source 1..75: mol_type = other DNA
ccggttggcggcgaactggaaatggttgatggcaccacgctgtcacactcccttgccggacgccataagattcgt

SEQ ID NO: 662889 - DNA, 75 bp, synthetic construct
  source 1..75: mol_type = other DNA
agtcgaatttctgccacttccaagactgaattcccgttctgaacgctcagaagtgcaggacatcatttcagttgt

SEQ ID NO: 662890 - DNA, 75 bp, synthetic construct
  source 1..75: mol_type = other DNA
cttttactgtctgacctgtcacataacataatacttccgacagagacccatcagaatacatggcaccttttccct

SEQ ID NO: 662891 - DNA, 75 bp, synthetic construct
  source 1..75: mol_type = other DNA
caaatcagtcgcggcgtgaggcattacagggaataagtgacgcagacagacgacgcacagagattgaggcatcaa

SEQ ID NO: 662892 - DNA, 75 bp, synthetic construct
  source 1..75: mol_type = other DNA
ccggttggcggcgagctggaaatggtcgatggcaccacgctgtcacactcccttgccgggcgtcataagattcgt

SEQ ID NO: 662893 - DNA, 75 bp, synthetic construct
  source 1..75: mol_type = other DNA
tctggcgcaggcgctcacccgggcgatgtcggaaatcggtcactgcgccgattgccgcaccttcaccgaacagga

SEQ ID NO: 662894 - DNA, 75 bp, synthetic construct
  source 1..75: mol_type = other DNA
gttgggattacggcaccagcgaactgaaatactacggtgagaaagtcgagaacaaaaaccctggcaacaacttcc

SEQ ID NO: 662895 - DNA, 75 bp, synthetic construct
  source 1..75: mol_type = other DNA
gtattcacccttatttaacctgcaactcgtttatgctggcttcgcaggtggtttattcgctcaacgcccgcacgg

SEQ ID NO: 662896 - DNA, 75 bp, synthetic construct
  source 1..75: mol_type = other DNA
tgatcggccttgcagtttgcacagggaatgcttttaatccagccgtagccgccgaaactaaacaacccaatttag

SEQ ID NO: 662897 - DNA, 75 bp, synthetic construct
  source 1..75: mol_type = other DNA
caaacgcatattccactggcggcgggtgagcgcatgttctcacgcttcgattttaaacgcgtgctggaagctggc

SEQ ID NO: 662898 - DNA, 75 bp, synthetic construct
  source 1..75: mol_type = other DNA
cgccagaactactccgtcagccataatgggcgttgggattacggcaccagcgaactgaaatactacggtgagtaa

SEQ ID NO: 662899 - DNA, 75 bp, synthetic construct
  source 1..75: mol_type = other DNA
agcctggcaaaacgtgaaaaggatgacccgcaaaactcaacgaccaccgataccggagaaacgccgcgtattgaa

SEQ ID NO: 662900 - DNA, 75 bp, synthetic construct
  source 1..75: mol_type = other DNA
atgtttcttataattaccagggatacaatgtttttcaccgcgatgaaaaatattttaagtaagggtaatgtcgtt

SEQ ID NO: 662901 - DNA, 75 bp, synthetic construct
  source 1..75: mol_type = other DNA
gtactacaaaagaagaacaggaaatcaaagatacaaattctgttgaatttttgggaattcggaatcgcaccataa

SEQ ID NO: 662902 - DNA, 75 bp, synthetic construct
  source 1..75: mol_type = other DNA
gccagttggtatgagattcaggcaatgtacgatgattatgttaatctttatgccgatgaaatcatcggctggttt

SEQ ID NO: 662903 - DNA, 75 bp, synthetic construct
  source 1..75: mol_type = other DNA
tccttttgctcatttttaaagcacgtcaactatatcaggatccagaatatcgcccctggtttgaagaacagcaca

SEQ ID NO: 662904 - DNA, 75 bp, synthetic construct
  source 1..75: mol_type = other DNA
taaactcaaacttctgacgatttaccagaatatcagtcagcttaatgaaatctatggtgttgaaggtgccaaaac

SEQ ID NO: 662905 - DNA, 75 bp, synthetic construct
  source 1..75: mol_type = other DNA
gtgagaccgataatccactatctaaagatctgtatgctgcttttcaggttatgtgccatttatacaatggttttg

SEQ ID NO: 662906 - DNA, 75 bp, synthetic construct
  source 1..75: mol_type = other DNA
tggcgatcgaaacccgccacttatacaaacggttcggtgacgttaccgccctggatgacattaatctgcgcattg

SEQ ID NO: 662907 - DNA, 75 bp, synthetic construct
  source 1..75: mol_type = other DNA
agctgagttagctaaaatccttagctacaaatctcaaactattcgtaaatggctttgtcaggacaaattgcctga

SEQ ID NO: 662908 - DNA, 75 bp, synthetic construct
  source 1..75: mol_type = other DNA
tcccggtaacttttgtccagagaaatattacgattattgactttgtcgcgctgcttaatggcagttactgttctg

SEQ ID NO: 662909 - DNA, 75 bp, synthetic construct
  source 1..75: mol_type = other DNA
tattttaagtaagggtaatgtcgttcatatacagaacgaagaggagatcgacttaacattgcatcagaatgcctt

SEQ ID NO: 662910 - DNA, 75 bp, synthetic construct
  source 1..75: mol_type = other DNA
agttaaagatggcataaatgaacgcatcaaaaccgataccagtttatgcctgcctcaggatatcagtgatacatc

SEQ ID NO: 662911 - DNA, 75 bp, synthetic construct
  source 1..75: mol_type = other DNA
acacatggaaattcgcaacagttactccggataaagatgaaaaaaccgagaatacgaccgcatgggaaagggatt

SEQ ID NO: 662912 - DNA, 75 bp, synthetic construct
  source 1..75: mol_type = other DNA
tttaaaccaacagatttcatccagtacacatggaaattcgcaacagttactccggataaagatgaaaaaaccgag

SEQ ID NO: 662913 - DNA, 75 bp, synthetic construct
  source 1..75: mol_type = other DNA
agtttgccttccacgccgacagccgcaaaatctgggcggcgctgtttccggtgatctccaacggctggaagctgc

SEQ ID NO: 662914 - DNA, 75 bp, synthetic construct
  source 1..75: mol_type = other DNA
cctcaaggctctctcccgtctggctgctaagcagggcttcggtggtgaagacgctatcgtcgatatgctggggac

SEQ ID NO: 662915 - DNA, 75 bp, synthetic construct
  source 1..75: mol_type = other DNA
taagacggttaaggctatgctgaacggtgtacttaaggacgctcaagagaacatcccgttccctgtagaagtcct

SEQ ID NO: 662916 - DNA, 75 bp, synthetic construct
  source 1..75: mol_type = other DNA
tggtcgatgtactggaatcctccaagctgttgaagactgtagagcttccggtcctgactggtagcctgaccgcta

SEQ ID NO: 662917 - DNA, 75 bp, synthetic construct
  source 1..75: mol_type = other DNA
cagctttgtcttacccattggctactcatttaatctcgttggatcaatggcctactgctccttcgccacagtttt

SEQ ID NO: 662918 - DNA, 75 bp, synthetic construct
  source 1..75: mol_type = other DNA
acggttaaaacgcatctttataatcttttcaagaagatagccgtaaaaaaccggacacaagcggtttcctgggca

SEQ ID NO: 662919 - DNA, 75 bp, synthetic construct
  source 1..75: mol_type = other DNA
tggcggtaaggctccaactgtggtcactgcgacctctggcaccgagattactgttgagcctatcgaaaaggctat

SEQ ID NO: 662920 - DNA, 75 bp, synthetic construct
  source 1..75: mol_type = other DNA
gctgcgccaacctcaattcggtgaaagcggcgattgcccgtcatggttacgagccggtggttagtcgtgacccgg

SEQ ID NO: 662921 - DNA, 75 bp, synthetic construct
  source 1..75: mol_type = other DNA
gtcgcatgcgcgaacgcctgcgggggctggcgctcatcctgcgtcctgcatcccttcatatctaccgtacagaga

SEQ ID NO: 662922 - DNA, 75 bp, synthetic construct
  source 1..75: mol_type = other DNA
ctctgcgcaccgcccggtgagcgcagtcgcatgcgcgaacgcctgcgggggctggcgctcatcctgcgtcctgca

SEQ ID NO: 662923 - DNA, 75 bp, synthetic construct
  source 1..75: mol_type = other DNA
ccgtggtggcaagcgacctgaagtcgtgaccgctccgtccggcactgaaatcaccgtggagccgattgaacaggc

SEQ ID NO: 662924 - DNA, 75 bp, synthetic construct
  source 1..75: mol_type = other DNA
attacatgcgtgaatggctggcagaacaggggatggtgaaatcgggggaatgcccgccgccggacaccgtttatg

SEQ ID NO: 662925 - DNA, 75 bp, synthetic construct
  source 1..75: mol_type = other DNA
gggacgacccgtatacattcgcaattaaaatatatctgctaaaaagtatggggttagatttagagctattgaata

SEQ ID NO: 662926 - DNA, 75 bp, synthetic construct
  source 1..75: mol_type = other DNA
aagcgcctgcaagtcgtcgccacctgtgcaaagtcaacgaccggagccagcagcatgggcgatggagaaagccca

SEQ ID NO: 662927 - DNA, 75 bp, synthetic construct
  source 1..75: mol_type = other DNA
cagattttcaatttcatcagaataacgacagttttaccctacattttcaacaacgtcttattttaacccatagca

SEQ ID NO: 662928 - DNA, 75 bp, synthetic construct
  source 1..75: mol_type = other DNA
tgtgctgacacatacatctccctgctggaaaaattaaccgccctgctgggacgccagccagaactgcccgactgg

SEQ ID NO: 662929 - DNA, 75 bp, synthetic construct
  source 1..75: mol_type = other DNA
atcggtaaaccgccggtcttttatcgcgccgatagcgaatgggcggcactgttcgcgtcgttaaaaagcatctaa

SEQ ID NO: 662930 - DNA, 75 bp, synthetic construct
  source 1..75: mol_type = other DNA
ttacgctgacgtaccagcaagacagccacgcacagcggagtatcggcaataacgcagcaagacttgttaaaggta

SEQ ID NO: 662931 - DNA, 75 bp, synthetic construct
  source 1..75: mol_type = other DNA
gacgcggaaaccatcgcccattttgcccgtatgaccaccgtcttcaccaccctgaaaccttacctgaaagaggcc

SEQ ID NO: 662932 - DNA, 75 bp, synthetic construct
  source 1..75: mol_type = other DNA
accgtacctcgcattacccttatgccgaagagatgctcgactgggcagatgaacatggcatcgtggtgattgatg

SEQ ID NO: 662933 - DNA, 75 bp, synthetic construct
  source 1..75: mol_type = other DNA
tgcgctggtgtgattgattttgctgatgcggtgcgtctggttgagatgcgtggcaagttcatgcaggaagctgta

SEQ ID NO: 662934 - DNA, 75 bp, synthetic construct
  source 1..75: mol_type = other DNA
tgtgaaatgcgaaaccaatggtgatgccatccgtgacgcactggtacgtcagttgtataacccggttcagtggac

SEQ ID NO: 662935 - DNA, 75 bp, synthetic construct
  source 1..75: mol_type = other DNA
ccaccctgtttgagatgaagcgtagcaaagagctgctgctgcgctggtgtgatttcagcgccttcacgccgatga

SEQ ID NO: 662936 - DNA, 75 bp, synthetic construct
  source 1..75: mol_type = other DNA
tggacgctctatctgccagacgataactggatccatgcctggaccggagaaaccttctgcggtggagaaattacc

SEQ ID NO: 662937 - DNA, 75 bp, synthetic construct
  source 1..75: mol_type = other DNA
ggcaacaagccgaaagaactgtacagcgaagaggcagtcaacggggaaactcagcaggcgcacttacaggcgatt

SEQ ID NO: 662938 - DNA, 75 bp, synthetic construct
  source 1..75: mol_type = other DNA
gaagcaggttacaacatcgaaccggatcaggtacgcgtggagtcgctggtgcctacccattgcgaaggcggcagc

SEQ ID NO: 662939 - DNA, 75 bp, synthetic construct
  source 1..75: mol_type = other DNA
atgtcacaaaccgttcatttccagggcaacccggttacagtcgccaattccatcccgcaggcgggtagcaaagcg

SEQ ID NO: 662940 - DNA, 75 bp, synthetic construct
  source 1..75: mol_type = other DNA
catcccgcaggcgggtagcaaagcgcagacttttactctcgtggcaaaagatctgtctgacgtcaccctcggtca

SEQ ID NO: 662941 - DNA, 75 bp, synthetic construct
  source 1..75: mol_type = other DNA
acagctttggaaacgctttatgttgagctattcattaattctatagagaaagatgatgtctacatagccaattgt

SEQ ID NO: 662942 - DNA, 75 bp, synthetic construct
  source 1..75: mol_type = other DNA
atgatattatttttggtattaaatttaacgagcttatctcatatgttgaaagtaggtataaatatctagaaaaac

SEQ ID NO: 662943 - DNA, 75 bp, synthetic construct
  source 1..75: mol_type = other DNA
gctgccgttgctgcgtctggatgaggccagcgaactggcgcgcctggcggctcccgttcttcacgcccgtacttt

SEQ ID NO: 662944 - DNA, 75 bp, synthetic construct
  source 1..75: mol_type = other DNA
atgaagccctatgacaaggataaaaataaacgcacgccgtatcttcagcttattgattcctttttctttttcact

SEQ ID NO: 662945 - DNA, 75 bp, synthetic construct
  source 1..75: mol_type = other DNA
ttttttctttttcacttctgttcacgctgaacaaacggccgctcccgcgaaacctgtaactgtggaagcgaagaa

SEQ ID NO: 662946 - DNA, 75 bp, synthetic construct
  source 1..75: mol_type = other DNA
ccggagttaaccctttcacgtccgtatgcggctcgtgcgatggaagcgattggtaaaccttttgagaaaggcgga

SEQ ID NO: 662947 - DNA, 75 bp, synthetic construct
  source 1..75: mol_type = other DNA
cgtcacgatagtcactgacagaagctacaacactgaacataatgattttgagaagcgaaaagagaagcagcaaaa

SEQ ID NO: 662948 - DNA, 75 bp, synthetic construct
  source 1..75: mol_type = other DNA
gccgtttcttcagcttattgattccttttttctttttcacttctgttcacgctgaacaaacggcatctcccgcga

SEQ ID NO: 662949 - DNA, 75 bp, synthetic construct
  source 1..75: mol_type = other DNA
caaactggcgcgcctgctggcgaccaaaggcatcacccatgaaatccagatcccggatatctcgaccaaagagaa

SEQ ID NO: 662950 - DNA, 75 bp, synthetic construct
  source 1..75: mol_type = other DNA
aaaattaggggagagctaatcaggtcaatcaaggaacacttgatcagtgcaagctggcatagcactaaaaaggta

SEQ ID NO: 662951 - DNA, 75 bp, synthetic construct
  source 1..75: mol_type = other DNA
caacgattattgatggtgaagaagacagcgcccggcgcatgggattcgaaaccattctgccgttgcgtgaaggta

SEQ ID NO: 662952 - DNA, 75 bp, synthetic construct
  source 1..75: mol_type = other DNA
ttgatgtcactaatgttaagcaattaagtgatacaaattatcaattaaccttaaaaacaagttcatcaatgagat

SEQ ID NO: 662953 - DNA, 75 bp, synthetic construct
  source 1..75: mol_type = other DNA
ttattgttttattttcagtccgtgcatactccgatgatgttaactactgtgaactcatatgggaaccggtcagtg

SEQ ID NO: 662954 - DNA, 75 bp, synthetic construct
  source 1..75: mol_type = other DNA
ggcgtccgcgaccgggcattcgaagaatgggagcagatcatcatagataacgcattgctcctgaatgctgattaa

SEQ ID NO: 662955 - DNA, 75 bp, synthetic construct
  source 1..75: mol_type = other DNA
agagtttgctgacaagcataacgttgaggtgcgcagggaagggggaagtaaagctctgcgcatgtaccgtccgga

SEQ ID NO: 662956 - DNA, 75 bp, synthetic construct
  source 1..75: mol_type = other DNA
tatactgaaggttggtataatttttgctctgcagataacgatagtacaaccttgctaaaacttagaatgatgctg

SEQ ID NO: 662957 - DNA, 75 bp, synthetic construct
  source 1..75: mol_type = other DNA
aagccatcaggattttgcaggaagccgctgatgtggatgctgacggcatcatcggcccgcgtacccgtaaggccg

SEQ ID NO: 662958 - DNA, 75 bp, synthetic construct
  source 1..75: mol_type = other DNA
tatgtcaatgaccccacagaccgtggcggcgaaaccaaatacggcatttctgaccgccgcgacggtgtgattgac

SEQ ID NO: 662959 - DNA, 75 bp, synthetic construct
  source 1..75: mol_type = other DNA
cctttgaacatgcgctgaattttattctgcgtcctgatatcgaaggcgtctatgtcaatgaccccacagaccgtg

SEQ ID NO: 662960 - DNA, 75 bp, synthetic construct
  source 1..75: mol_type = other DNA
gtttctggcagtgaaatcgacctgcagctgcgctgtagctacacgccggatcaaggttccacgcgcattgaacgc

SEQ ID NO: 662961 - DNA, 75 bp, synthetic construct
  source 1..75: mol_type = other DNA
ctgttcgcccgtgagcagagcacgctttcggcgcgtaccggctttgaatttgtgctggcaggcgtggtggacagc

SEQ ID NO: 662962 - DNA, 75 bp, synthetic construct
  source 1..75: mol_type = other DNA
atcgccggtaaaaacacccgcgcagccgttgaaggtgctgaccctgactggctgctgaaccgtttatttctgcgt

SEQ ID NO: 662963 - DNA, 75 bp, synthetic construct
  source 1..75: mol_type = other DNA
aatgcttttggtattactacaaagctggtaaatcgcgttcatagcaaaattgttattggtgatgatagtttgctg

SEQ ID NO: 662964 - DNA, 75 bp, synthetic construct
  source 1..75: mol_type = other DNA
cagactcccccgtacctcgggactggcgcgtcataccgataacatcgaagccatgtggagtgggctacgcacatt

SEQ ID NO: 662965 - DNA, 75 bp, synthetic construct
  source 1..75: mol_type = other DNA
atcgctgtcactaatcccccggtgtatgattttgctgactttcttaacgataatctggcgaaaattgttggcgtg

SEQ ID NO: 662966 - DNA, 75 bp, synthetic construct
  source 1..75: mol_type = other DNA
gccgtcgcagcaccgtttaagtcgttgtcactgctgatgcgcacgctggtgttactttcgcttggtcaaatttgg

SEQ ID NO: 662967 - DNA, 75 bp, synthetic construct
  source 1..75: mol_type = other DNA
gctctggaccttgcttacatcggtgtgacggctaatcaggttggtgacaacctgaaacgcggttacacctgcgta

SEQ ID NO: 662968 - DNA, 75 bp, synthetic construct
  source 1..75: mol_type = other DNA
tgactgcgccgctggcgttcctgctgcttcatgcctacatcatctatgcgccagcgttgatgatcgccctgttcg

SEQ ID NO: 662969 - DNA, 75 bp, synthetic construct
  source 1..75: mol_type = other DNA
ccagttcgcaaacagatgtttacaccgtcgcacgtattatcgccccactacgcccgaccaacgtcgccgactacc

SEQ ID NO: 662970 - DNA, 75 bp, synthetic construct
  source 1..75: mol_type = other DNA
gacagaaaatgatacggatattctggtcggcgcgtataaaggaaaatatctgtggtatactgccccggattttgt

SEQ ID NO: 662971 - DNA, 75 bp, synthetic construct
  source 1..75: mol_type = other DNA
agtaaaacgcatcagtttaacccgcttttctatattgatttaaaagaagagagcggggctaaagacctgctgaag

SEQ ID NO: 662972 - DNA, 75 bp, synthetic construct
  source 1..75: mol_type = other DNA
aatactggacaggactggctaagttgcttcatttctttattaactatgagccgtcctggcttaatgagttcgggc

SEQ ID NO: 662973 - DNA, 75 bp, synthetic construct
  source 1..75: mol_type = other DNA
ttttgtacctgggcctgtgcgcacttcacgaataacgtcgcgtatgcatttcaactggcgggctacacggctgcc

SEQ ID NO: 662974 - DNA, 75 bp, synthetic construct
  source 1..75: mol_type = other DNA
tctcgatgaaccctactgggcgatgacctcggctgcggtggtaagcttccccaccgttggtggtgtcatcagcaa

SEQ ID NO: 662975 - DNA, 75 bp, synthetic construct
  source 1..75: mol_type = other DNA
ccaactcgcaaacaaatttttacaccgttgcgcgcattattgccccgctacgcccaaccaacttagccgactacc

SEQ ID NO: 662976 - DNA, 75 bp, synthetic construct
  source 1..75: mol_type = other DNA
tggtcaatcgcgttcatagcaaaattgttattggtgatgatggtttgctgtgcgtgggatcgttcaactggttta

SEQ ID NO: 662977 - DNA, 75 bp, synthetic construct
  source 1..75: mol_type = other DNA
cgatagcggcctggttggcagagaaccagcaaaatattgaagcgcattacggcaaatcgcttcatgaagttgtcg

SEQ ID NO: 662978 - DNA, 75 bp, synthetic construct
  source 1..75: mol_type = other DNA
agaagcgaaaagagaagcagcagaaccttaaagcggcgctggagaaactgaatgcgctgggtattgctacaaagc

SEQ ID NO: 662979 - DNA, 75 bp, synthetic construct
  source 1..75: mol_type = other DNA
ctaacgacattgagcaatatctcgataatttaaataaattactttccggacaagaacaaaaagtcactctactga

SEQ ID NO: 662980 - DNA, 75 bp, synthetic construct
  source 1..75: mol_type = other DNA
atatcgcgccggtgaatcactgatctattcattattttcctggctcccggcggttcgtagtaagcgacagtacca

SEQ ID NO: 662981 - DNA, 75 bp, synthetic construct
  source 1..75: mol_type = other DNA
tcgcgttcatagcaaaattgttattggtgatgatagtttgctgtgcgtgggatcgttcaactggtttagcgcaac

SEQ ID NO: 662982 - DNA, 75 bp, synthetic construct
  source 1..75: mol_type = other DNA
ccgctgaaaggtctggctgcccgcgcagttgtcgtcattgatgaaaatgacaatgtgattttcagtcagttggtg

SEQ ID NO: 662983 - DNA, 75 bp, synthetic construct
  source 1..75: mol_type = other DNA
aaatgaagacatcaaagccgataccagtttacgcctgtcaaagacaaatataagtgatacgtcgctaaaccgtta

SEQ ID NO: 662984 - DNA, 75 bp, synthetic construct
  source 1..75: mol_type = other DNA
ataaacacatcacgatagtttctccatggctgacctggcaaaagctggagcaaacgggttttcttgattccatga

SEQ ID NO: 662985 - DNA, 75 bp, synthetic construct
  source 1..75: mol_type = other DNA
atggatgatttctccgccaaaccgggcgtaccgaacgtttacgggctggtgggcggtgatgccaacgccgtcggg

SEQ ID NO: 662986 - DNA, 75 bp, synthetic construct
  source 1..75: mol_type = other DNA
agaaacgaaaagagaagcagcagaatcttaaagggacgctggaaaaactgaatgcttttggtattactacaaagc

SEQ ID NO: 662987 - DNA, 75 bp, synthetic construct
  source 1..75: mol_type = other DNA
tggtatgtacctatatgaacaccgccggtgcttcgataatattattggatactgtaatacgctctgctatcacgg

SEQ ID NO: 662988 - DNA, 75 bp, synthetic construct
  source 1..75: mol_type = other DNA
cgcccctggtttgaagaacagcacagagtactctctgcattacgtgccaatacagagctcctgagaatctttaga

SEQ ID NO: 662989 - DNA, 75 bp, synthetic construct
  source 1..75: mol_type = other DNA
gggtgatcccggcgggcaacctctacattagcggcgaaaagcgccgcggagaggccgatgtcgccgagggcgcgg

SEQ ID NO: 662990 - DNA, 75 bp, synthetic construct
  source 1..75: mol_type = other DNA
catcactgaatcgacgatgatcggccacaatccgaaaacaccaggcggcatgggcctaggcataggagtcactat

SEQ ID NO: 662991 - DNA, 75 bp, synthetic construct
  source 1..75: mol_type = other DNA
gcaaccaggactcaacaacgtgccgatgcatggcgggaacaacatgattatcaagctgtttcacgccgtctggtt

SEQ ID NO: 662992 - DNA, 75 bp, synthetic construct
  source 1..75: mol_type = other DNA
gtgtgatattcgtggtgaagcaggcacgcacgcaggcggcatgctggagcgggtgcgaaaggtaatggcgtccct

SEQ ID NO: 662993 - DNA, 75 bp, synthetic construct
  source 1..75: mol_type = other DNA
aggcgatgagcgcctgcgcgcccgtgtgtgatattcgtggtgaagcaggcacgcacgcaggcggcatgctggagc

SEQ ID NO: 662994 - DNA, 75 bp, synthetic construct
  source 1..75: mol_type = other DNA
gtgaggagatggatttccttgaggcggtttggtttatcaatgaagcgctggatcgcggcgtcaacgtggtggcgg

SEQ ID NO: 662995 - DNA, 75 bp, synthetic construct
  source 1..75: mol_type = other DNA
gaccttgatggcattaacaacaatgatttcaatagtgccgaaataaaactaaaggacaaaaagaaaactaagaca

SEQ ID NO: 662996 - DNA, 75 bp, synthetic construct
  source 1..75: mol_type = other DNA
tctcaccctgaaaaaggtcagcgaggatatcagggagaagctggcggaaattaccaacgatgatgtgctgtctat

SEQ ID NO: 662997 - DNA, 75 bp, synthetic construct
  source 1..75: mol_type = other DNA
acgctatccggtacgctgtacccggaaatcagcggcggcgatgtgtcgctcactacgctggagacaatggcatac

SEQ ID NO: 662998 - DNA, 75 bp, synthetic construct
  source 1..75: mol_type = other DNA
ggaattcgttaaacgctttgccgaacgcgccaaccgtctgcgcgtgggcgatccgaacgatccgaatacccaggt

SEQ ID NO: 662999 - DNA, 75 bp, synthetic construct
  source 1..75: mol_type = other DNA
gtgagctggcgctggaagctggtattccggcgggcgtgctgaacgtggtacagggctacggcgcaaccgcaggcg

SEQ ID NO: 663000 - DNA, 75 bp, synthetic construct
  source 1..75: mol_type = other DNA
tggcgatgagagcggaagattatgccgaagaggcgctggcctggatgaaatcggatggcattgtggcagagatac

SEQ ID NO: 663001 - DNA, 75 bp, synthetic construct
  source 1..75: mol_type = other DNA
gctgagcgagtcgcggatgagcaatctaacgttgttaagaagatggtctttgaaacgctgaaaaatatttatagc

SEQ ID NO: 663002 - DNA, 75 bp, synthetic construct
  source 1..75: mol_type = other DNA
agggcgtgccggacattctctcttttggtgacgaattatcgccgcaaaatgtgcaggtccgctggcgtgaagcgg

SEQ ID NO: 663003 - DNA, 75 bp, synthetic construct
  source 1..75: mol_type = other DNA
ccaggcggccgctattttaagtggtttgaccgctgagcaatccactattgagcgcgcgctggccatgaactggct

SEQ ID NO: 663004 - DNA, 75 bp, synthetic construct
  source 1..75: mol_type = other DNA
cagtctcgcctggcgttcgcttgccgatcatcaaagtgccgccgctaacgacattcgtcagatgattcaggataa

SEQ ID NO: 663005 - DNA, 75 bp, synthetic construct
  source 1..75: mol_type = other DNA
aaaggcggggtgattgtttatccaaccgattctggctatgcgctcggttgtaaaatcgaagataaaaatgcgatg

SEQ ID NO: 663006 - DNA, 75 bp, synthetic construct
  source 1..75: mol_type = other DNA
tatctcgggcagaaaccaacaacggttattgatcttaccgatgatacgccggtcgtggtgcgtgaaggcgtaggt

SEQ ID NO: 663007 - DNA, 75 bp, synthetic construct
  source 1..75: mol_type = other DNA
ctggtcaatgtcgaattaacctcgtcgctgaaaggtaaacctgtttctgcgcagctaacggtaggcgtggtcgat

SEQ ID NO: 663008 - DNA, 75 bp, synthetic construct
  source 1..75: mol_type = other DNA
cagctggcgcgaattctgcatccgtttgtcggcgtggttatgttcgcctcgttcatcatcatgtttttccgttac

SEQ ID NO: 663009 - DNA, 75 bp, synthetic construct
  source 1..75: mol_type = other DNA
gatgggttaccagcgcttgggcgaagaaacatcacccgcgctggtaccgtgaggtccgcaagacaacggaaaaga

SEQ ID NO: 663010 - DNA, 75 bp, synthetic construct
  source 1..75: mol_type = other DNA
caggttctgtatatcgccacttcgcaaatccttgatgatgagatggcggcacggattgagcatcatcggcagggg

SEQ ID NO: 663011 - DNA, 75 bp, synthetic construct
  source 1..75: mol_type = other DNA
ctcgttatgtgcgttcctatgcacctgcgcagcaaagtgttgcggcagggtgtgaatggaccgggatgcaggtga

SEQ ID NO: 663012 - DNA, 75 bp, synthetic construct
  source 1..75: mol_type = other DNA
ggccagccaggcgctcggcgtaacgcaacaaccggaatactggcagcatatgctcgacagttatgccgagcaggc

SEQ ID NO: 663013 - DNA, 75 bp, synthetic construct
  source 1..75: mol_type = other DNA
gatgcagttctgcgctatggtcaggtggaagtaccgctcccgccgggggctgacgttgagaggacaacgtggggc

SEQ ID NO: 663014 - DNA, 75 bp, synthetic construct
  source 1..75: mol_type = other DNA
ccagagtgcgaataaaaccaactcctggcggcacgtcaaaaacgatcgcgtggggaaatccccgcgctatcagtt

SEQ ID NO: 663015 - DNA, 75 bp, synthetic construct
  source 1..75: mol_type = other DNA
aatggattctgcacaagttacgggagctacaagctcttatgcacgcaagtattgcctcaatggtttattcggcat

SEQ ID NO: 663016 - DNA, 75 bp, synthetic construct
  source 1..75: mol_type = other DNA
atggaaagagagtttagcgcaaaagcatcattaaaccgaaatataaaattttggtttgagcaatgtgggttatct

SEQ ID NO: 663017 - DNA, 75 bp, synthetic construct
  source 1..75: mol_type = other DNA
aacgcagtgccgatggcgagctgctgttcgcgacccgtaaccgcttgagtagcgttgttccactgtcgccagacg

SEQ ID NO: 663018 - DNA, 75 bp, synthetic construct
  source 1..75: mol_type = other DNA
tgctttacttttctgaccatggactgtcagtcagcgacagtactaatcctgttcatcatgatggccatgtgcagg

SEQ ID NO: 663019 - DNA, 75 bp, synthetic construct
  source 1..75: mol_type = other DNA
gtatatggttatcccgtgccaaccacaccgtggctgaatacggctcccggtttatttattgacggctatacatcg

SEQ ID NO: 663020 - DNA, 75 bp, synthetic construct
  source 1..75: mol_type = other DNA
gaagatgctcgaagggacgccggagcagcacaaagcgcaggacgtttacaacatcagacgagacgaattagaagg

SEQ ID NO: 663021 - DNA, 75 bp, synthetic construct
  source 1..75: mol_type = other DNA
gtgccgtctaccgctcatcagttgctgatgcgctgccaggcgttacttattcaactgctccataacggctggcgc

SEQ ID NO: 663022 - DNA, 75 bp, synthetic construct
  source 1..75: mol_type = other DNA
actacggcggcatttctaaaacagccattgcgttaggggttacccatagcgcggtgtgtcaatgggggaatgtaa

SEQ ID NO: 663023 - DNA, 75 bp, synthetic construct
  source 1..75: mol_type = other DNA
acgttatcccttccggcatctgcctgttctccttttgccgttgaacgcatggcggcgcttttgcaacaaacagac

SEQ ID NO: 663024 - DNA, 75 bp, synthetic construct
  source 1..75: mol_type = other DNA
gaacgcatggcggcgcttttgcaacaaacagacgaccccgtgtgtctggtttctggctttgtcagttttgttgat

SEQ ID NO: 663025 - DNA, 75 bp, synthetic construct
  source 1..75: mol_type = other DNA
acaatttcgtaatacagaaagcgaggcacgggtagaagcaatgaataacggtgttttgctttgcgaacaattatt

SEQ ID NO: 663026 - DNA, 75 bp, synthetic construct
  source 1..75: mol_type = other DNA
acatcctctccgaaggtcattttcctgcacatgatgggttctcatccgaatccatgtgaccggcttaactcctgg

SEQ ID NO: 663027 - DNA, 75 bp, synthetic construct
  source 1..75: mol_type = other DNA
cacgccgggcaactacaccttcatcctgaaagggacgaaggaggtgccacgccgtctgttgcaggaaaaacgcaa

SEQ ID NO: 663028 - DNA, 75 bp, synthetic construct
  source 1..75: mol_type = other DNA
gagcgtatttgtcgaattcgccagctgccggacggtcacaactttaccctgatgtgtcgcgatctttctgagctc

SEQ ID NO: 663029 - DNA, 75 bp, synthetic construct
  source 1..75: mol_type = other DNA
ttcggctggccccgcgtaataactttatggctgacgttattgagcggcggcgtcactggacgcaggaactgttgt

SEQ ID NO: 663030 - DNA, 75 bp, synthetic construct
  source 1..75: mol_type = other DNA
atgagtcagtttttttatatccatccagataatccgcaacagcgtctgatcaaccaggcggtggagattgtgcgt

SEQ ID NO: 663031 - DNA, 75 bp, synthetic construct
  source 1..75: mol_type = other DNA
gccgtttgttgcaggaaaaacgcaaaaccatcgggatgcgcgtgccgtcaaaccccatcgcccaggcgttacttg

SEQ ID NO: 663032 - DNA, 75 bp, synthetic construct
  source 1..75: mol_type = other DNA
caccggaacccttccggcttgccgctgattttacgattgttttttgccgtcagcacccggcaatcttcctcattg

SEQ ID NO: 663033 - DNA, 75 bp, synthetic construct
  source 1..75: mol_type = other DNA
attcatggtgattttctggcggacacaccaccgcggtcaccgtaactggctggcactgctgctattcgtattatg

SEQ ID NO: 663034 - DNA, 75 bp, synthetic construct
  source 1..75: mol_type = other DNA
tcggtcagcgacagtgccaatcctgttcatcattatggtcatgtgcagggaggctacagtgtgccactgattatt

SEQ ID NO: 663035 - DNA, 75 bp, synthetic construct
  source 1..75: mol_type = other DNA
attgtttttattcttttttgttgtttctgcaataaccacaattgcatgcggatacactgagaagaatgccaccgg

SEQ ID NO: 663036 - DNA, 75 bp, synthetic construct
  source 1..75: mol_type = other DNA
atgaccacggttatcgcgctggctaacgggaaaggcggggtgaaaaagtcctcgatgtcacgggctatcgctaca

SEQ ID NO: 663037 - DNA, 75 bp, synthetic construct
  source 1..75: mol_type = other DNA
cagattgaatccgggcaatgggatttgattgtcatcgacagtgcggcgtatgccactaaatcgttactcagcctg

SEQ ID NO: 663038 - DNA, 75 bp, synthetic construct
  source 1..75: mol_type = other DNA
gacaacccgaactcccaagccgttgtacttcgcataaacagccctggcggtagccccgttcaagctgggcggatt

SEQ ID NO: 663039 - DNA, 75 bp, synthetic construct
  source 1..75: mol_type = other DNA
tgttactctcattaatcagtggcgactactggtggatagtcattatacccgttggcgcgcatatcagtttttcgc

SEQ ID NO: 663040 - DNA, 75 bp, synthetic construct
  source 1..75: mol_type = other DNA
acacgctcgacgccatttgtgtccggtattacgggcgcactgagggcgtggttgagaccgtgctcgccgcaaatc

SEQ ID NO: 663041 - DNA, 75 bp, synthetic construct
  source 1..75: mol_type = other DNA
atataaaagacaaccagttggttaacgcgggtgatactctgttctctatcgataaaacgccctttcagattgctg

SEQ ID NO: 663042 - DNA, 75 bp, synthetic construct
  source 1..75: mol_type = other DNA
ttattactattccggttgaagaaacattacctgtggcacaatatgccgcggtatggtcgaaaaattatcgtatta

SEQ ID NO: 663043 - DNA, 75 bp, synthetic construct
  source 1..75: mol_type = other DNA
ttaaaacgccaccagagcatattattgcggattacattcttcgctttatgaagaacaataaagaggcaaaactct

SEQ ID NO: 663044 - DNA, 75 bp, synthetic construct
  source 1..75: mol_type = other DNA
cgctcttcattaagcaaagtctgtcgatctcgttccagggcggctcttaaagaggagtgtgaacaactcattcca

SEQ ID NO: 663045 - DNA, 75 bp, synthetic construct
  source 1..75: mol_type = other DNA
gctatcgtggaagaaatggttttaagtggttcttattctgttgatgatattcatgatgacggctgtttaacatat

SEQ ID NO: 663046 - DNA, 75 bp, synthetic construct
  source 1..75: mol_type = other DNA
gattaccgcacctacaggcgatatatttaatccagctaatgggcctcttgcaaactatctaaataaaggtgatag

SEQ ID NO: 663047 - DNA, 75 bp, synthetic construct
  source 1..75: mol_type = other DNA
accaggagaccatacactgtactcacctcaatatgttgtcacagcaaagcatgttaatggatcagatataatgag

SEQ ID NO: 663048 - DNA, 75 bp, synthetic construct
  source 1..75: mol_type = other DNA
atggcaactggcgcaaacggaaattcgcgccccggtgagtggatgggtgactaacctcactacccgcatcggcga

SEQ ID NO: 663049 - DNA, 75 bp, synthetic construct
  source 1..75: mol_type = other DNA
tcctgatgtgaaacctaacgtcccctgggtgcgtctcgcccaacgcgttcccgtccgctttgctctggataaagt

SEQ ID NO: 663050 - DNA, 75 bp, synthetic construct
  source 1..75: mol_type = other DNA
ctaacctcactacccgcatcggcgattacgctgacaccgggaaaccgctgtttgcccttgtcgacagccactcgt

SEQ ID NO: 663051 - DNA, 75 bp, synthetic construct
  source 1..75: mol_type = other DNA
aagccggatacccggctcacgttacgcagaagcggacagcgacggcgatattgaagtcgggtatttccgtaaggt

SEQ ID NO: 663052 - DNA, 75 bp, synthetic construct
  source 1..75: mol_type = other DNA
aatcttgagtgatttcattctggcgaatagccaaaaagacgaagccacaagcgacgctttactacaggaactgaa

SEQ ID NO: 663053 - DNA, 75 bp, synthetic construct
  source 1..75: mol_type = other DNA
ccaacaaaggaagggtattgctcagccaatattaatgtcactgagcatatgtcagaggttgtaaaaagcagagag

SEQ ID NO: 663054 - DNA, 75 bp, synthetic construct
  source 1..75: mol_type = other DNA
aagtggtaatgttcgaagtagtgggctttatcaaaatccacaagatatgagtgcgatagtattattctattcttg

SEQ ID NO: 663055 - DNA, 75 bp, synthetic construct
  source 1..75: mol_type = other DNA
ggatatcaggcccctgacatcaactgaagccacacaactggattcacggcgtcacgcattcaggaaaaacgccgt

SEQ ID NO: 663056 - DNA, 75 bp, synthetic construct
  source 1..75: mol_type = other DNA
ttactgcccacaaagcagaaagataaaccagcaaaagagcgggtcttcgccgcgctcaaagacgttatcgccctg

SEQ ID NO: 663057 - DNA, 75 bp, synthetic construct
  source 1..75: mol_type = other DNA
gaaaacttgggccactggagtgatgcttattggtgaagtcgacctgctcaacgcgttgccagaacgcctaaaaac

SEQ ID NO: 663058 - DNA, 75 bp, synthetic construct
  source 1..75: mol_type = other DNA
tattcgatatggacggtacgctggttgattcaacagccgtagtggaaagcgtctggagagatttttgtgcagaat

SEQ ID NO: 663059 - DNA, 75 bp, synthetic construct
  source 1..75: mol_type = other DNA
gtgatgtgactgaagaagaaggtaacattgttatttatactgaacctactgaccttcataaaggaatcgcggcgc

SEQ ID NO: 663060 - DNA, 75 bp, synthetic construct
  source 1..75: mol_type = other DNA
tgcaacgtctaaaatttatgcaaaattcggtgtagaaatctatgctgctgccaaacaaggtgaacccgatccaga

SEQ ID NO: 663061 - DNA, 75 bp, synthetic construct
  source 1..75: mol_type = other DNA
aaactttattttgggggttggtactgtgccagttgtaaccgaaaacttgcttttatttttactttttgtttttgg

SEQ ID NO: 663062 - DNA, 75 bp, synthetic construct
  source 1..75: mol_type = other DNA
gtaatagctgttcagcctgacgctctgggatcatctgaagcccatgccgtcagcgaactgtctgacattatggtc

SEQ ID NO: 663063 - DNA, 75 bp, synthetic construct
  source 1..75: mol_type = other DNA
attgatacactaacgcattttattggtgcaggtgagaaaaccaataaaatcgcggcctcactcgaagaggttgaa

SEQ ID NO: 663064 - DNA, 75 bp, synthetic construct
  source 1..75: mol_type = other DNA
acattcaaggccggaacccagcagattggattcagtaatatcacgccagaaatcaggacagaaaatacggataca

SEQ ID NO: 663065 - DNA, 75 bp, synthetic construct
  source 1..75: mol_type = other DNA
gggtgacctgcgggatactcagggggatgctggtgtctgggcgcgtatcatgaacggtaccggttcggcagatgg

SEQ ID NO: 663066 - DNA, 75 bp, synthetic construct
  source 1..75: mol_type = other DNA
aggaaagccggggtattattcacctgtaatctcgactacagaaggaattcatctcggtgagcgggccagcctttc

SEQ ID NO: 663067 - DNA, 75 bp, synthetic construct
  source 1..75: mol_type = other DNA
tttattaatagtagtctgcttctcgaaaaaggagcaaaactgactgcacagagtggtattttcacaaataacact

SEQ ID NO: 663068 - DNA, 75 bp, synthetic construct
  source 1..75: mol_type = other DNA
cctttacccgtcttcaggcggctgactacggggccatcatcaccaataacagtgagaaaaaatcaacggtaacac

SEQ ID NO: 663069 - DNA, 75 bp, synthetic construct
  source 1..75: mol_type = other DNA
actcaggatttccttggtcagcaaccgcaaaatgactttgacaaaaccatagcctacacctctggtaagggggca

SEQ ID NO: 663070 - DNA, 75 bp, synthetic construct
  source 1..75: mol_type = other DNA
ccaggtgtacaccaatgggggatttctgacaggaggaaccgtcagcgcgctgagctcctataataacggacagat

SEQ ID NO: 663071 - DNA, 75 bp, synthetic construct
  source 1..75: mol_type = other DNA
ttcgctcagaactggatcttttatcaaaaaagatcatgcctggttgtggtcttgtttttgagctgtatcaacgtc

SEQ ID NO: 663072 - DNA, 75 bp, synthetic construct
  source 1..75: mol_type = other DNA
ctgggcgacggactgaacaatacgctgacctggctgtgggataactggtacggcaaatctcgccgcgtgatgcag

SEQ ID NO: 663073 - DNA, 75 bp, synthetic construct
  source 1..75: mol_type = other DNA
ggcatttcggtcaataaacctaacgctggaaaacagcaggggcaattgctggaaaaagcgcgaaatgaaatgggc

SEQ ID NO: 663074 - DNA, 75 bp, synthetic construct
  source 1..75: mol_type = other DNA
tccggtgattcatgcaggaatgacaacctcagccggccagagtgattgggaaaaccgtcagtttacaatggataa

SEQ ID NO: 663075 - DNA, 75 bp, synthetic construct
  source 1..75: mol_type = other DNA
ctaatcttctggtcagaaaacactctctgattgcgttagatccaaaacaggaattgtggaaaatcaccagtaagg

SEQ ID NO: 663076 - DNA, 75 bp, synthetic construct
  source 1..75: mol_type = other DNA
cagcacgttcaaatggagatttgaggtcaatcatttatgatgcgagaatatccagcggaaacgctgtgtctcact

SEQ ID NO: 663077 - DNA, 75 bp, synthetic construct
  source 1..75: mol_type = other DNA
cacgttcagattggtgccgacagaaagcatgagctggacggtgtggatttgttcacgggtgcattactgacctat

SEQ ID NO: 663078 - DNA, 75 bp, synthetic construct
  source 1..75: mol_type = other DNA
acggaccaaacatggaccggaggtggtatcattactgaaaaaggtgtaaatgtgctttggcaggttaatggtgtt

SEQ ID NO: 663079 - DNA, 75 bp, synthetic construct
  source 1..75: mol_type = other DNA
tctacgcgttcctgcgagagccgcagcgggtaatgagcgcggtacgaaaagtgctctctgcgccgcagcaaaccc

SEQ ID NO: 663080 - DNA, 75 bp, synthetic construct
  source 1..75: mol_type = other DNA
atggcatacctggtggcagtaaccgcctgcgtcagcggcgtggcgcatacttatatggcggcggaacggctggaa

SEQ ID NO: 663081 - DNA, 75 bp, synthetic construct
  source 1..75: mol_type = other DNA
gagtggtattttcacaaataacactatggaaataaaagaaaacgcctctctgactctgacagggatcccttctgt

SEQ ID NO: 663082 - DNA, 75 bp, synthetic construct
  source 1..75: mol_type = other DNA
agagggttctctggagatacctggaaagtaacagcacgtgcaggactgagttaccagttcgatttgctggcaaat

SEQ ID NO: 663083 - DNA, 75 bp, synthetic construct
  source 1..75: mol_type = other DNA
actgaagcttgatgcagcaacattccatctctccagaaatactcgtatgcaaggagatattagtgctaccaacgg

SEQ ID NO: 663084 - DNA, 75 bp, synthetic construct
  source 1..75: mol_type = other DNA
tatttcgcttattcgtatcaacgaagcaaccccggttattggcgatgtggcgatggaaaccattacggaaaccat

SEQ ID NO: 663085 - DNA, 75 bp, synthetic construct
  source 1..75: mol_type = other DNA
aaggaactcacgttctgtggcaggtgaacggagtggccggtgataacctgcataaaattggcgaaggcaccctga

SEQ ID NO: 663086 - DNA, 75 bp, synthetic construct
  source 1..75: mol_type = other DNA
ctcattcctggtatgccggtgcagaggtcgggtatcgttaccacctgtcggaagaggcctgggtggagccacaga

SEQ ID NO: 663087 - DNA, 75 bp, synthetic construct
  source 1..75: mol_type = other DNA
gagcgcgtcttcgtaaccaatgccctgcgcgcgctacgtcaggtaagtccaggcggaaatattcgcgatattccg

SEQ ID NO: 663088 - DNA, 75 bp, synthetic construct
  source 1..75: mol_type = other DNA
tggcaattctggacttaggtgcaggctctaccgatgcctccatcatcaatcagaaaggggaaatcgttgccactc

SEQ ID NO: 663089 - DNA, 75 bp, synthetic construct
  source 1..75: mol_type = other DNA
acatgttcgccagaccatggctgaactgaccaacaaacccagcaacgaaatttttattcaggatttgctggcgat

SEQ ID NO: 663090 - DNA, 75 bp, synthetic construct
  source 1..75: mol_type = other DNA
tacttcacgcagatctacggcgagcataaaaatacagataaccctgaccaacgtatcgctgaagacattctctga

SEQ ID NO: 663091 - DNA, 75 bp, synthetic construct
  source 1..75: mol_type = other DNA
attttccgggcaggctgaatggctgactgaaaagctgtttggagttatcatttatatcgttttgggttttattgc

SEQ ID NO: 663092 - DNA, 75 bp, synthetic construct
  source 1..75: mol_type = other DNA
gtgggtttaaccatttctcgttatattggcgcagttgcaattttgtgggtgctggcgattggttttaatcctgcg

SEQ ID NO: 663093 - DNA, 75 bp, synthetic construct
  source 1..75: mol_type = other DNA
taattccatgaccgcgccaacaggatccaagccaagctttcctgacgggatgttaattctcgttgaccctgagca

SEQ ID NO: 663094 - DNA, 75 bp, synthetic construct
  source 1..75: mol_type = other DNA
gcccgatcaacccatcaagctggacgtaattaaacccgacgggcaggtactcaggagcgtcgttagtcagccggc

SEQ ID NO: 663095 - DNA, 75 bp, synthetic construct
  source 1..75: mol_type = other DNA
gtggggcgcttatcgtctggaagtcaaagcgccgaatgaagcggtcagtagcgtgcgtttctgggctggctatag

SEQ ID NO: 663096 - DNA, 75 bp, synthetic construct
  source 1..75: mol_type = other DNA
cagcggcctgttcccgtcactttataccaatgccgcccagctacaggcattgggtatcaaaggcgacagtgatga

SEQ ID NO: 663097 - DNA, 75 bp, synthetic construct
  source 1..75: mol_type = other DNA
atttatgatttccaagatcgcggtctggaaagcatatcaacgaattagagccaatcgtggctcgccgggtgttga

SEQ ID NO: 663098 - DNA, 75 bp, synthetic construct
  source 1..75: mol_type = other DNA
ttcagttgacgctggatgataaagggcgtggcgaagtttctacagaaagccagtggaaggaaacgcattccccat

SEQ ID NO: 663099 - DNA, 75 bp, synthetic construct
  source 1..75: mol_type = other DNA
agcaggcgagcattaagcacattgagttccgtgacgatcgctttgtggcggcggttgccgttgatgaataccagc

SEQ ID NO: 663100 - DNA, 75 bp, synthetic construct
  source 1..75: mol_type = other DNA
actacgaatctcgttaaaaagctattttaagccattgaatttcagcattatctgggaagttatggggattggtat

SEQ ID NO: 663101 - DNA, 75 bp, synthetic construct
  source 1..75: mol_type = other DNA
cgttacgcctgatgcaaaacatctacaatttcactccgcaatacgttgtgcatgacgcacatccgggctatgtct

SEQ ID NO: 663102 - DNA, 75 bp, synthetic construct
  source 1..75: mol_type = other DNA
cgacccgctcgatcgtcgcttccacgcccagccggtggcctgcccggagtgtggcccgcatcttgaatgggtaag

SEQ ID NO: 663103 - DNA, 75 bp, synthetic construct
  source 1..75: mol_type = other DNA
ctggaagacccggaaacgtttcttgttcaattgcatcagcactgcccgccgctggcgcgtattgatagcgtcgag

SEQ ID NO: 663104 - DNA, 75 bp, synthetic construct
  source 1..75: mol_type = other DNA
tggcgcttccgggtggcgatttggcagcgaagcagcgtggcgaaacctgctggcgcagtgcctgcgctttgtgcc

SEQ ID NO: 663105 - DNA, 75 bp, synthetic construct
  source 1..75: mol_type = other DNA
gttaatcaacgcgcgtgggcgtttcatgatgcgctggcgcagggttttgccgcgttgatgcgtgagcaggccacg

SEQ ID NO: 663106 - DNA, 75 bp, synthetic construct
  source 1..75: mol_type = other DNA
tgctgttacaggaactgcaatgcccgctggtgatgacctccggcaacctgagcggtaaaccaccggctatcagca

SEQ ID NO: 663107 - DNA, 75 bp, synthetic construct
  source 1..75: mol_type = other DNA
ggtgaccgggcgttggctatggaaatatcctcgcgctgaacataaaaagtgtgaaaaaaagccagttgtgtcgga

SEQ ID NO: 663108 - DNA, 75 bp, synthetic construct
  source 1..75: mol_type = other DNA
ggattaactatttcccgttatattggcgcaattgcaattttgtgggtactggcgattggttttaaccctgcgcta

SEQ ID NO: 663109 - DNA, 75 bp, synthetic construct
  source 1..75: mol_type = other DNA
aggctgggagtagggcagagagcgcaagcagaaatacagttgaggcatgttttctggttgtccacccttgggtta

SEQ ID NO: 663110 - DNA, 75 bp, synthetic construct
  source 1..75: mol_type = other DNA
aacgcgaacatgcgttatccctggagcgtgagcgccagctggaaatacaggaacggacactggatggcccttcgc

SEQ ID NO: 663111 - DNA, 75 bp, synthetic construct
  source 1..75: mol_type = other DNA
cacgtggttgttattcttatttggctaaacgcgttgtttatgcctatttggtccgcctcatgggtattacctgcg

SEQ ID NO: 663112 - DNA, 75 bp, synthetic construct
  source 1..75: mol_type = other DNA
gctgggattaactatttcccgttatattggcgcaattgcaattttgtgggtactggcgattggctttaatcctgc

SEQ ID NO: 663113 - DNA, 75 bp, synthetic construct
  source 1..75: mol_type = other DNA
tggaaggacagttgttgttgagcggcaaaccaccgctgaacattgctcgttatattaaagagttaaaagcgtatc

SEQ ID NO: 663114 - DNA, 75 bp, synthetic construct
  source 1..75: mol_type = other DNA
cgacgccaaaacgcgcggttggggtgttgcatctgccgcttggtgatgaaaaccgtcgcctcgatctggcgctgg

SEQ ID NO: 663115 - DNA, 75 bp, synthetic construct
  source 1..75: mol_type = other DNA
gattttaacggtgaattgcgcgtcatggcgcaagcctggacggcagatgatttcggtagcaacgaaagcaaagtg

SEQ ID NO: 663116 - DNA, 75 bp, synthetic construct
  source 1..75: mol_type = other DNA
gcaaagtggatggtgcctgggagctgtcagataatcttaaagagctgcgtttacgccacctcgaaccgaaacgtg

SEQ ID NO: 663117 - DNA, 75 bp, synthetic construct
  source 1..75: mol_type = other DNA
tcaacggtttactgcgtgacgcagatggtaaggcgttgccggagcaacccatcaagctggacgtcatcaaaccag

SEQ ID NO: 663118 - DNA, 75 bp, synthetic construct
  source 1..75: mol_type = other DNA
gttctttggtcagaaacgctatggcgcagacatttacgatatttacggtcaggtcattgaaggtcaggggcgtct

SEQ ID NO: 663119 - DNA, 75 bp, synthetic construct
  source 1..75: mol_type = other DNA
gatttccacgtcgaagattttatgccagagcgtatggcgctgaatctgaccggtgagaaaaccccgctaacgccg

SEQ ID NO: 663120 - DNA, 75 bp, synthetic construct
  source 1..75: mol_type = other DNA
ccaaaagcaaattactctaaatgaaattcaagatcttttcttagagagggggacaataatatgtaaaaaaacacc

SEQ ID NO: 663121 - DNA, 75 bp, synthetic construct
  source 1..75: mol_type = other DNA
aaaaagaaaaaagaccattatattatttgcggttctccagactatattaatgcaattgaattggatattattaat

SEQ ID NO: 663122 - DNA, 75 bp, synthetic construct
  source 1..75: mol_type = other DNA
atccaaactgacttgcgagtatccgagactaagatgcaatgaagttaagggccatgataataaacgtttgtttaa

SEQ ID NO: 663123 - DNA, 75 bp, synthetic construct
  source 1..75: mol_type = other DNA
atgaaaaagttacgcgtagccgcctgcatgctaatgctggcgctggcagggtgcgacaacaacgataacgcgcca

SEQ ID NO: 663124 - DNA, 75 bp, synthetic construct
  source 1..75: mol_type = other DNA
agcggcggattcgctaaaaaaagagctaacagaccaaaaagacctctgccatatagttgctgataaaagtggcat

SEQ ID NO: 663125 - DNA, 75 bp, synthetic construct
  source 1..75: mol_type = other DNA
agggcatcacttaagggggagggtgtactaaaatctgatgaattaagcgatctttatgatagaggattctatatc

SEQ ID NO: 663126 - DNA, 75 bp, synthetic construct
  source 1..75: mol_type = other DNA
tatatcaaagagttaaaagcgtatccgtacggctgtcttgagcaaaccaccagcggcctgttcccgtcactttat

SEQ ID NO: 663127 - DNA, 75 bp, synthetic construct
  source 1..75: mol_type = other DNA
aatgatgagcggaaatggctgggcgattacggtagcccactgcgcgataacgcgttgatgctctccttgttggaa

SEQ ID NO: 663128 - DNA, 75 bp, synthetic construct
  source 1..75: mol_type = other DNA
cggtaaaacagcccattgttgatgaagacagtaacgctgcttttgatatcgtttatagcgatgcacagggcgtga

SEQ ID NO: 663129 - DNA, 75 bp, synthetic construct
  source 1..75: mol_type = other DNA
actggaatccggcggccgcccggtgacgcgccgtgttgaacaggctatctggcctgcggatgcgttgccagggat

SEQ ID NO: 663130 - DNA, 75 bp, synthetic construct
  source 1..75: mol_type = other DNA
aacgtgatttgatcgtcactattggcaaggaggtcaaagcactcaacaacgcaaccttcagtaaagattacgaaa

SEQ ID NO: 663131 - DNA, 75 bp, synthetic construct
  source 1..75: mol_type = other DNA
aacagtggcgatcagccgttatggctgcgtgtggatgccagcggttatccgcaatccgcacctttaccggcgaac

SEQ ID NO: 663132 - DNA, 75 bp, synthetic construct
  source 1..75: mol_type = other DNA
aaatgcgccccaatcagccattaaccgtgaaaattaaagccagcaataaaaatggtgagatgccaaaacaggtga

SEQ ID NO: 663133 - DNA, 75 bp, synthetic construct
  source 1..75: mol_type = other DNA
tggggtactacctgtacggtgcacctgctaatggtaataccttgcagggacagcttttcctgcggccgctgcgtg

SEQ ID NO: 663134 - DNA, 75 bp, synthetic construct
  source 1..75: mol_type = other DNA
atggtggaatcaatgtatgttcctcaatggcgggcgactggtgcggctgacgatctgttgatagtcagaccgtaa

SEQ ID NO: 663135 - DNA, 75 bp, synthetic construct
  source 1..75: mol_type = other DNA
ttatggcgatggagaaattcaggcctccattagtgggttagcgttaccaggtgaaaccgttgccgaccagcataa

SEQ ID NO: 663136 - DNA, 75 bp, synthetic construct
  source 1..75: mol_type = other DNA
cagcggtctgttcccgtcactttataccaacgcagcccagctacaggcgttggggataaaaggcgacagcgatga

SEQ ID NO: 663137 - DNA, 75 bp, synthetic construct
  source 1..75: mol_type = other DNA
acggtacggcgttacagcctggtgaaacctgggcgctcccggctgatcggttgcaaaacttctctcctgttacgc

SEQ ID NO: 663138 - DNA, 75 bp, synthetic construct
  source 1..75: mol_type = other DNA
gcaactggaaaatgacaaaaacgcggcactgctgctggcgcgtaaagacggtcagacaacgttgcttgatttaaa

SEQ ID NO: 663139 - DNA, 75 bp, synthetic construct
  source 1..75: mol_type = other DNA
gcccaacaggctccagcggcagttcaacccggaagcaccggatgagcgttgggtaacggacatcacctacatccg

SEQ ID NO: 663140 - DNA, 75 bp, synthetic construct
  source 1..75: mol_type = other DNA
cagttcaatccggatgctccggatgagcgttgggtaacggacataacctacatcaggacccacgaaggctggctg

SEQ ID NO: 663141 - DNA, 75 bp, synthetic construct
  source 1..75: mol_type = other DNA
aatccggatgctccggatgaacgttgggtaacggacataacctacatcaggccccacgaaggctggctgtatctt

SEQ ID NO: 663142 - DNA, 75 bp, synthetic construct
  source 1..75: mol_type = other DNA
ccgtatccgctggtcgatgatctggagcgtttttacggtcatctggagcaaacgctgctggcaaccggctttatt

SEQ ID NO: 663143 - DNA, 75 bp, synthetic construct
  source 1..75: mol_type = other DNA
tggcgctggtttttggtcgcgagcgcgtcggcttgaccaatgaagagttgcagaaatgccattatcatgtcgcca

SEQ ID NO: 663144 - DNA, 75 bp, synthetic construct
  source 1..75: mol_type = other DNA
tgaataaattgcgccgtctgtttacccgtgcgcgcccggaaagccaggaattgaatatcctgcgcgggattctgg

SEQ ID NO: 663145 - DNA, 75 bp, synthetic construct
  source 1..75: mol_type = other DNA
aggtcggataccggagcccgcgggctcgtaaaggcgaggccagtatcgtgtcgctcaacaggcttcagcgacagt

SEQ ID NO: 663146 - DNA, 75 bp, synthetic construct
  source 1..75: mol_type = other DNA
ctgacccgcagtctcgggggaaaaaccgcgctggactgggctatgaagcaggatttccgttgcggctgctggttg

SEQ ID NO: 663147 - DNA, 75 bp, synthetic construct
  source 1..75: mol_type = other DNA
attgagttcatcattgagagaactaattcatatattaatctatcgaagcatctcaattccatctttaaaaagcat

SEQ ID NO: 663148 - DNA, 75 bp, synthetic construct
  source 1..75: mol_type = other DNA
ttcacaacgccatcaggcagacctgagactgacaggacagattaaacagttctggctggaattgggatgcgtcta

SEQ ID NO: 663149 - DNA, 75 bp, synthetic construct
  source 1..75: mol_type = other DNA
ctgaacgcactgctgatggctgtatggtggcgtaatcccgaaaaacaggtgctggttcattcggatcagggcagt

SEQ ID NO: 663150 - DNA, 75 bp, synthetic construct
  source 1..75: mol_type = other DNA
cacctcagtacgcctttatccgtgacaactcctgttgctggcctgttcgcctgctctgtcgggtgctggatgttc

SEQ ID NO: 663151 - DNA, 75 bp, synthetic construct
  source 1..75: mol_type = other DNA
cgtgacctgcgctccgctgccgcatctggctgggatttcagttctcgctggatggacaatccgcagcagctaaat

SEQ ID NO: 663152 - DNA, 75 bp, synthetic construct
  source 1..75: mol_type = other DNA
gcctgcaggtcatgtcggcagtatatgtggcgctgagtcgctgggagccacggctgacgctggattccatcacca

SEQ ID NO: 663153 - DNA, 75 bp, synthetic construct
  source 1..75: mol_type = other DNA
atgacgctttatagtgggatgaacaataccagcggcaaagccattactgatattgaccatctgcgccagtcggtg

SEQ ID NO: 663154 - DNA, 75 bp, synthetic construct
  source 1..75: mol_type = other DNA
ggggcgacaatatcgtgtggctgtgtctacaacgcacatcgccgtagcgtaaagcctcatggtatgagtaaaacg

SEQ ID NO: 663155 - DNA, 75 bp, synthetic construct
  source 1..75: mol_type = other DNA
cctctgacgacacttatagaattgctggagtatcagggcaatcaacaaacccctttgtggcgaaagctgtggcta

SEQ ID NO: 663156 - DNA, 75 bp, synthetic construct
  source 1..75: mol_type = other DNA
gtagccgcattgcccgtcgggaatatggttccctgctgtcggcgctgatagaccagccacaaaatccggcgttac

SEQ ID NO: 663157 - DNA, 75 bp, synthetic construct
  source 1..75: mol_type = other DNA
ggtggttgagcttatcggacacagcaataacggcgcgccagtttccctttccgtatcaacaggagcagacaatgg

SEQ ID NO: 663158 - DNA, 75 bp, synthetic construct
  source 1..75: mol_type = other DNA
ccttctttgccctgatggtggagttactggcacaacatgaaggcgatgcagcgttgaaacagtatctgccgcaac

SEQ ID NO: 663159 - DNA, 75 bp, synthetic construct
  source 1..75: mol_type = other DNA
aaagcaatccgaatcgacctgccactgaaatttaccgcgacctgcgctctgctgctgcgtctggctgggatttca

SEQ ID NO: 663160 - DNA, 75 bp, synthetic construct
  source 1..75: mol_type = other DNA
cgcagaaagtggcgttaatacctgctgccgtattattgtgtaccgccgcgctatctgcacaggcagaagaaacac

SEQ ID NO: 663161 - DNA, 75 bp, synthetic construct
  source 1..75: mol_type = other DNA
atcagagcgggttcgatctgcgccatttcgttaacgtcaatttcaccctgccgaaagagggagagaaatatgtgc

SEQ ID NO: 663162 - DNA, 75 bp, synthetic construct
  source 1..75: mol_type = other DNA
gtgcaaaacgccaaactttttccggaccaaaaaacctttgctgatgccgtgccgaacagcgatccgctgatgatc

SEQ ID NO: 663163 - DNA, 75 bp, synthetic construct
  source 1..75: mol_type = other DNA
cggtcgccccgctacggaaatctatcgcgacctgcgttccgccgccgcatctggctgggatttcagctcgcgctg

SEQ ID NO: 663164 - DNA, 75 bp, synthetic construct
  source 1..75: mol_type = other DNA
aaatgtgcgcagtctgtgtggatatattatttaaaccaacctgctgataatatccctcgatatgatggtggatac

SEQ ID NO: 663165 - DNA, 75 bp, synthetic construct
  source 1..75: mol_type = other DNA
ccgccaggattacgaaccacaaggtgccagcgtcactattctggtgagtgaagaaccggtcgacccgaaacttat

SEQ ID NO: 663166 - DNA, 75 bp, synthetic construct
  source 1..75: mol_type = other DNA
aagatttaaccgacagcgagcgccaggaaattaccactgcattgtggaaagaaatgcatgaaattttcaatggac

SEQ ID NO: 663167 - DNA, 75 bp, synthetic construct
  source 1..75: mol_type = other DNA
tacctacagttaccggtttggtctgttcgataaagcaggcgactggacgcatgttcaggtaaaagatgcggaagt

SEQ ID NO: 663168 - DNA, 75 bp, synthetic construct
  source 1..75: mol_type = other DNA
ggcggctttcgcgccagcgtgctgaacgacaccatgcaagggctggtgatgctgattggcaccgttgtgctgctt

SEQ ID NO: 663169 - DNA, 75 bp, synthetic construct
  source 1..75: mol_type = other DNA
tattctcggcaagaagttcgcaattcttgcgcgccgctacaatgcggtgacgctgaacgatatgctgtttgcccg

SEQ ID NO: 663170 - DNA, 75 bp, synthetic construct
  source 1..75: mol_type = other DNA
tacctgatccaccagcttgaatccgatatcgtgaccattgattatcgcgtgcgcggttttacccgcgatattaac

SEQ ID NO: 663171 - DNA, 75 bp, synthetic construct
  source 1..75: mol_type = other DNA
gcttaccacgcccgccgcgccgattgtgctggtggataaaaaatacgtacctgagctttgtgatgatatcgcccc

SEQ ID NO: 663172 - DNA, 75 bp, synthetic construct
  source 1..75: mol_type = other DNA
gtgtccggctgggcgggttacgcaattcatgatggcgggaataactcaatgtcaaaaaacacatcttgcggtgtc

SEQ ID NO: 663173 - DNA, 75 bp, synthetic construct
  source 1..75: mol_type = other DNA
gtgctggtggataaaaaatacgttcctgaactttgtgacgatatcgcccctggccttaacgaagtcggggtgatg

SEQ ID NO: 663174 - DNA, 75 bp, synthetic construct
  source 1..75: mol_type = other DNA
atccgagctggcaaatgccagcggaattgccggaatgtgcggcggtcaggcgttagatttagacgcggaaggtaa

SEQ ID NO: 663175 - DNA, 75 bp, synthetic construct
  source 1..75: mol_type = other DNA
ctggatgtggtgggagatactgcaacgttgggaaaacgtcagggtgccgaccagcagcttggcaaaagtacctac

SEQ ID NO: 663176 - DNA, 75 bp, synthetic construct
  source 1..75: mol_type = other DNA
acggcgctttgtggggcggcgagtgcctgcgggtgaactatcgcgaatgccagcacctgggcggcttgcctgcgg

SEQ ID NO: 663177 - DNA, 75 bp, synthetic construct
  source 1..75: mol_type = other DNA
gaatattcagtacctgggcttccaccctatcgtgccctcgttactactaagtttgctggctttcctggtcggaaa

SEQ ID NO: 663178 - DNA, 75 bp, synthetic construct
  source 1..75: mol_type = other DNA
cgttggatctcagtaatcatgcggcggatttaacgcagattggcgatgatttctgggatgccttcaatggcctcg

SEQ ID NO: 663179 - DNA, 75 bp, synthetic construct
  source 1..75: mol_type = other DNA
ggcagaagccgggcatattgaggtgctggaaacgcaccaggcggttgagcatattcgtgaggtctacaatttagc

SEQ ID NO: 663180 - DNA, 75 bp, synthetic construct
  source 1..75: mol_type = other DNA
taacactaaatgaatcggcttataaaacgacactctggcatgcattgaaagtgggtgaaagcattttaggttcac

SEQ ID NO: 663181 - DNA, 75 bp, synthetic construct
  source 1..75: mol_type = other DNA
aatctagactaataaatcaaatcactaatcacatagggtcacctaaagatgacgctttctttgttgatgccttct

SEQ ID NO: 663182 - DNA, 75 bp, synthetic construct
  source 1..75: mol_type = other DNA
agtggagagtttcgggatttcgtcgtcacccgcatcgaagcgccaacattgcttgaagaggttccgcaggccaac

SEQ ID NO: 663183 - DNA, 75 bp, synthetic construct
  source 1..75: mol_type = other DNA
tggaaatggtttttgtgtggaaacaaaattatattctagttgatgagtacttctttttttgttgcacttggattg

SEQ ID NO: 663184 - DNA, 75 bp, synthetic construct
  source 1..75: mol_type = other DNA
acagaccagaaacgaaaacagaccgttgagcagcatttctctcagaccggaacagtcccttgccgtgaatggatt

SEQ ID NO: 663185 - DNA, 75 bp, synthetic construct
  source 1..75: mol_type = other DNA
acaacggccagcaatcctgcatgcctgccggaaaaatacggaaaccttcttcgcgagcgccatccggacctgttt

SEQ ID NO: 663186 - DNA, 75 bp, synthetic construct
  source 1..75: mol_type = other DNA
acgctcaccgcgacctatatcagtgcaagttcgtttatcggcgggcctggagctgcttataaatacggcctgggg

SEQ ID NO: 663187 - DNA, 75 bp, synthetic construct
  source 1..75: mol_type = other DNA
ccagcgtcgggctgaccaacaaacctaacctggactttcctgcactgaatacggagaaaaacccgatgacagtac

SEQ ID NO: 663188 - DNA, 75 bp, synthetic construct
  source 1..75: mol_type = other DNA
gccaattatatgtttgtgcttcagccgtggtgcatagctgactataacgatgattatcgccgtcacggtgcgcgg

SEQ ID NO: 663189 - DNA, 75 bp, synthetic construct
  source 1..75: mol_type = other DNA
agttattaattggtgataaaatgcctaaatataagagtgaagctatcactttattaggtattagtgatgatgatt

SEQ ID NO: 663190 - DNA, 75 bp, synthetic construct
  source 1..75: mol_type = other DNA
gactttaacgggtgccgcgcaggcaaaaggccggctggtggtctattgcagcgccaccaatgaaatgtgtgaggc

SEQ ID NO: 663191 - DNA, 75 bp, synthetic construct
  source 1..75: mol_type = other DNA
ggcagcgttagcggcccaaggcaccggcaccaccggttctcgtatggctaatggcagttatgcgccgcatctggc

SEQ ID NO: 663192 - DNA, 75 bp, synthetic construct
  source 1..75: mol_type = other DNA
cggcaggcattacgctgctgcgctgtagcgttaacgccgctcacagtcgcgaacaaattgatgccatcattcagg

SEQ ID NO: 663193 - DNA, 75 bp, synthetic construct
  source 1..75: mol_type = other DNA
atttgggagcacatgcacgagacaggtcgtgtcactacgacatatgaaacttttcgacgccatgttaagcgatac

SEQ ID NO: 663194 - DNA, 75 bp, synthetic construct
  source 1..75: mol_type = other DNA
tataaatcccctaaccttgagcagatcatggaaaaattccgcgatccggcaaaagtgaaagggaatctgtcatcc

SEQ ID NO: 663195 - DNA, 75 bp, synthetic construct
  source 1..75: mol_type = other DNA
ctggtggtctattgcagcgccaccaatgaaatgtgtgaagctgaaaccaaagcgtttggcgagaaatatgatgtg

SEQ ID NO: 663196 - DNA, 75 bp, synthetic construct
  source 1..75: mol_type = other DNA
ggggcagcctaatcgccctgaacaggccgcccgtgtgtttgccgtgctttgcgagttacgaccggaaccggcgga

SEQ ID NO: 663197 - DNA, 75 bp, synthetic construct
  source 1..75: mol_type = other DNA
gcgttagcggaaaattatcagccgctgtatgccgccttagggttgcatccggggatgttggaaaaacatagcgat

SEQ ID NO: 663198 - DNA, 75 bp, synthetic construct
  source 1..75: mol_type = other DNA
tgtcatcgcaaaattaccgctggcatcgttgttgctggaaaccgacgcgccggatatgccgctcaatggttttca

SEQ ID NO: 663199 - DNA, 75 bp, synthetic construct
  source 1..75: mol_type = other DNA
ctgcgggtattacgctgctgcgctgtagcgttaacgccgctcacagccgcgagcaaatcgataccatcattcagg

SEQ ID NO: 663200 - DNA, 75 bp, synthetic construct
  source 1..75: mol_type = other DNA
ttcaatcgccctactgctattgttttttcaaccggttataccgccaatttaggcgtcatcagcgcacttgccgac

SEQ ID NO: 663201 - DNA, 75 bp, synthetic construct
  source 1..75: mol_type = other DNA
gttagagaaagagattgccgagtttttcaatcgccctaccgctatcgttttttcaaccggttataccgctaattt

SEQ ID NO: 663202 - DNA, 75 bp, synthetic construct
  source 1..75: mol_type = other DNA
cgcaaaagtgtgaaaaaaagccagttgtgtcggaataaacgacaaaatgcagattatttcagcaaacgatttcaa

SEQ ID NO: 663203 - DNA, 75 bp, synthetic construct
  source 1..75: mol_type = other DNA
acggtttgtgcaactgggctacaaaattggcgtaggcgggactatcacctatccacgcgccagtaaaacccgcga

SEQ ID NO: 663204 - DNA, 75 bp, synthetic construct
  source 1..75: mol_type = other DNA
gcgagttacgaccggaaccggcggatgagattgcgcaagcgttgcttaataacacctatacgttgtttaacgtgc

SEQ ID NO: 663205 - DNA, 75 bp, synthetic construct
  source 1..75: mol_type = other DNA
aagcacgctctacctggcggcaggtcaacggctggcgctagccacattaagtgaagaaggtatcaaggcgctgac

SEQ ID NO: 663206 - DNA, 75 bp, synthetic construct
  source 1..75: mol_type = other DNA
caaaatgtacccggattcaccgcacgaatacgtcacgttctgccatacctgccgtcgttttgatttatacgaaac

SEQ ID NO: 663207 - DNA, 75 bp, synthetic construct
  source 1..75: mol_type = other DNA
aataatcacccttatcagtccgtatttacagactttatcgccggtcatccctcctgcacggtctgtttctgggaa

SEQ ID NO: 663208 - DNA, 75 bp, synthetic construct
  source 1..75: mol_type = other DNA
ggggatgttagaaaaacatagcgatgcatcgctggagcagttacagcaggcgctggaaaggcatccggcgaaggt

SEQ ID NO: 663209 - DNA, 75 bp, synthetic construct
  source 1..75: mol_type = other DNA
cctttcaaaacttctcgcataggcgaactggctaccgtgactcctggtaccgatctcaccgtcgttgatgccagt

SEQ ID NO: 663210 - DNA, 75 bp, synthetic construct
  source 1..75: mol_type = other DNA
gtcgttgtgattctgatttggctaaatgctttatttatgcctatttggtctgcctcatgggtgctacccgctgga

SEQ ID NO: 663211 - DNA, 75 bp, synthetic construct
  source 1..75: mol_type = other DNA
gggaagtcatggggattggtattccagcgagtgtcgaatcagtgttatttaccagtggtcggttattaacccaaa

SEQ ID NO: 663212 - DNA, 75 bp, synthetic construct
  source 1..75: mol_type = other DNA
accgtcaatgcatggccgtccattgccaaagggatgggggcgcgaaccagcatgagcgaaaacgaactggatatt

SEQ ID NO: 663213 - DNA, 75 bp, synthetic construct
  source 1..75: mol_type = other DNA
gcaaagtgaatctgcgcagaaaatgcataacaaagcgcaaaaggacggcgaaacctgtatcgattgtcataaagg

SEQ ID NO: 663214 - DNA, 75 bp, synthetic construct
  source 1..75: mol_type = other DNA
catgagcgacaacgaactggacattttgacgaggtacttccagtacaacgccaaagatataactgagaaaaagtg

SEQ ID NO: 663215 - DNA, 75 bp, synthetic construct
  source 1..75: mol_type = other DNA
gcgagttacgcccggaacccgcggatgagattgccgaagtgttgcttaataatacgtatacgttgtttaacgtgc

SEQ ID NO: 663216 - DNA, 75 bp, synthetic construct
  source 1..75: mol_type = other DNA
cggacagcgactatttttgtcgcgtcttccggcgtcagtttggcctgacgccgggagagtacagcgcccgttttc

SEQ ID NO: 663217 - DNA, 75 bp, synthetic construct
  source 1..75: mol_type = other DNA
tattggtagcggggcacttcgtggtgcagggaatacgaaaataccgctactgattaacggtagcctgaatattct

SEQ ID NO: 663218 - DNA, 75 bp, synthetic construct
  source 1..75: mol_type = other DNA
gacagctgtacgtccggcaccctttttcctttttttacacagccaggtttccggcagtcagagggggagggtacg

SEQ ID NO: 663219 - DNA, 75 bp, synthetic construct
  source 1..75: mol_type = other DNA
tcttagccgttcgccgctggagcagaatatcattcagccgctggtgttaagtttgctgcatctttgccgtaacgt

SEQ ID NO: 663220 - DNA, 75 bp, synthetic construct
  source 1..75: mol_type = other DNA
ggctaatttaccgatcaacaacaaaccggtgatgctgttaagcctggtgttcgcaccgacctggcttgggttatc

SEQ ID NO: 663221 - DNA, 75 bp, synthetic construct
  source 1..75: mol_type = other DNA
gcagaaatatcatctgtcaattcatgaagtggcacagcgttgcggttttccggatagcgactattttgtcgcgtt

SEQ ID NO: 663222 - DNA, 75 bp, synthetic construct
  source 1..75: mol_type = other DNA
aactttatccagacagatgcttccattaaccgcggtaactccggcggtgcactgttaaaccttaacggtgagtta

SEQ ID NO: 663223 - DNA, 75 bp, synthetic construct
  source 1..75: mol_type = other DNA
aaggaaccgccagccaggagcagaaaattccggaagaattcaaaaagttttttggtgatgatttaccggatcagc

SEQ ID NO: 663224 - DNA, 75 bp, synthetic construct
  source 1..75: mol_type = other DNA
tggatttgccattcccagtaatatggcgcgaacactggcgcagcagcttatcgactttggtgaaatcaaacgcgg

SEQ ID NO: 663225 - DNA, 75 bp, synthetic construct
  source 1..75: mol_type = other DNA
aaccgggcatcaggctgacgtgtgatgtccggttaactcgtggtatgctgctgccgttctcttttttaacgatgc

SEQ ID NO: 663226 - DNA, 75 bp, synthetic construct
  source 1..75: mol_type = other DNA
aagcgggcgatattattaccagcctcaatggcaaaccacttaacagttttgctgaattgcgctcccgcatcgcaa

SEQ ID NO: 663227 - DNA, 75 bp, synthetic construct
  source 1..75: mol_type = other DNA
tcaacactgcaatccttgcgcctggcggcgggagcgtcgggattggatttgccatccccagtaatatggcgcgaa

SEQ ID NO: 663228 - DNA, 75 bp, synthetic construct
  source 1..75: mol_type = other DNA
acgatagccgcaccacgtcgttgttgcatcctgctcgccagatccaacttcccagcctgcaacgcggcgaaggtg

SEQ ID NO: 663229 - DNA, 75 bp, synthetic construct
  source 1..75: mol_type = other DNA
ctcgatcggcggttatgttggcgaccatctattgggaaccaaacgcaccattgttctcggggcaattgtgctggc

SEQ ID NO: 663230 - DNA, 75 bp, synthetic construct
  source 1..75: mol_type = other DNA
ctgacatcgccgtggtttatcgtgctggtttacttgttccagagcctgggtgaactgtttattagcgccctgggt

SEQ ID NO: 663231 - DNA, 75 bp, synthetic construct
  source 1..75: mol_type = other DNA
cgcatcttgggaacaaaggtaaagacctctccatgccgatgaaatttaccctcggcatgtttatgtgctcactgg

SEQ ID NO: 663232 - DNA, 75 bp, synthetic construct
  source 1..75: mol_type = other DNA
aatgtggtttgctgatgcacaaggactgacatcgccgtggtttatcgtgctggtttacttgttccagagcctggg

SEQ ID NO: 663233 - DNA, 75 bp, synthetic construct
  source 1..75: mol_type = other DNA
cctctctatgccgatgaaatttactctcggcatgtttatgtgctcgctgggctttcttacagccgccgctgcggg

SEQ ID NO: 663234 - DNA, 75 bp, synthetic construct
  source 1..75: mol_type = other DNA
tcatcgcgctggggactatcgccgtcggcaacggcttatttaaagccaaccctgccagcttgctttctaagtgct

SEQ ID NO: 663235 - DNA, 75 bp, synthetic construct
  source 1..75: mol_type = other DNA
ggctcaacaacctgtaccgtctctttgccccaggatattataaatggcactaccggctatcttcatagactggcc

SEQ ID NO: 663236 - DNA, 75 bp, synthetic construct
  source 1..75: mol_type = other DNA
atcaacaatttttcgcagatctgttcagcggcctggtgcttaacccacagcgactggggcgcgtctggtttgcca

SEQ ID NO: 663237 - DNA, 75 bp, synthetic construct
  source 1..75: mol_type = other DNA
atttaccggtcaacaacaaaccggtgatgctcttaagcctggtgttcgcaccgacctggcttgggttatcgtatt

SEQ ID NO: 663238 - DNA, 75 bp, synthetic construct
  source 1..75: mol_type = other DNA
tcgctacttaagcctgacctgattttcatcgccctggggactatcgctgtcggtaacggcctgtttaaagctaac

SEQ ID NO: 663239 - DNA, 75 bp, synthetic construct
  source 1..75: mol_type = other DNA
aagcgcacgaaaaaatgacgtttgtctatacgcggcgtgagtcttatgtgatgccaatgaatattaccgagtttt

SEQ ID NO: 663240 - DNA, 75 bp, synthetic construct
  source 1..75: mol_type = other DNA
atgccgatgaacattaccgagttttgcagcaaactgccgccgtcgcattttttccgctgccatcgctcattttgt

SEQ ID NO: 663241 - DNA, 75 bp, synthetic construct
  source 1..75: mol_type = other DNA
atgagcaaattcacagttgatagttttattgttgagctgggcttcaatgaaaacgttattagaggcttgcaaaga

SEQ ID NO: 663242 - DNA, 75 bp, synthetic construct
  source 1..75: mol_type = other DNA
acgcctttaaatgattctctcaaggtcatggaaaggaatgtcgataaaactgtttccaagattgagcagcgtctt

SEQ ID NO: 663243 - DNA, 75 bp, synthetic construct
  source 1..75: mol_type = other DNA
ctgtcactgcagagtcaaaagcgttatttgcgaaattacatcaacagggtgtattgttcgcactggatgattttg

SEQ ID NO: 663244 - DNA, 75 bp, synthetic construct
  source 1..75: mol_type = other DNA
gggttctatgtcacaggaacagacacaggagctatttggtaatgcaacggctatgagtcgcttaatggggctttc

SEQ ID NO: 663245 - DNA, 75 bp, synthetic construct
  source 1..75: mol_type = other DNA
tgaaatggggatgagttcttctatcgctggtgatgctatcggtggacttatcgacatgcttaaagctggtgtaga

SEQ ID NO: 663246 - DNA, 75 bp, synthetic construct
  source 1..75: mol_type = other DNA
taaaggtttcaggattaatacaaagcagcttgatagtaatttaacggcttctttaaagtcaatggaagggaagat

SEQ ID NO: 663247 - DNA, 75 bp, synthetic construct
  source 1..75: mol_type = other DNA
caatggaatagacgcggctgtttcattcagccaagcgcagattcctgatgttgttcatcagttgctgctatggaa

SEQ ID NO: 663248 - DNA, 75 bp, synthetic construct
  source 1..75: mol_type = other DNA
cgccttggcgcgctgctggatcaaaaaaatcgtattacgattaactattttgccatgccgccgagtacttttggc

SEQ ID NO: 663249 - DNA, 75 bp, synthetic construct
  source 1..75: mol_type = other DNA
ctggaaacgatgcgcggtattcaggcgttgtttgtgcgtcgcgatgaagtggaagaagcgtggaaatgggtagat

SEQ ID NO: 663250 - DNA, 75 bp, synthetic construct
  source 1..75: mol_type = other DNA
gataccgctatgcacctccgttacccgctgaacagtttattgctgagtggatatacgataacaaaagccagagat

SEQ ID NO: 663251 - DNA, 75 bp, synthetic construct
  source 1..75: mol_type = other DNA
catcccgactaatgggtttaagcactgatgagattaacgggattctaaaagctttcgagcagatggcttctaaag

SEQ ID NO: 663252 - DNA, 75 bp, synthetic construct
  source 1..75: mol_type = other DNA
tggttttctggtttatgaagaaacagtaccaaaaagttgaaattggtaagttcgatgatgaaggatgggcatggg

SEQ ID NO: 663253 - DNA, 75 bp, synthetic construct
  source 1..75: mol_type = other DNA
tgacaagagcaatcacaacgttaggtacaagagctaatcaggtggctggtcaggtagctactggtaaaggtggtg

SEQ ID NO: 663254 - DNA, 75 bp, synthetic construct
  source 1..75: mol_type = other DNA
ataatccaggcaggttagagcgtcataatcgttttaacaaacatgttggatgggcagcgaatcaggatctgttcc

SEQ ID NO: 663255 - DNA, 75 bp, synthetic construct
  source 1..75: mol_type = other DNA
gaacaaaggggtggagaaaacatattggggtgctgattttggggagttaaccactcgtgagaatgttatgaaggg

SEQ ID NO: 663256 - DNA, 75 bp, synthetic construct
  source 1..75: mol_type = other DNA
ggacaaaaggaggtaaaaatccctgcacttgataagaacggtgtacagcatggctggaagactgcacacaggaat

SEQ ID NO: 663257 - DNA, 75 bp, synthetic construct
  source 1..75: mol_type = other DNA
aatgcaatgcctgaactggttcgttttcgtgtcgagggggcgtatgataaactctttaattccttcaaacgaata

SEQ ID NO: 663258 - DNA, 75 bp, synthetic construct
  source 1..75: mol_type = other DNA
aagcgcagagatcatgaggctggcgcaggagctgcgggactttgatgaagccagacgcatgccatatgtggtgtc

SEQ ID NO: 663259 - DNA, 75 bp, synthetic construct
  source 1..75: mol_type = other DNA
gaagtacacaagccactgtgcgcagtgggcgagccagcccaggttcgcaaagcggttgtgaaaatgctgatggcg

SEQ ID NO: 663260 - DNA, 75 bp, synthetic construct
  source 1..75: mol_type = other DNA
gccatcgcctggctaacggctccctttgccggggttatggcacgttttacacccaggatccacaggttaaacatg

SEQ ID NO: 663261 - DNA, 75 bp, synthetic construct
  source 1..75: mol_type = other DNA
cgaattagcggcaacagagcaatcacagcagcacatagtgtgaatatgtctaagcttggtgatattaatccgctg

SEQ ID NO: 663262 - DNA, 75 bp, synthetic construct
  source 1..75: mol_type = other DNA
atggcacagtttaaagttgatagttttatcgttgagctaggcttcagtgaaaacattattaaaggcttgcaaaga

SEQ ID NO: 663263 - DNA, 75 bp, synthetic construct
  source 1..75: mol_type = other DNA
caaaggtaaaacctgaagatctgcttgagtcggtcagaaaaacgatgcacaagaagtacccaaaccatcgctttg

SEQ ID NO: 663264 - DNA, 75 bp, synthetic construct
  source 1..75: mol_type = other DNA
tttcgtattcgtgataacgacggtaaacgagctgatatcaggaaaaaagatttacgggaaattcgtacaggtttt

SEQ ID NO: 663265 - DNA, 75 bp, synthetic construct
  source 1..75: mol_type = other DNA
gcaggaaaaacggttaccgtcacatattttcagagagagcgttatggtcgtattctcgggcaggttatgcacctg

SEQ ID NO: 663266 - DNA, 75 bp, synthetic construct
  source 1..75: mol_type = other DNA
tgttcaaagagtcgtggcaggatctgccgcagaacaaactgactattcgtctgcaacccgatgagggcgtggata

SEQ ID NO: 663267 - DNA, 75 bp, synthetic construct
  source 1..75: mol_type = other DNA
gcccggatttggtgctgtatgttaacggtattgcgcttggtgtcattgaactaaaacgttctacagtgtcagtct

SEQ ID NO: 663268 - DNA, 75 bp, synthetic construct
  source 1..75: mol_type = other DNA
atacacaagcaaagcgcgccttctatgataacttcggccacgacgaggtactggcgacccgcatagatacgacga

SEQ ID NO: 663269 - DNA, 75 bp, synthetic construct
  source 1..75: mol_type = other DNA
ttctgccggacgccctgtttatcggttttaccggcacaccgctgatgaagaaagataagaagaagtcggttgagg

SEQ ID NO: 663270 - DNA, 75 bp, synthetic construct
  source 1..75: mol_type = other DNA
ggcgactcatcgcgatcttgccgcagaggtgaatgccggacgttttcgccaggatctctactatcgcctgaacgt

SEQ ID NO: 663271 - DNA, 75 bp, synthetic construct
  source 1..75: mol_type = other DNA
cgagcgtaatcgcaaggcggtaaaaggctttacgccacaggcgatggatttgctgatccactacgactggccggg

SEQ ID NO: 663272 - DNA, 75 bp, synthetic construct
  source 1..75: mol_type = other DNA
ttattcatccatcgtcttatactgtaggtaactttggcagtatcgaatttgcttttaaacttgttctttttcctt

SEQ ID NO: 663273 - DNA, 75 bp, synthetic construct
  source 1..75: mol_type = other DNA
ggtggctacatcactagtggagatgagttttttgtcattcctgactttgatgatgttatcgctgtattagatgct

SEQ ID NO: 663274 - DNA, 75 bp, synthetic construct
  source 1..75: mol_type = other DNA
tgctgttaccgcttattatttttgccctgaccgcgttagtcgcaaaatgggtaggttatgtcagacaaggactcc

SEQ ID NO: 663275 - DNA, 75 bp, synthetic construct
  source 1..75: mol_type = other DNA
atgcaggcggacagggtgcgttttgcgtatgaccgcagcgggtggctgacggcagagcacagcgtgcacggcagt

SEQ ID NO: 663276 - DNA, 75 bp, synthetic construct
  source 1..75: mol_type = other DNA
ttgagtacatcaaatcacatgtcagcgatgagacagcaaaaggtaagcacgctattgacggcgaccgtctgtttt

SEQ ID NO: 663277 - DNA, 75 bp, synthetic construct
  source 1..75: mol_type = other DNA
aactaaaagcagttatagactttccagacacaccaccttacccaaacaacgagaatggcagatatcgcatgatcg

SEQ ID NO: 663278 - DNA, 75 bp, synthetic construct
  source 1..75: mol_type = other DNA
tggtgttgctctagaagctgaaaaaataggtgaaattgaaaaaataaaaatgccgcaaataagaaaagatgtaaa

SEQ ID NO: 663279 - DNA, 75 bp, synthetic construct
  source 1..75: mol_type = other DNA
atggcattaacgaccaaaaaaaagcggtttgctgatgcgttatcaaggggcgcaaatcccacggaagccgctata

SEQ ID NO: 663280 - DNA, 75 bp, synthetic construct
  source 1..75: mol_type = other DNA
tgtttaaagagtcctggcaggatctgccgcagaataaactgactatccgcctgcaacctgatgaaggtgtggata

SEQ ID NO: 663281 - DNA, 75 bp, synthetic construct
  source 1..75: mol_type = other DNA
ggccggaacctggggaccggttgcctcggtggcgatgattacccgtgacggtcgttcctggaatgagtttgagta

SEQ ID NO: 663282 - DNA, 75 bp, synthetic construct
  source 1..75: mol_type = other DNA
tatttcaaaacgccagaactgaatctgtttaaagaatcctggcaggatctgccgcagaacaaattaaccatccgt

SEQ ID NO: 663283 - DNA, 75 bp, synthetic construct
  source 1..75: mol_type = other DNA
atatgatccagaaccacctgctgcaaattctttgcatgattgcgatgtctccgccgtccgacctgagcgccgaca

SEQ ID NO: 663284 - DNA, 75 bp, synthetic construct
  source 1..75: mol_type = other DNA
actgaagtctctgcgccgcattgaccgctccaacgtgcgcgaaaaaaccgtacgcgggcaatatactgcgggctt

SEQ ID NO: 663285 - DNA, 75 bp, synthetic construct
  source 1..75: mol_type = other DNA
tttgataaagccggtcagatgcgcgacatgatccagaaccacctgctacaaattctctgcatgattgcgatgtct

SEQ ID NO: 663286 - DNA, 75 bp, synthetic construct
  source 1..75: mol_type = other DNA
cgaacgtgcgcaggggaaatacccggtgcatctttccggtggtcagcaacagcgtgtttccattgcacgggcgct

SEQ ID NO: 663287 - DNA, 75 bp, synthetic construct
  source 1..75: mol_type = other DNA
attaacttcctcgaaaaaccaagcgaaggctcgatcgtggttaacggtcagatgatcaatctggtacgtgataaa

SEQ ID NO: 663288 - DNA, 75 bp, synthetic construct
  source 1..75: mol_type = other DNA
ccttgaccacaaacataacctgcaaatcaccaagctggacctgagctattcagaaacctttaatcagacgcatct

SEQ ID NO: 663289 - DNA, 75 bp, synthetic construct
  source 1..75: mol_type = other DNA
caacgggtctgaagctgatggttgacgctgaaaaatccggcaaggttatcccgctggataaagcaccggaattta

SEQ ID NO: 663290 - DNA, 75 bp, synthetic construct
  source 1..75: mol_type = other DNA
ttgacgctgagaaatccggcaaggttatcccgctggataaagcaccggaatttaaactggtcgattcaatcctgg

SEQ ID NO: 663291 - DNA, 75 bp, synthetic construct
  source 1..75: mol_type = other DNA
tgacctggtctttccttggcttgcaccgacgcgtaccagcgaactggacggtgctgtggtaacggatgaacaagt

SEQ ID NO: 663292 - DNA, 75 bp, synthetic construct
  source 1..75: mol_type = other DNA
tgacctgtgccgcctggtcatcacgggttcgcatgctgtgggttgaattcagtgctgagtttaagcaggtggtga

SEQ ID NO: 663293 - DNA, 75 bp, synthetic construct
  source 1..75: mol_type = other DNA
tgacctgtgccgcctggtcatcacgggttcgcatgctgagggttgaattcagtgcagagtttaagcaggtggtga

SEQ ID NO: 663294 - DNA, 75 bp, synthetic construct
  source 1..75: mol_type = other DNA
tggtctgctgtaaatggtcgtccagtgtgggggcgctgtgggtcacggtaaccgcaaattttgaacaggtcgtgg

SEQ ID NO: 663295 - DNA, 75 bp, synthetic construct
  source 1..75: mol_type = other DNA
tgacctgtgccgcctggtcatcacgggttcgcatgctgggggttgaattcagtgcggagtttaagcaggtggtga

SEQ ID NO: 663296 - DNA, 75 bp, synthetic construct
  source 1..75: mol_type = other DNA
ggccaacgagcagtgttggttggtcgcagcggttcaggtaaaagttcactgctgaacgcgctttctggttttctc

SEQ ID NO: 663297 - DNA, 75 bp, synthetic construct
  source 1..75: mol_type = other DNA
tacccgctgcaacactacgggaaaatgttctgctggcacgccctgatgccagtgagcaagagttacagactgcac

SEQ ID NO: 663298 - DNA, 75 bp, synthetic construct
  source 1..75: mol_type = other DNA
cattctgctgggcactgcaccgttaattccgttgtttatggcgctggttggaatgggggctgccgatgctaaccg

SEQ ID NO: 663299 - DNA, 75 bp, synthetic construct
  source 1..75: mol_type = other DNA
tgacctgcgcaaagtggactgtgcgggtcagtatgttgcgcgctgagttcagcgcagagtttaaacaggtggtga

SEQ ID NO: 663300 - DNA, 75 bp, synthetic construct
  source 1..75: mol_type = other DNA
gccgggagctggggtcatggtggaccgacgaaggccttgcctggctgagtggcgtgacgccgggggaaaaccttc

SEQ ID NO: 663301 - DNA, 75 bp, synthetic construct
  source 1..75: mol_type = other DNA
tttcgctggaaagtgaagccggatatggaggtgaactcgcagccatcggtgcgtgaagtgcgttttggtgacggg

SEQ ID NO: 663302 - DNA, 75 bp, synthetic construct
  source 1..75: mol_type = other DNA
gttgagcaacaactggtgaccgggagtacgaacgttctggcgcttgaacaggccagaggacaaatcgaaagtacc

SEQ ID NO: 663303 - DNA, 75 bp, synthetic construct
  source 1..75: mol_type = other DNA
ccaattgcttttatttctatgttgtcggccacaattagctttgttatatgtaagtttttcgataacaatattata

SEQ ID NO: 663304 - DNA, 75 bp, synthetic construct
  source 1..75: mol_type = other DNA
gtttaacctgattgtttctttattaatatatgctgttattttttttatgtcgccgcatataagtgccttttatag

SEQ ID NO: 663305 - DNA, 75 bp, synthetic construct
  source 1..75: mol_type = other DNA
cagcggcccgcagcaccggttccccagcagttttcactgtcccataacagcctgacgccagcggtaaatggctat

SEQ ID NO: 663306 - DNA, 75 bp, synthetic construct
  source 1..75: mol_type = other DNA
gcgatctggctcaggcaaacaatgccctgcaactggtgctgggaacgtaccgcgcagttccgtcagaaaaaggga

SEQ ID NO: 663307 - DNA, 75 bp, synthetic construct
  source 1..75: mol_type = other DNA
gcgcgagcggcatttttcccgtccattaccctgaccagtggcctttccgcaagcagtacagagttgtccagcctc

SEQ ID NO: 663308 - DNA, 75 bp, synthetic construct
  source 1..75: mol_type = other DNA
ccccagccgatccatcaaaaacacaaccaggcagtaaacaataacaacagcaataacagccagagcgccttccat

SEQ ID NO: 663309 - DNA, 75 bp, synthetic construct
  source 1..75: mol_type = other DNA
aaaccgtttttgtccagcacaataaatatccaactaaaccaatggagttcgctgtatttaccgccagtattcaat

SEQ ID NO: 663310 - DNA, 75 bp, synthetic construct
  source 1..75: mol_type = other DNA
taccggcagataaaggtgacctgtgccgggtggtctgcgcgggtcgggatgttgcgcgttgagttcagcgcggag

SEQ ID NO: 663311 - DNA, 75 bp, synthetic construct
  source 1..75: mol_type = other DNA
ttttaatgctggacgcaaccaggccaatctggatatcgccgaaattcgccagcagcagtcggtggtgaattatga

SEQ ID NO: 663312 - DNA, 75 bp, synthetic construct
  source 1..75: mol_type = other DNA
atgcttgagctacaaaatcaacaagcgcagcttcaaaatacgcgctatttgatggagcagcagaacaagattgat

SEQ ID NO: 663313 - DNA, 75 bp, synthetic construct
  source 1..75: mol_type = other DNA
aggccggttttctggaaaaaaactataaggcgtcgagtcagcgtatcaagaaaataaactctatgcgtaaagcac

SEQ ID NO: 663314 - DNA, 75 bp, synthetic construct
  source 1..75: mol_type = other DNA
ctttggtttttcctatctcggcgagctggattttggtcactacgatactggcgtgacgctggctgcgggttttct

SEQ ID NO: 663315 - DNA, 75 bp, synthetic construct
  source 1..75: mol_type = other DNA
cccgtattccgggagaagagacgaagcagggtaaatcctggcgtctgagctactccaaacgttttgatgacgtga

SEQ ID NO: 663316 - DNA, 75 bp, synthetic construct
  source 1..75: mol_type = other DNA
acaaatgcgaaaggccgtgaactggggatggtggcagacagcggtctggcctggctgagcggggtgaatccgggt

SEQ ID NO: 663317 - DNA, 75 bp, synthetic construct
  source 1..75: mol_type = other DNA
gcctggctggagtattccgacgcctcctggctgccgccgtcccgctgggataacggtattccggggctgttgttt

SEQ ID NO: 663318 - DNA, 75 bp, synthetic construct
  source 1..75: mol_type = other DNA
tggtcagccgtcacaacggcaaatgagtgcctattacaaccataacggttccctgacaaatctgtcagccagttt

SEQ ID NO: 663319 - DNA, 75 bp, synthetic construct
  source 1..75: mol_type = other DNA
gatgctttctctggcaggagtgcctgtctatgccgtcgattttaatacggatgttctggatgccgcagacagaca

SEQ ID NO: 663320 - DNA, 75 bp, synthetic construct
  source 1..75: mol_type = other DNA
ccggtgacgtttctggaacagccagcttccgtcgcagacggaaagaaaatgttaccgcagccctgtctgacagcg

SEQ ID NO: 663321 - DNA, 75 bp, synthetic construct
  source 1..75: mol_type = other DNA
ttaccgcgttttcattattcctgaaaatgatgtccggtttggcgaacgcaatcttagcaccccggttaaacacaa

SEQ ID NO: 663322 - DNA, 75 bp, synthetic construct
  source 1..75: mol_type = other DNA
ttaccgcgttttcattattcctgaaaatgatgtgcggtttggcgagcataaatttagcacccggttaaacacaat

SEQ ID NO: 663323 - DNA, 75 bp, synthetic construct
  source 1..75: mol_type = other DNA
ctttggtattcccgcttgcccgaatttaactctcgcctactgtctggcagtgtgcgtaggtatcgctaactcagc

SEQ ID NO: 663324 - DNA, 75 bp, synthetic construct
  source 1..75: mol_type = other DNA
cggaagacatggaagccacccgctcggtggtggaatcggtcctgacggaaggggccattggttacagggagtttg

SEQ ID NO: 663325 - DNA, 75 bp, synthetic construct
  source 1..75: mol_type = other DNA
acggctatgggctgattattccaggcatcctatttgtactgatcacgctgatgctgttgaaaagcaaattcccca

SEQ ID NO: 663326 - DNA, 75 bp, synthetic construct
  source 1..75: mol_type = other DNA
gtatgggttcactggtctgcgtctttattttcgccgcattactgaaaaaaatggttcggcctatctgggctaatg

SEQ ID NO: 663327 - DNA, 75 bp, synthetic construct
  source 1..75: mol_type = other DNA
gacggcggccgggtctccaccaaccggtggggcattggtgtggtgacggatgtgagcagctattaccgcaacatc

SEQ ID NO: 663328 - DNA, 75 bp, synthetic construct
  source 1..75: mol_type = other DNA
ttaagtgggcatttcctcgatcgcctgcgcggcatggaaacattgcgtatttttggtcgtggtgaagctgaaatt

SEQ ID NO: 663329 - DNA, 75 bp, synthetic construct
  source 1..75: mol_type = other DNA
taacccgctggttaaaacagcaaagcgtcatctcccaacgttggctgaatatttctcgtctgctgggctttgtaa

SEQ ID NO: 663330 - DNA, 75 bp, synthetic construct
  source 1..75: mol_type = other DNA
tgacgtgtgctaaatggacctccaggataaatatgctgcgtgtggaatttagtgctgagtttaaacaggtagtaa

SEQ ID NO: 663331 - DNA, 75 bp, synthetic construct
  source 1..75: mol_type = other DNA
tgtcaattgctctggtggcggtctactttggtttttcctacctcggcgagctggattttggtcactacgatactg

SEQ ID NO: 663332 - DNA, 75 bp, synthetic construct
  source 1..75: mol_type = other DNA
gaggccgaggatctgtttatcacgtcgccggaaggtaaaacgctggccggaccgctgaactttactttgccagca

SEQ ID NO: 663333 - DNA, 75 bp, synthetic construct
  source 1..75: mol_type = other DNA
agcatcgaccgatccggtgaccattgaggccgaggatctgtttatcacgtcgccggaaggtaaaacgctggccgg

SEQ ID NO: 663334 - DNA, 75 bp, synthetic construct
  source 1..75: mol_type = other DNA
tgcaatactgcgtcttgctgatggctctcagcccccgtttggtgccagtgtaaccagtgaaaaaggccgggagct

SEQ ID NO: 663335 - DNA, 75 bp, synthetic construct
  source 1..75: mol_type = other DNA
gggtgtgccggggaccctttccgctgatatcacgcagtcagtagcccgtattgagggagagagaacgtttcaggg

SEQ ID NO: 663336 - DNA, 75 bp, synthetic construct
  source 1..75: mol_type = other DNA
gcggaaaaaaacgttccaggtggacactgcatatgtgccgtatctgacccgtccgggccaggttcgttacaagct

SEQ ID NO: 663337 - DNA, 75 bp, synthetic construct
  source 1..75: mol_type = other DNA
ggaaggcatcggtcaatctgcagtacagccatcagacttactgggaccgccggacatctgactattacacgctgt

SEQ ID NO: 663338 - DNA, 75 bp, synthetic construct
  source 1..75: mol_type = other DNA
gtcgtgatttcgcagcagggacgcatactctatgactccactgtgccggcaggtccgttcaccattcaggacctg

SEQ ID NO: 663339 - DNA, 75 bp, synthetic construct
  source 1..75: mol_type = other DNA
ttgaaaaacagccagcagctatgcgccggataattggtaagcatctggccgtccctcgctggcaggatacatgtg

SEQ ID NO: 663340 - DNA, 75 bp, synthetic construct
  source 1..75: mol_type = other DNA
caacggaagcgctggtccctgccccgctttatcagggaatgcgcgacggcaaaatcgtccgtttcgaagagataa

SEQ ID NO: 663341 - DNA, 75 bp, synthetic construct
  source 1..75: mol_type = other DNA
atcaaagaagcattaaacgcgccgctaccgtggagctatcgcggagtcattcacccggataccgatcccattttg

SEQ ID NO: 663342 - DNA, 75 bp, synthetic construct
  source 1..75: mol_type = other DNA
tttaacagtcagtcagcgtcgtactttatttatgcatgccggattgactgaaaaagaattcaaccagccatactg

SEQ ID NO: 663343 - DNA, 75 bp, synthetic construct
  source 1..75: mol_type = other DNA
ttaaccagccatactggcgaattaatgaagaatcatgttactggcgtgatgctttattccgtgcattacgtgaat

SEQ ID NO: 663344 - DNA, 75 bp, synthetic construct
  source 1..75: mol_type = other DNA
acgtgaattattcagtctgtttgagtatgcgccgacaattctgacgtcggtaaaaccagagcaatatctgcatta

SEQ ID NO: 663345 - DNA, 75 bp, synthetic construct
  source 1..75: mol_type = other DNA
ctgcgtgccacccgcatggataacagcgataccctgtgggatcacttattcgaagatgaaagccagcaaactgca

SEQ ID NO: 663346 - DNA, 75 bp, synthetic construct
  source 1..75: mol_type = other DNA
aagaagaggacgattcgcctgatacacaagatgaaagccagaccttactgctgcgtgccacccgcatggataaca

SEQ ID NO: 663347 - DNA, 75 bp, synthetic construct
  source 1..75: mol_type = other DNA
atacactacctctacgcactgactggctggatgccatagctggttcgctgattaaagaagccctgaatgcgccgt

SEQ ID NO: 663348 - DNA, 75 bp, synthetic construct
  source 1..75: mol_type = other DNA
ataatggcgacgtgttagttgtctgcggtggctggcacgctccggcactggcaaaaatgtggcgcgaatgcccgc

SEQ ID NO: 663349 - DNA, 75 bp, synthetic construct
  source 1..75: mol_type = other DNA
ttgccagtatcaggacggtgcagcccccgggcgtggtgcctggacgccttttctgaattttcgccggagtggcag

SEQ ID NO: 663350 - DNA, 75 bp, synthetic construct
  source 1..75: mol_type = other DNA
cggagatgctctcaatcgtcagcgcgaagcctttatggctcgctggattacatgggcgatgcagcaaaacaatgg

SEQ ID NO: 663351 - DNA, 75 bp, synthetic construct
  source 1..75: mol_type = other DNA
accgaatctatgcagaataccctcaacaggctaaagaaatattactgtatttccccacttatgaaattatgccat

SEQ ID NO: 663352 - DNA, 75 bp, synthetic construct
  source 1..75: mol_type = other DNA
tgatttatgtaatcaacaggattataaagaaagatggtggaacgctattaaaggtaataaccttgctgatgacta

SEQ ID NO: 663353 - DNA, 75 bp, synthetic construct
  source 1..75: mol_type = other DNA
aaagaaagatggtggaacgctattaaaggtaataaccttgctgatgactatctttattttccgttccctgaacgt

SEQ ID NO: 663354 - DNA, 75 bp, synthetic construct
  source 1..75: mol_type = other DNA
cgcgaaaaatggtggaatgccgtatctaaaaacaatataggtgaaagtgttttggcgtttccttatccgcaacgc

SEQ ID NO: 663355 - DNA, 75 bp, synthetic construct
  source 1..75: mol_type = other DNA
gacaagttggggggagatgcacctgctggttacgatcaatttatggataacaaagggttactcatcgtgaaccgc

SEQ ID NO: 663356 - DNA, 75 bp, synthetic construct
  source 1..75: mol_type = other DNA
ctggttacgatcaatttatggataacaaagggttactcatcgctggtgcttcaatagttgctggagttgttctgg

SEQ ID NO: 663357 - DNA, 75 bp, synthetic construct
  source 1..75: mol_type = other DNA
tttcccgataactacaaccgtctgtttataccacggccaaaaactaaagatgataatggcctcaaaacactcaat

SEQ ID NO: 663358 - DNA, 75 bp, synthetic construct
  source 1..75: mol_type = other DNA
gcgtcggtggtcaccgccattccgtgggttgcggccttgtttgggacctggcttattccgcgctattccgataaa

SEQ ID NO: 663359 - DNA, 75 bp, synthetic construct
  source 1..75: mol_type = other DNA
taaaacgtattgaaaaaaacagtaatttcaattcaaaaagacaacgtccaccgacacacaccaataacgaaattc

SEQ ID NO: 663360 - DNA, 75 bp, synthetic construct
  source 1..75: mol_type = other DNA
ccgaagtggtggtgattttcagccccgtccgctgaaacgcctgttcacagccaaccagtgctggacgtccttcct

SEQ ID NO: 663361 - DNA, 75 bp, synthetic construct
  source 1..75: mol_type = other DNA
atgccggatagccgcaaagccagacgcattgccgacccagggctgcagccggagcgtacatcactggcgtggttt

SEQ ID NO: 663362 - DNA, 75 bp, synthetic construct
  source 1..75: mol_type = other DNA
cggcgctggctgcgggaattggttttgtaaacctgtttggtgcagtgggcgggtttattgccccgatcctgcgcg

SEQ ID NO: 663363 - DNA, 75 bp, synthetic construct
  source 1..75: mol_type = other DNA
tgatgtgctggcaggatacctttcaggaatgcctgccccggtctggcaaaactggtgctggcagtggggcttaca

SEQ ID NO: 663364 - DNA, 75 bp, synthetic construct
  source 1..75: mol_type = other DNA
gcggtccgacagactgaatgcgcttaccacgatgctgaatgacgatctgtcgaaagttatggtgtctccggccct

SEQ ID NO: 663365 - DNA, 75 bp, synthetic construct
  source 1..75: mol_type = other DNA
ctgcgcagttatctgtatgcgcatccggagaaactgaagtcactgacgtcgcggcagagatacaatctcgataac

SEQ ID NO: 663366 - DNA, 75 bp, synthetic construct
  source 1..75: mol_type = other DNA
atggcgggtaatgcttttgtttttgagctgaatgcaaagggtaacgcggatgcgcttttactgagagcctcagag

SEQ ID NO: 663367 - DNA, 75 bp, synthetic construct
  source 1..75: mol_type = other DNA
aaagtctgtcactgtcggacctcaaagcactccctatacaatgtattttaattttgataaagcgctggtgccatt

SEQ ID NO: 663368 - DNA, 75 bp, synthetic construct
  source 1..75: mol_type = other DNA
gcactgagcctggctgtaataagcgcgtgaagtccggcaagtgtgaagagcacaggcgggctgcatggcgtgcag

SEQ ID NO: 663369 - DNA, 75 bp, synthetic construct
  source 1..75: mol_type = other DNA
gacaaataccgcgccctgtacctgagcaaaaacccgttatgcgtgcgttgtctggctaagggtatttatacacca

SEQ ID NO: 663370 - DNA, 75 bp, synthetic construct
  source 1..75: mol_type = other DNA
tcaccgatccggcgatggagcaaatgcgccgcgagacggccgagcacaaggaaatggagaaggcctttcaggccg

SEQ ID NO: 663371 - DNA, 75 bp, synthetic construct
  source 1..75: mol_type = other DNA
caggacaccgggtggcgtaacttttttgccgatcccgaggtgacccggcttatcgctgaagccctgaccaataac

SEQ ID NO: 663372 - DNA, 75 bp, synthetic construct
  source 1..75: mol_type = other DNA
tcagcacgatatttatcctggcaggctgtgtctctctggcgcccgaatatcagcggccggcagcaccggtacccc

SEQ ID NO: 663373 - DNA, 75 bp, synthetic construct
  source 1..75: mol_type = other DNA
gcgaggaacggacacgccgctggaacggggagctactgactgccgaccgggccgacaaggccaaagctatcgttc

SEQ ID NO: 663374 - DNA, 75 bp, synthetic construct
  source 1..75: mol_type = other DNA
ccggcagagcgcagacgctcgccgtcaggcactgttcaaacagacgacgatgcccacttgggccgactggctaac

SEQ ID NO: 663375 - DNA, 75 bp, synthetic construct
  source 1..75: mol_type = other DNA
ctgatgtacggcactatcaaacagcaggccgacgcctcgcgccagaagaaccggcagagcgcagacgctcgccgt

SEQ ID NO: 663376 - DNA, 75 bp, synthetic construct
  source 1..75: mol_type = other DNA
tatctctcgatcgacgtacttcaggttaaaaagaacaataaagaatgatgctaaaattgcaaccttttctaaata

SEQ ID NO: 663377 - DNA, 75 bp, synthetic construct
  source 1..75: mol_type = other DNA
gccgacatttatcgccggtttcagcagtcatttaaatcaactaagtgatgccgattttatcaatgccctgcccga

SEQ ID NO: 663378 - DNA, 75 bp, synthetic construct
  source 1..75: mol_type = other DNA
agaaagcgaggcacgggtagaagcaatgaataacggtgttttactttgcgaacaattattccccatgcttcagca

SEQ ID NO: 663379 - DNA, 75 bp, synthetic construct
  source 1..75: mol_type = other DNA
atggctgccgctcatctgcatgcgatggcgctggcacagttgcgcggacataaactaccgttacgcactgactgg

SEQ ID NO: 663380 - DNA, 75 bp, synthetic construct
  source 1..75: mol_type = other DNA
tgctggcaggatacctttccggaatgcctgccccggtctggcaaaactggtgctggcagtggggcttacagcagg

SEQ ID NO: 663381 - DNA, 75 bp, synthetic construct
  source 1..75: mol_type = other DNA
tgcctgccccggtctggcaaagctggtgctggcagtggggcttacagcaggcgggagaacaactgctaaaaacgg

SEQ ID NO: 663382 - DNA, 75 bp, synthetic construct
  source 1..75: mol_type = other DNA
cggcgtttctctttctgcggcggtagccttactggagcgacacagtcaggcgattcatgtcctggcactggatcg

SEQ ID NO: 663383 - DNA, 75 bp, synthetic construct
  source 1..75: mol_type = other DNA
atgctggcgtaccgtatcaactgctggaatccagccgcctggcggaagtggagcccgcgctggcagaagtagcgc

SEQ ID NO: 663384 - DNA, 75 bp, synthetic construct
  source 1..75: mol_type = other DNA
ccggataattggcaagcatcttgccgtccctcgctggcaggatacatgtgattattataatcagatgatggagcg

SEQ ID NO: 663385 - DNA, 75 bp, synthetic construct
  source 1..75: mol_type = other DNA
gcgggagctttttaatttatttgagtatgcaccaacaatattaacctcggtaaagcctgagcaatatctgcatta

SEQ ID NO: 663386 - DNA, 75 bp, synthetic construct
  source 1..75: mol_type = other DNA
gctcaattaaaacagcgtcatgcgacgatgcgtcttgaggaaatgaacgatgtagaccgggagcgtctggtgtgc

SEQ ID NO: 663387 - DNA, 75 bp, synthetic construct
  source 1..75: mol_type = other DNA
gctcggttaaaacagcgtcacgcagtaatgcactttgaagaaatgaatgatgtcgaccgcgaacgtctggcttgt

SEQ ID NO: 663388 - DNA, 75 bp, synthetic construct
  source 1..75: mol_type = other DNA
taatctccaggcatggttggagcagaacgcacgtctgccgggaaatgactgtccgcaaggaaaagagtgtgagga

SEQ ID NO: 663389 - DNA, 75 bp, synthetic construct
  source 1..75: mol_type = other DNA
ttatcatactgatgtattaattccaggagaattaactaaggatgaaagattgctccatgaaatagaaaatagtga

SEQ ID NO: 663390 - DNA, 75 bp, synthetic construct
  source 1..75: mol_type = other DNA
gatctcatcttgctgaaagattgcctgtggtatgacgcccaaagtctgaatttaattcaacaacaaattgacgta

SEQ ID NO: 663391 - DNA, 75 bp, synthetic construct
  source 1..75: mol_type = other DNA
accggacgaaatcaaacaacaactggaagaacttgaaagcgactggcataagcaacgcgccctgttcaacgatca

SEQ ID NO: 663392 - DNA, 75 bp, synthetic construct
  source 1..75: mol_type = other DNA
gaaccagacgatcttagcgagtgggctgatatgcagtttctgttgtgggatgcacagcgccgtgctggcatcagc

SEQ ID NO: 663393 - DNA, 75 bp, synthetic construct
  source 1..75: mol_type = other DNA
cgtgagtttcatgaaaagctgcgtgaactgttgggaacgttaagtctgaaactggagccggcagatgattttcgt

SEQ ID NO: 663394 - DNA, 75 bp, synthetic construct
  source 1..75: mol_type = other DNA
gcgtcaccctgctggttgaaggttttccgccttcacatgccgggaccatcaccgtgtatgaagattcccgacccg

SEQ ID NO: 663395 - DNA, 75 bp, synthetic construct
  source 1..75: mol_type = other DNA
gccagttccgcaacggtgcacacgtagaaaaaatcccgatgcgtctgctggtggcggcctccaacgagctgccgg

SEQ ID NO: 663396 - DNA, 75 bp, synthetic construct
  source 1..75: mol_type = other DNA
gttcctccttggcccgccaggtattgccaaaagtttgatcgcccggcgcttaaaattcgcctttcagaatgcccg

SEQ ID NO: 663397 - DNA, 75 bp, synthetic construct
  source 1..75: mol_type = other DNA
agtatcagacgcttcgctatgagaatgcctggtattatgttcttgctcgctatgatgagcgtttgattttatcaa

SEQ ID NO: 663398 - DNA, 75 bp, synthetic construct
  source 1..75: mol_type = other DNA
actggataaattaccggatgcgccttatgtctcggatcgtcgctggaaaaaagcgatccgcttattgcaggccag

SEQ ID NO: 663399 - DNA, 75 bp, synthetic construct
  source 1..75: mol_type = other DNA
atatgaccgtatgctgattcgtctgtggttagataaagtgcaggataaaacgaattttcgctccatgctgaccag

SEQ ID NO: 663400 - DNA, 75 bp, synthetic construct
  source 1..75: mol_type = other DNA
ttgatgaccggtcacgcctggcaacagcaagggatgttgactcgccttggcgcgattgtgcaacgtcacctgcaa

SEQ ID NO: 663401 - DNA, 75 bp, synthetic construct
  source 1..75: mol_type = other DNA
ggttcaggacgcagagccaaacttcgatataaatggcaactctccggtaactccggatggttgggttatagtgcc

SEQ ID NO: 663402 - DNA, 75 bp, synthetic construct
  source 1..75: mol_type = other DNA
agaaagcgcatttctgctgtggatcttagcggcagtattgagcgaaaaacggctgttgcagcaggtcattgtgct

SEQ ID NO: 663403 - DNA, 75 bp, synthetic construct
  source 1..75: mol_type = other DNA
cagggagtttgacaggaaaggttactggcgaatgaaatgggcgacttacatccctgggcatcctgacgctaatga

SEQ ID NO: 663404 - DNA, 75 bp, synthetic construct
  source 1..75: mol_type = other DNA
gggcattggcagccgcacctaaatacgaagtacagaacgctaaacgcgtgcaaaacgcgcttaacgcctgccgcg

SEQ ID NO: 663405 - DNA, 75 bp, synthetic construct
  source 1..75: mol_type = other DNA
attgtggcgctgtggcctgggccgaaatggcagcgtatgtgcgcccgtctgccgtggctgctcgccattccccat

SEQ ID NO: 663406 - DNA, 75 bp, synthetic construct
  source 1..75: mol_type = other DNA
ccgcaggcattactggcaacgctggtgtcgacaaccatcgcagcggtcggcgctttgttgattgccctgctggtg

SEQ ID NO: 663407 - DNA, 75 bp, synthetic construct
  source 1..75: mol_type = other DNA
ttattcttgggccaggtaatccaccgacgctggcagtaattagctggcagtggttaactcagggcgacgcggatc

SEQ ID NO: 663408 - DNA, 75 bp, synthetic construct
  source 1..75: mol_type = other DNA
gccttcgctgttggtcatatttctggtggtcattttaacccggctgtcactattggtttatgggcaggcggtcgt

SEQ ID NO: 663409 - DNA, 75 bp, synthetic construct
  source 1..75: mol_type = other DNA
atgtgattgcccaggttgtcggcggtattgtggcggcggcattgctgtatttaattgccagcggcaaagctggat

SEQ ID NO: 663410 - DNA, 75 bp, synthetic construct
  source 1..75: mol_type = other DNA
ccaggcggttattccatgctttccgcgctggtagttgaactggtattgagtgcaggtttcctgctggtgatccac

SEQ ID NO: 663411 - DNA, 75 bp, synthetic construct
  source 1..75: mol_type = other DNA
tccggcgaggagatgcaacgattaagccgggtaatggtattgagcaggcaactcactggatgaaattaccggaac

SEQ ID NO: 663412 - DNA, 75 bp, synthetic construct
  source 1..75: mol_type = other DNA
cgtgagttctggggctggtggatggaactggaagcgcaggaatcccgttttacctacagttaccagtttggtctg

SEQ ID NO: 663413 - DNA, 75 bp, synthetic construct
  source 1..75: mol_type = other DNA
atcagtattccggtgactaacacttccgttaacccggcgcgcagtactgcggttgctatcttccagggcggttgg

SEQ ID NO: 663414 - DNA, 75 bp, synthetic construct
  source 1..75: mol_type = other DNA
tgcagagtttgagttttttcagactttttctggctatattgctgctttttgtttctcctgctttggaattttcag

SEQ ID NO: 663415 - DNA, 75 bp, synthetic construct
  source 1..75: mol_type = other DNA
tttttgctggggttactacaaagcagtttcgcgccaaaagattatcgtcgttgggatgatatctgggaagacggg

SEQ ID NO: 663416 - DNA, 75 bp, synthetic construct
  source 1..75: mol_type = other DNA
acaataaccgatcaaaactgcgataatgctcgtgctgcacttcagcaaaaacaagatagtgaatataaaaagaaa

SEQ ID NO: 663417 - DNA, 75 bp, synthetic construct
  source 1..75: mol_type = other DNA
tgccagcagcaccagaagtacaggccgcgccacaggagcaggatgcagcagttgtcagttctcgtgacgacgaag

SEQ ID NO: 663418 - DNA, 75 bp, synthetic construct
  source 1..75: mol_type = other DNA
atttacctttaccaaaaacctttgatgacctggtctttccctggcttgcaccgacgcgtaccagtgaactggatg

SEQ ID NO: 663419 - DNA, 75 bp, synthetic construct
  source 1..75: mol_type = other DNA
gtgcggtggtaacggatgaacaagtcaataaacttcaggcctactggggaatgccacggcgtattcgtattgact

SEQ ID NO: 663420 - DNA, 75 bp, synthetic construct
  source 1..75: mol_type = other DNA
attctaagcttgttacaccgagcgttgaaagaagcatggttctctgagaagaaaaccacaaagcttgatttcggt

SEQ ID NO: 663421 - DNA, 75 bp, synthetic construct
  source 1..75: mol_type = other DNA
ttactgagcggggagtctgtgctgccagtaagtcagcgctggcggatatgtttgctgacctgaagagtaaagcac

SEQ ID NO: 663422 - DNA, 75 bp, synthetic construct
  source 1..75: mol_type = other DNA
cgaaacaaattaataacctgatatcgcaagagaagtttgatgttgatgcggcaatgaagaaagtgtctgaactgg

SEQ ID NO: 663423 - DNA, 75 bp, synthetic construct
  source 1..75: mol_type = other DNA
gaaatggtcgatgaaatatttcagtcaattgtaatcgcggggcgggtttgtgatgagcgcggatatgtcacgaag

SEQ ID NO: 663424 - DNA, 75 bp, synthetic construct
  source 1..75: mol_type = other DNA
agagccgggacagggatgcagagtatgaagccctgtaccgtgacattctgcctgaacttgacctggtactgtggc

SEQ ID NO: 663425 - DNA, 75 bp, synthetic construct
  source 1..75: mol_type = other DNA
cgtaatcagggtggactcacggcatttgaactgggttcacacggtattcctcacaccctgattgccgacaatgcg

SEQ ID NO: 663426 - DNA, 75 bp, synthetic construct
  source 1..75: mol_type = other DNA
atgaatattaaaggtaaacactaccgaacggtctgggtttccggggatggaaaagcggtagagatcatcgatcag

SEQ ID NO: 663427 - DNA, 75 bp, synthetic construct
  source 1..75: mol_type = other DNA
atgcctcggcgtattcgtattgattttaagacaacctcaattggcaactgcgatatttgcggtagtcagagcggc

SEQ ID NO: 663428 - DNA, 75 bp, synthetic construct
  source 1..75: mol_type = other DNA
ttatgcgacctatcgttacttgcaggcgttcccggtcgattttattaagatcgataagtcgtttgtgcaaatggc

SEQ ID NO: 663429 - DNA, 75 bp, synthetic construct
  source 1..75: mol_type = other DNA
gcgttcactttttacagggctatttgtactccccgccagttccgggtaataaatttatctctgaatgggtaatga

SEQ ID NO: 663430 - DNA, 75 bp, synthetic construct
  source 1..75: mol_type = other DNA
ttgacaagtcgtttgtgcaaatggcgagtgttgacgaaatctccggccatattgtggacaatattgtcgaactgg

SEQ ID NO: 663431 - DNA, 75 bp, synthetic construct
  source 1..75: mol_type = other DNA
caggggtactgacgggctgtgaagtgcttgttcgctgggaacatccgcaaacgggaattatcccaccggatcagt

SEQ ID NO: 663432 - DNA, 75 bp, synthetic construct
  source 1..75: mol_type = other DNA
catccggtcttattgtcataatgacccgccaactgatgaaacagactgcggatattctgatgccggtaaaacatt

SEQ ID NO: 663433 - DNA, 75 bp, synthetic construct
  source 1..75: mol_type = other DNA
atccgcaggtagtctccgccacgggaagtaaaaataaattttatatccctgacaaccattttcatcatgttatca

SEQ ID NO: 663434 - DNA, 75 bp, synthetic construct
  source 1..75: mol_type = other DNA
ttgggcttgatgtcactcaaaaactatggtgttcaatacgtcatgtggcgccatcctctaacacctcgtctgccg

SEQ ID NO: 663435 - DNA, 75 bp, synthetic construct
  source 1..75: mol_type = other DNA
atgaactcgttttcacttctgacaacctcgtggttgcccgttcgttttaaagacggaacgacaggcaaactggca

SEQ ID NO: 663436 - DNA, 75 bp, synthetic construct
  source 1..75: mol_type = other DNA
atgcgccgtcaggtggcaaaggctatcgcaccggcttacgcggcggtgggccgatgactactctgattgaattac

SEQ ID NO: 663437 - DNA, 75 bp, synthetic construct
  source 1..75: mol_type = other DNA
cctggtcaagaaattaggaaacgataaaatcaaactggttctcgagctaaggaaggtgcgaataagcggggaaat

SEQ ID NO: 663438 - DNA, 75 bp, synthetic construct
  source 1..75: mol_type = other DNA
cgcgtaagcctggtctgagtatcgtggcggaaggggtagaaacccaggagcaggcggatttaatgatcggtaaag

SEQ ID NO: 663439 - DNA, 75 bp, synthetic construct
  source 1..75: mol_type = other DNA
gcttgttcgctgggagcacccgcaaacgggaattatccctccggatcagtttattcctctggcggagtcatctgg

SEQ ID NO: 663440 - DNA, 75 bp, synthetic construct
  source 1..75: mol_type = other DNA
tggtttgatggcgtagatgcacgttgtgacatgcagatgataattattatcattttgcgggtcctttccggcgat

SEQ ID NO: 663441 - DNA, 75 bp, synthetic construct
  source 1..75: mol_type = other DNA
tttgtactgacgatgattacgctatcaggtaacagccggaaattaaaagcctgccgaatatctgccagatacctt

SEQ ID NO: 663442 - DNA, 75 bp, synthetic construct
  source 1..75: mol_type = other DNA
gcagaaggtttacggctaaatttatttatgaagagccctttcgatcctgttgaggactatacagttcatgaaata

SEQ ID NO: 663443 - DNA, 75 bp, synthetic construct
  source 1..75: mol_type = other DNA
aaaccccaacttaaagctcttgttgatgatcatgagcagaagatacagtccgggcaagtcctctttaatgaggac

SEQ ID NO: 663444 - DNA, 75 bp, synthetic construct
  source 1..75: mol_type = other DNA
tgacctgtgccgggtggtctgcgcgggtcgggatgctgcgcgttgagttcagcgcggagtttaagcaggtggtga

SEQ ID NO: 663445 - DNA, 75 bp, synthetic construct
  source 1..75: mol_type = other DNA
acgacaccatgcaagggctggtaatgctgattggcaccactgtgctacttattggcgtcgtacatgccgctggcg

SEQ ID NO: 663446 - DNA, 75 bp, synthetic construct
  source 1..75: mol_type = other DNA
ttcctgcggtctggctttcgctcggtattctcggcaagaagttcgcgattcttgcgcgccgctacaatgcggtga

SEQ ID NO: 663447 - DNA, 75 bp, synthetic construct
  source 1..75: mol_type = other DNA
tactgccgaagtaatgaaagacggcgaaaatgcaattgtaacaccaggcaacatagatacatcagtcaacttaaa

SEQ ID NO: 663448 - DNA, 75 bp, synthetic construct
  source 1..75: mol_type = other DNA
ttcagagtcaaattattacagataatcacttccttcatcatccaaaagtcgacagtgagttaacacgtaaatatg

SEQ ID NO: 663449 - DNA, 75 bp, synthetic construct
  source 1..75: mol_type = other DNA
acctgggcttccaccctatcgtgccctcgttactactaagtttgctggctttcctggtcggaaaccgtttcggta

SEQ ID NO: 663450 - DNA, 75 bp, synthetic construct
  source 1..75: mol_type = other DNA
ctaagtgcgatgatcgttggcggcgtgctgtatgccgtactcgcgacgctgaatattcagtacctgggcttccac

SEQ ID NO: 663451 - DNA, 75 bp, synthetic construct
  source 1..75: mol_type = other DNA
gctgtgatttattttcaactctatcttcacttaattttagcaccgaggatattacaggtttgactccggccaact

SEQ ID NO: 663452 - DNA, 75 bp, synthetic construct
  source 1..75: mol_type = other DNA
atggaaaagaataattattttaccgttaataacattacctatgcgttgatgctttcactatcgggtgtgccggct

SEQ ID NO: 663453 - DNA, 75 bp, synthetic construct
  source 1..75: mol_type = other DNA
acattctatgtaacagataatgcaggtaatcgtgtagaagttggggtcgttaatcctggtaatggtggaaggcag

SEQ ID NO: 663454 - DNA, 75 bp, synthetic construct
  source 1..75: mol_type = other DNA
aaaaaagcccggttggctgtctgttttatgattttttcggcgggaataccctcaaggctgatgtctctatttcgg

SEQ ID NO: 663455 - DNA, 75 bp, synthetic construct
  source 1..75: mol_type = other DNA
ccgttacagcacagggggcagccctgcatgcgggtggtatgaatggtagtacccgcttactggtcgatactgacg

SEQ ID NO: 663456 - DNA, 75 bp, synthetic construct
  source 1..75: mol_type = other DNA
acagatatttcgatgctgctggcttgaaaaatgtttctttgggactgtctgcctcccgttcgaaataccagaact

SEQ ID NO: 663457 - DNA, 75 bp, synthetic construct
  source 1..75: mol_type = other DNA
ctcgacttgaggatgaaacaaaacaaggtaagtcctggcgtttaagttattcaaaacgttttgatgatgtaaatg

SEQ ID NO: 663458 - DNA, 75 bp, synthetic construct
  source 1..75: mol_type = other DNA
aacgctgacctgaaaacgtacagcgtgacgctgtctgtctcccgtgaggaggccacggcgctggagtcgtttctg

SEQ ID NO: 663459 - DNA, 75 bp, synthetic construct
  source 1..75: mol_type = other DNA
aacatacagggtgacgctttccgtgacccgggaggaggcccggcatctggaagcgtttctggcagagcacggggg

SEQ ID NO: 663460 - DNA, 75 bp, synthetic construct
  source 1..75: mol_type = other DNA
ggcgagcgtgttgcgggaaaagtgatcttcgaaacgcaatcgacccacaaaatgctggcccgttgcgccaggcga

SEQ ID NO: 663461 - DNA, 75 bp, synthetic construct
  source 1..75: mol_type = other DNA
cgcatggcgtcttttataaagatgagcccatcaaagaactggagtcggcgctgctggcgcaaggctttcagatta

SEQ ID NO: 663462 - DNA, 75 bp, synthetic construct
  source 1..75: mol_type = other DNA
tctggaatatgccactgaagtgatcattgcgtggcaatccatctgttttagctggaattatgacgccagtctcat

SEQ ID NO: 663463 - DNA, 75 bp, synthetic construct
  source 1..75: mol_type = other DNA
atgagcacttttaccaaagaatggctacaaaatacgattaccagtattgagtcagcacgagatgaaatgccattc

SEQ ID NO: 663464 - DNA, 75 bp, synthetic construct
  source 1..75: mol_type = other DNA
caggtgcctgcattgctgctggacgatggtactttgctgacggaaggcgtagcgattatgcagtatcttgccgac

SEQ ID NO: 663465 - DNA, 75 bp, synthetic construct
  source 1..75: mol_type = other DNA
cccaacactcaggtcggcgtatatgtcgactggtttaatgatggcaatccaacttgggatgacggtgatggcgaa

SEQ ID NO: 663466 - DNA, 75 bp, synthetic construct
  source 1..75: mol_type = other DNA
tttacaaagtcgtggaatgatatgtcatgtgcagaaaaattactgaaaattcttagtcttggtttatggagtcca

SEQ ID NO: 663467 - DNA, 75 bp, synthetic construct
  source 1..75: mol_type = other DNA
tgctcaagctagtcaactcaatgcgggaaattcacaaccattgcctaatgcttgcctcaacataagtctctctca

SEQ ID NO: 663468 - DNA, 75 bp, synthetic construct
  source 1..75: mol_type = other DNA
ttatggttcctaaacaggtaacgccggaaatcagcaacgcgataaacgttgtgggtcaacgctgtacatgcggaa

SEQ ID NO: 663469 - DNA, 75 bp, synthetic construct
  source 1..75: mol_type = other DNA
tccccgcgtagatggcattcgcaagcctgccacacctttattaccaggcactacgctggcgagtttttaccctta

SEQ ID NO: 663470 - DNA, 75 bp, synthetic construct
  source 1..75: mol_type = other DNA
acgtcggcagttctggatctggctgcctatattattaccggcgctgccgctggtcgcaggtcagtacacattgac

SEQ ID NO: 663471 - DNA, 75 bp, synthetic construct
  source 1..75: mol_type = other DNA
agtacacgctggcgctatggctgaacctggatggaagctggacggcggtggtctgggggcatctgctgtgggtaa

SEQ ID NO: 663472 - DNA, 75 bp, synthetic construct
  source 1..75: mol_type = other DNA
agcgccgtgctggtatcagtgatgctgaaattaccgctgcaatggaaaataaattgaagatcaacatggagcgcc

SEQ ID NO: 663473 - DNA, 75 bp, synthetic construct
  source 1..75: mol_type = other DNA
gcgtcgccagctatggttatggatgcccattttattaccggcactgccattagtggcaggtcaatacacgctggc

SEQ ID NO: 663474 - DNA, 75 bp, synthetic construct
  source 1..75: mol_type = other DNA
cggttaattttgattgcgcaaacactgggctggtcgcgggccaaaatcttcttttacgtgaaatgtccgcttatg

SEQ ID NO: 663475 - DNA, 75 bp, synthetic construct
  source 1..75: mol_type = other DNA
ggtgattcctcatacccctcaaacagatcctcttggcgggtctgcaccattcagttctgtgtttatggatgcatg

SEQ ID NO: 663476 - DNA, 75 bp, synthetic construct
  source 1..75: mol_type = other DNA
atgaggcgttgtttaaatgcattatggcttttgctttttgtttctgtcggagctagcggtggtgatgaagcgtct

SEQ ID NO: 663477 - DNA, 75 bp, synthetic construct
  source 1..75: mol_type = other DNA
gtagcgaaagagaaatggacgtcgacagccattattactcagccagatgtggggcaaatagccggctataacaat

SEQ ID NO: 663478 - DNA, 75 bp, synthetic construct
  source 1..75: mol_type = other DNA
agtcgatgattaagcatgaagcgactcgcccgttggtgttctcaccaaactactatcagactcgtcaaaacctgc

SEQ ID NO: 663479 - DNA, 75 bp, synthetic construct
  source 1..75: mol_type = other DNA
agggtgaattaactctacttcgcaccgtcgccgcaaatactcatcggcgttttaaaaagatggtcacctttgatt

SEQ ID NO: 663480 - DNA, 75 bp, synthetic construct
  source 1..75: mol_type = other DNA
atgctggctcattcaatttccatgttattgcagctgtactgaaagacagtagcaatacagttgtaactccaggca

SEQ ID NO: 663481 - DNA, 75 bp, synthetic construct
  source 1..75: mol_type = other DNA
gaatggggatggcaggagttactgtttccacaggcaattagagggatttcgcagcagtttgcgatggcccccatc

SEQ ID NO: 663482 - DNA, 75 bp, synthetic construct
  source 1..75: mol_type = other DNA
tgttccgccgcctgcgcaccgctcgctttctcaaggcatacggtaccgccagcgccgccgtggtgggttactccg

SEQ ID NO: 663483 - DNA, 75 bp, synthetic construct
  source 1..75: mol_type = other DNA
agtttttatgccaccccgaagcggcaacagccatatgctcggctttctatcaatctttcaatgtgccagccttaa

SEQ ID NO: 663484 - DNA, 75 bp, synthetic construct
  source 1..75: mol_type = other DNA
attattgacactatatcatgctatgtgatatctgttgtcgaatcattcataataaatgagacaggggaatctctc

SEQ ID NO: 663485 - DNA, 75 bp, synthetic construct
  source 1..75: mol_type = other DNA
cagctatcgttactcaacctgatgtggggcaaatcgctggttataccaacgcgatgaatgtaatttacggtccgg

SEQ ID NO: 663486 - DNA, 75 bp, synthetic construct
  source 1..75: mol_type = other DNA
actcggcaatgcaaagctttcactcaatggtgttgatatacctgcaaatgcacaaaaattgcttcgcgatgcact

SEQ ID NO: 663487 - DNA, 75 bp, synthetic construct
  source 1..75: mol_type = other DNA
tgtatatccacttcccaatgaattaggcagagtatctgctcgtttttcagatggttcatccttaagaatttccgt

SEQ ID NO: 663488 - DNA, 75 bp, synthetic construct
  source 1..75: mol_type = other DNA
taatgggggagatcctgacctgaacggcaggcaaaatctggcgggtatcaatgcggatggtctcagaatgcgtat

SEQ ID NO: 663489 - DNA, 75 bp, synthetic construct
  source 1..75: mol_type = other DNA
gaacttgccccggtgattacagacaccgggcgtaaaacctgggtgaagtcttcactggagcactatgttgcagcc

SEQ ID NO: 663490 - DNA, 75 bp, synthetic construct
  source 1..75: mol_type = other DNA
catgcggtatatcatcagttgtcgcgtttaattacacttcgttgcagtcataacgagtttcatccggataatgat

SEQ ID NO: 663491 - DNA, 75 bp, synthetic construct
  source 1..75: mol_type = other DNA
attcaacgcgccatttatggacgacatttagcgacgatcaaattgacctcaattatcgcagcccagatgtattac

SEQ ID NO: 663492 - DNA, 75 bp, synthetic construct
  source 1..75: mol_type = other DNA
cgcattgaaattcttttcgaccgccagagcacaaaaaacctcaaatcaggcacacttcaggcgctacagaatgaa

SEQ ID NO: 663493 - DNA, 75 bp, synthetic construct
  source 1..75: mol_type = other DNA
gatgctttctcaccgcaactgctgttcctggatgccgaccgtaacacgttaatacgccgttacagcgatacgcgc

SEQ ID NO: 663494 - DNA, 75 bp, synthetic construct
  source 1..75: mol_type = other DNA
ttaccggcgtttttataacggacattttctgcctgtggatcaggaaagcgcacagattctttccaccccaatgca

SEQ ID NO: 663495 - DNA, 75 bp, synthetic construct
  source 1..75: mol_type = other DNA
gtttaatgtcagtgaaaatattcagcatataaatattactggcctgcacggtcgggatctgattagtgaagttga

SEQ ID NO: 663496 - DNA, 75 bp, synthetic construct
  source 1..75: mol_type = other DNA
aaaatcggatataaccgtgcgattaaccgtaaaaaatatcacagtaaagagataacccgagaactgaacgattaa

SEQ ID NO: 663497 - DNA, 75 bp, synthetic construct
  source 1..75: mol_type = other DNA
gaacccactgcgtggcttgctaccagaaagcgaaatattagcgctggtcgaggcattacagcaggaaggggcatt

SEQ ID NO: 663498 - DNA, 75 bp, synthetic construct
  source 1..75: mol_type = other DNA
cttccagcaacaccacctggtttaacttccttgcctctcacgatggcatcgggcttaacccactgcgggggttgt

SEQ ID NO: 663499 - DNA, 75 bp, synthetic construct
  source 1..75: mol_type = other DNA
ttaattacgcttcgtcgccggcataaagaatttcatccggataatagttttaccatcgatacggttaattcatct

SEQ ID NO: 663500 - DNA, 75 bp, synthetic construct
  source 1..75: mol_type = other DNA
atgaaacagaaaattacggattacttggcagaaatttacggtggaacatttaccgcaactcatttacagaaactt

SEQ ID NO: 663501 - DNA, 75 bp, synthetic construct
  source 1..75: mol_type = other DNA
acggtcaaccaagttatataatggcgcattattttggcgtatctgacgatgcgatgacttatcgtttaaagaact

SEQ ID NO: 663502 - DNA, 75 bp, synthetic construct
  source 1..75: mol_type = other DNA
atgcaggagactttttttgataaacaggaggatgttttgagtctgacattaccattaatgtatttccagacaggt

SEQ ID NO: 663503 - DNA, 75 bp, synthetic construct
  source 1..75: mol_type = other DNA
cttgttatggcaggaacaccaccagcacaagccgaaaagatgttcatggcgtatgtgaagaacaacgtaaaaaat

SEQ ID NO: 663504 - DNA, 75 bp, synthetic construct
  source 1..75: mol_type = other DNA
gggtggcattacatacgcacaactggtagcgtccagccaggctatcgatattaagcgagcaaataacgccgtaga

SEQ ID NO: 663505 - DNA, 75 bp, synthetic construct
  source 1..75: mol_type = other DNA
gcatacattgtgacaataatggaaaactgtcttagcgaaatgattaaaagcgttgtattgtcacataacagatat

SEQ ID NO: 663506 - DNA, 75 bp, synthetic construct
  source 1..75: mol_type = other DNA
gtaaatacacggttttatactggatgtaagaaatggatgctacttatgtgtttgcttcctgtaacaataagcttt

SEQ ID NO: 663507 - DNA, 75 bp, synthetic construct
  source 1..75: mol_type = other DNA
atgggaaaaactggatctgatcctcaaaatgctgggatacccatcgcgatggagaactcagtcaatgttccattc

SEQ ID NO: 663508 - DNA, 75 bp, synthetic construct
  source 1..75: mol_type = other DNA
cgctgttccctccggcgttagtcgaaacattgttcgacgcctactgccagttgattaaccaactctgcgatgacg

SEQ ID NO: 663509 - DNA, 75 bp, synthetic construct
  source 1..75: mol_type = other DNA
attactggtcaagtcttgaactccattaaaattaacaaactaaaatgtataaatggattaaacgagattattttt

SEQ ID NO: 663510 - DNA, 75 bp, synthetic construct
  source 1..75: mol_type = other DNA
caaccaaaaaaagtgaaatttcttcacttttttacacttatttattgcgttgatttggtgattatgatgataaaa

SEQ ID NO: 663511 - DNA, 75 bp, synthetic construct
  source 1..75: mol_type = other DNA
tatcagaaacgccaggccgctttaagcacaaaactggcaaaggacaacggcaagattgacaagctacgtgaccag

SEQ ID NO: 663512 - DNA, 75 bp, synthetic construct
  source 1..75: mol_type = other DNA
taacaaatggattaactgtccacctgataacttcgaaatattaggtgagctaataaccattaatagaattatcaa

SEQ ID NO: 663513 - DNA, 75 bp, synthetic construct
  source 1..75: mol_type = other DNA
acgctgacgccagcgtccggctggtgctcatttgtcagcacgacgccagcgccggtcagacgatattcccgccct

SEQ ID NO: 663514 - DNA, 75 bp, synthetic construct
  source 1..75: mol_type = other DNA
cgagaccaatgttccgcataaagacaacattgcttactttggcgcaggcgatgacgaagcacatatggtgtacca

SEQ ID NO: 663515 - DNA, 75 bp, synthetic construct
  source 1..75: mol_type = other DNA
gtttctaaggagtaccgttgtcaaaggcacacgggtatgaatacgggcaacacgatgaatgctttagctatttga

SEQ ID NO: 663516 - DNA, 75 bp, synthetic construct
  source 1..75: mol_type = other DNA
aagtgagaaatattgtcaacatgaagctggcgcacccatggaagctgaaagatatttgtgactgcctgtacatca

SEQ ID NO: 663517 - DNA, 75 bp, synthetic construct
  source 1..75: mol_type = other DNA
gagcagaccgttacccgctgggtgaacgcgctggtcagcgaactgaacgacaaagaacagcacggcagccagtgg

SEQ ID NO: 663518 - DNA, 75 bp, synthetic construct
  source 1..75: mol_type = other DNA
tgcttccggaggtggttgagcgtgttgaatgccggaatcagggacaggagaaatccagaacgttgatgaccggta

SEQ ID NO: 663519 - DNA, 75 bp, synthetic construct
  source 1..75: mol_type = other DNA
gtacgacgacagccatccagaagccctggctcgtaatactcagaaaattttccgctgggtggagaaagacaccac

SEQ ID NO: 663520 - DNA, 75 bp, synthetic construct
  source 1..75: mol_type = other DNA
gccaggggcatcgcagaaatcaatatcacgaaacaacgtaacggttctctggggacgatttaccggcgtttttat

SEQ ID NO: 663521 - DNA, 75 bp, synthetic construct
  source 1..75: mol_type = other DNA
ccgtattttcgcccaactctggcacgtcggccgtatgtctcacaccactcttcagccgggccacattgcaccggt

SEQ ID NO: 663522 - DNA, 75 bp, synthetic construct
  source 1..75: mol_type = other DNA
aatccggagaaccgggcccggttgtaccaagccagccacgcgcgctggaaacgcatgaagttaaacgcatcactg

SEQ ID NO: 663523 - DNA, 75 bp, synthetic construct
  source 1..75: mol_type = other DNA
ctcatcaccgaagggatgccggtttcagaagaaggccggggttacctttatacccctggtatctacaacgacgaa

SEQ ID NO: 663524 - DNA, 75 bp, synthetic construct
  source 1..75: mol_type = other DNA
tgcccagggtttgccgaacaagatgattgcccgccgcctggacatcaccgaaagcacagtaaaagtgcacgtcaa

SEQ ID NO: 663525 - DNA, 75 bp, synthetic construct
  source 1..75: mol_type = other DNA
gtgatcacgcgcacattaatgaaggcataaaaaaaaaagccggcatcatgccggcccaaaaaaatataaacaaga

SEQ ID NO: 663526 - DNA, 75 bp, synthetic construct
  source 1..75: mol_type = other DNA
atgattgttgcgccagacggcctatgtgatcgcgcgcacattaatgaaggcataaaaaaagccggcttcatgccg

SEQ ID NO: 663527 - DNA, 75 bp, synthetic construct
  source 1..75: mol_type = other DNA
gtgtggagtccagacccaataaacgtcccatgaactcagacctgaaaaattccggagaaatagaggcggatgcag

SEQ ID NO: 663528 - DNA, 75 bp, synthetic construct
  source 1..75: mol_type = other DNA
cactgccggcggacgttttttctgtacgagcgtatcgggatatctacacaggcatctgcagacaggcccgtgttt

SEQ ID NO: 663529 - DNA, 75 bp, synthetic construct
  source 1..75: mol_type = other DNA
atttacgcgggaatttgcagacaggcccgtgtatccggcgtcattgaccccgtactgctgtgcaatgagatgccg

SEQ ID NO: 663530 - DNA, 75 bp, synthetic construct
  source 1..75: mol_type = other DNA
tggacgcaaaaacaggcggcatggaacccggcgacctggtgttcattgcggctcgtccgtcaatgggcaaaaccg

SEQ ID NO: 663531 - DNA, 75 bp, synthetic construct
  source 1..75: mol_type = other DNA
gccagcgatatatattcaaagtattcttggctcgcgtaatgattacgcaggtgtcgaaaaactcggatataaccg

SEQ ID NO: 663532 - DNA, 75 bp, synthetic construct
  source 1..75: mol_type = other DNA
tgggcgcaaagtctgagcttgccctccggtaaaacgacctggtttaacttcctcgcctctcacgatggcatcggg

SEQ ID NO: 663533 - DNA, 75 bp, synthetic construct
  source 1..75: mol_type = other DNA
gattaattacacagcgacgtaaaaaacactgggatgaaagtgatgtcgtgttaatcacctatgccgatcaatttc

SEQ ID NO: 663534 - DNA, 75 bp, synthetic construct
  source 1..75: mol_type = other DNA
ccggtgattactgatactgggcgtaaaacttgggtgaagtcttcactggagcactatgttgcagcgttgcgacgc

SEQ ID NO: 663535 - DNA, 75 bp, synthetic construct
  source 1..75: mol_type = other DNA
attacgtgatgcgcatacctgtgaagcagctgaagatgctctgaaggatgcgcagaacatgatggcctcattgtc

SEQ ID NO: 663536 - DNA, 75 bp, synthetic construct
  source 1..75: mol_type = other DNA
gtgtaatgagatgccggaacttgccccggtgattactgataccgggcgcaaaacctgggtgaagtcgtcactgga

SEQ ID NO: 663537 - DNA, 75 bp, synthetic construct
  source 1..75: mol_type = other DNA
gtgcgtcgcggcttccctgacgacggcgaagaggcacaacggcgaattattatggcggaaatcccctcgccgctg

SEQ ID NO: 663538 - DNA, 75 bp, synthetic construct
  source 1..75: mol_type = other DNA
gtacgaagacagccatccggaagccctggctcgtaatacacagaaaattttccgctgggtggagaaagacactcc

SEQ ID NO: 663539 - DNA, 75 bp, synthetic construct
  source 1..75: mol_type = other DNA
ctcggacctgaaaaactccggggaaatcgaggcggatgccgacatcattctgatgctttacagggatgaggtata

SEQ ID NO: 663540 - DNA, 75 bp, synthetic construct
  source 1..75: mol_type = other DNA
agccagtggaaggacgacgccgctatctcactggaggaatacaacgctatccgtaagcgctggaaaccggggcgc

SEQ ID NO: 663541 - DNA, 75 bp, synthetic construct
  source 1..75: mol_type = other DNA
tacgctgattcgccctgaaaccgtgctggctatcgctcattccagattccagaacgcccacactcaccctgcgcc

SEQ ID NO: 663542 - DNA, 75 bp, synthetic construct
  source 1..75: mol_type = other DNA
gcatcgccaggatgcatcgctggtgagcattcgttcgtggccagaatttatcggtacgaccagcggttacagcta

SEQ ID NO: 663543 - DNA, 75 bp, synthetic construct
  source 1..75: mol_type = other DNA
tggatatggtactgcactgggagatgatgctgaagccagaggaaaatcttccactgcggtgggggcacaggccac

SEQ ID NO: 663544 - DNA, 75 bp, synthetic construct
  source 1..75: mol_type = other DNA
acaaagtaatggatcaactgcgtgctgcaaaagtcgaagaaatgggtaaaatccacaaagcgttttcaggtgatg

SEQ ID NO: 663545 - DNA, 75 bp, synthetic construct
  source 1..75: mol_type = other DNA
gtagcggagactggtcatgctctgaccaatattgatgctgtaatccgtggcgtctatgtcgatgacttggccgat

SEQ ID NO: 663546 - DNA, 75 bp, synthetic construct
  source 1..75: mol_type = other DNA
cgctggtgagtattcgttcgtggccggagtttatcggtacgaccagcggttacagctatattaaaccaaaaggtg

SEQ ID NO: 663547 - DNA, 75 bp, synthetic construct
  source 1..75: mol_type = other DNA
aacaacttaaagcaatgctggcgaagcacggcattcgtcatgacaccacggtcattctgtacgggcgtgatgttt

SEQ ID NO: 663548 - DNA, 75 bp, synthetic construct
  source 1..75: mol_type = other DNA
gctttggcgcaatcggtattggcagtcgtgaatacgacactttttgtggtgcgatcgataaactcgaggcagaac

SEQ ID NO: 663549 - DNA, 75 bp, synthetic construct
  source 1..75: mol_type = other DNA
gctggatggcggctggcaaacctggtccgacgcgggactgcctgttgagcgcggaacgccaccgaaagtgaaagc

SEQ ID NO: 663550 - DNA, 75 bp, synthetic construct
  source 1..75: mol_type = other DNA
cgcaggcagcgactcaacccatatggaagatttccataatccagacggtacgatgcgcagcgccgatgatattac

SEQ ID NO: 663551 - DNA, 75 bp, synthetic construct
  source 1..75: mol_type = other DNA
acacggcattcgtcatgacaccactgttattctttatagtcgcgacgtttatgcagcagcgcgcgtggcgcagat

SEQ ID NO: 663552 - DNA, 75 bp, synthetic construct
  source 1..75: mol_type = other DNA
cgacaaaaattctggatgaaagagtgacagccaatacacagacagcagaagtacataagctgcttatttcggaga

SEQ ID NO: 663553 - DNA, 75 bp, synthetic construct
  source 1..75: mol_type = other DNA
gcggtcagggactgtcaggaggacagaggcagatggttgccctgacgagaatggtactgggttctccccgggtgg

SEQ ID NO: 663554 - DNA, 75 bp, synthetic construct
  source 1..75: mol_type = other DNA
gtgaagagtatttttgaaggattatcacaggtaacggcattactgggtacacctgtatctgctgagacgctggct

SEQ ID NO: 663555 - DNA, 75 bp, synthetic construct
  source 1..75: mol_type = other DNA
ggatgcgaaagcgccaatggttatggacaggaattttaaaccggggtttcgtattgatttgcatattaaagacct

SEQ ID NO: 663556 - DNA, 75 bp, synthetic construct
  source 1..75: mol_type = other DNA
cagcaggcccgtctggctatgcagggggtgaatgaaatagttcgccgcccggtggaacgggaaagtcagacacat

SEQ ID NO: 663557 - DNA, 75 bp, synthetic construct
  source 1..75: mol_type = other DNA
tgagtgtgctgcaaagttaatccggagttatctgacggatgttgcgggtaagaaggcagacctgattatcagctc

SEQ ID NO: 663558 - DNA, 75 bp, synthetic construct
  source 1..75: mol_type = other DNA
tattaatgcctccatgcgggaatcatcgcagcgccagggattacttgtggaggctctggacggaatagaaactct

SEQ ID NO: 663559 - DNA, 75 bp, synthetic construct
  source 1..75: mol_type = other DNA
ttttatcgcctgggcggagtataccggcgaatgtgactatgacgcgtttgatgatgcgtaccgcggcgaggcgga

SEQ ID NO: 663560 - DNA, 75 bp, synthetic construct
  source 1..75: mol_type = other DNA
tgggatgccgagtttatgttccaggactgggaaggcattccgtcgcagttcgtctctgaatgctccattgactgg

SEQ ID NO: 663561 - DNA, 75 bp, synthetic construct
  source 1..75: mol_type = other DNA
acggcagggaggatttttacgaggcctgtcaggcgctgcatgccgatgaatgggatgccgagtttatgttccagg

SEQ ID NO: 663562 - DNA, 75 bp, synthetic construct
  source 1..75: mol_type = other DNA
gcgctgggtgagaatggcattattgaaggcgcgaagccaggtacggtattgatcgatatgagttctatcgcaccg

SEQ ID NO: 663563 - DNA, 75 bp, synthetic construct
  source 1..75: mol_type = other DNA
accagaacgcgcactgcaaggaaaagtggtgttgccgctggcgacaggtggcacggtggctcacctgctggcggt

SEQ ID NO: 663564 - DNA, 75 bp, synthetic construct
  source 1..75: mol_type = other DNA
cttctggcaggcgctgcaccgccgcgatgttcaggttcccgatcttctgtctctgcgaggtaatgcccatgcgta

SEQ ID NO: 663565 - DNA, 75 bp, synthetic construct
  source 1..75: mol_type = other DNA
atgtagcagaacacctggctgaaaagctggaagaggcgggttttaccaccgaaacgctgcacggtccgctgttgg

SEQ ID NO: 663566 - DNA, 75 bp, synthetic construct
  source 1..75: mol_type = other DNA
gtagccagaaagtcgatgccggtaaaaaagaagttatcggtcttgatgatttgcctccaccgccgccagaagtaa

SEQ ID NO: 663567 - DNA, 75 bp, synthetic construct
  source 1..75: mol_type = other DNA
taccaggacaaaattcacaaacacatactacgtgatcgcttcctgtccagcttcaagcagccttgtcgattccga

SEQ ID NO: 663568 - DNA, 75 bp, synthetic construct
  source 1..75: mol_type = other DNA
caccgtcgactgctccttaatgaggagtcatggaacctggttatggatgccatcactaatccgccagtaccaaat

SEQ ID NO: 663569 - DNA, 75 bp, synthetic construct
  source 1..75: mol_type = other DNA
cgtttcagacccgcgtgaacaaaaccacgcgcacgctggagattgccgaatcgttcggtcttggcctggacgaaa

SEQ ID NO: 663570 - DNA, 75 bp, synthetic construct
  source 1..75: mol_type = other DNA
gataccttccgccatgcgaatccgcaaacagcagatcgtttctcatggtttgattaccgctcaaaaggttttgac

SEQ ID NO: 663571 - DNA, 75 bp, synthetic construct
  source 1..75: mol_type = other DNA
acctttgattcttcagcccgacaggcagtccccctgacagacctcctgagtttccagatgccagcactaacagcc

SEQ ID NO: 663572 - DNA, 75 bp, synthetic construct
  source 1..75: mol_type = other DNA
tggtgaccggtcacagacgtgagagcttcggtcgtggctttgaagaaatttgccacgcactggcagaaatcgcca

SEQ ID NO: 663573 - DNA, 75 bp, synthetic construct
  source 1..75: mol_type = other DNA
acaccaccgagcgcccggaagctgttaccgctggaacggtgcgtctggtggggacggataaacaacggatcgttg

SEQ ID NO: 663574 - DNA, 75 bp, synthetic construct
  source 1..75: mol_type = other DNA
tcatagaatccaactggtagttgaaatatataaagcagtcctgcaacctaagcaatatccacgttttccactcaa

SEQ ID NO: 663575 - DNA, 75 bp, synthetic construct
  source 1..75: mol_type = other DNA
caacaaatgaccagaataccgatctacaacgtaatgcgtttatttgtgccggaagtgagttgattgttgcgcgaa

SEQ ID NO: 663576 - DNA, 75 bp, synthetic construct
  source 1..75: mol_type = other DNA
atcgaccccgataaaaagatgattctggtgaccggtcacaggcgtgagagtttcggtcgtggctttgaagaaatc

SEQ ID NO: 663577 - DNA, 75 bp, synthetic construct
  source 1..75: mol_type = other DNA
ggcacggataagcagcgaattgtcgaggaagtgacgcgtcttttaaaagacgaaaacgaatatcaaactatgagc

SEQ ID NO: 663578 - DNA, 75 bp, synthetic construct
  source 1..75: mol_type = other DNA
atcgctacgctgaaaaattacatcaccgaaagcggtaagattgtcccaagccgtatcaccggtacccgtgcaaaa

SEQ ID NO: 663579 - DNA, 75 bp, synthetic construct
  source 1..75: mol_type = other DNA
gaactgaaactggtggcgctggaagatggcgtttcgctgctcaaccgtctgcggatggaaggcaaaaacagtaaa

SEQ ID NO: 663580 - DNA, 75 bp, synthetic construct
  source 1..75: mol_type = other DNA
accacgctagagttcacgcccgccgaagtggcggcacaacgtcaggcatggattagcgaatggcaacgcgccgtc

SEQ ID NO: 663581 - DNA, 75 bp, synthetic construct
  source 1..75: mol_type = other DNA
attgtcgtcgcgcagctctctcccgaattcaccgcccggctggtggaccgctggcgcgaactggaagaacaagta

SEQ ID NO: 663582 - DNA, 75 bp, synthetic construct
  source 1..75: mol_type = other DNA
tttctggcaggcacttcaccgccgtgatgttcaggttcctgaccttctttctctgcgaggtaatgcccatgcgta

SEQ ID NO: 663583 - DNA, 75 bp, synthetic construct
  source 1..75: mol_type = other DNA
atgcgtgtcatcaccctggcaggaagtcctcgctttccttctcgctccagctccttgctggaatatgcgcgggaa

SEQ ID NO: 663584 - DNA, 75 bp, synthetic construct
  source 1..75: mol_type = other DNA
tacggcctgtttttaaaaggtgaaagcgatctggtactgagttacaccacctctccggcttatcacattctcgaa

SEQ ID NO: 663585 - DNA, 75 bp, synthetic construct
  source 1..75: mol_type = other DNA
taactccagagggggtattgtcgcgtcgttccatcgtggccttatctcccttcatgaatgcttttaaccggatga

SEQ ID NO: 663586 - DNA, 75 bp, synthetic construct
  source 1..75: mol_type = other DNA
taccgctcattactctgctgctgacactgaatctggcattaggtttacttaatcgtatggccccgcaattatcca

SEQ ID NO: 663587 - DNA, 75 bp, synthetic construct
  source 1..75: mol_type = other DNA
tgccgctgtgcgaaccgctggcgaaattatcggtctgcaaatggggctgtcatttgcgacgtttgtcgatccggc

SEQ ID NO: 663588 - DNA, 75 bp, synthetic construct
  source 1..75: mol_type = other DNA
tcctccaatggaggtttccgaaaatatcaataacttaggatttaaagttaaaaattcacactacgtcttcgaagg

SEQ ID NO: 663589 - DNA, 75 bp, synthetic construct
  source 1..75: mol_type = other DNA
ttcatgaatgcctttaccctgatgatgtcggaggctgaacaccgaggaaaacgctggtatcacccaaggatggga

SEQ ID NO: 663590 - DNA, 75 bp, synthetic construct
  source 1..75: mol_type = other DNA
tagacaaaggtggcgttattgttcgtcctcaaattgaggttttcgaaaaaatcaataacttaggactacgacgta

SEQ ID NO: 663591 - DNA, 75 bp, synthetic construct
  source 1..75: mol_type = other DNA
tggggattttttggtcaacgactggacctgccagctatcataggcatgatgttgatttgtgccggtgtgttagtc

SEQ ID NO: 663592 - DNA, 75 bp, synthetic construct
  source 1..75: mol_type = other DNA
atgagaaacaggaaacctttgttgtcccgatgcgtaatgctggcgaactgacgctggtgaaaagttttgactggt

SEQ ID NO: 663593 - DNA, 75 bp, synthetic construct
  source 1..75: mol_type = other DNA
gccaagggcgcggaaaagccgcgctgattgcctggccgattgtcgcccggtcgccgccgcgctggcggcagtcaa

SEQ ID NO: 663594 - DNA, 75 bp, synthetic construct
  source 1..75: mol_type = other DNA
cctcattattttgtatggtttttatgaccgtttatatgacttagcctgtcataagcccccttataaaaaaccaca

SEQ ID NO: 663595 - DNA, 75 bp, synthetic construct
  source 1..75: mol_type = other DNA
cggcgctgccggcccggctttccggtcagaaggtagtgtatggctgtatgcagggaacaggtgtgatattccgtg

SEQ ID NO: 663596 - DNA, 75 bp, synthetic construct
  source 1..75: mol_type = other DNA
gtgcaatatttgcagaggtgattggtacaaccttaatgaagtattcagatggctttacacggttatggccctctg

SEQ ID NO: 663597 - DNA, 75 bp, synthetic construct
  source 1..75: mol_type = other DNA
gcagagatcgggcgtattgctgcaggtgcggtatctggcaatgtaaaaaccagtgcaggtcgtcgtgatgctatc

SEQ ID NO: 663598 - DNA, 75 bp, synthetic construct
  source 1..75: mol_type = other DNA
gtcgatggggtaataggcactgagacgatgtcgcagatgcactatatgcgacagctggatgtcgaggtatacccg

SEQ ID NO: 663599 - DNA, 75 bp, synthetic construct
  source 1..75: mol_type = other DNA
atgacacagggccggcgggaggataaatgcctgtctgcccgcgccgggaaaaaacgcgcgccggtggcgctgaaa

SEQ ID NO: 663600 - DNA, 75 bp, synthetic construct
  source 1..75: mol_type = other DNA
ggttaacggccgcacggtctatcagggatatctgttcgtcggcgagcaactgctgaatgagtccgggatgcgcca

SEQ ID NO: 663601 - DNA, 75 bp, synthetic construct
  source 1..75: mol_type = other DNA
aaaaatatctacaatgcactaacattcagacagtgacggtgcctgttcctgcgaagtttttacgtgcttcaaatg

SEQ ID NO: 663602 - DNA, 75 bp, synthetic construct
  source 1..75: mol_type = other DNA
cattttagataaagattacgccttctctgacggcgagatcctgatggtagataacgctgttcgtacgcattttga

SEQ ID NO: 663603 - DNA, 75 bp, synthetic construct
  source 1..75: mol_type = other DNA
tgacctgaatgaccgttacgcgccccctgaagttgtgcgtgagctggcacgaattgcactggcatcactggaagc

SEQ ID NO: 663604 - DNA, 75 bp, synthetic construct
  source 1..75: mol_type = other DNA
gtactgtgggcaccgattcgctttggtgctaccagtatcaactttgctaccgataagcccttcccttctccaccc

SEQ ID NO: 663605 - DNA, 75 bp, synthetic construct
  source 1..75: mol_type = other DNA
gctgtgcaggctttacgcagcaacgactgggatctctggcaagcagaagcctctatccgcaacaacaagatgtga

SEQ ID NO: 663606 - DNA, 75 bp, synthetic construct
  source 1..75: mol_type = other DNA
ttgctgaagaaatgaacacgacaaaatatagcgcaattgcatattatagacgatatttagcattacagaaaaaca

SEQ ID NO: 663607 - DNA, 75 bp, synthetic construct
  source 1..75: mol_type = other DNA
tggtggctgctggcaattactgtcttgtttggctggatgagtctggtcggcgtggtgcgggcggagtttttacgt

SEQ ID NO: 663608 - DNA, 75 bp, synthetic construct
  source 1..75: mol_type = other DNA
cttgtttggctggatgagtctggtcggcgtggtgcgggcggagtttttacgtacccgtaatttcgactacatccg

SEQ ID NO: 663609 - DNA, 75 bp, synthetic construct
  source 1..75: mol_type = other DNA
ctgtttggcctgatgctgaccctctgctccagcgtgatgggcgtgctggcgggggcgctacaaggctattacggc

SEQ ID NO: 663610 - DNA, 75 bp, synthetic construct
  source 1..75: mol_type = other DNA
atgccccctcaagatgattggattttaatttattcaaagcacggcgagtatatggcaggacaggtacaaggggaa

SEQ ID NO: 663611 - DNA, 75 bp, synthetic construct
  source 1..75: mol_type = other DNA
aatgatgggtgggtaatacctggtgcgtcgtggataccatcacactggatgccgctaccagaaccgccgcaggag

SEQ ID NO: 663612 - DNA, 75 bp, synthetic construct
  source 1..75: mol_type = other DNA
ccaaacttcgatgtaaatggcaactctccggtaattccgggcggttggataagctgtagtgagcgaatgccggat

SEQ ID NO: 663613 - DNA, 75 bp, synthetic construct
  source 1..75: mol_type = other DNA
aagcaaaagattttgcaaaaatggctggagtgtctcgtaaaacgatagtgaaatattatgctatgcctcgtgaac

SEQ ID NO: 663614 - DNA, 75 bp, synthetic construct
  source 1..75: mol_type = other DNA
atgacgcaatcagagatgctgaaattaatcgcccgacatggttataacgttggatttggcgctaagaaaaacttt

SEQ ID NO: 663615 - DNA, 75 bp, synthetic construct
  source 1..75: mol_type = other DNA
gagaaaggcttaaagtggaaagatgtaggaaaagagttagatacttctctacatggtgcggtagctctttataag

SEQ ID NO: 663616 - DNA, 75 bp, synthetic construct
  source 1..75: mol_type = other DNA
tcgcggatgtttgcagcccggttttcgaatgggttaacgggtatagggtttaatatttccagccatgttcccgac

SEQ ID NO: 663617 - DNA, 75 bp, synthetic construct
  source 1..75: mol_type = other DNA
ggcagaagccgaagcgaaatggacttctggcgaatacacactctccaggctggaggaagagtacggcattcgtcg

SEQ ID NO: 663618 - DNA, 75 bp, synthetic construct
  source 1..75: mol_type = other DNA
gtttttctgtatcgcacaatgagagtggttatgcttgcgctctgtgctgccgcccgcatggtaagagcaatatat

SEQ ID NO: 663619 - DNA, 75 bp, synthetic construct
  source 1..75: mol_type = other DNA
agaaatagcttctcgtgagtcagtcgaactctctttcagcaccgtgaagcaggaatacgtggtgcagaaccagca

SEQ ID NO: 663620 - DNA, 75 bp, synthetic construct
  source 1..75: mol_type = other DNA
gagtatctggcgatggaattgcagtctgccttgcttcaggttatcaaacagggcgtcattacacggctggatgca

SEQ ID NO: 663621 - DNA, 75 bp, synthetic construct
  source 1..75: mol_type = other DNA
ctggcccgtaatacccagaaaattttccgctgggtggagaaagacacccctgatgcggttgaaaaaattcaggcg

SEQ ID NO: 663622 - DNA, 75 bp, synthetic construct
  source 1..75: mol_type = other DNA
aatagactccttaaaaaaactggatcaggaaatcacagttttatcacaggatgttactttagatattgtgcagac

SEQ ID NO: 663623 - DNA, 75 bp, synthetic construct
  source 1..75: mol_type = other DNA
cggatggaacacttgatgtggcagctacggcagcggcctgtaataacgccacaagtaatacattagttttcacgt

SEQ ID NO: 663624 - DNA, 75 bp, synthetic construct
  source 1..75: mol_type = other DNA
acaaatactgttgctgttcaggcaaaaatattcccagataacatgttaagtggttctggttcttcagcaacacca

SEQ ID NO: 663625 - DNA, 75 bp, synthetic construct
  source 1..75: mol_type = other DNA
cggatggaacacttgatgtggcggctacggcagcagcctgtaataacgccacaagtaatacattagttttcacgt

SEQ ID NO: 663626 - DNA, 75 bp, synthetic construct
  source 1..75: mol_type = other DNA
cacaggcggggttcggcacggccaacctgaacaccgtgctctacaacgccggacaaatcccgagtggctggacct

SEQ ID NO: 663627 - DNA, 75 bp, synthetic construct
  source 1..75: mol_type = other DNA
gccacgcagcgtgtcgcccgtacacaggcagggtacggcacggccagcctgaacaccgtgctctacaacgccgga

SEQ ID NO: 663628 - DNA, 75 bp, synthetic construct
  source 1..75: mol_type = other DNA
gaattctggacgatttgttatcggtaagcactactttttacttgagaatgaggagttgcgggaatttaagcacag

SEQ ID NO: 663629 - DNA, 75 bp, synthetic construct
  source 1..75: mol_type = other DNA
atgagtggcgcttttaacaacgatgaacggggcatatctcccttaattgcagcctcctgggagcgatgcaataaa

SEQ ID NO: 663630 - DNA, 75 bp, synthetic construct
  source 1..75: mol_type = other DNA
tggcatgggggtttatgagccacgacgacctcgataaccagatggtcagtgtcctgactcagttcagggccactt

SEQ ID NO: 663631 - DNA, 75 bp, synthetic construct
  source 1..75: mol_type = other DNA
tttcccggccacctttctggttgacccgaaaacgcaccagtggcaacccctggcatgggggtttatgagccacga

SEQ ID NO: 663632 - DNA, 75 bp, synthetic construct
  source 1..75: mol_type = other DNA
ccagcatgacgccatctgagcagaaaaaggtcctgcagcaggcgacccgtgaagcgctggatacggccattctgt

SEQ ID NO: 663633 - DNA, 75 bp, synthetic construct
  source 1..75: mol_type = other DNA
taatatttccagccatcagcccgaatatattctcagattcagttacagcaagacccaggagaatctgcaatacag

SEQ ID NO: 663634 - DNA, 75 bp, synthetic construct
  source 1..75: mol_type = other DNA
tgtgatgttccgcttcaaagcgttgcttgaagagaatatggagcgtctggcccgtattatcagtgaagaacacgg

SEQ ID NO: 663635 - DNA, 75 bp, synthetic construct
  source 1..75: mol_type = other DNA
gtcctgatggctgacaacatcatcccggcaccaaagcgccgccataccggtattgcagcggcacgacgagcagaa

SEQ ID NO: 663636 - DNA, 75 bp, synthetic construct
  source 1..75: mol_type = other DNA
cgactttcacgtcgcaccttaacgttacccgccgtattgcaacaagcaataaaacaggcacatccgctcaaacac

SEQ ID NO: 663637 - DNA, 75 bp, synthetic construct
  source 1..75: mol_type = other DNA
aattcataatgaaagcgagcgtgctgcaggtccttatatcgccgtcaattgtgagttatatggtgatgcggcgct

SEQ ID NO: 663638 - DNA, 75 bp, synthetic construct
  source 1..75: mol_type = other DNA
aggaatgtaattcttttgcaaatgttgaaacgccgcagcgatgccatttatctcacggaaatgggcgcatttatc

SEQ ID NO: 663639 - DNA, 75 bp, synthetic construct
  source 1..75: mol_type = other DNA
catgctttcatttatggtgatcgcggagtaggaaagacatccttagcgcaaactgttgcttttaagctgcaggaa

SEQ ID NO: 663640 - DNA, 75 bp, synthetic construct
  source 1..75: mol_type = other DNA
gcgtctttccctcagatttgtcggtgccggagaaccagtggtcgggaggctcctatgcttcaatcaaatcctcca

SEQ ID NO: 663641 - DNA, 75 bp, synthetic construct
  source 1..75: mol_type = other DNA
gcgtctttccctccgctttgcctgtgccggagaaccagtggtcgggcggctcccatgcttcaatcaaatcggcca

SEQ ID NO: 663642 - DNA, 75 bp, synthetic construct
  source 1..75: mol_type = other DNA
aggcacagttggcaaagccacagattcaacagaccgaagacgtaacgcaggatacgttgttccttctggggagtg

SEQ ID NO: 663643 - DNA, 75 bp, synthetic construct
  source 1..75: mol_type = other DNA
tcaacagactggcgaagatatcacacaagatacgttgttccttttggggagcgaagcgctggagtcgatgattaa

SEQ ID NO: 663644 - DNA, 75 bp, synthetic construct
  source 1..75: mol_type = other DNA
actgcgttttctgctttagccgaagcgctggataatcaggaagaacctgaaaagctgattatcgagccttctgtt

SEQ ID NO: 663645 - DNA, 75 bp, synthetic construct
  source 1..75: mol_type = other DNA
ctcaggaagtggtggctcaggagcaaaaaacgctgcgtatccgccagattcaggaagcgttgcagtatgcgaatc

SEQ ID NO: 663646 - DNA, 75 bp, synthetic construct
  source 1..75: mol_type = other DNA
gcttaccgctatgtgatgaaaccgacgttacctattcgtcgcgatagtccgaaaaaggcaatcaccttgattctg

SEQ ID NO: 663647 - DNA, 75 bp, synthetic construct
  source 1..75: mol_type = other DNA
gcgaagcgctggagtcgatgattaagcacgaggcgacccgtccgttggtgttctcaccaaactactatcagactc

SEQ ID NO: 663648 - DNA, 75 bp, synthetic construct
  source 1..75: mol_type = other DNA
gaattacgctataacaccgatgaaggtgataaagataagtgggacccctcacaatttggcaataacggaacagga

SEQ ID NO: 663649 - DNA, 75 bp, synthetic construct
  source 1..75: mol_type = other DNA
gaatactgccgctggtgctggcagcggcattatgcagttcaccggtctgggcggaagaagccactttcaccgcta

SEQ ID NO: 663650 - DNA, 75 bp, synthetic construct
  source 1..75: mol_type = other DNA
cagaaaagcgcaaaatgatgacaatttcacaacgccccctggtcgttgtcttggcctatgatgggctatgtactt

SEQ ID NO: 663651 - DNA, 75 bp, synthetic construct
  source 1..75: mol_type = other DNA
ctgctatcatcactcaacccgatgtggggcaaatcgctggctataccgatgccatgaatgctatctacggtcagg

SEQ ID NO: 663652 - DNA, 75 bp, synthetic construct
  source 1..75: mol_type = other DNA
ggttatttaacctggaatgatggccataaaaactataccgcatcatttaaagtagggtacaaaatgggatcgtgg

SEQ ID NO: 663653 - DNA, 75 bp, synthetic construct
  source 1..75: mol_type = other DNA
atggcgattatcgctaaactatggcgacttaaaattatttcgtccgttatggtaatgatgagagtagaaaataat

SEQ ID NO: 663654 - DNA, 75 bp, synthetic construct
  source 1..75: mol_type = other DNA
gcagtacaggcattgtctcttatcaaaagaaatgcggaacaatgggcgctgcaaaaaaacagaattggtgtactg

SEQ ID NO: 663655 - DNA, 75 bp, synthetic construct
  source 1..75: mol_type = other DNA
gttcggtgttcaatgggctcgagaattgcctgttcatatatggcctgagttgtttgtcgcatggttaaaatccca

SEQ ID NO: 663656 - DNA, 75 bp, synthetic construct
  source 1..75: mol_type = other DNA
tgcagcatttatcacaactatcctgccatattgatttaaggggtaaggaaatttttgaggatgatttttacggaa

SEQ ID NO: 663657 - DNA, 75 bp, synthetic construct
  source 1..75: mol_type = other DNA
atgacttacatgaaattaacggcggctaaacgcattgtttttttttatatatttatttgtaatccagttttggaa

SEQ ID NO: 663658 - DNA, 75 bp, synthetic construct
  source 1..75: mol_type = other DNA
ttttctgctggggggcatatcgcctcaacgggtggggaatcagatttgtgatttcaaacgttcttctgacagtaa

SEQ ID NO: 663659 - DNA, 75 bp, synthetic construct
  source 1..75: mol_type = other DNA
ctgcgtgaccagtacatttcctccggtatttcttcttcattgttgcgatgatccgcttgttccggttaataacag

SEQ ID NO: 663660 - DNA, 75 bp, synthetic construct
  source 1..75: mol_type = other DNA
atggaagaattaagaatatttctcaattctctttcgtcagatgaacagcgtatgtttgcatgtgagtgtggtacc

SEQ ID NO: 663661 - DNA, 75 bp, synthetic construct
  source 1..75: mol_type = other DNA
gggaaaagatgatgagtccctctacctgccatcaggctcgattatgacgggtgtgcttatcaatggtatggatgc

SEQ ID NO: 663662 - DNA, 75 bp, synthetic construct
  source 1..75: mol_type = other DNA
tcaggaagcgttgcagtatgcgaatcaggcgcaggtgacaaagccgcagattcagcagacacaggacgtgaccca

SEQ ID NO: 663663 - DNA, 75 bp, synthetic construct
  source 1..75: mol_type = other DNA
ataatactgttgtacattcaatcctcagggttaatggccccacaatgcaggtgcgcacaattgactacagaggaa

SEQ ID NO: 663664 - DNA, 75 bp, synthetic construct
  source 1..75: mol_type = other DNA
gttatggaacaagattgcctgctggcatacgacggcgaaacctattttgaaggctcgctggttgaaccgctttcc

SEQ ID NO: 663665 - DNA, 75 bp, synthetic construct
  source 1..75: mol_type = other DNA
tgcgtgattggcgcgttcaacgccaactatcatcttcaggaaggtagttataaccacacgatggggattcgcccg

SEQ ID NO: 663666 - DNA, 75 bp, synthetic construct
  source 1..75: mol_type = other DNA
tggcctcaccgcgtgaaagccagacgttaggtgccttattcgactttttgcagcagaatctggcacaaacacata

SEQ ID NO: 663667 - DNA, 75 bp, synthetic construct
  source 1..75: mol_type = other DNA
gcctgaactggcaggagaaaaccctgaccctgaaaccgacgtcgctgaaaggcctgttgattgctttgccgaaag

SEQ ID NO: 663668 - DNA, 75 bp, synthetic construct
  source 1..75: mol_type = other DNA
tggccgttcactggtgagaagcagtatcaggcggatgatctgaaactgaaacttaccggcaaaatgaccgattac

SEQ ID NO: 663669 - DNA, 75 bp, synthetic construct
  source 1..75: mol_type = other DNA
acggcggagttgcggaataaccgtgctgaactgggctggactatccgtctgaccaataacggtcagtttgatggt

SEQ ID NO: 663670 - DNA, 75 bp, synthetic construct
  source 1..75: mol_type = other DNA
tgaccgattacacgctctctatgcgcacggcagtgaagggacaggagatcccgccagccaccattacccttgatg

SEQ ID NO: 663671 - DNA, 75 bp, synthetic construct
  source 1..75: mol_type = other DNA
ccaaagagttcccggagtggccgtcgaaactcaatggcttgattaaaacccgcggtagcctgtacggcggcacct

SEQ ID NO: 663672 - DNA, 75 bp, synthetic construct
  source 1..75: mol_type = other DNA
attaccgtgcgcaccatgctgctgaaagtgagcagtatcgacggcaataccaaactggacgcgctggatattgat

SEQ ID NO: 663673 - DNA, 75 bp, synthetic construct
  source 1..75: mol_type = other DNA
tctaacgataacttcctcgctaacatccagaaagacggcacctactcggtgatcccgcgttctccgggcggtgaa

SEQ ID NO: 663674 - DNA, 75 bp, synthetic construct
  source 1..75: mol_type = other DNA
actgccggacagcgcgcaaatctgctcctgcttcgacgtcaccaaaggcgacctgattgctgctatcaacaaagg

SEQ ID NO: 663675 - DNA, 75 bp, synthetic construct
  source 1..75: mol_type = other DNA
ggcgaatatccgcagtatggcaacaacgacgagcgcgtagacagcattgcctgcgatctggttgaacgctttatg

SEQ ID NO: 663676 - DNA, 75 bp, synthetic construct
  source 1..75: mol_type = other DNA
aaatccaccgatcagatcgccgggaaactcgacgtacgcgttgagcaaatttcgcagccggatgtaaatatcaac

SEQ ID NO: 663677 - DNA, 75 bp, synthetic construct
  source 1..75: mol_type = other DNA
cgtcaacatcaagattgatgacaccacggtgtcggtgatggacttcacctccggcctgaactggcaggagaaaac

SEQ ID NO: 663678 - DNA, 75 bp, synthetic construct
  source 1..75: mol_type = other DNA
ggtacgagcgcaggatgcggtgacgccggaaacgtagcgctacaggttgacgcatttttaagagcacgttgcgcg

SEQ ID NO: 663679 - DNA, 75 bp, synthetic construct
  source 1..75: mol_type = other DNA
gggtggtgcgctgcgcgaacaactggagattggcgttaatctttccggtccggtggatatggatctgcgcgccca

SEQ ID NO: 663680 - DNA, 75 bp, synthetic construct
  source 1..75: mol_type = other DNA
cggcattattccgcgtgatgccgatcagtacaatgccattcaggaacgcctgatttcgcgttttagcgagcttta

SEQ ID NO: 663681 - DNA, 75 bp, synthetic construct
  source 1..75: mol_type = other DNA
gaccgataactctgcgctgccgaaagcagtagagatgcaatatctgccgggtcagggtctgcagtcttatcagtt

SEQ ID NO: 663682 - DNA, 75 bp, synthetic construct
  source 1..75: mol_type = other DNA
agaaattaaagctgatgcggcaaccacttttaccgcaaccaaaatctttgcttccgatgcgttaactaacggttc

SEQ ID NO: 663683 - DNA, 75 bp, synthetic construct
  source 1..75: mol_type = other DNA
gatcgatctgtgtttacatatcgtgcgcaaagattttggtcatgagattgctaataatgtcgcccggcgactggt

SEQ ID NO: 663684 - DNA, 75 bp, synthetic construct
  source 1..75: mol_type = other DNA
tcattgcactggcatatgacgggctatgtacttttgaatttggcgttgccgttgaaatattcggcctgccacgac

SEQ ID NO: 663685 - DNA, 75 bp, synthetic construct
  source 1..75: mol_type = other DNA
gaagcttctcatccttccccgcttgggcagaatatttaattacggattcgtttgagagtttacggacttttgaaa

SEQ ID NO: 663686 - DNA, 75 bp, synthetic construct
  source 1..75: mol_type = other DNA
cgttggccgcattttaccgaagcaacggcccgcagcgccgcactttgcgctgaacaagagagcctgttagatgaa

SEQ ID NO: 663687 - DNA, 75 bp, synthetic construct
  source 1..75: mol_type = other DNA
ggattaaatccgttgccgggcaaagcgaaaccattgtgccgtggcagacgtggctacaaccgctggaattaccgg

SEQ ID NO: 663688 - DNA, 75 bp, synthetic construct
  source 1..75: mol_type = other DNA
agtggcgggcggaaaatccgggcgtcactctgcgcgctatccatgtgcatcacggtttaagtgccaatgccgatg

SEQ ID NO: 663689 - DNA, 75 bp, synthetic construct
  source 1..75: mol_type = other DNA
taacctggacggcagcaaaactgttccgctgactgtgacctggggtggtactgaaatcaagtccgatgccgctac

SEQ ID NO: 663690 - DNA, 75 bp, synthetic construct
  source 1..75: mol_type = other DNA
tgattgcggcggcaggggtatttgtgacgcaagaaggtgtggctgaaggtgagaatggcgtaagttttgtctggc

SEQ ID NO: 663691 - DNA, 75 bp, synthetic construct
  source 1..75: mol_type = other DNA
ctgctggcggatgatttagcgcactgccaaacgcaacagggaacgttaaagattgcgccaatggtggcaatgagc

SEQ ID NO: 663692 - DNA, 75 bp, synthetic construct
  source 1..75: mol_type = other DNA
gtccagcgccgttgggatggatatacagccagtgtcgcccgctcgtccatacgggtaaaaaataccagtaatatc

SEQ ID NO: 663693 - DNA, 75 bp, synthetic construct
  source 1..75: mol_type = other DNA
aaaaacgctggcaccgataaatatgaggcggtatacggtggctacaaaggcaaggaagcacagaatattttcttt

SEQ ID NO: 663694 - DNA, 75 bp, synthetic construct
  source 1..75: mol_type = other DNA
gcaaagcagaagaattagcgcgagtagtcaaaccgggtgggtgggtcattaccgctactcctgggccacggcatt

SEQ ID NO: 663695 - DNA, 75 bp, synthetic construct
  source 1..75: mol_type = other DNA
tttgtgtcgcttccagccaccgtttgccgttttccgataccagtatggacgccataatacgtatttacgcgccgt

SEQ ID NO: 663696 - DNA, 75 bp, synthetic construct
  source 1..75: mol_type = other DNA
gaagccgaatgcgaagctggaaacgttcggggtctttgataacggatggcacacactggcttttgagtttgccgg

SEQ ID NO: 663697 - DNA, 75 bp, synthetic construct
  source 1..75: mol_type = other DNA
gctgacaccacgacgatgagtacgctgtttgcttaccgggcatctgagtctgaagggcagctggcaccgcagggc

SEQ ID NO: 663698 - DNA, 75 bp, synthetic construct
  source 1..75: mol_type = other DNA
tattgaggtgacgccggtcattgatggtcaggacgggacaccgttcatgctgtcgcagtctccggttggcacgtt

SEQ ID NO: 663699 - DNA, 75 bp, synthetic construct
  source 1..75: mol_type = other DNA
acctgatacaccatcaaaaccgtccacaccaccggctgacacaacgacaatgagcacgttgcttgcttaccgggc

SEQ ID NO: 663700 - DNA, 75 bp, synthetic construct
  source 1..75: mol_type = other DNA
tctatataaagatctggttgccagaaccaaagctgcattagacaaaaacaaaaagaacgtatttcttggcgttgt

SEQ ID NO: 663701 - DNA, 75 bp, synthetic construct
  source 1..75: mol_type = other DNA
aatgcaggtattctgctggtcccttgtggacgtggcggatcaggctttagtaccggaacagaaggacagtattat

SEQ ID NO: 663702 - DNA, 75 bp, synthetic construct
  source 1..75: mol_type = other DNA
agaagtctggcaaacgctggcggcaaaagaagaatttgattgccagacggactttaatattcacgtctggcaacg

SEQ ID NO: 663703 - DNA, 75 bp, synthetic construct
  source 1..75: mol_type = other DNA
cagcatcccgaacccagggcagttttgtttcgacacagcgtgacagccatttcagctcatgggcacgcaggggcg

SEQ ID NO: 663704 - DNA, 75 bp, synthetic construct
  source 1..75: mol_type = other DNA
ggctacaaaggcaaggaagcacagaaaattttctttgtaccgttcctgacggatgagaatggacagaacacgcca

SEQ ID NO: 663705 - DNA, 75 bp, synthetic construct
  source 1..75: mol_type = other DNA
ggctggtgaaagatgtggatgattttgtcgcagcggcgatcgcctggggcaccctgactaacagtggtggtcagc

SEQ ID NO: 663706 - DNA, 75 bp, synthetic construct
  source 1..75: mol_type = other DNA
ggcgctgtactggccggtttcttcactgcctcagggcgtcacactggaaggtaatgccggtcataacctgctggc

SEQ ID NO: 663707 - DNA, 75 bp, synthetic construct
  source 1..75: mol_type = other DNA
tcgtgacacagccggatgaaaagccgtcaccagacgtaccatcaacaccgtcaacagacaccccgtccacgccac

SEQ ID NO: 663708 - DNA, 75 bp, synthetic construct
  source 1..75: mol_type = other DNA
aatattttctttgtgccgttcctgacggatgagaatggcgcaaacacgccaacgaaccagccggcagaagacccg

SEQ ID NO: 663709 - DNA, 75 bp, synthetic construct
  source 1..75: mol_type = other DNA
tcatttctgaccgtctgtcctcagccattctgctccatgcgggacgcacggctgaagttatgggtggacaggctg

SEQ ID NO: 663710 - DNA, 75 bp, synthetic construct
  source 1..75: mol_type = other DNA
tcaggtgacgccggtgattgatggtaaggacgaggaaccgttcatgctgtctcagtcacctgtcggttcttttgc

SEQ ID NO: 663711 - DNA, 75 bp, synthetic construct
  source 1..75: mol_type = other DNA
cctttggtttgtactggcgaatagcggaatggccgggtgagggtggtgaaggccatctgagttctttctttgtcc

SEQ ID NO: 663712 - DNA, 75 bp, synthetic construct
  source 1..75: mol_type = other DNA
atgtgatgtaccacaatgcgaaagtggcgacaaacaacctgaaactgggaacctttggcgcatttgataacgaat

SEQ ID NO: 663713 - DNA, 75 bp, synthetic construct
  source 1..75: mol_type = other DNA
gacatcattccggcggaccattgtctgcatgatgtgcaggacatgagccgtcttaaccatccgaaagcggacctg

SEQ ID NO: 663714 - DNA, 75 bp, synthetic construct
  source 1..75: mol_type = other DNA
agctgggtatgacgtttccggaactgtacgacgattcacacccagaagccctagctcgcaatactcagaaaattt

SEQ ID NO: 663715 - DNA, 75 bp, synthetic construct
  source 1..75: mol_type = other DNA
gatatcactaacggtgcaacatacccggtgctgattgacagcattgtggtggaagtgaataacgcgtcagcagga

SEQ ID NO: 663716 - DNA, 75 bp, synthetic construct
  source 1..75: mol_type = other DNA
cacgaagctggggtcattcggcgcatttgacaacgaatggcatacgctgggcttccgttttgccggtaataacag

SEQ ID NO: 663717 - DNA, 75 bp, synthetic construct
  source 1..75: mol_type = other DNA
gaaatgctggcacggtgccgtggatttgtggtgataccacgtattactggaaaaacacgtatgccacgcagtatg

SEQ ID NO: 663718 - DNA, 75 bp, synthetic construct
  source 1..75: mol_type = other DNA
aatgaagaaaatacggttgccacttcggagtctgtcattctctacgatgccaaaaaagcttcggacaatcagctg

SEQ ID NO: 663719 - DNA, 75 bp, synthetic construct
  source 1..75: mol_type = other DNA
gtacgtcgtgcacatataacgatatcattcccgcagaccactgcctgcatgatgtgcaggacatgagcgggataa

SEQ ID NO: 663720 - DNA, 75 bp, synthetic construct
  source 1..75: mol_type = other DNA
accgggatgacaacactgtttgcatacagggccagcgattcggaaggacaactgactccacagggctggggggct

SEQ ID NO: 663721 - DNA, 75 bp, synthetic construct
  source 1..75: mol_type = other DNA
ataatggtttattcacgaccatggttcagcagttcagaactgacctgtctccgcttgctgtgcagtgtgtgagtg

SEQ ID NO: 663722 - DNA, 75 bp, synthetic construct
  source 1..75: mol_type = other DNA
atgacatttaagcattatggtgtggtcagggcggcttcaccgtcagagcttgcggagcgactgtcacaaaaactg

SEQ ID NO: 663723 - DNA, 75 bp, synthetic construct
  source 1..75: mol_type = other DNA
gcagacaagttacgcctgaccgatatcaccagtaatgcaacgtatccggtactgattgacagcattttggtggaa

SEQ ID NO: 663724 - DNA, 75 bp, synthetic construct
  source 1..75: mol_type = other DNA
cctcagccattctgctccatgcgggacgcacggctgaagttatgggtggacaggctgtgacaccaccggatgaga

SEQ ID NO: 663725 - DNA, 75 bp, synthetic construct
  source 1..75: mol_type = other DNA
aataccgtcgatttcgtgtcgttcagctactacgcgtctcgctgtgcgtctgccgacatgaacgccaataacacc

SEQ ID NO: 663726 - DNA, 75 bp, synthetic construct
  source 1..75: mol_type = other DNA
ttgacgccagaaatggcgattaaactttccgtggtgatcggcagttcgccgcaaatgtggctgaatctgcaaaac

SEQ ID NO: 663727 - DNA, 75 bp, synthetic construct
  source 1..75: mol_type = other DNA
gctgaatctacaaaacgcctggagtctggcagaggcagaaaaaacggtagatgtgtcgcgactacgccgtctggt

SEQ ID NO: 663728 - DNA, 75 bp, synthetic construct
  source 1..75: mol_type = other DNA
gtttccgttttgccggtaataacagcattcaggtgacgccggtgattgatggtcaggatggtgcaccgttcatgc

SEQ ID NO: 663729 - DNA, 75 bp, synthetic construct
  source 1..75: mol_type = other DNA
gctattctgaacgtagccggtcgcacctcagccttcatcagtggtaaggcaccggaaatcaaaccctcgcccggc

SEQ ID NO: 663730 - DNA, 75 bp, synthetic construct
  source 1..75: mol_type = other DNA
atcgaaccgctggtcacgttgtgccacttcgatgtgccgatgcatctggtcaccgaatatggctcctggcgtaac

SEQ ID NO: 663731 - DNA, 75 bp, synthetic construct
  source 1..75: mol_type = other DNA
atgctgtcgcagtctccggtagggacactggcggcagacaagttacgcctgacagatttaaccagtacggcaaca

SEQ ID NO: 663732 - DNA, 75 bp, synthetic construct
  source 1..75: mol_type = other DNA
taacgatacggcttgataaagccacaatgatattatcgcttagcattccccaagcatggttaaaataccaggcaa

SEQ ID NO: 663733 - DNA, 75 bp, synthetic construct
  source 1..75: mol_type = other DNA
cgtggtgtggatgcagggggaatttgattttggcggtacgccggcaaatcatgccgcacagtttggtgcgctggt

SEQ ID NO: 663734 - DNA, 75 bp, synthetic construct
  source 1..75: mol_type = other DNA
aggtcttccgctgccggagacatatgaccgtccggacccgcgtattaagcagctggcgcgtcgcagtacggtgac

SEQ ID NO: 663735 - DNA, 75 bp, synthetic construct
  source 1..75: mol_type = other DNA
taatcagaatcttactgaaggccgttccgttagccacgacggcgactttgcgcgcacctatttgttccgtcctat

SEQ ID NO: 663736 - DNA, 75 bp, synthetic construct
  source 1..75: mol_type = other DNA
ctcgatttaagccaacgtcaggagttaacgacacggcttgataaagctacgatgatattatcgctaagtgttccc

SEQ ID NO: 663737 - DNA, 75 bp, synthetic construct
  source 1..75: mol_type = other DNA
ggtattcaagaaaacagtaccctgcgtttaacctggggtaacaccacctgtgaagttacgccgcctaatcagagc

SEQ ID NO: 663738 - DNA, 75 bp, synthetic construct
  source 1..75: mol_type = other DNA
tgcataccatcatacagttaatcaacaaaaagaacttggcacgtttggcgcattcgaccatgactggcatacgct

SEQ ID NO: 663739 - DNA, 75 bp, synthetic construct
  source 1..75: mol_type = other DNA
tggcgaaggtctgccgctgcctgagacatacgatcgccccgatcagcgcattaagcaactggcacgccgcagtac

SEQ ID NO: 663740 - DNA, 75 bp, synthetic construct
  source 1..75: mol_type = other DNA
gttgtgtgagtcaggggctgcatattgccaaaaaactgctgccttatatcccgcagaatgccgggatacttctgg

SEQ ID NO: 663741 - DNA, 75 bp, synthetic construct
  source 1..75: mol_type = other DNA
ctggacgtcacaggacagggcgagccatttcagttcatgggctcgccgcgggattatttccgaccgtctggcaac

SEQ ID NO: 663742 - DNA, 75 bp, synthetic construct
  source 1..75: mol_type = other DNA
cggaagggtatgcatcagtatacggagggtataagggtaaggagtcgcagaacattttctttgtaccgttaatga

SEQ ID NO: 663743 - DNA, 75 bp, synthetic construct
  source 1..75: mol_type = other DNA
gggtgtgggtaagccgctgtatcaggatttggtgagccggactaaagccgcactggcgaagaacccgaaaaaccg

SEQ ID NO: 663744 - DNA, 75 bp, synthetic construct
  source 1..75: mol_type = other DNA
gcggatatccttctattcttgtatctattctctttttaggtggcattcagttaattggtattggggtgctgggag

SEQ ID NO: 663745 - DNA, 75 bp, synthetic construct
  source 1..75: mol_type = other DNA
attaatgcacttgccgttgctgatccgcttgttatgcctttatccttcaccagaaacttcggtaaagaaccagct

SEQ ID NO: 663746 - DNA, 75 bp, synthetic construct
  source 1..75: mol_type = other DNA
cttcgcatctggacatacatagggttagtggtagccagtgtagcatttatttatggggcgtggatgattttagat

SEQ ID NO: 663747 - DNA, 75 bp, synthetic construct
  source 1..75: mol_type = other DNA
agtatataggaagaatatatgttgaaacaaaatccaggcctaaatacatactaaaaaaatggaaaagtcagaaat

SEQ ID NO: 663748 - DNA, 75 bp, synthetic construct
  source 1..75: mol_type = other DNA
tcttcaacgaagaggaagcgatacctattttttataaaacggtacgtgaattcgaagagttgaagccatatgaag

SEQ ID NO: 663749 - DNA, 75 bp, synthetic construct
  source 1..75: mol_type = other DNA
tttatgaagggggtacttagttgggttggtggaagaaccgatgtcgtcgaatacactcgcgctgagcgtatagcg

SEQ ID NO: 663750 - DNA, 75 bp, synthetic construct
  source 1..75: mol_type = other DNA
gttattcctcatcttattgaaaagtggaaggcaggggctgatatggtactggctaagcgctatgaccgttctaca

SEQ ID NO: 663751 - DNA, 75 bp, synthetic construct
  source 1..75: mol_type = other DNA
cgctagttgttccgctgtcatttacacgcaactttggtaaagaaccagcattatttgcagggttagaccatgcaa

SEQ ID NO: 663752 - DNA, 75 bp, synthetic construct
  source 1..75: mol_type = other DNA
ttggtggagatacagatgttgttgagtatgtccgtgctgagcgtgtagctggcagcacgaaattcaatgggggga

SEQ ID NO: 663753 - DNA, 75 bp, synthetic construct
  source 1..75: mol_type = other DNA
ttggcggtcgcacagatgttgtggaatacgcgagggcagaacgtgttgccggtgactctaaattcaatggatgga

SEQ ID NO: 663754 - DNA, 75 bp, synthetic construct
  source 1..75: mol_type = other DNA
ctaatcggtataggcgtgctcggagagtatataggacgtatctacattgaaacaaaatcaagacctaaatatatt

SEQ ID NO: 663755 - DNA, 75 bp, synthetic construct
  source 1..75: mol_type = other DNA
cattctgtttcttggagggatccaactaatcggcatcggtgtacttggagagtacatcgggaggatttacataga

SEQ ID NO: 663756 - DNA, 75 bp, synthetic construct
  source 1..75: mol_type = other DNA
tgtggacctgcaagatcctattgaagtaattcctcacctcattaccaaatggcaggctggggctgatatggttct

SEQ ID NO: 663757 - DNA, 75 bp, synthetic construct
  source 1..75: mol_type = other DNA
taaactgcatgtgacagacattaccaggaatgcgacttacccggtactgatagacagcattgcggtggaagtgaa

SEQ ID NO: 663758 - DNA, 75 bp, synthetic construct
  source 1..75: mol_type = other DNA
gggctggagtgctggcggaggtaaagcggaaaatgttgcagatgaaggtgcaaccggtggaaccgcgatgaggct

SEQ ID NO: 663759 - DNA, 75 bp, synthetic construct
  source 1..75: mol_type = other DNA
atgtcgattaaacattatgatgttgtcagggcggcgtcgccgtcagatcttgcggaaaagctgacacaaaaactg

SEQ ID NO: 663760 - DNA, 75 bp, synthetic construct
  source 1..75: mol_type = other DNA
gattggtactacgtcatcgtactggccgggcagtccaatgccatggcttacggtgaagggcttccgctgccggat

SEQ ID NO: 663761 - DNA, 75 bp, synthetic construct
  source 1..75: mol_type = other DNA
taacagccttcaggtgacgccggttattgatggtcaggatggcacaccgttcacgctgacgcagtcaccggtcag

SEQ ID NO: 663762 - DNA, 75 bp, synthetic construct
  source 1..75: mol_type = other DNA
ggcagattcgctgccgctttaaggcttcgggagcgctggctgcgaaccagtatgttatggcgttttactggccgg

SEQ ID NO: 663763 - DNA, 75 bp, synthetic construct
  source 1..75: mol_type = other DNA
ttaataggcataggagttcttggagagtatataggaagaatttatgttgaagttaagcagcgaccaagatacatt

SEQ ID NO: 663764 - DNA, 75 bp, synthetic construct
  source 1..75: mol_type = other DNA
ggtgattcaaaattcaacgggtggaagctttggaatctggcacttgaggggattactagcttttcgacgttcccg

SEQ ID NO: 663765 - DNA, 75 bp, synthetic construct
  source 1..75: mol_type = other DNA
ctgtttgccgggcttgagcacgctactggcgatgctgtaattccgattgatgttgacctgcaagatccgattgaa

SEQ ID NO: 663766 - DNA, 75 bp, synthetic construct
  source 1..75: mol_type = other DNA
gctgcatatcgccaaaaaactgctgccgtttataccggcgaatgcgggcattctgctggttccgtgctgtcgtgg

SEQ ID NO: 663767 - DNA, 75 bp, synthetic construct
  source 1..75: mol_type = other DNA
ggcagcactaaatttaacggatggaaactgtggaaccttgcccttgaggggataaccagtttctcaacattcccg

SEQ ID NO: 663768 - DNA, 75 bp, synthetic construct
  source 1..75: mol_type = other DNA
ttcatgaagggtgttttgagttgggttggtggtcgcactgatatcgttgattatgcccgcgcagaacgtgttgct

SEQ ID NO: 663769 - DNA, 75 bp, synthetic construct
  source 1..75: mol_type = other DNA
ctgaatggttctaccatcttcacaacttaatcagtaatcctcaaattgaagagaacgtcggcgattttcgtctta

SEQ ID NO: 663770 - DNA, 75 bp, synthetic construct
  source 1..75: mol_type = other DNA
gaccgtcacgccgtatcagaatcgtcgctttgattcctgcttcctgacagcgaaaaaagcgattgaaagcggcaa

SEQ ID NO: 663771 - DNA, 75 bp, synthetic construct
  source 1..75: mol_type = other DNA
gaccgtcacgccgtatcagaatcgtcgctttgactcctgcttcctgacagcgaaaaaagcgattgaaagtggcaa

SEQ ID NO: 663772 - DNA, 75 bp, synthetic construct
  source 1..75: mol_type = other DNA
tttttcgccgccatgcgaagccggaagaacaggcccccatttattcccatatccatttcaccagcgatctcgacg

SEQ ID NO: 663773 - DNA, 75 bp, synthetic construct
  source 1..75: mol_type = other DNA
aatatataggcagaatatatattgaagtaaaaaatagacctaaatacatcataaaaaaatctcatcgaggtaacc

SEQ ID NO: 663774 - DNA, 75 bp, synthetic construct
  source 1..75: mol_type = other DNA
ctttaaatataaaggaggcggcaatcaccaggttattccggtacttgacggagaagagaaaacaggttttgcact

SEQ ID NO: 663775 - DNA, 75 bp, synthetic construct
  source 1..75: mol_type = other DNA
gtgctggagtatgtcaacgatgagggtgtgacggtcagagaagagatgaaaccggtaatgggcgattacggacgc

SEQ ID NO: 663776 - DNA, 75 bp, synthetic construct
  source 1..75: mol_type = other DNA
gtcaccacaccagtggcggtgaccggtaatgagggtaaggcggtggctgtcagtgccaccagcgacccggagtat

SEQ ID NO: 663777 - DNA, 75 bp, synthetic construct
  source 1..75: mol_type = other DNA
ccggaaaaccacatctggtttctggagcatgatgcagccgggcagggggcagagttgctgaagaaaggaggacgt

SEQ ID NO: 663778 - DNA, 75 bp, synthetic construct
  source 1..75: mol_type = other DNA
gaagtgctggctcggtgccgtggatttgtggtgacaccacgtattactggaagaatcttaacgccgataaatatg

SEQ ID NO: 663779 - DNA, 75 bp, synthetic construct
  source 1..75: mol_type = other DNA
ggcatggcctacggtgaggggcttccgttaccggactcttatgaccgcccggacccgcgcattaaacagctggca

SEQ ID NO: 663780 - DNA, 75 bp, synthetic construct
  source 1..75: mol_type = other DNA
ttacggcagacaaattacgggtgactgatatcaccagcgctgcgacatatccggtgctgattgacagcattgtgg

SEQ ID NO: 663781 - DNA, 75 bp, synthetic construct
  source 1..75: mol_type = other DNA
ggattatttccgaccgtctggcaacggcgattctgattcatgcaggacgaaccacagtaaaagtcgatgctccat

SEQ ID NO: 663782 - DNA, 75 bp, synthetic construct
  source 1..75: mol_type = other DNA
cgctagttgttccgctgtcatttacacgcaactttggtaaagaaccagcattgtttgcagggttagaccatacaa

SEQ ID NO: 663783 - DNA, 75 bp, synthetic construct
  source 1..75: mol_type = other DNA
gaggttacccttctcttctggtgtctatcttattcttaggtggggtgcaacttataggaattggtgttcttggcg

SEQ ID NO: 663784 - DNA, 75 bp, synthetic construct
  source 1..75: mol_type = other DNA
atgtaaacctgatttgcaaactgcaccatggcaccagctcgcgcccggaagaagccgcatcgctgaacctggcac

SEQ ID NO: 663785 - DNA, 75 bp, synthetic construct
  source 1..75: mol_type = other DNA
ctcaaaggaatgcgcttatctgaaatgcaggcacacggtcagcgagtaaaatgcctggtcagcccctatcacacg

SEQ ID NO: 663786 - DNA, 75 bp, synthetic construct
  source 1..75: mol_type = other DNA
ttcatgaagggtgtgcttagctgggtaggcggaagaactgatgtggttgaatatgcccgcgcagagcgagttgcc

SEQ ID NO: 663787 - DNA, 75 bp, synthetic construct
  source 1..75: mol_type = other DNA
ataaacgcactttctgttgccgacccgcttgttgttccgctgtcgttcacgcgtaatttcgggaaagaaccagct

SEQ ID NO: 663788 - DNA, 75 bp, synthetic construct
  source 1..75: mol_type = other DNA
tctttaacgaagaggccacgatacctattttttataaaaccgtgcgcgaatttgaagggcttcagcagcatgaag

SEQ ID NO: 663789 - DNA, 75 bp, synthetic construct
  source 1..75: mol_type = other DNA
atgcaaaccctcatcaaaacactcgccaccgcgcgcgtaaaaccgtttgtcagcgtcgtcacgccaacctggaac

SEQ ID NO: 663790 - DNA, 75 bp, synthetic construct
  source 1..75: mol_type = other DNA
tgttgacctgcaagaccctattgaggttattcctcatcttattgaaaagtggcaggcaggtgctgatatggtact

SEQ ID NO: 663791 - DNA, 75 bp, synthetic construct
  source 1..75: mol_type = other DNA
gatcactagcttctcaacattcccgctgcgcatgtggacctatattgggttatttattgcatgtatatcatttac

SEQ ID NO: 663792 - DNA, 75 bp, synthetic construct
  source 1..75: mol_type = other DNA
cgcggcgaatacatcctctgcatggacgatgacgactactacccggcagataaaatctcttacaccatcgctatg

SEQ ID NO: 663793 - DNA, 75 bp, synthetic construct
  source 1..75: mol_type = other DNA
tggtgtgcggtacaggggcaactggcggaaattcgtcatcactattgcgatgcgtttatggatggcaaggcggga

SEQ ID NO: 663794 - DNA, 75 bp, synthetic construct
  source 1..75: mol_type = other DNA
aggagattcgccatcactattgcgatgcgtttatggatggcaaggcgggagaacgagcggcgttggtgattgtgg

SEQ ID NO: 663795 - DNA, 75 bp, synthetic construct
  source 1..75: mol_type = other DNA
ggttccggcattaaagcaggatcgcatctgcctgtttacggtcagcgatgatggtcatctggtagcgcaggaccc

SEQ ID NO: 663796 - DNA, 75 bp, synthetic construct
  source 1..75: mol_type = other DNA
tgaagccctcaagccgctgatcgggcaaacgcagccctatagctgggcagaaacctttgtcagggacgcgatcaa

SEQ ID NO: 663797 - DNA, 75 bp, synthetic construct
  source 1..75: mol_type = other DNA
ttcacaatgactgacggtagtaaatgggtagtgcctacgatcgtgatcgccaaacaccatgcgaaacatcacgct

SEQ ID NO: 663798 - DNA, 75 bp, synthetic construct
  source 1..75: mol_type = other DNA
ctggatggttgccattccgccaatatttctccagataaccgcacgttgtgggttccggcattaaagcaggatcgc

SEQ ID NO: 663799 - DNA, 75 bp, synthetic construct
  source 1..75: mol_type = other DNA
gtttacgaaattgttggcgagcaggggctactgcatgaaaaaggtcgctatgcggtcgggcaggggccgatgtgg

SEQ ID NO: 663800 - DNA, 75 bp, synthetic construct
  source 1..75: mol_type = other DNA
gcagagtctgcgctgccgggtagcccgacgcatatttccaccgatcaccaggggcagtttgtctttgtcggttct

SEQ ID NO: 663801 - DNA, 75 bp, synthetic construct
  source 1..75: mol_type = other DNA
tgtagaaggtgaaactgcagcgaaaaagaagccgctccggctaaagctgagaaaaaagcgaaaaaatccgcttaa

SEQ ID NO: 663802 - DNA, 75 bp, synthetic construct
  source 1..75: mol_type = other DNA
acgggttctgaagtgactccgtttgcggttgtaaccgacgatgcaacaggtcagaaatatccgctggcagactat

SEQ ID NO: 663803 - DNA, 75 bp, synthetic construct
  source 1..75: mol_type = other DNA
tgaagtgattaccgatggtcacaaacgtgcgctgatcgtgaccgaccgcttcctgttcaacaacggttatgcaga

SEQ ID NO: 663804 - DNA, 75 bp, synthetic construct
  source 1..75: mol_type = other DNA
tctgaaaccgtttgtggctggtgtctgtgcggcattgctggcggtcagcgtggctattccgggatggcagtttct

SEQ ID NO: 663805 - DNA, 75 bp, synthetic construct
  source 1..75: mol_type = other DNA
gacggtattcgataaaataaaaccctcggccattttaattaacacagcaagggggggattggttgatgaagaatc

SEQ ID NO: 663806 - DNA, 75 bp, synthetic construct
  source 1..75: mol_type = other DNA
cagggtggtatcggtgacctgtataacttcaaactcgcaccttccctgactctgggttgtggttcttggggtggt

SEQ ID NO: 663807 - DNA, 75 bp, synthetic construct
  source 1..75: mol_type = other DNA
tggtggtggccgagtgggtatagtcctttctggctcgccactgtttaatggcgatgcaggctcaggcccatcaga

SEQ ID NO: 663808 - DNA, 75 bp, synthetic construct
  source 1..75: mol_type = other DNA
tccgtctgctgacgtgaacgtaacgctgtctatggcactgggcgtatttatcctgattctgttctacagcatcaa

SEQ ID NO: 663809 - DNA, 75 bp, synthetic construct
  source 1..75: mol_type = other DNA
taaccttcagctggacctgcgtacattctcgctggtggatccacataaccccctagccaccttctggacaatcaa

SEQ ID NO: 663810 - DNA, 75 bp, synthetic construct
  source 1..75: mol_type = other DNA
cattttccacatcctgatcattacgctgcaagccttcatcttcatggttctgacgatcgtctatctgtcgatggc

SEQ ID NO: 663811 - DNA, 75 bp, synthetic construct
  source 1..75: mol_type = other DNA
atgttggactgtccccctgttttattgcccgaaggccctttctcacgcgaacaggcggttggcgtcacaacagct

SEQ ID NO: 663812 - DNA, 75 bp, synthetic construct
  source 1..75: mol_type = other DNA
atgtaggactgccgccctgttttattgcccgaaggccctttctcacgcgaacaggcggttggcgtcacaacagct

SEQ ID NO: 663813 - DNA, 75 bp, synthetic construct
  source 1..75: mol_type = other DNA
gtgctgggtctgttgttcctggttttattccgtagcgtagccaaaaaggcgaccagcggcgtgccaggtaagttt

SEQ ID NO: 663814 - DNA, 75 bp, synthetic construct
  source 1..75: mol_type = other DNA
tgctttctggttttgttttgacttataattactatggttccttgtcaaacaattacttcaggaagcgaatagcaa

SEQ ID NO: 663815 - DNA, 75 bp, synthetic construct
  source 1..75: mol_type = other DNA
caatattgcaaacagagcgatcatttactttggagatataagttattcgttttatttgatgcaattacctatatt

SEQ ID NO: 663816 - DNA, 75 bp, synthetic construct
  source 1..75: mol_type = other DNA
gccggggaatttatgaccccgcgtgatgccgtgcgtcttgccaccaaactggtgctggcggcggatgaagatatc

SEQ ID NO: 663817 - DNA, 75 bp, synthetic construct
  source 1..75: mol_type = other DNA
gcctgaatatcagataccgtctggcaggagcaacggaatgctacaataaaagtcagtccacacaaattcctgtat

SEQ ID NO: 663818 - DNA, 75 bp, synthetic construct
  source 1..75: mol_type = other DNA
atgccgggttgtacatcacgtttattgcccgagggccctttctcacgcgaacaggtggttgctgttacaacagtt

SEQ ID NO: 663819 - DNA, 75 bp, synthetic construct
  source 1..75: mol_type = other DNA
ttatccagcgatgcaagctttttaaaaatgattgcaagcatattcttgtttgttactggaatgcaatcatggatt

SEQ ID NO: 663820 - DNA, 75 bp, synthetic construct
  source 1..75: mol_type = other DNA
atgaaaaactgtccccgactctggcaatgtaccgtgctaaagatttcgaagacgcggtagataaagcagagaaac

SEQ ID NO: 663821 - DNA, 75 bp, synthetic construct
  source 1..75: mol_type = other DNA
cattaataaagataaatttgaccaatctaaacttgaaattatcaaagctgttgattatgaaaaattgcccaatct

SEQ ID NO: 663822 - DNA, 75 bp, synthetic construct
  source 1..75: mol_type = other DNA
gctgggtcgggtcatctgctgtttctgtaactggtcaacgatggatgaccgcagcaatgaacgcattaaaggtta

SEQ ID NO: 663823 - DNA, 75 bp, synthetic construct
  source 1..75: mol_type = other DNA
gtggcttatctcaacggtgtggatacgccatatattgatcagatggagggcttcagtgtggatggcgtgacaacg

SEQ ID NO: 663824 - DNA, 75 bp, synthetic construct
  source 1..75: mol_type = other DNA
acgttttatttgtggctccagtggctggaatatcaccgaccacgtcctgcgctatctcattcttgattattcacc

SEQ ID NO: 663825 - DNA, 75 bp, synthetic construct
  source 1..75: mol_type = other DNA
tgacctgcgagtcggttcacatcgttgcagaagtggatgacgagatgtgcaaacagggaatgcctcgttttgcga

SEQ ID NO: 663826 - DNA, 75 bp, synthetic construct
  source 1..75: mol_type = other DNA
tggcgtatatcgatatccggctgggacgttttatttgtggctccagtggctggaatatcaccgaccacgtcatgc

SEQ ID NO: 663827 - DNA, 75 bp, synthetic construct
  source 1..75: mol_type = other DNA
gtatgaggtcctgcagcccggcgggctccgtcagacgctgtctcatgaagcgttactggccgtttattccggtta

SEQ ID NO: 663828 - DNA, 75 bp, synthetic construct
  source 1..75: mol_type = other DNA
gtccagcgtcgctgggatggatatactgccagtgtcgcccgttcgtccatccgggtaaaaaataccagtaatgtc

SEQ ID NO: 663829 - DNA, 75 bp, synthetic construct
  source 1..75: mol_type = other DNA
gataatcatctttcccggcgatctccggaagatatcccgtcacttgcggttccggcgcttcttttattgaacgct

SEQ ID NO: 663830 - DNA, 75 bp, synthetic construct
  source 1..75: mol_type = other DNA
tctgtcactctgtatccggcccggagagcgggtgggtattattggctcaataggttgtggtaaatcgacgctgct

SEQ ID NO: 663831 - DNA, 75 bp, synthetic construct
  source 1..75: mol_type = other DNA
agcagattaataccgtcattctggtgattctgggtacttatcttatccacagtgatgaaccacacacgcgtatca

SEQ ID NO: 663832 - DNA, 75 bp, synthetic construct
  source 1..75: mol_type = other DNA
gaagctcaataacgccgtgaactgggtacaacgccgctgggacagttatacagccagcgtatcacgctcatccat

SEQ ID NO: 663833 - DNA, 75 bp, synthetic construct
  source 1..75: mol_type = other DNA
ggaaggtaataccatccccgcgctggcaaaagagtttgcgacgggcgtgctgacctgtgaatccgttcacatcgt

SEQ ID NO: 663834 - DNA, 75 bp, synthetic construct
  source 1..75: mol_type = other DNA
aaaaaagagaaaaaagcagttggcgatatcctgctcagaaatggtacgctgaatgcagcaatagtaggtcagcct

SEQ ID NO: 663835 - DNA, 75 bp, synthetic construct
  source 1..75: mol_type = other DNA
tcgtgactgaccgcttcctgttcaacaatggttatgctgatcagatcacctctgtactgaaagcagctggcgttg

SEQ ID NO: 663836 - DNA, 75 bp, synthetic construct
  source 1..75: mol_type = other DNA
atgaagaatgtaaaaagcacagaaaatcggatagcaatgatgctgaaaacaaaaggctggagtcaggctgaacta

SEQ ID NO: 663837 - DNA, 75 bp, synthetic construct
  source 1..75: mol_type = other DNA
caggtaacactcctgttgttatcgacgaaacggctgatatcaaacgtgctgtcgcatccgtactgatgtctaaaa

SEQ ID NO: 663838 - DNA, 75 bp, synthetic construct
  source 1..75: mol_type = other DNA
tccgtattgaaagcggctggcgtagaaactgaagtcttcttcgaagttgaagcagacccgactctgagcatcgta

SEQ ID NO: 663839 - DNA, 75 bp, synthetic construct
  source 1..75: mol_type = other DNA
atctccgagctgaaacagattctgctggatacctactacggtcgtgattatgtagaaggtgaaactgcagcgaaa

SEQ ID NO: 663840 - DNA, 75 bp, synthetic construct
  source 1..75: mol_type = other DNA
aagcgccgcatgaaatcacctttaatcttgatggcgaaccgttaagcggacaacattttcatatcgaaatacttc

SEQ ID NO: 663841 - DNA, 75 bp, synthetic construct
  source 1..75: mol_type = other DNA
gttttatcaacatggcgacgggcggatttgggacgcgcatcaccacggaaacacccgagaaattaaaagccgcgc

SEQ ID NO: 663842 - DNA, 75 bp, synthetic construct
  source 1..75: mol_type = other DNA
atggcagaatttcccgccagcttactgattcttaatggcaaaagtactgacaatctacccttgcgcgaagcaatt

SEQ ID NO: 663843 - DNA, 75 bp, synthetic construct
  source 1..75: mol_type = other DNA
agcggtcattggcaaaatattataactatgctttttcattggcaacatcggaattcttaatgaagtgtgatgctc

SEQ ID NO: 663844 - DNA, 75 bp, synthetic construct
  source 1..75: mol_type = other DNA
aattgtgcccgaacgcattaattaacgatggcttgctgcaactgcgcatttttaccggcgatgaaattattccga

SEQ ID NO: 663845 - DNA, 75 bp, synthetic construct
  source 1..75: mol_type = other DNA
tcttgatggcgaaccgttgagtgggcaaaattttcatattgaaatacttccggcagcgttgcgttgtcgattacc

SEQ ID NO: 663846 - DNA, 75 bp, synthetic construct
  source 1..75: mol_type = other DNA
gcatgagttccggcggctatgccgacggcagttacaccatccccggcttgggtagcagcctggttgccgggtatg

SEQ ID NO: 663847 - DNA, 75 bp, synthetic construct
  source 1..75: mol_type = other DNA
cgcagatccgcagtcgctacaggttgtacaaaccggtggtggcgacgcgcagtttacgctgttgaacccaaacca

SEQ ID NO: 663848 - DNA, 75 bp, synthetic construct
  source 1..75: mol_type = other DNA
atttcattaatggcagcattaatgccgttaatcgcgcctttttgcgaacatttattcagcgaaatatttaacctt

SEQ ID NO: 663849 - DNA, 75 bp, synthetic construct
  source 1..75: mol_type = other DNA
agcggtaagcacaacaacactgctgtcttaccgtgccagtgagtctgaagggaggctgaccgaacagggctggag

SEQ ID NO: 663850 - DNA, 75 bp, synthetic construct
  source 1..75: mol_type = other DNA
aaggcggacgtgtaagcgtgcggtttaaggtaccgggctcactggtacagaatcggtttgccctgggtatttact

SEQ ID NO: 663851 - DNA, 75 bp, synthetic construct
  source 1..75: mol_type = other DNA
gcagttcattccgtggctgaaagtcgcgctggagcaggagtttgtgcataacaacctggtcagggttaatgacga

SEQ ID NO: 663852 - DNA, 75 bp, synthetic construct
  source 1..75: mol_type = other DNA
ccggtttcattatcgtatatttggtataataagctttagtctgttattaacgggggtttttgagttactccggta

SEQ ID NO: 663853 - DNA, 75 bp, synthetic construct
  source 1..75: mol_type = other DNA
taagaactaacagccaggacattgcaaccaacagaaaagcgattcagtcaaacagccgccagctgcaggagcaca

SEQ ID NO: 663854 - DNA, 75 bp, synthetic construct
  source 1..75: mol_type = other DNA
gcgattcagtcaaacagccgccagctgcaggagcacaatgcacgtctgaatgaccatcaacgccagattcgtgaa

SEQ ID NO: 663855 - DNA, 75 bp, synthetic construct
  source 1..75: mol_type = other DNA
atctctttaatggcggcattaatgccgttaattgcacctttttgcgaacatttattcagtgaaatttttaatttg

SEQ ID NO: 663856 - DNA, 75 bp, synthetic construct
  source 1..75: mol_type = other DNA
attaggtattttggcaccagagttaaaagacagccttggaattacaactgaacaatactcctggattgttggtgg

SEQ ID NO: 663857 - DNA, 75 bp, synthetic construct
  source 1..75: mol_type = other DNA
aatggaatgcgtggttctgccgcatggattgccagctttttattctcactaattattggcgttactgctgacaaa

SEQ ID NO: 663858 - DNA, 75 bp, synthetic construct
  source 1..75: mol_type = other DNA
ttcaggtgacgccggttattgatggtcaggatggcacaccgttcacgctgacgcagtcaccggtcagtgcatttt

SEQ ID NO: 663859 - DNA, 75 bp, synthetic construct
  source 1..75: mol_type = other DNA
ctgaccgatatatcaaaatcggcgacgtatatgctgctgattgacagcattgcggtggaagtgaacagcacagac

SEQ ID NO: 663860 - DNA, 75 bp, synthetic construct
  source 1..75: mol_type = other DNA
agaagacccggacattccgggtatcgggtattacggttcgaaatggcgtgacagctcagccacctggacgtcaca

SEQ ID NO: 663861 - DNA, 75 bp, synthetic construct
  source 1..75: mol_type = other DNA
agacggtgtacggtagttacaaaaacaaaacggaaaagaatatccattttgtgccgttcatgaccgatgagaacg

SEQ ID NO: 663862 - DNA, 75 bp, synthetic construct
  source 1..75: mol_type = other DNA
caaaacgcctggagtctggcagaggctgaaaaaacggtggatgtgtcgcgactgcgccgtctggttacgcaataa

SEQ ID NO: 663863 - DNA, 75 bp, synthetic construct
  source 1..75: mol_type = other DNA
gcatgccgggagaaccgctgaattcattaccggaaaacagcctgatacggtgaagcccaccggaccttccggtga

SEQ ID NO: 663864 - DNA, 75 bp, synthetic construct
  source 1..75: mol_type = other DNA
aaacagggtgcatacgccactcagccggggctgtttgattccatggtggaaaaatatcgttctgacctgtcggaa

SEQ ID NO: 663865 - DNA, 75 bp, synthetic construct
  source 1..75: mol_type = other DNA
ccgtgacgacgcaggcaacggcacgctgacgcgcacgcgtaagaaatcattctggtggtataaaaaagtgattgc

SEQ ID NO: 663866 - DNA, 75 bp, synthetic construct
  source 1..75: mol_type = other DNA
gttcaccaccggagctgatggcacatacagtgacgcgagtggtgcctcggagaattcaacccgctggggtgtggg

SEQ ID NO: 663867 - DNA, 75 bp, synthetic construct
  source 1..75: mol_type = other DNA
acgctggagctggtgttcaccgccggcagtgccacggttactccgaaactgaatggagtggctggtccggcattc

SEQ ID NO: 663868 - DNA, 75 bp, synthetic construct
  source 1..75: mol_type = other DNA
agcacccgcaattattcctgaacatggtgaatcagttccgcgccgatctcagcgcatattcttcacagtgcaccg

SEQ ID NO: 663869 - DNA, 75 bp, synthetic construct
  source 1..75: mol_type = other DNA
gaaagaacagggctggacgggggcagacggaaaagcctctgtcgtagatgattctgctgctgagagcggtaaagc

SEQ ID NO: 663870 - DNA, 75 bp, synthetic construct
  source 1..75: mol_type = other DNA
ccgaaaaatgccggaatccttctggtaccttgctgtcgtggagggtcagcatttacttccggcgctgagggggca

SEQ ID NO: 663871 - DNA, 75 bp, synthetic construct
  source 1..75: mol_type = other DNA
ttgaaaaaataaaatctaatattgatggtgttaattcagttatcaccagtaaaactgcgaaagattacaatattg

SEQ ID NO: 663872 - DNA, 75 bp, synthetic construct
  source 1..75: mol_type = other DNA
atctcaactttgcactagccacgccagacggcactttcgctttgcgtgtacatttcagtgccacacgctacagtc

SEQ ID NO: 663873 - DNA, 75 bp, synthetic construct
  source 1..75: mol_type = other DNA
agcacgccgatgtgctgatcgttaacggcgggctggggccgaccagtgatgatttaagcgcactcgccgctgcga

SEQ ID NO: 663874 - DNA, 75 bp, synthetic construct
  source 1..75: mol_type = other DNA
tgacggtactttcgctctgcgtgtacatttcagtacctcgcgttacgacctgggcgtgcgccaggacgtgtgcgc

SEQ ID NO: 663875 - DNA, 75 bp, synthetic construct
  source 1..75: mol_type = other DNA
atggcgtttcgcttctcaaccgtctacggatggaaggcaaaaacagcaaagccgatgtggtgctggggctggata

SEQ ID NO: 663876 - DNA, 75 bp, synthetic construct
  source 1..75: mol_type = other DNA
gccgatgtggtgctggggctggataacaatctgttagacgccgccagtaaaaccggactatttgccaaaagcggt

SEQ ID NO: 663877 - DNA, 75 bp, synthetic construct
  source 1..75: mol_type = other DNA
atggcgtttcgcttctcaaccgtctacggatggaaggcaaaaatagtaaagccgatgtggtgctggggctggata

SEQ ID NO: 663878 - DNA, 75 bp, synthetic construct
  source 1..75: mol_type = other DNA
gcgatctggttatctgccgtcaggtggttgagaaggaagcacaggagcaaggcaaaccactggaggcgcactggg

SEQ ID NO: 663879 - DNA, 75 bp, synthetic construct
  source 1..75: mol_type = other DNA
atgtgggactggcaccctgttttattgcccgaaggccctttctcacgcgaacaggcggttggcgtcacaacagct

SEQ ID NO: 663880 - DNA, 75 bp, synthetic construct
  source 1..75: mol_type = other DNA
atgtcggactgacgccctgttttattgcccgaaggccctttctcacgcgaacaggcggttggcgtcacaacagct

SEQ ID NO: 663881 - DNA, 75 bp, synthetic construct
  source 1..75: mol_type = other DNA
gttcagcctgacgttgagcgagcaattcaccggtggtttattggctttgcaactttctcgcgcaggtgctccatt

SEQ ID NO: 663882 - DNA, 75 bp, synthetic construct
  source 1..75: mol_type = other DNA
agacggcactttcgctttgcgtgtgcgtttcagcactacgcgctacagtctggctattcgccaggaagtctgcgc

SEQ ID NO: 663883 - DNA, 75 bp, synthetic construct
  source 1..75: mol_type = other DNA
gctctccttcccgtttgaagtgccgcctggcatggagatgtcgctgctgggcgatctggttatctgccgtcaggt

SEQ ID NO: 663884 - DNA, 75 bp, synthetic construct
  source 1..75: mol_type = other DNA
gaactgaaatttgtggcgctggaagatggcgtctcactgctgaaccgtctgcggatggaaggcaaaaacagcaaa

SEQ ID NO: 663885 - DNA, 75 bp, synthetic construct
  source 1..75: mol_type = other DNA
cgctggcggtgctggaattttgaacctgatgccggaaaacagctaaatccgtatctcgccagtgaagggcttctc

SEQ ID NO: 663886 - DNA, 75 bp, synthetic construct
  source 1..75: mol_type = other DNA
accctgaagccattgctgaagtgattgccgcaggcgcagaaacagcgtctacggctaaaactatcgctgaacagt

SEQ ID NO: 663887 - DNA, 75 bp, synthetic construct
  source 1..75: mol_type = other DNA
agctattttcgacaaatactatgacttgatgaaagcgatggcgggatccgttgtatataccggagaaatcggtgc

SEQ ID NO: 663888 - DNA, 75 bp, synthetic construct
  source 1..75: mol_type = other DNA
ttttgtctactgcactggctggcgttttgtttggggttagttttggagttgcggctgaagaaatttatactaaag

SEQ ID NO: 663889 - DNA, 75 bp, synthetic construct
  source 1..75: mol_type = other DNA
cctcgcaaatggccgacatgctaaaacgcagaggtttttacctttttggcacgtcacccaaaggcacgcagatgc

SEQ ID NO: 663890 - DNA, 75 bp, synthetic construct
  source 1..75: mol_type = other DNA
atgtcacgtttattgcccgaagtccctttctcacgcgagcaggcggttgtcatcacaacagcttaccgcaatgtg

SEQ ID NO: 663891 - DNA, 75 bp, synthetic construct
  source 1..75: mol_type = other DNA
aaaattgaagtggttatcgccaacaatgatgcgatggcaatgggcgcggtagaagcgctgaaagcacacagcaag

SEQ ID NO: 663892 - DNA, 75 bp, synthetic construct
  source 1..75: mol_type = other DNA
tgctggaattttgaacctgatgccggaaaacagctaaacccgtatctcgccagcgagggaattctcaggcaataa

SEQ ID NO: 663893 - DNA, 75 bp, synthetic construct
  source 1..75: mol_type = other DNA
aagtcgccgcccgcaccgctgccagcaagcagccggagctggcgcaaaaattcctccagtttatggtttctccgg

SEQ ID NO: 663894 - DNA, 75 bp, synthetic construct
  source 1..75: mol_type = other DNA
gctggatacttcccacggcgtcggcgcgcaactgccgctcacagctgcggttatggagatgatgcaggcactgcg

SEQ ID NO: 663895 - DNA, 75 bp, synthetic construct
  source 1..75: mol_type = other DNA
ccaggctcttgccgtcacaacagcttaccttaatgtgcttattgaagatgaccagggaacgcatttccggctggt

SEQ ID NO: 663896 - DNA, 75 bp, synthetic construct
  source 1..75: mol_type = other DNA
atgaataagaaggtgttaaccctgtctgcaatcatggccagcatgttattcggtgccgctgcacacgctgctgat

SEQ ID NO: 663897 - DNA, 75 bp, synthetic construct
  source 1..75: mol_type = other DNA
ccccaaaactgacgcgtacgtgctggcgcttcccgcctcgctgcctgtgcgttacgccgcggtactgacggtcat

SEQ ID NO: 663898 - DNA, 75 bp, synthetic construct
  source 1..75: mol_type = other DNA
atgaactgccttcgcgctcagcattgctggggctgctggctgctggctgccggggtagggatccggcgtgatgat

SEQ ID NO: 663899 - DNA, 75 bp, synthetic construct
  source 1..75: mol_type = other DNA
accgaacgcttaaacgcgtttaatcgccactattcactggtggtttgcgccagccgtaacccgcgctgggcacgg

SEQ ID NO: 663900 - DNA, 75 bp, synthetic construct
  source 1..75: mol_type = other DNA
ctgcaacgtcagcaactgaacggctggcataaagcaatgctgagctattaccagaactctgatcttgttatcacc

SEQ ID NO: 663901 - DNA, 75 bp, synthetic construct
  source 1..75: mol_type = other DNA
cagtcattgacgaagtgattgtccgcgcgggggactatatcgacattggtacgcctctttttggcggatcggttg

SEQ ID NO: 663902 - DNA, 75 bp, synthetic construct
  source 1..75: mol_type = other DNA
gcgttgattctggtgccatcattatcaccggtgaaagcgcaaaaaaccgcaacgctcgcccggcggtgatggcgc

SEQ ID NO: 663903 - DNA, 75 bp, synthetic construct
  source 1..75: mol_type = other DNA
gcagaagcgctcggcataacgcagggcgggctaggccattggttaaatgccagacgtgaaccgaacctagaggtt

SEQ ID NO: 663904 - DNA, 75 bp, synthetic construct
  source 1..75: mol_type = other DNA
gttgaagtaattgactcgctgctttatggcaaagtcgatggtttaggcgtgcttaaggctgcggttgcagcgatt

SEQ ID NO: 663905 - DNA, 75 bp, synthetic construct
  source 1..75: mol_type = other DNA
ccagcgtttgttacccaacaaaccggttgaagtaattgactcgctgctttatggcaaagtcgatggtttaggcgt

SEQ ID NO: 663906 - DNA, 75 bp, synthetic construct
  source 1..75: mol_type = other DNA
ccatcgcggcagaacgcggttcgagaattatttctgtcaacggtgcggcggcccactgcgccagcgtcggcgata

SEQ ID NO: 663907 - DNA, 75 bp, synthetic construct
  source 1..75: mol_type = other DNA
tggcgccccaacgttgcctactttgaaggcgacaacgaaatgaaacgtaccgcgaaagcgatcccggttcaggtt

SEQ ID NO: 663908 - DNA, 75 bp, synthetic construct
  source 1..75: mol_type = other DNA
tggaagcaatcaacggaaaattggttgtagcgaaacttgacggtgacaatgaagctacattcaaaaagcttgtta

SEQ ID NO: 663909 - DNA, 75 bp, synthetic construct
  source 1..75: mol_type = other DNA
aggcagggaactggaagatcagtttgtcactcagcaaatgttgcaacacgcgctggcgcaattaagtgaaaaaga

SEQ ID NO: 663910 - DNA, 75 bp, synthetic construct
  source 1..75: mol_type = other DNA
cgccgcgttggctggctgaagagttcgctgaatccttagaattacaggtattaccgctgccgttaaaacaaaaca

SEQ ID NO: 663911 - DNA, 75 bp, synthetic construct
  source 1..75: mol_type = other DNA
ggcgctgcaggactggcaaatcttcggcgtggacgccccggtaatcacaggcttcctgagtcacttaagctgcgt

SEQ ID NO: 663912 - DNA, 75 bp, synthetic construct
  source 1..75: mol_type = other DNA
ttacatacttttcttggagtaggtaaacgctttgcatcgtggattacagaacgtattgaagagtacggattcgtt

SEQ ID NO: 663913 - DNA, 75 bp, synthetic construct
  source 1..75: mol_type = other DNA
attaacggaaaataacgaagtgtggtcgcgcgttagccaggccaacacttccagcaccagtaaaggtggctgtgg

SEQ ID NO: 663914 - DNA, 75 bp, synthetic construct
  source 1..75: mol_type = other DNA
cgggggtgacctttaaacgaccgctactggcagcagaagcgaccttggggtcctcggtaagtaataataatgagt

SEQ ID NO: 663915 - DNA, 75 bp, synthetic construct
  source 1..75: mol_type = other DNA
aaaaacgccgttggtcgcgagcctcgcgggtattgctcaggccagtgaaacggcagtgatctttaccgtcctcac

SEQ ID NO: 663916 - DNA, 75 bp, synthetic construct
  source 1..75: mol_type = other DNA
attgcacatcatcaccattctggtgatatgtatgctgattgcctccgttctggaatttattcgcagctttaatac

SEQ ID NO: 663917 - DNA, 75 bp, synthetic construct
  source 1..75: mol_type = other DNA
gagcacatctctcatgaaatgttagatgtcagcgaaatcactaccaccgcccccgcgttttacgccattctgccg

SEQ ID NO: 663918 - DNA, 75 bp, synthetic construct
  source 1..75: mol_type = other DNA
tggggctgcttaatgccattcgtcgctacgggctgccggacgaaggttttgcgggctatgccgtgcaccgtattc

SEQ ID NO: 663919 - DNA, 75 bp, synthetic construct
  source 1..75: mol_type = other DNA
aacgcggcattataacattttttgatttagaaatgtttggcctttataaaatacgacaaggtaaatcgccggaat

SEQ ID NO: 663920 - DNA, 75 bp, synthetic construct
  source 1..75: mol_type = other DNA
tgatgctgtgtggctttgccgcttacatgacccatatcggcgcgaatgatatggtggtcaagctggcgtcaaaac

SEQ ID NO: 663921 - DNA, 75 bp, synthetic construct
  source 1..75: mol_type = other DNA
taccggtgcttgttggtttggtgattgttatcgttgctacagagctgatggtgccaggaacggcagcagcggtca

SEQ ID NO: 663922 - DNA, 75 bp, synthetic construct
  source 1..75: mol_type = other DNA
ccggcgcagtggaacgcggctgcaaatgcggcgaagctgaaaaaaggcgaaacgctacaggtaaaggtgacggta

SEQ ID NO: 663923 - DNA, 75 bp, synthetic construct
  source 1..75: mol_type = other DNA
ctgggaacagtgcgggaaaacaacgaagactgggcgttgtacgatcaaaacaccagtatgcaggcggaatgcggg

SEQ ID NO: 663924 - DNA, 75 bp, synthetic construct
  source 1..75: mol_type = other DNA
acccccgttccctttacagccttcaccatcactaaaggcatggggtataaccgagcggggcaggtgagcgggttt

SEQ ID NO: 663925 - DNA, 75 bp, synthetic construct
  source 1..75: mol_type = other DNA
caaaaaaccgagagcgctatgtgactgacaaagaataccaggccgtattaagcgtggctcctgtgcctgttttta

SEQ ID NO: 663926 - DNA, 75 bp, synthetic construct
  source 1..75: mol_type = other DNA
ccgctggtgaatgacatgcaggggttgtatgcggattaccctaacggccagttaggatcggtgctcggcttgccg

SEQ ID NO: 663927 - DNA, 75 bp, synthetic construct
  source 1..75: mol_type = other DNA
caaccagttgggcacggtgctcggcttgccgaccttcgctgggtatatgtgggcctacgatatgatgacggtttc

SEQ ID NO: 663928 - DNA, 75 bp, synthetic construct
  source 1..75: mol_type = other DNA
gcctcgcaaatcacgacgaacacgggtgtactgcaaacctgccgtacaacgccgttgacggctgccagccagatt

SEQ ID NO: 663929 - DNA, 75 bp, synthetic construct
  source 1..75: mol_type = other DNA
agcctggactgagcgtcttagtgcggctgtggatatttgcagggaatggggacaggatggccctgttatcaggac

SEQ ID NO: 663930 - DNA, 75 bp, synthetic construct
  source 1..75: mol_type = other DNA
gaaaacagggaaaaaacagataaaagcatggagtccacgattacaggcggcgatcgaaaaagcaaaacagttacc

SEQ ID NO: 663931 - DNA, 75 bp, synthetic construct
  source 1..75: mol_type = other DNA
tggtattaaacagatcaaagcctggactgagcgtcttagtgcggctgtggatatttgcagggaatggggacagga

SEQ ID NO: 663932 - DNA, 75 bp, synthetic construct
  source 1..75: mol_type = other DNA
gcgacagcaaaggtgctgaaattcccggaagtgcagatgcatgaaatcctgagtgactttgccagaatgattccg

SEQ ID NO: 663933 - DNA, 75 bp, synthetic construct
  source 1..75: mol_type = other DNA
cagacccgcgattctgtgaaccagaaccagcaagaaacggaacagaacgaccagaaagcggaacaaaacagccca

SEQ ID NO: 663934 - DNA, 75 bp, synthetic construct
  source 1..75: mol_type = other DNA
agtcgggataagcaacttttctctggtcacaaaaccgaggggcaagtgctaatctatgacaggaaggttaaagtt

SEQ ID NO: 663935 - DNA, 75 bp, synthetic construct
  source 1..75: mol_type = other DNA
ccggcggcgcgggggtgaaaacccatatcacggcaagaatgcgcagcgattttaacgccacagatgccaaagatg

SEQ ID NO: 663936 - DNA, 75 bp, synthetic construct
  source 1..75: mol_type = other DNA
aaacacacagtgccccgccactgatgatgagatggaccccttcgatgatgatgaagaggatgaagagtcagaacg

SEQ ID NO: 663937 - DNA, 75 bp, synthetic construct
  source 1..75: mol_type = other DNA
gacctcgatgactttgatgatagtgacgatgattttacttacagacccaaaaagaaaactcacaccgattcaaag

SEQ ID NO: 663938 - DNA, 75 bp, synthetic construct
  source 1..75: mol_type = other DNA
ctttctttggatgagttaaatgattttctttctgtgaatgaatctgaccttgatagtgaagttactaaagaggct

SEQ ID NO: 663939 - DNA, 75 bp, synthetic construct
  source 1..75: mol_type = other DNA
ttcaaggccgtcaatctcagttcaggcaccagttcgataattccatctgccacaaaagaactgcttacctgccag

SEQ ID NO: 663940 - DNA, 75 bp, synthetic construct
  source 1..75: mol_type = other DNA
ggttgtggtcaatggtggcctggcggacgaaacttcgcttaataataccgctgcagcatacagcgccatgaccgg

SEQ ID NO: 663941 - DNA, 75 bp, synthetic construct
  source 1..75: mol_type = other DNA
gtcatgggggtagtgacaaaatgtcacccgtgttagataactcactagataaaacattaaataatattaaagata

SEQ ID NO: 663942 - DNA, 75 bp, synthetic construct
  source 1..75: mol_type = other DNA
aaacaacgatcaaccgctggcgtattactacttctcgctgcatctggatgacggcgttaaccgcaaaaatcaaac

SEQ ID NO: 663943 - DNA, 75 bp, synthetic construct
  source 1..75: mol_type = other DNA
gctgacggcaatgctttactctgatgcgacgaaaaaatccagcatcgacacaatctttacggtggtgaccagccc

SEQ ID NO: 663944 - DNA, 75 bp, synthetic construct
  source 1..75: mol_type = other DNA
gtgcagacagtccttggctggccgatgcagggggattattactggtcatcgctggcgggcaccaccgggcagcac

SEQ ID NO: 663945 - DNA, 75 bp, synthetic construct
  source 1..75: mol_type = other DNA
agagaaatacaaatcatattcaccaagtattgaccatctcgcttatatggctggcgtatcaaagagaacagcaat

SEQ ID NO: 663946 - DNA, 75 bp, synthetic construct
  source 1..75: mol_type = other DNA
accggatgttgaccttgatgatgaagaagaccctgaagaggaattgaaacgtgaacagcgtaaagcagaaattaa

SEQ ID NO: 663947 - DNA, 75 bp, synthetic construct
  source 1..75: mol_type = other DNA
gttggcgacgccgttaaccgtgacgctggcgcgtgatacaacgaaagtcgccacgctggatgttatctacacggt

SEQ ID NO: 663948 - DNA, 75 bp, synthetic construct
  source 1..75: mol_type = other DNA
gattgtgtcgtcacggttaccgatctcgccgatcagcaagcctttgctgaagccttggcttccgccgacatttta

SEQ ID NO: 663949 - DNA, 75 bp, synthetic construct
  source 1..75: mol_type = other DNA
atgacgaagttattgcagcaggcgcaacaagctggttgcaaaacgattgatggatacggcatgttgttgtggcaa

SEQ ID NO: 663950 - DNA, 75 bp, synthetic construct
  source 1..75: mol_type = other DNA
ctgcgcggctataacaccgacggcacgggccatattcgcgccattaaagagagcggttttgatatcaaaggcaaa

SEQ ID NO: 663951 - DNA, 75 bp, synthetic construct
  source 1..75: mol_type = other DNA
gtatctgcgccatattctgagcgtactgccggaatggccctccaaccgtgttgacgaactcctgccatggaacgt

SEQ ID NO: 663952 - DNA, 75 bp, synthetic construct
  source 1..75: mol_type = other DNA
cgcttagtgaatatcagcaataccggaatatattggtcgtcagtcatcagggagtgctgagtctgttaattgccc

SEQ ID NO: 663953 - DNA, 75 bp, synthetic construct
  source 1..75: mol_type = other DNA
ggatgctggagcgccattgatatcaacgaaacatttgtaaccttgcgtgtcctcaatagccgtgccatcgggttc

SEQ ID NO: 663954 - DNA, 75 bp, synthetic construct
  source 1..75: mol_type = other DNA
gtcggcgactgtggcagttaagggggatgagattattgtcaacaaggcaagcggctataaactgggattcggcaa

SEQ ID NO: 663955 - DNA, 75 bp, synthetic construct
  source 1..75: mol_type = other DNA
cgcgtacgtgactatatcatcgccttggcggttcctgggctcgtggccgccatgctctatgtcgcaccgggtata

SEQ ID NO: 663956 - DNA, 75 bp, synthetic construct
  source 1..75: mol_type = other DNA
cattgccagcttccggttatggcagatacgcaaccgccgtgtcagtcaggcagaaaaaggcacatttcgccactt

SEQ ID NO: 663957 - DNA, 75 bp, synthetic construct
  source 1..75: mol_type = other DNA
ctggatattcagaaaaaggcggaggaaatcatgaaaaagccctgggcatcagtatcagtcacctggacaacagag

SEQ ID NO: 663958 - DNA, 75 bp, synthetic construct
  source 1..75: mol_type = other DNA
gtcgcccgactgaatcaggaaatacgccgccggcagatggagctggatattctgaaaaaggcggaggaaatcata

SEQ ID NO: 663959 - DNA, 75 bp, synthetic construct
  source 1..75: mol_type = other DNA
aaaacaaagatcgctgatgccctgagacagggcatatcccctgacagaattactgcatgttctgagccttgcccg

SEQ ID NO: 663960 - DNA, 75 bp, synthetic construct
  source 1..75: mol_type = other DNA
tgtccgggatctggttcagaaccataatttcgcgcgtctggctaactgtgacactgatgattttccggtagagaa

SEQ ID NO: 663961 - DNA, 75 bp, synthetic construct
  source 1..75: mol_type = other DNA
agatcgggcgcggcaaaaaccatgcgcgcgatttagaccaggatacggcgcgcggcctgtatgcccatatgctca

SEQ ID NO: 663962 - DNA, 75 bp, synthetic construct
  source 1..75: mol_type = other DNA
tagcgaagatccaactcgcgtgctgacagaaaccattttcgaactgatgggtattacaccaacgttgcacggcgg

SEQ ID NO: 663963 - DNA, 75 bp, synthetic construct
  source 1..75: mol_type = other DNA
gtcggggcgtataaaggtaaatacctgtggtataccgcaccagattttgtatcacttggcgcaggaacccgagca

SEQ ID NO: 663964 - DNA, 75 bp, synthetic construct
  source 1..75: mol_type = other DNA
agaaaacggtcaatggtactatattgacggtacacgtccgcagtttggtcgcaacgatccctgcccttgtggttc

SEQ ID NO: 663965 - DNA, 75 bp, synthetic construct
  source 1..75: mol_type = other DNA
aggcaggaattacaggcgatgcggcgatatatgacgattctgatccagaacatctcatgcgttcgcgttactgcg

SEQ ID NO: 663966 - DNA, 75 bp, synthetic construct
  source 1..75: mol_type = other DNA
ctaatccgcagcgctgcccgcagatcaatctcattgaccgtgaagggatgcgggtgctgtatgaaaaacaggacc

SEQ ID NO: 663967 - DNA, 75 bp, synthetic construct
  source 1..75: mol_type = other DNA
ttctcagccgtaatggcgatccgcaaaccttgcagcagctaagtgtactgggattcaatgacggcacgtattgcg

SEQ ID NO: 663968 - DNA, 75 bp, synthetic construct
  source 1..75: mol_type = other DNA
cgaggcgcaaggcaacagttttattctgctgctgcacccggtggagcagatgcggcagctgatgaccagccagct

SEQ ID NO: 663969 - DNA, 75 bp, synthetic construct
  source 1..75: mol_type = other DNA
gctgttcacctcactcaaggtgatgacgaatgcctgcaacacactccgtactaaatgcattgatggcattacagc

SEQ ID NO: 663970 - DNA, 75 bp, synthetic construct
  source 1..75: mol_type = other DNA
tgaaagacctgattgcttatctggaagagaagccggacatggcggaacatctggcagccgttaaggcttatcgcg

SEQ ID NO: 663971 - DNA, 75 bp, synthetic construct
  source 1..75: mol_type = other DNA
tgaacgatctgattgcttatctggaagagaagccggaaatggcggaacacctggcggcggttaaggcttatcgcg

SEQ ID NO: 663972 - DNA, 75 bp, synthetic construct
  source 1..75: mol_type = other DNA
atgaaaccatatcagcgccagtttattgaatttgcgcttagcaaacaggtattaaagtttggtgagtttacgctg

SEQ ID NO: 663973 - DNA, 75 bp, synthetic construct
  source 1..75: mol_type = other DNA
ttctggatatccgcgctctcaaccggttactggaccacccggacactggacaccccgtccggactcttcttctcc

SEQ ID NO: 663974 - DNA, 75 bp, synthetic construct
  source 1..75: mol_type = other DNA
gaataatgttgtcaaagcgaaaaaaggggaagaagtcgtggttcgcgtgaccactaaagattcgcagggtaaccc

SEQ ID NO: 663975 - DNA, 75 bp, synthetic construct
  source 1..75: mol_type = other DNA
tctcaacagtgtgggatggacgaaggcactggagcacaggattgtagtatcacgctaatgaataaaccgggtctg

SEQ ID NO: 663976 - DNA, 75 bp, synthetic construct
  source 1..75: mol_type = other DNA
ccggggctaatcccgtatcctcaccgattattaactacgaaaactgggcttctgcacatatcattgatgccagta

SEQ ID NO: 663977 - DNA, 75 bp, synthetic construct
  source 1..75: mol_type = other DNA
attaacggaaaataacgaagtctggtcgcgagtcagccaggccaacgcctccagcaccagtaaaggtggctgtgg

SEQ ID NO: 663978 - DNA, 75 bp, synthetic construct
  source 1..75: mol_type = other DNA
agttcggtgcgctggcgacggtggtgcctacgtcagtgcaggatgtggctggttggccgatacagggtaactact

SEQ ID NO: 663979 - DNA, 75 bp, synthetic construct
  source 1..75: mol_type = other DNA
ttactggacccacagccagtcgcagatcgctcgttttgcgctcagggccttgccgggcgtttgctggttgcctgg

SEQ ID NO: 663980 - DNA, 75 bp, synthetic construct
  source 1..75: mol_type = other DNA
actgccttcaaacgccccttactctctgctgaaagatcgtcgggccagtcgtttatagaagacaatgaagagtgg

SEQ ID NO: 663981 - DNA, 75 bp, synthetic construct
  source 1..75: mol_type = other DNA
gggaatacggtgccgaatgtggaatttactttgaaacgcggtgaggcatcgccgcgtaacgctggggcaacgttg

SEQ ID NO: 663982 - DNA, 75 bp, synthetic construct
  source 1..75: mol_type = other DNA
caccactgacgcgttgacgtggtattacggcgtcattaatttgaaaacgggacaatcgacgacgactattaatgg

SEQ ID NO: 663983 - DNA, 75 bp, synthetic construct
  source 1..75: mol_type = other DNA
catggtcatatatatccaacactcaaaaagcgacggcagattgcccgctggaatatcaaccgcgcctcagcgagt

SEQ ID NO: 663984 - DNA, 75 bp, synthetic construct
  source 1..75: mol_type = other DNA
tgtggtagtgaatatgttccctctcaggccgggctggagtcattgtatgaagccaaccgcggcaatgcgatgaaa

SEQ ID NO: 663985 - DNA, 75 bp, synthetic construct
  source 1..75: mol_type = other DNA
acgctcaccagtccggatgcggttggcgcgcagatgtgggggcatatggatgagacgattaccgtcgatgcatta

SEQ ID NO: 663986 - DNA, 75 bp, synthetic construct
  source 1..75: mol_type = other DNA
ctattcagatacaacgaaaaaagcgaccctcgataccatttttaccgttgtaaccagtccggacagcgataaggc

SEQ ID NO: 663987 - DNA, 75 bp, synthetic construct
  source 1..75: mol_type = other DNA
cgcgcctgatgcgtacgttgtggcgtatacatcatcggcaaaaacacctttccaacgcgctacggcgctttctgg

SEQ ID NO: 663988 - DNA, 75 bp, synthetic construct
  source 1..75: mol_type = other DNA
ttagctgtttgtcgcggcgcgtgattgaagagcaattgcagactggcactttacgtgaggttgctgtcccactgc

SEQ ID NO: 663989 - DNA, 75 bp, synthetic construct
  source 1..75: mol_type = other DNA
ccgctgcgccgtggatcctgcgtgaacgcggttccggcacgcgggagattgtcgattatctattgctgtcacatt

SEQ ID NO: 663990 - DNA, 75 bp, synthetic construct
  source 1..75: mol_type = other DNA
ttaatgaacacgggcggctgctctatccgcgtgcgttggcactgcttgaacaggcgattgaaatcgaacaactgt

SEQ ID NO: 663991 - DNA, 75 bp, synthetic construct
  source 1..75: mol_type = other DNA
catgcggtgcgtcatggattgggaattagttgcctgtcgcgacgggtcattgaagatcaattgcaggcaggcacg

SEQ ID NO: 663992 - DNA, 75 bp, synthetic construct
  source 1..75: mol_type = other DNA
tattcatcatcggcaaaagcatctttccaacgcgttactgcgttttctggactactgcgatcccgctaatttacc

SEQ ID NO: 663993 - DNA, 75 bp, synthetic construct
  source 1..75: mol_type = other DNA
agtcccgcctctgggagcttcagcgtaatcgtaattttcaggccagtcgtcgtctcgaaggtgttgagatccctt

SEQ ID NO: 663994 - DNA, 75 bp, synthetic construct
  source 1..75: mol_type = other DNA
acgtgccgaattgatggccggatttgcgcatactgaatggttgggattgaccgtatttgaacattgttggcagga

SEQ ID NO: 663995 - DNA, 75 bp, synthetic construct
  source 1..75: mol_type = other DNA
ctggggttagccgtatttgagcattcataccacgaaggcgataacgtgggatatgtcagttttgtcgcacgtttt

SEQ ID NO: 663996 - DNA, 75 bp, synthetic construct
  source 1..75: mol_type = other DNA
ggtgttggggtcaagtataatgataatgacctgtatctggcagctgactactctgaaacccgaaatatgactcca

SEQ ID NO: 663997 - DNA, 75 bp, synthetic construct
  source 1..75: mol_type = other DNA
aaccttattgatgaaagcgaatttaccaaaaaggctggagttgcaaccgataatatacttgctgttggtatgatg

SEQ ID NO: 663998 - DNA, 75 bp, synthetic construct
  source 1..75: mol_type = other DNA
cgtctcgaaggtgttgagatccctttggtgacactgactgccgctgaggctttggtgcgccttgaagagctaagg

SEQ ID NO: 663999 - DNA, 75 bp, synthetic construct
  source 1..75: mol_type = other DNA
tatacgggttccagttcaaataaaaaatgggatattgttaagaccttacttccccacagcttatcttctttattt

SEQ ID NO: 664000 - DNA, 75 bp, synthetic construct
  source 1..75: mol_type = other DNA
tttgtcaccttgatgaaaaaaaattcagagggatgccgttatattatgaagaggacatcccttttttaggaaata

SEQ ID NO: 664001 - DNA, 75 bp, synthetic construct
  source 1..75: mol_type = other DNA
tgaagaagccgatagcctcattagcgcttttgtcagcgaccttgagcgcctggcggcgctgctcgacagtggtat

SEQ ID NO: 664002 - DNA, 75 bp, synthetic construct
  source 1..75: mol_type = other DNA
agcagcagaccaccggttagcgggattaatcaccggaaagttatatggcaggatacctaaagagatatggaaata

SEQ ID NO: 664003 - DNA, 75 bp, synthetic construct
  source 1..75: mol_type = other DNA
caggacgtccctaagatgaccgatttcggtctgccgctgccgcatatgggctggaatcgcgtctatccgcaggcg

SEQ ID NO: 664004 - DNA, 75 bp, synthetic construct
  source 1..75: mol_type = other DNA
gctgcgccaatttgaactcggtgaagtcagccattgcgcgccacggttatgaacccaaagtcagccgtgacccgg

SEQ ID NO: 664005 - DNA, 75 bp, synthetic construct
  source 1..75: mol_type = other DNA
ggagcgagcgacagcaacaaatatcgccagatccacgatgcgttcgaaaaaaccgggcgtcactggttgtataac

SEQ ID NO: 664006 - DNA, 75 bp, synthetic construct
  source 1..75: mol_type = other DNA
cacaaatacgacaacgcaaaaaaaaaatgggatacaataaactcaattctttcaaaaaaaacaaagatatatgta

SEQ ID NO: 664007 - DNA, 75 bp, synthetic construct
  source 1..75: mol_type = other DNA
cggttctaagcgtcggtgccaccaccggcgtaaaaaacagaaagctggtcgaacaattgctggaagaatacgaag

SEQ ID NO: 664008 - DNA, 75 bp, synthetic construct
  source 1..75: mol_type = other DNA
atctgattagcggcctgctacccgccgaagaagccgatagcctcattagcgcttttgtcagcgatcttgagcgcc

SEQ ID NO: 664009 - DNA, 75 bp, synthetic construct
  source 1..75: mol_type = other DNA
tgtgctggcaggcgtggtggacagccgccgcagcctgttgagttatgacgggctggacgccagccgcgcgttagc

SEQ ID NO: 664010 - DNA, 75 bp, synthetic construct
  source 1..75: mol_type = other DNA
tgatccgcggacctggcgcagggcgcgacgtcaccgccggggcgattcagtcggatattaatcgtctggcgcagt

SEQ ID NO: 664011 - DNA, 75 bp, synthetic construct
  source 1..75: mol_type = other DNA
tttagtggtgctggacgttaccgccagccagcagcttgctgatcagtatcttgatttcgccagccacggtttcca

SEQ ID NO: 664012 - DNA, 75 bp, synthetic construct
  source 1..75: mol_type = other DNA
atgctaaaaccatctgcgatcatctggcagtgctacgcccggatgtctggttgatgattggtcactgtggtggct

SEQ ID NO: 664013 - DNA, 75 bp, synthetic construct
  source 1..75: mol_type = other DNA
acttttgagtgctcatccatgccgggttatctatgcagtaagtgaagaggatgatgcaaaaaaaatctcagagaa

SEQ ID NO: 664014 - DNA, 75 bp, synthetic construct
  source 1..75: mol_type = other DNA
gccagggaattattgataaaagaggaaatgttgggtatgcataatctgatattgttggagaatatttgtatgcaa

SEQ ID NO: 664015 - DNA, 75 bp, synthetic construct
  source 1..75: mol_type = other DNA
cgcattacgcgtaaaggtttaatcatccccgatctccgttatctggtgggagattgtcagcttgcgcatatcacc

SEQ ID NO: 664016 - DNA, 75 bp, synthetic construct
  source 1..75: mol_type = other DNA
atgactaataagggctccggtctgaccccagctcaggcactggaaaaactcgaggcgctgtatgagcaatctgtt

SEQ ID NO: 664017 - DNA, 75 bp, synthetic construct
  source 1..75: mol_type = other DNA
ctttcgcccttatcttgatgagcagctcactctactgtatcaggattatggcgcgagcatctccgtccaaccgtc

SEQ ID NO: 664018 - DNA, 75 bp, synthetic construct
  source 1..75: mol_type = other DNA
gcgacctggtgcggggctgtgaagcctcgttcctgtctcagctggcgggtatcgagtacggcaataagctggaaa

SEQ ID NO: 664019 - DNA, 75 bp, synthetic construct
  source 1..75: mol_type = other DNA
gccattgatgcaaaccctgaatgggctgtcgaagcgcagcgctggacagaacgcctcaaacagtggcaggacacc

SEQ ID NO: 664020 - DNA, 75 bp, synthetic construct
  source 1..75: mol_type = other DNA
cggtagcgtgccgtttaccgagctggtggatcaggcgtggcagcagggcttaaccgaacctgatccgcgtgacga

SEQ ID NO: 664021 - DNA, 75 bp, synthetic construct
  source 1..75: mol_type = other DNA
gcaaacaacccgataaggctatgcaacttctcagtctcgatgacaatgccctacattattatttacctactgtgt

SEQ ID NO: 664022 - DNA, 75 bp, synthetic construct
  source 1..75: mol_type = other DNA
catatccttccacattgtttctccggaaatcactaacggtttggcatttgcagaaccattatcagccatagcttc

SEQ ID NO: 664023 - DNA, 75 bp, synthetic construct
  source 1..75: mol_type = other DNA
gtggaatacggtaacaagctggagagcaagcttcgtcaggacaatcagacaatgaaagaccttatcgagcaggtt

SEQ ID NO: 664024 - DNA, 75 bp, synthetic construct
  source 1..75: mol_type = other DNA
atgcaggactttaataactataacggatgctacatgaaaaacgacagtttaattacgcggtataaaatacttaaa

SEQ ID NO: 664025 - DNA, 75 bp, synthetic construct
  source 1..75: mol_type = other DNA
actgtcgcagcaccttatggtgtgggtattcatccttatttaacctgcaacttaacgcctgttgatgactatgta

SEQ ID NO: 664026 - DNA, 75 bp, synthetic construct
  source 1..75: mol_type = other DNA
gcccagttacggctatccgtttatgctggcctcgcaagttgtttattcgctcaacgcacgcacgggcctttccgt

SEQ ID NO: 664027 - DNA, 75 bp, synthetic construct
  source 1..75: mol_type = other DNA
ttccagcttccggcagaacaggtttatgccgtcgatgagcacgcaaatccgacaacgcttcaccacgttgatgag

SEQ ID NO: 664028 - DNA, 75 bp, synthetic construct
  source 1..75: mol_type = other DNA
acgagtacgcggatactatcgacaagacaagttctacccatatgtggataccgaagggtacgctacaatcggtta

SEQ ID NO: 664029 - DNA, 75 bp, synthetic construct
  source 1..75: mol_type = other DNA
atgacattagaacaaaaactaaaagattatgaaggtagtttaaagtatcaatcacatattggtacattccgctat

SEQ ID NO: 664030 - DNA, 75 bp, synthetic construct
  source 1..75: mol_type = other DNA
agttgactttagcatcccatcaacccgatagaataatgactatagttcggtcccaagatgacattggtatctatc

SEQ ID NO: 664031 - DNA, 75 bp, synthetic construct
  source 1..75: mol_type = other DNA
ttttactgcgatcctccgtattggttggatggtggttacggcattgatttttcattctgcaattatgagcgcatg

SEQ ID NO: 664032 - DNA, 75 bp, synthetic construct
  source 1..75: mol_type = other DNA
tgcgctgaaatcatcaacgatataaacagtgatatcgttaatctctaccgtgtggtgaagtaccaccaggaggaa

SEQ ID NO: 664033 - DNA, 75 bp, synthetic construct
  source 1..75: mol_type = other DNA
aggatcccgataattttccctatgaatactattccgtgcggttcagcaccttctccggtggtcatttcgccagct

SEQ ID NO: 664034 - DNA, 75 bp, synthetic construct
  source 1..75: mol_type = other DNA
gcgttaccctgacagcttttctgccgcccagttacggctatccgtttatgctggcttcgcaggttgtttattcgc

SEQ ID NO: 664035 - DNA, 75 bp, synthetic construct
  source 1..75: mol_type = other DNA
caaattagcgaattaaccgccaccagcgttaccctgacagcttttctgccgcccagttacggctatccgtttatg

SEQ ID NO: 664036 - DNA, 75 bp, synthetic construct
  source 1..75: mol_type = other DNA
ccgctcgcgcatctggggaaagtgcttattccgtggcccaatcggattgccaacggctgttatcgctatcaagga

SEQ ID NO: 664037 - DNA, 75 bp, synthetic construct
  source 1..75: mol_type = other DNA
tagataggatttcctctattttttcagagacttttgatgcattgattgatatcgaatattcggctactgtgaatt

SEQ ID NO: 664038 - DNA, 75 bp, synthetic construct
  source 1..75: mol_type = other DNA
agccgtggtcagttcgagaacgcttttaatagcgagcgtaatcgcatgcagcaacaactgggcgaccgatactct

SEQ ID NO: 664039 - DNA, 75 bp, synthetic construct
  source 1..75: mol_type = other DNA
cacccagaacaacgcacaaatcgtctttgaagctctgatgagtaacctgcgtaaagaggcgaaaatcaaaattgg

SEQ ID NO: 664040 - DNA, 75 bp, synthetic construct
  source 1..75: mol_type = other DNA
agaaaaaagcgatggtgcagggtatcacccagaacaacgcacaaatcgtctttgaagctctgatgagtaacctgc

SEQ ID NO: 664041 - DNA, 75 bp, synthetic construct
  source 1..75: mol_type = other DNA
tggtagccctggcattctatctgttgcttggttccacgattgattggtcaagctggaaaacctatgccgccatgt

SEQ ID NO: 664042 - DNA, 75 bp, synthetic construct
  source 1..75: mol_type = other DNA
cgggtgttaaagccacccagactggctggtttagtaaagataaactgccggaagagttaaactttaagccggttg

SEQ ID NO: 664043 - DNA, 75 bp, synthetic construct
  source 1..75: mol_type = other DNA
gaaaaatctgccgatattatctctgcccgtaacggcggcgatatgggttggttagaagatgccactatcccggac

SEQ ID NO: 664044 - DNA, 75 bp, synthetic construct
  source 1..75: mol_type = other DNA
ttaacagcgagcgtaatcgcatgcagcaacagctgggcgatcaatactccgagctggcagcgaacgaaggctata

SEQ ID NO: 664045 - DNA, 75 bp, synthetic construct
  source 1..75: mol_type = other DNA
tgattggcggaggcaataactacgccgcaaaagtgaatgaccaggaaatcagccgtgggcagttcgagaacgcct

SEQ ID NO: 664046 - DNA, 75 bp, synthetic construct
  source 1..75: mol_type = other DNA
aaacacgaaaaagccctggatgcttactatgcgctgcaacagaaagtcagcgatgcggcgagcaatgacaccgaa

SEQ ID NO: 664047 - DNA, 75 bp, synthetic construct
  source 1..75: mol_type = other DNA
cggcgttgcgggcactgactttatgctaaaaggtgaaaccgacgagctggcagcgctggttgctcaacaacgtgt

SEQ ID NO: 664048 - DNA, 75 bp, synthetic construct
  source 1..75: mol_type = other DNA
gttagaagatgccactatcccggacgaactgaaaaatgctggtctgaaagaaaaaggccaactgtctggtgtcat

SEQ ID NO: 664049 - DNA, 75 bp, synthetic construct
  source 1..75: mol_type = other DNA
aacgcgctggcggcgaagcagcctgtgaccgaacaggagattgccagctactacgaacaaaacaaaaacaatttc

SEQ ID NO: 664050 - DNA, 75 bp, synthetic construct
  source 1..75: mol_type = other DNA
tcgtcgcctgttactggctgaatatgcaaacgccggacttctccttaccctttggccccgtccgctggtgtttat

SEQ ID NO: 664051 - DNA, 75 bp, synthetic construct
  source 1..75: mol_type = other DNA
ctcatctattacttctgcctcgccagtgccattcaacgtactggcgcacctgtttccacgatgattatcggcacc

SEQ ID NO: 664052 - DNA, 75 bp, synthetic construct
  source 1..75: mol_type = other DNA
tggcgcgtcgcgactggcttaccgccttgatgctcaccatgatgggcaaccttatctattacttctgccttgcca

SEQ ID NO: 664053 - DNA, 75 bp, synthetic construct
  source 1..75: mol_type = other DNA
ttgtacagtgaacatcctaatggtgcgataggaaccgatttaggccttccgttgacgaaaacctggtgggcttac

SEQ ID NO: 664054 - DNA, 75 bp, synthetic construct
  source 1..75: mol_type = other DNA
cagcggggcagtcaaccgtggataataatgaatcctggctttccttaaatacagcagcaaaaaatgatgtcagca

SEQ ID NO: 664055 - DNA, 75 bp, synthetic construct
  source 1..75: mol_type = other DNA
acgcagcggatccaaccaccttcgacagcacaaataatgttgtcaaagttaaaaaaggcgaagcggcagtggtgc

SEQ ID NO: 664056 - DNA, 75 bp, synthetic construct
  source 1..75: mol_type = other DNA
cggtagctatggcagtggtgtcttttggtgcaaatgctgctgataccgttgcgccatctcaggggtcagggcagg

SEQ ID NO: 664057 - DNA, 75 bp, synthetic construct
  source 1..75: mol_type = other DNA
gatcagtctgtcgattttggccagatatcaaaagtctttctggacaatgatgggcaaaccacacctaaggctttt

SEQ ID NO: 664058 - DNA, 75 bp, synthetic construct
  source 1..75: mol_type = other DNA
gtggatcactattgcaccgttcgtgacatttatggcctcaaccgtaagatgcccttctctactgacgactcggta

SEQ ID NO: 664059 - DNA, 75 bp, synthetic construct
  source 1..75: mol_type = other DNA
cttgatgctcaccatgatgggcaaccttatctattacttctgccttgccagtgccattcaacgtactggcgcgcc

SEQ ID NO: 664060 - DNA, 75 bp, synthetic construct
  source 1..75: mol_type = other DNA
agctacaccaggcggtgcagctaagacaggtacggtatccctgacttttgcaggtgtgcctgcaggaaacgcaag

SEQ ID NO: 664061 - DNA, 75 bp, synthetic construct
  source 1..75: mol_type = other DNA
tcagcaaatcagactattgattttggccagatttcgaaattgtttctggagaatggtggaaccacccagccgaaa

SEQ ID NO: 664062 - DNA, 75 bp, synthetic construct
  source 1..75: mol_type = other DNA
tcgccgaaggcaaactactgggggcatatgccagcaaccttgacggcagtgaatggtgcggtatttgaacgcccg

SEQ ID NO: 664063 - DNA, 75 bp, synthetic construct
  source 1..75: mol_type = other DNA
agatgccccgctttttggtgatgctaaatttgccagtgattcagatttgaaaaaatcaaagctgttaaagtggga

SEQ ID NO: 664064 - DNA, 75 bp, synthetic construct
  source 1..75: mol_type = other DNA
atgcggatgaaagaattaaataaattcagagtgatagacctcttttgtggggcaggtggattatcttatggtttt

SEQ ID NO: 664065 - DNA, 75 bp, synthetic construct
  source 1..75: mol_type = other DNA
ttcgctgggatggccagcttcgccaagtttcccttacttgtcctctcaacggtgtgggatggacgagagcactgg

SEQ ID NO: 664066 - DNA, 75 bp, synthetic construct
  source 1..75: mol_type = other DNA
ggaaaaattcctcgccagcgcctgttacagtgaccttagcccaagaacacaaaaagattatctgcaacatcaaaa

SEQ ID NO: 664067 - DNA, 75 bp, synthetic construct
  source 1..75: mol_type = other DNA
tgacaggaaggttaaagtttcaccaacacttaatatcccgttacctgaaaatattccaagaaaatattccaagta

SEQ ID NO: 664068 - DNA, 75 bp, synthetic construct
  source 1..75: mol_type = other DNA
aaacagtattcagagcgactgacgttcgcacttgagcaggcgaaatcgttgggaggacaacatttcgtggtctgt

SEQ ID NO: 664069 - DNA, 75 bp, synthetic construct
  source 1..75: mol_type = other DNA
caaggcccggatgtgggggcatatgcagggtattattgattctaataatatctttaaacgtccacggctggcaga

SEQ ID NO: 664070 - DNA, 75 bp, synthetic construct
  source 1..75: mol_type = other DNA
ttctggacagaactgaactgaccactatcgcgaccgaatatcacggcaccaccgatgcgaacggcgttgcgacga

SEQ ID NO: 664071 - DNA, 75 bp, synthetic construct
  source 1..75: mol_type = other DNA
aacggtgaaagacagcgccgggaaaacggtggcgaatgtggcttttaccctgaaacgcggtgatgctgcgccaag

SEQ ID NO: 664072 - DNA, 75 bp, synthetic construct
  source 1..75: mol_type = other DNA
acggcgttaaccgcaaaaatcaaaccgatccggcgtgggaagcgcatccggtacaaatttccggcggcaccaacc

SEQ ID NO: 664073 - DNA, 75 bp, synthetic construct
  source 1..75: mol_type = other DNA
cacctgtcaatcttgataccactgaactcaccaccacagcaacggagtatcggggcacgactaatgctgatggcg

SEQ ID NO: 664074 - DNA, 75 bp, synthetic construct
  source 1..75: mol_type = other DNA
tgcgacattgacagaaaacaatgaagtctgggcgcgtgttagtcaggcaaatacctcaagtataagtaacggtgg

SEQ ID NO: 664075 - DNA, 75 bp, synthetic construct
  source 1..75: mol_type = other DNA
ataccatgctctgtacgtgtctggtcaacgagcatgatgtacggatttcaaccgttgagcacctgaatgctgcgc

SEQ ID NO: 664076 - DNA, 75 bp, synthetic construct
  source 1..75: mol_type = other DNA
aatgcccttccatggtgattgtcatctccagttcgtggcgtgaatgtgccagtataacttacctgaaatctcttt

SEQ ID NO: 664077 - DNA, 75 bp, synthetic construct
  source 1..75: mol_type = other DNA
aaacgcccggcaatttaccgtgctaaaaacgcttacatggaaagccgtgaaaaagtgatcacgctttccggtctg

SEQ ID NO: 664078 - DNA, 75 bp, synthetic construct
  source 1..75: mol_type = other DNA
gagcggtatcgcgctgttagtggtcggcgtggtgattgcagtcagagcaaaaccggaaaaaaccttaactgaatc

SEQ ID NO: 664079 - DNA, 75 bp, synthetic construct
  source 1..75: mol_type = other DNA
ggccgttagtaaagcggatgattcccgtggaattctgaaggcatttaaggcattgcaaagtcgtgttaataaaca

SEQ ID NO: 664080 - DNA, 75 bp, synthetic construct
  source 1..75: mol_type = other DNA
gaccaactacttaagcgattctcatataacccgcagacacgctggcaaatgaatcagcgaagtatgggttcggtc

SEQ ID NO: 664081 - DNA, 75 bp, synthetic construct
  source 1..75: mol_type = other DNA
ttggtgaggacaatgccgttgagtcaggtaatggacggaccatggggatcattaaagcctatcaggacggcaatg

SEQ ID NO: 664082 - DNA, 75 bp, synthetic construct
  source 1..75: mol_type = other DNA
tgcgcatcaacgtgccaacctttttccgcgatccaaatttcccccaagtggagcaactggtgggcgatttttcgg

SEQ ID NO: 664083 - DNA, 75 bp, synthetic construct
  source 1..75: mol_type = other DNA
agctggcgttaatctcgcctgtggttatctggaaaacggtgaacaggtcgaccatgattttgtgaatattcttac

SEQ ID NO: 664084 - DNA, 75 bp, synthetic construct
  source 1..75: mol_type = other DNA
gcgctatatggaaattagccgctcatcgacaaaaattaatttagataatctcggtgtgttaaccatgcaggccaa

SEQ ID NO: 664085 - DNA, 75 bp, synthetic construct
  source 1..75: mol_type = other DNA
ggcaacggcgcaggcgctggtcacactgccggtttctctcatcggctatctcgtcgcttgttactggctgaatac

SEQ ID NO: 664086 - DNA, 75 bp, synthetic construct
  source 1..75: mol_type = other DNA
acgcccccgcctgcgcagcgcgtccggctattgaacaaaaaatactggagatttactgcgcggcaatgcagcagc

SEQ ID NO: 664087 - DNA, 75 bp, synthetic construct
  source 1..75: mol_type = other DNA
ggcggagaaacgtcaccgcatggagaaccagcaactgctgcgcgaccggggcgtgccgtgtgaaatcagcctctc

SEQ ID NO: 664088 - DNA, 75 bp, synthetic construct
  source 1..75: mol_type = other DNA
gcgctggacagaatggtgggatagacctgcgcaaggaacttgctgatatttatcgcctgaccggcgggaaaatat

SEQ ID NO: 664089 - DNA, 75 bp, synthetic construct
  source 1..75: mol_type = other DNA
tgttgacgattatcgcgtactgaacgaaggcggcctgcgttttgaagacgaatttgtgcgtcacaaaatgctcga

SEQ ID NO: 664090 - DNA, 75 bp, synthetic construct
  source 1..75: mol_type = other DNA
aaaagtatataaaagaacaaaggaaaacgaggaagcaagaagaacctctgttgaaacaaacactcatatgaagaa

SEQ ID NO: 664091 - DNA, 75 bp, synthetic construct
  source 1..75: mol_type = other DNA
tgatttatctcagcgtgtaactttgcatggatatatatcaaatgcgagttctatgttggggaaatttgatgttta

SEQ ID NO: 664092 - DNA, 75 bp, synthetic construct
  source 1..75: mol_type = other DNA
ctggcgaaacaggaagcttgggaatatgtgaccttccaggacgacgcagaactgccgttggccttcaaagcgcct

SEQ ID NO: 664093 - DNA, 75 bp, synthetic construct
  source 1..75: mol_type = other DNA
gaagacggcctgcgttttgaagacgaatttgtgcgtcacaaaatgctcgatgcgatcggtgacttgttcatgtgt

SEQ ID NO: 664094 - DNA, 75 bp, synthetic construct
  source 1..75: mol_type = other DNA
gccagatcagccgtgcgcgtacgttcggtttcatgcgtgatatcgaatatctgcagtcccgtggtttgtgcctgg

SEQ ID NO: 664095 - DNA, 75 bp, synthetic construct
  source 1..75: mol_type = other DNA
atatattaatcaggaagattcggatgcatttatagtgtcatcatttgttgaaaagccaaatcatgagacagccac

SEQ ID NO: 664096 - DNA, 75 bp, synthetic construct
  source 1..75: mol_type = other DNA
taaagactcagacggcaacgtaatagttggggatattttctctcatgaaacaaagaattctttcatatatgccga

SEQ ID NO: 664097 - DNA, 75 bp, synthetic construct
  source 1..75: mol_type = other DNA
ggatatccttcgccaggtgtctcaggaactggaaaacgaaggtatgcaagggatatccggcggtcttttcgagtc

SEQ ID NO: 664098 - DNA, 75 bp, synthetic construct
  source 1..75: mol_type = other DNA
atatactaaatattcacaggaagaaagaagaaaactgtccttagaaacagaagttaaagaaatctatactgacgc

SEQ ID NO: 664099 - DNA, 75 bp, synthetic construct
  source 1..75: mol_type = other DNA
atgaatactaatgacactgaactacttcgcttatttgatacattgacgacagaacaaaagattgatatcgccaga

SEQ ID NO: 664100 - DNA, 75 bp, synthetic construct
  source 1..75: mol_type = other DNA
tatctgaatctccctgatgctgccagagtctggctacctgaatgttgggactggcgaagagagattgcccattca

SEQ ID NO: 664101 - DNA, 75 bp, synthetic construct
  source 1..75: mol_type = other DNA
gtggatggcggcattccgtgaaagccactcccagccagaacgaaacaattttctggcgcgtcgtgagcggtgctt

SEQ ID NO: 664102 - DNA, 75 bp, synthetic construct
  source 1..75: mol_type = other DNA
agcgctgggcgtacctcgccgttgttctcgacctgttcgcaagaaaaccagtgggctgggccatgtcgttctcgc

SEQ ID NO: 664103 - DNA, 75 bp, synthetic construct
  source 1..75: mol_type = other DNA
tataacggtgggctgacgccggaagagtcagagaacagataccatttttactgtaaaaccgtggccaatattact

SEQ ID NO: 664104 - DNA, 75 bp, synthetic construct
  source 1..75: mol_type = other DNA
ctcacatgaagccagtagtggttcacgggccagccatgatgcccgccatgatattgatgcgaaagccagtaagga

SEQ ID NO: 664105 - DNA, 75 bp, synthetic construct
  source 1..75: mol_type = other DNA
caaggacgaggcccggcagcaaattaatgattacatattgaactactacaacagtgtcagacctcaccattataa

SEQ ID NO: 664106 - DNA, 75 bp, synthetic construct
  source 1..75: mol_type = other DNA
gcactcttgatgtccgactcgctgaacggttcacgatagttgccagactcagtggcagccacaccgttgtcagtc

SEQ ID NO: 664107 - DNA, 75 bp, synthetic construct
  source 1..75: mol_type = other DNA
cgggggcgcgcacgctggctgacatgctgacccaaaacggcgtcccgatgagccgttaccgtgccgggcggctga

SEQ ID NO: 664108 - DNA, 75 bp, synthetic construct
  source 1..75: mol_type = other DNA
tgccagccagattatgcgccagaacgttacaataaatgccctgaaagagggtatcaccagtaatgccgcccgtaa

SEQ ID NO: 664109 - DNA, 75 bp, synthetic construct
  source 1..75: mol_type = other DNA
atttgtcgcaacagtttgcacagtatgtgatgaaacacgcaccgcaggatgccgaagctattctgacaaacacca

SEQ ID NO: 664110 - DNA, 75 bp, synthetic construct
  source 1..75: mol_type = other DNA
aaattgcgctcacattatctgttctcgcagtggctgtgatgtgggtacaacggcacaacgtgatggatttgctgg

SEQ ID NO: 664111 - DNA, 75 bp, synthetic construct
  source 1..75: mol_type = other DNA
gaatgccattgccgcctttatgggaacccggacgtgggattccattgagaaaattgctctcaccctgtctgttgt

SEQ ID NO: 664112 - DNA, 75 bp, synthetic construct
  source 1..75: mol_type = other DNA
gacggtaatatggtgatggatgcgagcggggcgatgtcccgtttaccggtcggtatcaatgcaacgcgtcagatt

SEQ ID NO: 664113 - DNA, 75 bp, synthetic construct
  source 1..75: mol_type = other DNA
aggagtgggaggaaaagttggcggaagagctagcattgactggagtgatgatgatgctcatgaggccagcagtgg

SEQ ID NO: 664114 - DNA, 75 bp, synthetic construct
  source 1..75: mol_type = other DNA
acgatagttgccagactcagtggcagccacaccgttgtcagtctgtgttctgctctgggaatacaccgcagcagt

SEQ ID NO: 664115 - DNA, 75 bp, synthetic construct
  source 1..75: mol_type = other DNA
tggtccagaccattctgaccggaataaccattggtattttcccgcttctggtactggctgctgcatttaataaaa

SEQ ID NO: 664116 - DNA, 75 bp, synthetic construct
  source 1..75: mol_type = other DNA
gtggtgagtggttgcgcaataacctgaacgccattgccgcttttatggggacccggacgtgggattccatcgaaa

SEQ ID NO: 664117 - DNA, 75 bp, synthetic construct
  source 1..75: mol_type = other DNA
gtatgagtgggcagatgagtgaagacctgtcgcaacagtttgcacagtatgtgatgaaacacgcactgcaggatg

SEQ ID NO: 664118 - DNA, 75 bp, synthetic construct
  source 1..75: mol_type = other DNA
aggtatgggaggaaaagttggcggaagagctagcattgactggagcgatgatgatactcatgaggccagcagtgg

SEQ ID NO: 664119 - DNA, 75 bp, synthetic construct
  source 1..75: mol_type = other DNA
agaaaaatcagctcaggaaggaatgcccggtgctgacagcccacaggaacttatgaacagggcaaaagagtatca

SEQ ID NO: 664120 - DNA, 75 bp, synthetic construct
  source 1..75: mol_type = other DNA
gatggccagccgtatgcgcagtgcagtggaaagctatgcgaaggcgcataatatcagtaatgagcaggcaacaag

SEQ ID NO: 664121 - DNA, 75 bp, synthetic construct
  source 1..75: mol_type = other DNA
tgttcggggccgggcttgtgtcaaaaagtaccgactttgtgtcacgtaatccggaaatcactaatattttccagg

SEQ ID NO: 664122 - DNA, 75 bp, synthetic construct
  source 1..75: mol_type = other DNA
aagccctttgtttatacgaagaagataaacaaaggattactttttaactttgttaatgctttgagaaatttaatc

SEQ ID NO: 664123 - DNA, 75 bp, synthetic construct
  source 1..75: mol_type = other DNA
tggcttctctgtgtgcctgtggcgcatccggcgtggcggggggttctctgctgctgatcccgctggcctgtaata

SEQ ID NO: 664124 - DNA, 75 bp, synthetic construct
  source 1..75: mol_type = other DNA
cagtgattctgtcacaggtggtgctgacagcacgatgagcgcacaggactccatgatggccagccgtatgcgcag

SEQ ID NO: 664125 - DNA, 75 bp, synthetic construct
  source 1..75: mol_type = other DNA
caaataccagttcgccggagattgcagaacgccgtcgggctatggcgtggtcttttgtgcaggaacaggtacagc

SEQ ID NO: 664126 - DNA, 75 bp, synthetic construct
  source 1..75: mol_type = other DNA
ggcgacaagagaactggcatcaagaagcacgagaggttctgcagggatgtatggcgatgctcatgttcaatgggg

SEQ ID NO: 664127 - DNA, 75 bp, synthetic construct
  source 1..75: mol_type = other DNA
cagcagggcttcccatgatgctcgccatgatattgacgctagagccagtaaggactttaaagaggccagcgatta

SEQ ID NO: 664128 - DNA, 75 bp, synthetic construct
  source 1..75: mol_type = other DNA
gtcagatgatgtaccagaccggcagtggcgcaaccgccacacagacccgtgacggtaatatggtgatggatgcaa

SEQ ID NO: 664129 - DNA, 75 bp, synthetic construct
  source 1..75: mol_type = other DNA
gaaagacaagctgaatctggatacacagagtggcggaaaaacctggcattattatgcccagcagctatttggtgg

SEQ ID NO: 664130 - DNA, 75 bp, synthetic construct
  source 1..75: mol_type = other DNA
ggatcaccagttatgcagcacgtaatggtgattcagccagcctggtgaatctggccaccacgtcatcgatggaga

SEQ ID NO: 664131 - DNA, 75 bp, synthetic construct
  source 1..75: mol_type = other DNA
atgcgcttggggcgcatctcaccgccgagcagcggcaagctgttgctgaaggcttgctgattgagccgctgatag

SEQ ID NO: 664132 - DNA, 75 bp, synthetic construct
  source 1..75: mol_type = other DNA
tagtggcagcagggcttcccatgatgctcgccatgatattgacgctagagccagtaaggactttaaagaggccag

SEQ ID NO: 664133 - DNA, 75 bp, synthetic construct
  source 1..75: mol_type = other DNA
gacggtaatatggtgatggatgcaagcggagcgatgtcccgtttaccggtcggtatcaatgcaacgcgtcagatt

SEQ ID NO: 664134 - DNA, 75 bp, synthetic construct
  source 1..75: mol_type = other DNA
ccagtgtgtacagccatttcgcttcctctgctatcagcccgactgccagtgcggcaggtagtgtggttgacggta

SEQ ID NO: 664135 - DNA, 75 bp, synthetic construct
  source 1..75: mol_type = other DNA
caaaatcaccataaaacagaggcattatctcagaatgataaatataatgaagaaaaatcagctcaggaaggaata

SEQ ID NO: 664136 - DNA, 75 bp, synthetic construct
  source 1..75: mol_type = other DNA
atgaagaaaagctggctcaggaaagaatacttggtgctgatagtccgaaagagcttttagagaaagcaaagagtt

SEQ ID NO: 664137 - DNA, 75 bp, synthetic construct
  source 1..75: mol_type = other DNA
gtggtgagtggttgcgtaacaacctgaatgccattgcagcatttatgagtacccggacctgggattccattgaaa

SEQ ID NO: 664138 - DNA, 75 bp, synthetic construct
  source 1..75: mol_type = other DNA
agtacgctgattggcgacagttaccgttacttctatgactcaagtaaatcagccagccagatcatccgccagaat

SEQ ID NO: 664139 - DNA, 75 bp, synthetic construct
  source 1..75: mol_type = other DNA
gagaacttctgccgggatgtatggagatgctcatgctgaatggggggttaaacctaaaattcttggtgttgtgga

SEQ ID NO: 664140 - DNA, 75 bp, synthetic construct
  source 1..75: mol_type = other DNA
ggaggtgccccaatattatgtgtcttgattggttcgatggccttaagcgggcggctgaaggccgtcgcctgatga

SEQ ID NO: 664141 - DNA, 75 bp, synthetic construct
  source 1..75: mol_type = other DNA
atagccgccagactaagtgacagccacacggttgtcagcctgtgttctgctctggaaatacaccgcagcagttac

SEQ ID NO: 664142 - DNA, 75 bp, synthetic construct
  source 1..75: mol_type = other DNA
tttgccgaatctgctcgagcgtcagttcgctgtaccggagccagacagggtatggtgcggagatattacgtatat

SEQ ID NO: 664143 - DNA, 75 bp, synthetic construct
  source 1..75: mol_type = other DNA
cacagttttgccatgatcccgctggcggatgcccagcaatatcttgatatgggttccagcgtgtcaggtattgcc

SEQ ID NO: 664144 - DNA, 75 bp, synthetic construct
  source 1..75: mol_type = other DNA
aacaacttctctggcgttacaggataaagcaaagtgtcagccgacggggaaactgctgggataacagtccaatgg

SEQ ID NO: 664145 - DNA, 75 bp, synthetic construct
  source 1..75: mol_type = other DNA
cattttatggtgcgtggataaattctttttcgcacctaaacggcgggaacgtcaggcagcggcgcaggcggctgc

SEQ ID NO: 664146 - DNA, 75 bp, synthetic construct
  source 1..75: mol_type = other DNA
aaccgatggctacacaggcaaagacgtggcccggcagcaaatcagcagttatattctgaattattacaatagcgt

SEQ ID NO: 664147 - DNA, 75 bp, synthetic construct
  source 1..75: mol_type = other DNA
ataaccttgccgggaattattgatacggaaaatggcattgtgcatcgtatgccgttctatgaggacgtaaaagag

SEQ ID NO: 664148 - DNA, 75 bp, synthetic construct
  source 1..75: mol_type = other DNA
gcaatgtccaaagtcattggaaagctagaaggtattgctgctgatactggatgttcgattatatttctacaccat

SEQ ID NO: 664149 - DNA, 75 bp, synthetic construct
  source 1..75: mol_type = other DNA
ttccacatcgaggaagaaaacgccagcggccccatggcccaggtcatcggtcgcatggaggccatcgccgccgat

SEQ ID NO: 664150 - DNA, 75 bp, synthetic construct
  source 1..75: mol_type = other DNA
gtgaatccggtgcatgtcaggttgtgcagtgaaatacgccgggtgtggaaccaaagccggggctctgcgggggcg

SEQ ID NO: 664151 - DNA, 75 bp, synthetic construct
  source 1..75: mol_type = other DNA
gagacttggtattcattttttcgtcttgcgacgtcaagaatccgtatcttcgagtgcccacacagattgtctgat

SEQ ID NO: 664152 - DNA, 75 bp, synthetic construct
  source 1..75: mol_type = other DNA
gcgcatgtcgggcgcattcttgccatcatggtgaatttatttaacccacaaaaaatactgattggctcaccgtta

SEQ ID NO: 664153 - DNA, 75 bp, synthetic construct
  source 1..75: mol_type = other DNA
cggccagtaaatatgcgctggaggcgtggtcagacgcactgcgcatggagctgcgccacagcggaattaaagtca

SEQ ID NO: 664154 - DNA, 75 bp, synthetic construct
  source 1..75: mol_type = other DNA
gatcgccctgaccgataattgtctgtatgggatctttaacaatgccggattcggcatgtatggccccctttccac

SEQ ID NO: 664155 - DNA, 75 bp, synthetic construct
  source 1..75: mol_type = other DNA
gtatttgttttttgaaaagccaataaacaataagctaagaaaatggtggagtggatttaagaatgatgtttcaac

SEQ ID NO: 664156 - DNA, 75 bp, synthetic construct
  source 1..75: mol_type = other DNA
agaccagcgcaattctatcggcaccttagcggctggcgcacgccttgcgtcattgtctccagaagcaatgcaatc

SEQ ID NO: 664157 - DNA, 75 bp, synthetic construct
  source 1..75: mol_type = other DNA
tgacaggtaaagttatgcaaaaatcggtcttaattaccggatgttccagtggtattggcctggaaagcgcactcg

SEQ ID NO: 664158 - DNA, 75 bp, synthetic construct
  source 1..75: mol_type = other DNA
ggacgtattgtgatgacctcatcggtgatggggttaatctccacaccgggccgcggtgcttatgcagccagtaaa

SEQ ID NO: 664159 - DNA, 75 bp, synthetic construct
  source 1..75: mol_type = other DNA
tgccgcgtataacgatctcaattctgccagtgcgctgattgacgacgccacctgcgcggtaattgtcgagccagt

SEQ ID NO: 664160 - DNA, 75 bp, synthetic construct
  source 1..75: mol_type = other DNA
gcgaaacagatctctcaggaggcggcgaaagcgggcgtgatggtgctgattgctggcggtaatgtggtgcgtttt

SEQ ID NO: 664161 - DNA, 75 bp, synthetic construct
  source 1..75: mol_type = other DNA
gtaatccgctggcctcggcggtggcgggtaaagtgcttgatctcatcaacacgccagagatgcttactggtgtca

SEQ ID NO: 664162 - DNA, 75 bp, synthetic construct
  source 1..75: mol_type = other DNA
gaagggctgattctgttgctggatggcaaagtggagcgaggtatcgaggcgattgagacatctctagccatatgc

SEQ ID NO: 664163 - DNA, 75 bp, synthetic construct
  source 1..75: mol_type = other DNA
aactttctgacatatttaaatttagttgatctgaatatgttgctacctgattttttagataaaaatataaatctc

SEQ ID NO: 664164 - DNA, 75 bp, synthetic construct
  source 1..75: mol_type = other DNA
tcagcaaaaagatgccataggtcaattcaggcagagatagcttatcgaatggagttattaatgaaacttgaggca

SEQ ID NO: 664165 - DNA, 75 bp, synthetic construct
  source 1..75: mol_type = other DNA
atgagtgcaaacggcagcccaggacaatctgatcgcaaccgaaacatcatggggatggatgttaagaagggtgaa

SEQ ID NO: 664166 - DNA, 75 bp, synthetic construct
  source 1..75: mol_type = other DNA
ggatatcgacgcgatcgcaaatgcagacgcttctgctctcgatttcatgacaggaatgaccggcggtgcaggtaa

SEQ ID NO: 664167 - DNA, 75 bp, synthetic construct
  source 1..75: mol_type = other DNA
atgcgtctggtgatcgcggtgctttgcgtcagttggctactcaatatccagaacagattgaatccgttcgtaaag

SEQ ID NO: 664168 - DNA, 75 bp, synthetic construct
  source 1..75: mol_type = other DNA
aacagcacgaggtcaaaacatcacgatgcgcggtcaggatttatctgcttctactgcgcgacgcgggcaggattt

SEQ ID NO: 664169 - DNA, 75 bp, synthetic construct
  source 1..75: mol_type = other DNA
aaatttacttcagccgggaggcccgggagttggatgatgatctcctgaaatggcatgggaatgagatagagacga

SEQ ID NO: 664170 - DNA, 75 bp, synthetic construct
  source 1..75: mol_type = other DNA
acatgtagccgctaataagagccttaagatcgtcgaaatgggcgatgtgaaactggtggccataaccagctcgat

SEQ ID NO: 664171 - DNA, 75 bp, synthetic construct
  source 1..75: mol_type = other DNA
ggccctgcatcagataaggatattgagtttgcaaggaaaggcattccaagcgaaacggataatccaatggtcatg

SEQ ID NO: 664172 - DNA, 75 bp, synthetic construct
  source 1..75: mol_type = other DNA
tgcgggaggcgatattcgccctccgcgtgcagacgaagcggtcagcgtgcgtttcaaagcgccaggattgctgca

SEQ ID NO: 664173 - DNA, 75 bp, synthetic construct
  source 1..75: mol_type = other DNA
cgattggaccagaaaaggcgtttgctgttcaggataagatggttggtcgccagcaggatcagcaaaaaattaacg

SEQ ID NO: 664174 - DNA, 75 bp, synthetic construct
  source 1..75: mol_type = other DNA
caacagccgcctactcagcaatcagcaggaggtagctacacgtcaaaatcaggcattcaatttacggtggaatga

SEQ ID NO: 664175 - DNA, 75 bp, synthetic construct
  source 1..75: mol_type = other DNA
atggctacgtggcaacagggtattaattctggtggttttttggctggcattggcgcgcaaaacgagaatgcgcca

SEQ ID NO: 664176 - DNA, 75 bp, synthetic construct
  source 1..75: mol_type = other DNA
gcatgggattcattgatgaagaccagcgcaattctatcggcaccttagcggctggcgcacgccttgcgtcatcgt

SEQ ID NO: 664177 - DNA, 75 bp, synthetic construct
  source 1..75: mol_type = other DNA
gtgaggatctggcaggaagtggcgctggcgcgagaagatgcttccccctgtttacgtttgggtgcgtttgaaatc

SEQ ID NO: 664178 - DNA, 75 bp, synthetic construct
  source 1..75: mol_type = other DNA
agcaacgtcacgactggtttgttgagcgtcttaatattattaatcaccgctatggtttgttcaatgaagttcgcg

SEQ ID NO: 664179 - DNA, 75 bp, synthetic construct
  source 1..75: mol_type = other DNA
gcatatggatgggctggcgaatgattttctccctgacgctggccgctggcagtggcgctactggggaaaaggcag

SEQ ID NO: 664180 - DNA, 75 bp, synthetic construct
  source 1..75: mol_type = other DNA
ggcaattgattgtgctggcacgggataacggcgatccgttgctcgatttgccgtggcaaattactcgtcaacaat

SEQ ID NO: 664181 - DNA, 75 bp, synthetic construct
  source 1..75: mol_type = other DNA
acgtattgcattagatgaaagcccacgcattacgcgtaaaggtttaatcattcccgatctccgttatctggtggg

SEQ ID NO: 664182 - DNA, 75 bp, synthetic construct
  source 1..75: mol_type = other DNA
gtgaagcgaaacaggcggacctcattttatatgcccgtttacctgcgcagctaagtggaagtctgtctgacccaa

SEQ ID NO: 664183 - DNA, 75 bp, synthetic construct
  source 1..75: mol_type = other DNA
tctctcaaccggcttcgaccagttgcaatatggcaccatgaaggtggaaacgccacgtttgatcctcgagaagcc

SEQ ID NO: 664184 - DNA, 75 bp, synthetic construct
  source 1..75: mol_type = other DNA
ggaacttgattccgcgtgtctggcgaaattaccgcagacggaacaatcgcccgcagcgccgaaaacccttgcgga

SEQ ID NO: 664185 - DNA, 75 bp, synthetic construct
  source 1..75: mol_type = other DNA
gtggtgagtggctgcgtaacaacctgaacgccattgcggcattcatgagtacccggacctgggattccatcgaaa

SEQ ID NO: 664186 - DNA, 75 bp, synthetic construct
  source 1..75: mol_type = other DNA
tgtgtttgctctgatgtggttccagacctggccgttgctgtatgccattctgaacagtgccatgacattctatgc

SEQ ID NO: 664187 - DNA, 75 bp, synthetic construct
  source 1..75: mol_type = other DNA
taatgtgccggtcggtctggcgatgccactttcactgacgacacgtatcgggcatgcaatggtggtcagctacga

SEQ ID NO: 664188 - DNA, 75 bp, synthetic construct
  source 1..75: mol_type = other DNA
gacccggacgcactcgacgagctttccattctcgtctgcgccgcagaaaacgggcatcacattgaaccgtataac

SEQ ID NO: 664189 - DNA, 75 bp, synthetic construct
  source 1..75: mol_type = other DNA
atgcctttatcgttattaattggcctgcgttttagtcgcggacggcggcgcggcggcatggtgtcgctgatctcc

SEQ ID NO: 664190 - DNA, 75 bp, synthetic construct
  source 1..75: mol_type = other DNA
tgataagcagtgccctgcggatgacctatgagacgcgtggccaaccccgggatgtcgtgttccatagcgaccagg

SEQ ID NO: 664191 - DNA, 75 bp, synthetic construct
  source 1..75: mol_type = other DNA
gctgggacggtattcgtctgcgcggtaacgcctggtggcctaaacaatcactgactgtattccagccgctggtgc

SEQ ID NO: 664192 - DNA, 75 bp, synthetic construct
  source 1..75: mol_type = other DNA
taaatgaagaactggaaaaagacctgaaagacaacatcgcgctgcgtatgaaaaacttgcaagattctctgaaaa

SEQ ID NO: 664193 - DNA, 75 bp, synthetic construct
  source 1..75: mol_type = other DNA
ctggcgcggatggtatccgtaacgctgtaaaccagagtcagcgtgatgaggttattgaatctcatgttgctcagg

SEQ ID NO: 664194 - DNA, 75 bp, synthetic construct
  source 1..75: mol_type = other DNA
agtctgtatgacgtggctttttacgctgatgatctggatgcacttaacgaactttccgagctgatctgtgccgca

SEQ ID NO: 664195 - DNA, 75 bp, synthetic construct
  source 1..75: mol_type = other DNA
acgaagcggcgctaaaactggcgcgtaaattcgctcacgaccgctacggcagccataagagcggtatcgtggcgt

SEQ ID NO: 664196 - DNA, 75 bp, synthetic construct
  source 1..75: mol_type = other DNA
gcagtgctgctgggcggtatggtgggcgcggggattgtgttggggcgtaacgcactgcgtaattacaacgcgaag

SEQ ID NO: 664197 - DNA, 75 bp, synthetic construct
  source 1..75: mol_type = other DNA
gatactatgttccttttggggagcgaagcgctggagtcgatgattaagcacgaagcgacccgtccgttggtgttc

SEQ ID NO: 664198 - DNA, 75 bp, synthetic construct
  source 1..75: mol_type = other DNA
gcttccgtgcaggggggcatggcgtgttgaaaggtggcagcgcgtggatgccagataaccaggtcaacggtgtcg

SEQ ID NO: 664199 - DNA, 75 bp, synthetic construct
  source 1..75: mol_type = other DNA
taccggcgatccgttgctcgatttaccgtgggaaattacccgtcagcaattgactgtcagtgatggtcgctggag

SEQ ID NO: 664200 - DNA, 75 bp, synthetic construct
  source 1..75: mol_type = other DNA
ggccttgccactatggctgaacaatgaaaaatggattgtcaaagatggctggttggcaaactcggggccgatgac

SEQ ID NO: 664201 - DNA, 75 bp, synthetic construct
  source 1..75: mol_type = other DNA
cgtaaacactatcgtaagcagcagggtcatcgtcagtggttcactgatgtgaaaattactggcatcagcgcctaa

SEQ ID NO: 664202 - DNA, 75 bp, synthetic construct
  source 1..75: mol_type = other DNA
agcgaactggatgtcgtcgcgtttgaaaatcagccgccggtaaaactggtgggggaatttactatgccgctcgtg

SEQ ID NO: 664203 - DNA, 75 bp, synthetic construct
  source 1..75: mol_type = other DNA
gggcgttatccgtggaccgaagacgaacccttgctactgaccaatgtgagtgttgatgttttaggcggtaacgtg

SEQ ID NO: 664204 - DNA, 75 bp, synthetic construct
  source 1..75: mol_type = other DNA
aattggtgctcatgggcacgccattactgtgaacgctgccggtaacgcagaaaacaccgttaaaaacatcgctta

SEQ ID NO: 664205 - DNA, 75 bp, synthetic construct
  source 1..75: mol_type = other DNA
gcaaggccaggcttttgataaagcggcctatccattgctcgcgggtgcgtatccttccggggtcatacctgatat

SEQ ID NO: 664206 - DNA, 75 bp, synthetic construct
  source 1..75: mol_type = other DNA
atccatcgggtgttattactgacatgcgccgccagacaatcaaaggaaagccagacggtcgcgcagttctctcct

SEQ ID NO: 664207 - DNA, 75 bp, synthetic construct
  source 1..75: mol_type = other DNA
ccagttctgccgaactggcacagcaacagattgcaatgcttaattgttgtacctggctaccagtaagttgggctc

SEQ ID NO: 664208 - DNA, 75 bp, synthetic construct
  source 1..75: mol_type = other DNA
gtggatacggaattgttaaaaactttcctggaagttagccgaacgcgtcactttggtcgagcggctgaatcgctc

SEQ ID NO: 664209 - DNA, 75 bp, synthetic construct
  source 1..75: mol_type = other DNA
ttcacggaaaaagtacccgccgatgcgatggtatgcactctggaacggtttaaattttatctggagcaacacggg

SEQ ID NO: 664210 - DNA, 75 bp, synthetic construct
  source 1..75: mol_type = other DNA
cggaaacgatgaaagcagtcactgtgttcaatatcggcactctggagcaacctggacacgctgacaacaaggcac

SEQ ID NO: 664211 - DNA, 75 bp, synthetic construct
  source 1..75: mol_type = other DNA
gaatgacgtcaatgacgtcattttgcggcgtttgccctatcctgcatcgcatcgaactgacatgcggcaaaagag

SEQ ID NO: 664212 - DNA, 75 bp, synthetic construct
  source 1..75: mol_type = other DNA
ataaaaatcaatgacgggattatgtcctcctggggggccgcatggactctcgatatcggcggcgtttcagcccat

SEQ ID NO: 664213 - DNA, 75 bp, synthetic construct
  source 1..75: mol_type = other DNA
gtcaaccataaggaggcatttcagcgagtaatacaaagcgcctcatgttttctgcaacgtattgacagtcactgt

SEQ ID NO: 664214 - DNA, 75 bp, synthetic construct
  source 1..75: mol_type = other DNA
ccgagagtacggtgaattttatttatcaccatcgccggactgccggggacgctgtattacgggagctaacgccat

SEQ ID NO: 664215 - DNA, 75 bp, synthetic construct
  source 1..75: mol_type = other DNA
ccagttctgctgaactggcacagcaacagattgcgatgcttaatggttgcacatggctgccggtgagttgggcac

SEQ ID NO: 664216 - DNA, 75 bp, synthetic construct
  source 1..75: mol_type = other DNA
ctttttccattttaaaagtgcagaagaagttcaggactcgttctgaactggaagatagctatcgtgcgaaaggtg

SEQ ID NO: 664217 - DNA, 75 bp, synthetic construct
  source 1..75: mol_type = other DNA
cgacaaccttcattgtcatataaccctttttccattttaaaagtgcagaagaagttcaggactcgttctgaactg

SEQ ID NO: 664218 - DNA, 75 bp, synthetic construct
  source 1..75: mol_type = other DNA
cgaaaaagacctatatcgttcagcgacgagtgtcttctcctggcaatcgccctaagacaggggggaaatctccat

SEQ ID NO: 664219 - DNA, 75 bp, synthetic construct
  source 1..75: mol_type = other DNA
ctaatatcgatcaagcccgcgaagttgctcgcaatttagttcaaaccatgaagttgaccaaaaggaaccctaaca

SEQ ID NO: 664220 - DNA, 75 bp, synthetic construct
  source 1..75: mol_type = other DNA
ccaaaagatactcttggacgatttttaacagcattgcataacaagagaagctttaatcggttggggtgcgattat

SEQ ID NO: 664221 - DNA, 75 bp, synthetic construct
  source 1..75: mol_type = other DNA
ggctttggtgtgaaggtcagtttgacgaaaaaaacgtatgtaatccagagaagagtgtcctccggtgatcgtagt

SEQ ID NO: 664222 - DNA, 75 bp, synthetic construct
  source 1..75: mol_type = other DNA
cttttagagtctctttgtgttcttgctgtaactcaatttgagtcgttgctggtttctcattttgcgtcacaaact

SEQ ID NO: 664223 - DNA, 75 bp, synthetic construct
  source 1..75: mol_type = other DNA
tattgtttcttattgtgactcattttgagtatatgtcaagcggtgttgctcttttagagtctctttatgttcttg

SEQ ID NO: 664224 - DNA, 75 bp, synthetic construct
  source 1..75: mol_type = other DNA
agcacaccgcacgcctttccctcgttcgcgattacatcctctcgttcgctggccgtttgccggttgcggaggtgc

SEQ ID NO: 664225 - DNA, 75 bp, synthetic construct
  source 1..75: mol_type = other DNA
ttcttcggaagtttgatgagattgcttcaagagccagaacagcagcggaacagacctttaggtggatcaatgttg

SEQ ID NO: 664226 - DNA, 75 bp, synthetic construct
  source 1..75: mol_type = other DNA
atcaagaacggatttttgaagcattacaaaggattgagttgcatatgcttatgactgctcctaaattatacaatg

SEQ ID NO: 664227 - DNA, 75 bp, synthetic construct
  source 1..75: mol_type = other DNA
gtgcagaagaagttcaggactcgttctgagcttgaggatagctatcgtgcgaaaggtgttcgaaacccactttct

SEQ ID NO: 664228 - DNA, 75 bp, synthetic construct
  source 1..75: mol_type = other DNA
tttaaagcgggcgaacagcaaattatcatcggcaaaggcgtggcggatgcgctgaaagtgaagcagggcgattgg

SEQ ID NO: 664229 - DNA, 75 bp, synthetic construct
  source 1..75: mol_type = other DNA
gattttatgcctgacccgccaggctgaagaactggagtccaggggcttataccgtcgtgctgcaacggtgtggat

SEQ ID NO: 664230 - DNA, 75 bp, synthetic construct
  source 1..75: mol_type = other DNA
atgagtctcttcaatgacgttcagaaattcattgaagcccatccggggtgtacttccggtgacattgcggatgct

SEQ ID NO: 664231 - DNA, 75 bp, synthetic construct
  source 1..75: mol_type = other DNA
gacatcgcgggtaaaatgatccgctggatcgaacgccacgctacgacagaatattgcctgaaaacgggtggttag

SEQ ID NO: 664232 - DNA, 75 bp, synthetic construct
  source 1..75: mol_type = other DNA
tcccgcgccagacaaagatatcgccggaggcggaacggcaaccagttcgtgaaaccagacctgtgcgcaatttct

SEQ ID NO: 664233 - DNA, 75 bp, synthetic construct
  source 1..75: mol_type = other DNA
tcagagtgggcgtgtggctcaccgttgtgaaggagatacacgcagacatttcccacgcctgactgagagagcgca

SEQ ID NO: 664234 - DNA, 75 bp, synthetic construct
  source 1..75: mol_type = other DNA
aaaacacacaggcatttttctcgcaaggctgtgttgccacctgagccggtgctgaagcatatgaatgtggccagt

SEQ ID NO: 664235 - DNA, 75 bp, synthetic construct
  source 1..75: mol_type = other DNA
aaatgtctgcattactggggattggtcgcactacgctgtggcgaaaaatgaagcaacatggcattgatgcgagtc

SEQ ID NO: 664236 - DNA, 75 bp, synthetic construct
  source 1..75: mol_type = other DNA
ctgctttattacaggttatcaagcagggggttatcacgcggctggatgcgcggcgtttaataccgattgatgtca

SEQ ID NO: 664237 - DNA, 75 bp, synthetic construct
  source 1..75: mol_type = other DNA
atgagtctctttaatgacgttcagaaattcattgaagcccatccggggtgtacttccggcgacattgcggatgct

SEQ ID NO: 664238 - DNA, 75 bp, synthetic construct
  source 1..75: mol_type = other DNA
atgagtcttttgaatgacgttcagaaattcattgaagcccatccggggtgtacttccggggacattgcggatgct

SEQ ID NO: 664239 - DNA, 75 bp, synthetic construct
  source 1..75: mol_type = other DNA
tttattcgcgctcgcttagggaaggtgcgaataagcaggtcatttcttcccaagctgactcgctgattaaaattt

SEQ ID NO: 664240 - DNA, 75 bp, synthetic construct
  source 1..75: mol_type = other DNA
tggcgcggcaagtgtcgcaagtatcacgccgcaggagcgcgaaatcgccattaaagccgcgcgaacgatggcgct

SEQ ID NO: 664241 - DNA, 75 bp, synthetic construct
  source 1..75: mol_type = other DNA
tagctcacttgagctttcatttatattgcataaatatcatttgcgtgtagatgagaagaaatctcgaaatgtatt

SEQ ID NO: 664242 - DNA, 75 bp, synthetic construct
  source 1..75: mol_type = other DNA
tcaattcccagaacgtcgatgaaaaagcggctaatccagcaacgcctgatatggcacatctgctgggtaaagaag

SEQ ID NO: 664243 - DNA, 75 bp, synthetic construct
  source 1..75: mol_type = other DNA
agctgctaatccagcaacgcctgatatggcacatctgctgggtaaagaaggcgattacggcaaggatctgaagtt

SEQ ID NO: 664244 - DNA, 75 bp, synthetic construct
  source 1..75: mol_type = other DNA
aataccgtcacccgcgacgatattccgtttgccatctggtcagggcttcaccccgacaccccgcatcagtgcgta

SEQ ID NO: 664245 - DNA, 75 bp, synthetic construct
  source 1..75: mol_type = other DNA
ccgcgccgtacaggccgacaccggttctatcggcggtagcgcctctcacgaattccaggtgctggcgcagagcgg

SEQ ID NO: 664246 - DNA, 75 bp, synthetic construct
  source 1..75: mol_type = other DNA
ttgcataaatatcatttgcgtgtagatgagaagaaatctcgaaatgtattcagcgccatacgtgatgagctcatc

SEQ ID NO: 664247 - DNA, 75 bp, synthetic construct
  source 1..75: mol_type = other DNA
ggtcgaaggcacgcagggaattggtgtggtgctggcggaaacgcgccaggcggcagaaagcgtgattgatgcttt

SEQ ID NO: 664248 - DNA, 75 bp, synthetic construct
  source 1..75: mol_type = other DNA
gcagttatccgctgaacgaatcggtcgcgattgcccgggcgcgtgacaaattgcgttccatgcaactgctggcgc

SEQ ID NO: 664249 - DNA, 75 bp, synthetic construct
  source 1..75: mol_type = other DNA
tggaagtgaatgcgtcgccggggctggaaggaatagaaaaaaccaccggtatcgacatcgcgggtaaaatgatcc

SEQ ID NO: 664250 - DNA, 75 bp, synthetic construct
  source 1..75: mol_type = other DNA
agaaagcccgctgaaaattaaacgtgggcaaaataatctctggaataacggcggtattcagtacgcaccgcccgt

SEQ ID NO: 664251 - DNA, 75 bp, synthetic construct
  source 1..75: mol_type = other DNA
atcgacattgcgggtaaaatgatccgctggatcgaacgccacgccacggcagaatattgcctgaaaacgggtggt

SEQ ID NO: 664252 - DNA, 75 bp, synthetic construct
  source 1..75: mol_type = other DNA
cggcgcggcaagcatcgccagtatcacgccgaaggagcgtgaaatcgccatcaaagccgcgcgaacgatggcgct

SEQ ID NO: 664253 - DNA, 75 bp, synthetic construct
  source 1..75: mol_type = other DNA
gcggtgctacgtcacgtattcctataagtatcaacatgactcgtcagattgcaaccgcacagcaggcaatggccc

SEQ ID NO: 664254 - DNA, 75 bp, synthetic construct
  source 1..75: mol_type = other DNA
tcgggcatgcgatggtggtcagctacgagatgatattcacccaaccggacagcgtcacctacagcaagacaggca

SEQ ID NO: 664255 - DNA, 75 bp, synthetic construct
  source 1..75: mol_type = other DNA
gctatttctacggggccagccagtcggccagtcagattatgcgtaagaatgtgacaataaatgcactgaaagagg

SEQ ID NO: 664256 - DNA, 75 bp, synthetic construct
  source 1..75: mol_type = other DNA
ccagtgtgtacagccatttcgcttcctctgctatcagcccgaccgccagtgcggcaggcagtgtggttgacggta

SEQ ID NO: 664257 - DNA, 75 bp, synthetic construct
  source 1..75: mol_type = other DNA
atgccggatgaagcgtttatgccgcatccggtagtcctgaaaccgtgcgggggcaaccccgcacacatcaataat

SEQ ID NO: 664258 - DNA, 75 bp, synthetic construct
  source 1..75: mol_type = other DNA
cgcaccattcgtcgcattcagtccatccactatctggatcgcaaagacccggaaatgcaggtgcacatcctctga

SEQ ID NO: 664259 - DNA, 75 bp, synthetic construct
  source 1..75: mol_type = other DNA
atgggcggcggcgttattgcatgatgttgaaaagcgcagcactaccgtgcaggaaaacggacgtattcagtctcc

SEQ ID NO: 664260 - DNA, 75 bp, synthetic construct
  source 1..75: mol_type = other DNA
tttgccaggagcaacaatgctggggaaaagtgcgttcattcgcttcggattccgcacgctggcattacctgaccc

SEQ ID NO: 664261 - DNA, 75 bp, synthetic construct
  source 1..75: mol_type = other DNA
aacctaaaattcttggtgttggtggtggcgcaggtgttagaggtggtggtcgggcaagtattgactggagtgatg

SEQ ID NO: 664262 - DNA, 75 bp, synthetic construct
  source 1..75: mol_type = other DNA
caggcaaaagaagaggcgcgcgtttttttacgccagaaaaagccgttcatctggaatgcaacgaacattacccgc

SEQ ID NO: 664263 - DNA, 75 bp, synthetic construct
  source 1..75: mol_type = other DNA
aacgctggtcggcgctacgtcagcgttttagctgggttgaggagatgcatcacacgccacaagacccggagcatc

SEQ ID NO: 664264 - DNA, 75 bp, synthetic construct
  source 1..75: mol_type = other DNA
acggtccgacaaattttatggcgcgatatccctactccgttcgtgttgcgcgaacaaattgttgcactggtgcgt

SEQ ID NO: 664265 - DNA, 75 bp, synthetic construct
  source 1..75: mol_type = other DNA
taatgctcgtcatgatatcgatgccagagctacacaagactttaaagaggccagcgattactttaccagtcgcaa

SEQ ID NO: 664266 - DNA, 75 bp, synthetic construct
  source 1..75: mol_type = other DNA
attatgtgcagcagatatttggcggcagaccggacccggacctgttattcaggcaactggtgagtgacagttaca

SEQ ID NO: 664267 - DNA, 75 bp, synthetic construct
  source 1..75: mol_type = other DNA
cgaacccgtatgtattgatataagtgagctatcttcagatgttatgtatatagggaaatatatgctctcttccgg

SEQ ID NO: 664268 - DNA, 75 bp, synthetic construct
  source 1..75: mol_type = other DNA
atattgatgccagagctacacaagactttaaagaagcaagcgactactttattaatcgcaaggtcagtgaatccg

SEQ ID NO: 664269 - DNA, 75 bp, synthetic construct
  source 1..75: mol_type = other DNA
cgggccagccatgatgcccgtcatgatattgatgccagagctacacaagactttaaagaagcaagcgactacttt

SEQ ID NO: 664270 - DNA, 75 bp, synthetic construct
  source 1..75: mol_type = other DNA
aaactgacgctgtccgtcctgaaaggctatgtgtttgccctgatgtggttgcagtcatggccaatgttgtacgcc

SEQ ID NO: 664271 - DNA, 75 bp, synthetic construct
  source 1..75: mol_type = other DNA
gaaagacaagctgaatctggacacacagagtggcggaaaaacctggcattattatgcccagcagctatttggcgg

SEQ ID NO: 664272 - DNA, 75 bp, synthetic construct
  source 1..75: mol_type = other DNA
accagtaatgccgcccgtaatggtgacaccgccagcctggtgaatctggccaccacgtcatcgatggagaagcaa

SEQ ID NO: 664273 - DNA, 75 bp, synthetic construct
  source 1..75: mol_type = other DNA
ttcagcagcagtattgccagtgcctggaacacgctcagtcagtttggttctaaccgggggagcagtgattctgtc

SEQ ID NO: 664274 - DNA, 75 bp, synthetic construct
  source 1..75: mol_type = other DNA
ttccggaagtaaaaaagaatactatggttttagcataattagatccggagtacgtattttaagacttgatgataa

SEQ ID NO: 664275 - DNA, 75 bp, synthetic construct
  source 1..75: mol_type = other DNA
aggccagcgattactttaccagtcgcaaagtcagtgaatccggcagccatactgacaataatgccgattcccgtg

SEQ ID NO: 664276 - DNA, 75 bp, synthetic construct
  source 1..75: mol_type = other DNA
tcaatgcaacgcgtcagattgcagcggcacaacaggaaatggcccgggaggcgtcgaacagagcagaaagtgccc

SEQ ID NO: 664277 - DNA, 75 bp, synthetic construct
  source 1..75: mol_type = other DNA
ccatgatggccagccgtatgcgtagtgcggtggaaagctatgcgaaggcgcataatatcagtaatgaacaggcga

SEQ ID NO: 664278 - DNA, 75 bp, synthetic construct
  source 1..75: mol_type = other DNA
tacaaaagcagccgctttcagcaaaacagcaacaagagcttgaggaagtgctgaatgaagtgatagataaaaacg

SEQ ID NO: 664279 - DNA, 75 bp, synthetic construct
  source 1..75: mol_type = other DNA
gtgccggggcgcaaaccctctctgaacaacgactgtgtcgggtactgaatatcgacatcggcggcggcaccgcga

SEQ ID NO: 664280 - DNA, 75 bp, synthetic construct
  source 1..75: mol_type = other DNA
actgccaggggcgcgtgatttacgctcataaaccggggcagatgattgtggatgagtgcttcggcacaggcactg

SEQ ID NO: 664281 - DNA, 75 bp, synthetic construct
  source 1..75: mol_type = other DNA
gattttgtgcctgacccgccaggcggaagaactggagtccaggggcttataccgtcgagctgcaacggtgtggat

SEQ ID NO: 664282 - DNA, 75 bp, synthetic construct
  source 1..75: mol_type = other DNA
gcgcaatttctatgtcggcactaacgatccccgggtgattttgtgcctgacccgccaggctgaagaactggagtc

SEQ ID NO: 664283 - DNA, 75 bp, synthetic construct
  source 1..75: mol_type = other DNA
gtggatcactattgcaccgttcgtgacacggaaccgcaaccagttcgtgaaaccagacctgtgcgcaatttctat

SEQ ID NO: 664284 - DNA, 75 bp, synthetic construct
  source 1..75: mol_type = other DNA
gctgtcctataatcctttttcaattttaaaggtacagaagaagttcagaacgcgatctgaactggaggatagcta

SEQ ID NO: 664285 - DNA, 75 bp, synthetic construct
  source 1..75: mol_type = other DNA
gggcactattcagacagtaaaagcttacgcgagaatatctgtcaggaagccggaataatgaagttgggaatgcat

SEQ ID NO: 664286 - DNA, 75 bp, synthetic construct
  source 1..75: mol_type = other DNA
agcgaagagtagcctcttcagatcgtaatgtcagtgagggtaagaagccaagctctgtcttgaaagtaaaggttg

SEQ ID NO: 664287 - DNA, 75 bp, synthetic construct
  source 1..75: mol_type = other DNA
acagccaggggcgcgtggtttacgctcataaaccggggcagatgattgtggatgagtgcttcggcgcaggcaccg

SEQ ID NO: 664288 - DNA, 75 bp, synthetic construct
  source 1..75: mol_type = other DNA
tcggtatcgatatcggcaccaccaccaccacccaggtgattttctcccacctggaactggttaaccgtgcggcgg

SEQ ID NO: 664289 - DNA, 75 bp, synthetic construct
  source 1..75: mol_type = other DNA
ggcattgatgcaaactggtctgctgcccgcaggcgttacgcctgacattattaccctttccggcggtgtgggtga

SEQ ID NO: 664290 - DNA, 75 bp, synthetic construct
  source 1..75: mol_type = other DNA
ggagtttatcacttgataccgaatgcccaaaatgcggtcacaatttcgatctgctttgtgatgctgatttttggg

SEQ ID NO: 664291 - DNA, 75 bp, synthetic construct
  source 1..75: mol_type = other DNA
cagcaggcagtgtggttgacggtaattactcctacggcaacatgcagacggaaaacgtgaacggcttcagctgga

SEQ ID NO: 664292 - DNA, 75 bp, synthetic construct
  source 1..75: mol_type = other DNA
gatgctcatgctgaatggggggttaaacctaaaattcttggtgttggtggaggattaggcgttagaggcggtggt

SEQ ID NO: 664293 - DNA, 75 bp, synthetic construct
  source 1..75: mol_type = other DNA
gagatgtctcaagagcgtaaatataacgaagaaaaagctgcccaggaacgaatgcccggggcagatactcctgat

SEQ ID NO: 664294 - DNA, 75 bp, synthetic construct
  source 1..75: mol_type = other DNA
aacctaaaattcttggtgttggtggcggcttaggtgttaaaggtggtggtcgcgctggtattgattgggaagata

SEQ ID NO: 664295 - DNA, 75 bp, synthetic construct
  source 1..75: mol_type = other DNA
tattgacttcctgccatcggaattgcactggctggacgtcttctacgtactggtcacagcattgttgctgagtct

SEQ ID NO: 664296 - DNA, 75 bp, synthetic construct
  source 1..75: mol_type = other DNA
ttcatcgggtctcagtgcaacatcgcaggctgcctccggcgtggtggacggcaattactcgtttgccaacatgca

SEQ ID NO: 664297 - DNA, 75 bp, synthetic construct
  source 1..75: mol_type = other DNA
gatcatggtgatggccgccatgtttaatatgatgacgctgcaggtgctaaaggggtatgtgtttgcgcttatctg

SEQ ID NO: 664298 - DNA, 75 bp, synthetic construct
  source 1..75: mol_type = other DNA
agttttctggagctaaacaggcatgtgaagaaataaaaggttacgaaacatgctgtccagaatgtaaccatgaat

SEQ ID NO: 664299 - DNA, 75 bp, synthetic construct
  source 1..75: mol_type = other DNA
cacctgaaatcgctgcccaaagggagcaactggctcgtgaatttgtgaaacaacaggttgaacctaaagttgatg

SEQ ID NO: 664300 - DNA, 75 bp, synthetic construct
  source 1..75: mol_type = other DNA
cagtctggaaacatcactgataacaatgcatcttctcgggttgatcaattttccgcctctttggccagtgcgaaa

SEQ ID NO: 664301 - DNA, 75 bp, synthetic construct
  source 1..75: mol_type = other DNA
gccgatactaccgagtcttcgcaggattcgatggccagaagcaagatgatgaatgctgtagattcgtatgctaaa

SEQ ID NO: 664302 - DNA, 75 bp, synthetic construct
  source 1..75: mol_type = other DNA
gtattttcttttaaagatacattacttacgagaatgaatgacttaaatagggatttagttaattattcgcatgat

SEQ ID NO: 664303 - DNA, 75 bp, synthetic construct
  source 1..75: mol_type = other DNA
acataaaaaaatgctgtccggcagtgatgcaaattcaaagacctcgtcttcttcttttaacgaactgaatgccgg

SEQ ID NO: 664304 - DNA, 75 bp, synthetic construct
  source 1..75: mol_type = other DNA
atgttcgttccggaaaatcagtgggcacaacagaggatatgagttcgtttaccggaagtgttgctgctgataatt

SEQ ID NO: 664305 - DNA, 75 bp, synthetic construct
  source 1..75: mol_type = other DNA
taatgctgatgtgaaaggtgatattaaggcgaaaaactcaacagtaacgcttggcagtgataccgcttatattga

SEQ ID NO: 664306 - DNA, 75 bp, synthetic construct
  source 1..75: mol_type = other DNA
gctgccagatcattctgctgtactggcagaaaactgtcattttcgctatggagtgatcacgcctgaacaccagat

SEQ ID NO: 664307 - DNA, 75 bp, synthetic construct
  source 1..75: mol_type = other DNA
gctggtggtcaagcgcgaagcgctgggcactgtactacgctcacgtagcgaagacatcgggcagtccagtgttaa

SEQ ID NO: 664308 - DNA, 75 bp, synthetic construct
  source 1..75: mol_type = other DNA
agccgccctggtccatgagcgtgtcaataacgcaggggctgaagctcaccagatacaggcgagaaaccttcgtgg

SEQ ID NO: 664309 - DNA, 75 bp, synthetic construct
  source 1..75: mol_type = other DNA
actccgggaactgcggtacaactgacgctggctccggtgccattgcagaatgccagtattaaacgtcgtcgtatt

SEQ ID NO: 664310 - DNA, 75 bp, synthetic construct
  source 1..75: mol_type = other DNA
acaggcctttgcctgatggctaacggtattgccgccgggtttgccggtaatgaagtgatgttttcggaagcgtat

SEQ ID NO: 664311 - DNA, 75 bp, synthetic construct
  source 1..75: mol_type = other DNA
ttcacctgaacagtggcagagtcagtttaacccggcgtccattgtggcttattcctggcgtggtgagtacattgc

SEQ ID NO: 664312 - DNA, 75 bp, synthetic construct
  source 1..75: mol_type = other DNA
catctcatttgtggattgataacttttatgtgcgggattatcttgattttgcccaaaacaagggtaagtttacgg

SEQ ID NO: 664313 - DNA, 75 bp, synthetic construct
  source 1..75: mol_type = other DNA
aagctggttactttgaatgtaatcgccgcatggtttcagttctcattgatcaagacgcgatagctgaagggctgg

SEQ ID NO: 664314 - DNA, 75 bp, synthetic construct
  source 1..75: mol_type = other DNA
gaaaacaaccattaccgcctacccagtcagtacgaacggaaaactccccgcagccggtgattatagcggtgtggc

SEQ ID NO: 664315 - DNA, 75 bp, synthetic construct
  source 1..75: mol_type = other DNA
ttatctcagcacgccgtttgactgtgcatggattgatcttgcaaaagatatgatgcgcgtggtgacaggggacaa

SEQ ID NO: 664316 - DNA, 75 bp, synthetic construct
  source 1..75: mol_type = other DNA
atgatgaacatcgaagaagtgcgtaaaattttttgtgacgatggcctctatactgtgcgcgttgagaatggcgct

SEQ ID NO: 664317 - DNA, 75 bp, synthetic construct
  source 1..75: mol_type = other DNA
catggactctgatcggctataaatctgtggccaacgccgatgcggctaaaaaggcaacattactgatgtcaggcg

SEQ ID NO: 664318 - DNA, 75 bp, synthetic construct
  source 1..75: mol_type = other DNA
agtgcatttgtgctgcgtgcaaatctggcccaagcagatcagcttgttgtcaataagtcgttgtctggtaaaaac

SEQ ID NO: 664319 - DNA, 75 bp, synthetic construct
  source 1..75: mol_type = other DNA
agtcttgatatttctgatgccacacaagatgttattccttcgaaaggtgctgttgtcggtgtcgattttgatgca

SEQ ID NO: 664320 - DNA, 75 bp, synthetic construct
  source 1..75: mol_type = other DNA
gatactgaggttggagatattgcacagattattgatggcgcacgttatgatttccagttagacagtcaaacgctg

SEQ ID NO: 664321 - DNA, 75 bp, synthetic construct
  source 1..75: mol_type = other DNA
tttttagtgaagatggcctctatactgtgcgcgttgagaatggcgttatcgccagtcactgccgtattgaatgtt

SEQ ID NO: 664322 - DNA, 75 bp, synthetic construct
  source 1..75: mol_type = other DNA
aaatgaaggcgaattgccagccatccctattaagcctgtcaaaatttacaagcggggtgacgatgatgaagccta

SEQ ID NO: 664323 - DNA, 75 bp, synthetic construct
  source 1..75: mol_type = other DNA
cgtcgtatttatcgttctgtctcagggggcggagaagccgattttttactcgtggctgagcttgaagcatccgtg

SEQ ID NO: 664324 - DNA, 75 bp, synthetic construct
  source 1..75: mol_type = other DNA
aaagtcacggctgctgaaattgccaccaaaggagagggtaatttccctgcggcatcatatcgtctggggatcccc

SEQ ID NO: 664325 - DNA, 75 bp, synthetic construct
  source 1..75: mol_type = other DNA
ggaaatgtcctgtttaaggataatttggattttggtagcggtggtattatctttgacgaaggccatgaatataac

SEQ ID NO: 664326 - DNA, 75 bp, synthetic construct
  source 1..75: mol_type = other DNA
gaaacgtatcaaaggtgaaaaagacggtcgtatgctcatgaatgttggtctcaacgccgaaattcgcgataatct

SEQ ID NO: 664327 - DNA, 75 bp, synthetic construct
  source 1..75: mol_type = other DNA
atacatattcaattgctgcgttattagcagcaagcatgtgtatggcaattataggcgttgctattagaatggctt

SEQ ID NO: 664328 - DNA, 75 bp, synthetic construct
  source 1..75: mol_type = other DNA
atccctgatactccggttcagttaacactctctccggttccgttgcaggacgcaaacatcaatcgtcgtcgtatt

SEQ ID NO: 664329 - DNA, 75 bp, synthetic construct
  source 1..75: mol_type = other DNA
aggcgacaaacgtattctgtatgcttccgaaacagcggcccgtgcggttggcgggcagattacgcttcacgcttt

SEQ ID NO: 664330 - DNA, 75 bp, synthetic construct
  source 1..75: mol_type = other DNA
ccccgatcttggttcgctgaacagcggctcgttggtctatttccgcaaaatcccggtggggcgagtctatgacta

SEQ ID NO: 664331 - DNA, 75 bp, synthetic construct
  source 1..75: mol_type = other DNA
ctggtcggcggaaactatatcggcatgatgccaggtaaaggtaaagagcaagatcactttgtcgccctcgatacc

SEQ ID NO: 664332 - DNA, 75 bp, synthetic construct
  source 1..75: mol_type = other DNA
cgggatacgtattctgccgggcgataaaggcgagatgaaagccagctatccactgtatgccaatctggaaaaagc

SEQ ID NO: 664333 - DNA, 75 bp, synthetic construct
  source 1..75: mol_type = other DNA
ggtaatcctcgccgtgactttgagttgcaagaagctactattactgattcgcgttacctggatggcttaagcatt

SEQ ID NO: 664334 - DNA, 75 bp, synthetic construct
  source 1..75: mol_type = other DNA
gaaagttacggtattgatgccggtcagccgttaattctgcatggtgtacaggtaggccaggtaattgaacgtaaa

SEQ ID NO: 664335 - DNA, 75 bp, synthetic construct
  source 1..75: mol_type = other DNA
agaaagaagctgctaaagccggtatcaagatttctaggcgttgtcctgcatggcttaagcttaatgatgaccgta

SEQ ID NO: 664336 - DNA, 75 bp, synthetic construct
  source 1..75: mol_type = other DNA
gtacaaaggcggggagaattgaagcacaactgattattagaagtgctgttaaagaggtcgttttaaatactgcta

SEQ ID NO: 664337 - DNA, 75 bp, synthetic construct
  source 1..75: mol_type = other DNA
tgaaaggtggcttaggtgacttcttaaccgctatcgagaaagggcttgtaaaagcaggtgatacgctcttgatag

SEQ ID NO: 664338 - DNA, 75 bp, synthetic construct
  source 1..75: mol_type = other DNA
atgaaacgtgtcatttcttacatccggttttcatctgagaagcaagctaaaggcgactcactccgcagacaatct

SEQ ID NO: 664339 - DNA, 75 bp, synthetic construct
  source 1..75: mol_type = other DNA
accccgaaaggctgtgaagagatatctggttattatcctgcaattatagatgaaacaacattctacaaagttcaa

SEQ ID NO: 664340 - DNA, 75 bp, synthetic construct
  source 1..75: mol_type = other DNA
gaatcgctctgtaattggatactttaccccgaaaggctgtgaagagatatctggttattatcctgcaattataga

SEQ ID NO: 664341 - DNA, 75 bp, synthetic construct
  source 1..75: mol_type = other DNA
aaagcccaggaaggcaagcacttcctgttgcaggaaagtgaaccgaaagagtggcgtgaatggggaactgcgctt

SEQ ID NO: 664342 - DNA, 75 bp, synthetic construct
  source 1..75: mol_type = other DNA
gtacgatcgcggccaaaaacttcacaatagagttgctgagtagtgtgcagaataaaatgacgaatatgactttgc

SEQ ID NO: 664343 - DNA, 75 bp, synthetic construct
  source 1..75: mol_type = other DNA
tctcaagaaagaacaaactaaaacgcaacagaaagacgaacagaatctatactacggtggatttaaactatggta

SEQ ID NO: 664344 - DNA, 75 bp, synthetic construct
  source 1..75: mol_type = other DNA
tttagacaagatataaaaaaaccagtttttcatgcgtttttatctcttccaaaagatgaaaaattaacagatgga

SEQ ID NO: 664345 - DNA, 75 bp, synthetic construct
  source 1..75: mol_type = other DNA
gcaggtgatggtatccggattcgggcaggtggaacgaataaccctgagtacatcgatgtcggagatgccggtatg

SEQ ID NO: 664346 - DNA, 75 bp, synthetic construct
  source 1..75: mol_type = other DNA
tgaaggagagagtgtggccgggtggacgcttgtgtatgccggccatggtgaagcaacgttccgggtgaatggtcg

SEQ ID NO: 664347 - DNA, 75 bp, synthetic construct
  source 1..75: mol_type = other DNA
aatctctcaaaacaggttaaagccgcctatgagctatcgcacagccaggtcggtaccagctcggacgtcatttca

SEQ ID NO: 664348 - DNA, 75 bp, synthetic construct
  source 1..75: mol_type = other DNA
gcgatctgatgatccacctgcaagcccccgatctcggttcactgaacagtggttcattggtctatttccgcaaga

SEQ ID NO: 664349 - DNA, 75 bp, synthetic construct
  source 1..75: mol_type = other DNA
gcggtgccagcgccagtcagcgtaaaggcgacaagcgtattctgtatgcttccgaaacagcggcccgtgcggttg

SEQ ID NO: 664350 - DNA, 75 bp, synthetic construct
  source 1..75: mol_type = other DNA
ctttggtcttacaggcggcgtagtgaaaaccggtacgtttaaccagtttatccgtggcgggatcgccttcgccac

SEQ ID NO: 664351 - DNA, 75 bp, synthetic construct
  source 1..75: mol_type = other DNA
ctggttgggggtaactatatcggcatgatgccaggcaaaggcaaagagcaggatcactttgtcgccctcgatacc

SEQ ID NO: 664352 - DNA, 75 bp, synthetic construct
  source 1..75: mol_type = other DNA
tgatgccaggtagaggtaaagagcaggatcactttatcgcactcgatacccaaccgaaatatcggctggataatg

SEQ ID NO: 664353 - DNA, 75 bp, synthetic construct
  source 1..75: mol_type = other DNA
tcacgctgcgcggttgggtggcagatccaaaccacaccacgcccacactggcagaaattcagtattgctacgtga

SEQ ID NO: 664354 - DNA, 75 bp, synthetic construct
  source 1..75: mol_type = other DNA
atgaaaacttataatggcgagagaaaataccgtgactatttactcagacgttatagcatttctcgtgaaggtcat

SEQ ID NO: 664355 - DNA, 75 bp, synthetic construct
  source 1..75: mol_type = other DNA
accccgcgctgtgctacagatgctcctgctccggaggcattatcagttgcttgtgcagcttcctgccatgtggaa

SEQ ID NO: 664356 - DNA, 75 bp, synthetic construct
  source 1..75: mol_type = other DNA
aatgttgcacaactggcccgggaacatggcgttgataacaacctgatttttaaatggctacgcctctggcaaaga

SEQ ID NO: 664357 - DNA, 75 bp, synthetic construct
  source 1..75: mol_type = other DNA
atcatccgccgcattgcgctggcgcgtttcgacgtcacgatcaacctgtcgcataacggtaaaattgtgcgtcag

SEQ ID NO: 664358 - DNA, 75 bp, synthetic construct
  source 1..75: mol_type = other DNA
aaccgttcatcatctgccgccaacactgatggcgcagtggtattttggtgatgccagcagcaaattccgtcctta

SEQ ID NO: 664359 - DNA, 75 bp, synthetic construct
  source 1..75: mol_type = other DNA
aacggaacacccgtgaaagactcggtacgactggatccgtgggtgtttatgttctctgccgggtaccgcttttaa

SEQ ID NO: 664360 - DNA, 75 bp, synthetic construct
  source 1..75: mol_type = other DNA
gcgcacttattttgagaaacctcgaacccgtaaaggctggaagggaataatgcacgatcctgatctaaatggaag

SEQ ID NO: 664361 - DNA, 75 bp, synthetic construct
  source 1..75: mol_type = other DNA
agggagggattattatttcgtcgatggtgtgacagatttaaagattgacgctttgaggtttgcagtgctgtatca

SEQ ID NO: 664362 - DNA, 75 bp, synthetic construct
  source 1..75: mol_type = other DNA
actcgtaaaggctggaaaggaataatgcacgatcctgatctaaatggaagctataatgttgagaaagggatacga

SEQ ID NO: 664363 - DNA, 75 bp, synthetic construct
  source 1..75: mol_type = other DNA
accgagggaagttgcttggcagtttacctgctgtgggcgagattcataaagaaatcgcagtatcagaagaaaccg

SEQ ID NO: 664364 - DNA, 75 bp, synthetic construct
  source 1..75: mol_type = other DNA
tcttactccgcttttatccactccttcacaaagcacagtcagtgccagttcctgtaaagttgcgttccgccacgg

SEQ ID NO: 664365 - DNA, 75 bp, synthetic construct
  source 1..75: mol_type = other DNA
ggaaaatcgctctgctgatcagctcagtaaatacggtgcggtttccctgcgggagcaggcccttttctggatatc

SEQ ID NO: 664366 - DNA, 75 bp, synthetic construct
  source 1..75: mol_type = other DNA
ggcgaaaatcactggtattaatatcaacaccctgacgcctggaatgcgctcaggtagtcgtggaattgcccaagc

SEQ ID NO: 664367 - DNA, 75 bp, synthetic construct
  source 1..75: mol_type = other DNA
acatacacgcccatatcacctgtctttcgcccagtagaccaacctacagatccatacgcgcaggctggtgagcag

SEQ ID NO: 664368 - DNA, 75 bp, synthetic construct
  source 1..75: mol_type = other DNA
atagcattcctggatggttatcctcctccctcacagctctagttggtactcttattggcggatggtttaccctaa

SEQ ID NO: 664369 - DNA, 75 bp, synthetic construct
  source 1..75: mol_type = other DNA
ttacacagatagtttgctaggtcaggtttttgaattattaaaagatcgccgcgcctcggtcatgtattttgccga

SEQ ID NO: 664370 - DNA, 75 bp, synthetic construct
  source 1..75: mol_type = other DNA
gaaaacaacatcttttcgacagcttacaataattaccttattaatgcgtggatgggggtaacaaagccggaacag

SEQ ID NO: 664371 - DNA, 75 bp, synthetic construct
  source 1..75: mol_type = other DNA
cgattgacgagaaccccctatcccaaatgtttaaggctaaaatattgagcctttactttccagaacactttataa

SEQ ID NO: 664372 - DNA, 75 bp, synthetic construct
  source 1..75: mol_type = other DNA
tcaccgccagcgccgtctgtagcgtaaccgacacaccgcccacattactggtgtgcctgaatcgtggggcgtccg

SEQ ID NO: 664373 - DNA, 75 bp, synthetic construct
  source 1..75: mol_type = other DNA
tttttggcggcaaaacgcccatggaacaccgctttgccgccgcccgctggcagactggtgtgaccggatgcccgc

SEQ ID NO: 664374 - DNA, 75 bp, synthetic construct
  source 1..75: mol_type = other DNA
ctaaatgtggttctgaaagagaagccgcgttaaagctggcagagtggatgcagagaatggctgctgcaattgaga

SEQ ID NO: 664375 - DNA, 75 bp, synthetic construct
  source 1..75: mol_type = other DNA
aatgtgtatcgcatcgactctggcgtgggtttgggcgctttcagcagcgaaagaagcctggtacatcctgaagag

SEQ ID NO: 664376 - DNA, 75 bp, synthetic construct
  source 1..75: mol_type = other DNA
gccgtaaaagcaatacgtgatgcagttggaaacgaagagttcaatcgcttagcgagggctggcattgtagcgtcg

SEQ ID NO: 664377 - DNA, 75 bp, synthetic construct
  source 1..75: mol_type = other DNA
agagtatggtcagtcagttactgatgagtgtctttcatggcaacagacagaacaattattatcaactttggcagc

SEQ ID NO: 664378 - DNA, 75 bp, synthetic construct
  source 1..75: mol_type = other DNA
ctgaaagaagttatgcgactgggggcgttgcagaaaaaactctttatcgacggcaagcgtgtcggggacagagag

SEQ ID NO: 664379 - DNA, 75 bp, synthetic construct
  source 1..75: mol_type = other DNA
tttacgggcggcagctctcggtaagaaagttaactcactgactgatgaccgggtgctgaaagaagttatgcgact

SEQ ID NO: 664380 - DNA, 75 bp, synthetic construct
  source 1..75: mol_type = other DNA
agaggagcatggtgcgtatttgttgctgatgttcaattactggcaaacaggaaagccaatacctaaaaacaggct

SEQ ID NO: 664381 - DNA, 75 bp, synthetic construct
  source 1..75: mol_type = other DNA
aatacgagcattatgaatggcctggtgattacttcactacgggcgaaggcgagatgctgacgcgcattcgtatgg

SEQ ID NO: 664382 - DNA, 75 bp, synthetic construct
  source 1..75: mol_type = other DNA
acggccagtgagaggctgcgtactggaaagtgggtgatggacgattttgattttatgaagcctcgttcgctgctt

SEQ ID NO: 664383 - DNA, 75 bp, synthetic construct
  source 1..75: mol_type = other DNA
atgagttttgtatctacgggtaataaatctggcagtaacggtgggccagctatctccacgccaccgatagccgga

SEQ ID NO: 664384 - DNA, 75 bp, synthetic construct
  source 1..75: mol_type = other DNA
actacgaaaaaatgattcatataccttgtggttggtgggttgataatgaagctcgtgagatgattgttgaagcct

SEQ ID NO: 664385 - DNA, 75 bp, synthetic construct
  source 1..75: mol_type = other DNA
gtgcttggaatgtacagcggaacagctgcgttacatacggctttgattcttgcaggtgtaaaagaaggtgatgag

SEQ ID NO: 664386 - DNA, 75 bp, synthetic construct
  source 1..75: mol_type = other DNA
ttgatataaagagaatcagaaaactagcagataaacataatctgttactgatagaagattgtgctcatgctttag

SEQ ID NO: 664387 - DNA, 75 bp, synthetic construct
  source 1..75: mol_type = other DNA
caactaataaagatacagataaagatctaaaaacagatcccccccctaaatcccccccgggggaatcgaggtgtc

SEQ ID NO: 664388 - DNA, 75 bp, synthetic construct
  source 1..75: mol_type = other DNA
ttcgcgccgaaaggtgttcgacctgagacgttactccgacaggttaacaccgtctcgttaccggatagtgcgatc

SEQ ID NO: 664389 - DNA, 75 bp, synthetic construct
  source 1..75: mol_type = other DNA
tttgaacatgatgtcaacacaaaggcaactaataaagatactgaaccgccccgggtttcctggagagtattttat

SEQ ID NO: 664390 - DNA, 75 bp, synthetic construct
  source 1..75: mol_type = other DNA
gtgaagttccacgcggaaaaagacctgaatactacggtaaaaaacaatgaaacccacacgatcatggtcgatcgc

SEQ ID NO: 664391 - DNA, 75 bp, synthetic construct
  source 1..75: mol_type = other DNA
attcatgaaatgtcacatttttatgatgtgctcggaagttttgatgagggtttaagaagtggtggtatagatcta

SEQ ID NO: 664392 - DNA, 75 bp, synthetic construct
  source 1..75: mol_type = other DNA
ccactggtggagtggcaccaggaagggctgaaactggacaaggaatttatccacaccattacggccagtgagagg

SEQ ID NO: 664393 - DNA, 75 bp, synthetic construct
  source 1..75: mol_type = other DNA
attccagaataaaaccgtggtggatattctcgatgaagtactggatgaatattcctttccggtggaaaagcgtct

SEQ ID NO: 664394 - DNA, 75 bp, synthetic construct
  source 1..75: mol_type = other DNA
gcatggttttgtgagatgtgctctgtccggtgaaatgctggcggtaaatcctgaacagatagatgcattgataga

SEQ ID NO: 664395 - DNA, 75 bp, synthetic construct
  source 1..75: mol_type = other DNA
tccggtgaaatgctggcagtaaatcctgaacagatagatgcattgatagaatttctgaaagggatcagggactga

SEQ ID NO: 664396 - DNA, 75 bp, synthetic construct
  source 1..75: mol_type = other DNA
gaaatctggacagataaatatggccgggtgaaagttcagtttggctgggatcgttacggtaagaatgacgaaaat

SEQ ID NO: 664397 - DNA, 75 bp, synthetic construct
  source 1..75: mol_type = other DNA
catcctgaacctgggttacgtttctcccgctgccaacctgccgcttcagcccatggtgggcaaagacctgtgcgt

SEQ ID NO: 664398 - DNA, 75 bp, synthetic construct
  source 1..75: mol_type = other DNA
agcttaaaacctcggacaccctgaacctgggttatgtatctcccgccgccaacctgccgctcaaactgatggtgg

SEQ ID NO: 664399 - DNA, 75 bp, synthetic construct
  source 1..75: mol_type = other DNA
ccttatctccggcccgggggcgcataacgtcacggtaagcggcagtgctgtgccgccgcagatgttgttgtttgc

SEQ ID NO: 664400 - DNA, 75 bp, synthetic construct
  source 1..75: mol_type = other DNA
ccatcagcgtgggagaagaccgcaatgccaccatcacaaaaaatgatgggctttccgtcaaacaggcccaaacca

SEQ ID NO: 664401 - DNA, 75 bp, synthetic construct
  source 1..75: mol_type = other DNA
tttgagcacagcgagaacagccacacgctggtactggctgatgccatcaatggtcataaaacgtgcccggactcg

SEQ ID NO: 664402 - DNA, 75 bp, synthetic construct
  source 1..75: mol_type = other DNA
acactgtgcagcttaaaactccagacaccctgaacctgggctacgtttcgcccgccgccaatctgccgctaaagc

SEQ ID NO: 664403 - DNA, 75 bp, synthetic construct
  source 1..75: mol_type = other DNA
gcaaggcaacgtgggcaacggcctgggcgtgacgctggcaacgggcgacccgagcattattgcgccaaccaaaac

SEQ ID NO: 664404 - DNA, 75 bp, synthetic construct
  source 1..75: mol_type = other DNA
gcgaataactttgaacagctgggctatcaggccgagtccgccaccttacctgaccggcgcgaaagagctgcgcga

SEQ ID NO: 664405 - DNA, 75 bp, synthetic construct
  source 1..75: mol_type = other DNA
ttcgcctcgatagcgcgaaagccgcgggtaaaaatatcagcctgaacttcaatatgagcaacggcgataacctca

SEQ ID NO: 664406 - DNA, 75 bp, synthetic construct
  source 1..75: mol_type = other DNA
gtcgcaatcaagttatccactcgtcctgaaaagcggatgggaagcgacgcagactgggataggctggaaaacgcg

SEQ ID NO: 664407 - DNA, 75 bp, synthetic construct
  source 1..75: mol_type = other DNA
tgacaagtctgatcgctgaaaacccgccgattattaaagagcaggtcacgcgggcacaggctattgactgttttg

SEQ ID NO: 664408 - DNA, 75 bp, synthetic construct
  source 1..75: mol_type = other DNA
tccgacggcggcacagctggcgctgaaaccgttgattgatgccgatcttcttgacctcaatcagtggccggtgat

SEQ ID NO: 664409 - DNA, 75 bp, synthetic construct
  source 1..75: mol_type = other DNA
aaaacccgcgacaccagcaagtggaccgagtatctgaacgaaacgctggatatgtggggtaacgacgcggaagta

SEQ ID NO: 664410 - DNA, 75 bp, synthetic construct
  source 1..75: mol_type = other DNA
cgcggggaagattataaatttgatatcaatgcgcccgcgcccgaaaccgttaaccctagcctgtggcgtcagtcg

SEQ ID NO: 664411 - DNA, 75 bp, synthetic construct
  source 1..75: mol_type = other DNA
tattacttttgactgtgcaattaatgaactcaaaccggttgcaaaatgccagttcaacctaatgactataatata

SEQ ID NO: 664412 - DNA, 75 bp, synthetic construct
  source 1..75: mol_type = other DNA
tcctgatgaccccaggcagcgaagcacccgcggaaatgcatttctatattccggccctgaaagcgctgtgcaccg

SEQ ID NO: 664413 - DNA, 75 bp, synthetic construct
  source 1..75: mol_type = other DNA
ccgcacttgacctttacttccagcatcgtccgcaaaaaccgattgttgccgttatctacactcacagccacgccg

SEQ ID NO: 664414 - DNA, 75 bp, synthetic construct
  source 1..75: mol_type = other DNA
catgaatgaaatcggcgacatgattaagctgccgcctgcgcttgccaataactgggccagccgtggctattacgg

SEQ ID NO: 664415 - DNA, 75 bp, synthetic construct
  source 1..75: mol_type = other DNA
atggaattgcgacgaaagccggtgatatgaccgtctataactacgatggtgaaacgcgcgagtatctgtcgactt

SEQ ID NO: 664416 - DNA, 75 bp, synthetic construct
  source 1..75: mol_type = other DNA
ggtgtggatagcgcaggcgtatgagcagcagatagcggagagtcgcaggccggaagaggagacaacaccacgtga

SEQ ID NO: 664417 - DNA, 75 bp, synthetic construct
  source 1..75: mol_type = other DNA
gctactgtagattcaatctgtcaatgcaacacccctttcaattatctctttcggtgttttgaacttcagtgtctt

SEQ ID NO: 664418 - DNA, 75 bp, synthetic construct
  source 1..75: mol_type = other DNA
atacgtgagctgaggaaaaagctacaacgcattgaaatggagaatgaaatattaaaaaaggctactgtagattca

SEQ ID NO: 664419 - DNA, 75 bp, synthetic construct
  source 1..75: mol_type = other DNA
ataaaactcaggatgtacgtaatggtcaggtcgttgtcgcacgtattgatgacgaagttaccgttaaacgtctga

SEQ ID NO: 664420 - DNA, 75 bp, synthetic construct
  source 1..75: mol_type = other DNA
ctgctaagagcggggctgagtaaggacagggcgatgatctcagcgtacaacaaccacgggccatggtggaactca

SEQ ID NO: 664421 - DNA, 75 bp, synthetic construct
  source 1..75: mol_type = other DNA
cgctggcgcgatctgaacctgtgtgtggtggtggtcgcagctctgtttgcactgaagattattctggtggattag

SEQ ID NO: 664422 - DNA, 75 bp, synthetic construct
  source 1..75: mol_type = other DNA
cacctgtttgattgccggtatcggcagtattgcgatggggatatttgctaacttacccgtggcgctggctccggc

SEQ ID NO: 664423 - DNA, 75 bp, synthetic construct
  source 1..75: mol_type = other DNA
ggccagcctgattgcgtggatgaaatacattcaggcactgaacgcggtcgatacctccacggcaccggatatcga

SEQ ID NO: 664424 - DNA, 75 bp, synthetic construct
  source 1..75: mol_type = other DNA
ggtcgttgaccagaactacaccgtggcagatgcagccagctctatggatgtcggcctttccacaatgacgcgatg

SEQ ID NO: 664425 - DNA, 75 bp, synthetic construct
  source 1..75: mol_type = other DNA
ggatgtcggcctttccacaatgacgcgatgggtgaaacaattacgtgatgagcggcagggaaaaacaccaaaagc

SEQ ID NO: 664426 - DNA, 75 bp, synthetic construct
  source 1..75: mol_type = other DNA
cattttagcggcgcgttaacacttgaactcgccggtatcattttctcctttatgctgatcaacctatttgattca

SEQ ID NO: 664427 - DNA, 75 bp, synthetic construct
  source 1..75: mol_type = other DNA
accgctggtgcgattgtatgacaaaggcgttccggcgctgaaaaatgtcgttgggctgccattttgcgatatcgg

SEQ ID NO: 664428 - DNA, 75 bp, synthetic construct
  source 1..75: mol_type = other DNA
taacagcggcatgatttcaaaagccgattacgatgctctgctcacgctgatacgggattttctgacgaccttaac

SEQ ID NO: 664429 - DNA, 75 bp, synthetic construct
  source 1..75: mol_type = other DNA
atgttccgggcattgataacattaaatacccgctaaaactgggccaggggccggggctgatgctgtttgataaac

SEQ ID NO: 664430 - DNA, 75 bp, synthetic construct
  source 1..75: mol_type = other DNA
atggtgtcgcgcgcagtgcctggcaactgaatgaaggaagttcagctattgtggtgctggataaagatggtcgcg

SEQ ID NO: 664431 - DNA, 75 bp, synthetic construct
  source 1..75: mol_type = other DNA
acagcggcatgatttcaaaagccgattacgatgctctgctcacgttgatacgggattttctgaccaccttaaccg

SEQ ID NO: 664432 - DNA, 75 bp, synthetic construct
  source 1..75: mol_type = other DNA
acacattaaaccggacgtcgtgatcgtgttggataccgccgtagcgggcgatgttccgggcattgataacattaa

SEQ ID NO: 664433 - DNA, 75 bp, synthetic construct
  source 1..75: mol_type = other DNA
gattacgatgctctgctcacgctgatacgggattttctgacgaccttaactgcggagaaagtcaacgcgtttagc

SEQ ID NO: 664434 - DNA, 75 bp, synthetic construct
  source 1..75: mol_type = other DNA
cgcgagttcgaggactacctcaagtgcggccgcctggaacacggctttctgcgcgtacgctgccaatcctgccac

SEQ ID NO: 664435 - DNA, 75 bp, synthetic construct
  source 1..75: mol_type = other DNA
aggtaatgaacccagaaaagatggtttctttaactctgaagaaggaaaacgcagtgatgcagaagaagttctgga

SEQ ID NO: 664436 - DNA, 75 bp, synthetic construct
  source 1..75: mol_type = other DNA
gcctcccctattaccccggaacaaattgaaatccgtgagctcaggaaaaagctacaacaaacgtggtggtcatga

SEQ ID NO: 664437 - DNA, 75 bp, synthetic construct
  source 1..75: mol_type = other DNA
atctgctgcaggagcgactgcagcagatggagcgggatatggttcgtgacctgcagaaagagaaaaccctgggcg

SEQ ID NO: 664438 - DNA, 75 bp, synthetic construct
  source 1..75: mol_type = other DNA
tcgccctgctgttgccgctgaatggccaggcagcggtatttggtcgcactattcagcaaggctttgaagcggcga

SEQ ID NO: 664439 - DNA, 75 bp, synthetic construct
  source 1..75: mol_type = other DNA
tgttctggcagccctgattttcgtcggttgtggcacccatactcccgatcagtccactgcttatatgcagggcac

SEQ ID NO: 664440 - DNA, 75 bp, synthetic construct
  source 1..75: mol_type = other DNA
atggcaactgatactttgacgcacgcgactgcccacgcgcacgaacacgaacacgggcaccacgatgcaggcgga

SEQ ID NO: 664441 - DNA, 75 bp, synthetic construct
  source 1..75: mol_type = other DNA
aagctatagaacgtttagttgaagcatatgggttcggtacccgtcaggctctctgtgatcatttaggtgtttcta

SEQ ID NO: 664442 - DNA, 75 bp, synthetic construct
  source 1..75: mol_type = other DNA
tcgttgcagcctatggatttaagacaagacaagctttagctgatcatttgggtatttcaaaaagcacactagcta

SEQ ID NO: 664443 - DNA, 75 bp, synthetic construct
  source 1..75: mol_type = other DNA
gctttttccagagtaccggcggttcgtgcagttactccaccatcaccaaatggacgccgcgtcgtaaacgcggga

SEQ ID NO: 664444 - DNA, 75 bp, synthetic construct
  source 1..75: mol_type = other DNA
ggctgtcacacataatacagaacagaaccaccataaagatggtaaggagattcattctctcactttagacacaaa

SEQ ID NO: 664445 - DNA, 75 bp, synthetic construct
  source 1..75: mol_type = other DNA
aagccatagaacgtttagttgaagcatatgggttcggtactcgtcaggctctctgtgatcatttaggtgtttcta

SEQ ID NO: 664446 - DNA, 75 bp, synthetic construct
  source 1..75: mol_type = other DNA
gtaatccagtgcgcccttgaaacgggtacctcgcttaattggctaacaacagggcatggttcaaagcaagcatca

SEQ ID NO: 664447 - DNA, 75 bp, synthetic construct
  source 1..75: mol_type = other DNA
cgcatcatgtgcctgagtttgttctggcacttcctggatgtagtttggatctgtgtattcactgttgtttatcta

SEQ ID NO: 664448 - DNA, 75 bp, synthetic construct
  source 1..75: mol_type = other DNA
tgctgatggtgcaaatcgcccgtcgcggcctgaccagcactaaccgtacccgtatcatgtgcctgagcctgttct

SEQ ID NO: 664449 - DNA, 75 bp, synthetic construct
  source 1..75: mol_type = other DNA
ggcacttcctggatgtggtttggatctgtgtgttcactgttgtttatctgatggggcgatgtaatgagtcattct

SEQ ID NO: 664450 - DNA, 75 bp, synthetic construct
  source 1..75: mol_type = other DNA
tgtgtatcaacacgccagcaaccaatatatctacctggcttctctctttgcgttgggtttcctggtctttggccc

SEQ ID NO: 664451 - DNA, 75 bp, synthetic construct
  source 1..75: mol_type = other DNA
tcccaaagcacgatggctaacagatatgcccgcgatacatttccagctgattgggttgttatctgctcgatcgag

SEQ ID NO: 664452 - DNA, 75 bp, synthetic construct
  source 1..75: mol_type = other DNA
gcagcccggatttttgcgtcagtcagtgccatagttcagccttctgaatgcgttaaagagggtacaaattctgtc

SEQ ID NO: 664453 - DNA, 75 bp, synthetic construct
  source 1..75: mol_type = other DNA
agagtcagaattcaggatttccttgcaatcaatgtatgttttttattccgattgagtgcagtgaggtgaatcaac

SEQ ID NO: 664454 - DNA, 75 bp, synthetic construct
  source 1..75: mol_type = other DNA
gctgacatcaatcagaaaatagctgaagagaaaagaaaaagggatgaaataaatatggtaaaggatgccataaaa

SEQ ID NO: 664455 - DNA, 75 bp, synthetic construct
  source 1..75: mol_type = other DNA
gtccattttttgtaaaccttattaccattttctgtattatcctcattgaaaaaggaaaagtaatggcactgataa

SEQ ID NO: 664456 - DNA, 75 bp, synthetic construct
  source 1..75: mol_type = other DNA
ggatactgataacggctattcgacgtttgaacaatctctgctgcgctacattgctgcagggctgggtgtgtcgta

SEQ ID NO: 664457 - DNA, 75 bp, synthetic construct
  source 1..75: mol_type = other DNA
atacactgcagaatacgcagctccagagcgcgattgtcaaggcgatgtatgccgccacgattgaaagtgagctgg

SEQ ID NO: 664458 - DNA, 75 bp, synthetic construct
  source 1..75: mol_type = other DNA
cggacggtaaaaccgctctgcgggattatgccggataccatggcggtgctggtggctttggcggtcagctccgcg

SEQ ID NO: 664459 - DNA, 75 bp, synthetic construct
  source 1..75: mol_type = other DNA
ataaactacacattaatgaagacagcgaaaaaaaggttactgaaagtaaaaataaccttaattcgcctattcttt

SEQ ID NO: 664460 - DNA, 75 bp, synthetic construct
  source 1..75: mol_type = other DNA
atgatctgaaacttcagaccgcgcaggattcagacaatggattttcggcgcttgaacaggcgctgctgcggtata

SEQ ID NO: 664461 - DNA, 75 bp, synthetic construct
  source 1..75: mol_type = other DNA
tctaaagcccgattcagttttcaggaggcgagaagcgcctggggaaatgcagactggatcggctccgggagaatg

SEQ ID NO: 664462 - DNA, 75 bp, synthetic construct
  source 1..75: mol_type = other DNA
ttaatggtttgtttgctaacaaatatcacgcaggacactggtttaaaattaacaaggaatcaatttttaatgctg

SEQ ID NO: 664463 - DNA, 75 bp, synthetic construct
  source 1..75: mol_type = other DNA
taaataagttgaaggatttatttaataaatttacctctaattgcgacgaatatgagtattttaacactaaaaaaa

SEQ ID NO: 664464 - DNA, 75 bp, synthetic construct
  source 1..75: mol_type = other DNA
tcagcagaggatttagggattcagttgtttaatggatttgctggattacacacgcgacaattttaccctcaaaat

SEQ ID NO: 664465 - DNA, 75 bp, synthetic construct
  source 1..75: mol_type = other DNA
tacaaaacagaaaaatacacaaatactcaacggagttaaaaaacaacactataaaaaatcaaacaaaattaataa

SEQ ID NO: 664466 - DNA, 75 bp, synthetic construct
  source 1..75: mol_type = other DNA
tggcaacgtagcgggggtttcattcagtgtaaatgacatagcatttaagggatcttcattaggtaaaaaattcag

SEQ ID NO: 664467 - DNA, 75 bp, synthetic construct
  source 1..75: mol_type = other DNA
agccacgtacagaattaaatgacaaattatttcgctatgcaacactacgctcttatctactacctgaaattgatg

SEQ ID NO: 664468 - DNA, 75 bp, synthetic construct
  source 1..75: mol_type = other DNA
tctgaaccgatcaaaggcgatgtcctgaactatgatgaagtgatggagcgcatggatcacttcatggactggctg

SEQ ID NO: 664469 - DNA, 75 bp, synthetic construct
  source 1..75: mol_type = other DNA
tccaccacgaagcatccatcgaaggtggtcagcacctgaacgttaacgtgatgaaccgtgaaatgctgctcgacg

SEQ ID NO: 664470 - DNA, 75 bp, synthetic construct
  source 1..75: mol_type = other DNA
gtgtacatcgaacgtgacctgaaagctggcaagatcaccgaacaagaagcgcaggaaatggttgaccacctggtc

SEQ ID NO: 664471 - DNA, 75 bp, synthetic construct
  source 1..75: mol_type = other DNA
ttccttatccggtgttgttcccaagagaaaatactgttgatgacttggttgaagctatttctaaattgtctaaag

SEQ ID NO: 664472 - DNA, 75 bp, synthetic construct
  source 1..75: mol_type = other DNA
aagatgacttttatcgcggtcaacatttgatttatccaggggcgaataaatatagccatacaatcggcttcgttt

SEQ ID NO: 664473 - DNA, 75 bp, synthetic construct
  source 1..75: mol_type = other DNA
agttaaatgaggatgattttcgttctcacgtttattccttgtgtcaattagataatgttggcgttctgttaggtg

SEQ ID NO: 664474 - DNA, 75 bp, synthetic construct
  source 1..75: mol_type = other DNA
ttgatatcgccgcgattggttgtatctgcctgatggcgatagtggcggtgatggaagaacgcaaaatccgccgcg

SEQ ID NO: 664475 - DNA, 75 bp, synthetic construct
  source 1..75: mol_type = other DNA
cgggatgtttatctttccatcgattatcgcgttgattgtcggttttatcggcctgcgttatggcagtgactcccc

SEQ ID NO: 664476 - DNA, 75 bp, synthetic construct
  source 1..75: mol_type = other DNA
gctctctgacctggcgaacggtcgccgtggcctggtggcctgcatcgcgctggcgctgattatcgccacactcgg

SEQ ID NO: 664477 - DNA, 75 bp, synthetic construct
  source 1..75: mol_type = other DNA
atgtgaacggcgttccgcttcgtgagagtctcagctacaacgggggcggcgcaggatttggcgggcaaatggccg

SEQ ID NO: 664478 - DNA, 75 bp, synthetic construct
  source 1..75: mol_type = other DNA
acgccgggacatgccaccgggaatcgctttctgcgtgcgggggtggaaactgaccgcaatggacgggcgctggct

SEQ ID NO: 664479 - DNA, 75 bp, synthetic construct
  source 1..75: mol_type = other DNA
ctggctggggatgcgtgaaacggcagcgaaaagttttatagatgaggttgaagcggcctggtcggaatatgcaga

SEQ ID NO: 664480 - DNA, 75 bp, synthetic construct
  source 1..75: mol_type = other DNA
cgcggttattccgcacgcgttttaaagccgtgagccctaaacgggtggacacgccgggacacggtatgggtaacc

SEQ ID NO: 664481 - DNA, 75 bp, synthetic construct
  source 1..75: mol_type = other DNA
attgcactgattgtcggttttatcggtctgcgttacggaagtgactcccctgaagcttatggtcttggcaaagcc

SEQ ID NO: 664482 - DNA, 75 bp, synthetic construct
  source 1..75: mol_type = other DNA
tgtggccatgcacaccttcaactggcgtaatcatggcccttcggggccattgtctctctgtggagaagtccatga

SEQ ID NO: 664483 - DNA, 75 bp, synthetic construct
  source 1..75: mol_type = other DNA
tcttactttatttctgtatttaaagacttctatggcatgacgccactccattatgttagccaacacagagaacgt

SEQ ID NO: 664484 - DNA, 75 bp, synthetic construct
  source 1..75: mol_type = other DNA
gctggcgctgatgggcgaggattatcaggacattttccgccagcaggtcagggaatctgctgagcggcaaaaagc

SEQ ID NO: 664485 - DNA, 75 bp, synthetic construct
  source 1..75: mol_type = other DNA
acgcatggacacggtatggggaaccgttttctgcgggccggtgtggaggtcgatcgatatggccgtgccgtcgcg

SEQ ID NO: 664486 - DNA, 75 bp, synthetic construct
  source 1..75: mol_type = other DNA
ggaggcgcaaaagtgccacacctgatgccgggtgattcactgaacctgcagacggctcaggacacggataacggc

SEQ ID NO: 664487 - DNA, 75 bp, synthetic construct
  source 1..75: mol_type = other DNA
gtttatcaaattattgaaagcgatatccacaaagactggaatcttagtatggtagccggttgtttatgtcttagc

SEQ ID NO: 664488 - DNA, 75 bp, synthetic construct
  source 1..75: mol_type = other DNA
gactcgaacccgctgaattcgtttattcagagttacgtgacgtactacaacggcgcaaacattaaattaggcggc

SEQ ID NO: 664489 - DNA, 75 bp, synthetic construct
  source 1..75: mol_type = other DNA
atttgctggcgctgatcgcgacgctccagcgggcgctggggataaggacgagaaggtctctgagcgtgcgttact

SEQ ID NO: 664490 - DNA, 75 bp, synthetic construct
  source 1..75: mol_type = other DNA
tcgctggcgaaatgctacatcaaataatgatggaagcgcgtatggcagtgcgcccgcgtgaaacgctgtatgaat

SEQ ID NO: 664491 - DNA, 75 bp, synthetic construct
  source 1..75: mol_type = other DNA
agcagaaaaatgttctgctttatcttcggatccgaagatggctgatgagaggataacaccatcttcagacactaa

SEQ ID NO: 664492 - DNA, 75 bp, synthetic construct
  source 1..75: mol_type = other DNA
gaactgttgctggaagactacaaagcctccctgaaatatctcagcgaccacccgaaactgcagggtattgcccag

SEQ ID NO: 664493 - DNA, 75 bp, synthetic construct
  source 1..75: mol_type = other DNA
ttggtgtttcgccagataaagtccatgccactgcgattaagagcgatgccagcaaaggcgaggcactggtgcttt

SEQ ID NO: 664494 - DNA, 75 bp, synthetic construct
  source 1..75: mol_type = other DNA
tgccgacaaagtgtggattttcgctcatttgctgatgccgcgtctggcacaggtaaaacagcagccagaagaaga

SEQ ID NO: 664495 - DNA, 75 bp, synthetic construct
  source 1..75: mol_type = other DNA
catttgctgatgccgcgtctggcacaggttaaacagcagccggaagaagaggcgctgatcctttttacctccggt

SEQ ID NO: 664496 - DNA, 75 bp, synthetic construct
  source 1..75: mol_type = other DNA
aaatggtcaggccgttggcaccaacaccattggctcttccgaggcctgtatgctcggcgggatggcgatgaaatg

SEQ ID NO: 664497 - DNA, 75 bp, synthetic construct
  source 1..75: mol_type = other DNA
acgaacatttggctgatgcggtggctgccatccataccggtatgcaaacagatcagttccgccaggtgcgcgatg

SEQ ID NO: 664498 - DNA, 75 bp, synthetic construct
  source 1..75: mol_type = other DNA
aaaccttgcgcccgccgtgaatgtggggcaaaacctggtcgtagatctttcgacgcaaatcttttgccataacga

SEQ ID NO: 664499 - DNA, 75 bp, synthetic construct
  source 1..75: mol_type = other DNA
gcttcctggcaccgttcgtcgccccggatatcgtctgggacttccgcctgccgcgtgtgaaatcgatcagtgctt

SEQ ID NO: 664500 - DNA, 75 bp, synthetic construct
  source 1..75: mol_type = other DNA
tgaagtcgctctgggatccgcggggaatctccggtactgaaactgcttccccgcagagcggcactccccaggcgg

SEQ ID NO: 664501 - DNA, 75 bp, synthetic construct
  source 1..75: mol_type = other DNA
tatcaatgacgaattatatcttgatggcaacgctcgtcagaacctggccactttctgccagacctgggacgacga

SEQ ID NO: 664502 - DNA, 75 bp, synthetic construct
  source 1..75: mol_type = other DNA
acagatgccattacttggcagcggcaaacctgactttgtcacgttgaaaagctgggtagacgaagcggaacaaca

SEQ ID NO: 664503 - DNA, 75 bp, synthetic construct
  source 1..75: mol_type = other DNA
tggggtactgaccggtttgccggacggttatggtcgcggacgtattatcggagactatcgccgcgtggcgttgta

SEQ ID NO: 664504 - DNA, 75 bp, synthetic construct
  source 1..75: mol_type = other DNA
cggcatcgttcctcgatatctacattgagcgcgactttaaagctggcgtactcaatgagcagcaggcacaggaac

SEQ ID NO: 664505 - DNA, 75 bp, synthetic construct
  source 1..75: mol_type = other DNA
tctggaagccaccatccgtctgcgtgaggagctggcagagcatcgtcatgcgctgttgcagattcaggaaatggc

SEQ ID NO: 664506 - DNA, 75 bp, synthetic construct
  source 1..75: mol_type = other DNA
ctaccattaccgcccatgatgctggttatattaatcagccgctggaaaaaattgttggtctgcaaaccgatgcgc

SEQ ID NO: 664507 - DNA, 75 bp, synthetic construct
  source 1..75: mol_type = other DNA
tgccgttcacctacgccaaagatgggatctcgtacaccttctcaatcgtccctgcggcgctgggcaaagaagatc

SEQ ID NO: 664508 - DNA, 75 bp, synthetic construct
  source 1..75: mol_type = other DNA
cgcccggcgcagaatgcgcaggaagcggtgcagtggctctacttcgcttacctggcggcagtgaaatcacagaac

SEQ ID NO: 664509 - DNA, 75 bp, synthetic construct
  source 1..75: mol_type = other DNA
aagcgctgccgcaggaactggtgttcaacgttgactacctggggggtcagattggtactttcgccatcaacttct

SEQ ID NO: 664510 - DNA, 75 bp, synthetic construct
  source 1..75: mol_type = other DNA
ggcgggatggcgatgaaatggcgttggcgcaagcgtatggaagctgcaggcaaaccaacggataaaccaaacctg

SEQ ID NO: 664511 - DNA, 75 bp, synthetic construct
  source 1..75: mol_type = other DNA
aataccatcggcgtggtgccgactttcggcgtgacctacaccggtaactatgagttcccgcagccgctgcacgat

SEQ ID NO: 664512 - DNA, 75 bp, synthetic construct
  source 1..75: mol_type = other DNA
cgacgccgccagcggtggcttcctggcaccgttcgtcgcccggatatcgtctgggacttccgcctgccgcgtgtg

SEQ ID NO: 664513 - DNA, 75 bp, synthetic construct
  source 1..75: mol_type = other DNA
gtatgagttcatctgtaccggtcgcccggacgaaggcattccggcggtttgcttcaaactcaaagatggtgaaga

SEQ ID NO: 664514 - DNA, 75 bp, synthetic construct
  source 1..75: mol_type = other DNA
tatgagttcccgcaaccgctgcacgatgcgctggataaattccaggccgacaccggtatcgacatcgacatgcac

SEQ ID NO: 664515 - DNA, 75 bp, synthetic construct
  source 1..75: mol_type = other DNA
ccaaactggggccgtatgagttcatctgtaccggtcgcccggacgaaggcatcccgacggtttgcttcaaactga

SEQ ID NO: 664516 - DNA, 75 bp, synthetic construct
  source 1..75: mol_type = other DNA
ctttcttgaggctcaggtacctgattctgatctggatgactggatggagacgagagtgtatccggttctcgcaga

SEQ ID NO: 664517 - DNA, 75 bp, synthetic construct
  source 1..75: mol_type = other DNA
ggcaggccattctgcatatcgaagtctttcttgaggctcaggtacctgattctgatctggatgactggatggaga

SEQ ID NO: 664518 - DNA, 75 bp, synthetic construct
  source 1..75: mol_type = other DNA
cgtcgcgcagcatgtggatttactggttggtgtagtgcctatcgttaacctggagtggattcaaaaactcatccg

SEQ ID NO: 664519 - DNA, 75 bp, synthetic construct
  source 1..75: mol_type = other DNA
atgctgtacgacttcgagacggtgcgcctgttcatccaccagccgcggcttaaccacgtttcagagtgggctctg

SEQ ID NO: 664520 - DNA, 75 bp, synthetic construct
  source 1..75: mol_type = other DNA
atggaggagcatttcttcatacctgatgacgaagcagacttcgattctgagatccccactgacgaaagaggtcct

SEQ ID NO: 664521 - DNA, 75 bp, synthetic construct
  source 1..75: mol_type = other DNA
cagcgtgattgtgatgttcaacatcgccgattgcgaaggcgtcgaaaccctgccgcttgaaaacttcacacccgg

SEQ ID NO: 664522 - DNA, 75 bp, synthetic construct
  source 1..75: mol_type = other DNA
gaccaccaccaccagcctcgagtttcgtaaaatattcgcgcagttaaatctgcatgcaaccgaggtggaaggcga

SEQ ID NO: 664523 - DNA, 75 bp, synthetic construct
  source 1..75: mol_type = other DNA
agtcctcgacggatgtttactaccgtatccaaagcggcattgatggcgatcgggcggggcgtcaggagggcggca

SEQ ID NO: 664524 - DNA, 75 bp, synthetic construct
  source 1..75: mol_type = other DNA
agtcctcgacggatgtttactactgtatccaaagcggcattgatggcaatcgggcagggcgtcaggaggtacgaa

SEQ ID NO: 664525 - DNA, 75 bp, synthetic construct
  source 1..75: mol_type = other DNA
ctacttcggccccgaagcgaacgactttggcctgctggaacaaaccttcattgaatacggtcagagcggcaaagg

SEQ ID NO: 664526 - DNA, 75 bp, synthetic construct
  source 1..75: mol_type = other DNA
gaccaccaccaccagcctcgggtttcgtaaaatattcgcgcagttaaatctgcatgcagccgaggtggaaggcga

SEQ ID NO: 664527 - DNA, 75 bp, synthetic construct
  source 1..75: mol_type = other DNA
gaccaccaccaccagcctcgcgtttcgtaaaatattcgcgcagttaaatctgcatgcacccgaggtggaaggcga

SEQ ID NO: 664528 - DNA, 75 bp, synthetic construct
  source 1..75: mol_type = other DNA
cagtgcgatccttgttctcaatattgctgaatgcgaaggcattgagacactaccgctggaaaacttcatacctgg

SEQ ID NO: 664529 - DNA, 75 bp, synthetic construct
  source 1..75: mol_type = other DNA
gacatcgcaatcggtcatagtgactttcctgagtgtttcggtcttattgctgacgccatcgctgaatttgttgaa

SEQ ID NO: 664530 - DNA, 75 bp, synthetic construct
  source 1..75: mol_type = other DNA
tccacccataacactgtttttggttttaactgttccgcgtgcgctgagccgcattcaccgcatcacaaaattcac

SEQ ID NO: 664531 - DNA, 63 bp, synthetic construct
  source 1..63: mol_type = other DNA
atgcaatatgcgaaacctgtcactctgaacgttgaagagtgcgaccgtctctcctttctgcct

SEQ ID NO: 664532 - DNA, 75 bp, synthetic construct
  source 1..75: mol_type = other DNA
ttccggcaggtcaatttgtggcggtggtgggccgcagcggcggtggcaaaagtactctgctgcgcctgctggcag

SEQ ID NO: 664533 - DNA, 75 bp, synthetic construct
  source 1..75: mol_type = other DNA
ggctgcggtaggactggagaatcgcgcgggggaatggcctgccgcactttctggcgggcagaaacaacgtgtggc

SEQ ID NO: 664534 - DNA, 75 bp, synthetic construct
  source 1..75: mol_type = other DNA
tgtagcatggactggtcccggtagccggtactcgctgctgttcgaattgttcgtgctctcatggctaaaaatcaa

SEQ ID NO: 664535 - DNA, 75 bp, synthetic construct
  source 1..75: mol_type = other DNA
tggaatctggacgaccaagccgatttacgaaattgattataacgatgcttatcgctttgggggtgatctatgggc

SEQ ID NO: 664536 - DNA, 75 bp, synthetic construct
  source 1..75: mol_type = other DNA
cgctcacaagttaggaaaccgcaattattattccgtagttcctcattattccggttatggccttattaccgaaga

SEQ ID NO: 664537 - DNA, 75 bp, synthetic construct
  source 1..75: mol_type = other DNA
ctggctatggactcgttaccgaagatggaatctggacgaccaagccgatttacgaaattgattataacgatgctt

SEQ ID NO: 664538 - DNA, 75 bp, synthetic construct
  source 1..75: mol_type = other DNA
ttcgtgctgttcccaattttgggcgtgctgtttgcctggtggaaaccggtaaatgtcgacccgatgctctactcc

SEQ ID NO: 664539 - DNA, 75 bp, synthetic construct
  source 1..75: mol_type = other DNA
tctgaattacgcaaccgtcgcagccgaaacacgcaaggaggcacacagaatgaaagcaagcaaaccagatgttgt

SEQ ID NO: 664540 - DNA, 75 bp, synthetic construct
  source 1..75: mol_type = other DNA
ccggagaaaggacaagaacgcggttcaccgtatcctgttgtctgatatccgcgaatacctgctcgaacaggggca

SEQ ID NO: 664541 - DNA, 75 bp, synthetic construct
  source 1..75: mol_type = other DNA
ggtccgaactactcgattcacgttttggcgcaaagccgatttcgactatcgcagaatcaaaacgttttccgctgc

SEQ ID NO: 664542 - DNA, 75 bp, synthetic construct
  source 1..75: mol_type = other DNA
gttccgaactactcgattcacgttttggcgcaaagccgatttcgactatcgcagaatcaaaacgatttccgctgc

SEQ ID NO: 664543 - DNA, 75 bp, synthetic construct
  source 1..75: mol_type = other DNA
gatccgaactactcgattcacgttttggcgctaagccgatttcgactatcgcagaatcaaaacgctttccgctgc

SEQ ID NO: 664544 - DNA, 75 bp, synthetic construct
  source 1..75: mol_type = other DNA
atggaagaacaagcaaacaagattctcgtagaactactgcaaaaagccagcaatggaatagatgctgctgtttca

SEQ ID NO: 664545 - DNA, 75 bp, synthetic construct
  source 1..75: mol_type = other DNA
tgcacgaaatgcgtgatgatgtcgcattccagattatcaatgatgaattatatcttgatggcaacgctcgtcaga

SEQ ID NO: 664546 - DNA, 75 bp, synthetic construct
  source 1..75: mol_type = other DNA
ggtcgcccggacgaaggcatcccggcggtttgcttcaaactgaaagatggtgaagatccaggatacaccctgtac

SEQ ID NO: 664547 - DNA, 75 bp, synthetic construct
  source 1..75: mol_type = other DNA
acctggccactttctgccagacctgggacgacgagaatgtccataaattgatggatttctcaataaagaaaaact

SEQ ID NO: 664548 - DNA, 75 bp, synthetic construct
  source 1..75: mol_type = other DNA
acctggccactttctgccagacctgggacgacgagaatgtccataaattgatggatttatccataaagaaaaact

SEQ ID NO: 664549 - DNA, 75 bp, synthetic construct
  source 1..75: mol_type = other DNA
acctggccactttctgccagacctgggacgacgagaaagtccataaattgatggatttctctataaagaaaaact

SEQ ID NO: 664550 - DNA, 75 bp, synthetic construct
  source 1..75: mol_type = other DNA
gcacagtactatgaattcctgcgcctcggtcgtgaaggctatacaaaagtacagaacgcctcctagcgcacgttc

SEQ ID NO: 664551 - DNA, 75 bp, synthetic construct
  source 1..75: mol_type = other DNA
gcacagtactatgaattcctgcgcctcggtcgtgaaggctatacaaaagtacagaacgcttcccagcgcacgttc

SEQ ID NO: 664552 - DNA, 75 bp, synthetic construct
  source 1..75: mol_type = other DNA
acctggccactttctgccagacctgggacgacgagaacgtccataaattgatggatttatctataaagaaaaact

SEQ ID NO: 664553 - DNA, 75 bp, synthetic construct
  source 1..75: mol_type = other DNA
tcagctttatctccacgccgatccacactacagcggacgagttactgttcccgtgctgtgggacaaaaagaacca

SEQ ID NO: 664554 - DNA, 75 bp, synthetic construct
  source 1..75: mol_type = other DNA
cgacgcggacatttggtacgctgatgagcatggaaccggcactggccgccatttccgggatgattttcctcggtg

SEQ ID NO: 664555 - DNA, 75 bp, synthetic construct
  source 1..75: mol_type = other DNA
ctgatgacgcggaaatatgtcgaaaactggttgctgtgggtcatcattaacgtgatcagtgtggtgatcttcgca

SEQ ID NO: 664556 - DNA, 75 bp, synthetic construct
  source 1..75: mol_type = other DNA
atggatttatccattaacaaaactggatcgacaaagaagaatatccgcaatccgcagccatcgacctgcgttgcg

SEQ ID NO: 664557 - DNA, 75 bp, synthetic construct
  source 1..75: mol_type = other DNA
aaggcatcccggcggtttgcttcaaactgaaagatggtgaagatccgggatacaccctgtacgacctctctgaac

SEQ ID NO: 664558 - DNA, 75 bp, synthetic construct
  source 1..75: mol_type = other DNA
ggccgttggcaccaacaccattggttcttccgaggcctgtatgcttggcgggatggcgatgaaatggcgttggcg

SEQ ID NO: 664559 - DNA, 75 bp, synthetic construct
  source 1..75: mol_type = other DNA
gatggtgaagatccaggatacaccctgtacgacctctctgaacgtctgcgtctgcgcggctggcaggttccggcc

SEQ ID NO: 664560 - DNA, 75 bp, synthetic construct
  source 1..75: mol_type = other DNA
caccattgtcagcaacgaatcagcggaaatcatccgcatgttcaatactgcgtttgatgcgctgggcgcaaaagc

SEQ ID NO: 664561 - DNA, 75 bp, synthetic construct
  source 1..75: mol_type = other DNA
gatatctaccagatgccgggaattgccgaaacagtcaatttcgatcacatccgtaatcattacttccgcagtcat

SEQ ID NO: 664562 - DNA, 75 bp, synthetic construct
  source 1..75: mol_type = other DNA
ggtgcgttttgatccagtgtatgtgacccacttcaagtgtgataagcaccgcatcagcgattacctgaatctgta

SEQ ID NO: 664563 - DNA, 75 bp, synthetic construct
  source 1..75: mol_type = other DNA
catgcgcctgcgccgaaaaatggtcaggccgttggcaccaacaccattggttcttccgaggcctgtatgctcggc

SEQ ID NO: 664564 - DNA, 75 bp, synthetic construct
  source 1..75: mol_type = other DNA
gatatctaccagatgccggggattgccgaaactgtcaatttcgatcacatccgtaatcattacttccgcagccat

SEQ ID NO: 664565 - DNA, 75 bp, synthetic construct
  source 1..75: mol_type = other DNA
cgtttgatgcgctgggcgcaaaagccggagattattatccccctgcgctgcaaacgaaaattgacgaacttaacg

SEQ ID NO: 664566 - DNA, 75 bp, synthetic construct
  source 1..75: mol_type = other DNA
tcacgcaagtttcggtgggaaatttctttaaacaatccctgcccctactggcggctctactgttaatgctaatgc

SEQ ID NO: 664567 - DNA, 75 bp, synthetic construct
  source 1..75: mol_type = other DNA
ggatcgacaaagaagaatatccgcaatctgcagccatcgacctgcgttgcgtaaacatggttgccgatctgtggc

SEQ ID NO: 664568 - DNA, 75 bp, synthetic construct
  source 1..75: mol_type = other DNA
cttctcccgcccggcgggtcaggtaattgcacagtactatgaattcctgcgcctcggtcgtgaaggctataccaa

SEQ ID NO: 664569 - DNA, 75 bp, synthetic construct
  source 1..75: mol_type = other DNA
gaacgtctgcgtctgcgcggctggcaggttccggccttcactctcggcggtgaagccaccgacatcgtggtgatg

SEQ ID NO: 664570 - DNA, 75 bp, synthetic construct
  source 1..75: mol_type = other DNA
ttccggcaggtcagtttgtggcggtggtgggccgcagcggtggtggcaaaagtaccctgctgcgcctgctggccg

SEQ ID NO: 664571 - DNA, 75 bp, synthetic construct
  source 1..75: mol_type = other DNA
tgatgtttcaggatgcgcgtctgctaccgtggaaatcggtgattgataacgttgggctgggccttcaaggtcagt

SEQ ID NO: 664572 - DNA, 75 bp, synthetic construct
  source 1..75: mol_type = other DNA
caaactggggccgtatgagttcatctgtacgggtcgcccggacgaaggcatcccggcggtttgcttcaaactgaa

SEQ ID NO: 664573 - DNA, 75 bp, synthetic construct
  source 1..75: mol_type = other DNA
atatccacagtacggcaacaacgacgagcgtgtagacagtattgcttgtgacctggttgaacgctttatgaagaa

SEQ ID NO: 664574 - DNA, 75 bp, synthetic construct
  source 1..75: mol_type = other DNA
ccgcatggtgcgcttcctgcgtacaccggaatttgattcgttgttctccggcgatcccatctgggcgacggaagt

SEQ ID NO: 664575 - DNA, 75 bp, synthetic construct
  source 1..75: mol_type = other DNA
aatacggttttgacatctcccgtccggcgcagaatgcacaggaagcggtgcagtggctctacttcgcttacctgg

SEQ ID NO: 664576 - DNA, 75 bp, synthetic construct
  source 1..75: mol_type = other DNA
cgtacgctggtgaccaaaaactccttccgctatctgcatacgctacacacaatggggccagcgccggaaccgaac

SEQ ID NO: 664577 - DNA, 75 bp, synthetic construct
  source 1..75: mol_type = other DNA
cgtacgctggtgaccaaaaactctttccgttatctgcacaccctgcacactatggggccagcaccggaaccaaac

SEQ ID NO: 664578 - DNA, 75 bp, synthetic construct
  source 1..75: mol_type = other DNA
tctggctacgccgtgcgcttcaacgcactgacccgtgaacagcaacaggatgttatttcacgtacctttacccag

SEQ ID NO: 664579 - DNA, 75 bp, synthetic construct
  source 1..75: mol_type = other DNA
tgtgagcgaagcggtagcaatggctgaccgggtgttgttaattgaagagggaaaaattggtctggatttgacagt

SEQ ID NO: 664580 - DNA, 75 bp, synthetic construct
  source 1..75: mol_type = other DNA
tttcggcatcatcatctgggggattggcaacggcgggcaaccgaccggtattcataatctgtggagcaacggcgg

SEQ ID NO: 664581 - DNA, 75 bp, synthetic construct
  source 1..75: mol_type = other DNA
ccattatcatcatgattgtcgccggtttcggtatcattatctgggggattggcaacggcgggcaaccgacgggta

SEQ ID NO: 664582 - DNA, 75 bp, synthetic construct
  source 1..75: mol_type = other DNA
ctggacctactgctttgaaatccttattgtcgccattgccgatgtgaccgctttcggtatctatatgggcgtctg

SEQ ID NO: 664583 - DNA, 75 bp, synthetic construct
  source 1..75: mol_type = other DNA
agaacgcttcctaccaggttgctgcttatctggcggatgaaatcgccaaactggggccgtatgagttcatctgta

SEQ ID NO: 664584 - DNA, 75 bp, synthetic construct
  source 1..75: mol_type = other DNA
acagtactatgaattcctgcgcctcggtcgtgaaggctatacaaaagtacagaacgcttcctaccaggttgctgc

SEQ ID NO: 664585 - DNA, 75 bp, synthetic construct
  source 1..75: mol_type = other DNA
atggatttgtcgatcaataaaaactggatcgacaaagaagaatatccgcaatctgcagcaatcgatctgcgttgc

SEQ ID NO: 664586 - DNA, 75 bp, synthetic construct
  source 1..75: mol_type = other DNA
gttgttaattgaagagggaaaaattggtctggatttgacagtggatatcccccgtccgcgtcgattagggtcggt

SEQ ID NO: 664587 - DNA, 75 bp, synthetic construct
  source 1..75: mol_type = other DNA
gcagcggtggtggcaaaagtaccctgctgcgcctgctggccgggctggaaacgccaaccgcaggcgatgtgttgg

SEQ ID NO: 664588 - DNA, 75 bp, synthetic construct
  source 1..75: mol_type = other DNA
gggtcggtgcgattagcggagctggaagcggaagtgttgcaacgggtgatgcagcgagggcattctgaacaacct

SEQ ID NO: 664589 - DNA, 75 bp, synthetic construct
  source 1..75: mol_type = other DNA
atggaaagtaagaacaagctaaagcgtgggctaagtacccgccacatacgctttatggcactgggttcagcaatt

SEQ ID NO: 664590 - DNA, 75 bp, synthetic construct
  source 1..75: mol_type = other DNA
aacaccatcggcgtggtgccgactttcggcgtgacctataccggtaactatgagttcccgcagccgctgcacgat

SEQ ID NO: 664591 - DNA, 75 bp, synthetic construct
  source 1..75: mol_type = other DNA
ttaccgttttgctggtgacgcatgatgtgagcgaagcggtggcgatggctgaccgggtgctgttgattgaagagg

SEQ ID NO: 664592 - DNA, 75 bp, synthetic construct
  source 1..75: mol_type = other DNA
tatcgtcaggagcgactgccggaaggtatcaaagcgaatctgtatgatttaatgaacgccgatgtcttcgccagc

SEQ ID NO: 664593 - DNA, 75 bp, synthetic construct
  source 1..75: mol_type = other DNA
cagaatgccagaatctacatcgctacctatcccggtatgatgaaaatcatggaccatttcgatgtcggttatttc

SEQ ID NO: 664594 - DNA, 75 bp, synthetic construct
  source 1..75: mol_type = other DNA
ccggtgtgttccctgatatagagcagatcgcccgcctgcaaaagatagtcgaagagctgggtgttgtgaccgacg

SEQ ID NO: 664595 - DNA, 75 bp, synthetic construct
  source 1..75: mol_type = other DNA
gttatttaattacaaatcttatgcgtcaacacaaattagagagcttgtttctggctcttataatcttgctatata

SEQ ID NO: 664596 - DNA, 75 bp, synthetic construct
  source 1..75: mol_type = other DNA
gggttgactaacattatggccagactcagtgagtctctggctgatggtttttatgctaattctgactatatagcc

SEQ ID NO: 664597 - DNA, 75 bp, synthetic construct
  source 1..75: mol_type = other DNA
tggctggggcggcatggcgctgaacgacgtggcgatggatacccgcgttaaagcggtagctaccagcgtgatgta

SEQ ID NO: 664598 - DNA, 75 bp, synthetic construct
  source 1..75: mol_type = other DNA
agctctcgacccgtaaacctgccggaaatttcgcgccggacgcgacgcacgagagtgaaaagcccgcgccatcta

SEQ ID NO: 664599 - DNA, 75 bp, synthetic construct
  source 1..75: mol_type = other DNA
tattttatttgccagtttggccctgggcagtgctcgaaatcctcacgtacgacatgtacgctccggtttctccgc

SEQ ID NO: 664600 - DNA, 75 bp, synthetic construct
  source 1..75: mol_type = other DNA
atatttttcaacgaattttctcccgacggctgtggctggcggggttgccttgtctggcgttgctgggctgtgtgc

SEQ ID NO: 664601 - DNA, 75 bp, synthetic construct
  source 1..75: mol_type = other DNA
tatcgtcaggagcggttgccggaaggtattaaggctaatctttacgatttaatgaatgctgatgtctttaccagc

SEQ ID NO: 664602 - DNA, 75 bp, synthetic construct
  source 1..75: mol_type = other DNA
tttacataagcaataaatacccagatgtcgctttttatttgttgccatctcgtatgtgggaaatgttagctggtg

SEQ ID NO: 664603 - DNA, 75 bp, synthetic construct
  source 1..75: mol_type = other DNA
gctattaccacctttgaccggggaatgctatggcctggctatcttgcgttagtgccggtggtgggtgctatgttg

SEQ ID NO: 664604 - DNA, 75 bp, synthetic construct
  source 1..75: mol_type = other DNA
ttaatgaaggctggcgtgatattacagtggaagaactcaggttatcttcggaatatgtcgattcaagagggtttt

SEQ ID NO: 664605 - DNA, 75 bp, synthetic construct
  source 1..75: mol_type = other DNA
gattcggctatagcatgggtgttgctaccacgtacgcactattcagcagcatcgactgggatgacgacgatcatg

SEQ ID NO: 664606 - DNA, 75 bp, synthetic construct
  source 1..75: mol_type = other DNA
cgggaaagcctggcagcataacggcgataatatcaatatcaacgtcaataatttcaaccgtatcacgggcgagca

SEQ ID NO: 664607 - DNA, 75 bp, synthetic construct
  source 1..75: mol_type = other DNA
ttttcaaatgtatgtgctgattttgaagctgaactggttgaaatggatggcgaaccagatcacgtccatttgtta

SEQ ID NO: 664608 - DNA, 75 bp, synthetic construct
  source 1..75: mol_type = other DNA
aagttactaacccggatgctgtcatcatcaacgcttttcaggtcgtgcgtcaggagaacagtggtttcccacctg

SEQ ID NO: 664609 - DNA, 75 bp, synthetic construct
  source 1..75: mol_type = other DNA
tccgcctcgcctgagcagcgccaggcggttcgcgagaaaatgcagactaacccgcagatccagcagcgaagagag

SEQ ID NO: 664610 - DNA, 75 bp, synthetic construct
  source 1..75: mol_type = other DNA
caggcagtccgcgagaaaatgcagactaacccgcagatccagcagcgaagagaggcagcgcgtgagcgtattcag

SEQ ID NO: 664611 - DNA, 75 bp, synthetic construct
  source 1..75: mol_type = other DNA
cggaccgttcgcctgggggaaagatgcccacgatgcggtgcataacgcggtggtgatggaagaagtggcgaaaat

SEQ ID NO: 664612 - DNA, 75 bp, synthetic construct
  source 1..75: mol_type = other DNA
tggatttcaataaaaacaaaggagagatggacaaattatttctttcaagagaaattgtgtccagcgcagatgaat

SEQ ID NO: 664613 - DNA, 75 bp, synthetic construct
  source 1..75: mol_type = other DNA
aggtatcttctgaagtggcgtaataaaaatgttgattatggcaaacatactgaaggtacaaccggagatgatagt

SEQ ID NO: 664614 - DNA, 75 bp, synthetic construct
  source 1..75: mol_type = other DNA
tggttttatgccgatgcattgcttgagaatgcggctaagcgtgtggggctggattttgaagtcggtagcaatgct

SEQ ID NO: 664615 - DNA, 75 bp, synthetic construct
  source 1..75: mol_type = other DNA
ccacaactgaatcacatcgacagcttcctgatgaataaacacttcatgcgtaagcacggtcctaacgcttattac

SEQ ID NO: 664616 - DNA, 75 bp, synthetic construct
  source 1..75: mol_type = other DNA
ttgaagccaacatggagctgccgcgctacgggctggtgacctttacctggggcaacgtcagcgctatcgaccgcg

SEQ ID NO: 664617 - DNA, 75 bp, synthetic construct
  source 1..75: mol_type = other DNA
cctttaaacaagggattttgctcgccgacgccaaaattacgccgtatgagcgccgccagctggtcgcgcgcattg

SEQ ID NO: 664618 - DNA, 75 bp, synthetic construct
  source 1..75: mol_type = other DNA
ggagatggatgcaggcacctggcataccgtattgtcactggatgaaggcggcgttatttttgaggtaaaacacgg

SEQ ID NO: 664619 - DNA, 75 bp, synthetic construct
  source 1..75: mol_type = other DNA
tacgcaagcaaagcgcacaagccgcaaattccccccgcttacgtgcccatcataatttccaccctgaattgagcg

SEQ ID NO: 664620 - DNA, 75 bp, synthetic construct
  source 1..75: mol_type = other DNA
cattgcggtactcctgacacaacgctttcatattgcgctcctactggcgactggcatatcggtaatagtgtcaat

SEQ ID NO: 664621 - DNA, 75 bp, synthetic construct
  source 1..75: mol_type = other DNA
gattaaacccgcagcgcgtctgaccgctaatggcattgttggattgctggcaactcgcggaacagttaaacgttc

SEQ ID NO: 664622 - DNA, 75 bp, synthetic construct
  source 1..75: mol_type = other DNA
tccctctactacaagaagaactgttacaagtgctgccagagggaacccggctggtggattctggcgcagcgattg

SEQ ID NO: 664623 - DNA, 75 bp, synthetic construct
  source 1..75: mol_type = other DNA
aacagccgaatcaagcaagatacagtgatggggattgttttttctggcatgtttgccgcaggtctgatcttgtat

SEQ ID NO: 664624 - DNA, 75 bp, synthetic construct
  source 1..75: mol_type = other DNA
atggctaccaaactgcaggacgggaatataccttgtctggcagctacaccttctgaaccacgtcccaccgtgctg

SEQ ID NO: 664625 - DNA, 75 bp, synthetic construct
  source 1..75: mol_type = other DNA
tgacgccagaagctgaacaattattgcctgttttacagcgctatggcttcaaaacgctcgaaaaactggcaatcc

SEQ ID NO: 664626 - DNA, 75 bp, synthetic construct
  source 1..75: mol_type = other DNA
attcgttttgaacatattggtgatggcaccctggaagcgacaatgccggtagactcgcggacaaagcagcctttc

SEQ ID NO: 664627 - DNA, 75 bp, synthetic construct
  source 1..75: mol_type = other DNA
cgatgcatccagaaagaaggttgcttacttccgtaagttcaatgctctctttgggtggatggaacgcaacgtagg

SEQ ID NO: 664628 - DNA, 75 bp, synthetic construct
  source 1..75: mol_type = other DNA
atgggacttgatatctacattgagacgcagccaaaaaacgatctgaataatgaggcatccagaaagaaggttgct

SEQ ID NO: 664629 - DNA, 75 bp, synthetic construct
  source 1..75: mol_type = other DNA
cgcagcctaaaaacgatctgaataacgaggcatccagaaagcaggttgcttacttccgtaagttcaatgcgctcg

SEQ ID NO: 664630 - DNA, 75 bp, synthetic construct
  source 1..75: mol_type = other DNA
gttggctgaagcgaagctgcatggcgaagatgtttctctggatgcactaaagcgtatcttgcgcccgtggttaag

SEQ ID NO: 664631 - DNA, 75 bp, synthetic construct
  source 1..75: mol_type = other DNA
gactttgcccgtcgtgaagacgtggtcgttgcaactaaagtgttccatcgcgttggtgatttgccggaaggatta

SEQ ID NO: 664632 - DNA, 75 bp, synthetic construct
  source 1..75: mol_type = other DNA
ttccatggagtccgctggcgcggggccgtctgacgcgtccttggggagaaaccaccgcacggctggtgtcggatg

SEQ ID NO: 664633 - DNA, 75 bp, synthetic construct
  source 1..75: mol_type = other DNA
catcgatgcatgcctcccagtttgctcaagcgctggagctgcaaaaacagcacggctgggcacaatttgtcagta

SEQ ID NO: 664634 - DNA, 75 bp, synthetic construct
  source 1..75: mol_type = other DNA
tgccccgacggctgtggctggcagggctgccatgtctggcattgctgggttgcgtgcagaatcacaataagccag

SEQ ID NO: 664635 - DNA, 75 bp, synthetic construct
  source 1..75: mol_type = other DNA
acgctaatgaagttactatccctacactcatcgtgaccggtgaaaaagcccattcacgctattttgctgaagatg

SEQ ID NO: 664636 - DNA, 75 bp, synthetic construct
  source 1..75: mol_type = other DNA
atcaccttgaagccggaacagattgctgaactggaaacgccgtataaaccgcatccggtcgtaggatttaaatag

SEQ ID NO: 664637 - DNA, 75 bp, synthetic construct
  source 1..75: mol_type = other DNA
catggattatgtcgatatcctgcaaattcatcgctgggattacaacacaccgatcgaagagacgctggaagctct

SEQ ID NO: 664638 - DNA, 75 bp, synthetic construct
  source 1..75: mol_type = other DNA
ggctggcgggcgggcgtttatgacaatgcacatcctagttcctgggcgatggactgttcaatatgggcacgactg

SEQ ID NO: 664639 - DNA, 75 bp, synthetic construct
  source 1..75: mol_type = other DNA
cgctgaatatgttgcggctgagggtgagattaaagagattaaagcggttgctaaggaattaggtgttaaaggttt

SEQ ID NO: 664640 - DNA, 75 bp, synthetic construct
  source 1..75: mol_type = other DNA
aaaccgggcattgccgcaccgattatcggaacttcgcgggaagaacagcttgatgagctgctgaacgcggtggat

SEQ ID NO: 664641 - DNA, 75 bp, synthetic construct
  source 1..75: mol_type = other DNA
tgggcgcagtttgtcagtatgcaggatcactacaatctgatttatcgagaagaagagcgcgagatgctgccactg

SEQ ID NO: 664642 - DNA, 75 bp, synthetic construct
  source 1..75: mol_type = other DNA
tcccgcgcacaaattttgcgctctattgacgacagcctgcgtcgtctcggtatggattatgtcgatatcctgcaa

SEQ ID NO: 664643 - DNA, 75 bp, synthetic construct
  source 1..75: mol_type = other DNA
aagtgcgaccgtatcaacgatggagatagttgcaacaaacttactaatactaagcaatttcctcaaaagcaggaa

SEQ ID NO: 664644 - DNA, 75 bp, synthetic construct
  source 1..75: mol_type = other DNA
aaggcagagattcgataagcaaaagattacgaatgtaagggtgataaaaatggaacaagttgctaaaagaacttt

SEQ ID NO: 664645 - DNA, 75 bp, synthetic construct
  source 1..75: mol_type = other DNA
gctatctcatggggtggtcaaaagattcaaagatgtcggaaaattataacttcaaacacatatcaatgaaagaaa

SEQ ID NO: 664646 - DNA, 75 bp, synthetic construct
  source 1..75: mol_type = other DNA
atgaacattctgttagcgtttaaagccgaaccggatgccggaatgctggcggaaaaagagtggcagggggcggct

SEQ ID NO: 664647 - DNA, 75 bp, synthetic construct
  source 1..75: mol_type = other DNA
ttatcaccctcgaacagcgtactgaacatgggctgcgctgttgccgggttcgcttgcctgcggtgattgccgtgc

SEQ ID NO: 664648 - DNA, 75 bp, synthetic construct
  source 1..75: mol_type = other DNA
agcgatgcagtgtctgcaactggcaagagcagagcaacgacgcggagcgacgctgattgatgggcaaacggtagc

SEQ ID NO: 664649 - DNA, 75 bp, synthetic construct
  source 1..75: mol_type = other DNA
aaaaccgcagccggtctctttgacagtgaccttgcctatcagcgagttctataccaaagagtgccagaaaaatga

SEQ ID NO: 664650 - DNA, 75 bp, synthetic construct
  source 1..75: mol_type = other DNA
tgatttgctgcagtatcgaaacgtaaaccgcgtatatattgtcggtggcggggcagcactcattgctgatgctgt

SEQ ID NO: 664651 - DNA, 75 bp, synthetic construct
  source 1..75: mol_type = other DNA
tcgtaaggcatggaaccaccttggcgaaaaggtggtccttatggatgaacctcagacagcgctggtccaggctat

SEQ ID NO: 664652 - DNA, 75 bp, synthetic construct
  source 1..75: mol_type = other DNA
atagtcgcaacaaatctacttatactaagcaattttctgaaaagcaggaatataaatatcattaataggattgaa

SEQ ID NO: 664653 - DNA, 75 bp, synthetic construct
  source 1..75: mol_type = other DNA
gattcgcaccggccttgtcgtcgaaaccaaccttaaagccggtcgctgccgtgtgcagaccggcggcatgtgcac

SEQ ID NO: 664654 - DNA, 75 bp, synthetic construct
  source 1..75: mol_type = other DNA
tcgccagtttgggtgaacgtgtagttgatgaccttgccggattccgccatgttaaccgggtttacattattggcg

SEQ ID NO: 664655 - DNA, 75 bp, synthetic construct
  source 1..75: mol_type = other DNA
agtcctcggcggatgtttactaccgtatccaaagcggcattgatggcgatcgggcagggcgtcaggagggcggca

SEQ ID NO: 664656 - DNA, 75 bp, synthetic construct
  source 1..75: mol_type = other DNA
ccgtctgttggggagcgggaaagatttacccgccagtgagcgcgaattgcgtcagcaacgggtgattagcgccgc

SEQ ID NO: 664657 - DNA, 75 bp, synthetic construct
  source 1..75: mol_type = other DNA
aaatccagcagtggcgcgcgctgggcacacgcttcattcaggtggtgccagaagtgcaaattcatatcgcgcagg

SEQ ID NO: 664658 - DNA, 75 bp, synthetic construct
  source 1..75: mol_type = other DNA
aatccagcagtggcgcgcgttgggcacacgcttcattcaggtggtgccggaagtgcaaattcataccgcacagga

SEQ ID NO: 664659 - DNA, 75 bp, synthetic construct
  source 1..75: mol_type = other DNA
agtcctcgacggatgtttactaccgtatccaaagcggcattgatggcgatcgggcagggcgtcagaagggcggca

SEQ ID NO: 664660 - DNA, 75 bp, synthetic construct
  source 1..75: mol_type = other DNA
cctcgacggatgtttactaccgtatccaaagcggcattgatggcgatcgggcagggcgtcaggagggcagcatga

SEQ ID NO: 664661 - DNA, 75 bp, synthetic construct
  source 1..75: mol_type = other DNA
actggcgtagcgaagggcgttattaccgcccaatcccggagtggattgccggatttggctcgttaagcgccagaa

SEQ ID NO: 664662 - DNA, 75 bp, synthetic construct
  source 1..75: mol_type = other DNA
cggcgggggcttctttggtgcaaatttattctggttttatttttaaaggtccgccactgattaaagaaatcgtta

SEQ ID NO: 664663 - DNA, 75 bp, synthetic construct
  source 1..75: mol_type = other DNA
atgtctgtcggatggttcagcaaggctctggagagtgttgacgaagttcgcattatcactgatggacggattaat

SEQ ID NO: 664664 - DNA, 75 bp, synthetic construct
  source 1..75: mol_type = other DNA
tatcactgatggacggattaattttatcgaaccatcgacagggctggagaagaagggaaacagtaaaggctccat

SEQ ID NO: 664665 - DNA, 75 bp, synthetic construct
  source 1..75: mol_type = other DNA
taaaacgctacttcctcgaaatgcgcttcaagccgatgccgcaatattacggcggtgcgctggtgcgtgagggcg

SEQ ID NO: 664666 - DNA, 75 bp, synthetic construct
  source 1..75: mol_type = other DNA
tcggcactgtaacgccgcgtccacaacctggaaatgacaagccgcgtcttttccgcctggttgatgccgaaggtc

SEQ ID NO: 664667 - DNA, 75 bp, synthetic construct
  source 1..75: mol_type = other DNA
tgatcaaccgtatgggctttaataatcttggcgttgataacctcgtagagaacgtaaaaaaagcccattatgacg

SEQ ID NO: 664668 - DNA, 75 bp, synthetic construct
  source 1..75: mol_type = other DNA
gatacaaatgtgttggcagttcaccacgcattactgaacagtggcattgaaccccaggagatcgatctcaccgtt

SEQ ID NO: 664669 - DNA, 75 bp, synthetic construct
  source 1..75: mol_type = other DNA
atctcgcgtggagtgaagatcctgcacaggcgcggcataaaccgcgtttagtcgtgtttcacgggctcgaaggca

SEQ ID NO: 664670 - DNA, 75 bp, synthetic construct
  source 1..75: mol_type = other DNA
atggcgcaagtaacgacgaccgatcttaacgacgccagcagtagtgctgaattcacccctatgcgtggcttcagt

SEQ ID NO: 664671 - DNA, 75 bp, synthetic construct
  source 1..75: mol_type = other DNA
cgcgtctgtttcgtcgccaggtgaaattcaccccgcactggcagcgactggagttgcccgacggcgattttgtcg

SEQ ID NO: 664672 - DNA, 75 bp, synthetic construct
  source 1..75: mol_type = other DNA
aatatttcctcgactccatccgcgcctggctgatgttgttagggatcccttttcatatttctttaatctattcaa

SEQ ID NO: 664673 - DNA, 75 bp, synthetic construct
  source 1..75: mol_type = other DNA
atcccgttactgaagtttttgttctctggtaaaccggttgttaagcgtgagaacgataaagcaccagcccgttaa

SEQ ID NO: 664674 - DNA, 75 bp, synthetic construct
  source 1..75: mol_type = other DNA
ggaaagttggcctgggctgtcattgtatgacaaatataatacgttggcctgggaattaatatcacatctgtggtt

SEQ ID NO: 664675 - DNA, 75 bp, synthetic construct
  source 1..75: mol_type = other DNA
tttcacctatttggcaaccatttatttgcaaatgcgaaagcgcttatttttgcgggagtttttttttctggtaaa

SEQ ID NO: 664676 - DNA, 75 bp, synthetic construct
  source 1..75: mol_type = other DNA
tatcgacacttttcaggtcgtacgtcaggatgtcagcggcttctcgccggtgttgacggttaatatgcacgctgc

SEQ ID NO: 664677 - DNA, 75 bp, synthetic construct
  source 1..75: mol_type = other DNA
ccgtaagctggcgctggaagatgaaatctggctgcgggtatttaccgtcgcgaagcatctccagagagcgggtta

SEQ ID NO: 664678 - DNA, 75 bp, synthetic construct
  source 1..75: mol_type = other DNA
caccgccagaattcacggctacgccgacgctatcgactattatcgtcagtgtagcgccatgccgatgctcaatcg

SEQ ID NO: 664679 - DNA, 75 bp, synthetic construct
  source 1..75: mol_type = other DNA
cgtggttctggccttcgcgttcatggcgatgttcaaatataaacacgttcgtgtcccgacaggtacacagacggt

SEQ ID NO: 664680 - DNA, 75 bp, synthetic construct
  source 1..75: mol_type = other DNA
taatgaacaaattctttctgatggagggcattttgaaagaagtcccatgtatcataatattatccttaatgacat

SEQ ID NO: 664681 - DNA, 75 bp, synthetic construct
  source 1..75: mol_type = other DNA
aaacatgaacaataagcaggtacgtgaatcaatgcgtgccagaatggaagaattggctgcaaaacgacaaggatg

SEQ ID NO: 664682 - DNA, 75 bp, synthetic construct
  source 1..75: mol_type = other DNA
ccattaccgccatcgtgccggtggtgctagtgaaagccgaaacccgcattaccctcgatactcccgaggtggtgt

SEQ ID NO: 664683 - DNA, 75 bp, synthetic construct
  source 1..75: mol_type = other DNA
gccgtgacgtggtgggcgccgacagtgggcgaacaggtttatattttgtgcccctgcggtgagatggagacggca

SEQ ID NO: 664684 - DNA, 75 bp, synthetic construct
  source 1..75: mol_type = other DNA
acggccagcgtgacggcttctgattctgttaccgccacggtgccggtggtcatggtgaaagcatcaacccgcgtc

SEQ ID NO: 664685 - DNA, 75 bp, synthetic construct
  source 1..75: mol_type = other DNA
ttgctgctggtatcgtccggcggcatccttcccgtcatgaacactctcgcaaatattcaggaactcgcgcgcgca

SEQ ID NO: 664686 - DNA, 75 bp, synthetic construct
  source 1..75: mol_type = other DNA
ctgttactgccagggtgcctgtggtcatggtgaaagcatcaacccgcgtcaccctggacacaccggaggtggtct

SEQ ID NO: 664687 - DNA, 75 bp, synthetic construct
  source 1..75: mol_type = other DNA
cgtgccgggcgttcgcgcacatggtgggcaccttccgtgggggaacaggtgctgattctggccgtgggtggtgaa

SEQ ID NO: 664688 - DNA, 75 bp, synthetic construct
  source 1..75: mol_type = other DNA
caagtggacgatatggtggtggttgacatgagtggcaatgtggtggaagggcagtatcgtccatcgtcagacact

SEQ ID NO: 664689 - DNA, 75 bp, synthetic construct
  source 1..75: mol_type = other DNA
gttacccgtcgcttggcggcattgtccatacccactccactcatgccaccgcatgggcgcaggcggggctggcga

SEQ ID NO: 664690 - DNA, 75 bp, synthetic construct
  source 1..75: mol_type = other DNA
cccattgttgtcgatctgcgtcagcagagcttcaccattgaagggctggctgttggagttattcgcaacggcgat

SEQ ID NO: 664691 - DNA, 75 bp, synthetic construct
  source 1..75: mol_type = other DNA
acggccagcgtgacggcttctgattctgttactgccacggtgccggtggtcacggtgaaagcatcaacccgcgtc

SEQ ID NO: 664692 - DNA, 75 bp, synthetic construct
  source 1..75: mol_type = other DNA
ggatttattccggtgataaccccgcgccgtctgcgtcggcggatgccctgcatatccgtttccctgacggggcgg

SEQ ID NO: 664693 - DNA, 75 bp, synthetic construct
  source 1..75: mol_type = other DNA
atgaacactctcgcaaatattcaggaactcgcgcgcgcactgcgcaatatgattcgcaccggcgttatcgtcgaa

SEQ ID NO: 664694 - DNA, 75 bp, synthetic construct
  source 1..75: mol_type = other DNA
ttcagcatccgttattgtcgcccgacattgatagcggcttactccatgcggcaaatttatttattaaacacgctg

SEQ ID NO: 664695 - DNA, 75 bp, synthetic construct
  source 1..75: mol_type = other DNA
acgacggcattaggtatgggatttgataaacctgatttaggtttcgtcattcattatcagatgccggggtctatt

SEQ ID NO: 664696 - DNA, 75 bp, synthetic construct
  source 1..75: mol_type = other DNA
tgatgaacggcggtcaggtaattcttgccgatgaaccaaccggcgcactggacagccattctggcgaagaggtga

SEQ ID NO: 664697 - DNA, 75 bp, synthetic construct
  source 1..75: mol_type = other DNA
gaaatactttctaatgagccacagcgctatcctggggctagagttactgatgagatttttcttttcctattccgc

SEQ ID NO: 664698 - DNA, 75 bp, synthetic construct
  source 1..75: mol_type = other DNA
tcaacccgcaataaaagcacttacaccattacttccaacggatatccgcctgcatattttgcccgacgtttatcc

SEQ ID NO: 664699 - DNA, 75 bp, synthetic construct
  source 1..75: mol_type = other DNA
cctgcttcgcggtgttcactatgcgatgaaagccaccggggccagtagcggaatcatcgcgctgaaagagaaata

SEQ ID NO: 664700 - DNA, 75 bp, synthetic construct
  source 1..75: mol_type = other DNA
ctattaccgggcaggataaattcaaccaggtcatggcagggatcgatgctgcatttgaggccggttttgagaagg

SEQ ID NO: 664701 - DNA, 75 bp, synthetic construct
  source 1..75: mol_type = other DNA
ccgtatgaaaaagacttctgcgccacttgcaaccgcctgcgcgtttcctccattggtaaactccatctctgcctg

SEQ ID NO: 664702 - DNA, 75 bp, synthetic construct
  source 1..75: mol_type = other DNA
tcaaagtcaataccgtgctgatgcgtgatgttaatcatcaccagctcgacacctttctgaactggatccagcatc

SEQ ID NO: 664703 - DNA, 75 bp, synthetic construct
  source 1..75: mol_type = other DNA
tggaagaccgtacagagtattatccggcacagctttcgggtggtcagcaacagcgcgtcagcatcgcgcgggcat

SEQ ID NO: 664704 - DNA, 75 bp, synthetic construct
  source 1..75: mol_type = other DNA
gctgcagaatgtgaaccaatgctaaaagttgaccagcagttaatggctctgcaagccaggcgtctgattcgcgga

SEQ ID NO: 664705 - DNA, 75 bp, synthetic construct
  source 1..75: mol_type = other DNA
ttacgtcaacgcagcgacggtcccgcgcaagtcttttgccatccggattacgccggagagattggccttatcatg

SEQ ID NO: 664706 - DNA, 75 bp, synthetic construct
  source 1..75: mol_type = other DNA
caacccgcagcggcgatgaagtgattcttgaggcgcaacattttgcttttcctgaggtgacgttgccgccgccag

SEQ ID NO: 664707 - DNA, 75 bp, synthetic construct
  source 1..75: mol_type = other DNA
aagccattattaacgcgtcaacgtgggaatggctgcgcccgggaaatattgatattcagtcttttccacgtgagg

SEQ ID NO: 664708 - DNA, 75 bp, synthetic construct
  source 1..75: mol_type = other DNA
gatgtggttatcacttctgcaaatgatttaccgtcacaggagctgattaacgcggtgatggcccatatcaatgat

SEQ ID NO: 664709 - DNA, 75 bp, synthetic construct
  source 1..75: mol_type = other DNA
gtccgcccggtcacagcgaaggacacgatggtgctggccccgacgaaaaaagccgttgatttcgttgtccgggta

SEQ ID NO: 664710 - DNA, 75 bp, synthetic construct
  source 1..75: mol_type = other DNA
ggtttcgcgctctttctcagcattaattcccggttttattattctttccgtgatggggattattgcctgggcgtt

SEQ ID NO: 664711 - DNA, 75 bp, synthetic construct
  source 1..75: mol_type = other DNA
caaaatttattcacacatggttacgctttggggaaattatgaggggatctctcagggccatgtttgtattaatta

SEQ ID NO: 664712 - DNA, 75 bp, synthetic construct
  source 1..75: mol_type = other DNA
atttatctgccctttgttgtggtggctaacaaagcacaaaacgcgattgataaagaagagagcgaagaagatatc

SEQ ID NO: 664713 - DNA, 75 bp, synthetic construct
  source 1..75: mol_type = other DNA
gaaaaagatgatattgaatcacgtattgaaaaactggagtgctatatcgctgaattgaaaaaaagcaccccaaca

SEQ ID NO: 664714 - DNA, 75 bp, synthetic construct
  source 1..75: mol_type = other DNA
cgcattgtcagaaaaagaggcggcttacctgcggcctgagtacgtcattacggttaacagtgccggagaggaaga

SEQ ID NO: 664715 - DNA, 75 bp, synthetic construct
  source 1..75: mol_type = other DNA
aaaaacgccgcgatgagcagtttgctgcgtttgacgattattgtcggaaagtgatgagcagaaatctcgcagagt

SEQ ID NO: 664716 - DNA, 75 bp, synthetic construct
  source 1..75: mol_type = other DNA
catcagttttttacgttgctcaagcgccacaacctgacgcgccaacaggcgttcaatctggtggcagatgatttg

SEQ ID NO: 664717 - DNA, 75 bp, synthetic construct
  source 1..75: mol_type = other DNA
ttataaagattatgaaacagaaaatgacactactggggggattttcccggataatggcaacggtgggacctctca

SEQ ID NO: 664718 - DNA, 75 bp, synthetic construct
  source 1..75: mol_type = other DNA
acagttaaaagtgccggagaggaaggcaataaacgttattttattgcgtctgcaccggataaagaccaggaatgg

SEQ ID NO: 664719 - DNA, 75 bp, synthetic construct
  source 1..75: mol_type = other DNA
tgggcgcggtgttagggctgagcagtatgacggtcagtattttgtttattctgcctattccggcggcattttttg

SEQ ID NO: 664720 - DNA, 75 bp, synthetic construct
  source 1..75: mol_type = other DNA
aggcttggaagtgcatccgttggctggcgggcatctgccatcgatgagtggctgacgttacatacggcaccagcc

SEQ ID NO: 664721 - DNA, 75 bp, synthetic construct
  source 1..75: mol_type = other DNA
tgcctcgacagccgccattccacggcggaaaaaccggtatttaaccgcaccgttgggctgcgtgatacctgggcg

SEQ ID NO: 664722 - DNA, 75 bp, synthetic construct
  source 1..75: mol_type = other DNA
aaaatcgacatggcttcgccgtttatcgtgatgcgcgatcctgtgctgtatcgtattaaatttgcggaacaccac

SEQ ID NO: 664723 - DNA, 75 bp, synthetic construct
  source 1..75: mol_type = other DNA
gaagggaaaatcacggctgacatgatgttaacccatcgctatccgttcgccacgctggcggaaatctatgagcgc

SEQ ID NO: 664724 - DNA, 75 bp, synthetic construct
  source 1..75: mol_type = other DNA
ctaaacagttgtatggcggtctggggcaaaacccgtttaatccggcaatgattggttatgtggtcttactgatct

SEQ ID NO: 664725 - DNA, 75 bp, synthetic construct
  source 1..75: mol_type = other DNA
gcgttacagatattgttattttcatgcatggcgagaaggggttagatgaaaagctagagagtattccagttgaag

SEQ ID NO: 664726 - DNA, 75 bp, synthetic construct
  source 1..75: mol_type = other DNA
catcgcccttccggcgtttgcctttgccagagtgccaaacgatacgcatcaaaatgtcgctatttcacggcgaaa

SEQ ID NO: 664727 - DNA, 75 bp, synthetic construct
  source 1..75: mol_type = other DNA
attgtctcttatgtgctgaccgtggcggtgatgctgcctgccagcggctggctggcggacaaagtcggcgtgcgc

SEQ ID NO: 664728 - DNA, 75 bp, synthetic construct
  source 1..75: mol_type = other DNA
atgctgcccgccagcggctggctggcggacaaagtcggcgtgcgcaatattttctttaccgccatcgtgctgttt

SEQ ID NO: 664729 - DNA, 75 bp, synthetic construct
  source 1..75: mol_type = other DNA
ccagtttgagcgtgaaggttacttctgcctcgatagccgccattctacggcggaaaaaccggtatttaaccgcac

SEQ ID NO: 664730 - DNA, 75 bp, synthetic construct
  source 1..75: mol_type = other DNA
tacaaacgtctggtgctgggtaaagaagtgcgtctgcgtaatgcttatgtgattaaggcagaacgcgtggagaaa

SEQ ID NO: 664731 - DNA, 75 bp, synthetic construct
  source 1..75: mol_type = other DNA
ctgttgctggcggtcggcatggcggtactaacgctggcgctggatggcagtaaaggcaccgggctgtcgctgcta

SEQ ID NO: 664732 - DNA, 75 bp, synthetic construct
  source 1..75: mol_type = other DNA
actccttgaagcgcgattaatcaaagagcagcagccgctatttaataaacgcttgcgccgcaatcgccagctctg

SEQ ID NO: 664733 - DNA, 75 bp, synthetic construct
  source 1..75: mol_type = other DNA
aaattgtggaaagagctgccgtcgacatcaggggttagcaaggtcaatagtaacaatgaagtctggcccgtgttt

SEQ ID NO: 664734 - DNA, 75 bp, synthetic construct
  source 1..75: mol_type = other DNA
cgccactgaatatacctgattataaagaaatgataagcggtggtagtacgaagaatacagaaaaaatagatttta

SEQ ID NO: 664735 - DNA, 75 bp, synthetic construct
  source 1..75: mol_type = other DNA
aaaatatcgtcctgacatgtatactcgattggttgcagcagatgaagatgttcagggattgatctggttaagcag

SEQ ID NO: 664736 - DNA, 75 bp, synthetic construct
  source 1..75: mol_type = other DNA
aacccgttatggtttttaacggggagaggaatgtaccggcagacagtctgaaaccgcagcctctgattcttccgg

SEQ ID NO: 664737 - DNA, 75 bp, synthetic construct
  source 1..75: mol_type = other DNA
cgatggtaaagaccagtcggttgatttgagaaatggcacgctgtatacgggttcaacaaaatcatttcagccttg

SEQ ID NO: 664738 - DNA, 75 bp, synthetic construct
  source 1..75: mol_type = other DNA
cagacggtacagcaagttttaccgttggtcaggataatacgccaggatataaaacgccgttgacggtgacgctga

SEQ ID NO: 664739 - DNA, 75 bp, synthetic construct
  source 1..75: mol_type = other DNA
cggttataaaatcctctgtaaacctctgctttccggtaactatgaaatcactgaacttgatccggagaatagcct

SEQ ID NO: 664740 - DNA, 75 bp, synthetic construct
  source 1..75: mol_type = other DNA
cgcaccccggatgaagccgccatgctacggcaatcccggcgaattagctggatctgcaccgcaggcgaaatcggc

SEQ ID NO: 664741 - DNA, 75 bp, synthetic construct
  source 1..75: mol_type = other DNA
actccttgaagcgcgattaattaaagaacaacagccactgtttaataaacgcttgcgccgtaatcgccagctctg

SEQ ID NO: 664742 - DNA, 75 bp, synthetic construct
  source 1..75: mol_type = other DNA
atacagaaaaaatagattttactatcacaaataaaggcgatgaggctgaaggactttctctggaagtgcttgatg

SEQ ID NO: 664743 - DNA, 75 bp, synthetic construct
  source 1..75: mol_type = other DNA
aataactgtaagaatgccaacgaagcactgtatgatatcaagagaaaagaaattataaatcagatgcttggacaa

SEQ ID NO: 664744 - DNA, 75 bp, synthetic construct
  source 1..75: mol_type = other DNA
ctttgttcagccgggcgcatttgagattaacgatctctacgcaacctccggcagcggcgacctgacggtgatcat

SEQ ID NO: 664745 - DNA, 75 bp, synthetic construct
  source 1..75: mol_type = other DNA
gaaggtcagatcaatattggcgaatgggtcctacttggcaggggatacgcgtatcaaggggaaaaatttcagagc

SEQ ID NO: 664746 - DNA, 75 bp, synthetic construct
  source 1..75: mol_type = other DNA
ctacttcactccagttgggtggtagtgtaattggtgtgccagaaggtggcataatatttactccagttaaaaatg

SEQ ID NO: 664747 - DNA, 75 bp, synthetic construct
  source 1..75: mol_type = other DNA
gattcgagccttttacactcaatagctctttattgctggataaaaattataacaatattggtttaggactaattc

SEQ ID NO: 664748 - DNA, 75 bp, synthetic construct
  source 1..75: mol_type = other DNA
ggaaatctgtttggagttgtcataatatctctgctcggattggctggtgtttgctgttttgtggccttatttatt

SEQ ID NO: 664749 - DNA, 75 bp, synthetic construct
  source 1..75: mol_type = other DNA
gattggtaaaacccagtcctacaataccctgaatgacggatttaccttttatggcgcacaattaaagtccaatca

SEQ ID NO: 664750 - DNA, 75 bp, synthetic construct
  source 1..75: mol_type = other DNA
gattggtaaaacccagtcctacaatactctcaataacggatttaccttttatggtgcacagttaaagtccaatca

SEQ ID NO: 664751 - DNA, 75 bp, synthetic construct
  source 1..75: mol_type = other DNA
cgcttgacgtgcccacctgggccattctggcatcctatgttgccgttaccggtgtgtttgtacttccaacatatc

SEQ ID NO: 664752 - DNA, 75 bp, synthetic construct
  source 1..75: mol_type = other DNA
attatggccggtaccggatttattgttttttccacactgccggtgattgctgaagttgcgaaagagtcaggtatt

SEQ ID NO: 664753 - DNA, 75 bp, synthetic construct
  source 1..75: mol_type = other DNA
tacttggcgcaatattttttggtattcgccagggagggatcggtattggtttatgtggcgggcttggactcgcta

SEQ ID NO: 664754 - DNA, 75 bp, synthetic construct
  source 1..75: mol_type = other DNA
tacagctttattcgtggagggagtaaggatattcctgatgttttaaacagcaataaagaaaacgtaccgggtaaa

SEQ ID NO: 664755 - DNA, 75 bp, synthetic construct
  source 1..75: mol_type = other DNA
ctattatttttcatttactatctaaaggtgctcttgccgaagagttcaactacagctttattcgtggagggagta

SEQ ID NO: 664756 - DNA, 75 bp, synthetic construct
  source 1..75: mol_type = other DNA
gatgagctcgctggcggtgattctcggcattgtaaccttaggcactacttttattgatgcgcatttaaccgagat

SEQ ID NO: 664757 - DNA, 75 bp, synthetic construct
  source 1..75: mol_type = other DNA
gcagcgacaccggtaataccgaaaatatcgcaaaaatgattcaaaaacagattggtaaagacgttgccgatgtcc

SEQ ID NO: 664758 - DNA, 75 bp, synthetic construct
  source 1..75: mol_type = other DNA
agatgacaaacatgatctcatatcagggacttgttcgcaccttccctaagttgaagaaaaaaatacttgccttcg

SEQ ID NO: 664759 - DNA, 75 bp, synthetic construct
  source 1..75: mol_type = other DNA
aggtgcgtgggatgggcaggagccaattaccattccggtcgatggtatagaaatgggcagtttaagtatgttgtc

SEQ ID NO: 664760 - DNA, 75 bp, synthetic construct
  source 1..75: mol_type = other DNA
ctgaaatgatgcgcctgtgcgagatgaacttttcacaattgcgccgtttgttaccgcgcaatgacgcacccggcg

SEQ ID NO: 664761 - DNA, 75 bp, synthetic construct
  source 1..75: mol_type = other DNA
atggtaacgataataataggtgtgtcgagagttattgactataaaacggcagaaatgtcggttgatatcccccca

SEQ ID NO: 664762 - DNA, 75 bp, synthetic construct
  source 1..75: mol_type = other DNA
caactcatgcggcagccgtgcctgcccgtcctgcggaaagaaggccacagacctgtggatagcgacacagctgaa

SEQ ID NO: 664763 - DNA, 75 bp, synthetic construct
  source 1..75: mol_type = other DNA
ttatccgggtgaataccggctctctcgatgcgctgtatgagctgttcaggacggacagccgttttcatgtcgtca

SEQ ID NO: 664764 - DNA, 75 bp, synthetic construct
  source 1..75: mol_type = other DNA
cggatgacaaccactttgtcggtctggctatcgacgaagaccgtcagccggaactgaccgccgaacgcgtggaaa

SEQ ID NO: 664765 - DNA, 75 bp, synthetic construct
  source 1..75: mol_type = other DNA
atggctatcactggcatctttttcggtagcgacaccggtaataccgaaaatatcgcaaaaatgattcaaaaacag

SEQ ID NO: 664766 - DNA, 75 bp, synthetic construct
  source 1..75: mol_type = other DNA
ctgatgatgaccactttgtcggtctggctatcgacgaagaccgtcagccggaactgaccgctgaacgtgtagaaa

SEQ ID NO: 664767 - DNA, 75 bp, synthetic construct
  source 1..75: mol_type = other DNA
atgattctgtcagcgaaagaagagttggctaatgaaccgtacccgattgatggcctgtccggtgaatatgcggag

SEQ ID NO: 664768 - DNA, 75 bp, synthetic construct
  source 1..75: mol_type = other DNA
accgcgagatctgaaagtgaatgaaacaaatgctgagtatctggtgcgtaaattcgatgaagtacgtacggaagc

SEQ ID NO: 664769 - DNA, 75 bp, synthetic construct
  source 1..75: mol_type = other DNA
aggttaagcgtgaaaatccgccagtcgaaaccggagcatggaaagacgctgttgactgggtactcaaagaggctt

SEQ ID NO: 664770 - DNA, 75 bp, synthetic construct
  source 1..75: mol_type = other DNA
gcgcttggtcatgttgatcagttccagcaggtggcggagcagcagcaaacggctgtcgacacgggcaaaagtgat

SEQ ID NO: 664771 - DNA, 75 bp, synthetic construct
  source 1..75: mol_type = other DNA
caaacacaacacggtggcacgtgaatatgccgaacgcacactcgataaagagaacgtgttacgtcaatttataaa

SEQ ID NO: 664772 - DNA, 75 bp, synthetic construct
  source 1..75: mol_type = other DNA
caggtaactcagcatcaacgggaatatctaatacgttcccaattccattcccgtcagggattatcatcattacga

SEQ ID NO: 664773 - DNA, 75 bp, synthetic construct
  source 1..75: mol_type = other DNA
aacggcatcgaaaaggaatgtcgggacgggggcaaatcagataccggacatgtccgccttcgcgtcaggatctgg

SEQ ID NO: 664774 - DNA, 75 bp, synthetic construct
  source 1..75: mol_type = other DNA
aatccgaatctgccacgtaccacggttaaaatgtttaccagctatcggttgcctgtcatgccagagttgacggtc

SEQ ID NO: 664775 - DNA, 75 bp, synthetic construct
  source 1..75: mol_type = other DNA
atgctttcgacacaatttaacagggataatcagcatcaagccgcagccacgccgtcgctgctcgcagcctgcatt

SEQ ID NO: 664776 - DNA, 75 bp, synthetic construct
  source 1..75: mol_type = other DNA
aattatccctattttatcaggtagtgttgccttatggctcggttggcgttatggcatgattattccggggaccat

SEQ ID NO: 664777 - DNA, 75 bp, synthetic construct
  source 1..75: mol_type = other DNA
gtgactacgatggtcaggttgcggaggctatggccctggtacgagcgctgaacaaaatgacgaaagcaggtatgc

SEQ ID NO: 664778 - DNA, 75 bp, synthetic construct
  source 1..75: mol_type = other DNA
gtgcataacctgcgtacagtgaagtggcacggtgatagttcaccgtatccgtgggcgacgtcgtttaatgagtat

SEQ ID NO: 664779 - DNA, 75 bp, synthetic construct
  source 1..75: mol_type = other DNA
atgaccgttacgccatatagtgttggtgaggcttatgcagtcggcgcaaactggttaggcggtgcaaatatcatc

SEQ ID NO: 664780 - DNA, 75 bp, synthetic construct
  source 1..75: mol_type = other DNA
atcccttacgggaattaatttcttcttttcctgggtgtccagttcaaccccggcaaatggtttccaatggttcgc

SEQ ID NO: 664781 - DNA, 75 bp, synthetic construct
  source 1..75: mol_type = other DNA
acgttcctggtgggaccataattcagtggggacaagttacagaaaccataaatgaggggactaaaaacgtggtat

SEQ ID NO: 664782 - DNA, 75 bp, synthetic construct
  source 1..75: mol_type = other DNA
cgtgatgaattgcgtctggcaaggtgggagcatgttgacacggtcaaacgcaccctgtggctcccggaaaccaag

SEQ ID NO: 664783 - DNA, 75 bp, synthetic construct
  source 1..75: mol_type = other DNA
ggctggatcgctacaacagcgaaaagactttcttctccggcattgtggatgctgatttgggcgagctgaccacgc

SEQ ID NO: 664784 - DNA, 75 bp, synthetic construct
  source 1..75: mol_type = other DNA
tacaggtcatgacgctgattcagtgatggttgatgatgatggtgtttgttggcataacggcaactgttggacgta

SEQ ID NO: 664785 - DNA, 75 bp, synthetic construct
  source 1..75: mol_type = other DNA
tgggcgcagtattagggctgagcagtatgacagtcagtattttgtttattctgccaattccggcggcatttttcg

SEQ ID NO: 664786 - DNA, 75 bp, synthetic construct
  source 1..75: mol_type = other DNA
cgacagggtaggtcgccgcccggtgatcctcatcggaatgtccatttttatgttagcaacgctggttgcggtcac

SEQ ID NO: 664787 - DNA, 75 bp, synthetic construct
  source 1..75: mol_type = other DNA
gccagcaggcgtcgctctctttctccgcgctggtgcaggtgcgcaacaaaatcgccaccggatttaacgatctga

SEQ ID NO: 664788 - DNA, 75 bp, synthetic construct
  source 1..75: mol_type = other DNA
actgtacaaaaatgggaaagtggcgctaaacgccccaatggcatttcattaaaactgctcagcattgtgcaaaaa

SEQ ID NO: 664789 - DNA, 75 bp, synthetic construct
  source 1..75: mol_type = other DNA
cgcggtcaacattgctgatgttgaaccggcaagcgaactgtttaaacgcttcgataccgccgcgatgtctatcgg

SEQ ID NO: 664790 - DNA, 75 bp, synthetic construct
  source 1..75: mol_type = other DNA
ccggcttcggcaatggcttacggggacaccgacgggttacgtatcaggcggtacgcaccttcaacctgagcagtg

SEQ ID NO: 664791 - DNA, 75 bp, synthetic construct
  source 1..75: mol_type = other DNA
cagatatccgcttcccggtcacagacagtgattacctgtttctgtatctcccccagccgttcggccatgcgctcc

SEQ ID NO: 664792 - DNA, 75 bp, synthetic construct
  source 1..75: mol_type = other DNA
tgaaggatgcatattttgacagggggcgagatctcgcaaagctttgcgccgcactaaaagaaatcagtcagtatt

SEQ ID NO: 664793 - DNA, 75 bp, synthetic construct
  source 1..75: mol_type = other DNA
tttgctggtgctctgtgcgggtgtaacgttcagtatggcacgctggatgccggaaacgcgccctgctgacgcgcc

SEQ ID NO: 664794 - DNA, 75 bp, synthetic construct
  source 1..75: mol_type = other DNA
ggagcagcggatgtgcctcacatgcccttgcagtggcagtaaatccggcttcggcaatggcttacggggacaccg

SEQ ID NO: 664795 - DNA, 75 bp, synthetic construct
  source 1..75: mol_type = other DNA
gggggcgtacatcaggacagagtgagccagcagcccgtgcgtcttcgggttagtggtggtattccccaggtcatc

SEQ ID NO: 664796 - DNA, 75 bp, synthetic construct
  source 1..75: mol_type = other DNA
gatgccgaaggcaatatcaccaccatcttctgtacttatgacgccgacaccttaagcaaagatccggcagatggt

SEQ ID NO: 664797 - DNA, 75 bp, synthetic construct
  source 1..75: mol_type = other DNA
gcgaaggcgaaatggttaccatgccgaaccatccgaataaaccggaaatgggcagccgtcaggtgccatttagcg

SEQ ID NO: 664798 - DNA, 75 bp, synthetic construct
  source 1..75: mol_type = other DNA
aactctctgtgtgtctatcatacgtttttagataacgatgatgcagggagaaatgcttatgccgcagctgaacaa

SEQ ID NO: 664799 - DNA, 75 bp, synthetic construct
  source 1..75: mol_type = other DNA
ttcgaactggaattgaatgccctggtccgtcgtcatttcccgcactggggtgcgcgcgatttactgggagataaa

SEQ ID NO: 664800 - DNA, 75 bp, synthetic construct
  source 1..75: mol_type = other DNA
catcactattgatgtggcctaccgctatttctctaccgagaagcgtaaatttattatcgccgacaccccagggca

SEQ ID NO: 664801 - DNA, 75 bp, synthetic construct
  source 1..75: mol_type = other DNA
cgctttgtgccgctctccgcactggaaggcgacaacgtggcttcgcaaagtgaaagtatgccgtggtacagcggt

SEQ ID NO: 664802 - DNA, 75 bp, synthetic construct
  source 1..75: mol_type = other DNA
tgatacctttaattatcaataacttcaccgtgctgggctacgacaccatgatcccgctgttaatgcccgccatta

SEQ ID NO: 664803 - DNA, 75 bp, synthetic construct
  source 1..75: mol_type = other DNA
agatttcatcttttttagttattacatgactggttgtgtttcccacgacgaaagcattaataaaaatgcgcaggg

SEQ ID NO: 664804 - DNA, 75 bp, synthetic construct
  source 1..75: mol_type = other DNA
cgttggcgcacaaggtatggcgcaatttatgcctgctacagcgacatggataagccagttgtatccacaattgcg

SEQ ID NO: 664805 - DNA, 75 bp, synthetic construct
  source 1..75: mol_type = other DNA
gtgctcaacaaactctccttactgctgaaagacgcaggaatttcgcttaccgatcaccagaaaaaccagcttatt

SEQ ID NO: 664806 - DNA, 75 bp, synthetic construct
  source 1..75: mol_type = other DNA
caaagcaagttgctgaacgtgctgggatgtcgccaataacattgcgctctctggagtcaggaagtgcaggggtca

SEQ ID NO: 664807 - DNA, 75 bp, synthetic construct
  source 1..75: mol_type = other DNA
aacaatggaagccttgcaaacgggatgtgttcatataaatacataatgcgaattggacacggttttgacgtacat

SEQ ID NO: 664808 - DNA, 75 bp, synthetic construct
  source 1..75: mol_type = other DNA
ttattatcgccgacaccccagggcatgagcagtacacccgcaatatggcgaccggcgcgtcgacgtgtgatctgg

SEQ ID NO: 664809 - DNA, 75 bp, synthetic construct
  source 1..75: mol_type = other DNA
tgccggtgaaagccaatgatgcggcgctcagcgaaggcaccttttctgcctacgcaacattacaggtggattacc

SEQ ID NO: 664810 - DNA, 75 bp, synthetic construct
  source 1..75: mol_type = other DNA
gggtactggtgatgcatgaagggaaactaaaagccaacctgataaatcataacctgactcaggagcaggtgatgg

SEQ ID NO: 664811 - DNA, 75 bp, synthetic construct
  source 1..75: mol_type = other DNA
gattactggttggcgcggcgaattattgcttccgctatttaccactgcgcctgcgggtgggtaatacccgcccaa

SEQ ID NO: 664812 - DNA, 75 bp, synthetic construct
  source 1..75: mol_type = other DNA
ggcgtggtgctgactcgcacgctattgcagggtaagcgcacccgctggcagcaatcgcccttccttttaaccgcc

SEQ ID NO: 664813 - DNA, 75 bp, synthetic construct
  source 1..75: mol_type = other DNA
gttctgtcttgccttgttagtggcgctgatgcagggagcgtcatggtttagtcaaaaccaccagcgacaacgtaa

SEQ ID NO: 664814 - DNA, 75 bp, synthetic construct
  source 1..75: mol_type = other DNA
tcgattgcctatctacgtgggtaaggccgtcccagcaggggcgagaatggggcttaccaaccctgataaggttgg

SEQ ID NO: 664815 - DNA, 75 bp, synthetic construct
  source 1..75: mol_type = other DNA
tactggtattgacgctgaacacgatgaccattctgttgtcgattgccggactggcgttggcgtgggtgtacccgt

SEQ ID NO: 664816 - DNA, 75 bp, synthetic construct
  source 1..75: mol_type = other DNA
tgactatgctgatcgtaagtttgatggtcatgttaagcgcacggcaaaccgaccgcttcccagtggcgcggtgac

SEQ ID NO: 664817 - DNA, 75 bp, synthetic construct
  source 1..75: mol_type = other DNA
tgattatgctgaccgcaagtttgatggtcatgttaagcgcacggcgaaccgaccacttcccagcggcgcggtaac

SEQ ID NO: 664818 - DNA, 75 bp, synthetic construct
  source 1..75: mol_type = other DNA
gctcgacaccattggcatcgcctcgatatgcgctctgctggttgtctctaccgcaccagaagtgatgcacgatac

SEQ ID NO: 664819 - DNA, 75 bp, synthetic construct
  source 1..75: mol_type = other DNA
tggcttcgaatagtgaataccgataaagctatacataatgaaagatatgctggtaaaaagactcatctctctttc

SEQ ID NO: 664820 - DNA, 75 bp, synthetic construct
  source 1..75: mol_type = other DNA
agcatattttaactttgaaaacggtcgtgatatgcatttaaatagaattaatcaaattgaacccaaaataataat

SEQ ID NO: 664821 - DNA, 75 bp, synthetic construct
  source 1..75: mol_type = other DNA
acttagccagtgtattagtagtcgctggtttgctctggtgcggcggctttttcagccaggcgcacgccgccgaac

SEQ ID NO: 664822 - DNA, 75 bp, synthetic construct
  source 1..75: mol_type = other DNA
tccgcgcatggataaaggccggggagcgattcgagggacgctctgacggtaacgggctttatctttcataccgcg

SEQ ID NO: 664823 - DNA, 75 bp, synthetic construct
  source 1..75: mol_type = other DNA
tcgcattaagggcgtagaggggatttataaccgccatcagtattttgatgagcgtaaagcagcactggcacagtg

SEQ ID NO: 664824 - DNA, 75 bp, synthetic construct
  source 1..75: mol_type = other DNA
aaaacagaatgatcccacatattcaggaaagcactttacccgtagcactggctaaggttcgcgccgaaatgccgg

SEQ ID NO: 664825 - DNA, 75 bp, synthetic construct
  source 1..75: mol_type = other DNA
gatccctcatatacaggaaagtacactgcccgtagcactggcaaaagtgcgcagcaaccttcctgatataccaaa

SEQ ID NO: 664826 - DNA, 75 bp, synthetic construct
  source 1..75: mol_type = other DNA
ccctacagtggctaatgatgtcctccgctggacccgccgcatcttcaactatggtatcaaacgccatatgctgga

SEQ ID NO: 664827 - DNA, 75 bp, synthetic construct
  source 1..75: mol_type = other DNA
caaagagccatagttattggctcttactctgagctatctcttgctaaagcacgagaaacggctaaagagctttcc

SEQ ID NO: 664828 - DNA, 75 bp, synthetic construct
  source 1..75: mol_type = other DNA
aagccacgccacattgacgacatgttgaaaggtatcgttgaccgaggagcaccaacgatagcaacagatgtatta

SEQ ID NO: 664829 - DNA, 75 bp, synthetic construct
  source 1..75: mol_type = other DNA
cagagaaacagcaaaagagctgtcagccagagttgctcttggctatgacgtagcagcagagaaacaggaacgaaa

SEQ ID NO: 664830 - DNA, 75 bp, synthetic construct
  source 1..75: mol_type = other DNA
aacggcctttatatttgctaccccaaaaactacacagtcccgttctggcgattccgctataagctcgcaggaaag

SEQ ID NO: 664831 - DNA, 75 bp, synthetic construct
  source 1..75: mol_type = other DNA
ttcagataaaggcgtggataaaggccggggaacgctttgatgcccgcgccgatggtaacggcctgtatttgtgct

SEQ ID NO: 664832 - DNA, 75 bp, synthetic construct
  source 1..75: mol_type = other DNA
agcaaaaacggcgaccccatagatattccacttgttccccccgttattgaatggctgaaagaactgcgcgtcttg

SEQ ID NO: 664833 - DNA, 75 bp, synthetic construct
  source 1..75: mol_type = other DNA
ggcatgacgccgtggcaaactatgcgtcgcgcaattttgccgcaggcggctcgggtggcgctgccgccgctgtcg

SEQ ID NO: 664834 - DNA, 75 bp, synthetic construct
  source 1..75: mol_type = other DNA
agccttagagcagtgggcagcattactggtctcactggaacgcggtgaggattacaatgtgatgccgataaaaaa

SEQ ID NO: 664835 - DNA, 75 bp, synthetic construct
  source 1..75: mol_type = other DNA
cgtattgtgacctgtgaaaaccatagtattcacaatgggctagggtcagccgttgccgaggtattagtcgaaagt

SEQ ID NO: 664836 - DNA, 75 bp, synthetic construct
  source 1..75: mol_type = other DNA
ggtggtgatggagatgacagatgccgtaatgttcagcgatatcttgcgtcaactcgttgcactggaaggatttta

SEQ ID NO: 664837 - DNA, 75 bp, synthetic construct
  source 1..75: mol_type = other DNA
atgttatcaggtgtgtttaaagctgttctgctgggcaataccctgcagtttcgggtgatcgctgagatatttcag

SEQ ID NO: 664838 - DNA, 75 bp, synthetic construct
  source 1..75: mol_type = other DNA
tgaagatctggccagtggtaagcacaccacagtacatacccgtttcccgccggaaccgaatggctatctgcatat

SEQ ID NO: 664839 - DNA, 75 bp, synthetic construct
  source 1..75: mol_type = other DNA
ccagtttgagcgtgaaggttatttctgcctcgacagccgccattctacggcggaaaaaccggtatttaaccgcac

SEQ ID NO: 664840 - DNA, 75 bp, synthetic construct
  source 1..75: mol_type = other DNA
cgcaatggcggttatcgatccggtgaaactggttatcgaaaactaccagggcgaaggcgaaatggtcaccatgcc

SEQ ID NO: 664841 - DNA, 75 bp, synthetic construct
  source 1..75: mol_type = other DNA
gttgaagtcaatcgtaaaaatggttccggaaaaaagaccattaaagccccgactggcagctttgagctggcaact

SEQ ID NO: 664842 - DNA, 75 bp, synthetic construct
  source 1..75: mol_type = other DNA
gaccacgctgtctgatgagctcgagcgcaagatcattcgcctgttcgcgctggggatgagctaccaggatatcag

SEQ ID NO: 664843 - DNA, 75 bp, synthetic construct
  source 1..75: mol_type = other DNA
aagcgcttaaagcactccagtccggtcaggcattaacgggcaaagatggtatttttaccccattaatcaaacagt

SEQ ID NO: 664844 - DNA, 75 bp, synthetic construct
  source 1..75: mol_type = other DNA
accgatgctgagctagcattgcagccgggcgagatcgccgaccaggagcgtgaacgctgccggcgcaagccgtgt

SEQ ID NO: 664845 - DNA, 75 bp, synthetic construct
  source 1..75: mol_type = other DNA
ctgaaaaatttcggcaaccgaattatcgccattactaataatggaaattccacgctggcgaaaaatgctgatgcc

SEQ ID NO: 664846 - DNA, 75 bp, synthetic construct
  source 1..75: mol_type = other DNA
ataatgctaactccacgctggcaaaacatgctgacgccacgctggaactgcatatggcgaacgaaacctgcccga

SEQ ID NO: 664847 - DNA, 75 bp, synthetic construct
  source 1..75: mol_type = other DNA
gtgaatacttaccacatcacaataccctggcccccgagcaataaccgctagtaccgccataatcgcgggcgcacc

SEQ ID NO: 664848 - DNA, 75 bp, synthetic construct
  source 1..75: mol_type = other DNA
gtgaatacttacaacatcacaatgccctggcccccgagcaataaccgctagtaccgccataatcgcgggcgcacg

SEQ ID NO: 664849 - DNA, 75 bp, synthetic construct
  source 1..75: mol_type = other DNA
gtgaatacttacaacatcacaatcccctggcccccgagcaataaccgctagtaccgccataatcgcgggcgcacc

SEQ ID NO: 664850 - DNA, 75 bp, synthetic construct
  source 1..75: mol_type = other DNA
tcaggtcgttgattaccgcgttatgaagatgcccgttaccaaaggtggaaagctggagctgaccatcactgaact

SEQ ID NO: 664851 - DNA, 75 bp, synthetic construct
  source 1..75: mol_type = other DNA
ctgtatatgcaccgcatcgaaaaagactggtacacgttgatgaacaccatcatcaacggttcagcctctgaagcg

SEQ ID NO: 664852 - DNA, 75 bp, synthetic construct
  source 1..75: mol_type = other DNA
gtgaatacttacgacatcacaataccctggcccccgagcaataaccgctagtaccgccataatcgcgggcgcacg

SEQ ID NO: 664853 - DNA, 75 bp, synthetic construct
  source 1..75: mol_type = other DNA
tggaaattgaacaacgttataaccacattcctgacaccagttcgctgagcattcgtacttccggcctgcttggag

SEQ ID NO: 664854 - DNA, 75 bp, synthetic construct
  source 1..75: mol_type = other DNA
ctgaaggcggcaaacgtgacgtcaatacgtactgaaccaacctacacgctctatgcgacgttcgataacatcggc

SEQ ID NO: 664855 - DNA, 75 bp, synthetic construct
  source 1..75: mol_type = other DNA
cagcaaaagcttcatctaagccgctataaccgtctggtaaaagaaaaagcagagcttgaagaacggctcagtgat

SEQ ID NO: 664856 - DNA, 75 bp, synthetic construct
  source 1..75: mol_type = other DNA
gtgaatacttacaacatcacaattccctggcccccgagcaataaccgctagtaccgccataatcgcgggcgcact

SEQ ID NO: 664857 - DNA, 75 bp, synthetic construct
  source 1..75: mol_type = other DNA
gtgaatacttacaacatcacaataccctggcccccgagcaataaccgctagtaccgccataatcgcgggcgcaca

SEQ ID NO: 664858 - DNA, 75 bp, synthetic construct
  source 1..75: mol_type = other DNA
gcaggttgttgattaccgcgttgtgaagatgccgatcgttaaaggcgggaagctggagctgaccattacagaact

SEQ ID NO: 664859 - DNA, 75 bp, synthetic construct
  source 1..75: mol_type = other DNA
ggcgtgaatacctacagcatcacattaccctggcctccgagcaataatcgctactaccggcataatcgcgggcgc

SEQ ID NO: 664860 - DNA, 75 bp, synthetic construct
  source 1..75: mol_type = other DNA
ataagctggcgattaatcacagcaaaatgctggcgtattccgggatcctggcaaatccgggacgatccccggaaa

SEQ ID NO: 664861 - DNA, 75 bp, synthetic construct
  source 1..75: mol_type = other DNA
aatgtgttgcaaaatataccctgccagttgagcaaaaaatttcaaggattatttctgttacagcaaactgccagt

SEQ ID NO: 664862 - DNA, 75 bp, synthetic construct
  source 1..75: mol_type = other DNA
gcaaggaaatgcgatagtgccttatctgagtatctatcgtgagaataatgtatctatacgcagtgaaacgctgag

SEQ ID NO: 664863 - DNA, 75 bp, synthetic construct
  source 1..75: mol_type = other DNA
gctgcacgccagaaataacaaccgcgctcttttcagtctgaaactgttccgcactcgtaccttttcgctgggcct

SEQ ID NO: 664864 - DNA, 75 bp, synthetic construct
  source 1..75: mol_type = other DNA
cccggcagataaagagcagaatgatccgctggcacaggtttttcataacgcctgctcttacaatttttttgcgat

SEQ ID NO: 664865 - DNA, 75 bp, synthetic construct
  source 1..75: mol_type = other DNA
ggcgaaaaactggcgggaagatcggtactgggcaactttgttctgggtacacgggtgcccgatctcagcggaaaa

SEQ ID NO: 664866 - DNA, 75 bp, synthetic construct
  source 1..75: mol_type = other DNA
atctgtattggcgcttacggttgcaggctctttttctgcgacagctggaaaatttaatccgcgttttctggaaga

SEQ ID NO: 664867 - DNA, 75 bp, synthetic construct
  source 1..75: mol_type = other DNA
ttttaccgcggatgttaggaaataccaccgctactttcagggaagggcaatgggaagccatagacgcggtggtga

SEQ ID NO: 664868 - DNA, 75 bp, synthetic construct
  source 1..75: mol_type = other DNA
cctggccgccgagcaataatcgctattaccgccataatcgcgggcgcacgcacgtcagcgcagaggggcaggcat

SEQ ID NO: 664869 - DNA, 75 bp, synthetic construct
  source 1..75: mol_type = other DNA
aagatggtcagttatatatcagtgggatgcctaaaacagggaatgtgaagatcgtatggggtaaagatacgtcac

SEQ ID NO: 664870 - DNA, 75 bp, synthetic construct
  source 1..75: mol_type = other DNA
tgatctctatcctactgccaacagcggtgatttaacggttattattaaagaagctgatggtagcgaacaacgatt

SEQ ID NO: 664871 - DNA, 75 bp, synthetic construct
  source 1..75: mol_type = other DNA
ataccttgtttaagccggacacaactggctgatatgggcgttcgtgtagacagtttttcagcacttaaccttata

SEQ ID NO: 664872 - DNA, 75 bp, synthetic construct
  source 1..75: mol_type = other DNA
ccgcgaagtcatcgagattgacgtcgttaacatggtgctgaaagtcgacggcgtcgaccgtctggcggagcaccg

SEQ ID NO: 664873 - DNA, 75 bp, synthetic construct
  source 1..75: mol_type = other DNA
ggtgcgcagtgtattcaggctgatttttcgaccaacgacggtgtgatggcgtttgccgatgaagtactaaaaagc

SEQ ID NO: 664874 - DNA, 75 bp, synthetic construct
  source 1..75: mol_type = other DNA
ccggaagccctgcaggcaattgatgatggtgatgacgaggtcagctgcgggtacgacgccgattacgaacagatt

SEQ ID NO: 664875 - DNA, 75 bp, synthetic construct
  source 1..75: mol_type = other DNA
acgcagactgccaccactgttaaaaccattgccggtatgaatcaggccgcgcaggaattctggtctaaacgaggc

SEQ ID NO: 664876 - DNA, 75 bp, synthetic construct
  source 1..75: mol_type = other DNA
acgttaataccccatatctactcaaccatgccctggaaagattactgcgtgggcacggacacgccgccagcgata

SEQ ID NO: 664877 - DNA, 75 bp, synthetic construct
  source 1..75: mol_type = other DNA
gtgaattctatcgcaccatcgctgatcctgtttaatgaacatgatgacgcggagtatcgtcagcaggcgctgaat

SEQ ID NO: 664878 - DNA, 75 bp, synthetic construct
  source 1..75: mol_type = other DNA
gcgagaaagaagtgatcgacctggtcgattacttacttaccagctgctttgtcaccggacgcagtttcccacttg

SEQ ID NO: 664879 - DNA, 75 bp, synthetic construct
  source 1..75: mol_type = other DNA
caggatgccggattcgaaagtgtcgactactacaatctgacggcaggggttgtggcgctgcatcgtggttataag

SEQ ID NO: 664880 - DNA, 75 bp, synthetic construct
  source 1..75: mol_type = other DNA
tgagtatgttcaggcgaacgctgaggcgctgccgttcccggataacacctttgattgcatcaccatttcgtttgg

SEQ ID NO: 664881 - DNA, 75 bp, synthetic construct
  source 1..75: mol_type = other DNA
tgttattgcctggtacgtgtcgaatctggttggcggcaccatgtactggtggtttgccgcgcgcgaattacgccg

SEQ ID NO: 664882 - DNA, 75 bp, synthetic construct
  source 1..75: mol_type = other DNA
aacgatgccgccgaaatggcgaatcttatcgacaacccgcctgatgatgtcacgggcgataacgatgtatcgacc

SEQ ID NO: 664883 - DNA, 75 bp, synthetic construct
  source 1..75: mol_type = other DNA
tgctgaaacccggcggtcgtctgttggtacttgagttctcgaagccgattatcgagccgctaagtaaagcctatg

SEQ ID NO: 664884 - DNA, 75 bp, synthetic construct
  source 1..75: mol_type = other DNA
cagaatccatccgtatgcatcccgatcaggatactctgaaagccatgatgcaggatgccggattcgaaagtgtcg

SEQ ID NO: 664885 - DNA, 75 bp, synthetic construct
  source 1..75: mol_type = other DNA
acgattctgcatcctgaagatgaaaacgggaatgtgcggctggtaaatcccgagaactggaaagagcttgctgtc

SEQ ID NO: 664886 - DNA, 75 bp, synthetic construct
  source 1..75: mol_type = other DNA
aaacccagtgttaatggtaacggcgcgatctcatacactttagaaaacgattacgatgtaattttaggagaactg

SEQ ID NO: 664887 - DNA, 75 bp, synthetic construct
  source 1..75: mol_type = other DNA
cactggtagcggtactggtgccttttttatcggtgggatgcgttagccttgataaggcgcgccagcttttcgata

SEQ ID NO: 664888 - DNA, 75 bp, synthetic construct
  source 1..75: mol_type = other DNA
atttcactgagaacggaaccggagcaggaaacggttcattttcgtgccagtcctgacatcgcgtttcccctgcgg

SEQ ID NO: 664889 - DNA, 75 bp, synthetic construct
  source 1..75: mol_type = other DNA
ccaataatcgtgccttcgacggttgttcactgctggcaatgggaatgttgatgctgagtttctggctgaaagaaa

SEQ ID NO: 664890 - DNA, 75 bp, synthetic construct
  source 1..75: mol_type = other DNA
gtcaggcattaattcctgtaaaacgggccagcccaacattgacttttaccaatattaaccgcgtcagcgaactgc

SEQ ID NO: 664891 - DNA, 75 bp, synthetic construct
  source 1..75: mol_type = other DNA
ttcactgctggcgatgggaatgttgatgctgagtttctggctgaaagaaaacgccccaggcagacgacgtatcgt

SEQ ID NO: 664892 - DNA, 75 bp, synthetic construct
  source 1..75: mol_type = other DNA
atgacctcaaaacattactgaaatccctgctggctaagctggaaggaaatgcgacgggcgataacgataataagc

SEQ ID NO: 664893 - DNA, 75 bp, synthetic construct
  source 1..75: mol_type = other DNA
aatcggtagatatggcgtttaacgccgtgtcagagattgccaaagggcgaaacacccgcagcaccacgggcgatg

SEQ ID NO: 664894 - DNA, 75 bp, synthetic construct
  source 1..75: mol_type = other DNA
tcaacctgtccccgcagcaaccactaccggacaaagcaccagagatggggggaggtccaaccggcgacagtgatg

SEQ ID NO: 664895 - DNA, 75 bp, synthetic construct
  source 1..75: mol_type = other DNA
ttcctgttgcgcgatcagtttgcctgggagctgcggttaagtcttgtgccagagcaaattggtggaatgcggctg

SEQ ID NO: 664896 - DNA, 75 bp, synthetic construct
  source 1..75: mol_type = other DNA
aaaatgctcgcgtatgccggaattctggcaacgccggggcgctcgccggatgtggtgtgcaacctggtcagccac

SEQ ID NO: 664897 - DNA, 75 bp, synthetic construct
  source 1..75: mol_type = other DNA
atgctggaaatactctatcaggatgaatggctggttgcggtaaataaaccctccggctggctggttcaccgcagc

SEQ ID NO: 664898 - DNA, 75 bp, synthetic construct
  source 1..75: mol_type = other DNA
atgacggtgcgtctgtatcatgacgcgatggtggctgaagggtgttcaagccagcagatttttcgcttcaaagcg

SEQ ID NO: 664899 - DNA, 75 bp, synthetic construct
  source 1..75: mol_type = other DNA
tgtaccgtcgatgctggcggcgtttgttgcttcgctgacagcggaaaccgctcgccaaagttgcgcgacgttgaa

SEQ ID NO: 664900 - DNA, 75 bp, synthetic construct
  source 1..75: mol_type = other DNA
tccggtgccgccgggtgtggcgggtgatctctatctcaccggtattcaactggcgcaggggtatcttggacgacc

SEQ ID NO: 664901 - DNA, 75 bp, synthetic construct
  source 1..75: mol_type = other DNA
aagccgttacccacgcctgtgtgattaaccaggcggcagccaccggtggtgatgcgcgtcagttggtgggctatc

SEQ ID NO: 664902 - DNA, 75 bp, synthetic construct
  source 1..75: mol_type = other DNA
aacagcgccggaagcgggacaaatcgcaccggctctcgcgcacattgggccagaatcaacagaatccgaccactc

SEQ ID NO: 664903 - DNA, 75 bp, synthetic construct
  source 1..75: mol_type = other DNA
agcgcatctggcaacgttacttgaacaacaaccgcacggcccatattacctgctgggttattcacttggcggtac

SEQ ID NO: 664904 - DNA, 75 bp, synthetic construct
  source 1..75: mol_type = other DNA
gcgcgtccgtcgctgttaatcaccactgacgatcaactgccgcgctttagcgatatccctaatttaaccagcctt

SEQ ID NO: 664905 - DNA, 75 bp, synthetic construct
  source 1..75: mol_type = other DNA
gtaaagcgacgctgtttgttgctgaacgtacacttcaggaaggtatgagtcctgaacgcgcctggtcgccatggg

SEQ ID NO: 664906 - DNA, 75 bp, synthetic construct
  source 1..75: mol_type = other DNA
ctgaaactggaatttaccgacggggaattccgccagctggctacgcaactttcaggtgtgcagcgtaccgattta

SEQ ID NO: 664907 - DNA, 75 bp, synthetic construct
  source 1..75: mol_type = other DNA
actgctcatagcgtaccgtttgacggtaaagcgacgctgtttgttgctgaacgcacgcttcaggaaggtatgagt

SEQ ID NO: 664908 - DNA, 75 bp, synthetic construct
  source 1..75: mol_type = other DNA
tttccatcctgcgtccggttttgcctggcagttcagcgtgctctcgcgttatctcgatccacaatggtcgattat

SEQ ID NO: 664909 - DNA, 75 bp, synthetic construct
  source 1..75: mol_type = other DNA
gcggataaccgctggtactggtatcagcgttatcaccatttgctggtcgatggcttcagtttcccggccattacc

SEQ ID NO: 664910 - DNA, 75 bp, synthetic construct
  source 1..75: mol_type = other DNA
ggttttgcctggcagtttagcgtgctctcgcgttatctcgatccacaatggtcgattatcggcattcagtcgccg

SEQ ID NO: 664911 - DNA, 75 bp, synthetic construct
  source 1..75: mol_type = other DNA
ctgggcgcggcggcaatcgctaaagctgatggtgcacaggtggtagtggcagataccagtccgactcgccgtgag

SEQ ID NO: 664912 - DNA, 75 bp, synthetic construct
  source 1..75: mol_type = other DNA
atcccggaaaaccgcgtggcggcggggcgcaatcattttgctgaaccggcagttcgtgagccagtagctccgcgt

SEQ ID NO: 664913 - DNA, 75 bp, synthetic construct
  source 1..75: mol_type = other DNA
ccctgccggtagcggaacgctggttgcgtcaggtgcaactgacgccgggtgaatcgccagtttgcgcccagccgt

SEQ ID NO: 664914 - DNA, 75 bp, synthetic construct
  source 1..75: mol_type = other DNA
gaaaaccgcgtagccgcagggcgtaatcattttgcagaaccggcagttcgtgagccggtagctccacgctacact

SEQ ID NO: 664915 - DNA, 75 bp, synthetic construct
  source 1..75: mol_type = other DNA
gcaggaagcctggcaggcctatgccgaagggcgcgatatggacgtgacggttaaaccggcggcgcatccggtggg

SEQ ID NO: 664916 - DNA, 75 bp, synthetic construct
  source 1..75: mol_type = other DNA
aagtgcgtttccatcagtcgcgtctggtgcatgactttatctatcagggcgtgctgagcgtgctacaacagcaac

SEQ ID NO: 664917 - DNA, 75 bp, synthetic construct
  source 1..75: mol_type = other DNA
atttaaccatatcgatgaaatcatccgccgcattgcgctggcgcgtttcgacgtcactatcaacctgtcgcataa

SEQ ID NO: 664918 - DNA, 75 bp, synthetic construct
  source 1..75: mol_type = other DNA
cagagaggttttcttctgtggtggcgtctggccaatgagatgtttatctccggaaacaaaaaacaaaggaaatgt

SEQ ID NO: 664919 - DNA, 75 bp, synthetic construct
  source 1..75: mol_type = other DNA
gccttagtgcacggattggtaagggtatcgtgttgccccacaattcaggtgtcgtcattcacggtaatgtgaata

SEQ ID NO: 664920 - DNA, 75 bp, synthetic construct
  source 1..75: mol_type = other DNA
ggcagtgtggaagaagaagttgggctacgcggggcacaaacctcggcggaacacattaaaccggatgtggtgatc

SEQ ID NO: 664921 - DNA, 75 bp, synthetic construct
  source 1..75: mol_type = other DNA
cgtgggtaaaacctgtgaaatcgatcttgaagcacacggcgaatttgaaaccacctctgccctgcatacctactt

SEQ ID NO: 664922 - DNA, 75 bp, synthetic construct
  source 1..75: mol_type = other DNA
tgtggttgagtaacaacacaccgttcaaaaatggcgtcgctattcgcggtggcgtaccggtttgctggccgtggt

SEQ ID NO: 664923 - DNA, 75 bp, synthetic construct
  source 1..75: mol_type = other DNA
ccttgcgcccctgcatccctgcaggcccggcaaagatggaggcacggcaccgcccggtgtcgcggaatatgtgac

SEQ ID NO: 664924 - DNA, 75 bp, synthetic construct
  source 1..75: mol_type = other DNA
ttcaggaaggtatgagtcccgaacgcgcctggtcgccgtggatagcggagctggatatctatcgtcaggattgtg

SEQ ID NO: 664925 - DNA, 75 bp, synthetic construct
  source 1..75: mol_type = other DNA
cagggtgaactgtacgattttgcctcgacgcagctggctccgacgatttcgcaaatcgacggcgtcggtgatgtc

SEQ ID NO: 664926 - DNA, 75 bp, synthetic construct
  source 1..75: mol_type = other DNA
cgttgcggtgccggtttcgctgattggtacgtttgcggcgatgtacctgtgtggtttcagtctcaataatctttc

SEQ ID NO: 664927 - DNA, 75 bp, synthetic construct
  source 1..75: mol_type = other DNA
agcaattgatctgcaaattgcccaggatcgctcccctactatccgcgcgtcgctggaagaggttgagcagacgct

SEQ ID NO: 664928 - DNA, 75 bp, synthetic construct
  source 1..75: mol_type = other DNA
tgcgcggcagttttgccggcacggcgcaggtgttccaggagacgatgaactcacaggtgatcctgattatcgccg

SEQ ID NO: 664929 - DNA, 75 bp, synthetic construct
  source 1..75: mol_type = other DNA
ggtgaatcatcaggggttgtcggcggcctcaaccatctcgttcaacttgccaaccgggaaatcgctttctgaggc

SEQ ID NO: 664930 - DNA, 75 bp, synthetic construct
  source 1..75: mol_type = other DNA
aggagacgatgaactcacaggtgatcctgattatcgccgccatcgccacggtgtatatcgtgctgggtatccttt

SEQ ID NO: 664931 - DNA, 75 bp, synthetic construct
  source 1..75: mol_type = other DNA
atgccttggatccaactgaaactgaacactaccggcgcgaatgctgaagaacttagcgatgcgctgatggaagcg

SEQ ID NO: 664932 - DNA, 75 bp, synthetic construct
  source 1..75: mol_type = other DNA
tgaagcttatgctgataacttcacgctcgacccggttgtggaaaaagaagagtggtgccgcattaccggtcgtaa

SEQ ID NO: 664933 - DNA, 75 bp, synthetic construct
  source 1..75: mol_type = other DNA
tggggcgacaccgatgtgattggtctgtttgacgctgaaaccgatatgaacgacgtggtggcgattctggaaaac

SEQ ID NO: 664934 - DNA, 75 bp, synthetic construct
  source 1..75: mol_type = other DNA
tagccctgcaacaaggctacggcaagtcgctgaaatgggtgctcaatcatacccgtctggtgggcgtggtgctgc

SEQ ID NO: 664935 - DNA, 75 bp, synthetic construct
  source 1..75: mol_type = other DNA
tgaggcttatgcagctaacttcacgctcgacccggttgtggaaaaagaagagtggtgtcgcattaccggtcgtaa

SEQ ID NO: 664936 - DNA, 75 bp, synthetic construct
  source 1..75: mol_type = other DNA
gtggtggtcgctaacatcctcgcaggcccgttacgtgaactggcaccgttaatcagcgtcctgccggtttcaggc

SEQ ID NO: 664937 - DNA, 75 bp, synthetic construct
  source 1..75: mol_type = other DNA
tgccctcggcgggcgttggagcgctgttggcgctggagctgttcaatgccccgttcagcctaatcgccctgatag

SEQ ID NO: 664938 - DNA, 75 bp, synthetic construct
  source 1..75: mol_type = other DNA
acaggtgttctgtagtggtgaagcgttaccgaccgatttatgccgtgaatggcaacagttaaccaacgtgccatt

SEQ ID NO: 664939 - DNA, 75 bp, synthetic construct
  source 1..75: mol_type = other DNA
tgggagccgaaaatccgcaaaaaactggcgacgttgccggaactggcggacgttaactctgaccagcaagacaac

SEQ ID NO: 664940 - DNA, 75 bp, synthetic construct
  source 1..75: mol_type = other DNA
tgggagccgaaaatccgcaaaaaactggcgacattgccagagctggctgatgttaactccgatcaggaagataat

SEQ ID NO: 664941 - DNA, 75 bp, synthetic construct
  source 1..75: mol_type = other DNA
tctcgcgttatctcgatccacaatggtcgattatcggcattcagtcgccgcgccctcatggccccatgcagaccg

SEQ ID NO: 664942 - DNA, 75 bp, synthetic construct
  source 1..75: mol_type = other DNA
aggccgttacccacgcttgtgtcattaaccaggcggcagtcactggtggtgatgcgcgccagttggtagggtatc

SEQ ID NO: 664943 - DNA, 75 bp, synthetic construct
  source 1..75: mol_type = other DNA
ggctggggcgattgtgcaaccgcatggactacgctgccggatttatctttatgcgtcgactgggctcggcggcgc

SEQ ID NO: 664944 - DNA, 75 bp, synthetic construct
  source 1..75: mol_type = other DNA
ttctgtcgccattggtatttcgttgctggtttccctgacgctaacgccgatgatgtgcggctggatgctaaaagc

SEQ ID NO: 664945 - DNA, 75 bp, synthetic construct
  source 1..75: mol_type = other DNA
caccatcgccacaggttttgtggtagatgacgccatcgtggtgctggaaaacattgcccgccatctggaagcagg

SEQ ID NO: 664946 - DNA, 75 bp, synthetic construct
  source 1..75: mol_type = other DNA
ctggacgacgtacgcactgccatcagcaatgccaacgtgcgtaaaccgcagggggcgctggaagatggcactcac

SEQ ID NO: 664947 - DNA, 75 bp, synthetic construct
  source 1..75: mol_type = other DNA
tgttacgcgaatttgccgtgacgctttctgtcgccattggtatttcgttgctggtttccctgacgctaacgccga

SEQ ID NO: 664948 - DNA, 75 bp, synthetic construct
  source 1..75: mol_type = other DNA
ggctgaatccgcaagcgctgtttaatcagggcgtgtcgctggacgatgtgcgcaccgccatcagcaatgccaacg

SEQ ID NO: 664949 - DNA, 75 bp, synthetic construct
  source 1..75: mol_type = other DNA
atgacctccagcagttcgctcggcagcacgcgcattattttgcagtttgattttgaccgggatatcaacggcgca

SEQ ID NO: 664950 - DNA, 75 bp, synthetic construct
  source 1..75: mol_type = other DNA
ttattgacgtgataggtaatgtgtacaaagaaaccggagaactgactgaagatggcgagccggtatgtgttaagg

SEQ ID NO: 664951 - DNA, 75 bp, synthetic construct
  source 1..75: mol_type = other DNA
gaaacagtagtctcaccgcaagccgttttcgatgcgccacaactcactaccgttgctaaagaatggccgctgttt

SEQ ID NO: 664952 - DNA, 75 bp, synthetic construct
  source 1..75: mol_type = other DNA
tgcctggcagccgcaaactggcgacatcatctttcagatctctcgctcatcgcaaagtaaagcgatccaactggc

SEQ ID NO: 664953 - DNA, 75 bp, synthetic construct
  source 1..75: mol_type = other DNA
gatttaacactcaaatttgccgacagggccgaattttcggcctttatggggagtgctggctattatgatgacgag

SEQ ID NO: 664954 - DNA, 75 bp, synthetic construct
  source 1..75: mol_type = other DNA
catcattaatgatgtaaaaaaatcgtcaatattcgataaatacgcggttgttgttgagcatcaacttcgtggctg

SEQ ID NO: 664955 - DNA, 75 bp, synthetic construct
  source 1..75: mol_type = other DNA
cagacagggccgacttttcggcctttatggagagtattggctattatgatgacgagtcgatgcaggatgatattc

SEQ ID NO: 664956 - DNA, 75 bp, synthetic construct
  source 1..75: mol_type = other DNA
gtataaaggatttaatgaaatgtgggttgaggcaagaaatttagcaggacagatatctgggatcgccaccgattt

SEQ ID NO: 664957 - DNA, 75 bp, synthetic construct
  source 1..75: mol_type = other DNA
ttggaaacgacggaatctttatccagcaagggaaaacaggaaaaaaacagataaaagcatggagtccacgattac

SEQ ID NO: 664958 - DNA, 75 bp, synthetic construct
  source 1..75: mol_type = other DNA
tcatcgaggccaaactggacgcgctttataacaaactggaagtggtacagcagtaccgcaataccggaggtcaat

SEQ ID NO: 664959 - DNA, 75 bp, synthetic construct
  source 1..75: mol_type = other DNA
atgaaatacaggctactgatcctcagcatgctggtttctgtgcctgcccttgcctggcagccggaaactggcgac

SEQ ID NO: 664960 - DNA, 75 bp, synthetic construct
  source 1..75: mol_type = other DNA
gaaatgggagcagattggaaacgacggaatctttatccagcaagggaaaacaggaaaaaaacagataaaagcatg

SEQ ID NO: 664961 - DNA, 75 bp, synthetic construct
  source 1..75: mol_type = other DNA
atggaaattgcctatctgtgtgcagcgagggtttccgatgtgttatcgctgaaatgggagcagattggaaacgac

SEQ ID NO: 664962 - DNA, 75 bp, synthetic construct
  source 1..75: mol_type = other DNA
ccgacagggccgacttttcggcctttatggagagtatcggctattatgatgatgagtcgatgcaggatgatattc

SEQ ID NO: 664963 - DNA, 75 bp, synthetic construct
  source 1..75: mol_type = other DNA
gacagggccgacttttcggcctttatggacagaaatggctattatgatgacgagtcgatgcaggatgatattctt

SEQ ID NO: 664964 - DNA, 75 bp, synthetic construct
  source 1..75: mol_type = other DNA
gacagggccgacttttcggcctttatggatagtactggctattatgatgacgagtcgatgcaggatgatattctt

SEQ ID NO: 664965 - DNA, 75 bp, synthetic construct
  source 1..75: mol_type = other DNA
gacagggccgacttttcggcctttatggaaagaactggctattatgatgacgagtcgatgcaggatgatattctt

SEQ ID NO: 664966 - DNA, 75 bp, synthetic construct
  source 1..75: mol_type = other DNA
gacagggccgacttttcggcctttatggagaggactggctattatgatgacgagtcgatgcaggatgatattctt

SEQ ID NO: 664967 - DNA, 75 bp, synthetic construct
  source 1..75: mol_type = other DNA
gacagggccgacttttcggcctttatggacaggagtggctattatgatgacgagtcgatgcaggatgatattctt

SEQ ID NO: 664968 - DNA, 75 bp, synthetic construct
  source 1..75: mol_type = other DNA
gacagggccgacttttcggcctttatggacagcactggctattatgatgacgagtcgatgcaggatgatattctt

SEQ ID NO: 664969 - DNA, 75 bp, synthetic construct
  source 1..75: mol_type = other DNA
gataatggatttttccatacgctggcggtgccgctgtttatctttaccaattttattattgcaatactgctcatc

SEQ ID NO: 664970 - DNA, 75 bp, synthetic construct
  source 1..75: mol_type = other DNA
ctgcggacatcgctcggtattcagcttgcccctgcgctggtcgcttgtagcgcctggttaagcgttaacggtggc

SEQ ID NO: 664971 - DNA, 75 bp, synthetic construct
  source 1..75: mol_type = other DNA
gttggggacgatagggatgggattcgcctggcgctatgccagccaggtttggcaagtcagccactggttggggga

SEQ ID NO: 664972 - DNA, 75 bp, synthetic construct
  source 1..75: mol_type = other DNA
gatgagtcgatgcaggatgatattcttattgacgtgataggtaacgtgtacaaagaaaccggagaactgactgaa

SEQ ID NO: 664973 - DNA, 75 bp, synthetic construct
  source 1..75: mol_type = other DNA
tcttgaaaagctgggcgttgagtacaaaattgttgaagagaatacttatgggatcgtgaaagaaaagatcccgga

SEQ ID NO: 664974 - DNA, 75 bp, synthetic construct
  source 1..75: mol_type = other DNA
aactgagcgcgccgttttaatgaaagcagaggacaaagaatgctcattcgtgacgaaaactattttactgataaa

SEQ ID NO: 664975 - DNA, 75 bp, synthetic construct
  source 1..75: mol_type = other DNA
tttaccgctgaattatgtccgtcgcgaggattatatccgtggccagacagtcatcgaggccaaactggacgcgct

SEQ ID NO: 664976 - DNA, 75 bp, synthetic construct
  source 1..75: mol_type = other DNA
gtgatgattggcgatttaagctctcacggcgtgttattaggtatattaggtttttttattataaccgtattgtca

SEQ ID NO: 664977 - DNA, 75 bp, synthetic construct
  source 1..75: mol_type = other DNA
cggttgtggtcggcgttatgttcctgttagttatgttcttctcaccgctggtggcgatggttcctccttacgcaa

SEQ ID NO: 664978 - DNA, 75 bp, synthetic construct
  source 1..75: mol_type = other DNA
taaaggcgatatgtgatgaccgtcgcagattcatcatgaatggggtgcagatgggttatatcaaggtgccagcag

SEQ ID NO: 664979 - DNA, 75 bp, synthetic construct
  source 1..75: mol_type = other DNA
accttggattcgacgcctctcgtgtcgtgccaacagctaatgaaaaccgtccacgtaacatcgcctttaattata

SEQ ID NO: 664980 - DNA, 75 bp, synthetic construct
  source 1..75: mol_type = other DNA
tatgcagtcgagcggttcgttaacatttggagattgctacatatcacttaacgagttcgccgcccagcttcgtaa

SEQ ID NO: 664981 - DNA, 75 bp, synthetic construct
  source 1..75: mol_type = other DNA
gtgcaccgggcgctggcgcgatctgaacctgtgtgtggtggtggtcgcagctctgtttgcactgaagattattct

SEQ ID NO: 664982 - DNA, 75 bp, synthetic construct
  source 1..75: mol_type = other DNA
caaattcttggcgttgctggcatggataccagcgccgtcttcgtcactacctgtctgatcgctgcattcggcagt

SEQ ID NO: 664983 - DNA, 75 bp, synthetic construct
  source 1..75: mol_type = other DNA
gtacttcttctgttacggcgtatattgagtcttcttccggcgtttctgttggtggtcgtaccggtctgacggcag

SEQ ID NO: 664984 - DNA, 75 bp, synthetic construct
  source 1..75: mol_type = other DNA
taatctgagtcgaaagtcgctttgtgccaaacttctttgccgactggaacaagctacaggggaaagaggaacaga

SEQ ID NO: 664985 - DNA, 75 bp, synthetic construct
  source 1..75: mol_type = other DNA
cagcttctcgtggagcgacgatcgccagtactgttcggaagtggtgtggaaggtttaccagaatgcgctgggaat

SEQ ID NO: 664986 - DNA, 75 bp, synthetic construct
  source 1..75: mol_type = other DNA
attccgttaatgagcagagcggtattttcgcaggccggggttattttgatatcactgtggggaatcacactcagc

SEQ ID NO: 664987 - DNA, 75 bp, synthetic construct
  source 1..75: mol_type = other DNA
actggatgatagccaacattccggtgagtctgcgtgtgggtattaccagcggtatcggtctgttcattggcatga

SEQ ID NO: 664988 - DNA, 75 bp, synthetic construct
  source 1..75: mol_type = other DNA
tcgataattacccaattcccaacccggatattacagagggtggtgttgttgcggcaacgactaaacctgcaggtg

SEQ ID NO: 664989 - DNA, 75 bp, synthetic construct
  source 1..75: mol_type = other DNA
agtttaaacgcgaatccgctcaactggttgttgaccagagatacaccgtggcagatgccgccaaagctatggatg

SEQ ID NO: 664990 - DNA, 75 bp, synthetic construct
  source 1..75: mol_type = other DNA
agtttaaacgcgaatccgctcaactggtagttgaccagacatacactgtggcagatgccgccaaagctatggatg

SEQ ID NO: 664991 - DNA, 75 bp, synthetic construct
  source 1..75: mol_type = other DNA
gttatggacagatgcagtatcgttattgcgggaaaagtggtttacgcctgcccgcgctgtcattgggcttatggc

SEQ ID NO: 664992 - DNA, 75 bp, synthetic construct
  source 1..75: mol_type = other DNA
atgacgttgcaggttgaattctggacggtggtgggtttcctcatcaccttcatgagctttgtcggtggcatagcc

SEQ ID NO: 664993 - DNA, 75 bp, synthetic construct
  source 1..75: mol_type = other DNA
agtttaaacgcgaatccgctcaactggtcgttgaccagatatacacggtggcagatgccgccaaagctatggatg

SEQ ID NO: 664994 - DNA, 75 bp, synthetic construct
  source 1..75: mol_type = other DNA
agtttaaacgcgaatccgctcaactggtcgttgaccagaaatacactgtggcagatgccgccaaagctatggatg

SEQ ID NO: 664995 - DNA, 75 bp, synthetic construct
  source 1..75: mol_type = other DNA
ggagagtaataaaaagctttatccctggtcgcagtttattgttgatagcaatggcgtcgcacgcggtgcctggca

SEQ ID NO: 664996 - DNA, 75 bp, synthetic construct
  source 1..75: mol_type = other DNA
ggatcgttttcagcccaccaccattgtgaacactgatgatgccatctttggtaccggctattttgtcgttggcaa

SEQ ID NO: 664997 - DNA, 75 bp, synthetic construct
  source 1..75: mol_type = other DNA
gacacttcattcacgagggagtatcggtaatactggcgggaatgaaacccgtccacgaaatattgcatttaattt

SEQ ID NO: 664998 - DNA, 75 bp, synthetic construct
  source 1..75: mol_type = other DNA
tggataccctggaaaataacggtgtgggctgcattgccttcactccgctcgcccagggattgttaaccggaaaat

SEQ ID NO: 664999 - DNA, 75 bp, synthetic construct
  source 1..75: mol_type = other DNA
gctcagggattgctgaccggaaaatatctcaacggcattccgcaagattcacggatgtatcgtgaagggaataaa

SEQ ID NO: 665000 - DNA, 75 bp, synthetic construct
  source 1..75: mol_type = other DNA
aaaaacagaatcgtccaaaaacaaattatatgtagccttaacacgagcacgttatagtgttgcaataatttatcc

SEQ ID NO: 665001 - DNA, 75 bp, synthetic construct
  source 1..75: mol_type = other DNA
ggctatccttatctttctcaggtgaataacgttgaccctcaggccatgatgatgatggccactctgttatccctg

SEQ ID NO: 665002 - DNA, 75 bp, synthetic construct
  source 1..75: mol_type = other DNA
agctatttttaacccggcactctgggctgttgttgctgttagtgcaacagcaatggcactgcaaactgcagttga

SEQ ID NO: 665003 - DNA, 75 bp, synthetic construct
  source 1..75: mol_type = other DNA
ggagtcgaacagagggaaccgaaccacagcgcagcactcagaatgcaagctctggctatccttatctttctcagg

SEQ ID NO: 665004 - DNA, 75 bp, synthetic construct
  source 1..75: mol_type = other DNA
cattaaacgtgctatggcaggtatataccgaactgtatccgaaatctttacataatcgttttgaagagctccaaa

SEQ ID NO: 665005 - DNA, 75 bp, synthetic construct
  source 1..75: mol_type = other DNA
tatcgtccaacgacagcccaaaaaatcggaattcatttttccatataacagcacttctgttactgcgggatttca

SEQ ID NO: 665006 - DNA, 75 bp, synthetic construct
  source 1..75: mol_type = other DNA
ttgccttgcttggggaagcctgggatatcgtccagcgacaacccaaaaaatcagaattcatttttccatataaca

SEQ ID NO: 665007 - DNA, 75 bp, synthetic construct
  source 1..75: mol_type = other DNA
ggcgtttcttttctgatgttgttggtccagagcattgggggcttaacgaataccccataccaaccccaccaattc

SEQ ID NO: 665008 - DNA, 75 bp, synthetic construct
  source 1..75: mol_type = other DNA
atggctgatcaaaataatccgtgggataccacgccagcggcggacagcgccgcacaatccgcagacgcctggggt

SEQ ID NO: 665009 - DNA, 75 bp, synthetic construct
  source 1..75: mol_type = other DNA
gccgttgggcgcgactcacgcagtcgcggcaaccgtcgctggtacaccactggccctgttggtctgctgacccgc

SEQ ID NO: 665010 - DNA, 75 bp, synthetic construct
  source 1..75: mol_type = other DNA
ggggggtcttcacttatgtctaaagttggcgatgtggctggcaaagtgggttcaaacatcgtaaaagcggtcact

SEQ ID NO: 665011 - DNA, 75 bp, synthetic construct
  source 1..75: mol_type = other DNA
tgcccctcagggattaaagactgcagcacaggtctttggcggaatatctatggccgcaagcattctgacagccgg

SEQ ID NO: 665012 - DNA, 75 bp, synthetic construct
  source 1..75: mol_type = other DNA
ggctgggcgttgcattaacagcggttgccgctgtttttaacccagctctctgggctgttgttgccgttagtgcag

SEQ ID NO: 665013 - DNA, 75 bp, synthetic construct
  source 1..75: mol_type = other DNA
caggcgttaaaaacagcagcgcaagcttttggcggtctatctcttgccgcaggtattctgacagccggcattggc

SEQ ID NO: 665014 - DNA, 75 bp, synthetic construct
  source 1..75: mol_type = other DNA
cagttaaaagcatctggcgttaaaaatattttcgatctgccatttagcgaaggcttaattcgttctctgaatctg

SEQ ID NO: 665015 - DNA, 75 bp, synthetic construct
  source 1..75: mol_type = other DNA
tgctgaaagacagcgatgatttatctatcgatctgttcggcctcaaccatatggtgttcattaaggatgtgctgg

SEQ ID NO: 665016 - DNA, 75 bp, synthetic construct
  source 1..75: mol_type = other DNA
actgactgggcggtagaaatgacctgtacgctgggtcgcaatggcgcgacgccacatccgcgaattacccatttt

SEQ ID NO: 665017 - DNA, 75 bp, synthetic construct
  source 1..75: mol_type = other DNA
ttcctcttaaaagcgtctgaagcagatttagcggtattcctgataccgtaccgaccccacaccacatactggctt

SEQ ID NO: 665018 - DNA, 75 bp, synthetic construct
  source 1..75: mol_type = other DNA
ccgcatgcatcaactgccgtcttctggagcccgcgcttaagcaactggcccgggaattcagcgtggtgatttatc

SEQ ID NO: 665019 - DNA, 75 bp, synthetic construct
  source 1..75: mol_type = other DNA
atgacgcagattaccaacgtttttggtcaggttcgcggtgctttccagtacctgattaactcatggaccacactg

SEQ ID NO: 665020 - DNA, 75 bp, synthetic construct
  source 1..75: mol_type = other DNA
gagtgaacaacagctcgcgaaaatttctgctgcgatggaacaacgtctgtcacgcaaagttaagctgaattgcaa

SEQ ID NO: 665021 - DNA, 75 bp, synthetic construct
  source 1..75: mol_type = other DNA
acaaacatcttgcagagataaccagccaatcaaatagcataaaacctgatactgcggaaagtaataacgccgttg

SEQ ID NO: 665022 - DNA, 75 bp, synthetic construct
  source 1..75: mol_type = other DNA
gtattgattaattgggaaccactgggtgcaaatgttgatgctgaggacgcagaggttctggctgaattgaagaaa

SEQ ID NO: 665023 - DNA, 75 bp, synthetic construct
  source 1..75: mol_type = other DNA
gcgcggtggggcttattactctgatgcagcgtgcgaagtgatcaacgctatctacaacgacaagcaagcagaaca

SEQ ID NO: 665024 - DNA, 75 bp, synthetic construct
  source 1..75: mol_type = other DNA
acttgaaaaagcgcaaatacctggggcactggaaggcgcgcaacgactggcgcagggcggtgcggtgacgcgcgg

SEQ ID NO: 665025 - DNA, 75 bp, synthetic construct
  source 1..75: mol_type = other DNA
tggatcgaactgggtcgtaaactctggctgcccgcaggcgttgaaggcgtctggcagctatgggaacagccgcag

SEQ ID NO: 665026 - DNA, 75 bp, synthetic construct
  source 1..75: mol_type = other DNA
tggcgatgccgaccattatggcgggcgttaaccagacgctgatgctggccctttctatggtggtcatcgctcgat

SEQ ID NO: 665027 - DNA, 75 bp, synthetic construct
  source 1..75: mol_type = other DNA
cgcgatcatattctgctggaatttggcggacgaaatcgtggcaagccaaccgatctgatgcctgttgtaagctat

SEQ ID NO: 665028 - DNA, 75 bp, synthetic construct
  source 1..75: mol_type = other DNA
tttcgtgagcctgacggatttgctgacattgccgatcgtcttcgtcatgtacaagatgaaatcaatcgttttatg

SEQ ID NO: 665029 - DNA, 75 bp, synthetic construct
  source 1..75: mol_type = other DNA
tcctccgcgcttgatgtaagtcgatatggtgtttcgacgtttggcgatctgcagatcgcgttccagtcaacaaac

SEQ ID NO: 665030 - DNA, 75 bp, synthetic construct
  source 1..75: mol_type = other DNA
gcgaagcgctccggggaactgacgctgggattcttcacgctcgatgacctggatgacgtgtgcaaggctttgggg

SEQ ID NO: 665031 - DNA, 75 bp, synthetic construct
  source 1..75: mol_type = other DNA
atgcaagagaagccattgactactaccaccagcatccaggcatgactgatgcagaaaaggcctatgtggtcgcgt

SEQ ID NO: 665032 - DNA, 75 bp, synthetic construct
  source 1..75: mol_type = other DNA
aaacgcttatgacaccggttatattctttgggaaaagctgacggcgctgcaccagttctgcacgcaaaccaaagc

SEQ ID NO: 665033 - DNA, 75 bp, synthetic construct
  source 1..75: mol_type = other DNA
ccgaagtaggtatcaacctgcatattggaacgaccgatattcaccacctgacactaccctggactcctgccagta

SEQ ID NO: 665034 - DNA, 75 bp, synthetic construct
  source 1..75: mol_type = other DNA
aactggcatatttacctaatccggcggtatccaaaatggcccgtgacatggctgtaaaagctgcgtacatgatga

SEQ ID NO: 665035 - DNA, 75 bp, synthetic construct
  source 1..75: mol_type = other DNA
tatgggattcggaactggtttgggtaaaacgacgaccgcgctggcactggaagcctataactttgaaaccgggcg

SEQ ID NO: 665036 - DNA, 75 bp, synthetic construct
  source 1..75: mol_type = other DNA
atgccatcaagaaaatcggtgggcgtttctggaacttcgaagttaacccggttgccgatgtggactttgaccgtc

SEQ ID NO: 665037 - DNA, 75 bp, synthetic construct
  source 1..75: mol_type = other DNA
attatcgcgcgatcatcgatgagaatcacaatacgacagcaattgttcgtgttaccgccattgatgcggaaaggg

SEQ ID NO: 665038 - DNA, 75 bp, synthetic construct
  source 1..75: mol_type = other DNA
ataatgctctcgataactacctgaaagcggcgaatgctgccgggaaggatatcggcatgatggaggcagaactga

SEQ ID NO: 665039 - DNA, 75 bp, synthetic construct
  source 1..75: mol_type = other DNA
tcctaagcggagaggggcgctcaaacagtcagatcagagaggaactggggattgagaaggtatacacggttacac

SEQ ID NO: 665040 - DNA, 75 bp, synthetic construct
  source 1..75: mol_type = other DNA
gcagactggaggcactgtcagcatcaccggagaaagcgttgccgcgctcatggtggcggcgtcttttacagagag

SEQ ID NO: 665041 - DNA, 75 bp, synthetic construct
  source 1..75: mol_type = other DNA
ctgtcagcgtcaccggagaacgatttaccgcgctcatggtggtggcgtcttttacagagaggtacccggtcatga

SEQ ID NO: 665042 - DNA, 75 bp, synthetic construct
  source 1..75: mol_type = other DNA
ttttcttggcaatggcgttaatgtcattaaaatttggtcaattggcaagcatggcagggccagtattaattatca

SEQ ID NO: 665043 - DNA, 75 bp, synthetic construct
  source 1..75: mol_type = other DNA
cgggcgtagtggtgactataatctttgctctgccgccgattatccgtctgacgattcttggtattaatcaggttc

SEQ ID NO: 665044 - DNA, 75 bp, synthetic construct
  source 1..75: mol_type = other DNA
tacgcctgcaccaaatgtcgagcattttaatattctcgatccgtttcataagacgctgatcccactcgacagttg

SEQ ID NO: 665045 - DNA, 75 bp, synthetic construct
  source 1..75: mol_type = other DNA
cgggaggtgaggagattgcagaacagagctgaggcgttgtcagcgtcaccggagacagatatcccccgctcatgg

SEQ ID NO: 665046 - DNA, 75 bp, synthetic construct
  source 1..75: mol_type = other DNA
tctatgtgaaaacagaaggtaaggcagaagcaggttttcttgatctggagaaaagtcgccgtcgtctgcgtcgcc

SEQ ID NO: 665047 - DNA, 75 bp, synthetic construct
  source 1..75: mol_type = other DNA
ccagctggaaaaatatctggagccaattcccaaagcggactgggagcaggtgaaagcgtattactacgccatgta

SEQ ID NO: 665048 - DNA, 75 bp, synthetic construct
  source 1..75: mol_type = other DNA
ggttcatcagcattgctgactggtatgcccagcatgcagtatcgccttattctgacgaagtacggcaagccatgt

SEQ ID NO: 665049 - DNA, 75 bp, synthetic construct
  source 1..75: mol_type = other DNA
gcttttgagcaaccaagcgtcaaaagaaaaatcaatgcaaataacgttattgaaaccatttcaatgctgattatc

SEQ ID NO: 665050 - DNA, 75 bp, synthetic construct
  source 1..75: mol_type = other DNA
cgcagtggtacgagcgtgcggctgaatgcgccaacgaaaccgtcatcttgtctggcggccgcgtggcgttcgttg

SEQ ID NO: 665051 - DNA, 75 bp, synthetic construct
  source 1..75: mol_type = other DNA
ggttcatcagcattgctgactggtatgcccagcatgcagtatcgccttatctgacgaagtacggcaagccatgtt

SEQ ID NO: 665052 - DNA, 75 bp, synthetic construct
  source 1..75: mol_type = other DNA
ctatagcctcggtatcgatacctggtggtatgacgtcaataaagcggccaaactgccgtccgccagcaaacaggg

SEQ ID NO: 665053 - DNA, 75 bp, synthetic construct
  source 1..75: mol_type = other DNA
tctcccagccggccgtgcgccccatctatagcctcggtatcgatacctggtggtatgacgtcaataaagcggcca

SEQ ID NO: 665054 - DNA, 75 bp, synthetic construct
  source 1..75: mol_type = other DNA
gtaccggcaagacggtagaggacattttccgtggtgcgcaggccagcttcaatgcatgggcaaagcttccaccgg

SEQ ID NO: 665055 - DNA, 75 bp, synthetic construct
  source 1..75: mol_type = other DNA
acggctactattcactgggaataaaaaactacgaattgggttgtcaggcgttacaccgtcaaaatatatttgagg

SEQ ID NO: 665056 - DNA, 75 bp, synthetic construct
  source 1..75: mol_type = other DNA
gggatgtcgcacagccgtgtgcggaggtgctggttcgcctgaggaaggcggagtacatcacagcgcgacgtccgg

SEQ ID NO: 665057 - DNA, 75 bp, synthetic construct
  source 1..75: mol_type = other DNA
cgggtcagaaaaagaaacatgatgcggagcatagcgaatgtggaaccttttgcgacgaacccgaaaaaaccagaa

SEQ ID NO: 665058 - DNA, 75 bp, synthetic construct
  source 1..75: mol_type = other DNA
gtctccccctcaagatattagtgagattgtccatcaagccaagagtcgggtagtcggaagagatttgtttgatat

SEQ ID NO: 665059 - DNA, 75 bp, synthetic construct
  source 1..75: mol_type = other DNA
tacccattcagaattagttttgctggctaatttggtttcatttcaccagaatgtggattcgcaaatattaccgtc

SEQ ID NO: 665060 - DNA, 75 bp, synthetic construct
  source 1..75: mol_type = other DNA
acgtagattcgcaaacattaccatcaatatctctttttgccaccagaatgcgtgcatctcgtgccattatagaag

SEQ ID NO: 665061 - DNA, 75 bp, synthetic construct
  source 1..75: mol_type = other DNA
gacaatagccaacagagaaaaactaattactgccagcatatttagtccatttttttatgctttttatgcatattt

SEQ ID NO: 665062 - DNA, 75 bp, synthetic construct
  source 1..75: mol_type = other DNA
atgggtaaagatgtcagacaaactcataatgctggcgaagggcctttgtgtaatcgtcggtatttcattttcact

SEQ ID NO: 665063 - DNA, 75 bp, synthetic construct
  source 1..75: mol_type = other DNA
ggcgtagacataattggcaatcttcaggccttactggtagataaaatctatggtgatttacgaaatcaactagct

SEQ ID NO: 665064 - DNA, 75 bp, synthetic construct
  source 1..75: mol_type = other DNA
atctggaattgctccggaaatgcgctgagcaaatatcatatgggctgggatacagaaacgaaaatgagcacttac

SEQ ID NO: 665065 - DNA, 75 bp, synthetic construct
  source 1..75: mol_type = other DNA
ctcggggcaacgctgcgctgcggcgaacacactgaaattaacgacgtgatccatgtacggggtgacgatggaaca

SEQ ID NO: 665066 - DNA, 75 bp, synthetic construct
  source 1..75: mol_type = other DNA
ggcgctgccagtagatgatggcggttacagttctgcacccgctgtatttggggtgcttacttacatcatcaatga

SEQ ID NO: 665067 - DNA, 75 bp, synthetic construct
  source 1..75: mol_type = other DNA
gatgcctcactttcagcctgtgatggctcgctgctgatctgcgcgatagacggagaatttaggatcaagcgatat

SEQ ID NO: 665068 - DNA, 75 bp, synthetic construct
  source 1..75: mol_type = other DNA
cgatgcagaggcgatggatccacgttatctggatatagtggcagaagcctgtatgagccggaaccggaccatcag

SEQ ID NO: 665069 - DNA, 75 bp, synthetic construct
  source 1..75: mol_type = other DNA
atactgagttcggattccgaaccatcagaaaaatcagaaggttatcacagagttcggaaaccgaaccattacgta

SEQ ID NO: 665070 - DNA, 75 bp, synthetic construct
  source 1..75: mol_type = other DNA
agagcggatagtgcagaaaggccgacaacaggacggaaaaatacaaagcggactgctgtttaccggaaatgtgca

SEQ ID NO: 665071 - DNA, 75 bp, synthetic construct
  source 1..75: mol_type = other DNA
tgccagatttaagtaatgaagaggcactggagagtgctgcgatattaagtctggtaaatgccgaatcggtacaaa

SEQ ID NO: 665072 - DNA, 75 bp, synthetic construct
  source 1..75: mol_type = other DNA
ggtgaaggatgcctgatagccgatcatctacaagcggtctgtgcatttctggaaggtaaacatgctctcgaacgc

SEQ ID NO: 665073 - DNA, 75 bp, synthetic construct
  source 1..75: mol_type = other DNA
cgggaagagctggattattttttagatgcgctcacgttgacgccacacacgcgcaatacgtttaccgataaaaag

SEQ ID NO: 665074 - DNA, 75 bp, synthetic construct
  source 1..75: mol_type = other DNA
actggttcaaacgataagctgtgtatgtgatccaaagtcaaacgaatcggaaaaaaattttgctcttttgttgct

SEQ ID NO: 665075 - DNA, 75 bp, synthetic construct
  source 1..75: mol_type = other DNA
tccggcaggtcagaaaaagaaacgtgatgcggagcatagcgaatgtggaactttttgcgacgaacccgaaaaaac

SEQ ID NO: 665076 - DNA, 75 bp, synthetic construct
  source 1..75: mol_type = other DNA
ggcacgcatgatgcccgggccggggatatccgtgatgtggcacagccgtgtgcggaggtgctggttcgcctgggg

SEQ ID NO: 665077 - DNA, 75 bp, synthetic construct
  source 1..75: mol_type = other DNA
gtctcagacgtggcaggtaaactccagtgtgtgttgactgatgatgtatacagcgccagtaagaaaacccgctta

SEQ ID NO: 665078 - DNA, 75 bp, synthetic construct
  source 1..75: mol_type = other DNA
tgcaggcgcttctggtagcagagcaggatgaggctatcgggtatcgtccgcgtattctggcggcgcctgggcttg

SEQ ID NO: 665079 - DNA, 75 bp, synthetic construct
  source 1..75: mol_type = other DNA
tggatgcactggtgacagccggaaaactcatcggggctgagtgctggttcgatatcatcgacaacggcacaacca

SEQ ID NO: 665080 - DNA, 75 bp, synthetic construct
  source 1..75: mol_type = other DNA
cacgcgtcaaagaaaacaccgacctcgtgaccgcgattaatgacattgattccagtgtcattggcatcgtggcca

SEQ ID NO: 665081 - DNA, 75 bp, synthetic construct
  source 1..75: mol_type = other DNA
agattaccacgctgatcaaacgcgacggcttccggttctgggggaaccgcaccaccgacaccgaagagtatattt

SEQ ID NO: 665082 - DNA, 75 bp, synthetic construct
  source 1..75: mol_type = other DNA
gcattccgatgtacgacacgcaggaagtaaccgcacagctacgcgtaattgcgaagcagctgcgtgcattctctt

SEQ ID NO: 665083 - DNA, 75 bp, synthetic construct
  source 1..75: mol_type = other DNA
atccggtctactggtctctccagtcagaagacagtgatgccaataacctcaataacaaagaaatcaccacaatta

SEQ ID NO: 665084 - DNA, 75 bp, synthetic construct
  source 1..75: mol_type = other DNA
cccgccgtacagcgatattccgtcgttcctcgtaaaagcgtctgaagcagatttagcggtattcctgataccgta

SEQ ID NO: 665085 - DNA, 75 bp, synthetic construct
  source 1..75: mol_type = other DNA
aagaacttacaccgtgaatttattttcagtctggatggtgctgcaactaagcacgatacgttattaccccgcttt

SEQ ID NO: 665086 - DNA, 75 bp, synthetic construct
  source 1..75: mol_type = other DNA
caggcaaggaaaacccattaagtgcattgcagatgctctcagaatgcctctgagcacgtcatacaggattgctca

SEQ ID NO: 665087 - DNA, 75 bp, synthetic construct
  source 1..75: mol_type = other DNA
acaagccgctgacgccgtcgaacgtgaaggatgtgttaagcgatatccgggcaaaactgagtgcccttgtgacag

SEQ ID NO: 665088 - DNA, 75 bp, synthetic construct
  source 1..75: mol_type = other DNA
accgatgatatccacaatcagtcatgggttggtgaaaaggtattctgtaacccaccatacagcgacactaaaaca

SEQ ID NO: 665089 - DNA, 75 bp, synthetic construct
  source 1..75: mol_type = other DNA
tcagtctagatggtgctgcaactgagcatgacacgctgttaccacgattcaccgatgatattcacaatcagtcat

SEQ ID NO: 665090 - DNA, 75 bp, synthetic construct
  source 1..75: mol_type = other DNA
gatgcgaacaacctgaacaacaaggaaatcaccacgattattcgccgtaacggcttccgcttctgggggaaccgt

SEQ ID NO: 665091 - DNA, 75 bp, synthetic construct
  source 1..75: mol_type = other DNA
gctgttatgcaacttagtgctgatatggcactgaatgaggccagcaaaattatcatggctgatacggaggtggtg

SEQ ID NO: 665092 - DNA, 75 bp, synthetic construct
  source 1..75: mol_type = other DNA
aaacagaatatgccggggctttcgttcctcattcactggctgtaatgcaacttagtgctgatatggcactgaatg

SEQ ID NO: 665093 - DNA, 75 bp, synthetic construct
  source 1..75: mol_type = other DNA
tgaaacgggaatttgatggcgcacaggaagatgcagcgggcgcattgttgagcgttgctggcatgatgaaagctg

SEQ ID NO: 665094 - DNA, 75 bp, synthetic construct
  source 1..75: mol_type = other DNA
ggctcctgtggcgttctcacgcgcccttgcagtgacggctgaaggtggacaggccggaagcaataccagaaccag

SEQ ID NO: 665095 - DNA, 75 bp, synthetic construct
  source 1..75: mol_type = other DNA
gatcgttttaattccctgaaacaagaattttccggcgttcctgatgatgcggctgatgcgctttcgtcaatgcca

SEQ ID NO: 665096 - DNA, 75 bp, synthetic construct
  source 1..75: mol_type = other DNA
atgtgcaataaaaccacaccggacgcagccgccgccgcgctcactacgctgatgcacgcgcttattgatattgaa

SEQ ID NO: 665097 - DNA, 75 bp, synthetic construct
  source 1..75: mol_type = other DNA
tttgctgtcctgctggcaaacattacggttcccctgatcgattactacacgcgtccacgcgtctacggccatcgc

SEQ ID NO: 665098 - DNA, 75 bp, synthetic construct
  source 1..75: mol_type = other DNA
ctcgcagccgtgccaggaatcgcagcgcaactgtggttttttggttggggtactctcgttcagatcctgttggcg

SEQ ID NO: 665099 - DNA, 75 bp, synthetic construct
  source 1..75: mol_type = other DNA
tgatgctcttatggccggacttcatcgcctacaacccgaaaagtggcgaaaacgaaacgttccccgcgcctgctt

SEQ ID NO: 665100 - DNA, 75 bp, synthetic construct
  source 1..75: mol_type = other DNA
cagccgccgccgcgctcactacgctgatgcacgcgcttattgatattgaatgcacggcagagcttgcacagggag

SEQ ID NO: 665101 - DNA, 75 bp, synthetic construct
  source 1..75: mol_type = other DNA
atcgcagccgtgcccggaatcgctgcgcaactttggttttttggctggggtactctcgttcagatcctcctggcg

SEQ ID NO: 665102 - DNA, 75 bp, synthetic construct
  source 1..75: mol_type = other DNA
cagatcctgttggcgtcggtcagtgctctgttagccgaagctctcgtactcaaactacgcaagcagtcggtagcc

SEQ ID NO: 665103 - DNA, 75 bp, synthetic construct
  source 1..75: mol_type = other DNA
cctacactggtaactatgagttcccacaaccgctgcacgatgcgctggataaattccaggccgataccggtatcg

SEQ ID NO: 665104 - DNA, 75 bp, synthetic construct
  source 1..75: mol_type = other DNA
gccttaatactatcaatcgttgcatatttacagattataacggattatggtttttcttttagtgcaagtcgtgcg

SEQ ID NO: 665105 - DNA, 75 bp, synthetic construct
  source 1..75: mol_type = other DNA
gtatataaaggaagcaagaagtggcaagctatctaaaaaaccacgtaatccatattatgctgatataagatgttt

SEQ ID NO: 665106 - DNA, 75 bp, synthetic construct
  source 1..75: mol_type = other DNA
actggctttggattgttcatataaggttttagcgtattctgaaggtaataaaatggccttggatatagtacgaag

SEQ ID NO: 665107 - DNA, 75 bp, synthetic construct
  source 1..75: mol_type = other DNA
ttgccgggtattatgcggagagtcgttattagcgaagtggcaatatccggtgggaacgttgggcatcgagtatcg

SEQ ID NO: 665108 - DNA, 75 bp, synthetic construct
  source 1..75: mol_type = other DNA
tagtcaaggccgtattgtcgctatttacaccactgacgcaagctatatatccttataattgtcgtaagttttcac

SEQ ID NO: 665109 - DNA, 75 bp, synthetic construct
  source 1..75: mol_type = other DNA
tgttcttaataatgtattcggcattcagatattgagtgcatcaggaagaagtaaaatatatagtaggatggtatt

SEQ ID NO: 665110 - DNA, 75 bp, synthetic construct
  source 1..75: mol_type = other DNA
atgcagaaattgacgctatgatgggtaccacgccgatggttggcgtgaacgacgttcagggcgaggtgttctatc

SEQ ID NO: 665111 - DNA, 75 bp, synthetic construct
  source 1..75: mol_type = other DNA
gtcctgagcgatgccaaagcgaaaggtgttgagctggcgggtgtgaacgtgatgacaatggactacggtaacgcg

SEQ ID NO: 665112 - DNA, 75 bp, synthetic construct
  source 1..75: mol_type = other DNA
acgttaaaccggctcctgatgttcagccagccccagctgataagtcaaacgacaactatgctgtcgtagcctgga

SEQ ID NO: 665113 - DNA, 75 bp, synthetic construct
  source 1..75: mol_type = other DNA
gatattctcggtgttaaccatgccgccagcctggcctctgtgggggctctacttcttatgccgtcactgcccgtg

SEQ ID NO: 665114 - DNA, 75 bp, synthetic construct
  source 1..75: mol_type = other DNA
aacccattggaatctgttcgttttggatacggaactatcaagaaactcatcagttatcgagtaatacctatgtta

SEQ ID NO: 665115 - DNA, 75 bp, synthetic construct
  source 1..75: mol_type = other DNA
atgtcagatcgtatgcgcccgctagggcacagctgggaagagagccttacctactcatttgaaaaaactcccgct

SEQ ID NO: 665116 - DNA, 75 bp, synthetic construct
  source 1..75: mol_type = other DNA
taaacctaaccagtttcagaacacaattcagttttttgaaacgtggatgaattcaaaactttctcgcggaaatac

SEQ ID NO: 665117 - DNA, 75 bp, synthetic construct
  source 1..75: mol_type = other DNA
gcaacggggcaaaatacaaccccacgacgttttcaccggtggatgcgcagacggtggaacaactgaagatgaccg

SEQ ID NO: 665118 - DNA, 75 bp, synthetic construct
  source 1..75: mol_type = other DNA
gaggcagtgagccatattcctgttccgcgtgatggtcgtgactatgatccggaagtactgcagaaggcggtgaat

SEQ ID NO: 665119 - DNA, 75 bp, synthetic construct
  source 1..75: mol_type = other DNA
accgcagggccgacggcaacacgctggcggtcggtggacagcttaaccgcctcagtgcggtgaagaacttcttcc

SEQ ID NO: 665120 - DNA, 75 bp, synthetic construct
  source 1..75: mol_type = other DNA
aagcgcgcgggctgctgtacgcgccacagataagcctggcggtgctggaagcgtaccagcgccatcttcgcagct

SEQ ID NO: 665121 - DNA, 75 bp, synthetic construct
  source 1..75: mol_type = other DNA
gccatgtggcgctggagtgggtgatgcgctacctgcgtaacgtccggcctcacctgacgcaacgcgccgacagcg

SEQ ID NO: 665122 - DNA, 75 bp, synthetic construct
  source 1..75: mol_type = other DNA
tgaccgccgataaacccggagaagcgcatgcatcaggctggaccctggctgccaaacggggacgggatgcaggag

SEQ ID NO: 665123 - DNA, 75 bp, synthetic construct
  source 1..75: mol_type = other DNA
gacggtaataaggcaatcactgaaacagagcatgatgcggtgaaggcgatgttcagggggattctgagaaaatga

SEQ ID NO: 665124 - DNA, 75 bp, synthetic construct
  source 1..75: mol_type = other DNA
ccccggcgatacggtgacgtgggggggctcgctgtggcactgcaacagtatgaccgaagataaacccggagaagc

SEQ ID NO: 665125 - DNA, 75 bp, synthetic construct
  source 1..75: mol_type = other DNA
accccggatgatgtgcgtccgatgcttgaacagatggtgacagaggcagtgagccatattcctgttccgcgtgat

SEQ ID NO: 665126 - DNA, 75 bp, synthetic construct
  source 1..75: mol_type = other DNA
ctgtggtggtccggcagagcagtggccagcgtacggaaaaaacattttccctgccggtgatgctctaccgcggtg

SEQ ID NO: 665127 - DNA, 75 bp, synthetic construct
  source 1..75: mol_type = other DNA
gcaggacgggcgtgatgccacggcactggaaatactccccgccattgacgatcaaaaatcctttccccggggcac

SEQ ID NO: 665128 - DNA, 75 bp, synthetic construct
  source 1..75: mol_type = other DNA
ccagaacatccacggtaagtgtgcaacgtctgcgattgccaacctgcatgcgcagctgaaaggcctctatggcaa

SEQ ID NO: 665129 - DNA, 75 bp, synthetic construct
  source 1..75: mol_type = other DNA
ctgaacaatacatcgtgcgcaagcgtggtgcatttgttgacgcttacatgaaaccacgcaaccaaaacaagcaaa

SEQ ID NO: 665130 - DNA, 75 bp, synthetic construct
  source 1..75: mol_type = other DNA
gtgaccatactcgttcggcgattgttgtccaccggcgcggtcagaattccaatatggcttctctgagctgggaag

SEQ ID NO: 665131 - DNA, 75 bp, synthetic construct
  source 1..75: mol_type = other DNA
gtagcggtggagaaaaagagattatcgcttcttacgtgttaacagcttcacttagctacgcactttgtcctgcgg

SEQ ID NO: 665132 - DNA, 75 bp, synthetic construct
  source 1..75: mol_type = other DNA
agtgctgagcgatgaagagattgccgtagtgctggagaaattcaaacctatgggttacgaattgaagagtaattt

SEQ ID NO: 665133 - DNA, 75 bp, synthetic construct
  source 1..75: mol_type = other DNA
gcagatggaacagagctggcagcagtgaccgaattcctggcgttcatttcacgcaatatgcatgacgaaagcccg

SEQ ID NO: 665134 - DNA, 75 bp, synthetic construct
  source 1..75: mol_type = other DNA
atgattgtgaaagttccagatgagagcatagcgagagacctgctggttgcgtgggtaaagcgccagccatatgag

SEQ ID NO: 665135 - DNA, 75 bp, synthetic construct
  source 1..75: mol_type = other DNA
tgtgacccgaaacaggcggttgcggtggcgaacaaagtcgttaacgacggcattaaatacgtgattggtcacctc

SEQ ID NO: 665136 - DNA, 75 bp, synthetic construct
  source 1..75: mol_type = other DNA
caggcggttgcggatatcaacgccaaaggcggcgttaaaggcaacaaactgcaaatcgtaaaatatgacgatgcc

SEQ ID NO: 665137 - DNA, 75 bp, synthetic construct
  source 1..75: mol_type = other DNA
cgatgacagaatgcatgatttatcggatgcgttttgtattgtcggtccccagtcgcaggcaaggaggattagcgg

SEQ ID NO: 665138 - DNA, 75 bp, synthetic construct
  source 1..75: mol_type = other DNA
cattatccttgatgaagctttctcccgcagttctcatgcggtggctggcaggatcattgccgcgctcagagaatt

SEQ ID NO: 665139 - DNA, 75 bp, synthetic construct
  source 1..75: mol_type = other DNA
cgtgacacgcctcatgctatgacggtgcagggattaatgtctggtaaacagcgtttttatgacaagcatgatcag

SEQ ID NO: 665140 - DNA, 75 bp, synthetic construct
  source 1..75: mol_type = other DNA
cctggactccgaccaggggccgacggcggcgaaatatattcttgagaaagtgaaaccgcaacgcattgctatcgt

SEQ ID NO: 665141 - DNA, 75 bp, synthetic construct
  source 1..75: mol_type = other DNA
atggaaagaacacgtttatcccgtgaaataattgaaacctgtctggaaatgacgcgccttgggttaaatcagggg

SEQ ID NO: 665142 - DNA, 75 bp, synthetic construct
  source 1..75: mol_type = other DNA
atcctggcatgtttcttcgtgatattggtgctgagtaccaggaagccgccaaaaatttcatgcagttccttaatg

SEQ ID NO: 665143 - DNA, 75 bp, synthetic construct
  source 1..75: mol_type = other DNA
cgacactatcgccgccattgctgcggcatctggctgccatcgggaacaatctgaaccagacagcccggaaggtga

SEQ ID NO: 665144 - DNA, 75 bp, synthetic construct
  source 1..75: mol_type = other DNA
cctgggtgagcctgtcgcccgttccgggaggctgccgacgctggcaccgccgttactgcgtcagctggccgccat

SEQ ID NO: 665145 - DNA, 75 bp, synthetic construct
  source 1..75: mol_type = other DNA
tttagcgtgtatggtgcgactatcgccttttttgtcgtggcagtgggaggtattgccgttgggatcgccgttacc

SEQ ID NO: 665146 - DNA, 75 bp, synthetic construct
  source 1..75: mol_type = other DNA
gaattcaatcctgaactttttctcttattgtttatacctcccttgttgtttgctgaaagctcaaaaatacaacct

SEQ ID NO: 665147 - DNA, 75 bp, synthetic construct
  source 1..75: mol_type = other DNA
attacgacaacgccccttactgcacctgcaatggagaaaatattcagcgacgcctgggtgttgctgaataaaagg

SEQ ID NO: 665148 - DNA, 75 bp, synthetic construct
  source 1..75: mol_type = other DNA
acgagcaccggcggctgcttgagcgctgtgacggcaggcagctggcggcgtggatgcggcagacctgcctggacg

SEQ ID NO: 665149 - DNA, 75 bp, synthetic construct
  source 1..75: mol_type = other DNA
gccggtatgggtaacaacctgaaccagatcgcccggaaagtgaatgcaggtggtgccggtcatgaccgggtgcag

SEQ ID NO: 665150 - DNA, 75 bp, synthetic construct
  source 1..75: mol_type = other DNA
gcaccgccgttactgcgtcagctggccgccatcgggaataacctgaatcagacggcgaggaaggtgaacagcggg

SEQ ID NO: 665151 - DNA, 75 bp, synthetic construct
  source 1..75: mol_type = other DNA
gttcaggtggtggccgcactgatggccatcggggacgagctgcgccggctgcgtctggccgtcagggaacagggg

SEQ ID NO: 665152 - DNA, 75 bp, synthetic construct
  source 1..75: mol_type = other DNA
tggatgaggcagacctgcctgggcgaaaagcctgcgcgtaccggaaagcttccctctatctcgccggcgctgctg

SEQ ID NO: 665153 - DNA, 75 bp, synthetic construct
  source 1..75: mol_type = other DNA
ggccgcactgatggccatcggggatgagctgcgccggctgcgtctggcggtcagggaacagggggcgcgggatga

SEQ ID NO: 665154 - DNA, 75 bp, synthetic construct
  source 1..75: mol_type = other DNA
cgctttgttaggcaatcattcaaatggtgcaagccgacgcatcagagaatacagaaacggtgaaaaacctattcc

SEQ ID NO: 665155 - DNA, 75 bp, synthetic construct
  source 1..75: mol_type = other DNA
agacttactcaaaaaatgccgtgtccgcacaagaagtaaaagaatatgtcgagttggtcaaacatgtttttgatc

SEQ ID NO: 665156 - DNA, 75 bp, synthetic construct
  source 1..75: mol_type = other DNA
ggctattggtgcatacagcggtatgcggcttaatgaaatatgtacgctacgcgaaagcagcattaaaaatgtcga

SEQ ID NO: 665157 - DNA, 75 bp, synthetic construct
  source 1..75: mol_type = other DNA
atgaagggtaaagcgttactggcaggatgtatcgcgctggcattcagcaatatggctctggcagaagatattaaa

SEQ ID NO: 665158 - DNA, 75 bp, synthetic construct
  source 1..75: mol_type = other DNA
ggtacgtatgaattacttttgctcctggctgatgaacatccagattaccagctcgttaagagagaaaaaaatcag

SEQ ID NO: 665159 - DNA, 75 bp, synthetic construct
  source 1..75: mol_type = other DNA
attgttggaatggttggcgctgtcgacgtatggcgttgggaatggtggcaggcagggcttcttttctttggcggc

SEQ ID NO: 665160 - DNA, 75 bp, synthetic construct
  source 1..75: mol_type = other DNA
gagcgtgggattaaggttgtcgcgtcaaacagcgatctggaaatggtgcattacctgtatgcaggatttgacgct

SEQ ID NO: 665161 - DNA, 75 bp, synthetic construct
  source 1..75: mol_type = other DNA
gccttcaaccactccggcaaatcctttggttctgaatctgtggaagctgcggcgcgttttctttatctgaaccgt

SEQ ID NO: 665162 - DNA, 75 bp, synthetic construct
  source 1..75: mol_type = other DNA
gaatacggattatgacgagtatctgatagctgatgtgaatcctgaccttgttaatctgtataagacgatggctta

SEQ ID NO: 665163 - DNA, 75 bp, synthetic construct
  source 1..75: mol_type = other DNA
catacgcagcagttcacaagggcaaagcgtaaagctcttggtgaacttgccgcagagaggaaagtgtttcattca

SEQ ID NO: 665164 - DNA, 75 bp, synthetic construct
  source 1..75: mol_type = other DNA
tatcaggcgcaactgaagcggcataatctgcgtggaagtatgagcgcaaaaggttgctgctacgataatgcctgc

SEQ ID NO: 665165 - DNA, 75 bp, synthetic construct
  source 1..75: mol_type = other DNA
gcagaaagagcaaatcatcgcatcctatcctgagcatgagagagaggcgcgtgctcgcggtattcctacgatggg

SEQ ID NO: 665166 - DNA, 75 bp, synthetic construct
  source 1..75: mol_type = other DNA
tgagaaaggtgatctgaaaggctttgagttcggtgtgtttgactggcacgccaacggcacagcgaccgatgcgaa

SEQ ID NO: 665167 - DNA, 75 bp, synthetic construct
  source 1..75: mol_type = other DNA
aaaatgacagctgtgagaaaatactgacgccgacagagtggaaactactgtgggttaagctggaaggaaagccgc

SEQ ID NO: 665168 - DNA, 75 bp, synthetic construct
  source 1..75: mol_type = other DNA
accacaacgacaacggactcaacgactgaaccggccccggaaccggatatcgaacaaaaaaaacgcggcctatgg

SEQ ID NO: 665169 - DNA, 75 bp, synthetic construct
  source 1..75: mol_type = other DNA
aatacgagaagtaaaaaagatgcactggtacttcttaaggatatgactgagtggatggactcaaaaataagaaca

SEQ ID NO: 665170 - DNA, 75 bp, synthetic construct
  source 1..75: mol_type = other DNA
ccgtcgaagcgttacgtggtttacgcacgagccttcactttgccatgatggaagcgaagaataatgtgttgatga

SEQ ID NO: 665171 - DNA, 75 bp, synthetic construct
  source 1..75: mol_type = other DNA
agttaaaggtgtgattctgaacgcgaccgagaagaaagcattgagttattacggttactacaactattcatacaa

SEQ ID NO: 665172 - DNA, 75 bp, synthetic construct
  source 1..75: mol_type = other DNA
gctgcaaacgtgcatgtggctcgcagtacctggcgcttgctggtcagttacatcaacaaccgtatgattgttcgc

SEQ ID NO: 665173 - DNA, 75 bp, synthetic construct
  source 1..75: mol_type = other DNA
ccgatgatgattgccgctgcgctggcgatgccggaaatcccgctgccggtgttctgcctgatggttggtgcggca

SEQ ID NO: 665174 - DNA, 75 bp, synthetic construct
  source 1..75: mol_type = other DNA
gggaatgaggttagcaacacgataaccgtatataccgaactgcttcacaagatgcagccagtgcagcgcccggaa

SEQ ID NO: 665175 - DNA, 75 bp, synthetic construct
  source 1..75: mol_type = other DNA
acaaggcattagccaccatctaccccgtaacgcatgacgactggacaaacgccgacgtatacggcgcaccatacc

SEQ ID NO: 665176 - DNA, 75 bp, synthetic construct
  source 1..75: mol_type = other DNA
atatctagatattcttatcagacatgatgaattcatcataggtattgagcataaagtgttggctgatacatataa

SEQ ID NO: 665177 - DNA, 75 bp, synthetic construct
  source 1..75: mol_type = other DNA
ggcagcctgagttcacagataaaatactctccaggaaacccggggcggttcaatccgttgctggcgctggcgatt

SEQ ID NO: 665178 - DNA, 75 bp, synthetic construct
  source 1..75: mol_type = other DNA
atgaaaattaactatccgttgctggcgctggcgattggcgcgtttggtatcgggacaacggagttctcgccaatg

SEQ ID NO: 665179 - DNA, 75 bp, synthetic construct
  source 1..75: mol_type = other DNA
cccgttcggtaagtacaaaaagccttatttccccgctgatgaaatccgcgcctttgctgaaaaagcgaaacgcgc

SEQ ID NO: 665180 - DNA, 75 bp, synthetic construct
  source 1..75: mol_type = other DNA
tctggaggcgctgtcccgtcgtgatgcccgtgaggatccgttcgcgtcttccgggaaaagcgtcgtcaggcacac

SEQ ID NO: 665181 - DNA, 75 bp, synthetic construct
  source 1..75: mol_type = other DNA
gccacgcaggggcatcatattcaggcaaattcaacgtcttttttcagaaatggcggcaggccgtccggggtgatt

SEQ ID NO: 665182 - DNA, 75 bp, synthetic construct
  source 1..75: mol_type = other DNA
cgcggtagttgccatgtctaaatcatttttaggcacctactttggcgttattgaaggtgcgacggaattagtcaa

SEQ ID NO: 665183 - DNA, 75 bp, synthetic construct
  source 1..75: mol_type = other DNA
gctatggataaatgcaaaaaaattatgaaggtcgcttatctcatcatctgcgtgagcgtgctgttcttcgtcttt

SEQ ID NO: 665184 - DNA, 75 bp, synthetic construct
  source 1..75: mol_type = other DNA
gcgcaacatggcgcgccgaaacatttaaccgatctttctgcattgccgtgcctggtcattaaagagcgcgatcat

SEQ ID NO: 665185 - DNA, 75 bp, synthetic construct
  source 1..75: mol_type = other DNA
aatgcggggaaaacggccattctgagcaacggggcaaaatacaaccccacgacgttttcacctgtggatgcgcag

SEQ ID NO: 665186 - DNA, 75 bp, synthetic construct
  source 1..75: mol_type = other DNA
gccatgtggcgctggagtgggtaacgcgctacctgcgtaacgtccgacctcacctgacgcaacgcgccgacagta

SEQ ID NO: 665187 - DNA, 75 bp, synthetic construct
  source 1..75: mol_type = other DNA
acggcgcggacacgcggcatatccaggcgatcctcgggcatgagaagctggagacgacgcaggtctacacgcggg

SEQ ID NO: 665188 - DNA, 75 bp, synthetic construct
  source 1..75: mol_type = other DNA
gcagggggatattgcccgtctctgtcgtcgtcccaatgcacagcagaatcgtatccagttttttgaactgtggct

SEQ ID NO: 665189 - DNA, 75 bp, synthetic construct
  source 1..75: mol_type = other DNA
cctgacggcgcatctgacggtaataaggcaatcagtgaaacagagcatgatgcggttgaaagcgatgttcagggg

SEQ ID NO: 665190 - DNA, 75 bp, synthetic construct
  source 1..75: mol_type = other DNA
cggtaccgcgtgatggtcgtgattatgatccggatgtactgcagcaggcggtgaatgatgcggttgcgaatattc

SEQ ID NO: 665191 - DNA, 75 bp, synthetic construct
  source 1..75: mol_type = other DNA
cgctgtcaattatgttggtatcgctgattactttcatcgtctgctgcatcaaccctaacgcaatttcgatgattt

SEQ ID NO: 665192 - DNA, 75 bp, synthetic construct
  source 1..75: mol_type = other DNA
taccgctaacggtactctggactggaaaccgctggcgctggaagactggtcgttctatgtttctggtaattatac

SEQ ID NO: 665193 - DNA, 75 bp, synthetic construct
  source 1..75: mol_type = other DNA
acggcgattaatcagtttgtcacggttggcggtgaatggcgtcacgacaaacttagtgatgcagtaaacctgacc

SEQ ID NO: 665194 - DNA, 75 bp, synthetic construct
  source 1..75: mol_type = other DNA
gcgcgaattcagggcgtggagactgagttgaaaattccgttcaatgacgaatggaagctgtcactcaactacacc

SEQ ID NO: 665195 - DNA, 75 bp, synthetic construct
  source 1..75: mol_type = other DNA
acgttttccggctatcacactgatggtttcactgaagatgaccagtatcacctagcatccgttcttgaacatcgg

SEQ ID NO: 665196 - DNA, 75 bp, synthetic construct
  source 1..75: mol_type = other DNA
ctgtatctcaatcgtcacggttaccgtggtttatgtcgctataacaagagcgggcatttcaacattccctacggc

SEQ ID NO: 665197 - DNA, 75 bp, synthetic construct
  source 1..75: mol_type = other DNA
gatctcagtcgtgatgactacagctataacgaagacggacgtcgttactttatggcagtggattatcgcttctga

SEQ ID NO: 665198 - DNA, 75 bp, synthetic construct
  source 1..75: mol_type = other DNA
cgggtaatgggatttttggtattcccattgattgcctatttcttatttctatctatttacctggtcggtagttgg

SEQ ID NO: 665199 - DNA, 75 bp, synthetic construct
  source 1..75: mol_type = other DNA
aacccgaacgcgatttcgatgatttacgcgatcagcggcccgctcattgccatgatacttttcatcatgcctacg

SEQ ID NO: 665200 - DNA, 75 bp, synthetic construct
  source 1..75: mol_type = other DNA
aacaacactacagcaggttggtgtaaagaaaagtcgtgcatttaaccgcgcactatcaattatgttggtatcgct

SEQ ID NO: 665201 - DNA, 75 bp, synthetic construct
  source 1..75: mol_type = other DNA
cgacggcaaatacacgttgccgctgacggcaattaatcagtttctcacggttgcggtgaatggcgtcacgacaaa

SEQ ID NO: 665202 - DNA, 75 bp, synthetic construct
  source 1..75: mol_type = other DNA
cgggcagaaacgcgccgacagcgcgacggctaaaacaccgggcggttataccatctggaataccggcgcggcctg

SEQ ID NO: 665203 - DNA, 75 bp, synthetic construct
  source 1..75: mol_type = other DNA
aggggtcaccattttatcggcgctttctatgctgccgaacgccccagcatggttgtcaatttccgggattattgt

SEQ ID NO: 665204 - DNA, 75 bp, synthetic construct
  source 1..75: mol_type = other DNA
cacgcgaagaccgggaatttattgaagccaacgttggaaaaatgaccgttgaagaaatggcggaaaaactgaacg

SEQ ID NO: 665205 - DNA, 75 bp, synthetic construct
  source 1..75: mol_type = other DNA
atgaagtgtatacgtaagcgctggtcacgcaaagaccgggagtttatcgaagccaacgtcgggaaaatgaccgtc

SEQ ID NO: 665206 - DNA, 75 bp, synthetic construct
  source 1..75: mol_type = other DNA
acaggagatgacccagcaactggcgcagacggttttacagggcaaaaccgttgacctcaccgacacccgcgacta

SEQ ID NO: 665207 - DNA, 75 bp, synthetic construct
  source 1..75: mol_type = other DNA
caaccgttattgctgaatttgaatcgctggaagcagctcaggcctgggccgatgctgacccgtacgtagcggcag

SEQ ID NO: 665208 - DNA, 75 bp, synthetic construct
  source 1..75: mol_type = other DNA
agctattgccgcggttgtagggctactggtctatcgactgttcgcaaactggaaaaaggcactcgccaaatcagt

SEQ ID NO: 665209 - DNA, 75 bp, synthetic construct
  source 1..75: mol_type = other DNA
gatattcatgtcattgcccgaaagatggaattaagcaatcgtgctgtatccagcattgtatacagcggatattaa

SEQ ID NO: 665210 - DNA, 75 bp, synthetic construct
  source 1..75: mol_type = other DNA
ttttcccggctatgcgcaggcggcaaaccggctggtgcgcgacgtggccgttgaccatctgcaacagcaactgaa

SEQ ID NO: 665211 - DNA, 75 bp, synthetic construct
  source 1..75: mol_type = other DNA
cgccgccaccggaactgaccggcgcagtgcgtaaaatcctgctgcgccagattggtgtgcgtaatgccgaaaaca

SEQ ID NO: 665212 - DNA, 75 bp, synthetic construct
  source 1..75: mol_type = other DNA
ggcgctgcctgaaggcgtcacatgggacccgtttaaccgcaagtggttccccaagcatgtcgtgctgacggaacg

SEQ ID NO: 665213 - DNA, 75 bp, synthetic construct
  source 1..75: mol_type = other DNA
taatttttttgcgtggttgatatgcattatgaccctcatttttgtacgggcatcctggtatttctctcgattgta

SEQ ID NO: 665214 - DNA, 75 bp, synthetic construct
  source 1..75: mol_type = other DNA
gcaggagatgacccagcaactggcgcagacggtcttacaaggcaaaaccgttgaccttaccgacacccgcgacta

SEQ ID NO: 665215 - DNA, 75 bp, synthetic construct
  source 1..75: mol_type = other DNA
aaccgtggcctgtcagactcgctggcgaaatcggcacaggaactgtttaacggcaaggagaaaacgccgcagcaa

SEQ ID NO: 665216 - DNA, 75 bp, synthetic construct
  source 1..75: mol_type = other DNA
tctgacacccatctccaggcgctactcgcttgatgaactgctggcacagtgtgacatgaacgccgcggaacttag

SEQ ID NO: 665217 - DNA, 75 bp, synthetic construct
  source 1..75: mol_type = other DNA
agcttcagggctggaactggtttctcctgtccagctttctcccctttatacgacgtcgtttggcactggcgaact

SEQ ID NO: 665218 - DNA, 75 bp, synthetic construct
  source 1..75: mol_type = other DNA
gtgcgatttttaatggcggtgagaaatcgatgacgctgaatgtggccaatgacaacaaacagcttccgtacctgg

SEQ ID NO: 665219 - DNA, 75 bp, synthetic construct
  source 1..75: mol_type = other DNA
aaaaaacgctgatggcggtagcgtgtctgagcgcagtaccggcagcccaggctgccatctccctggaccgtacgc

SEQ ID NO: 665220 - DNA, 75 bp, synthetic construct
  source 1..75: mol_type = other DNA
atgtatggcgcagcactgtaagtaaagcgaactaccgcttttttatggtgcgtatttcaggaaatccgggaagcc

SEQ ID NO: 665221 - DNA, 75 bp, synthetic construct
  source 1..75: mol_type = other DNA
gcagagaaacagacattcagcggtggtctttcaggtgaactgtccggcaatgctgctacagcgacaaagctgaaa

SEQ ID NO: 665222 - DNA, 75 bp, synthetic construct
  source 1..75: mol_type = other DNA
tctcaataacccgctgatcaagcacgatctggaaaacccgactgcgccgaagtctgcgattggttacatcgtcga

SEQ ID NO: 665223 - DNA, 75 bp, synthetic construct
  source 1..75: mol_type = other DNA
aggaattttgtactcactgtagtggtttggatccttataggggtcagtttggatatagagaattattgtacggta

SEQ ID NO: 665224 - DNA, 75 bp, synthetic construct
  source 1..75: mol_type = other DNA
gatttgcaggtgaataaagtgactcataatctattcgctaaatatcctgatccggcttcactttcggaggcggaa

SEQ ID NO: 665225 - DNA, 75 bp, synthetic construct
  source 1..75: mol_type = other DNA
tcgcttgatgaactgctggcacagtgtgacatgaacgccgcggaacttagcgagcaggatgtctggggtaaatcc

SEQ ID NO: 665226 - DNA, 75 bp, synthetic construct
  source 1..75: mol_type = other DNA
tgatgagcaaaaccagcgggggttaccggattgaaaacccgacgccgtattacgtgacggtgattggtcttggcg

SEQ ID NO: 665227 - DNA, 75 bp, synthetic construct
  source 1..75: mol_type = other DNA
cgtgttctgaatgaggttattcctcagcttaaacaaatgggtattgagccggacctgtttaattctctgttgccg

SEQ ID NO: 665228 - DNA, 75 bp, synthetic construct
  source 1..75: mol_type = other DNA
attcagaacgcctgggcaatgcaccaggaaggtttgatcgacgaagcggaagtcatcgaggtcgcaggatatatg

SEQ ID NO: 665229 - DNA, 75 bp, synthetic construct
  source 1..75: mol_type = other DNA
ccgaacaggtcgccgctgaagcggcaggatggataacccgcgatgagcatggccaggcggaagaaatctctgtca

SEQ ID NO: 665230 - DNA, 75 bp, synthetic construct
  source 1..75: mol_type = other DNA
tttacatctgcaatgagtgcgtggatttgtgcaatgaaattatcagaagagaagtgacagaccatgaagaaaaaa

SEQ ID NO: 665231 - DNA, 75 bp, synthetic construct
  source 1..75: mol_type = other DNA
tagtgcatctcttgaacaaaccagccagcaaatacttctcaatgcagattcaatgcgtgtggccctggatgaagg

SEQ ID NO: 665232 - DNA, 75 bp, synthetic construct
  source 1..75: mol_type = other DNA
tggctatgtcttcactgcgtgaagtgcttcaggtgaatcaacatcaaattagcgaactctctcgtcatctggaaa

SEQ ID NO: 665233 - DNA, 75 bp, synthetic construct
  source 1..75: mol_type = other DNA
gaaaaaccgtctcgtcgtcccggcgatgccaaaccggcaggtgagcaacaacgtcgccgccgtccgcgtaaacct

SEQ ID NO: 665234 - DNA, 75 bp, synthetic construct
  source 1..75: mol_type = other DNA
aataaagaaaatggatttaatcatgtcaaaacattcaccaaaattatatttattttttctgtattagtttttaat

SEQ ID NO: 665235 - DNA, 75 bp, synthetic construct
  source 1..75: mol_type = other DNA
atgtcagaagaaaataaagaaaatggatttaatcatgtcaaaatactcaccagaattatatttattttttctgta

SEQ ID NO: 665236 - DNA, 75 bp, synthetic construct
  source 1..75: mol_type = other DNA
ccgattggaaataggaaaggaaaagtccgatattcccggcgggtctaaagcacgagaggatattctcgtggaatt

SEQ ID NO: 665237 - DNA, 75 bp, synthetic construct
  source 1..75: mol_type = other DNA
gcccgtcgtgtgtctccgtgctcgtcttttaaacttccattggcaatcatggggtttgatagtggaatcttgcag

SEQ ID NO: 665238 - DNA, 75 bp, synthetic construct
  source 1..75: mol_type = other DNA
tgttggtgttcgtttccgccactctcccaatcagttccgtggcttctgatgaggttgaaacgcttaaatgcacca

SEQ ID NO: 665239 - DNA, 75 bp, synthetic construct
  source 1..75: mol_type = other DNA
tgaatggtttaggcagaaagatataattaataatcctaaagaccatgatcttttaacaattggtttctcaacctt

SEQ ID NO: 665240 - DNA, 75 bp, synthetic construct
  source 1..75: mol_type = other DNA
aaggggttgaaagactcttaccttgagggccatacggagctgtcagcttcgggcacgagaggggcatccattgtg

SEQ ID NO: 665241 - DNA, 75 bp, synthetic construct
  source 1..75: mol_type = other DNA
tatgagccggacccgtcaatcaaagccgaaccgatccagaacggtcgccagcaacgtggcggcatcaggctgatg

SEQ ID NO: 665242 - DNA, 75 bp, synthetic construct
  source 1..75: mol_type = other DNA
ggatgagcacttccttcgatatcggcagttgtcggaaaggtggtatcaggcgggctctattagtgacagaaacaa

SEQ ID NO: 665243 - DNA, 75 bp, synthetic construct
  source 1..75: mol_type = other DNA
tgcatccgctcttgagtatgtcggatggcctaaatcgctttctgttgccattggtggtggcgtggggctgatcgg

SEQ ID NO: 665244 - DNA, 75 bp, synthetic construct
  source 1..75: mol_type = other DNA
accggagagcgcaagctggtcagggaggctggtgaaataatgtctgtaaggaatgatgagctgcattatttcatg

SEQ ID NO: 665245 - DNA, 75 bp, synthetic construct
  source 1..75: mol_type = other DNA
aagatctgagtggaaatgacattcctgctgacaattatgtgttcatcaagaatgctaataaccagacattctata

SEQ ID NO: 665246 - DNA, 75 bp, synthetic construct
  source 1..75: mol_type = other DNA
atgaacatgatgtcggtgtttacaaccagttcagctatcgtaaaaaccgctgggtggttgaacagtcagcaccgg

SEQ ID NO: 665247 - DNA, 75 bp, synthetic construct
  source 1..75: mol_type = other DNA
gggcgatattcgtgtactggtggcaactgacatcgctgcgcgcggtctggatatcgaagagttgccgcacgtcgt

SEQ ID NO: 665248 - DNA, 75 bp, synthetic construct
  source 1..75: mol_type = other DNA
ttgcacaacccgctggaaatcgaagtggcacgccgcaataccgcgtctgatcaggtgacccagcatgttcacttt

SEQ ID NO: 665249 - DNA, 75 bp, synthetic construct
  source 1..75: mol_type = other DNA
gccgcacgccaaagggcgtcgtccggtacgtgcgctcattcttaccccaacccgtgaactggctgcacagattgg

SEQ ID NO: 665250 - DNA, 75 bp, synthetic construct
  source 1..75: mol_type = other DNA
gtggggtggggctgattggtgttgatgctattcgtggggcggcaatgcgagtaatcggtaacaagttcggtgccc

SEQ ID NO: 665251 - DNA, 75 bp, synthetic construct
  source 1..75: mol_type = other DNA
agatgtttgcggagtgtgcatacacacttgaacatcatgatcacgcagtagccttcgccgctgagcttcgcaaag

SEQ ID NO: 665252 - DNA, 75 bp, synthetic construct
  source 1..75: mol_type = other DNA
ggaggcctgtcgtgcggcgctggcggcggagaatgcgggaataaagtctgcaattccagaatcacgggatattga

SEQ ID NO: 665253 - DNA, 75 bp, synthetic construct
  source 1..75: mol_type = other DNA
ttggacgcaaagggaaaccgacgcgtccggtaaaacaaaaggtaagccgtcgtcgttacgaagatgacgattacg

SEQ ID NO: 665254 - DNA, 75 bp, synthetic construct
  source 1..75: mol_type = other DNA
atggccgggaatgaccgcgagccaattggacgcaaagggaaaccgacgcgtccggtcaaacaaaaggtaagccgt

SEQ ID NO: 665255 - DNA, 75 bp, synthetic construct
  source 1..75: mol_type = other DNA
ggcgaccggcaacatgaactttgccagctatttacacataccgtatctgcgacacgccggggaactggttattgt

SEQ ID NO: 665256 - DNA, 75 bp, synthetic construct
  source 1..75: mol_type = other DNA
gcgtaatctggtgctacgattgctgcaacaacagcagattattgatcaagaactctacgacatgttgagcgcgcg

SEQ ID NO: 665257 - DNA, 75 bp, synthetic construct
  source 1..75: mol_type = other DNA
accgtcatttctacgagcatgatggcatcagcctctactccattgggcgtgcggtgctggcaaacctgactgccg

SEQ ID NO: 665258 - DNA, 75 bp, synthetic construct
  source 1..75: mol_type = other DNA
tctacaacccgtggcgtaacccgaaactggcgctggagcgacgtaatctggtgctgcgtctgctgcaacagcaac

SEQ ID NO: 665259 - DNA, 75 bp, synthetic construct
  source 1..75: mol_type = other DNA
cgcgctacgtatcggctctgcaacgacatttacccagctcattgaagatcctgtaactcaacgtcatctcccggc

SEQ ID NO: 665260 - DNA, 75 bp, synthetic construct
  source 1..75: mol_type = other DNA
ccacctacggcggaaatatttgcaacggtgccaccagcgcagattctgccacgccaacgctaatttatgacgcga

SEQ ID NO: 665261 - DNA, 75 bp, synthetic construct
  source 1..75: mol_type = other DNA
caaaaaaaataacagtaacagcactatttaatgatattgaaacgcagacgaccgcagagttacttgagaaagtat

SEQ ID NO: 665262 - DNA, 75 bp, synthetic construct
  source 1..75: mol_type = other DNA
gcgttaggcattatcgccgtactgctgcgtcaggaattcctgctggtgattatgggcggcgtgtttgtcgttgaa

SEQ ID NO: 665263 - DNA, 75 bp, synthetic construct
  source 1..75: mol_type = other DNA
gcaattatgccgaccgtatttgtcgccggtggttttgcgctggtggcgtgggcgaccggcaacatgaactttgcc

SEQ ID NO: 665264 - DNA, 75 bp, synthetic construct
  source 1..75: mol_type = other DNA
tacatcctgttggcttacttcgtgattgtcggcaccggcaacgcagtaaacctgactgatggccttgatggtctg

SEQ ID NO: 665265 - DNA, 75 bp, synthetic construct
  source 1..75: mol_type = other DNA
aagctgctggaggcgacccagtatcgtcaggtgtcgaaaatgacccgtcctggcgaatttaccgtgcaggccaac

SEQ ID NO: 665266 - DNA, 75 bp, synthetic construct
  source 1..75: mol_type = other DNA
tttcacaccgggccgggcaaagtatctcttgagcatgacgaaatccttgtcgcctttcattttccgccacagccg

SEQ ID NO: 665267 - DNA, 75 bp, synthetic construct
  source 1..75: mol_type = other DNA
ctattgatgcgtattaatacttcaacagcactcgatattgaatggcctacgcctccggcagttcaggccagatga

SEQ ID NO: 665268 - DNA, 75 bp, synthetic construct
  source 1..75: mol_type = other DNA
agattatcgacggcgaactgtatgaaatgctgagtgcgcgaccgctgggcgtacagccacgcggcggagtaatct

SEQ ID NO: 665269 - DNA, 75 bp, synthetic construct
  source 1..75: mol_type = other DNA
atgccaattccaactcaatcacagatcggcggtgagcagcagaccgcgcaggccattgccgattcggtgtctacc

SEQ ID NO: 665270 - DNA, 75 bp, synthetic construct
  source 1..75: mol_type = other DNA
gggccagctcacggctacggctgaaggtggaacgacaatcacatccccgactatcacgctgaacggcaacgtaac

SEQ ID NO: 665271 - DNA, 75 bp, synthetic construct
  source 1..75: mol_type = other DNA
taaaagaaggcgacgagtgcctgctgatctttgccgaccgttgcatcgatttctggtggcagagcggcggcgttc

SEQ ID NO: 665272 - DNA, 75 bp, synthetic construct
  source 1..75: mol_type = other DNA
cagagcttcccgcaggcggaacgcgctgttccggcgcaggcggcgtatctgacactatggaccatgcagcaggtg

SEQ ID NO: 665273 - DNA, 75 bp, synthetic construct
  source 1..75: mol_type = other DNA
accgtcatttctacgagcatgatgggatcagtctctactcaatcggacgtgcggtgctggcaaacctgactgccg

SEQ ID NO: 665274 - DNA, 75 bp, synthetic construct
  source 1..75: mol_type = other DNA
gatgaacgtgccaacggtgaatctggggatggcgttagggttacctgcggtaacggacacctggattaaactggg

SEQ ID NO: 665275 - DNA, 75 bp, synthetic construct
  source 1..75: mol_type = other DNA
tatgaacgtgccaacggtaaatctggggatggcgctggggctgcctgcggttacggacacctggattaagctggg

SEQ ID NO: 665276 - DNA, 75 bp, synthetic construct
  source 1..75: mol_type = other DNA
gtaggccgtgataacaaccagccgaccaaactgtatggagccagcggggcaatgtcgatttatcagcgttatctg

SEQ ID NO: 665277 - DNA, 75 bp, synthetic construct
  source 1..75: mol_type = other DNA
gttgacccgttcgatgaacgtgccgacggtgaatctggggatggcgctggggctgcctgcggttacggagacctg

SEQ ID NO: 665278 - DNA, 75 bp, synthetic construct
  source 1..75: mol_type = other DNA
caggcgattaaagacattaatgccaaagggggaattaagggcgacaagctggttggcgcggaatatgacgacgcc

SEQ ID NO: 665279 - DNA, 75 bp, synthetic construct
  source 1..75: mol_type = other DNA
aatcagccccacggcaggatttgttccagaccgttaccgataagattattacggcgctggagaacgggattacac

SEQ ID NO: 665280 - DNA, 75 bp, synthetic construct
  source 1..75: mol_type = other DNA
caatttccgggattattgtcgcagtagttgcgatgtcgaaatcattcctgggtacgtactttggcgttattgaag

SEQ ID NO: 665281 - DNA, 75 bp, synthetic construct
  source 1..75: mol_type = other DNA
gcgatttcgatgatttacgcgatcagcggcccgctcattgccatgatacttttcatcatgcctacgctgtcaacg

SEQ ID NO: 665282 - DNA, 75 bp, synthetic construct
  source 1..75: mol_type = other DNA
cgatctttctgtgtgtaatcgtgacaagttatgggcaaaaaccagtaaggctggcctggagtttcagttattagt

SEQ ID NO: 665283 - DNA, 75 bp, synthetic construct
  source 1..75: mol_type = other DNA
ttggggattaccggattttatgtgaaatcagagacgaagagcttgtgattctggcagtcactattggccaccgtc

SEQ ID NO: 665284 - DNA, 75 bp, synthetic construct
  source 1..75: mol_type = other DNA
ccagcttccacctcttcaacgttgagcagtgtgaaaacctgcccgacaacctttacccggaaataccggttttac

SEQ ID NO: 665285 - DNA, 75 bp, synthetic construct
  source 1..75: mol_type = other DNA
cggaaacggcgtgacagtcctcggtattctggaggtgttgaggcgctttgatggtgttaatgtatggcagcgtta

SEQ ID NO: 665286 - DNA, 75 bp, synthetic construct
  source 1..75: mol_type = other DNA
gggcaatcatacgcacactgtcggtggtgtttatggcggcgactctgtcggtggaaaacagcgtgtacaggcttc

SEQ ID NO: 665287 - DNA, 75 bp, synthetic construct
  source 1..75: mol_type = other DNA
cctgacgccgaaaaatattggtgcatttgcttcaggaaaaacaggagacaccgttgcgaatgataaagccgttgg

SEQ ID NO: 665288 - DNA, 75 bp, synthetic construct
  source 1..75: mol_type = other DNA
ttcgcttttagccatacgcccattatttctacgtttgccatagacagacgtgaaaaatatggcgaacacgctatg

SEQ ID NO: 665289 - DNA, 75 bp, synthetic construct
  source 1..75: mol_type = other DNA
atgaaaattaactatccgttgctggcgctggcgctggcgattggcgcgtttggtatcgggacaacggagttctcg

SEQ ID NO: 665290 - DNA, 75 bp, synthetic construct
  source 1..75: mol_type = other DNA
ggatgtcatttctggcaacagcggggctgggcgtgatttcaatggtaagtctgttcttctcattacctaaaggtg

SEQ ID NO: 665291 - DNA, 75 bp, synthetic construct
  source 1..75: mol_type = other DNA
aaaatatagccaataagggggatgcttatgggcaaagtattacagccagtgagttgcgatggatttatcgtaatc

SEQ ID NO: 665292 - DNA, 75 bp, synthetic construct
  source 1..75: mol_type = other DNA
cgtttatacgacaaggtgtaaaaggtgtggagaaaatgcggaatatacctatacgtaattttcgactattcctaa

SEQ ID NO: 665293 - DNA, 75 bp, synthetic construct
  source 1..75: mol_type = other DNA
ttacgtcgcaacgttgtctggcgtaccagcaacggcactggttacaccatcgccagccgtcgctttgtttcggca

SEQ ID NO: 665294 - DNA, 75 bp, synthetic construct
  source 1..75: mol_type = other DNA
ttcgcgagtgttgtgatggcgctgcaggataatacgccaaaaccacaaaacgcatctgcttatcgacgtaaaaga

SEQ ID NO: 665295 - DNA, 75 bp, synthetic construct
  source 1..75: mol_type = other DNA
aattcagtcccctctggattatctggcattaccaggactcggtgatgtcgttaaatctaacgcccagtggcgtta

SEQ ID NO: 665296 - DNA, 75 bp, synthetic construct
  source 1..75: mol_type = other DNA
gcttgattcttacctgagcatcggagcaaaaggacgagttatggatctggggcgaggatatgaaaaactcacccg

SEQ ID NO: 665297 - DNA, 75 bp, synthetic construct
  source 1..75: mol_type = other DNA
ttttggtgatacagaacaggatacacttgtcgccgctggtcaggcaaaaagtctctgggaaggccatgattttga

SEQ ID NO: 665298 - DNA, 75 bp, synthetic construct
  source 1..75: mol_type = other DNA
ctggatcttgatttacaaaatgtactactctctccgaatgtaattaaagaaaaaaacatcacttttcagggcaac

SEQ ID NO: 665299 - DNA, 75 bp, synthetic construct
  source 1..75: mol_type = other DNA
acttgacaaacccagagaaaaagttgtcaacgcaataagggccataaacactctatctaagaaagatattatctc

SEQ ID NO: 665300 - DNA, 75 bp, synthetic construct
  source 1..75: mol_type = other DNA
cagaagttaccgcagcgtctgctggacccggtgcgtctgcacctgcaaaacggcggcagctggcgtcacctggcg

SEQ ID NO: 665301 - DNA, 75 bp, synthetic construct
  source 1..75: mol_type = other DNA
cgctacaaattaccgaaacgtttggtgcgttgggacacgaagccggtttgtatcggccaaaacaaaaatggtttc

SEQ ID NO: 665302 - DNA, 75 bp, synthetic construct
  source 1..75: mol_type = other DNA
ccttgcttcaacgcgtaactggttgcgctacaaattaccgaaacgtttggtgcgttgggacacgaagccggtttg

SEQ ID NO: 665303 - DNA, 75 bp, synthetic construct
  source 1..75: mol_type = other DNA
attatgggcaaaaacaagcaaggccggcctggagtttcagacattaacacgcaacaaaacggttattttttgtgc

SEQ ID NO: 665304 - DNA, 75 bp, synthetic construct
  source 1..75: mol_type = other DNA
catgactaacccggattatcgcaaagcggcctttgccctgatgatgcaggaacaagcgccaacgctgtcgatgcc

SEQ ID NO: 665305 - DNA, 75 bp, synthetic construct
  source 1..75: mol_type = other DNA
tgtggctggtggatgagggcggattatctcaagaactcagtcaggcggtatgggcaggttttcgtcgcccgcggg

SEQ ID NO: 665306 - DNA, 75 bp, synthetic construct
  source 1..75: mol_type = other DNA
ggatttaatatgtgctgtcattgactccgttactcacatggggtggcaattccccggaggggctggaccgggtga

SEQ ID NO: 665307 - DNA, 75 bp, synthetic construct
  source 1..75: mol_type = other DNA
gcgatcttatctactatcctgcaaagaagggagatgataaacctgaaaacatcctgaaaatcgtcaaagaatggc

SEQ ID NO: 665308 - DNA, 75 bp, synthetic construct
  source 1..75: mol_type = other DNA
gtaaggcattgctggttcgccaacgtgaagaggcagcgcaggcgctgttcgcacttgatgatgttcgcacagagc

SEQ ID NO: 665309 - DNA, 75 bp, synthetic construct
  source 1..75: mol_type = other DNA
ccacagccggagcaacaacatattttacagcagcttctgaccatgccgccgggcgtggcggcggtgactgcggcg

SEQ ID NO: 665310 - DNA, 75 bp, synthetic construct
  source 1..75: mol_type = other DNA
gggcgtggcagcggtaacggctgcgcgtgggcgcggtaagtcggcgttggcagggcaactcatttctcgtattgc

SEQ ID NO: 665311 - DNA, 75 bp, synthetic construct
  source 1..75: mol_type = other DNA
tatacgcagtcctttaaatgtcattatcacgtctgccttttttttaacaaagacgcttattaccacctgggagac

SEQ ID NO: 665312 - DNA, 75 bp, synthetic construct
  source 1..75: mol_type = other DNA
atgacagaaagtattggaggtaaaactgctctggactgggccacgaagcaggattttcgctgcggttgctggcta

SEQ ID NO: 665313 - DNA, 75 bp, synthetic construct
  source 1..75: mol_type = other DNA
acatggtaccggtcactggagtacgataattttccggaaatcagtgaagcgaacattctgagcacatttgaacaa

SEQ ID NO: 665314 - DNA, 75 bp, synthetic construct
  source 1..75: mol_type = other DNA
aagttaagcgtggtgctggacgtctgggagggcgagccagaactcaacgtcgagctgctgcaaaaagtggatatc

SEQ ID NO: 665315 - DNA, 75 bp, synthetic construct
  source 1..75: mol_type = other DNA
gtggggatgagggtgatttccgctcgctggatgaattagttcagcatgcggatattctgactttccatacgccac

SEQ ID NO: 665316 - DNA, 75 bp, synthetic construct
  source 1..75: mol_type = other DNA
cctgggacgcgaaacacttgatgagttcgaagatttgcttgaagctcacgccgcagaaaaagaattcctgccctg

SEQ ID NO: 665317 - DNA, 75 bp, synthetic construct
  source 1..75: mol_type = other DNA
cgtgggcgcggtaagtcggcgctggcagggcaactcatttctcgtattgcgggcagtgcgattgtcaccgcgccc

SEQ ID NO: 665318 - DNA, 75 bp, synthetic construct
  source 1..75: mol_type = other DNA
aaagataatacctgagccatcaggagaggctgtgaaagaaatgattgatggtaaaaaggaacgactgaaggggcc

SEQ ID NO: 665319 - DNA, 75 bp, synthetic construct
  source 1..75: mol_type = other DNA
cagtacacgacgaatatgacccgcagccatgaatatgcggaaatggcctcccgtactgaaagcatgagtgggcag

SEQ ID NO: 665320 - DNA, 75 bp, synthetic construct
  source 1..75: mol_type = other DNA
gaggccagcgattactttaccagccgcaaagtcagtgaatccggcagccatactgacaataatgccgattcccgc

SEQ ID NO: 665321 - DNA, 75 bp, synthetic construct
  source 1..75: mol_type = other DNA
acacaattagatcctagctacacggggcaagtacctacagccgatatcaagatattacagaaagcagcttaccac

SEQ ID NO: 665322 - DNA, 75 bp, synthetic construct
  source 1..75: mol_type = other DNA
aggggcatcaggtcattattgatcaaagaacgcaggacagtaatatccgtaatgatgtaaaacatcaggttgata

SEQ ID NO: 665323 - DNA, 75 bp, synthetic construct
  source 1..75: mol_type = other DNA
tgaagaaaataaacgacagaaattaatgccaacaccgtctgaagatgcgttaaaacagatggtggatgataagaa

SEQ ID NO: 665324 - DNA, 75 bp, synthetic construct
  source 1..75: mol_type = other DNA
tgttcgctgcggctgtagctcttactggctgtgctgttgacaaagaggctgcattgcataatctgccgaatagcg

SEQ ID NO: 665325 - DNA, 75 bp, synthetic construct
  source 1..75: mol_type = other DNA
cgcagtattcatttattgtattttgctatataataatgaagttatattttttatacttgttttcattctgctagg

SEQ ID NO: 665326 - DNA, 75 bp, synthetic construct
  source 1..75: mol_type = other DNA
gtaatgcgggtaaacaactggctgaacgtgagcattaccgtttacgtcgcgatgcgcaagctctcgcaaagtgga

SEQ ID NO: 665327 - DNA, 75 bp, synthetic construct
  source 1..75: mol_type = other DNA
actcagcgaaacagagttacgaccagtacacgacgaatatgacccgcagccatgaatatgctgaaatggcatccc

SEQ ID NO: 665328 - DNA, 75 bp, synthetic construct
  source 1..75: mol_type = other DNA
gcgcatcaggccagcagtggttcacgggccagccatgatgctcgccatgatatcgatgccagggctacacaagac

SEQ ID NO: 665329 - DNA, 75 bp, synthetic construct
  source 1..75: mol_type = other DNA
cacgatgagcgcacaggactccatgatggccagccgtatgcgcagcgcagtggaaagctatgcgaaggcgcataa

SEQ ID NO: 665330 - DNA, 75 bp, synthetic construct
  source 1..75: mol_type = other DNA
ggaaagcattggaggtaaaaccacccgggactgggccatgaaacaggattttcgctgcggctgctggctcatgga

SEQ ID NO: 665331 - DNA, 75 bp, synthetic construct
  source 1..75: mol_type = other DNA
atgacggaaagcattggcggtaaaactgcactggactgggccatgaaacaggattttcgctgcggctgctggctg

SEQ ID NO: 665332 - DNA, 75 bp, synthetic construct
  source 1..75: mol_type = other DNA
gatccccgacaaccgggaaaacatcacgattcgtctggatggtcacatccagtccgttcagggtaaagagcgcta

SEQ ID NO: 665333 - DNA, 75 bp, synthetic construct
  source 1..75: mol_type = other DNA
cgaaatctggcgtggcctgatgcaacgttccgggatgctgtcattaatggatgcgcaggcccgtgatacatggta

SEQ ID NO: 665334 - DNA, 75 bp, synthetic construct
  source 1..75: mol_type = other DNA
tgagcacatttgaacaactgcaccagaataacgatgaagtgtttgaccggggagtgatcaacgtcttcacagggc

SEQ ID NO: 665335 - DNA, 75 bp, synthetic construct
  source 1..75: mol_type = other DNA
tgagcgaggggtgatcaacgtcttcaggggactgaactggaattacaaaaccaattgcccctgcaaatttggcag

SEQ ID NO: 665336 - DNA, 75 bp, synthetic construct
  source 1..75: mol_type = other DNA
cccctgcaaatttggcagtaaaattatcgtcaacaacctggtgaggtgggaccggtggggctttcatcttatcac

SEQ ID NO: 665337 - DNA, 75 bp, synthetic construct
  source 1..75: mol_type = other DNA
atgttgcatctgctcagcggtaaaccgatccccgacaaccgggggaatatcaccattaatctggatgaccacata

SEQ ID NO: 665338 - DNA, 75 bp, synthetic construct
  source 1..75: mol_type = other DNA
tggatgcacaggcccgtgatacatggtaccggtcactggagtacgataattttccggaaatcagtgaagcgaaca

SEQ ID NO: 665339 - DNA, 75 bp, synthetic construct
  source 1..75: mol_type = other DNA
gtccggaagtagtcaccgggcatacggacgttatctgctcaaccagtatccgccacattctggctgtacgaaaga

SEQ ID NO: 665340 - DNA, 75 bp, synthetic construct
  source 1..75: mol_type = other DNA
atttatctgcaaaaaggaatatcgattatatctgaactcacagcctcccgtccggaagtggtcaacggacatacg

SEQ ID NO: 665341 - DNA, 75 bp, synthetic construct
  source 1..75: mol_type = other DNA
tgggacagatggggatttcatctgaacaacggcccacaggccgatcgacttgccgacctggaaagaatgctgcat

SEQ ID NO: 665342 - DNA, 75 bp, synthetic construct
  source 1..75: mol_type = other DNA
tggcagtaaaattatcgtcaacaacctagtgaggtgggaccggtggggggttcatcttatcaccgggcaacagac

SEQ ID NO: 665343 - DNA, 75 bp, synthetic construct
  source 1..75: mol_type = other DNA
tgagcacatttgaacaactgcaccagaataacgatgatgtgtttgaccggggtgtgatcaacgtcttcacagggc

SEQ ID NO: 665344 - DNA, 75 bp, synthetic construct
  source 1..75: mol_type = other DNA
ctgctcaaccagactaatccggtcgatctctcatcgctgcatcagcaaaatgccgtaccgccgcgcgtcgcagaa

SEQ ID NO: 665345 - DNA, 75 bp, synthetic construct
  source 1..75: mol_type = other DNA
ccgctaacttcttcgaacaagtagaaaatgagtggcatctggaagcaattagccgcgatttgctgatcagcgcct

SEQ ID NO: 665346 - DNA, 75 bp, synthetic construct
  source 1..75: mol_type = other DNA
gctgcacctgttcagcggcaggcccatccccgacaaccgggaaaatatcatcatccgtctggatgaccacattca

SEQ ID NO: 665347 - DNA, 75 bp, synthetic construct
  source 1..75: mol_type = other DNA
accggtggggatttcatcttatcaccgggcaacaggcagatcgactcgccgacctggaaagaatgctgcatctgt

SEQ ID NO: 665348 - DNA, 75 bp, synthetic construct
  source 1..75: mol_type = other DNA
catgctgcttatctggtacgtaatctggatcttcccggttttacgcctgcacagaaaaaattactggcgacgcta

SEQ ID NO: 665349 - DNA, 75 bp, synthetic construct
  source 1..75: mol_type = other DNA
atctctcatcgctgcatcagcaaaatgccgtaccgccgcgcgtcgcagaacaactctgccgtttactacgcctgg

SEQ ID NO: 665350 - DNA, 75 bp, synthetic construct
  source 1..75: mol_type = other DNA
tgagcacatttgaacaactgcaccagaataacgatgacgtgtttgaccggggcgtgatcaacgtcttcacagggc

SEQ ID NO: 665351 - DNA, 75 bp, synthetic construct
  source 1..75: mol_type = other DNA
tgagcacatttgaacaactgcaccagaataacgatgacgtgtttgaccggggtgtgatcaacgtcttcatagggc

SEQ ID NO: 665352 - DNA, 75 bp, synthetic construct
  source 1..75: mol_type = other DNA
tgagcacatttgaacaactgcaccagaataacgatgacgtgtttgaccggggagtgatcaacgtcttcaaagggc

SEQ ID NO: 665353 - DNA, 75 bp, synthetic construct
  source 1..75: mol_type = other DNA
gaattttcactgcggttgctggctgatggagaaacctgaaaccgcaatgaaagccatcacacgcaatctcgatcg

SEQ ID NO: 665354 - DNA, 75 bp, synthetic construct
  source 1..75: mol_type = other DNA
tgagcacatttgaacaactgcaccagaataacgatgaggtgtttgaccggggggtgatcaacgtcttcacagggc

SEQ ID NO: 665355 - DNA, 75 bp, synthetic construct
  source 1..75: mol_type = other DNA
tgagcacatttgaacaactgcaccagaataacgatgacgtgtttgaccggggggtgatcaacgtcttcagagggc

SEQ ID NO: 665356 - DNA, 75 bp, synthetic construct
  source 1..75: mol_type = other DNA
gcgaaaaggaatccctggcgctgacggcgacggatctgggtcatggcgacgggcgcgggcgttgggtgaaacagg

SEQ ID NO: 665357 - DNA, 75 bp, synthetic construct
  source 1..75: mol_type = other DNA
gcagcgttacgggccgtgctgagacaggcgggacgccgccaggtggtggagcacccgcgcctgaccaataaggcg

SEQ ID NO: 665358 - DNA, 75 bp, synthetic construct
  source 1..75: mol_type = other DNA
ttgctggcaagcattaacgtgccgatgtgcgtcgtctctaacggtccggtcagcaaaatgcagcattcgcttggt

SEQ ID NO: 665359 - DNA, 75 bp, synthetic construct
  source 1..75: mol_type = other DNA
cacaaacaggcggctaaagttgggttgacgggcgaatactccccgcactcgctgcgctatgcctgggcgcaggac

SEQ ID NO: 665360 - DNA, 75 bp, synthetic construct
  source 1..75: mol_type = other DNA
tttacgaacgctgcaaaacgatatggcggcactgcaggccgtgctgagacaggctggacgcaggcaggtggtgga

SEQ ID NO: 665361 - DNA, 75 bp, synthetic construct
  source 1..75: mol_type = other DNA
gccctacctgtcgcaaaacagcgtaatggaaaactgatcgacaaacccgaccttaaaacagcgatggatcactgg

SEQ ID NO: 665362 - DNA, 75 bp, synthetic construct
  source 1..75: mol_type = other DNA
aatggtggcgatggacctggggcatggcgacgggcgcggtcgctgggtgaagcaggtgtatgcgcacggctggac

SEQ ID NO: 665363 - DNA, 75 bp, synthetic construct
  source 1..75: mol_type = other DNA
gatacgctatgtccaccatttaaaggcgaagcatattgaggcgtatattcagatgcggctggcgcaggggattca

SEQ ID NO: 665364 - DNA, 75 bp, synthetic construct
  source 1..75: mol_type = other DNA
aacggcgcaacggcaggctgattgatgcggcgagccttaaacaggcaatgaaatactggcgcaaccagactttgc

SEQ ID NO: 665365 - DNA, 75 bp, synthetic construct
  source 1..75: mol_type = other DNA
agcaaatgatttgctggaaagcgtaaaagtgccgatgtgcgtcgtctcaaacggtccggttaacaaaatgcagca

SEQ ID NO: 665366 - DNA, 75 bp, synthetic construct
  source 1..75: mol_type = other DNA
ataccgaacttgaggacatcgcaggagcgaacgaattgctggcgagcattaacgtgccgatgtgcgtcgtctcta

SEQ ID NO: 665367 - DNA, 75 bp, synthetic construct
  source 1..75: mol_type = other DNA
aatggtggcgatggacctggggcatggcgacgggcgcggtcgctgggtgaagcaggtttacgcgcagggctggaa

SEQ ID NO: 665368 - DNA, 75 bp, synthetic construct
  source 1..75: mol_type = other DNA
gactaacagcaatctgaccaaagcactgaacaccattcagtctattggttcccgctatgcccgcgatgaaaatac

SEQ ID NO: 665369 - DNA, 75 bp, synthetic construct
  source 1..75: mol_type = other DNA
aatggggttcagtgacactcatcttcgttgttatgtattacacgacgacagtatgggtcagcacatacacatcat

SEQ ID NO: 665370 - DNA, 75 bp, synthetic construct
  source 1..75: mol_type = other DNA
agaacctggcaagcacgagaataattcagcaacttgaaagagattacaatctgacaagaaccaaaggaccgaaag

SEQ ID NO: 665371 - DNA, 75 bp, synthetic construct
  source 1..75: mol_type = other DNA
gcaatgaacagatgctatcagaaagaactggtgttccctctcctaaggaagccctacaacagatcattgataaaa

SEQ ID NO: 665372 - DNA, 75 bp, synthetic construct
  source 1..75: mol_type = other DNA
taagttcgatccgctgtttctgcgcctgtttttccgtgaaacctatcctttcaccacggagaaagtctatctctc

SEQ ID NO: 665373 - DNA, 75 bp, synthetic construct
  source 1..75: mol_type = other DNA
cgcgctggagtttcaataccggagatcatgcaagctggtggctggaccaatgtaaatattgtcatgaactatatc

SEQ ID NO: 665374 - DNA, 75 bp, synthetic construct
  source 1..75: mol_type = other DNA
aatagcgatcgctgccaggatatacgtaatctggcatttctggggattgcttataacaccctgttacgtatagcc

SEQ ID NO: 665375 - DNA, 75 bp, synthetic construct
  source 1..75: mol_type = other DNA
aaggctctgctgaagggcatatcagatacgatggcagaagtggctcctcgcacgggaccagttccgatctggccc

SEQ ID NO: 665376 - DNA, 75 bp, synthetic construct
  source 1..75: mol_type = other DNA
caggaactgtatcaaaaactgttcccggtttatcaacgactttctgcgattgataatgaaatccataactcatga

SEQ ID NO: 665377 - DNA, 75 bp, synthetic construct
  source 1..75: mol_type = other DNA
cggtgtcggcgcatcatcaggtcacgtagaccttcaggcggaatacgctcagcagcagggtagcatgaatgcact

SEQ ID NO: 665378 - DNA, 75 bp, synthetic construct
  source 1..75: mol_type = other DNA
acttctgcatttatcgccgaaattatccgcgcagggatccaggcagtgccttatggtcaacatgaagcagctcgg

SEQ ID NO: 665379 - DNA, 75 bp, synthetic construct
  source 1..75: mol_type = other DNA
tttacccgtaaagataacaacattagccttaataaagccgggcaggaactttatcaaaaactattcccggtttac

SEQ ID NO: 665380 - DNA, 75 bp, synthetic construct
  source 1..75: mol_type = other DNA
ataaaaatgacattgtaattaatcatgatgaaaatattgaacaaatcaaagatgacatgagtaatagatttaatg

SEQ ID NO: 665381 - DNA, 75 bp, synthetic construct
  source 1..75: mol_type = other DNA
tgaaaacgtggcggcaggcgctggatcttggtgacactcgcttaaccgtggtgttcggcaccaaaggcgggcgac

SEQ ID NO: 665382 - DNA, 75 bp, synthetic construct
  source 1..75: mol_type = other DNA
tattacggcacacgctctcctgttatagatgtagtgttaaattaactgcggctaatatttgtaatgagcactttt

SEQ ID NO: 665383 - DNA, 75 bp, synthetic construct
  source 1..75: mol_type = other DNA
tgcaaaagggagtccgtcagtggtagagcgggcgatggtgattgcgccatgttcgcggatgggaccagtgacgga

SEQ ID NO: 665384 - DNA, 75 bp, synthetic construct
  source 1..75: mol_type = other DNA
gctattgctggcgcggctgttaaatctcaacgatgtgcaatccggcgtgctgaatattatcttccgcattgccga

SEQ ID NO: 665385 - DNA, 75 bp, synthetic construct
  source 1..75: mol_type = other DNA
tcggcatctggttcttctcggcaaccgataattcagaggaaggcgcgcgcgagcgtgaactattccgcgcgcaat

SEQ ID NO: 665386 - DNA, 75 bp, synthetic construct
  source 1..75: mol_type = other DNA
tctgttcctgattgccgaacgtctacgtaatctgggtcgctatacctttgcggacgtagcctcttatcgcctgaa

SEQ ID NO: 665387 - DNA, 75 bp, synthetic construct
  source 1..75: mol_type = other DNA
cgtcgtgtttacgctcggcattacctactgggcatcaaaacgcgtacgttctcgtagcgactactacaccgcagg

SEQ ID NO: 665388 - DNA, 75 bp, synthetic construct
  source 1..75: mol_type = other DNA
gcgaggcgttaatctcgtttctcgatgcgaaaggaagcccttctgtggtggagcgtgcgatggtgatcgcgcctt

SEQ ID NO: 665389 - DNA, 75 bp, synthetic construct
  source 1..75: mol_type = other DNA
aatgagcttaatctttctaatattttgcttaaacgctatagctatttattatcacaacacgctaaagaacataaa

SEQ ID NO: 665390 - DNA, 75 bp, synthetic construct
  source 1..75: mol_type = other DNA
gtgattcttgctatggttctctttgttggaaatatattttatacaaatcatcgtgatgatataagcatggaggct

SEQ ID NO: 665391 - DNA, 75 bp, synthetic construct
  source 1..75: mol_type = other DNA
gagtttgctggggggagaaaaaggtaagccaggtgcgatttgtctttgcctgatgcgacgctggcgcgtcttatc

SEQ ID NO: 665392 - DNA, 75 bp, synthetic construct
  source 1..75: mol_type = other DNA
agtacatcggcgataacgccaaatccttccagaatcagtacggaaatatcagtagcgcatcggttggtgccatcc

SEQ ID NO: 665393 - DNA, 75 bp, synthetic construct
  source 1..75: mol_type = other DNA
gggctgattactggcgcaacggggacgggtaaaaccgttacgctgcaaaaactggcagagtcattgtcggaaatc

SEQ ID NO: 665394 - DNA, 75 bp, synthetic construct
  source 1..75: mol_type = other DNA
tcggctttagcttcaacaatctgttcagcgaagcgatggcggtacacccgaaaggtgtcgacatcatgaagccgg

SEQ ID NO: 665395 - DNA, 75 bp, synthetic construct
  source 1..75: mol_type = other DNA
attcagagagtggcacagattaaggttcgccacattgaaagctatattcatgcaagactggcgcaggggatcggc

SEQ ID NO: 665396 - DNA, 75 bp, synthetic construct
  source 1..75: mol_type = other DNA
tatgtaacgatgtttcaggaatttggtattacgctcgatcctgaagaggtattcaaacgtttcaagggtgtaaaa

SEQ ID NO: 665397 - DNA, 75 bp, synthetic construct
  source 1..75: mol_type = other DNA
acgcggcacatcgaaggttacattcagcatcggctgacgcagggtatcagtaaacgcacgctgcaaaacgagatg

SEQ ID NO: 665398 - DNA, 75 bp, synthetic construct
  source 1..75: mol_type = other DNA
gcgtgggcgcaggatgccattcgtcattatctggcgcagggattttgtgagaaggaagcgctggcaatgacggcg

SEQ ID NO: 665399 - DNA, 75 bp, synthetic construct
  source 1..75: mol_type = other DNA
cgtgacgtgctggagacggcccgcgcaaaagatccgggactggcggcagcgctggaactctcaaggctgatggga

SEQ ID NO: 665400 - DNA, 75 bp, synthetic construct
  source 1..75: mol_type = other DNA
acggcaggctgattgatgcggcaagccttaaacaggcaatgaaatactggcgcaaccagactttgcgtatggggc

SEQ ID NO: 665401 - DNA, 75 bp, synthetic construct
  source 1..75: mol_type = other DNA
atgacaacaaaaaaacttattcgcatgccggaagtgatcaataaaacaggatttagcaaagcatggatctataga

SEQ ID NO: 665402 - DNA, 75 bp, synthetic construct
  source 1..75: mol_type = other DNA
ggtacacccgaaaggtgtcgacatcatgaagccgggcgggctggtgaaagatccgatctccgcgctctctctggg

SEQ ID NO: 665403 - DNA, 75 bp, synthetic construct
  source 1..75: mol_type = other DNA
tgttcctcggttttatttcagcggttgctttcgccaccattcttgcggtggttgcgggtctgacgctggcgggcg

SEQ ID NO: 665404 - DNA, 75 bp, synthetic construct
  source 1..75: mol_type = other DNA
ggccagcgttatgactcgtggttgcgaaggttactgcggagcccccgcaacaggtgcaatggatggtctgtttaa

SEQ ID NO: 665405 - DNA, 75 bp, synthetic construct
  source 1..75: mol_type = other DNA
atcacgcccgccactttaactgcgtggagggcaacaccacgctttacgccctgccgaaacccgaggttgtcctgc

SEQ ID NO: 665406 - DNA, 75 bp, synthetic construct
  source 1..75: mol_type = other DNA
cgggtgattttagacagccgcccggttcatgcagcacgtccacacagtgaagctattcgcgacgctcaacgaaaa

SEQ ID NO: 665407 - DNA, 75 bp, synthetic construct
  source 1..75: mol_type = other DNA
atgccaaccgttattactcacgccgccgttcccctttgtattggtttagggttggggtcgaaaatcatcccaccg

SEQ ID NO: 665408 - DNA, 75 bp, synthetic construct
  source 1..75: mol_type = other DNA
cacgccgtacggtcatcaggtgataatttctgaattgatgtgggtatggttgccggggatggtactgatgggaat

SEQ ID NO: 665409 - DNA, 75 bp, synthetic construct
  source 1..75: mol_type = other DNA
ttgttgacccggcaatcactcagcctggtgtgctaaaaccgaagaaagggctgattatcctcggcgcgattatcc

SEQ ID NO: 665410 - DNA, 75 bp, synthetic construct
  source 1..75: mol_type = other DNA
tctctgcgcgtcgccggaatttattgcgcaacatggcgcgccgaaacatttaaccgatctttccgcattgccgtg

SEQ ID NO: 665411 - DNA, 75 bp, synthetic construct
  source 1..75: mol_type = other DNA
cgggaccggtgagccgctcctgacgttagtctgttcaggctcatggcccctggatcaaacgctcgccagagatac

SEQ ID NO: 665412 - DNA, 75 bp, synthetic construct
  source 1..75: mol_type = other DNA
cactgctgcaaatcgacacacttatccggcaactggctgaaatctcatcaatgacagaaagtattggaggtaaaa

SEQ ID NO: 665413 - DNA, 75 bp, synthetic construct
  source 1..75: mol_type = other DNA
gcgatgatgcaattgtgctaattgatgaaccagagatttcattacatatcgattggcaagaagatctattgaaaa

SEQ ID NO: 665414 - DNA, 75 bp, synthetic construct
  source 1..75: mol_type = other DNA
ataccgtcactggatgggaacgggaactgtcggtgtgatgattgccagcagtgacctgattaatcccattccgga

SEQ ID NO: 665415 - DNA, 75 bp, synthetic construct
  source 1..75: mol_type = other DNA
tgatgaagactggttgtaccggcacgccagaatcaaacgctgcccgcgaaaagatgcggtggcagcccggggatt

SEQ ID NO: 665416 - DNA, 75 bp, synthetic construct
  source 1..75: mol_type = other DNA
gttcaggaaaccagaactggttgacaggctaaatgacataattgccaggcactatccaaatgtattagcagacag

SEQ ID NO: 665417 - DNA, 75 bp, synthetic construct
  source 1..75: mol_type = other DNA
attgccataaatggtgaggttttctcgttatcccacgaagcctggcagcgtgagcttgactttgccagtggagaa

SEQ ID NO: 665418 - DNA, 75 bp, synthetic construct
  source 1..75: mol_type = other DNA
attttatgataaatatttcgcctgaatttatttcttcgcgtgataatgataaccataaagactcagaagaaatgg

SEQ ID NO: 665419 - DNA, 75 bp, synthetic construct
  source 1..75: mol_type = other DNA
ctattacatcgcactacccgacgcgtcactatcactgaagaaggtgagcggatttatgaatgggcacagcgcata

SEQ ID NO: 665420 - DNA, 75 bp, synthetic construct
  source 1..75: mol_type = other DNA
taaccgttcggcttttaatcagatggtagcgtattgtgaaactgcaccagatatgatgattcctagttgggctgt

SEQ ID NO: 665421 - DNA, 75 bp, synthetic construct
  source 1..75: mol_type = other DNA
cacaactggttgacaggcttaatgatattattgccagacactacccggaagccctggcaagcacagtgaacaaaa

SEQ ID NO: 665422 - DNA, 75 bp, synthetic construct
  source 1..75: mol_type = other DNA
ggagaccggtgagccactcctgacactggtatgctcagggacatggccactggatcaaacgcttgccagagatac

SEQ ID NO: 665423 - DNA, 75 bp, synthetic construct
  source 1..75: mol_type = other DNA
tgctgaatattaatcaactggcggctttatctggcctgcaccgccagactgtcgtggcaagactgaaaaacattc

SEQ ID NO: 665424 - DNA, 75 bp, synthetic construct
  source 1..75: mol_type = other DNA
ttgactcaatcagaaatgccccaggaatgcgccatcaaaacgtgcagggtacgcttgaagaacgagccagggggc

SEQ ID NO: 665425 - DNA, 75 bp, synthetic construct
  source 1..75: mol_type = other DNA
aaacgggacagccctaacattcctgtttcacaacttaccgctacggcaactagtctctgcaaagacgggctttaa

SEQ ID NO: 665426 - DNA, 75 bp, synthetic construct
  source 1..75: mol_type = other DNA
taacccagaccggcgattactcgcgacgctcgtttatttatggcagcgttatttgtctgctggtggcgctgattc

SEQ ID NO: 665427 - DNA, 75 bp, synthetic construct
  source 1..75: mol_type = other DNA
tggcgatgattatctttctgccgcaacgttttgcccgttacggcttgctggtcggcacgataaccgggtggttgt

SEQ ID NO: 665428 - DNA, 75 bp, synthetic construct
  source 1..75: mol_type = other DNA
tggtcgatttggttaatgaaggcgtcgatctggatattcgtattggcgatgatatcgcccccaatttaatcgccc

SEQ ID NO: 665429 - DNA, 75 bp, synthetic construct
  source 1..75: mol_type = other DNA
cgaaatctggcgtgacctgatgcaacgttccgggatgctgtcattaatggatacgcaggcccgtgatacatggta

SEQ ID NO: 665430 - DNA, 75 bp, synthetic construct
  source 1..75: mol_type = other DNA
gacctggaaagaatgctgcatctgttcagtggcaaaccagtccccgacaaccgggaaaatatcatcattcatctg

SEQ ID NO: 665431 - DNA, 75 bp, synthetic construct
  source 1..75: mol_type = other DNA
tcagtaacggcttactggtcggaattttactggctgtgttcttatggataatcttattccgtgggaacgcatcga

SEQ ID NO: 665432 - DNA, 75 bp, synthetic construct
  source 1..75: mol_type = other DNA
gcggaattttgattggaaactttgcaaaggttgttggtattggtccaaacaaactgtttgcgtggatgcgcgatc

SEQ ID NO: 665433 - DNA, 75 bp, synthetic construct
  source 1..75: mol_type = other DNA
attgtcgtttaaatttggcgttgcttacggcaacgtttttggtcatcgcgggtttacccattcgctggtgtttgc

SEQ ID NO: 665434 - DNA, 75 bp, synthetic construct
  source 1..75: mol_type = other DNA
attatttctgaattgatgtgggtatggttgccggggatgctactgatgggaatgttgtggtggcgcagacgataa

SEQ ID NO: 665435 - DNA, 75 bp, synthetic construct
  source 1..75: mol_type = other DNA
gctggcacagattggcattaccagcgatgccagtaccggcaagctggaaatcgcgaccgacaaactgcaaacggc

SEQ ID NO: 665436 - DNA, 75 bp, synthetic construct
  source 1..75: mol_type = other DNA
gcggtaaagatccggtcacgattgatatcagcgcggctaactcgtcactttccggcattcgcgatgccattaaca

SEQ ID NO: 665437 - DNA, 75 bp, synthetic construct
  source 1..75: mol_type = other DNA
atgagtaatttaatttgtttctcttccgttaagatgaccagtatcgaaattgccgaactggtagaaagccgccat

SEQ ID NO: 665438 - DNA, 75 bp, synthetic construct
  source 1..75: mol_type = other DNA
ggactggctcaggcgcgtgacccgcagctggcggcatggattgaagaaaacgtcaccttcccgtgcaccatggtt

SEQ ID NO: 665439 - DNA, 75 bp, synthetic construct
  source 1..75: mol_type = other DNA
tctcaataacccgctgatcaagcacgatctggaaaacccgaccgcgccgaagtccgcgattggttacatcgtaga

SEQ ID NO: 665440 - DNA, 75 bp, synthetic construct
  source 1..75: mol_type = other DNA
taatgccattgacgtggtcgacccgatgctggccgagttccagaagattaacgcgcagtatcagggcgcagaccg

SEQ ID NO: 665441 - DNA, 75 bp, synthetic construct
  source 1..75: mol_type = other DNA
aacgtaaatccgaagaggccgccaaaagtctggcgtttctggcaaagcaactgcctgaggtacgtaaccggcttg

SEQ ID NO: 665442 - DNA, 75 bp, synthetic construct
  source 1..75: mol_type = other DNA
tgaaagcagcgcgaaacggacgtcggttgccaactttgacctgatcccgcgcgggcagatcccgccaaatccgtc

SEQ ID NO: 665443 - DNA, 75 bp, synthetic construct
  source 1..75: mol_type = other DNA
aaaacggcggcagctggcgtcacctggcgctgggcgtggctggctggatgcgttacacccagggcgtggatgagc

SEQ ID NO: 665444 - DNA, 75 bp, synthetic construct
  source 1..75: mol_type = other DNA
cccacagcagttcaaactataaaacgctggcacagattggcattaccagcgatgccagtaccggcaagctggaaa

SEQ ID NO: 665445 - DNA, 75 bp, synthetic construct
  source 1..75: mol_type = other DNA
cgctgagttggtgggaagccaacacggtaatgtcagaatatcaatagaacgtctggcaaagcgtggggtgattca

SEQ ID NO: 665446 - DNA, 75 bp, synthetic construct
  source 1..75: mol_type = other DNA
ctggcccatttctggctggtggggatctcaagtttgtttgccgtggctattggcgtcggtgcaggaattgcggtc

SEQ ID NO: 665447 - DNA, 75 bp, synthetic construct
  source 1..75: mol_type = other DNA
ataccgcgtatgtgatccagggggcgttactggtggcactggcggcgatcatcgcagaccgcctgtttgaaaggc

SEQ ID NO: 665448 - DNA, 75 bp, synthetic construct
  source 1..75: mol_type = other DNA
gacaaggtgaaacaatctattgaacgactggcgggacgaggtgtaatagcttttcccccaatgggggagaagccc

SEQ ID NO: 665449 - DNA, 75 bp, synthetic construct
  source 1..75: mol_type = other DNA
gcttcctcaaattgaggtttccgaaagaatcaataacttagggttcaatgttcagtacgagcattacgttttcga

SEQ ID NO: 665450 - DNA, 75 bp, synthetic construct
  source 1..75: mol_type = other DNA
ccttgaagaccagaaggctgaactggagaaacagcttgctctcgcagcacctaaagttgagtttgccgatcgagt

SEQ ID NO: 665451 - DNA, 75 bp, synthetic construct
  source 1..75: mol_type = other DNA
ctgaacgcctttcccggctgtgaagtcgccgtcagcgacgtgccgagcggtcagttgattgtggtagcggaagcc

SEQ ID NO: 665452 - DNA, 75 bp, synthetic construct
  source 1..75: mol_type = other DNA
ggggtaaccaccggcattagtagcaacctgaccagttggctctcttccaccgggataatccaggcagcaaaagat

SEQ ID NO: 665453 - DNA, 75 bp, synthetic construct
  source 1..75: mol_type = other DNA
agattggcattaccagcgatgccagtaccggcaagctggaaatcgcgaccgacaaactgcaaacggcgctaaaaa

SEQ ID NO: 665454 - DNA, 75 bp, synthetic construct
  source 1..75: mol_type = other DNA
gattatcgccttgatcctttacggtgtgctgcccgtcctgcaggcgacacttgccgggctgggagcgattgatgc

SEQ ID NO: 665455 - DNA, 75 bp, synthetic construct
  source 1..75: mol_type = other DNA
cagccgctgtttgctgccttgttcccacaactgccacgacccgtttatcagcaagaaagttttgcagctctggca

SEQ ID NO: 665456 - DNA, 75 bp, synthetic construct
  source 1..75: mol_type = other DNA
tctggctcattgctttgtttgtggcactgattttctggctgccttacagccagccgctgtttgctgccttgttcc

SEQ ID NO: 665457 - DNA, 75 bp, synthetic construct
  source 1..75: mol_type = other DNA
ggattttcgctgcggctgctggctgactgagaaaccggaaaccgcaatgaaagccattacccgcaaccttgaccg

SEQ ID NO: 665458 - DNA, 75 bp, synthetic construct
  source 1..75: mol_type = other DNA
cacattctggctgtacgaaagagtgcgctgctgcaaatcgacacacttatccggcaactggctgaaatctcagca

SEQ ID NO: 665459 - DNA, 75 bp, synthetic construct
  source 1..75: mol_type = other DNA
tttatctgtgcgggcggcggtttggcggcaagctattacgccgtttctcgaaacatcaggataaaattgagcggg

SEQ ID NO: 665460 - DNA, 75 bp, synthetic construct
  source 1..75: mol_type = other DNA
ccgcactggactgggcgatgaaacaggattttcgctgcggctgctggctgatggagaaaactgaaacggcaatga

SEQ ID NO: 665461 - DNA, 75 bp, synthetic construct
  source 1..75: mol_type = other DNA
ccggtcactggagtacgataactttccggaaatcagtgaagcgaacattctgagcacatttgaacaactgcacca

SEQ ID NO: 665462 - DNA, 75 bp, synthetic construct
  source 1..75: mol_type = other DNA
aagccatcacccgcaactttgaccgcgaaatctggcgtgacctgatgcaacggttccgggatgctttccttaatg

SEQ ID NO: 665463 - DNA, 75 bp, synthetic construct
  source 1..75: mol_type = other DNA
ggcgcaaatgcaacctgccagcgccgcgctgattttcgcagcgccagaagtgacccgtagcgccgacagcgaata

SEQ ID NO: 665464 - DNA, 75 bp, synthetic construct
  source 1..75: mol_type = other DNA
cgccggctcagcgcgaaatctacgacattgtgctggagtctctcgaaaccagtttgcgtctgtatcgtccgggaa

SEQ ID NO: 665465 - DNA, 75 bp, synthetic construct
  source 1..75: mol_type = other DNA
ttcagcgtcgccgtcaggctctggtggagcaaatgcaacccggcagcgccgcgctgatttttgccgccccggaag

SEQ ID NO: 665466 - DNA, 75 bp, synthetic construct
  source 1..75: mol_type = other DNA
tgtgcgggcggcggtttggcggcaagctgttacgccgtttctcgaaacatcaggataaaattgagcgggcgcaga

SEQ ID NO: 665467 - DNA, 75 bp, synthetic construct
  source 1..75: mol_type = other DNA
ctgacagaaagtattggaggtaaaactgctctggactgggccatgaaacaggattttcgctgcggctgctggctg

SEQ ID NO: 665468 - DNA, 75 bp, synthetic construct
  source 1..75: mol_type = other DNA
catggccttagccactggttaggtctggatgttcatgatgtgggtgtttatggtcaggatcgctcgcgcattctt

SEQ ID NO: 665469 - DNA, 75 bp, synthetic construct
  source 1..75: mol_type = other DNA
cgatcagggattgttgctgctcgactttaaagatctgcgggcgattacccagtacatcggcgataacgccaaatc

SEQ ID NO: 665470 - DNA, 75 bp, synthetic construct
  source 1..75: mol_type = other DNA
ggatttccgttgcggctgctggttgatggagaaaccagaagcggcgatgaaagctattacccgtaatctcgatcg

SEQ ID NO: 665471 - DNA, 75 bp, synthetic construct
  source 1..75: mol_type = other DNA
aaccatgcgggccaatccggcgtttgataccgaaaaggcaatccaggaactggggaccggcgaggcgttaatctc

SEQ ID NO: 665472 - DNA, 75 bp, synthetic construct
  source 1..75: mol_type = other DNA
ctgctcgctcggttgaaaagtatcggcgtcaacgactggcaaccacatgcgaatccagtggtggtgtgggatatt

SEQ ID NO: 665473 - DNA, 75 bp, synthetic construct
  source 1..75: mol_type = other DNA
attaatggatgcgcagacccgtgatacatggtacaggtcactggagtacaataattttccggaaatcagtgaagc

SEQ ID NO: 665474 - DNA, 75 bp, synthetic construct
  source 1..75: mol_type = other DNA
gttcagcatcagatactttaagaagggctccgcgcacatcacgttcaggaaaccagaactggttgatcggctaaa

SEQ ID NO: 665475 - DNA, 75 bp, synthetic construct
  source 1..75: mol_type = other DNA
cgaaatctggcgtgacctgatgcaacgctccgggatgctgtcattaatggatgcacaggcccgtgatacatgtta

SEQ ID NO: 665476 - DNA, 75 bp, synthetic construct
  source 1..75: mol_type = other DNA
tcgcaaaacccgtctgatatccctgacaacgtgcttgggcagttgggaaatcgcgttcagcacgctctgcgcgcc

SEQ ID NO: 665477 - DNA, 75 bp, synthetic construct
  source 1..75: mol_type = other DNA
agatgagcgtaatggcttgattaatcactccccggtgtatggcaagtacgaggatgacgtggaccgcgagtccgc

SEQ ID NO: 665478 - DNA, 75 bp, synthetic construct
  source 1..75: mol_type = other DNA
ggattaaaggatattttgtttggcactaccggaccacgcggcgggaagaaagatggtgtggtgcaaacaatggcg

SEQ ID NO: 665479 - DNA, 75 bp, synthetic construct
  source 1..75: mol_type = other DNA
gaggggaccgatcgaactcgtatttgactttatcaacaatgtgaaagggagctttcgctcccttgcttggttacg

SEQ ID NO: 665480 - DNA, 75 bp, synthetic construct
  source 1..75: mol_type = other DNA
tcgcaaaacccttcggatatacccgacaacgtactcgggcagttggggaatcgcgttcaacacgctctgcgcgcc

SEQ ID NO: 665481 - DNA, 75 bp, synthetic construct
  source 1..75: mol_type = other DNA
caggccagtaccgaacagcaaaataaccctcctgccaaagggaaagagataagtgaagatgacggtattctgggt

SEQ ID NO: 665482 - DNA, 75 bp, synthetic construct
  source 1..75: mol_type = other DNA
gttgggctgatcccgcgttcccgaaaaatttcccgtggttaaccgggaagattactggctgcgacaaacggcgac

SEQ ID NO: 665483 - DNA, 75 bp, synthetic construct
  source 1..75: mol_type = other DNA
ggggagatcaatgtcttcagaggactgagccgggattacaaaaccaggtcgccctgcaaatttagtgtaagcgta

SEQ ID NO: 665484 - DNA, 75 bp, synthetic construct
  source 1..75: mol_type = other DNA
acctgatgcaacgttccgggacgctttccttaatggatgcacaggctcgtgatacatggtacagaccactggaat

SEQ ID NO: 665485 - DNA, 75 bp, synthetic construct
  source 1..75: mol_type = other DNA
ccgccccggcctgggccatgaaacaggattttcgctgcggctgctggctgatggagaaaccggaaaccgcaatga

SEQ ID NO: 665486 - DNA, 75 bp, synthetic construct
  source 1..75: mol_type = other DNA
gcggcaaaccgatccctgacaaccgggaaaatatcatcattcggctggatgatcacatccgctccgttcagggca

SEQ ID NO: 665487 - DNA, 75 bp, synthetic construct
  source 1..75: mol_type = other DNA
gacgtcagcctgaacagggctggcgttttcgtttataaaccaaaagggaaaccgataatgtcagacatcacaatc

SEQ ID NO: 665488 - DNA, 75 bp, synthetic construct
  source 1..75: mol_type = other DNA
atgtcaggcatcataatctcccgtccggaagtggacaccgggcatacggacgttatctgctccaccagtatccga

SEQ ID NO: 665489 - DNA, 75 bp, synthetic construct
  source 1..75: mol_type = other DNA
aagccatcacccgcaatctcgatcgagaaatctggcgtgacctgatgcaacattcagggatgctttccttaatgg

SEQ ID NO: 665490 - DNA, 75 bp, synthetic construct
  source 1..75: mol_type = other DNA
gaataaggatgaagtgtttgagcgaggagtgatcaacctcttcagagggttgagctggaattacaaaaccaattg

SEQ ID NO: 665491 - DNA, 75 bp, synthetic construct
  source 1..75: mol_type = other DNA
tggatgcacaggcccatgatacatggtacaggtcacgaagtacgataattttccggaaatcatcgaagcgaacat

SEQ ID NO: 665492 - DNA, 75 bp, synthetic construct
  source 1..75: mol_type = other DNA
atggagaaaactgaaacggcaatgaaagccatcacccgaaaccttgaccgtgaaatctggcgtgacctgatgcaa

SEQ ID NO: 665493 - DNA, 75 bp, synthetic construct
  source 1..75: mol_type = other DNA
tattattattggtgccggtattgcaggcaccgcttgcgcgttacgcatggatatatcgttcgatactggaaagcg

SEQ ID NO: 665494 - DNA, 75 bp, synthetic construct
  source 1..75: mol_type = other DNA
ggattttcgctgcggttgctggctgatggagaaacctgaaaccgcaatgaaagccatcacacgcaatctcgatcg

SEQ ID NO: 665495 - DNA, 75 bp, synthetic construct
  source 1..75: mol_type = other DNA
aaacggcgaatcatgtgaagatttgttaccggaatcggtattgacctacattaaccaacaaggcttgtatcgctg

SEQ ID NO: 665496 - DNA, 75 bp, synthetic construct
  source 1..75: mol_type = other DNA
ctgaacgttggacagccgatcaaatcctcgaagaacatcaatttgcgttgcagctggttaacgatgaagttccgg

SEQ ID NO: 665497 - DNA, 75 bp, synthetic construct
  source 1..75: mol_type = other DNA
tgctcggcgactccacgctgcggacgattcagacgcagttgaagtcgatgctgagtaataccgtcagttcttcca

SEQ ID NO: 665498 - DNA, 75 bp, synthetic construct
  source 1..75: mol_type = other DNA
gcaataaagatccgataaccattgatatcagcgcggctaactcgtctttaagcgcgattcgtgatgccatcaaca

SEQ ID NO: 665499 - DNA, 75 bp, synthetic construct
  source 1..75: mol_type = other DNA
cgacagacggcgacttttatagaacaggcaaaagttctacaagaaccccctttgcaattaacacctatgtattaa

SEQ ID NO: 665500 - DNA, 75 bp, synthetic construct
  source 1..75: mol_type = other DNA
ttttatttcgctgtttttccaagcgtcggtggtcgccagttcgaagctgataatatcgatcagatggaagcggtt

SEQ ID NO: 665501 - DNA, 75 bp, synthetic construct
  source 1..75: mol_type = other DNA
cctcgaagaacatcaatttgcgttacaactggtaaacgacgaagttccagtcgccgcgccgttagcctataacgg

SEQ ID NO: 665502 - DNA, 75 bp, synthetic construct
  source 1..75: mol_type = other DNA
tctgagcacatttgaacaactgcaccagaacaacgatgaggtgtttgatcggggcgtgatcaacgtcttcatagg

SEQ ID NO: 665503 - DNA, 75 bp, synthetic construct
  source 1..75: mol_type = other DNA
tctgagcacatttgaacaactgcaccagaataaggatgaggtgtttgaacggggcgtgatcaacgtcttcatagg

SEQ ID NO: 665504 - DNA, 75 bp, synthetic construct
  source 1..75: mol_type = other DNA
tctgagcacatttgaacaactgcaccagaaaaatgatgaggtgtttgaccggggcgtgatcaacgtcttcatagg

SEQ ID NO: 665505 - DNA, 75 bp, synthetic construct
  source 1..75: mol_type = other DNA
gaccaaatacaccgccgtagatgcgggagctgatagccagagttctagcaatggcgcactgctcggcgactccac

SEQ ID NO: 665506 - DNA, 75 bp, synthetic construct
  source 1..75: mol_type = other DNA
atgctgagcaataccgtcagttcctccaactataaaacgctggcgcagatgggtatcacgaccgatcccagcaac

SEQ ID NO: 665507 - DNA, 75 bp, synthetic construct
  source 1..75: mol_type = other DNA
ggaccggtggggatgtcatcttatcaccggacaacagactgaccgactcgccgacatggaaagaatgctacatct

SEQ ID NO: 665508 - DNA, 75 bp, synthetic construct
  source 1..75: mol_type = other DNA
aagaaagtagagattttttcaaaaattgatgcattaaaagaaaaaacaacaacgccgcatgttcttgttcagatg

SEQ ID NO: 665509 - DNA, 75 bp, synthetic construct
  source 1..75: mol_type = other DNA
ggtcaggctgcgttaggcgttgtctgcctgggatataccgtgtcgctgtctaagaaaatcaaacaattacgtcag

SEQ ID NO: 665510 - DNA, 75 bp, synthetic construct
  source 1..75: mol_type = other DNA
gctggatccactggcaaataccattaattggcggaatctgctgtgctgctttttatgcctggctgacgggaatgc

SEQ ID NO: 665511 - DNA, 75 bp, synthetic construct
  source 1..75: mol_type = other DNA
aagttcgtgcagttcatggccaacttaatgatggcggctttgatagccagcgttatgccattgcccagcatcagc

SEQ ID NO: 665512 - DNA, 75 bp, synthetic construct
  source 1..75: mol_type = other DNA
tgctgctttttatgcctggcattacgggaatgcaacctcctgcattgcgtaccgtggtggcgcttgccatttggg

SEQ ID NO: 665513 - DNA, 75 bp, synthetic construct
  source 1..75: mol_type = other DNA
tttatacccttattgtgtcagaattaatcgtaagccattttaatgatgtcgctatggtatatccgggaagcgaag

SEQ ID NO: 665514 - DNA, 75 bp, synthetic construct
  source 1..75: mol_type = other DNA
gatctgaacggcaataccgccgaattccgcctgtctgaagaccgcgcatttattgaagcgatgaatcagcagatg

SEQ ID NO: 665515 - DNA, 75 bp, synthetic construct
  source 1..75: mol_type = other DNA
ccgagtttgaacaaccgcgtacgtttaacgtacggacatcgcaacccattgaaaaaaaatcaagacgggaattca

SEQ ID NO: 665516 - DNA, 75 bp, synthetic construct
  source 1..75: mol_type = other DNA
atgaaggtgattctggctaccaggaaccgctatctggagtatggtctgcaggcgttactgaaggggcacagtgtg

SEQ ID NO: 665517 - DNA, 75 bp, synthetic construct
  source 1..75: mol_type = other DNA
acgatgtcagagatggtggtgatgttcggttatgtctaccgccagtcgagaccctgtcgccttgccagtgaaatg

SEQ ID NO: 665518 - DNA, 75 bp, synthetic construct
  source 1..75: mol_type = other DNA
atactggcgagggagtttttcctgccggagaaccgccgttatatcccggactttgacgaatcctggctgataatc

SEQ ID NO: 665519 - DNA, 75 bp, synthetic construct
  source 1..75: mol_type = other DNA
gcgtggaggacagcctgattgcctgtgtggatggcctgacagggttcccggaagcgataagcagcatttatccgc

SEQ ID NO: 665520 - DNA, 75 bp, synthetic construct
  source 1..75: mol_type = other DNA
aagcactggcgcggcaggggcaacagttgatggcggaaattcacgccttgccagttccggttattgccgccattc

SEQ ID NO: 665521 - DNA, 75 bp, synthetic construct
  source 1..75: mol_type = other DNA
tatcggcctgcatttcttcagtccggtggaaaaaatgccgctggtggagattattcctcatgcggggacatcggc

SEQ ID NO: 665522 - DNA, 75 bp, synthetic construct
  source 1..75: mol_type = other DNA
gttaatggcagagattcatgctttgcccgttccggttatcgcggctattcacggcgcatgtcttggcggcgggct

SEQ ID NO: 665523 - DNA, 75 bp, synthetic construct
  source 1..75: mol_type = other DNA
aagtgcgccgtcgtcatctcaaagccagcgaacgcgacaagcaactggctttaatttccggcacgacggattacc

SEQ ID NO: 665524 - DNA, 75 bp, synthetic construct
  source 1..75: mol_type = other DNA
ctggcgatgacgccgcaatcgcaagctctgcgtaatctcttttttgccagtacagaagtgaagaaagatcccggt

SEQ ID NO: 665525 - DNA, 75 bp, synthetic construct
  source 1..75: mol_type = other DNA
gcgtgacggagatattggcgcggtatttggcattggttttccgccatttctcggtggaccgttccgctatatcga

SEQ ID NO: 665526 - DNA, 75 bp, synthetic construct
  source 1..75: mol_type = other DNA
ctggaggttgttgaaacgggattagcgcagggcaccagcagcggttatgacgccgaagctcgggcgtttggcgaa

SEQ ID NO: 665527 - DNA, 75 bp, synthetic construct
  source 1..75: mol_type = other DNA
gttgatggcggagattcatgctttgcccattccggttatcgcggctattcatggcgcttgcctgggtggtgggct

SEQ ID NO: 665528 - DNA, 75 bp, synthetic construct
  source 1..75: mol_type = other DNA
cacggctaccatcagtgcggttaccgataaagtcattcctgagttaaaacagtggcagcagcgcccgctggaaaa

SEQ ID NO: 665529 - DNA, 75 bp, synthetic construct
  source 1..75: mol_type = other DNA
caattatccggcgacagaacgcatcctggaggttgttgaaacgggattagcgcagggcaccagcagtggctatga

SEQ ID NO: 665530 - DNA, 75 bp, synthetic construct
  source 1..75: mol_type = other DNA
ttcaattttgaacgacgatcgcaaaggtagaaaaaatggccggggtttctatctttaccgccaaaaagggcgtaa

SEQ ID NO: 665531 - DNA, 75 bp, synthetic construct
  source 1..75: mol_type = other DNA
agtttgcctcgcaggtgcgcgccattattaaacaactccgcgaaaataaagaacttcgaggcgtagtgtttatct

SEQ ID NO: 665532 - DNA, 75 bp, synthetic construct
  source 1..75: mol_type = other DNA
caacctgctcaacaggagcagaaagacagcgacggcgtggctggctggatcaaggagatgtttggtagtaattaa

SEQ ID NO: 665533 - DNA, 75 bp, synthetic construct
  source 1..75: mol_type = other DNA
atgatctgggcattcgtaaaagcataccgtaaacagttgattatcatggcggtgcttgctgttctggtcatatca

SEQ ID NO: 665534 - DNA, 75 bp, synthetic construct
  source 1..75: mol_type = other DNA
tgcacaggcaaaggcagatcgaaaagccgaagatgagaaagcgcgtctgcatgacgaacaggagaaagcgacaaa

SEQ ID NO: 665535 - DNA, 75 bp, synthetic construct
  source 1..75: mol_type = other DNA
gtgctgatttctttgtcgctgatcccttactggaactctgcagttatcgaccaggttgacctcggttcgctgtcg

SEQ ID NO: 665536 - DNA, 75 bp, synthetic construct
  source 1..75: mol_type = other DNA
cggcactggagtttaccgagtcgtgcaccggtacactggttggatggcatcgcgcgttttgcctgcgcctgaccg

SEQ ID NO: 665537 - DNA, 75 bp, synthetic construct
  source 1..75: mol_type = other DNA
cattttgctttaaagaaagcgaatttggagttcgcatctgcacaggctgccactcatctattacatatggcgaag

SEQ ID NO: 665538 - DNA, 75 bp, synthetic construct
  source 1..75: mol_type = other DNA
ttctggtggcggttggctaacgaaatgtatattaatggtaataaattacataagaaagcagccaaaaagttaaac

SEQ ID NO: 665539 - DNA, 75 bp, synthetic construct
  source 1..75: mol_type = other DNA
gctaatggtgggtgggattggcccaagaatttggggtttgaaggtgatccaatcaaaactataattccggtaggc

SEQ ID NO: 665540 - DNA, 75 bp, synthetic construct
  source 1..75: mol_type = other DNA
aatggtaaactatgctatgacgcagttcggtgtggataaagcgacggctgaaagctacgtcgaaacctatgacgg

SEQ ID NO: 665541 - DNA, 75 bp, synthetic construct
  source 1..75: mol_type = other DNA
actcatcagagaaaaatgatggctgttttggatgaaatcggtatatcgattagtaatgggcccaaaaatattttt

SEQ ID NO: 665542 - DNA, 75 bp, synthetic construct
  source 1..75: mol_type = other DNA
tttattcaacaaagccccttgtttggtacggcaatcggcgccggggtgctgttcttccctatccgcgcaggtttt

SEQ ID NO: 665543 - DNA, 75 bp, synthetic construct
  source 1..75: mol_type = other DNA
ttcgccggtatcaatggttcagagggcagggagaaaggcaacggcacgacctggacagaaaccacgctggatgcg

SEQ ID NO: 665544 - DNA, 75 bp, synthetic construct
  source 1..75: mol_type = other DNA
caataatgctgccaccatggcccgggaggcgaaagaaaccagcgacagccgtctggcggtactgaaaggaacaca

SEQ ID NO: 665545 - DNA, 75 bp, synthetic construct
  source 1..75: mol_type = other DNA
tggagcaggaactgaccctgctgtggaaacgggagatgattaccggctgctatctgccaacctggtgccagcttg

SEQ ID NO: 665546 - DNA, 75 bp, synthetic construct
  source 1..75: mol_type = other DNA
ccactacaagtgggataacggactggccctgcgtgactggcgctacgttgttcgcatcgccaacatcgatgtgag

SEQ ID NO: 665547 - DNA, 75 bp, synthetic construct
  source 1..75: mol_type = other DNA
acacctgcgggatgctggaaacttatgccgaagttgacaagtcactggcagatctgaacggcaacaccgctgaat

SEQ ID NO: 665548 - DNA, 75 bp, synthetic construct
  source 1..75: mol_type = other DNA
gcgttctattgacgacccggacgttgccttgcttgtagggcttgctcgtgaaaagggaatagttgttacagaaat

SEQ ID NO: 665549 - DNA, 75 bp, synthetic construct
  source 1..75: mol_type = other DNA
cgccagaagatattgcagatatgggcgtggactacgacggcaactttgtttgcagcggtggtatgcgtgtcttgc

SEQ ID NO: 665550 - DNA, 75 bp, synthetic construct
  source 1..75: mol_type = other DNA
ggtgaccatcacctgggtcggccgtgataacaaccagccgaccaaactgtatggagccagcggggcaatgtcgat

SEQ ID NO: 665551 - DNA, 75 bp, synthetic construct
  source 1..75: mol_type = other DNA
tggtggaccactttccgtggcattcctatccgtgaaaccgatgcgattctggaaacagaagcgcgcgttgtttaa

SEQ ID NO: 665552 - DNA, 75 bp, synthetic construct
  source 1..75: mol_type = other DNA
ttttgcctcagcaatttctttaagattttatttacgcaagaaatttgcccacagagccgttttcacacataaaag

SEQ ID NO: 665553 - DNA, 75 bp, synthetic construct
  source 1..75: mol_type = other DNA
atgagtaaagagaccattaagtgcccgttctgcttcaaagagagtccgttcggagttcgtgtctgtatcggctgt

SEQ ID NO: 665554 - DNA, 75 bp, synthetic construct
  source 1..75: mol_type = other DNA
ttggcactattgaagaatcactcttatggtcggcagaacagcgggcagcctcgctggcagctacgctggcttgtc

SEQ ID NO: 665555 - DNA, 75 bp, synthetic construct
  source 1..75: mol_type = other DNA
tgcctggaggatgctgtcagtgaagcagacatccccgtcgccctcaaaaatctggagcacctgctgcacgagctc

SEQ ID NO: 665556 - DNA, 75 bp, synthetic construct
  source 1..75: mol_type = other DNA
acgattgcgttcagtgccacgccaccaaacgggcgatggaaaaccggagctttgattttgaaatgattaatgtcg

SEQ ID NO: 665557 - DNA, 75 bp, synthetic construct
  source 1..75: mol_type = other DNA
ttcttcatattcgctattagtcaaaattttatattaaccgtcgtaatctattttgcattagcaatttctttaaga

SEQ ID NO: 665558 - DNA, 75 bp, synthetic construct
  source 1..75: mol_type = other DNA
atccttgctgatatcaacaatgatctgattagtctttacaacatagtgaagacgcgtacggaagagtacgtgcag

SEQ ID NO: 665559 - DNA, 75 bp, synthetic construct
  source 1..75: mol_type = other DNA
ttcgctgaaaaagcgcagaatgcctttttctattgtgagtcttacgccgatagcatggcgcgcgcagatgatgca

SEQ ID NO: 665560 - DNA, 75 bp, synthetic construct
  source 1..75: mol_type = other DNA
gccgcacgcgagctgtttgttcccgaaacaaattgcgccgaggtctactatcagttccgcgaagagttcaacaaa

SEQ ID NO: 665561 - DNA, 75 bp, synthetic construct
  source 1..75: mol_type = other DNA
aaacctattatggaggtgaaatcccattcattagatcagccgagatccaaaaatacaaaacggaactctatttaa

SEQ ID NO: 665562 - DNA, 75 bp, synthetic construct
  source 1..75: mol_type = other DNA
ctgcgggaattggttttgtaaacctgtttggtgcagtgggcgggtttattgccccgatcctgcgcgtgaaagcag

SEQ ID NO: 665563 - DNA, 75 bp, synthetic construct
  source 1..75: mol_type = other DNA
atgaagaaaaaacgcgcttttttgaagtgggcagggggcaagtatcccctgcttgatgatattaaacggcatttg

SEQ ID NO: 665564 - DNA, 75 bp, synthetic construct
  source 1..75: mol_type = other DNA
ggcgcgtccatacaaccgtcgtgaagatgccaaataccgcgatcagcagggcgcggttgccagtcgtattgataa

SEQ ID NO: 665565 - DNA, 75 bp, synthetic construct
  source 1..75: mol_type = other DNA
gcatcgtgttggaattctacaactccggtaagctgccgctggcgctgcgtccggggatgctgatcggtgcactga

SEQ ID NO: 665566 - DNA, 75 bp, synthetic construct
  source 1..75: mol_type = other DNA
gatgaaaacgaggcgttttttcttcatccaggtgagctggcgctggcggtgacgctggagtcggtaaccttgcct

SEQ ID NO: 665567 - DNA, 75 bp, synthetic construct
  source 1..75: mol_type = other DNA
gcaactttctttgtccgggctataggtgattcgatgcagaatatgaggttgcagtccggggatcggatggtggtc

SEQ ID NO: 665568 - DNA, 75 bp, synthetic construct
  source 1..75: mol_type = other DNA
gatattggcctgcacaacggcgatctcatggtggtggataaagcagaaacgccccagcacggcgacatcgtggtt

SEQ ID NO: 665569 - DNA, 75 bp, synthetic construct
  source 1..75: mol_type = other DNA
gcctatccgacactctatcccgatccggaacacctgcagatttttggtgtggtgacgcattttgtgcaccgcacc

SEQ ID NO: 665570 - DNA, 75 bp, synthetic construct
  source 1..75: mol_type = other DNA
cattcattgtcaagacaagtctggtaaggctcttctgcgtaaaaaatttacccgtactaaactgatgcagtttct

SEQ ID NO: 665571 - DNA, 75 bp, synthetic construct
  source 1..75: mol_type = other DNA
atggataagaagcaagtaacggatttaaggtcggaactactcgattcacgttttggagctaagtctatttccact

SEQ ID NO: 665572 - DNA, 75 bp, synthetic construct
  source 1..75: mol_type = other DNA
tacctggatggcaatgcccgacaaaaccttgccacattttgccagacctgggacgacgaaaatgttcataagctg

SEQ ID NO: 665573 - DNA, 75 bp, synthetic construct
  source 1..75: mol_type = other DNA
cagttactgatgcgcttacatgcccattatatttatcttgtcggacagatcaccgagcttgaaatcgcactggag

SEQ ID NO: 665574 - DNA, 75 bp, synthetic construct
  source 1..75: mol_type = other DNA
cgatgcgctggataaattccaggccgacaccggtatcgacatcgacatgcacatcgacgctgccagcggtggctt

SEQ ID NO: 665575 - DNA, 75 bp, synthetic construct
  source 1..75: mol_type = other DNA
atggataagaagcaagtaacggatttaaggtcggaactactcgattcacgttttggggctaagtccatttctact

SEQ ID NO: 665576 - DNA, 75 bp, synthetic construct
  source 1..75: mol_type = other DNA
atggataagaagcaagtaacggatttaaggtcggaactactcgattcacgttttggtgctaagtcgatttccact

SEQ ID NO: 665577 - DNA, 75 bp, synthetic construct
  source 1..75: mol_type = other DNA
gtaatggaagcctgtgcgggtgcacactttatggctcgtcgtatctctgattttgggcatgaaactaagctaatt

SEQ ID NO: 665578 - DNA, 75 bp, synthetic construct
  source 1..75: mol_type = other DNA
tgatgcagaagccatatgcgaagcggcttcacgaccatcaatgcgttttgtccagccaagaactgagacccagca

SEQ ID NO: 665579 - DNA, 75 bp, synthetic construct
  source 1..75: mol_type = other DNA
tcaaaagtaataagaatgattttgtcgatgctgaagcaatatgtgaggccgcatcgcgaccatcaatgcgtttcg

SEQ ID NO: 665580 - DNA, 75 bp, synthetic construct
  source 1..75: mol_type = other DNA
ttgttggcaagaaaacactccagcgtagtatgttgcgcactggccaacaaattagcccggatagcgtgggcaatc

SEQ ID NO: 665581 - DNA, 75 bp, synthetic construct
  source 1..75: mol_type = other DNA
atggctcgctgtatctctgattttgggcatgaaactaagctgatttctccacagttcgttcgcccgtttgtcaaa

SEQ ID NO: 665582 - DNA, 75 bp, synthetic construct
  source 1..75: mol_type = other DNA
aacaattttcatgcagcagggattttgcagcatccacaggacttgttccccgacaatatagtaccggtggtaaat

SEQ ID NO: 665583 - DNA, 75 bp, synthetic construct
  source 1..75: mol_type = other DNA
ggccttcagtggaaggcgccgcacttcctttttttgccgaacccgtttcggccggctttcccagcccggcagcag

SEQ ID NO: 665584 - DNA, 75 bp, synthetic construct
  source 1..75: mol_type = other DNA
acctatctgttagggctatggaatgcagagatgcagttaaatgaaaaagggtattattttgccgtactggtatta

SEQ ID NO: 665585 - DNA, 75 bp, synthetic construct
  source 1..75: mol_type = other DNA
tacggtagcggtgcagaagaatatccgtgatgccggaatcaacgcatcaaaagaaacgatgactgtgcaggaaga

SEQ ID NO: 665586 - DNA, 75 bp, synthetic construct
  source 1..75: mol_type = other DNA
aaaagaccgttcgggacaagtatgaaggcataccgaccatggatttgcccctatatttccagacacctgttatca

SEQ ID NO: 665587 - DNA, 75 bp, synthetic construct
  source 1..75: mol_type = other DNA
caaagcagggcatccgctcgctgggcgcggcgtagtgctctccggttcatgctctcaaatgaccaaccgccaggt

SEQ ID NO: 665588 - DNA, 75 bp, synthetic construct
  source 1..75: mol_type = other DNA
gttctgagtcaggaaagtgaacttgctccgctggtttttgccaccgccagcaccgacgcgctggccgctattcaa

SEQ ID NO: 665589 - DNA, 75 bp, synthetic construct
  source 1..75: mol_type = other DNA
ctccactggtttttgccaccgccagcactgacgcattggcagcaattcaacagcaatacggtgcacaaaaagcca

SEQ ID NO: 665590 - DNA, 75 bp, synthetic construct
  source 1..75: mol_type = other DNA
agtatggttcgcgctttaccccttgtgaacgtttacaagagatgagcgagcgtggagaaagtttttggaaaacaa

SEQ ID NO: 665591 - DNA, 75 bp, synthetic construct
  source 1..75: mol_type = other DNA
cgcgtctgcagtgacgatcctaaaacggtgcttggcttgccggaagttcagcttggattattgccaggttcaggc

SEQ ID NO: 665592 - DNA, 75 bp, synthetic construct
  source 1..75: mol_type = other DNA
cgatcgtggtgcaggataaagccgggttttatgtcaatcgcattttagcgccgtacattaacgaagctatccgca

SEQ ID NO: 665593 - DNA, 75 bp, synthetic construct
  source 1..75: mol_type = other DNA
ctcagcgaaaaaggcttctatggtctggccttctttttaagcttgtttggtgcagtagcggtgcagaaaaatatc

SEQ ID NO: 665594 - DNA, 75 bp, synthetic construct
  source 1..75: mol_type = other DNA
tggctttcttcttaagcttgtttggtgcagtagcggtgcagaagaatattcgtgatgccggaataaacccaccaa

SEQ ID NO: 665595 - DNA, 75 bp, synthetic construct
  source 1..75: mol_type = other DNA
caccatataaaacaccttcctgttgttggggatatccagattatacagattatacagatttcctgtcgttgggga

SEQ ID NO: 665596 - DNA, 75 bp, synthetic construct
  source 1..75: mol_type = other DNA
tccattgtttgccgatctggccagctgcggttttcccagccctgctgctgactatgtcgagtccgatctggatct

SEQ ID NO: 665597 - DNA, 75 bp, synthetic construct
  source 1..75: mol_type = other DNA
gctttcctgccggtagcagagttcttaggtgacccggtaatggcaacgctgattgcggtgctgattgcgatgttc

SEQ ID NO: 665598 - DNA, 75 bp, synthetic construct
  source 1..75: mol_type = other DNA
ttcaaagagtactttaacctgactatcggcgagaccatcaagtcctggtcgatgctggaaaccattatctcggtg

SEQ ID NO: 665599 - DNA, 75 bp, synthetic construct
  source 1..75: mol_type = other DNA
tggcgcaatgctgggcaaaatgctggcagactgcggtggcgcacaacgtatcgccaccacgctgattgccaaatt

SEQ ID NO: 665600 - DNA, 75 bp, synthetic construct
  source 1..75: mol_type = other DNA
cgaaatgatcctgccgaaaggtcacgctttcctgccggtagcggagttcctcggtgacccggtaatggcaacgct

SEQ ID NO: 665601 - DNA, 75 bp, synthetic construct
  source 1..75: mol_type = other DNA
gttttgccctgttctatgaagtgggctttgtgctgatgctgccgctggtgtttaccatcgcggcttccgcgaata

SEQ ID NO: 665602 - DNA, 75 bp, synthetic construct
  source 1..75: mol_type = other DNA
tcactgcgggtggtatcgcggcaccgctgattgcaacgacgggtgttagcccggagctgatggttattgcggtgg

SEQ ID NO: 665603 - DNA, 75 bp, synthetic construct
  source 1..75: mol_type = other DNA
tgccaggccggttttccttcccctgccactgattatgctgagcaggaactggatctgaacagctattgcatcagc

SEQ ID NO: 665604 - DNA, 75 bp, synthetic construct
  source 1..75: mol_type = other DNA
ataccgaagacgaactggatctaaatgcctactgtatccgtcgccccagtgcaacctactttgtccgggccattg

SEQ ID NO: 665605 - DNA, 75 bp, synthetic construct
  source 1..75: mol_type = other DNA
gcaactttctttgtccgggctataggtgattcgatgcagaatatggggttgcactccggtgatctgatggtggtc

SEQ ID NO: 665606 - DNA, 75 bp, synthetic construct
  source 1..75: mol_type = other DNA
atcagcaccgggtgggggaagggcgtttgtgacgttgccatgcccgatgcgcaagcttatcgggcctacaaaggc

SEQ ID NO: 665607 - DNA, 75 bp, synthetic construct
  source 1..75: mol_type = other DNA
aatcaactggcaggtagtttacgggcagtgttgtcacaaaagctggaagtggataaacaggaaggacgcgtggcg

SEQ ID NO: 665608 - DNA, 75 bp, synthetic construct
  source 1..75: mol_type = other DNA
cactgtatgacgttcgcatcgggattgcgggccgcattgcgggaagatcctgatgtgattttgctcggagagctg

SEQ ID NO: 665609 - DNA, 75 bp, synthetic construct
  source 1..75: mol_type = other DNA
aacgatatcgatctgcatgccaacgacatgaacttcgtggcaatcgccgaaaacggcaagctggtaggcttcaac

SEQ ID NO: 665610 - DNA, 75 bp, synthetic construct
  source 1..75: mol_type = other DNA
aaacgtgaagaggatgaactaaaagagcgtgaagaacgtgagcgaaaggatcgcgatcgtgaccgcaaagaagcg

SEQ ID NO: 665611 - DNA, 75 bp, synthetic construct
  source 1..75: mol_type = other DNA
ctacctgcttcgcgacccgaaagagttagccaaagcagcatctacattcaacaacatcccgctccttaacgaaca

SEQ ID NO: 665612 - DNA, 75 bp, synthetic construct
  source 1..75: mol_type = other DNA
tgttaattgccgcgctgggcgggatcctgctggcgaatgccaaccatctggcgtctctgttcctcggtatcgaac

SEQ ID NO: 665613 - DNA, 75 bp, synthetic construct
  source 1..75: mol_type = other DNA
ctggtgtacgcgcagtctggcgacctgtcgttcgtcgcgctgggtaaaaacctcggtgatggtatgctcaacgag

SEQ ID NO: 665614 - DNA, 75 bp, synthetic construct
  source 1..75: mol_type = other DNA
atgacaataactccacaaaacctgatcgcactgctaccgttgctgatcgtcggcttgacggtggtggttgtgatg

SEQ ID NO: 665615 - DNA, 75 bp, synthetic construct
  source 1..75: mol_type = other DNA
tcaacactcaagaaggttcctttagtatcaatttatattccagcctataactgtgcagaccatattgtacgttgt

SEQ ID NO: 665616 - DNA, 75 bp, synthetic construct
  source 1..75: mol_type = other DNA
aaaaatcactaataaatgaaattcctgaaatcattactaataatcaggttgcaggcaaggttgagcaaaccaaat

SEQ ID NO: 665617 - DNA, 75 bp, synthetic construct
  source 1..75: mol_type = other DNA
tttgcgtccatgaccggtaccaaaacaacgtttgcgattacactggaatatgccgcttccatcatcgcactcgtg

SEQ ID NO: 665618 - DNA, 75 bp, synthetic construct
  source 1..75: mol_type = other DNA
ggctacgggttcttttgaggctcgcggtaaaaaactcggcatcattggttacggccatattggtacgcaactggg

SEQ ID NO: 665619 - DNA, 75 bp, synthetic construct
  source 1..75: mol_type = other DNA
gtaataaatgaatctctgaaacgtcaaggaatacggctgtatgcttttcaacctgccaatgatgatgattcaagt

SEQ ID NO: 665620 - DNA, 75 bp, synthetic construct
  source 1..75: mol_type = other DNA
actggaaaatcaatcacaattcagttaatacaagaaaaagttccatattattataggaaactagataaaatagat

SEQ ID NO: 665621 - DNA, 75 bp, synthetic construct
  source 1..75: mol_type = other DNA
tctctgcactgttggtactggtgctgggtgtatggccgcaaccgctgattagcattgtgcggttagcaatgccgc

SEQ ID NO: 665622 - DNA, 75 bp, synthetic construct
  source 1..75: mol_type = other DNA
gtcgtgcgatgctggcggaaatgggcctggtgggtaaagcgccgggtcgctacaacctgcatcttggcggcaacc

SEQ ID NO: 665623 - DNA, 75 bp, synthetic construct
  source 1..75: mol_type = other DNA
gagcgggttaatgaatgccgtcacgccgcagcgtgaaaactcaatggcctgcgtctcgttcccaacgtgtccgct

SEQ ID NO: 665624 - DNA, 75 bp, synthetic construct
  source 1..75: mol_type = other DNA
gaccgtaaaaacgccaaaaccaaatacacgctggagcgcgtgggggtcgagacgtttaaagcagaagtggaacgt

SEQ ID NO: 665625 - DNA, 75 bp, synthetic construct
  source 1..75: mol_type = other DNA
agcaggatgaccgcgacatccgcgccgaacgtgctgaacagaagctggagccgcgccacgcgatgctgttgcgct

SEQ ID NO: 665626 - DNA, 75 bp, synthetic construct
  source 1..75: mol_type = other DNA
aagatttaaacgacggtctgaccggcggctttaagggcgacaacttcctgctgatccgcttccacggcatgtatc

SEQ ID NO: 665627 - DNA, 75 bp, synthetic construct
  source 1..75: mol_type = other DNA
gcaccggaagaaatcaggctaaagtcgaaagctgtttacctcgaggccgaagatatcttcatgaacgggaaaatt

SEQ ID NO: 665628 - DNA, 75 bp, synthetic construct
  source 1..75: mol_type = other DNA
gattccgccattacggcaataaaagccgccatgaccgggcatctgatgctgaccaccatccatgcgaacgacccg

SEQ ID NO: 665629 - DNA, 75 bp, synthetic construct
  source 1..75: mol_type = other DNA
accgcattctgcaacgtcctgaaggtatcatcactctgtcaggcccaacgggatcagggaaatcaacaaccctga

SEQ ID NO: 665630 - DNA, 75 bp, synthetic construct
  source 1..75: mol_type = other DNA
tgctggtggcgctgattgcgctgcaaaccggcgagatgtcgatggaagcggtaggggtttacctggccggttatc

SEQ ID NO: 665631 - DNA, 75 bp, synthetic construct
  source 1..75: mol_type = other DNA
tccgcccgtatgagttcaccggacgcggcgatcgtattggctgggttaagggcattgatgataactggcacctga

SEQ ID NO: 665632 - DNA, 75 bp, synthetic construct
  source 1..75: mol_type = other DNA
agcaggatgaccgcgacatccgcgccgaacgtgctgaacagaagctggagccgcgtcatgcgatgctgttgcgct

SEQ ID NO: 665633 - DNA, 75 bp, synthetic construct
  source 1..75: mol_type = other DNA
aagatttaaacgacggtctgaccggcggctttaagggcgacaacttcctgctgatccgtttccacggtatgtatc

SEQ ID NO: 665634 - DNA, 75 bp, synthetic construct
  source 1..75: mol_type = other DNA
ttacggaaacggtggaagagcattttggtaaaactggcggcgtggttatcacgttcctgtacttcttcgcgattt

SEQ ID NO: 665635 - DNA, 75 bp, synthetic construct
  source 1..75: mol_type = other DNA
agataaaaaagcgatcgccgcactggattgcaacgatcgcctagttagcccggcaggtctggctcctgaatggga

SEQ ID NO: 665636 - DNA, 75 bp, synthetic construct
  source 1..75: mol_type = other DNA
atggctatccctgcatttggtttaggtactttccgtctgaaagacgacgttgttatttcatctgtgaaaacggcg

SEQ ID NO: 665637 - DNA, 75 bp, synthetic construct
  source 1..75: mol_type = other DNA
aaagcgatcgccgcactggattgcaacgaccgcctggttagcccggaaggtgagactgtaattaaaattgtgtaa

SEQ ID NO: 665638 - DNA, 75 bp, synthetic construct
  source 1..75: mol_type = other DNA
atccgcaatccgcagccatcgacctgcgttgcgtaaatatggttgccgatctgtggcatgcgcctgcgccgaaaa

SEQ ID NO: 665639 - DNA, 75 bp, synthetic construct
  source 1..75: mol_type = other DNA
gccttcactctcggcggtgaagccaccgacatcgtggtgatgcgcattatgtgtcgtcgcggattcgaaatggac

SEQ ID NO: 665640 - DNA, 75 bp, synthetic construct
  source 1..75: mol_type = other DNA
agaagcgctgccgcaggaactggtgttcaacgttgactacctgggtggtcaaattggtactttagccatcaactt

SEQ ID NO: 665641 - DNA, 75 bp, synthetic construct
  source 1..75: mol_type = other DNA
ttcgtcgccccggatatcgtctgggacttccgcctgccgcgtgtgaaatcgatcagtgcttcaggccataaattc

SEQ ID NO: 665642 - DNA, 75 bp, synthetic construct
  source 1..75: mol_type = other DNA
actggggccgtatgagttcatctgtaccggtcgcccggacgaaggcatcccggcggtttgcttcaaactgaaaga

SEQ ID NO: 665643 - DNA, 75 bp, synthetic construct
  source 1..75: mol_type = other DNA
tcggcgtgacctacaccggtaactatgagttcccacaaccgctgcacgatgcgctggataaattccaggccgaac

SEQ ID NO: 665644 - DNA, 75 bp, synthetic construct
  source 1..75: mol_type = other DNA
aacatcgctactaaccagattgaactctctccttatctgcaaaaccgtaaagtggttgcctgggctaaacagcac

SEQ ID NO: 665645 - DNA, 75 bp, synthetic construct
  source 1..75: mol_type = other DNA
ccggatatcgtctgggacttccgcctgccgcgtgtgaaatcgatcagtgcttcaggccataaattcggtctggct

SEQ ID NO: 665646 - DNA, 75 bp, synthetic construct
  source 1..75: mol_type = other DNA
tgacgaaaacaccatcggcgtggtgccgactttcggcgtgacctacactggtaactatgagttcccacaaccgct

SEQ ID NO: 665647 - DNA, 75 bp, synthetic construct
  source 1..75: mol_type = other DNA
tcgccaaactggggccgtatgagttcatctgtaccggtcgcccggacgaaggcatcccggcggtttgcttcaaac

SEQ ID NO: 665648 - DNA, 75 bp, synthetic construct
  source 1..75: mol_type = other DNA
cccgatcttcgtctccgccgcccaaaaagacgcattccgcctcaaagaacctggtgatgcaaaatcgttgccaca

SEQ ID NO: 665649 - DNA, 75 bp, synthetic construct
  source 1..75: mol_type = other DNA
gaacgggcgacagtatgtattaagcgcggtaaagaccatgcttgaaagcaaggaaactcaggaaggtttacgcct

SEQ ID NO: 665650 - DNA, 75 bp, synthetic construct
  source 1..75: mol_type = other DNA
caattattgcgacatatccaggaaaagaaatttcttttctgggaagtaaatctttaagctactttatgaatcata

SEQ ID NO: 665651 - DNA, 75 bp, synthetic construct
  source 1..75: mol_type = other DNA
tcaagttgatctgagcaatatcgcgctgaccgggcatgatggcattctggttacgctgtggctggggatttccat

SEQ ID NO: 665652 - DNA, 75 bp, synthetic construct
  source 1..75: mol_type = other DNA
acgttcctgtatttcttcgcgatttgcccactgttgtggatttatggcgttaccattaccaacacctttatgacc

SEQ ID NO: 665653 - DNA, 75 bp, synthetic construct
  source 1..75: mol_type = other DNA
atgagtacttcagatagcattgtatccagccagacaaaacaatcgtcctggcgtaaatcagataccacatggacg

SEQ ID NO: 665654 - DNA, 75 bp, synthetic construct
  source 1..75: mol_type = other DNA
agtgatgaactcatgccaatcgacggagaagacttctctcacgaagatgagcaacagaaggagctggcaaatggc

SEQ ID NO: 665655 - DNA, 75 bp, synthetic construct
  source 1..75: mol_type = other DNA
caatgcaagacgaactggataacctcccgatcttcgtctccgccgcccaaaaagacgcattccgcctcaaagggg

SEQ ID NO: 665656 - DNA, 75 bp, synthetic construct
  source 1..75: mol_type = other DNA
cagtattattggtaatgtttattggttttgtaatttatcgcgaactgaaaatcagccatgtatttacagcactct

SEQ ID NO: 665657 - DNA, 75 bp, synthetic construct
  source 1..75: mol_type = other DNA
ttcaggggcgcgcgaaacgctttgccaaaattgcaggcgaaatggtgtcgctggaaatggtggaacaactggcca

SEQ ID NO: 665658 - DNA, 75 bp, synthetic construct
  source 1..75: mol_type = other DNA
gatgtcaattttacccctgatacctatcgcaaattacttatcaaaacgctgtttgttggtcgcatcctcgaaaaa

SEQ ID NO: 665659 - DNA, 75 bp, synthetic construct
  source 1..75: mol_type = other DNA
cttctaccatagcggcgattttgctcggttccgtagccggtggtgtgctggctgactggcatgtcctcgtcgccc

SEQ ID NO: 665660 - DNA, 75 bp, synthetic construct
  source 1..75: mol_type = other DNA
aatttcccggacggacgccagaacgttagggatcaccgccccgctacgcatgtcaggcgatctcagcggcactcc

SEQ ID NO: 665661 - DNA, 75 bp, synthetic construct
  source 1..75: mol_type = other DNA
cgcattacagaggagagccgaactaagctcgcggataaagttgatgccatccaaaatatttgatgtcgtcaaatt

SEQ ID NO: 665662 - DNA, 75 bp, synthetic construct
  source 1..75: mol_type = other DNA
tcgtagtgtcggctggcttgaagaagacatagagggatggatttctagtcgtaagtctatcaacgatggaaagct

SEQ ID NO: 665663 - DNA, 75 bp, synthetic construct
  source 1..75: mol_type = other DNA
ctgaccatttcccttgttgttaccgcagcaacctttacccgtgggctttccgcgctgaccggtttacccgataac

SEQ ID NO: 665664 - DNA, 75 bp, synthetic construct
  source 1..75: mol_type = other DNA
aaatgcatattgatactgatgaagcgaatgctgccggtattgatggaggccaggcagtggcaagacttctcctga

SEQ ID NO: 665665 - DNA, 75 bp, synthetic construct
  source 1..75: mol_type = other DNA
gacgatttgataaatcctttcttcgctgaatttactatgggtcttgagatgacgctggcggagcacggttttatc

SEQ ID NO: 665666 - DNA, 75 bp, synthetic construct
  source 1..75: mol_type = other DNA
tatgccgtgaatgtggttacttgtttccagtgatatctgaacagtcgcttaatatttatcgtaatattgtgaatc

SEQ ID NO: 665667 - DNA, 75 bp, synthetic construct
  source 1..75: mol_type = other DNA
ttatttaggggcgtttccacgacatattccggcacagaatgcggttctggacgtcacctttgaattccctcgcgg

SEQ ID NO: 665668 - DNA, 75 bp, synthetic construct
  source 1..75: mol_type = other DNA
tgatgaagcgattaactatattcgcgtcaagcgctcgcagattgtgctgacagacgaacacaaagcgatgctgag

SEQ ID NO: 665669 - DNA, 75 bp, synthetic construct
  source 1..75: mol_type = other DNA
ctcatccctttctatcctcattaaaccgaatgtcgcctgccaatgttgtctccacattagatattttcaagcatc

SEQ ID NO: 665670 - DNA, 75 bp, synthetic construct
  source 1..75: mol_type = other DNA
gccggtgccatatttcctttgtgaaagaacgcggcgagaaaacgactcattatgatacgccgccgcggttatttt

SEQ ID NO: 665671 - DNA, 75 bp, synthetic construct
  source 1..75: mol_type = other DNA
catcatgtccagcgcaaagagttacttactatgcggcgggataccttgtttgatattgattacggcccggcagtt

SEQ ID NO: 665672 - DNA, 75 bp, synthetic construct
  source 1..75: mol_type = other DNA
tcaataaggtgaaccttggcgtttctagtgtccgtgacgatgatatggggcgcgcatacgagtatctgatcaaac

SEQ ID NO: 665673 - DNA, 75 bp, synthetic construct
  source 1..75: mol_type = other DNA
tcgacaacgtccttctgacgccacatattggcggttcgactcaggaagcgcaggagaatatcggcctggaagttg

SEQ ID NO: 665674 - DNA, 75 bp, synthetic construct
  source 1..75: mol_type = other DNA
cattctcgcggagtcgctggggatgtatgtttacttctatgatattgaaaacaaactgccactgggcaacgcgac

SEQ ID NO: 665675 - DNA, 75 bp, synthetic construct
  source 1..75: mol_type = other DNA
ctggtcgctattggctgtttctgtatcggaacaaaccaggttgatctggatgcggcggcaaagcgcgggatcccg

SEQ ID NO: 665676 - DNA, 75 bp, synthetic construct
  source 1..75: mol_type = other DNA
ggagtgccggaagccaacgccaaagcgcaccgtggcgtgtggaacaaactggcggcggggtcttttgaagcgcgc

SEQ ID NO: 665677 - DNA, 75 bp, synthetic construct
  source 1..75: mol_type = other DNA
caaaaacatgatgggagcgaaagagatctcgctgatgaagcccggctcgctactgattaacgcctctcgtggcac

SEQ ID NO: 665678 - DNA, 75 bp, synthetic construct
  source 1..75: mol_type = other DNA
caggagaatatcggcctggaagttgcaggaaaattgatcaagtactctgacaatggctccacgctttctgcggtg

SEQ ID NO: 665679 - DNA, 75 bp, synthetic construct
  source 1..75: mol_type = other DNA
caaacagatatatgtttacgagacctggttatctctaattaaatgtcctgatgaattgaaactcctagcgaagcg

SEQ ID NO: 665680 - DNA, 75 bp, synthetic construct
  source 1..75: mol_type = other DNA
ccagatgcaaaagaaatcgaaggcgttgcacgctgggttcctctgaaggagattgaagaaaatgacttcaatcta

SEQ ID NO: 665681 - DNA, 75 bp, synthetic construct
  source 1..75: mol_type = other DNA
agccggtgagttctataccccacgaactatcgttcgcttgatggttaacattcttgatccaaaagccggtgagag

SEQ ID NO: 665682 - DNA, 75 bp, synthetic construct
  source 1..75: mol_type = other DNA
ccatgtggaattccattacggtaaaatgatgctggaaaatccttcaccagagctgctcacggtgttgatccgtga

SEQ ID NO: 665683 - DNA, 75 bp, synthetic construct
  source 1..75: mol_type = other DNA
atgaatatcgaagaatttgtgagtgaagataaccatatgtgcaatttaggcgatgatcttttttacaagatcttc

SEQ ID NO: 665684 - DNA, 75 bp, synthetic construct
  source 1..75: mol_type = other DNA
cggagatcggttttacaagatctttgaccaagaagtgatttatgacttacccaataacgagtttaataaagaaat

SEQ ID NO: 665685 - DNA, 75 bp, synthetic construct
  source 1..75: mol_type = other DNA
gtggtgaatgccacgctggcggtggtacaggaaaatagcgcccttgccagcgcagcaacgggagaattggtagcc

SEQ ID NO: 665686 - DNA, 75 bp, synthetic construct
  source 1..75: mol_type = other DNA
aaccacggtagtgatcccgccgcagaacgatattgatctgcatgccaacgacatgaacttcgtggcgatcgccga

SEQ ID NO: 665687 - DNA, 75 bp, synthetic construct
  source 1..75: mol_type = other DNA
gtattggctgggttaagggcattgatgataactggcacctgacgctgtttatcgaaaatggtcgcatccttgatt

SEQ ID NO: 665688 - DNA, 75 bp, synthetic construct
  source 1..75: mol_type = other DNA
gccatcaaagacagaatagatactagcgctcctgttatcggggaaatctatactcatctgatggctatattctct

SEQ ID NO: 665689 - DNA, 75 bp, synthetic construct
  source 1..75: mol_type = other DNA
ctttatattaggcggttgtctgatggctaatttacagcatattcatcaaggccggtgccatatttcctttgtgaa

SEQ ID NO: 665690 - DNA, 75 bp, synthetic construct
  source 1..75: mol_type = other DNA
gctgcaaaacactgggttgtaaaaatctgggggtgctgaatagcgtggattatgttgcgcaggggaaaaatattt

SEQ ID NO: 665691 - DNA, 75 bp, synthetic construct
  source 1..75: mol_type = other DNA
tcgaacacggcaacaagaaaacctacgcccgcacggcgagtgagtttggctatctgccgctggagcatacgctgg

SEQ ID NO: 665692 - DNA, 75 bp, synthetic construct
  source 1..75: mol_type = other DNA
tccgcgaccacgattccgctattacggcgataaaagccgccatgaccgggcatctgatgctgaccaccatccatg

SEQ ID NO: 665693 - DNA, 75 bp, synthetic construct
  source 1..75: mol_type = other DNA
tgtggaagcccgggttcacggcgaactggaagtgctcgatatcctccggaaagaagaaggcctcgaattactggg

SEQ ID NO: 665694 - DNA, 75 bp, synthetic construct
  source 1..75: mol_type = other DNA
ggcctgtttggcgcacgctactcccactacccctgcgtgggaggcctctatgctgttctccgtctgatcaaggat

SEQ ID NO: 665695 - DNA, 75 bp, synthetic construct
  source 1..75: mol_type = other DNA
tatagccatcaaagacagaatagatactagcgctcctgttatcggggaaatctatactcatctgatggctatatt

SEQ ID NO: 665696 - DNA, 75 bp, synthetic construct
  source 1..75: mol_type = other DNA
ttcgcccgtatgagtttaccggacgcggcgatcgtattggctgggttaagggcattgatgataactggcacctga

SEQ ID NO: 665697 - DNA, 75 bp, synthetic construct
  source 1..75: mol_type = other DNA
actacccctgtgtgggcggtctctatgccgtgctccggctgatcaaggatgacagccagcaaatcccgaccttca

SEQ ID NO: 665698 - DNA, 75 bp, synthetic construct
  source 1..75: mol_type = other DNA
ttagaatataaaggttcctttggctcaataaatgcaggttatgctgactggaatagtggcttcgttaacactcac

SEQ ID NO: 665699 - DNA, 75 bp, synthetic construct
  source 1..75: mol_type = other DNA
gccgtgatacggaaaatgcgcattcagtgctgaataaaatctttgataaagagaaagagcagaaccaggtaaaag

SEQ ID NO: 665700 - DNA, 75 bp, synthetic construct
  source 1..75: mol_type = other DNA
aatgaaataaaaaaacagatcccggatgaagaaaccgatgtcaaactgaaacgcactattgctcatggtatagcg

SEQ ID NO: 665701 - DNA, 75 bp, synthetic construct
  source 1..75: mol_type = other DNA
taccgcccgccgtttactggctgacattgccctgccgcatcgggatgtggctgtctatgcgttggttttgtcgtc

SEQ ID NO: 665702 - DNA, 75 bp, synthetic construct
  source 1..75: mol_type = other DNA
aagagggggagctccgacaggccgtggcgatgctggaaacattacgcgaagagcaaggcagcgttctggtccatt

SEQ ID NO: 665703 - DNA, 75 bp, synthetic construct
  source 1..75: mol_type = other DNA
tggcaggcgcaaatggccgcgcgcgtgtggcgcgacgacgggggttccgcgtctggagagtgggtgcatgagtga

SEQ ID NO: 665704 - DNA, 75 bp, synthetic construct
  source 1..75: mol_type = other DNA
tatccgggatggagttgggcctacaggtggtggggttatccggggtcgtctgggtagtgacgggcactctgaacc

SEQ ID NO: 665705 - DNA, 75 bp, synthetic construct
  source 1..75: mol_type = other DNA
aggagctgatcaaaaactgcaaagagtttggcgtcgagctgtatgacctgaatcacccgtatcaggggatcgtcc

SEQ ID NO: 665706 - DNA, 75 bp, synthetic construct
  source 1..75: mol_type = other DNA
caaaatctttattgaagccggttttgaatggcgcttgcctggctgctcaatgtgtctggcgatgaacaacgatcg

SEQ ID NO: 665707 - DNA, 75 bp, synthetic construct
  source 1..75: mol_type = other DNA
gtttatcggttcctgcaccaactcacgtattgaagatttacgcgcggcggcggaaatcgccaaagggcggaaagt

SEQ ID NO: 665708 - DNA, 75 bp, synthetic construct
  source 1..75: mol_type = other DNA
atttggcgtcgagctgtatgacctgaatcacccgtatcaagggatcgtccacgtgatgggaccagaacagggcgt

SEQ ID NO: 665709 - DNA, 75 bp, synthetic construct
  source 1..75: mol_type = other DNA
atttggcgtcgaactgtatgacctgaatcacccctatcaagggatcgtccacgtaatggggccggaacagggcgt

SEQ ID NO: 665710 - DNA, 75 bp, synthetic construct
  source 1..75: mol_type = other DNA
caaaatttttatcgaagctggttttgaatggcgcttgccaggttgttcaatgtgcctggcgatgaacaacgaccg

SEQ ID NO: 665711 - DNA, 75 bp, synthetic construct
  source 1..75: mol_type = other DNA
ccaaagtacaaaacgcctcttatcaggtcgccacttacctggcggatgaaatcgctaaactgggaccgtatgagt

SEQ ID NO: 665712 - DNA, 75 bp, synthetic construct
  source 1..75: mol_type = other DNA
tgagtttatgaacgtcaaggcggcctcccgcgatgatgtgctggctgctcaccgcgtaccaccacaactgatggg

SEQ ID NO: 665713 - DNA, 75 bp, synthetic construct
  source 1..75: mol_type = other DNA
gggatgccggagtatatcggtgggctgctgtcggtgagcctgtcgaactcggcggacacgttccgcaagctctac

SEQ ID NO: 665714 - DNA, 75 bp, synthetic construct
  source 1..75: mol_type = other DNA
acatctcaggcgaatgcggaaagtgtcgaggccattaaaaaaacgcttacggattcccgtggtcgcggggcgttt

SEQ ID NO: 665715 - DNA, 75 bp, synthetic construct
  source 1..75: mol_type = other DNA
cccggaagatcgcgaacagattttccgtccgttctatcggaccgatgaagcgcgcgatcgtgaatctggcggtac

SEQ ID NO: 665716 - DNA, 75 bp, synthetic construct
  source 1..75: mol_type = other DNA
gctttctgatatctctcacgagctgcgcaccccgctgacgcgtctgcaactgggtacggcgttactgcgccgtcg

SEQ ID NO: 665717 - DNA, 75 bp, synthetic construct
  source 1..75: mol_type = other DNA
accgccatccagcagcaccgtggttgggtgaaagctgaagacagtccgctgggcggtttacggctggtaatttgg

SEQ ID NO: 665718 - DNA, 75 bp, synthetic construct
  source 1..75: mol_type = other DNA
acaggttgatcgcgaaagtatgcaggctctcgaaagagcgttgcagggcgcaagaggcggtggggcattcaagaa

SEQ ID NO: 665719 - DNA, 75 bp, synthetic construct
  source 1..75: mol_type = other DNA
ccgctttttacaatattcagtcaggaaatttccgcccgtgatttgattctgcttctgggtggcttgttccttatc

SEQ ID NO: 665720 - DNA, 75 bp, synthetic construct
  source 1..75: mol_type = other DNA
gctgacgctgctggagattgttcttgggatcgacaatattattttcctttctctggtggtggcaaagcttcccac

SEQ ID NO: 665721 - DNA, 75 bp, synthetic construct
  source 1..75: mol_type = other DNA
tgaatcatggtggtatgtgcaggatggcaaggatgcgtttcagtttcgccctggcaaagtgtgccacctgatgaa

SEQ ID NO: 665722 - DNA, 75 bp, synthetic construct
  source 1..75: mol_type = other DNA
gcaacaactttaaaaatctgtttctctatgccccgcaggggaaagccgacggcattaaaattatcccgctcagtg

SEQ ID NO: 665723 - DNA, 75 bp, synthetic construct
  source 1..75: mol_type = other DNA
tcatcatgtacatgaccgacgccgcgcagaaccaggaagacgtgcacaacctccgcaacgcgataaaaagcgcca

SEQ ID NO: 665724 - DNA, 75 bp, synthetic construct
  source 1..75: mol_type = other DNA
tacgacaatggatcccacgccgggtgcatcatctacatcggtgcagcgcaggtaaaccgcgaaagcatggactcc

SEQ ID NO: 665725 - DNA, 75 bp, synthetic construct
  source 1..75: mol_type = other DNA
tattaatagactttacttcagacatgatattgcaaaaagatattattatcagttaggccgcatggatcgctcaga

SEQ ID NO: 665726 - DNA, 75 bp, synthetic construct
  source 1..75: mol_type = other DNA
ggtctacaaaggccccggcgataatttcttcgggacgctcagcgcttcacgtcccgagatttaccccatctactg

SEQ ID NO: 665727 - DNA, 75 bp, synthetic construct
  source 1..75: mol_type = other DNA
caattatgctgacccacttttcccgtgtagaagcatatcgaaatgggcaattactgggagtttggtatttagatg

SEQ ID NO: 665728 - DNA, 75 bp, synthetic construct
  source 1..75: mol_type = other DNA
accttttctgtttctgttgtgttttttgtaggggcaattgtgggatggattttggtgtctgaaatatattacagc

SEQ ID NO: 665729 - DNA, 75 bp, synthetic construct
  source 1..75: mol_type = other DNA
ttaatgctggtattcgtttacctgtaacaaaaaatatctctagtcagcaaggtatatctgttattgataacaagg

SEQ ID NO: 665730 - DNA, 75 bp, synthetic construct
  source 1..75: mol_type = other DNA
aataccttttaataaaggtcagtcatcagttggtgatatgcagcaggatatattcattcagacaggtaccattgt

SEQ ID NO: 665731 - DNA, 75 bp, synthetic construct
  source 1..75: mol_type = other DNA
ttctcggcgctggcgctggactggtttgtgttcggtaacgcattccttgagcttcgaagcaatatgctcggcgaa

SEQ ID NO: 665732 - DNA, 75 bp, synthetic construct
  source 1..75: mol_type = other DNA
atcaaggttcaactcggtatcaccctcagaggtaacgaactgctatggctcacagtccatctggtgaggataact

SEQ ID NO: 665733 - DNA, 75 bp, synthetic construct
  source 1..75: mol_type = other DNA
gatttatgaaaagtcaaattacaacccaaatgcttcaatagatatctcattcgagaactatagagcaaggattaa

SEQ ID NO: 665734 - DNA, 75 bp, synthetic construct
  source 1..75: mol_type = other DNA
cattgttttcgtcggagatgttatatgtgatgttaatagcacaagttccttaccagatgaatttgtaaagaaccc

SEQ ID NO: 665735 - DNA, 75 bp, synthetic construct
  source 1..75: mol_type = other DNA
agacatgatttagataagagatattattatcaatttggacgaatggatcgtacagatttgtcacaaagtattagc

SEQ ID NO: 665736 - DNA, 75 bp, synthetic construct
  source 1..75: mol_type = other DNA
tacccgactctttccgtgatttatggggagaacaagatgaattttatgaagtaaaactatatgggcaaactctag

SEQ ID NO: 665737 - DNA, 75 bp, synthetic construct
  source 1..75: mol_type = other DNA
ggcgggttgcttcatcccacacccgctactgtctcgccagacgttctccgccctggcgcttgactggtttgtgtt

SEQ ID NO: 665738 - DNA, 75 bp, synthetic construct
  source 1..75: mol_type = other DNA
tagcagtttcattcaaaggaaagtatctaaaagatctattcttacgacatacaacagctattaaatcacagcaag

SEQ ID NO: 665739 - DNA, 75 bp, synthetic construct
  source 1..75: mol_type = other DNA
agccagaatgtatctaaaagctgcaggcgcaaatgtaataaatatatcgtggttaaaaaccatcaatcgtgacgt

SEQ ID NO: 665740 - DNA, 75 bp, synthetic construct
  source 1..75: mol_type = other DNA
tcggcggcgtggatgtagtttttgaaccaaatgaggtcgcctacaattcatatattaatgaaatggcgatggata

SEQ ID NO: 665741 - DNA, 75 bp, synthetic construct
  source 1..75: mol_type = other DNA
tccgtaaatacctgcgccctcttctcggtgccaaaaagctggcaggtatgacggaggcagatattctgagctatc

SEQ ID NO: 665742 - DNA, 75 bp, synthetic construct
  source 1..75: mol_type = other DNA
gtgaaattgcgtctgaaattatcaccggcctgaaagagagcgctaaaaagcacggtaaagattaccgtaagatta

SEQ ID NO: 665743 - DNA, 75 bp, synthetic construct
  source 1..75: mol_type = other DNA
aggctactcagccattaactaaatccgtgattgcggaaagctgtgcccgtgcattgcatgagggccggacagtcg

SEQ ID NO: 665744 - DNA, 75 bp, synthetic construct
  source 1..75: mol_type = other DNA
cctgacgatattgaattaggttgtggcgcatcgcttgctcgtcttgcgcagaaaggattttatatcaccgccgtt

SEQ ID NO: 665745 - DNA, 75 bp, synthetic construct
  source 1..75: mol_type = other DNA
catttatgccacaggtttttgaatccgtggaagaagaatatttcaccattaaactggctgcattaaaacagcata

SEQ ID NO: 665746 - DNA, 75 bp, synthetic construct
  source 1..75: mol_type = other DNA
gagaagtggttttacactgctggatacctcggtcgatgcctaccgacaacagcaactgcggcgggaaaactcccg

SEQ ID NO: 665747 - DNA, 75 bp, synthetic construct
  source 1..75: mol_type = other DNA
aagttgccccggcacataactatctgacgcgaattgtggcaacggaaagtaaagaagcactggcagaagtattaa

SEQ ID NO: 665748 - DNA, 75 bp, synthetic construct
  source 1..75: mol_type = other DNA
cgacagcgtggtctgtcacatcaacggttaccagggcattcaggcggcgctggagaaaaaactgaacatcaaacc

SEQ ID NO: 665749 - DNA, 75 bp, synthetic construct
  source 1..75: mol_type = other DNA
catgatgatcgatgaggacactcatgcgcatctgaccccagaagcgattcctgaactgctggagcggtataaatg

SEQ ID NO: 665750 - DNA, 75 bp, synthetic construct
  source 1..75: mol_type = other DNA
acggaggcagatattctgagctatctgcataatctcgatctcaagccagccacccgcaatcgccatctggcgctc

SEQ ID NO: 665751 - DNA, 75 bp, synthetic construct
  source 1..75: mol_type = other DNA
taatctccctcaggggaaaaaataccgcgcaaatattctggagtacgcgcgggagcgggagcgatggcatccgac

SEQ ID NO: 665752 - DNA, 75 bp, synthetic construct
  source 1..75: mol_type = other DNA
gagcaaaggagatttatgaagagttgataattgccgtgccgagcagggaaaatgaattcagaaaactttctctcg

SEQ ID NO: 665753 - DNA, 75 bp, synthetic construct
  source 1..75: mol_type = other DNA
tgaggcacccaaaaaaagcccctgtcaatttatttcaagtgctaccagtcatgaacatagcaatgtaaacattca

SEQ ID NO: 665754 - DNA, 75 bp, synthetic construct
  source 1..75: mol_type = other DNA
ggccacagccacgatgtgactggtgttcaaagcggcggcagcacgatcacgtcgaagcaaccaaatccgggttaa

SEQ ID NO: 665755 - DNA, 75 bp, synthetic construct
  source 1..75: mol_type = other DNA
atgagtaaacgcaaaaaatacaccggaaagcgggggcaggattcgctacacgatgcactgaaatcaacgcctgca

SEQ ID NO: 665756 - DNA, 75 bp, synthetic construct
  source 1..75: mol_type = other DNA
gacggtacggagttcagtttccggaaaggggctgtgtgccacgtgcttaatcctgatattaatcaggagatctac

SEQ ID NO: 665757 - DNA, 75 bp, synthetic construct
  source 1..75: mol_type = other DNA
acgattagagagtattttgattgctgtggctttttgttgtgggagtgttgaatggattatttatcagaagtgtta

SEQ ID NO: 665758 - DNA, 75 bp, synthetic construct
  source 1..75: mol_type = other DNA
tgtgattgctcgctggaacggcaatgcaccacgtcggtttggagaaacggctatcaggggctggaagaaggagaa

SEQ ID NO: 665759 - DNA, 75 bp, synthetic construct
  source 1..75: mol_type = other DNA
gtctagatagtagccttgatcacccaagagcgacatcgagctggctgttaaagcaaactcctaacggaacctctc

SEQ ID NO: 665760 - DNA, 75 bp, synthetic construct
  source 1..75: mol_type = other DNA
tataaccaaattcaatccctggttagaaaaggattattaaacaaagtaagaaaaacaggcgtgtatcaatattta

SEQ ID NO: 665761 - DNA, 75 bp, synthetic construct
  source 1..75: mol_type = other DNA
aatgaattcaggaagctttctcttgaacaagagaaaaaacacatcaagataaatgaaaaaataaatacattaatt

SEQ ID NO: 665762 - DNA, 75 bp, synthetic construct
  source 1..75: mol_type = other DNA
tactcagtcacatctgaattcaatgtcgtaaaggaaagcgtagagttaattgaggtacccaaaaaaaattcctgt

SEQ ID NO: 665763 - DNA, 75 bp, synthetic construct
  source 1..75: mol_type = other DNA
aacattgcgcgattcgcattaacccgaatcgcagcggtgaagagacggtgctgaggattttacgtgagagtattc

SEQ ID NO: 665764 - DNA, 75 bp, synthetic construct
  source 1..75: mol_type = other DNA
attacccagcgtgtggaacaggtgctggctgatgcatttcacgcacaggccgcggcgctggtacagggcgcgggt

SEQ ID NO: 665765 - DNA, 75 bp, synthetic construct
  source 1..75: mol_type = other DNA
gatagagatacagataaagaagatcaaaacactatggtccctggcgtaaaaaacgccacgaaccatgtaggggat

SEQ ID NO: 665766 - DNA, 75 bp, synthetic construct
  source 1..75: mol_type = other DNA
tacttaacggcggcgcggtgccggaagttaaaagtgccgtcattgccaatgcgcagtcgaaggtgttgattgtgg

SEQ ID NO: 665767 - DNA, 75 bp, synthetic construct
  source 1..75: mol_type = other DNA
aatgcggggcgaatgtctcgacattttcctgcttcaagctatttgggccagagggtgttggcgcggtggtaggcg

SEQ ID NO: 665768 - DNA, 75 bp, synthetic construct
  source 1..75: mol_type = other DNA
aaccagatgcagcactggtgcaacatacacgccagcagccgcaggatcgctacattctggcagatgtgctggcaa

SEQ ID NO: 665769 - DNA, 75 bp, synthetic construct
  source 1..75: mol_type = other DNA
ccaactccattaacagtctgggaatgctaacaccgcttcaatatttttgcgtttttaacgccaacaccggggaag

SEQ ID NO: 665770 - DNA, 75 bp, synthetic construct
  source 1..75: mol_type = other DNA
ctaaggcaattaatagcctggggatgctaacaccacttcaatatttctgtatttttaacgccagcaccggggaag

SEQ ID NO: 665771 - DNA, 75 bp, synthetic construct
  source 1..75: mol_type = other DNA
cgatggcagcgggagccgtgcttagctgggccagttacagcatagttgctcacgtttcaataaaacggcagatca

SEQ ID NO: 665772 - DNA, 75 bp, synthetic construct
  source 1..75: mol_type = other DNA
ggcaatatttcgcaaaccgcaaaatctccggcagagcgcaagagggcgcagcgagagagggaaagaaagcgggaa

SEQ ID NO: 665773 - DNA, 75 bp, synthetic construct
  source 1..75: mol_type = other DNA
cgattacccttcgtgacgtcacgattattgatgacggcaaattgcgaaaagccattactgcggcatcgttgggta

SEQ ID NO: 665774 - DNA, 75 bp, synthetic construct
  source 1..75: mol_type = other DNA
aagagcaaccagttttcagcacctacctctggcacgacaagaacaaacaaaccattcaaatattcgggcaacaag

SEQ ID NO: 665775 - DNA, 75 bp, synthetic construct
  source 1..75: mol_type = other DNA
tttcgccaggcgaatccgcaactcgaacattgcgcgattcgcattaacccgaatcgcagcggtgaagagacggtg

SEQ ID NO: 665776 - DNA, 75 bp, synthetic construct
  source 1..75: mol_type = other DNA
caggcatgcgtgctggccgaaacccccggtatgaccgtggaaacggcccgccgtattctggccgcagcaccacag

SEQ ID NO: 665777 - DNA, 75 bp, synthetic construct
  source 1..75: mol_type = other DNA
attaatcaatgcgtcggatgccatcagtgtgatggccacggcgctgaacagtaatgtcagaggaggcactatgcc

SEQ ID NO: 665778 - DNA, 75 bp, synthetic construct
  source 1..75: mol_type = other DNA
gcggcgcgccggatgtttgccgaaaaagtggcgatgtataccggtctgtctgttgatgccgtcacgggaacagag

SEQ ID NO: 665779 - DNA, 75 bp, synthetic construct
  source 1..75: mol_type = other DNA
atggctaatgcctggctcagattatggcatgacatgccaaatgaccccaagtggcgaaccattgcccgggtgtca

SEQ ID NO: 665780 - DNA, 75 bp, synthetic construct
  source 1..75: mol_type = other DNA
gaagccgattccgccattcagcgggaagccgatcgggtagtcccggaaaacaccgggcagcctgtgggacgagtg

SEQ ID NO: 665781 - DNA, 75 bp, synthetic construct
  source 1..75: mol_type = other DNA
aggaagaaaaggaaacacattactcatagaatcccgaaaaattaattcagcgccggaatatacgaaggtggagtt

SEQ ID NO: 665782 - DNA, 75 bp, synthetic construct
  source 1..75: mol_type = other DNA
cagctgttgctgtatggtgagcggtgatgtgcagcaatgctataccgccaaagagcgccgtttgcagcaacatac

SEQ ID NO: 665783 - DNA, 75 bp, synthetic construct
  source 1..75: mol_type = other DNA
cgccgcgcaggagaaccagcgagtgatggggatcctgacatgccaggaagcgaaaggacgtgaacagcttgccac

SEQ ID NO: 665784 - DNA, 75 bp, synthetic construct
  source 1..75: mol_type = other DNA
gcgaccgggaaagcgggaacggaatttgttcagcgggcgacaacgttttttggacctgaccggaattttgaaaac

SEQ ID NO: 665785 - DNA, 75 bp, synthetic construct
  source 1..75: mol_type = other DNA
gcaggtaatggacaagaaagcgacgtttcgccatgtgtggcaggaaaatgaagcgcagtcggttttcggaactta

SEQ ID NO: 665786 - DNA, 75 bp, synthetic construct
  source 1..75: mol_type = other DNA
ttaatgagtcaaatgatgtcaatgggataacatttaaaaactggtttgcgaaagatgcctcaggagcagataatc

SEQ ID NO: 665787 - DNA, 75 bp, synthetic construct
  source 1..75: mol_type = other DNA
ttgtctggagattcagggggccagtctagagacaaaacactcagtggtaaaagttatattgactattatgaagag

SEQ ID NO: 665788 - DNA, 75 bp, synthetic construct
  source 1..75: mol_type = other DNA
ggaggcagtccggaaaatatgaatatattaccgagttattagtcaagggtgttgataaatggacggtgaaggggg

SEQ ID NO: 665789 - DNA, 75 bp, synthetic construct
  source 1..75: mol_type = other DNA
ggaattggcgttcatgcctggcagtatgcgcagtcgtgtatgttgattagcgtacagtgtgagaacgatcccggc

SEQ ID NO: 665790 - DNA, 75 bp, synthetic construct
  source 1..75: mol_type = other DNA
gctcgctgattgcattacatcgagataatgatcttcaggagctggaactgaagggcggtgaagtgattcgcgcga

SEQ ID NO: 665791 - DNA, 75 bp, synthetic construct
  source 1..75: mol_type = other DNA
taaggaggaaagatctgccgcttctttattgcagttgtccggtaatgccagtgatttttcatatggacggaactc

SEQ ID NO: 665792 - DNA, 75 bp, synthetic construct
  source 1..75: mol_type = other DNA
gcaatgcagatgcagataccggaactaaagctgcagcaggtgttgaattaacaacgaaagtactgggtaatgttg

SEQ ID NO: 665793 - DNA, 75 bp, synthetic construct
  source 1..75: mol_type = other DNA
gtcagggggataccgcctttccggaagcattaccggtgccaccggacgtgatgcagaccttcttcccgaatatcc

SEQ ID NO: 665794 - DNA, 75 bp, synthetic construct
  source 1..75: mol_type = other DNA
ggaaagatctgccgcttctttattgcagttgtccggtaatgccagtgatttttcatatggacggaactcaataac

SEQ ID NO: 665795 - DNA, 75 bp, synthetic construct
  source 1..75: mol_type = other DNA
gacccattaaaagggaatattgacctgtctgtaattaagtcatctactttgttaaagtttattacgccattattg

SEQ ID NO: 665796 - DNA, 75 bp, synthetic construct
  source 1..75: mol_type = other DNA
ggtacgcaccagaaaatcattgatatggccatgaatggcgttggcctcaacacgattttccgccatttaaaaaac

SEQ ID NO: 665797 - DNA, 75 bp, synthetic construct
  source 1..75: mol_type = other DNA
tggaaaacaccgtcctgcaacaggcgctgtggcaggcgctggaagcgcatccgaaagtgacgttgcgtgtaccga

SEQ ID NO: 665798 - DNA, 75 bp, synthetic construct
  source 1..75: mol_type = other DNA
agcaacctggccgacagagtgccgtggtgtcggttttaccgaagcgccgcgcggggcgttaggccactgggccgc

SEQ ID NO: 665799 - DNA, 75 bp, synthetic construct
  source 1..75: mol_type = other DNA
cacgcctggtatcgttatcccaacgatcaggtcgggcgtcatccgttcgatggcatcaccgacccgtggtacaac

SEQ ID NO: 665800 - DNA, 75 bp, synthetic construct
  source 1..75: mol_type = other DNA
tcctgcaagggcgcgacccgcgcgatgcgtgggcgttcgttgaacgtatctgcggcgtctgtactggcgtacacg

SEQ ID NO: 665801 - DNA, 75 bp, synthetic construct
  source 1..75: mol_type = other DNA
gtggcttctgtttccatcagatgtccttcctgctccgctactgaaggcgtagtgcgtaacggcaaaagcactgcc

SEQ ID NO: 665802 - DNA, 75 bp, synthetic construct
  source 1..75: mol_type = other DNA
gtggcttccatttccatcagctgtccttcctgttcagctactgaaggcgtggtgcgtaacggcaaaagcactgcc

SEQ ID NO: 665803 - DNA, 75 bp, synthetic construct
  source 1..75: mol_type = other DNA
gcgaccgttgagtcggtcgatcgcatgatgtcggcgctgaacctgccgctttccggtatccagtcaacgttaggc

SEQ ID NO: 665804 - DNA, 75 bp, synthetic construct
  source 1..75: mol_type = other DNA
actcgacgggctgtatgaatgtattctctgcgcatgttgttcaacctcttgtccgtctttctggtggaatcccga

SEQ ID NO: 665805 - DNA, 75 bp, synthetic construct
  source 1..75: mol_type = other DNA
catccatccgctggcggggcagggggtgaatcttggttatcgtgatgtcgatgccctgattgatgttctggtcaa

SEQ ID NO: 665806 - DNA, 75 bp, synthetic construct
  source 1..75: mol_type = other DNA
cgaccatctggtgcacttttatcagctcgccggaatggactggatcgacgtacttaacgcgctgcaagccgaccc

SEQ ID NO: 665807 - DNA, 75 bp, synthetic construct
  source 1..75: mol_type = other DNA
gagatatctctttatcaagttggctcaggatttaccaacggagtgttacaagagcattattgcgatggtattaag

SEQ ID NO: 665808 - DNA, 75 bp, synthetic construct
  source 1..75: mol_type = other DNA
tatctactccaaaagtattgaaatggatcggggaaataaaaacaacgtacgcgcaaaaaataacaactgatattg

SEQ ID NO: 665809 - DNA, 75 bp, synthetic construct
  source 1..75: mol_type = other DNA
tggtattgcttgttgcggattattagctaagagttttaatgttgaagaaagagatataattacagcatcatccca

SEQ ID NO: 665810 - DNA, 75 bp, synthetic construct
  source 1..75: mol_type = other DNA
tgaataacttcatgattgcttttgacccattagaaaatcaattaaccatacgggataacaataacgagactgaaa

SEQ ID NO: 665811 - DNA, 75 bp, synthetic construct
  source 1..75: mol_type = other DNA
aaagataaagataaagatataagtcatcactgcaatgttaaaaccgagcaactgcagcagtttattaaaataatg

SEQ ID NO: 665812 - DNA, 75 bp, synthetic construct
  source 1..75: mol_type = other DNA
tttcacaacagtgattctatatgaaacacctgcaacacctgcaacatctgaaactgctaaaatacctgaaatacc

SEQ ID NO: 665813 - DNA, 75 bp, synthetic construct
  source 1..75: mol_type = other DNA
gctacgttcttctatgacacgccgatccactggtgcgctacggatttactggaggcgattagttctactcgtttg

SEQ ID NO: 665814 - DNA, 75 bp, synthetic construct
  source 1..75: mol_type = other DNA
tgacagtatcgagaaacaagccagtgacagtatcgagaaacaagccagtgacagtaccgataaacaagccagtga

SEQ ID NO: 665815 - DNA, 75 bp, synthetic construct
  source 1..75: mol_type = other DNA
ataccaaaataatttcacatttgaacatatgtattatgcaacaatagatgaatataataaattaatacatactaa

SEQ ID NO: 665816 - DNA, 75 bp, synthetic construct
  source 1..75: mol_type = other DNA
cgatcagtggcttaatcctctcggttatggtgtcaaaggttatagcaaaacaatggctattgtagggagtggctc

SEQ ID NO: 665817 - DNA, 75 bp, synthetic construct
  source 1..75: mol_type = other DNA
tatccgagtagatcgcaatagtgggtatatggatgttgttcgtcccggatggagtaaggaagatacaaaagatat

SEQ ID NO: 665818 - DNA, 75 bp, synthetic construct
  source 1..75: mol_type = other DNA
catactttcccggtaacacgtcggtcactggctgcattattgcgtgacctcagtatgctgacgccggggaactgt

SEQ ID NO: 665819 - DNA, 75 bp, synthetic construct
  source 1..75: mol_type = other DNA
tcatcaatactattagcactgctattcctgaagatgcaacggggcaacggtgtatcgaagggttgaatttagcag

SEQ ID NO: 665820 - DNA, 75 bp, synthetic construct
  source 1..75: mol_type = other DNA
atctgccgccgctgcgttttgtgcgtaatcttggtttgatggcggcggagcgtgctggcgtgttgaaacgtcagg

SEQ ID NO: 665821 - DNA, 75 bp, synthetic construct
  source 1..75: mol_type = other DNA
atgaataaagcattactgccactgttactctgctgctttatttttccggcgtcaggaaaagatgcaggctggcag

SEQ ID NO: 665822 - DNA, 75 bp, synthetic construct
  source 1..75: mol_type = other DNA
acgttacaccgcttgccgctggtgcgtttccgctgacgcgtcgccatgcgttgcagtacgtgcagccagggcttg

SEQ ID NO: 665823 - DNA, 75 bp, synthetic construct
  source 1..75: mol_type = other DNA
acctggccactttctgccagacctgggacgacgagaatgtccataaattgatggatttgtcgataaaaaaaaact

SEQ ID NO: 665824 - DNA, 75 bp, synthetic construct
  source 1..75: mol_type = other DNA
acctggccactttctgccagacctgggacgacgagaaagtccataaattgatggatttttcgatcaaaaaaaact

SEQ ID NO: 665825 - DNA, 75 bp, synthetic construct
  source 1..75: mol_type = other DNA
ctcccgcccggcaggtcaggtgattgcacagtactatgaattcctgcgccttggtcgtgaaggctataccaaagt

SEQ ID NO: 665826 - DNA, 75 bp, synthetic construct
  source 1..75: mol_type = other DNA
catcgccgggcgacttcccgcgcgaggactatgaaacaaactgggaaggacgctttacgcttgccgacctcaaca

SEQ ID NO: 665827 - DNA, 75 bp, synthetic construct
  source 1..75: mol_type = other DNA
atattgatattgatttacagtctgaatttggtcggttgccaccgagcatgttaccgctaggaaataaacgattag

SEQ ID NO: 665828 - DNA, 75 bp, synthetic construct
  source 1..75: mol_type = other DNA
tgacagataaaatgattaagcatgtatcagacctgctcatcaaagaaggtggtttcggtgatgcttgcaatccaa

SEQ ID NO: 665829 - DNA, 75 bp, synthetic construct
  source 1..75: mol_type = other DNA
tgggcaaacggaccactcatgggactcacgtttttgggggccggttaagttgacttcagttattgggaaaacata

SEQ ID NO: 665830 - DNA, 75 bp, synthetic construct
  source 1..75: mol_type = other DNA
ggatgacgtgccggacgacgagctgtgcggcgtcgcgcctggtaaagttctgcctgtttctgagaaatggcaccc

SEQ ID NO: 665831 - DNA, 75 bp, synthetic construct
  source 1..75: mol_type = other DNA
tctcgccgggtgacttcccacgtgaagattatgaagcaaactgggaaggccgctttacgctggaggatctgaacg

SEQ ID NO: 665832 - DNA, 75 bp, synthetic construct
  source 1..75: mol_type = other DNA
tacggcgactactcctccgcgcaaattgctatacctacggcggctgggcagatggcaacagcccgtcggatatcg

SEQ ID NO: 665833 - DNA, 75 bp, synthetic construct
  source 1..75: mol_type = other DNA
ctgtcgcgctgtaccccgactctctgctttcacaagtgttaatggcatcaacctatccggcaaacgttgctcaag

SEQ ID NO: 665834 - DNA, 75 bp, synthetic construct
  source 1..75: mol_type = other DNA
cgttaatgggcgaaaacccgcagtgggtgcaaaatcttggcgacgcatttctggcgcaaccacaggacgtaatgg

SEQ ID NO: 665835 - DNA, 75 bp, synthetic construct
  source 1..75: mol_type = other DNA
atactgcccgattgaataatgagcaacggtcagcggtacgcgaacggttgtctgagcgtggagcaaggagactgg

SEQ ID NO: 665836 - DNA, 75 bp, synthetic construct
  source 1..75: mol_type = other DNA
gggtgcaaaacctgggcgatgcttttctggcgcagccgcaggacgtgatggactcggtacagcgattgcggcaac

SEQ ID NO: 665837 - DNA, 75 bp, synthetic construct
  source 1..75: mol_type = other DNA
gcattgatgggcgaaaacccgcaatgggtgcaaaacctgggcgatgcttttctggcgcagccgcaggacgtgatg

SEQ ID NO: 665838 - DNA, 75 bp, synthetic construct
  source 1..75: mol_type = other DNA
agaggcagcgcgtgagcgtattcagtctgcaactcccgaacagcgccaggtatttaaggaaaaagtacagcagcg

SEQ ID NO: 665839 - DNA, 75 bp, synthetic construct
  source 1..75: mol_type = other DNA
gggccaataccgcttatccgccagtttatctgccaccaccagccggagaaccgtttgttgacagctttgtgcgcg

SEQ ID NO: 665840 - DNA, 75 bp, synthetic construct
  source 1..75: mol_type = other DNA
tcaatcggcctctcctgagcagcgccaggcagtccgcgagaaaatgcaaaccagcccgcagaatcagcagcgaag

SEQ ID NO: 665841 - DNA, 75 bp, synthetic construct
  source 1..75: mol_type = other DNA
atgggcgttgctaccacgtacgcactattcagcagcatcgactgggacgacgacgatcatgaccatcatcatcat

SEQ ID NO: 665842 - DNA, 75 bp, synthetic construct
  source 1..75: mol_type = other DNA
atggcatggcggcacaatccaaactaccgtaatggtgtgccctatcatgatcaggatatggcaaagcggtttcat

SEQ ID NO: 665843 - DNA, 75 bp, synthetic construct
  source 1..75: mol_type = other DNA
tctaaacgacagtaaccatactgtcaggctgaataacgagcaacggtcagcagtacgcgaacgtctctctgagcg

SEQ ID NO: 665844 - DNA, 75 bp, synthetic construct
  source 1..75: mol_type = other DNA
aacgtctaaacgacagtaaccgtactgcccgattgaataacgagcagcggtcaacagtacgcgaacgtctctctg

SEQ ID NO: 665845 - DNA, 75 bp, synthetic construct
  source 1..75: mol_type = other DNA
gctgcggttacgcttcctgcaacagtttccatgcccccggtaacgcctgccgtcgtcaaatctgccttcagtact

SEQ ID NO: 665846 - DNA, 75 bp, synthetic construct
  source 1..75: mol_type = other DNA
agtcggtatatcaaagacatttgcgaataccagatgcaactatccggggagaagacgaaatatgcctgttttatt

SEQ ID NO: 665847 - DNA, 75 bp, synthetic construct
  source 1..75: mol_type = other DNA
atgtggtttttaacgagtttttctttgatataggtaaggcgctttttatcaatgtggttgatcttatgtcatacg

SEQ ID NO: 665848 - DNA, 75 bp, synthetic construct
  source 1..75: mol_type = other DNA
tatcagcttgcggacgaacttaaggcccggctactgtctggtgtctaccagcaggatttgcctcgccgaagaaat

SEQ ID NO: 665849 - DNA, 75 bp, synthetic construct
  source 1..75: mol_type = other DNA
tccccggttactacgtctttgccaaaaacaatatctccgccagcgactttaagcgcaccgtcaacgccgggcatg

SEQ ID NO: 665850 - DNA, 75 bp, synthetic construct
  source 1..75: mol_type = other DNA
ccgctgatcccaggcgatccgatcgtctggcgcaaaaatctttccgaaaccaccaaagacaagatctacgacttc

SEQ ID NO: 665851 - DNA, 75 bp, synthetic construct
  source 1..75: mol_type = other DNA
atgaacgctaagataattgcctcgctggccttcaccagcatgttcagcctcagcaccctgttaagcccggcgcac

SEQ ID NO: 665852 - DNA, 75 bp, synthetic construct
  source 1..75: mol_type = other DNA
gcataggcccctacccgtcagttacgcttgccgatgccagaaactaccgggcagagtcacgctctctcctggcga

SEQ ID NO: 665853 - DNA, 75 bp, synthetic construct
  source 1..75: mol_type = other DNA
tcatttcccgcatacccgatggtcaggccgaggatgcccgtaaggcaatcgatgcagcagaacgtgcacaaccag

SEQ ID NO: 665854 - DNA, 75 bp, synthetic construct
  source 1..75: mol_type = other DNA
ctaacccgcagatccagcagcgaagagaggcagcgcgtgagcgcattcagtccgcctcgcctgagcagcgccagg

SEQ ID NO: 665855 - DNA, 75 bp, synthetic construct
  source 1..75: mol_type = other DNA
tgtggatgaatacagcaaaaaacagaagatctcacgatcgcaggttatttccacattgctggatgccaccgttcc

SEQ ID NO: 665856 - DNA, 75 bp, synthetic construct
  source 1..75: mol_type = other DNA
cgtttgcaggtgggttattcttgctttttgccggagtgccgatggcagaatcatctgcagtgaagggtatgctca

SEQ ID NO: 665857 - DNA, 75 bp, synthetic construct
  source 1..75: mol_type = other DNA
aacaaatcgatccacaggaacatcagcaagaacaacttcgcagttcgcttgaagctaaaaccaatactttccaac

SEQ ID NO: 665858 - DNA, 75 bp, synthetic construct
  source 1..75: mol_type = other DNA
ggtactggtgctgggtcaggaatatgaagggttaccggatgccgcacgcgatccgaacgatttgcgcgtgaagat

SEQ ID NO: 665859 - DNA, 75 bp, synthetic construct
  source 1..75: mol_type = other DNA
ataatctgggcgggatgatgcgtagctgtgcgcacttcggcgtgaaaggtgttgttgtgcaggatgcggcgttgc

SEQ ID NO: 665860 - DNA, 75 bp, synthetic construct
  source 1..75: mol_type = other DNA
ataacctgggcggcatgatgcgcagttgcgcacacttcggcgtgaaaggcgttgtggtgcaggatgcggcgttgc

SEQ ID NO: 665861 - DNA, 75 bp, synthetic construct
  source 1..75: mol_type = other DNA
cgattgggtcgttgagtgcgtctccagccaaaagcaagccgcggaagccatcacagctcttttacgtcataaccc

SEQ ID NO: 665862 - DNA, 75 bp, synthetic construct
  source 1..75: mol_type = other DNA
attacattatagttttaatgttaaaacttgtgtttctcttttgatttctttgtttaaccctcgtcttttgttctt

SEQ ID NO: 665863 - DNA, 75 bp, synthetic construct
  source 1..75: mol_type = other DNA
ttcctgatcaaaaagcgtaatggcacaaccgtgcagcagtgggtaagccaggcaggcgcgcaggattgtgtactg

SEQ ID NO: 665864 - DNA, 75 bp, synthetic construct
  source 1..75: mol_type = other DNA
tttaccgggggcaggaccccatcgacgggcagctggcgcaggtcattaatggcttccgggatacgtatggtctga

SEQ ID NO: 665865 - DNA, 75 bp, synthetic construct
  source 1..75: mol_type = other DNA
aataccgcacaggaacacatgccggcattgtcgcatgggtacaacagaacggtgccaccatcaacggtaacaaag

SEQ ID NO: 665866 - DNA, 75 bp, synthetic construct
  source 1..75: mol_type = other DNA
atgacgcgccccgtgattaacgagtcacaactccggcaggttcgtcgcgccatcagagaggcagaacttccgccg

SEQ ID NO: 665867 - DNA, 75 bp, synthetic construct
  source 1..75: mol_type = other DNA
gcgctggaaaacgaatctaacccgcataacctgggtggcatgatgcgcagctgcgcgcacttcggcgtgaaaggc

SEQ ID NO: 665868 - DNA, 75 bp, synthetic construct
  source 1..75: mol_type = other DNA
cgtcgtcagcgtgcggaagaaacccgcgtctacggcgaaaatgcatgtcaggcactgttccagagccgtccggaa

SEQ ID NO: 665869 - DNA, 75 bp, synthetic construct
  source 1..75: mol_type = other DNA
gtaaattttcaggtattgatgttgatatttgtcgtggtgttgccgctgctgtatttggtgacgacacgaaagtga

SEQ ID NO: 665870 - DNA, 75 bp, synthetic construct
  source 1..75: mol_type = other DNA
cacttgcggatcgcatgatgcaaaaaatcacccatgaagagacgcattcacgcaatcttattattcccgcccggc

SEQ ID NO: 665871 - DNA, 75 bp, synthetic construct
  source 1..75: mol_type = other DNA
atgcaaaatctcattctaaagaatggtaatgaagaattgattatcactaatgaagcattcaacgctacggcttat

SEQ ID NO: 665872 - DNA, 75 bp, synthetic construct
  source 1..75: mol_type = other DNA
gtaatgaagaattgattatcactaatgaagcattcaacgctacggcctacatgctggggatcactcccacagaat

SEQ ID NO: 665873 - DNA, 75 bp, synthetic construct
  source 1..75: mol_type = other DNA
ctgccgtttagtttgttaatgcagtacgtcattctgttcttctattccgctttctcattatttatgaccaaagcc

SEQ ID NO: 665874 - DNA, 75 bp, synthetic construct
  source 1..75: mol_type = other DNA
tatcgcgattatcgtcgtcacggtgcgtcggctttcagcgcgacgctcggctgtttctggatgatcctggcctag

SEQ ID NO: 665875 - DNA, 75 bp, synthetic construct
  source 1..75: mol_type = other DNA
cccacgacgtttgtggcagaaagtttacgccagtctgcctgcgatgttttgctcagcatgaagacaaatgacggg

SEQ ID NO: 665876 - DNA, 75 bp, synthetic construct
  source 1..75: mol_type = other DNA
cgtcagacattgctcggcaatagtctggtcgttgtagcaccgaaaaccagtgcacagaaagatttcaccatcgac

SEQ ID NO: 665877 - DNA, 75 bp, synthetic construct
  source 1..75: mol_type = other DNA
aacgtagatggtttgaccgttgctcgtcgtcgtggtgggaccaattggggatctactataaattcgtttgttcct

SEQ ID NO: 665878 - DNA, 75 bp, synthetic construct
  source 1..75: mol_type = other DNA
atgacctgcggcgcatggcggaagaaaaaggtatcccggttattttcgcttcgcgcgccagctatcttgacgatg

SEQ ID NO: 665879 - DNA, 75 bp, synthetic construct
  source 1..75: mol_type = other DNA
gtgcgcaatcgccaggcgtcggcgctgcgcggcgggcaaagcggcgtcattggtttgatcgtccgtgatttatct

SEQ ID NO: 665880 - DNA, 75 bp, synthetic construct
  source 1..75: mol_type = other DNA
tggtcttggcctgccgtttagtttgttaatgcagtacgtcattctgttcttctattccgctttctcattatttat

SEQ ID NO: 665881 - DNA, 75 bp, synthetic construct
  source 1..75: mol_type = other DNA
atgagtttggcgagcagctgcgcctcaacggctgtgtcaatcatcactttgttagctacatgatgcggaactcga

SEQ ID NO: 665882 - DNA, 75 bp, synthetic construct
  source 1..75: mol_type = other DNA
atctactataaattcgtttgttcctgctggctgcaccgtctcctttggtttagggggtgaaggtggtgttgaata

SEQ ID NO: 665883 - DNA, 75 bp, synthetic construct
  source 1..75: mol_type = other DNA
cccgcgcatttctgggagccagcgatgctgaatttgcccgcattctggaagcgcagctgcgcagcctgcattacg

SEQ ID NO: 665884 - DNA, 75 bp, synthetic construct
  source 1..75: mol_type = other DNA
atggataagaagcaagtaacggatttaaggtcggaactactcgattcacgttttggcgccaagtcaatttcgact

SEQ ID NO: 665885 - DNA, 75 bp, synthetic construct
  source 1..75: mol_type = other DNA
atggataagaagcaagtaacggatttaaggtcggaactactcgattcacgttttggcgcaaagtctatttctact

SEQ ID NO: 665886 - DNA, 75 bp, synthetic construct
  source 1..75: mol_type = other DNA
tccgctcagaactactcgattcacgttttggtgccaagccaatttctactatcgctgactcaaaacgatttccgc

SEQ ID NO: 665887 - DNA, 75 bp, synthetic construct
  source 1..75: mol_type = other DNA
cccgaacgcgtacaggttacgaaagggcgcaaggcatgggatttaagcgaggttgttgcgtggattaacaacatt

SEQ ID NO: 665888 - DNA, 75 bp, synthetic construct
  source 1..75: mol_type = other DNA
tgaactgttgctggaagactacaaagcctccctgaaatatctcagcgatcacccgaaactgcagggtattgccca

SEQ ID NO: 665889 - DNA, 75 bp, synthetic construct
  source 1..75: mol_type = other DNA
atggataagaagcaagtaacggatttaaggtcggaactactcgattcacgttttggcgcgaagtcaatttccact

SEQ ID NO: 665890 - DNA, 75 bp, synthetic construct
  source 1..75: mol_type = other DNA
gctcagaactactcgattcacgttttggtgcgaaggccatttcgactatcgcagaatcaaaacgctttccgctgc

SEQ ID NO: 665891 - DNA, 75 bp, synthetic construct
  source 1..75: mol_type = other DNA
gatccgaactactcgattcacgttttggtgccaaggccatttcgactatcgcagaatcaaaacgctttccgctgc

SEQ ID NO: 665892 - DNA, 75 bp, synthetic construct
  source 1..75: mol_type = other DNA
acctggccactttctgccagacctgggacgacgagaaggtccataaattgatggatttgtcgattaaaaaaaact

SEQ ID NO: 665893 - DNA, 75 bp, synthetic construct
  source 1..75: mol_type = other DNA
tccgctcagaactactcgattcacgttttggtgccaagtcaatttccactatcgctgactcaaaacgatttccgc

SEQ ID NO: 665894 - DNA, 75 bp, synthetic construct
  source 1..75: mol_type = other DNA
tccgctcagaactactcgattcacgttttggtgccaagactatttcaactatcgctgactcaaaacgatttccgc

SEQ ID NO: 665895 - DNA, 75 bp, synthetic construct
  source 1..75: mol_type = other DNA
gctcggaactactcgattcacgttttggtgcaaaggccatttcgactatcgcagaatcaaaacgctttccgctgc

SEQ ID NO: 665896 - DNA, 75 bp, synthetic construct
  source 1..75: mol_type = other DNA
ctgtgctggcaccagctcagggcgttctctcatttgaaggttcaacgggttcaatgcctgttaacccacaaatac

SEQ ID NO: 665897 - DNA, 75 bp, synthetic construct
  source 1..75: mol_type = other DNA
atttcttcgatactgatcaccctgttggtacatccaccaaatcgaacgttgtgggcgacccggcgaccgatacgg

SEQ ID NO: 665898 - DNA, 75 bp, synthetic construct
  source 1..75: mol_type = other DNA
atgccctgaccaccgcactgagcgccgcctttaccaaaggtgttggtcgggtcaatccgcagtatcgatccatcg

SEQ ID NO: 665899 - DNA, 75 bp, synthetic construct
  source 1..75: mol_type = other DNA
caaataccggaaagagattttaaacagcccggaattcgaagcgttatggcaacgcattagtcaaaaaacattgta

SEQ ID NO: 665900 - DNA, 75 bp, synthetic construct
  source 1..75: mol_type = other DNA
cgaatggagcaggcgaatatatgaaggggcacggtatttagacaaactggggcgtaatgttgtttccgcacaaag

SEQ ID NO: 665901 - DNA, 75 bp, synthetic construct
  source 1..75: mol_type = other DNA
acaagagcgaaaatcagccctggttgcgctacgctctcactgggctgatgtgcagaatgaacaccttgcgcgaca

SEQ ID NO: 665902 - DNA, 75 bp, synthetic construct
  source 1..75: mol_type = other DNA
gccagaacttctttgatgaagaccacccgctgggcgacggcacctacagcaacgttgtcggtacaccaggaacgg

SEQ ID NO: 665903 - DNA, 75 bp, synthetic construct
  source 1..75: mol_type = other DNA
gccatcaaggaaggcgtttataaaacactacagatcacggaagagcatttcaaaagcctgtatgcgggtattcca

SEQ ID NO: 665904 - DNA, 75 bp, synthetic construct
  source 1..75: mol_type = other DNA
tctattttgtcgtcgagacaaaaagtaatttattaacccttagagataatgaatccggaaagataaaatgtgggg

SEQ ID NO: 665905 - DNA, 75 bp, synthetic construct
  source 1..75: mol_type = other DNA
tcactacaggaacaaattgaaactatcctgcgtaaatcagcagggcgactcaatataaacaatgctgatgagcgt

SEQ ID NO: 665906 - DNA, 75 bp, synthetic construct
  source 1..75: mol_type = other DNA
gcgaagatagcctgtggaactgcgcattttagtgccctaaaagaagaacagagtaatgcagcaaaatatgttaga

SEQ ID NO: 665907 - DNA, 75 bp, synthetic construct
  source 1..75: mol_type = other DNA
attttatctcacttaaagaacagatgcttaatcctgcgagatatatgcgctctactagtgtagatgagcttttaa

SEQ ID NO: 665908 - DNA, 75 bp, synthetic construct
  source 1..75: mol_type = other DNA
ttagcgaaaagttccttccccttcaggagcaaattgaatctatcctgcgtaaatcatcaggacgactcaatataa

SEQ ID NO: 665909 - DNA, 75 bp, synthetic construct
  source 1..75: mol_type = other DNA
gatagcgaagagcgccaattgctacaacgtaaatgtagcctgctggaaaactgggccgcctcgctgggtgtggaa

SEQ ID NO: 665910 - DNA, 75 bp, synthetic construct
  source 1..75: mol_type = other DNA
tggcgcgatttcgcataacaaactgcatggcctgtcagtgcaggtagaaaccaatcacgtcaaattaccggcagt

SEQ ID NO: 665911 - DNA, 75 bp, synthetic construct
  source 1..75: mol_type = other DNA
gttagcttcttcctgattgatgaaaaccgttttcgccacaacgagagtggcagtctggggggcgaagattgtggc

SEQ ID NO: 665912 - DNA, 75 bp, synthetic construct
  source 1..75: mol_type = other DNA
tcgaaagtattcagggcagcgggacttacgtaaaagaagagcgggtcaattacgatatttttcagttaaccagtt

SEQ ID NO: 665913 - DNA, 75 bp, synthetic construct
  source 1..75: mol_type = other DNA
gtcgcttctactcgtcatcgcacgatcgtttcacttacggctccagtttcatcaactttaacctgccgcagtttt

SEQ ID NO: 665914 - DNA, 75 bp, synthetic construct
  source 1..75: mol_type = other DNA
ctgagtgcattgaactgcgtctttccagcacccgccaggaaaccgggcgctttaaagcgttgcgcgtttctggcc

SEQ ID NO: 665915 - DNA, 75 bp, synthetic construct
  source 1..75: mol_type = other DNA
aaaatgcatcaggacgccgcaccgccagatagcgtggaagtcttctgttatagccagcatctgcgcggattaatc

SEQ ID NO: 665916 - DNA, 75 bp, synthetic construct
  source 1..75: mol_type = other DNA
caactgaccgatgagtggccgcaatatcccggtgacgagataaaacaaatcgttgaacaaagcggcatgtttctt

SEQ ID NO: 665917 - DNA, 75 bp, synthetic construct
  source 1..75: mol_type = other DNA
ttgtcgatctgctggagcaacagccgcgcacgcctggcgagctggcgcaacagactggcgtttcaggcaggacca

SEQ ID NO: 665918 - DNA, 75 bp, synthetic construct
  source 1..75: mol_type = other DNA
aaaatgcatcaggacgccgcaccgccagatagcgtggaagtcttctgctacagccagcatctgcgcggattaatc

SEQ ID NO: 665919 - DNA, 75 bp, synthetic construct
  source 1..75: mol_type = other DNA
atgacgggtagcgaaatcaggcgatacgtcttgtacctctatattgagactctgaaacagagactggatgccata

SEQ ID NO: 665920 - DNA, 75 bp, synthetic construct
  source 1..75: mol_type = other DNA
cagcctggggggcgaagattgtggctccacccagcatatactgctgcttgacgaattttatcgtaccgccgtgcg

SEQ ID NO: 665921 - DNA, 75 bp, synthetic construct
  source 1..75: mol_type = other DNA
tcaattacgatatttttcagttaaccagttttgatgaaaaactgtcggaccgtcacgtcgatacacacagtgaag

SEQ ID NO: 665922 - DNA, 75 bp, synthetic construct
  source 1..75: mol_type = other DNA
atgaggcgttactggtactggcgggatatctgctgattaatctggtcttcggcaatattctggagccgcgcatca

SEQ ID NO: 665923 - DNA, 75 bp, synthetic construct
  source 1..75: mol_type = other DNA
aacaattattgtcaaaattgcgcttgaacaaacagcgggaggtcaaagcatcgccgttctgttaagcgatctcaa

SEQ ID NO: 665924 - DNA, 75 bp, synthetic construct
  source 1..75: mol_type = other DNA
aaccgttgttgcaacgcgtagggattgatgtctcagttgaccaactggcgcattacattgatccgaacgcggcga

SEQ ID NO: 665925 - DNA, 75 bp, synthetic construct
  source 1..75: mol_type = other DNA
ttcttagcggagatcggggatgagttacttgactgcgaacctgcttggtgggcagacgaagcgtatgaaatcgcg

SEQ ID NO: 665926 - DNA, 75 bp, synthetic construct
  source 1..75: mol_type = other DNA
tgtttatgctgctcgaagttccgcaactgcccggcaaactccagcaaatgatggcacgtccggtcgaaggaatgg

SEQ ID NO: 665927 - DNA, 75 bp, synthetic construct
  source 1..75: mol_type = other DNA
tgatgtctcagttgaccaactggcgcattacattgacccgaacgcggcgatgacgttactgaccaacttactgac

SEQ ID NO: 665928 - DNA, 75 bp, synthetic construct
  source 1..75: mol_type = other DNA
caccggaactccctcgttttttgttcacggtacggaagcggtacacggcgaccttggaatggtggcgaaagacga

SEQ ID NO: 665929 - DNA, 75 bp, synthetic construct
  source 1..75: mol_type = other DNA
gaaaactcgcagcaacatttgccagcaccggaactccctcgttttttgttcacggtacggaagcggtacacggcg

SEQ ID NO: 665930 - DNA, 75 bp, synthetic construct
  source 1..75: mol_type = other DNA
tcattaaacattttatgcgtaacgaacataaagcagttgaagaagttattgattcccccctttcggaggtcgcaa

SEQ ID NO: 665931 - DNA, 75 bp, synthetic construct
  source 1..75: mol_type = other DNA
ttgcgcttaattacatcccgaatattggttcagtcctcgcggcaatcccccctatcgctcaggtactggtgttta

SEQ ID NO: 665932 - DNA, 75 bp, synthetic construct
  source 1..75: mol_type = other DNA
gggaatgctggtcattattctctgcggtatccgttttgccgccgagatcatcgtgccgtttattctcgcattatt

SEQ ID NO: 665933 - DNA, 75 bp, synthetic construct
  source 1..75: mol_type = other DNA
ttattaaacattttatgcgtaacgaatataaagcagttgaagaagttattgattcccccctttcggagatcgcaa

SEQ ID NO: 665934 - DNA, 75 bp, synthetic construct
  source 1..75: mol_type = other DNA
acaccggcgagatcccgctgttcagccactaccagatcgagtcgcagatcgagtccgccttccagcgtgaagttc

SEQ ID NO: 665935 - DNA, 75 bp, synthetic construct
  source 1..75: mol_type = other DNA
aaaaaatgactggaaaaaagttggttctttgccggaaggacttgcttatggtgtaagcctgccctggcagggggg

SEQ ID NO: 665936 - DNA, 75 bp, synthetic construct
  source 1..75: mol_type = other DNA
ttcccttctgcttgtttattggaacgtcggtagccggagctttaccggaaattcctgaaccatttaaatatggtg

SEQ ID NO: 665937 - DNA, 75 bp, synthetic construct
  source 1..75: mol_type = other DNA
gattgtttatcaaggtacgcgaacgcggcgacctgttaccggatattaacgaatacttgactaatatgtggtggt

SEQ ID NO: 665938 - DNA, 75 bp, synthetic construct
  source 1..75: mol_type = other DNA
tttccagaaaagcggcatgttggcggtcaaaggtaaatacatcaccatcgaaaataacgatgcgctggctcagct

SEQ ID NO: 665939 - DNA, 75 bp, synthetic construct
  source 1..75: mol_type = other DNA
tgccgaagaacgtctggctgcattcatctacaacctgtcccgtcgttttgcccaacgcggcttctcccctcgtga

SEQ ID NO: 665940 - DNA, 75 bp, synthetic construct
  source 1..75: mol_type = other DNA
tcgagttatcaaaagggaattccgcgctgacagagaaagtcaacagggattattttagtaaacctgctgatgatt

SEQ ID NO: 665941 - DNA, 75 bp, synthetic construct
  source 1..75: mol_type = other DNA
cattggaggagagacaacaggaggaaatgccacttctgacatgatatttatttcagaaaaagccaataaattaat

SEQ ID NO: 665942 - DNA, 75 bp, synthetic construct
  source 1..75: mol_type = other DNA
cgtaacatcggtagtgacctactggcagaaattcaacgcatatcttcaatcatctcaccgttagaacgtcaaacg

SEQ ID NO: 665943 - DNA, 75 bp, synthetic construct
  source 1..75: mol_type = other DNA
aaaaccattacggaacgacaggcagcggaagggctgatctccaacatgctgcgtgtggagcgggcgctggaaagg

SEQ ID NO: 665944 - DNA, 75 bp, synthetic construct
  source 1..75: mol_type = other DNA
tcagatcgattctataaaaattgttcgctgccgtaaggtaaaaggcgggcgattgtttatcaaggtgcgcgaacg

SEQ ID NO: 665945 - DNA, 75 bp, synthetic construct
  source 1..75: mol_type = other DNA
ttcatgccgcgccgccggataaccgaaccagagatctggataatatccctaaatgcctttttgatagccttacat

SEQ ID NO: 665946 - DNA, 75 bp, synthetic construct
  source 1..75: mol_type = other DNA
atgaacgaatatacatttagcctaccttacccgccatcgaataaccgctattaccgacattcgcgaggttttcac

SEQ ID NO: 665947 - DNA, 75 bp, synthetic construct
  source 1..75: mol_type = other DNA
aatcgtcacaacagatgcactcagcgaaaatgaaagtgaactgctgcagccggaaggcccgccctttcatctctg

SEQ ID NO: 665948 - DNA, 75 bp, synthetic construct
  source 1..75: mol_type = other DNA
acaatgccgataaccgtgacaacggtggtatgccgcgtcgttctcgccgctcgcctcgtcacctgcgcgtgagtg

SEQ ID NO: 665949 - DNA, 75 bp, synthetic construct
  source 1..75: mol_type = other DNA
gtgagcaggaagaaatgcaggtgcagccgatagtgactgaagtccctgttgctgccgctatcgaacctgttgtta

SEQ ID NO: 665950 - DNA, 75 bp, synthetic construct
  source 1..75: mol_type = other DNA
tctgttaagtcgcttcttcggtgcactaaaatccctgttcagcagcagtgaagaagcgaaacccgctgaacagtc

SEQ ID NO: 665951 - DNA, 75 bp, synthetic construct
  source 1..75: mol_type = other DNA
taaatgcaattgaaacccgtcaggacggcgtgcgctgtgtgattgtaccaaacgatcagatggaaactccgcact

SEQ ID NO: 665952 - DNA, 75 bp, synthetic construct
  source 1..75: mol_type = other DNA
agaacactcaggaagtccacgctattgttcctgtccctattgcctcttacctgctgaacgaaaaacgttctgcgg

SEQ ID NO: 665953 - DNA, 75 bp, synthetic construct
  source 1..75: mol_type = other DNA
tatcgataacccgaaagtgctcgaactggcacgtcagcatatcgctgcattaggtcgcccggatttcagcagcaa

SEQ ID NO: 665954 - DNA, 75 bp, synthetic construct
  source 1..75: mol_type = other DNA
gtatatgcaggaatacctctattcactgaaaaatcatcgctataccgccacgatactacagcaaattgctgaaga

SEQ ID NO: 665955 - DNA, 75 bp, synthetic construct
  source 1..75: mol_type = other DNA
gtatatgcaggaatatctttattcgattagaaatcatcgatataccgccacgatgcttcaatatattgctgaaga

SEQ ID NO: 665956 - DNA, 75 bp, synthetic construct
  source 1..75: mol_type = other DNA
ctggtaaatccggcaaagctgaaatattttgatgcgccgcatacgccaatgtatatgcaggaatatctttattcg

SEQ ID NO: 665957 - DNA, 75 bp, synthetic construct
  source 1..75: mol_type = other DNA
gattgttatcgacttcatcgacatgacgccagtacgccaccagcgtgcggtagaaaaccgtctgcgtgaagcggt

SEQ ID NO: 665958 - DNA, 75 bp, synthetic construct
  source 1..75: mol_type = other DNA
cgacccgcggcggcgatatcgaagaaaccgcgtttaacaccaacctcgaagctgccgatgagattgctcgtcagc

SEQ ID NO: 665959 - DNA, 75 bp, synthetic construct
  source 1..75: mol_type = other DNA
gtatatgcaggaatacctctattcactgaaaaaccatcgctataccgccacgatgctacagcaaatttctgaaga

SEQ ID NO: 665960 - DNA, 75 bp, synthetic construct
  source 1..75: mol_type = other DNA
cggacacgatgcgatcgtgcgccgcaggattgagcagcccgatgcgccaaaggataaccaaattcgtgtggtggc

SEQ ID NO: 665961 - DNA, 75 bp, synthetic construct
  source 1..75: mol_type = other DNA
cagcagtgggatttacaccaggcactggaagattttactcaggttattcctgtcttaattaatcaaggaaaataa

SEQ ID NO: 665962 - DNA, 75 bp, synthetic construct
  source 1..75: mol_type = other DNA
ctctaggatttaccggtatgatgcttacagaaccatatatagaaacagatattcaagcatatctatatacttatg

SEQ ID NO: 665963 - DNA, 75 bp, synthetic construct
  source 1..75: mol_type = other DNA
tgagcgacgcggttgggattttatggattcaggatggcgcgacctacggcaccagcgataaccgcaacctgtcgt

SEQ ID NO: 665964 - DNA, 75 bp, synthetic construct
  source 1..75: mol_type = other DNA
cagaaagcgaaattcacggcttcctggcgacagtgggcgtgggttatacccgaatgttgcgccagcaggatgaca

SEQ ID NO: 665965 - DNA, 75 bp, synthetic construct
  source 1..75: mol_type = other DNA
ctggaagagcagctctgcgatggtgagcaattaattatttcccgcttcgaaccggccgttttaccgttagtcgtc

SEQ ID NO: 665966 - DNA, 75 bp, synthetic construct
  source 1..75: mol_type = other DNA
tgacgtgacaaatggtcgagtctttacggcagctctgttacacgccccgcagcctgcgtctagcacgctggtact

SEQ ID NO: 665967 - DNA, 75 bp, synthetic construct
  source 1..75: mol_type = other DNA
caaggcgcgggtaagatcatggtcatcatgaaggcctcattgttgggggcgttggtaaatattatgctcgatcca

SEQ ID NO: 665968 - DNA, 75 bp, synthetic construct
  source 1..75: mol_type = other DNA
accgcagccaggcggtcagactgccaaaagctgttgcattgccggaaaacgtaaaacgcgttgaagtgattgctg

SEQ ID NO: 665969 - DNA, 75 bp, synthetic construct
  source 1..75: mol_type = other DNA
gaatactccagaaatacaagggagcgaggggcttaaaccaccaccagcaccacgtattccgcctgtagcaaggaa

SEQ ID NO: 665970 - DNA, 75 bp, synthetic construct
  source 1..75: mol_type = other DNA
tccagaccttatctggtcattacctgacggagaaatacgtcgctacgacaggcgcctgaacatgatttgtcacga

SEQ ID NO: 665971 - DNA, 75 bp, synthetic construct
  source 1..75: mol_type = other DNA
gcacgctggacgccgtcagcactgtcaatggcaccagcaacagcggactgcatcgctggaatgactatctggcga

SEQ ID NO: 665972 - DNA, 75 bp, synthetic construct
  source 1..75: mol_type = other DNA
tgatgaagcgcgtgagttgttacctccctgggccggatttattggcggcgtgattgagtcatcgaaactaacgcc

SEQ ID NO: 665973 - DNA, 75 bp, synthetic construct
  source 1..75: mol_type = other DNA
ggtatgagataaatcatcatggtatagcagcgtattgttcccatcttcctgatgacgttgacattgatgaaatgg

SEQ ID NO: 665974 - DNA, 75 bp, synthetic construct
  source 1..75: mol_type = other DNA
tcagcctgagtgactgggcaatcatcgtcggtattgcctgcactgttatcacctgtgccgtgaactggtattacc

SEQ ID NO: 665975 - DNA, 75 bp, synthetic construct
  source 1..75: mol_type = other DNA
tacagtgataatgcgggtggcggtaaaacggagttgactgcggcggcaggaaaaaccagttataaaatcaccgat

SEQ ID NO: 665976 - DNA, 75 bp, synthetic construct
  source 1..75: mol_type = other DNA
gctgttacatgctattgaggttccactttgtgtcatatctgaaccgccccgggtttcctggagagtgttttatct

SEQ ID NO: 665977 - DNA, 75 bp, synthetic construct
  source 1..75: mol_type = other DNA
gtcgccaaactgtactcggatgagaacaaaaacggtcggtatgacgcgggtactgacgttgatgttaccaccaat

SEQ ID NO: 665978 - DNA, 75 bp, synthetic construct
  source 1..75: mol_type = other DNA
aaagaggctctcacgatcccgaccaacggcgacggggtacagggttacaaacttcatattatttacaaacacaaa

SEQ ID NO: 665979 - DNA, 75 bp, synthetic construct
  source 1..75: mol_type = other DNA
ttcactatggctatatctgagaactaaggcaaagaaaaagaaaatcctacaggttgttaagaagataaaagaaag

SEQ ID NO: 665980 - DNA, 75 bp, synthetic construct
  source 1..75: mol_type = other DNA
acagatttccaacctggtggctattttattatgtattaagaaaagcttatttctttcttggaatacctttttttc

SEQ ID NO: 665981 - DNA, 75 bp, synthetic construct
  source 1..75: mol_type = other DNA
ttaccctgtcgactttcctcgcctgattcaggaaaagcgtaaggagtgggagcagattgcaggcatacctgtagc

SEQ ID NO: 665982 - DNA, 75 bp, synthetic construct
  source 1..75: mol_type = other DNA
aaacgacagccactatcaaatggtacagctacagcgataatgcgggtggcggtaaaacggagctgaccgcagcgg

SEQ ID NO: 665983 - DNA, 75 bp, synthetic construct
  source 1..75: mol_type = other DNA
cgtgggtctttaacggtaacagtaaacaacttgcggcggcgggcggtattgccaacgccagcttcgataacaatg

SEQ ID NO: 665984 - DNA, 75 bp, synthetic construct
  source 1..75: mol_type = other DNA
tgattggcctggatattcacaacttcacccgaacagttgctgaagacggcaagctggaaatccacaccacctatg

SEQ ID NO: 665985 - DNA, 75 bp, synthetic construct
  source 1..75: mol_type = other DNA
gttcggcaatacgaatgtgggcgtcgcacgcttccctatggatgcagtgatcaagctgttcgacggccagcaccg

SEQ ID NO: 665986 - DNA, 75 bp, synthetic construct
  source 1..75: mol_type = other DNA
caagacattaaagataacgactacgttctgacaccgggccgctatgtaggagcagccgagcaggaagaggacggc

SEQ ID NO: 665987 - DNA, 75 bp, synthetic construct
  source 1..75: mol_type = other DNA
gcacggattgcgcgtggtgatagcaagctggaaaaatatgaagaccaggcaggcttctgcaaagttgcgaccctg

SEQ ID NO: 665988 - DNA, 75 bp, synthetic construct
  source 1..75: mol_type = other DNA
tatcgaaagaagacctggtcggacgcgtttacgaatacttcctcggtaagtttgccgcaactgaaggcaaaggcg

SEQ ID NO: 665989 - DNA, 75 bp, synthetic construct
  source 1..75: mol_type = other DNA
ggtgcagccgagcaggaagaggacggcgtggcatttgagacaaaaatgcgcgaattgtcgaagacgttgtttgag

SEQ ID NO: 665990 - DNA, 75 bp, synthetic construct
  source 1..75: mol_type = other DNA
gtcgagagccatcagggtaaaagccgtgatatcgcgctgtatggtcaggaactgacagccacgacgtataaactg

SEQ ID NO: 665991 - DNA, 75 bp, synthetic construct
  source 1..75: mol_type = other DNA
gcaggcttctgcaaagttgcgaccctgcaagatattaaagataacgactacgtgctgacgccgggccgctatgtg

SEQ ID NO: 665992 - DNA, 75 bp, synthetic construct
  source 1..75: mol_type = other DNA
gcacacgaaactgacgttgaaacgttatcgaaagaagacctggtcggacgcgtttacgaatacttcctcggtaag

SEQ ID NO: 665993 - DNA, 75 bp, synthetic construct
  source 1..75: mol_type = other DNA
cggaagaactggctgcacggattgcgcgtggtgacagcaagctggaaaaatatgaagaccaggcaggcttctgca

SEQ ID NO: 665994 - DNA, 75 bp, synthetic construct
  source 1..75: mol_type = other DNA
cctaaaatttgttgaaagccatcaaggtaagagtaaagacatcgctatttacggccaggagttgaccagcaccac

SEQ ID NO: 665995 - DNA, 75 bp, synthetic construct
  source 1..75: mol_type = other DNA
ttgcagcaacaggcgctgcaaatcaaatcgaccgccaccgcgttgggggaggacgatgacattaccggcaatatg

SEQ ID NO: 665996 - DNA, 75 bp, synthetic construct
  source 1..75: mol_type = other DNA
agctatcgaaaaacagtgagcttaccgccattcgcagcacggggttttctatcttccgtattgcactggtggcgc

SEQ ID NO: 665997 - DNA, 75 bp, synthetic construct
  source 1..75: mol_type = other DNA
tatcgcgttattgggggggattgttggtctcgggcagttatcgaaaaacagtgagcttaccgccattcgcagcac

SEQ ID NO: 665998 - DNA, 75 bp, synthetic construct
  source 1..75: mol_type = other DNA
gatgtagtgacggaggccgtgcgtttgctggaggagtgtccactgtttaatgccggtattggcgccgtctttacg

SEQ ID NO: 665999 - DNA, 75 bp, synthetic construct
  source 1..75: mol_type = other DNA
gcgtgccggtcatgccgcccgtcgcggctgaatacagtaaaacgacgctttatttcaccgaaggagggaacggta

SEQ ID NO: 666000 - DNA, 75 bp, synthetic construct
  source 1..75: mol_type = other DNA
catccacactgcctgtagctacgccaatactgttaattcacaacggcatgggcaccatcgaagaattcaaaacat

SEQ ID NO: 666001 - DNA, 75 bp, synthetic construct
  source 1..75: mol_type = other DNA
tggagatcccacgacaaaaacaatgtcgatctgggactgcgtcagagggaacgagttcacctatgagtacaccct

SEQ ID NO: 666002 - DNA, 75 bp, synthetic construct
  source 1..75: mol_type = other DNA
ttctgatggataactgggcggggatctgcacgaaagccagccaggaaaaactatcggttattgccaatgtggcag

SEQ ID NO: 666003 - DNA, 75 bp, synthetic construct
  source 1..75: mol_type = other DNA
aaccgattttgaacacaacgtagtgccattaaaaagtaatatgtgtgaaccgccccgggaatcctggagactaaa

SEQ ID NO: 666004 - DNA, 75 bp, synthetic construct
  source 1..75: mol_type = other DNA
agaattcggcaacacaaatgtcggtgttgttaggtttcctatggatgccgaaattaaacttttcgacggtcagca

SEQ ID NO: 666005 - DNA, 75 bp, synthetic construct
  source 1..75: mol_type = other DNA
atgtcatcatgctggattgtttaggatttcaccagcgtcatcgcgatttactgcaaaaacagctcgatgttcctg

SEQ ID NO: 666006 - DNA, 75 bp, synthetic construct
  source 1..75: mol_type = other DNA
gttaaactacgttctacacctagcgtttatgagtcaatgaggcgcttcatagttgaaagccctaactcaccgctt

SEQ ID NO: 666007 - DNA, 75 bp, synthetic construct
  source 1..75: mol_type = other DNA
tatcagcgtgataaggttgccgaccagcggcgattaatgtgggtaggttttgggtttggtggtgttggtgtaatt

SEQ ID NO: 666008 - DNA, 75 bp, synthetic construct
  source 1..75: mol_type = other DNA
tcaggggactacaagcctcttacaatgaaaatacgcggagataccggtagcgggatagttacgataaatgcaaca

SEQ ID NO: 666009 - DNA, 75 bp, synthetic construct
  source 1..75: mol_type = other DNA
taaatacctactccaacataccaggaagtaaaaaaccgataagtggcaattcacaatatatagcagaaattggat

SEQ ID NO: 666010 - DNA, 75 bp, synthetic construct
  source 1..75: mol_type = other DNA
aaacagattatggtttcgagttttcaacccctaaagatattgctagatttatagataccttctgtttaagagagc

SEQ ID NO: 666011 - DNA, 75 bp, synthetic construct
  source 1..75: mol_type = other DNA
gaattaaaacaaattaaggctcaaggatataaagcaccaaaagacattgctgattcctttggtcaaaacaaaaca

SEQ ID NO: 666012 - DNA, 75 bp, synthetic construct
  source 1..75: mol_type = other DNA
gagtttggcgtatccaaaactaaaatatctctggaacaacacgctaaacttcactttgataactcaaagaaaatt

SEQ ID NO: 666013 - DNA, 75 bp, synthetic construct
  source 1..75: mol_type = other DNA
cagcacttcatgacacgataaaaaacctttctaatgatatattgttagaactgcatagcggaaacaaaggggtga

SEQ ID NO: 666014 - DNA, 75 bp, synthetic construct
  source 1..75: mol_type = other DNA
tggcaatgtccgtagagccgtttgtcggaatgactgagctggaaaaatccaatatcagtcagcggtcaaataaat

SEQ ID NO: 666015 - DNA, 75 bp, synthetic construct
  source 1..75: mol_type = other DNA
gttagtgtggatgtgttttttattacctgctatttggcaaaatataactgtgtatggattctcaataccaacaat

SEQ ID NO: 666016 - DNA, 75 bp, synthetic construct
  source 1..75: mol_type = other DNA
atgatttttgaaggacgtcagcaaaagggactgtcgcttattgaaatagcgatggtaattattttgtctgtggta

SEQ ID NO: 666017 - DNA, 75 bp, synthetic construct
  source 1..75: mol_type = other DNA
gtgccgacagcctatgcgttcgcattgattgcgatcctgtttacggctctgagctacgggaagctggttcgccgc

SEQ ID NO: 666018 - DNA, 75 bp, synthetic construct
  source 1..75: mol_type = other DNA
ttcggctacgtgcatccaacctggcgcaccccggcgatgaacatcatcctggttggcgcgattgcgctgctggcg

SEQ ID NO: 666019 - DNA, 75 bp, synthetic construct
  source 1..75: mol_type = other DNA
cccggcactggcagaactgattaccacgatggttacgcagggctatgagtatcgtcgtgatgacgatatggcgtt

SEQ ID NO: 666020 - DNA, 75 bp, synthetic construct
  source 1..75: mol_type = other DNA
tttaccggcacaggtacctgattcggagctcgatcagtggatggaaagccggatttacccggcgatggcggagat

SEQ ID NO: 666021 - DNA, 75 bp, synthetic construct
  source 1..75: mol_type = other DNA
tcggtcatctcgcagttctggatccgtgagaagcgtaacaaaacgctgaaagatcacttccagtatctgttcctg

SEQ ID NO: 666022 - DNA, 75 bp, synthetic construct
  source 1..75: mol_type = other DNA
gctacccgcgcattgttgggtaaagatcccaaagagaacaactttgaggaatgcacccaaattgctacccaatat

SEQ ID NO: 666023 - DNA, 75 bp, synthetic construct
  source 1..75: mol_type = other DNA
ctataacgaccatgtactacatgaatgctgcccggcgctggatttgcgaaacgtcggggttgcggcaccgtttgg

SEQ ID NO: 666024 - DNA, 75 bp, synthetic construct
  source 1..75: mol_type = other DNA
atgaaacagataacctttgctccccgtaatcacctgctcaccaataccaataccaatacaaataccaatacctgg

SEQ ID NO: 666025 - DNA, 75 bp, synthetic construct
  source 1..75: mol_type = other DNA
gatgaggttggtgtgcagtttggaagcgaggcggaaaagatgatcatgttcgaaatcatcaacacccgctacgag

SEQ ID NO: 666026 - DNA, 75 bp, synthetic construct
  source 1..75: mol_type = other DNA
ttggggtgagcaataccagcctgatgccatctcgacgcaaattgattgggggtttatcggtaactgggttattcc

SEQ ID NO: 666027 - DNA, 75 bp, synthetic construct
  source 1..75: mol_type = other DNA
atgggtaggaaatcacgcgctggcgtttattggcgacacactttcgccaaagggcgagaaagtgccggagctgtt

SEQ ID NO: 666028 - DNA, 75 bp, synthetic construct
  source 1..75: mol_type = other DNA
aaccacgcccacgccgcagcctggcagtgatgaaatcaatcgtgcttatgaagaaggatgggtaggaaatcacgc

SEQ ID NO: 666029 - DNA, 75 bp, synthetic construct
  source 1..75: mol_type = other DNA
caccagaatggtgatatctgccggacttgatcgtgaaggtgcgacagaagcttacagcaatatttgtcgttttat

SEQ ID NO: 666030 - DNA, 75 bp, synthetic construct
  source 1..75: mol_type = other DNA
ccggactggcaattagccgcaaaaaaggaagtttcaccggttcaactacgtcaggactatgttcacgctcacggt

SEQ ID NO: 666031 - DNA, 75 bp, synthetic construct
  source 1..75: mol_type = other DNA
ttttctgcactaacagcatccattgccgttgacgtccagtttgatgagtttcccggcacgaataatctagggacg

SEQ ID NO: 666032 - DNA, 75 bp, synthetic construct
  source 1..75: mol_type = other DNA
agacaatcaaaaattgaatatttgttgaattctctcaatattccagagaggttcaaaaattgcactcttcagaat

SEQ ID NO: 666033 - DNA, 75 bp, synthetic construct
  source 1..75: mol_type = other DNA
gtattcatgtccggaattaaaaaacaaaacatattctgagagaattaaatggttatgtggttatgttcatgagga

SEQ ID NO: 666034 - DNA, 75 bp, synthetic construct
  source 1..75: mol_type = other DNA
atttaaagtcaggtatatttacgcagttcgatattagcaatggaaaggtgcttaaactaggggatacttttattg

SEQ ID NO: 666035 - DNA, 75 bp, synthetic construct
  source 1..75: mol_type = other DNA
cagtgctggatgcactgcagcagcatgaacacggggcgacgctgtttgatggtcgccccgttgtttttgacgaag

SEQ ID NO: 666036 - DNA, 75 bp, synthetic construct
  source 1..75: mol_type = other DNA
ctggtgacaccgggcattcaggacagccagaaagtggtgatccgcgcaggtatttccgcaggcgatcgggtagtg

SEQ ID NO: 666037 - DNA, 75 bp, synthetic construct
  source 1..75: mol_type = other DNA
gaagctcagagcgccactgcaccggaagagaaagccaccagccgcgaatacgcgaaaaaaggagcgcgttcctga

SEQ ID NO: 666038 - DNA, 75 bp, synthetic construct
  source 1..75: mol_type = other DNA
taaaagcgggggatttactggctgagattgatcccagccagttcaaagttgcactggcccaggcacaaggacaac

SEQ ID NO: 666039 - DNA, 75 bp, synthetic construct
  source 1..75: mol_type = other DNA
cggtagctgctggcgggctgatgggggccagtatgttcggccttgcaactggcattgattatggcgtggtatttg

SEQ ID NO: 666040 - DNA, 75 bp, synthetic construct
  source 1..75: mol_type = other DNA
ggcgggtagcgctggccgtgctggtggtggtcgcgggggcggctggcatctggcactttagcagcaattctgaca

SEQ ID NO: 666041 - DNA, 75 bp, synthetic construct
  source 1..75: mol_type = other DNA
aaaacaaggtcagcaaacatctggtgacgccgggcattcaggacagtcagaaagtggtgatccgcgcaggtattt

SEQ ID NO: 666042 - DNA, 75 bp, synthetic construct
  source 1..75: mol_type = other DNA
atgccacaaccggtacgattaaagtgaaagcacgctttaataatcaggatgatgcgctgtttcccaatcagtttg

SEQ ID NO: 666043 - DNA, 75 bp, synthetic construct
  source 1..75: mol_type = other DNA
tgccgctggcctggttggttctaagctgtcacaggctaccgggtacagtgacaggccattagacgcacttggtgc

SEQ ID NO: 666044 - DNA, 75 bp, synthetic construct
  source 1..75: mol_type = other DNA
tggtgtcgtatattgcggggatcctttgttccgggctggtgggttcaaagctggctcaggttactggctacagtg

SEQ ID NO: 666045 - DNA, 75 bp, synthetic construct
  source 1..75: mol_type = other DNA
cgatagtgtttcataattcctccatttttctctcttattggctggctacactagtatcattccgcgaaacgtttc

SEQ ID NO: 666046 - DNA, 75 bp, synthetic construct
  source 1..75: mol_type = other DNA
atgaaagacagttataaatcccgttgggtaattgtaatcgtggtggttatcgccgccatcgctgcattctggttc

SEQ ID NO: 666047 - DNA, 75 bp, synthetic construct
  source 1..75: mol_type = other DNA
acaggcagttccgcgttacctcaccgggcttggcaccattaccgccgctaatactgttacggtgcgcagccgcgt

SEQ ID NO: 666048 - DNA, 75 bp, synthetic construct
  source 1..75: mol_type = other DNA
atcgaggaagagaccgctcccggagtctggtgtgattccgagggagacatagcacaacgatttcctgtcaggatt

SEQ ID NO: 666049 - DNA, 75 bp, synthetic construct
  source 1..75: mol_type = other DNA
gtatggctacgcagcctgcacaaccggcagcaggcacgtcagccaggacagcaaagccggctccccgctggttcc

SEQ ID NO: 666050 - DNA, 75 bp, synthetic construct
  source 1..75: mol_type = other DNA
aactatcatcgacaccggcattggcgacaccatcggcatgttgatgtcccacgcaatatctcgccctacattatg

SEQ ID NO: 666051 - DNA, 75 bp, synthetic construct
  source 1..75: mol_type = other DNA
gtataacgattctaagcacttctcgattggtcgcttctataccaactattgggtgccaaacccgaacttacgtcc

SEQ ID NO: 666052 - DNA, 75 bp, synthetic construct
  source 1..75: mol_type = other DNA
cccggtactgaagcagctggcgaaacagtacggcttctcggtgttcccgtacaccctggatggtcgcggggatga

SEQ ID NO: 666053 - DNA, 75 bp, synthetic construct
  source 1..75: mol_type = other DNA
atgaaacatactgatatccgtgcggcagtgctggatgcactcgagcagcatgaacacggggcgacgctgtttgat

SEQ ID NO: 666054 - DNA, 75 bp, synthetic construct
  source 1..75: mol_type = other DNA
aaaggtcgggcagcgatggagcgagagtttcctgaagcactggagcggatgaaagagagactgccaccgtatctc

SEQ ID NO: 666055 - DNA, 75 bp, synthetic construct
  source 1..75: mol_type = other DNA
tggtattcggcatcggcctgatgctggtactgaatttgaagttcaagatcaactcgatggtggctttgctggtgg

SEQ ID NO: 666056 - DNA, 75 bp, synthetic construct
  source 1..75: mol_type = other DNA
catttctgaaagcagatcaaccggtagatatgaacaatctgccttctttcggcatctcgattctggtgccgctga

SEQ ID NO: 666057 - DNA, 75 bp, synthetic construct
  source 1..75: mol_type = other DNA
acggatgttatttgtcgcctcgacgttaatgtggacctgcaacaccatgtacattattgatatgccgttgtggat

SEQ ID NO: 666058 - DNA, 75 bp, synthetic construct
  source 1..75: mol_type = other DNA
tttgcaacttcaggaaacagccaacagcagcaaagtagcaatcatcaaaatcatcctgtatacgacgattccatc

SEQ ID NO: 666059 - DNA, 75 bp, synthetic construct
  source 1..75: mol_type = other DNA
agcggaataccccggccaggtgggcgttcagattggctatcacgaagcattttcgcatcgcattatgggcggcgc

SEQ ID NO: 666060 - DNA, 75 bp, synthetic construct
  source 1..75: mol_type = other DNA
tggtgctggaagccttaccgggtcttctggagcagggcgggcagctggcgctactcggcgcgggcgatccggtgc

SEQ ID NO: 666061 - DNA, 75 bp, synthetic construct
  source 1..75: mol_type = other DNA
ccgccgatcggcgggcttaccgcgtgggcgatatcctgacggtgatcctcgaagaatccacccagtcgagcaaac

SEQ ID NO: 666062 - DNA, 75 bp, synthetic construct
  source 1..75: mol_type = other DNA
ccgcgactttgacggcagcgccacttcccagcagcagaacagcctgcgcggggagatcaccgtttccgtccatgc

SEQ ID NO: 666063 - DNA, 75 bp, synthetic construct
  source 1..75: mol_type = other DNA
gcctcaataaagccggacaggaactgtatcaaaaactgttcccggtttatcaacggctttctgcgattgataatg

SEQ ID NO: 666064 - DNA, 75 bp, synthetic construct
  source 1..75: mol_type = other DNA
agcgagcacccatggtttactcggtcatcctgcgcttacgcagcccatcaaaaatatccttctcgaggaagcaaa

SEQ ID NO: 666065 - DNA, 75 bp, synthetic construct
  source 1..75: mol_type = other DNA
cgggcaaatctctttcctgaaggccggattgtattacgccgaccacattacagcggttagtccgacctacgctcg

SEQ ID NO: 666066 - DNA, 75 bp, synthetic construct
  source 1..75: mol_type = other DNA
ctgttttatgccgacgttagtgcgtcgccattctgtcgcaacgcgccagaatgcggcggcgatcactaactcaac

SEQ ID NO: 666067 - DNA, 75 bp, synthetic construct
  source 1..75: mol_type = other DNA
cgccagagagttggatcggcaccggtacgccagatatgcccggcggcgaagctgcgatggttgaactgctggggc

SEQ ID NO: 666068 - DNA, 75 bp, synthetic construct
  source 1..75: mol_type = other DNA
gtcaggctggcgtctctgtggcaacggtttcccgagtgctcaataacagcacgctggtcagtgccgacacgcgtg

SEQ ID NO: 666069 - DNA, 75 bp, synthetic construct
  source 1..75: mol_type = other DNA
gccgttagtgcggcgcaccggtgggcttgctgatacggtttctgactgttctcttgagaaccttgcagatggcgt

SEQ ID NO: 666070 - DNA, 75 bp, synthetic construct
  source 1..75: mol_type = other DNA
cagatgcgtgccgacagttgccgcgttgggtttatgtgaaaggtgtgtttaatcaggggctggataaccgccgtg

SEQ ID NO: 666071 - DNA, 75 bp, synthetic construct
  source 1..75: mol_type = other DNA
gttagcagcagcgcagaacattattgaaacgctgaaacgagagtgttcacagcttggtcatgatctgaaccgcgc

SEQ ID NO: 666072 - DNA, 75 bp, synthetic construct
  source 1..75: mol_type = other DNA
gaatgggggtgtagaagatctttacgggaaacaatgtgttagaaatctaaaatcacaattcgaatgtattgattg

SEQ ID NO: 666073 - DNA, 75 bp, synthetic construct
  source 1..75: mol_type = other DNA
atgaatccatcaatcgttaaacgctgcattgtcggggccgtgttggctattgctgccacgctgccgggttttcag

SEQ ID NO: 666074 - DNA, 75 bp, synthetic construct
  source 1..75: mol_type = other DNA
aatcaggggctggataggtgctctgctcagtccgataggtcttgtggttactgcactggcgggcgtggcgctggt

SEQ ID NO: 666075 - DNA, 75 bp, synthetic construct
  source 1..75: mol_type = other DNA
ggtgtttttaatcaggggctggataaccgccgtgcgcgggagatggcctggtgccttaaaggagctggactatga

SEQ ID NO: 666076 - DNA, 75 bp, synthetic construct
  source 1..75: mol_type = other DNA
tcgcctgacaccttaccagtgcagcgcgggagtgtggacgtcgggcatcgggcacactgccggggtggtcccgaa

SEQ ID NO: 666077 - DNA, 75 bp, synthetic construct
  source 1..75: mol_type = other DNA
gtgagctcaatcattaaacgctgcagtgtggccgccgtgctggtgctggccgcgctgatgcctgactttcgtctg

SEQ ID NO: 666078 - DNA, 75 bp, synthetic construct
  source 1..75: mol_type = other DNA
gcgttatcggtgtggtgctggcgattgccgccacgctgccgggttttcagcaactccacacatcggtggaaggat

SEQ ID NO: 666079 - DNA, 75 bp, synthetic construct
  source 1..75: mol_type = other DNA
aatcagcaatgcgttgagtatcaaggcgaactcgtcacactgcgtaaaaagttagcagcggcgcagagcattatt

SEQ ID NO: 666080 - DNA, 75 bp, synthetic construct
  source 1..75: mol_type = other DNA
cgccagttagtcgagcaacagatcctcgaaagcattcagggcagcgggacttacgtcaaagaagagcgggtcaat

SEQ ID NO: 666081 - DNA, 75 bp, synthetic construct
  source 1..75: mol_type = other DNA
ggtgtttgtgaatggtgagcgtaataccgggctcgaaaaccgccgctttcgcgagcgtacttactgcctgaaggg

SEQ ID NO: 666082 - DNA, 75 bp, synthetic construct
  source 1..75: mol_type = other DNA
atgtccttaactggtattcatgcaatgctggaagttcgcgagcaattcgaagctggtaatcacaatgcgactcca

SEQ ID NO: 666083 - DNA, 75 bp, synthetic construct
  source 1..75: mol_type = other DNA
gcgggacagtattcatagtgaccgtatcctcatcacgatgatcccggcccttgagctgtcctcgcataccgcatc

SEQ ID NO: 666084 - DNA, 75 bp, synthetic construct
  source 1..75: mol_type = other DNA
tccgacagcgaaagtccgttaaaagagatcaatccggattcatttcagaacaatggcacgattctcatcccggca

SEQ ID NO: 666085 - DNA, 75 bp, synthetic construct
  source 1..75: mol_type = other DNA
tgatgtcggtcgcgagctctggttatcccaggcggacctggtccggcacatcatgttcttctccacgacaggggg

SEQ ID NO: 666086 - DNA, 75 bp, synthetic construct
  source 1..75: mol_type = other DNA
acctcatacaccgcacggcctggggaaacccgctgtggaatgcactgcataacctgaacatcattggtctgtgtc

SEQ ID NO: 666087 - DNA, 75 bp, synthetic construct
  source 1..75: mol_type = other DNA
cggaagaggaacactccggtcctgaagatataccttcagtgaaggcgattctgaatactctgctccccctggaga

SEQ ID NO: 666088 - DNA, 75 bp, synthetic construct
  source 1..75: mol_type = other DNA
acctcggtcaccgggttaacgggacggacgaggaggcactggaagtcaaaaagtacgcaacgacgcttccttata

SEQ ID NO: 666089 - DNA, 75 bp, synthetic construct
  source 1..75: mol_type = other DNA
agcaaatttacgcgcgcctgcgcaataacagccgggataaattagtcggcgtaagaaagacgccgcgtattcctg

SEQ ID NO: 666090 - DNA, 75 bp, synthetic construct
  source 1..75: mol_type = other DNA
atgattaagatggttagcgtcgttccgcagccggaaacagtgaagacgctccgggaaaaaatgggcatgactgaa

SEQ ID NO: 666091 - DNA, 75 bp, synthetic construct
  source 1..75: mol_type = other DNA
atgcctgctgtaattccgttggcgacatgtttacttgctgcaagttatgcaaataatctggagcctcgtttgctc

SEQ ID NO: 666092 - DNA, 75 bp, synthetic construct
  source 1..75: mol_type = other DNA
cgccttctgaaagaagggcgtatcaaactggccaagcacggtaagtttctggaaggaagtgttgacgagcaggtt

SEQ ID NO: 666093 - DNA, 75 bp, synthetic construct
  source 1..75: mol_type = other DNA
ccccgccgttaaatttttcatttgaagaaaggaaaaaaatttttctatgggtattgacccgtcttctgaaagaag

SEQ ID NO: 666094 - DNA, 75 bp, synthetic construct
  source 1..75: mol_type = other DNA
tatttccgaaaacagaagaagagatggaagacggtatctggttttttgatgagagttgtccggggggagctgttt

SEQ ID NO: 666095 - DNA, 75 bp, synthetic construct
  source 1..75: mol_type = other DNA
aacttttacaccgtacagcctggggaaatcctgtctggaatgcactccagagtctcaatatctatggcttttgcc

SEQ ID NO: 666096 - DNA, 75 bp, synthetic construct
  source 1..75: mol_type = other DNA
agtgcagcaacaactgggcgttgatcaaccggattttgggacattatttgccgacatgtgttatggcgataacga

SEQ ID NO: 666097 - DNA, 75 bp, synthetic construct
  source 1..75: mol_type = other DNA
tctggctggcacgcaaaatggccagtctgggtgaaccgctgcgcgccggagatatcattcttaccggggcattag

SEQ ID NO: 666098 - DNA, 75 bp, synthetic construct
  source 1..75: mol_type = other DNA
ctgcgcgatctgattggtattgataacgctgaagcggcctacagcattcagcacataaatgtgcaacatgacgtc

SEQ ID NO: 666099 - DNA, 75 bp, synthetic construct
  source 1..75: mol_type = other DNA
ttcacccaattagaaatagctattcatctttcacctgggtcggcaagcagattataaatatgttgagaaagcagt

SEQ ID NO: 666100 - DNA, 75 bp, synthetic construct
  source 1..75: mol_type = other DNA
gttgccggatggacggggcgaccgttcgggtgatgggcaaacaggcggagattaacggcgtcgtgtatgacgtga

SEQ ID NO: 666101 - DNA, 75 bp, synthetic construct
  source 1..75: mol_type = other DNA
tagccgccgatttacgtcaggctgaagaaaaaggggaagccatcgccccactgcgtgaattgattggtgtggata

SEQ ID NO: 666102 - DNA, 75 bp, synthetic construct
  source 1..75: mol_type = other DNA
caggggcgcacaatagcacatccatatgcacatactttaggctctgtggatatcaaagatcccacaaatctttaa

SEQ ID NO: 666103 - DNA, 75 bp, synthetic construct
  source 1..75: mol_type = other DNA
acagcaacggtgctgcaatttttatcaccaacgattatcgtggcatggttctcactggtacgtaaatcacgcccc

SEQ ID NO: 666104 - DNA, 75 bp, synthetic construct
  source 1..75: mol_type = other DNA
ctgctgacgctctcattttttcacggcgataaagtcttctcgatagtaaaaaatcataaagacgccatcagcttg

SEQ ID NO: 666105 - DNA, 75 bp, synthetic construct
  source 1..75: mol_type = other DNA
actctccttttgttgtccaatctgttaatgatgcgataatttatgatttaagcacaaacgaacaacttgaagatc

SEQ ID NO: 666106 - DNA, 75 bp, synthetic construct
  source 1..75: mol_type = other DNA
aaatccagacaattgctgcaacgacacttagcgatagcctggtggaaattaaaccgggatccgcaaaaaaagaaa

SEQ ID NO: 666107 - DNA, 75 bp, synthetic construct
  source 1..75: mol_type = other DNA
ccagtcaggccggaaaaaccggctccccgctggtttcgtctcagtaacggcagtcaggttaatctggccgactgg

SEQ ID NO: 666108 - DNA, 75 bp, synthetic construct
  source 1..75: mol_type = other DNA
atgcgttttaaagataaggatcaccagtgcatagcggcggatgcgggaggggtaaaaaaagaggattttatcgca

SEQ ID NO: 666109 - DNA, 75 bp, synthetic construct
  source 1..75: mol_type = other DNA
tccctccgtgatactcagttaagaaatcctgaagctcttttttctgttcacgtgtcatctcatcctgattgccct

SEQ ID NO: 666110 - DNA, 75 bp, synthetic construct
  source 1..75: mol_type = other DNA
tatgggtctgcgtcaatcctgatgaagagaatattattgagtccgttataggggaagtcatccctgggacgctta

SEQ ID NO: 666111 - DNA, 75 bp, synthetic construct
  source 1..75: mol_type = other DNA
atggccaattgcgcgctcattcttaaaatatccctggcaatgctggcgtttgctgcaaactctattctgtgccgt

SEQ ID NO: 666112 - DNA, 75 bp, synthetic construct
  source 1..75: mol_type = other DNA
aactgaacccttcggtttttctcaccgcacatgtgtcatcgcatgattgccctgacagcgaagcccgggcaattt

SEQ ID NO: 666113 - DNA, 75 bp, synthetic construct
  source 1..75: mol_type = other DNA
aaatgaaaagcgtataacgcgctgggggccagggagtccgcttcaggatcctgaaaacacaggtggattgtccat

SEQ ID NO: 666114 - DNA, 75 bp, synthetic construct
  source 1..75: mol_type = other DNA
tgagtaaggcaacgggcaattatttcctgtacatcaaacgcttgtcagcaaatgatactggtgcaacaggcggtc

SEQ ID NO: 666115 - DNA, 75 bp, synthetic construct
  source 1..75: mol_type = other DNA
aacaatgcgatcaaggcgctcaatgataagaatgctgggttacgagtaacgccgttacaatacaccattcaccgt

SEQ ID NO: 666116 - DNA, 75 bp, synthetic construct
  source 1..75: mol_type = other DNA
gggatgccccttatgctaaatatctacgccgcattgcggccgataagacgcatagcggctacttttccatcgaca

SEQ ID NO: 666117 - DNA, 75 bp, synthetic construct
  source 1..75: mol_type = other DNA
gtcgctggaaatcacggccgagcactttcaggagacctaccacaagaaggcccgctcctttatttacaactctaa

SEQ ID NO: 666118 - DNA, 75 bp, synthetic construct
  source 1..75: mol_type = other DNA
cgatattttctgccctggcggtgctgactggcattgtgatggtgacacgcgagaaatccccccatcagccgatga

SEQ ID NO: 666119 - DNA, 75 bp, synthetic construct
  source 1..75: mol_type = other DNA
atggccaggtgcgcgctcattcttaaaatatcactggcaatgctggcatttgcggcaaactccattctgtgtcgt

SEQ ID NO: 666120 - DNA, 75 bp, synthetic construct
  source 1..75: mol_type = other DNA
catcatcgagcatctggcctatgacacgctagaagacaagtttgatttggacatctttaccacgggtcagagcaa

SEQ ID NO: 666121 - DNA, 75 bp, synthetic construct
  source 1..75: mol_type = other DNA
cgcacatgtgtcatcgcatgattgccctgacagcgaagcccgggcaatttattataacagccgtcattttggtaa

SEQ ID NO: 666122 - DNA, 75 bp, synthetic construct
  source 1..75: mol_type = other DNA
ctgctgtggtggcatttctggtaacagcgagcgggctgacattggttgggattggttcggcgttttggggattaa

SEQ ID NO: 666123 - DNA, 75 bp, synthetic construct
  source 1..75: mol_type = other DNA
acaatattcgtacacttcgcgcacaggctcgtgaaactgatctggaaacgctggaagagatgctggaaaagttaa

SEQ ID NO: 666124 - DNA, 75 bp, synthetic construct
  source 1..75: mol_type = other DNA
gatgaaaacggtaatgagcagacttggacgggtcagggtcgcactcctaaagcgatcgctgctgctatcgaactt

SEQ ID NO: 666125 - DNA, 75 bp, synthetic construct
  source 1..75: mol_type = other DNA
tcctcatctctgttcagtgaggtctgcagtgagctgcttgcgcgcgttcataccctgggggaccgccgttacatt

SEQ ID NO: 666126 - DNA, 75 bp, synthetic construct
  source 1..75: mol_type = other DNA
taaggcaatcagtcttctgcccggcgaattggttgaactggattatgttgtagcgcatatcacccaatccacttc

SEQ ID NO: 666127 - DNA, 75 bp, synthetic construct
  source 1..75: mol_type = other DNA
aaatcagcgtctctagttcggatgcaaccaatctcacccggccaggtcagtacacgccctcctctttccacttcc

SEQ ID NO: 666128 - DNA, 75 bp, synthetic construct
  source 1..75: mol_type = other DNA
cagatgcgcagtgaacacgtgacatcatctgatgatccgtttgccagcgaagaaggcaaaacgtgtcgtcaatat

SEQ ID NO: 666129 - DNA, 75 bp, synthetic construct
  source 1..75: mol_type = other DNA
ccattgagttgttctgtgcgccaggcgaaattccctctgcccgattaccgatgagcgatgtgcgtttttattccc

SEQ ID NO: 666130 - DNA, 75 bp, synthetic construct
  source 1..75: mol_type = other DNA
tgccaccgcccagcctacggaaaaaaaagaagaagagtgggatccggcaatctggctgaaagaactggctaacct

SEQ ID NO: 666131 - DNA, 75 bp, synthetic construct
  source 1..75: mol_type = other DNA
gatgataacggtaatgagcagacttggactggtcagggccgtactccgaaagcaatagtggctgctattgaggca

SEQ ID NO: 666132 - DNA, 75 bp, synthetic construct
  source 1..75: mol_type = other DNA
ggacgggccaaggtcgtactcctaaagcaatcgctgctgctatcgaagctggtaaaacgctggaagacttcgcga

SEQ ID NO: 666133 - DNA, 75 bp, synthetic construct
  source 1..75: mol_type = other DNA
agatggcatagacccggcagagttgctttcaactgttaactcatcttcttccaagaccggagcgaaacgcgcccc

SEQ ID NO: 666134 - DNA, 75 bp, synthetic construct
  source 1..75: mol_type = other DNA
tccagtctgacgggcgtgatggcgcagcgactggtccgcacgctgtgcaccgactgccgtcagcccgcgcctgcc

SEQ ID NO: 666135 - DNA, 75 bp, synthetic construct
  source 1..75: mol_type = other DNA
gctcttaacctggtcagtaatcatccgcttgatgtgcgtttggtgaataatcgtaaggttcctgtagagatagag

SEQ ID NO: 666136 - DNA, 75 bp, synthetic construct
  source 1..75: mol_type = other DNA
ccatgcaaaatatctgaacagcgagaaccttcaccgctttgatgggttcgcgggtgaaaacatggacgcccgttc

SEQ ID NO: 666137 - DNA, 75 bp, synthetic construct
  source 1..75: mol_type = other DNA
ggtttatcagactgacaatgccacgctctgtcgtgggaatgcgctggaaatattgccgctgattgagccagaaag

SEQ ID NO: 666138 - DNA, 75 bp, synthetic construct
  source 1..75: mol_type = other DNA
gccctacaggatatgtgatgacgggcacccggatgtacggcataggtgatggcgttgatgaggagcatgtggatg

SEQ ID NO: 666139 - DNA, 75 bp, synthetic construct
  source 1..75: mol_type = other DNA
gttttgaggaatcaacttacgccagaactcaggctaaattctgcattgatggtcccctgcttcataccaggggcc

SEQ ID NO: 666140 - DNA, 75 bp, synthetic construct
  source 1..75: mol_type = other DNA
gaaatacggaaagccgtttgtagcctggaggtaagtagaggtgaaaaaataaagctaagtagtttggtgaccgac

SEQ ID NO: 666141 - DNA, 75 bp, synthetic construct
  source 1..75: mol_type = other DNA
tgccattggctgaacgctaccgggtaccagataaataccgtcttaagccagagtgtgatgagcgcccatccccat

SEQ ID NO: 666142 - DNA, 75 bp, synthetic construct
  source 1..75: mol_type = other DNA
cgacagggaatatcttacagatcgaaattccttattcattactaccctcgttaatcactacccgtgaaggtgaat

SEQ ID NO: 666143 - DNA, 75 bp, synthetic construct
  source 1..75: mol_type = other DNA
gcaggcttttgttgacctggcaggtgacaatcatctggaaattgcgccagagcagcgccttgcctgtctctcctg

SEQ ID NO: 666144 - DNA, 75 bp, synthetic construct
  source 1..75: mol_type = other DNA
ttaaccgatgcgtttcaggccagtggctttacatggcgcggcatcattgcgtggaacaaggggagggggtcacga

SEQ ID NO: 666145 - DNA, 75 bp, synthetic construct
  source 1..75: mol_type = other DNA
aaggagctgaaacacagggggatgcttactttaccgcgtttggcctgcggaatgttgatactgaatcttactgcg

SEQ ID NO: 666146 - DNA, 75 bp, synthetic construct
  source 1..75: mol_type = other DNA
aacattttagtctgtatattgatgggtataagcgggttaggaagatgagagacctagcgttttgggagttgctga

SEQ ID NO: 666147 - DNA, 75 bp, synthetic construct
  source 1..75: mol_type = other DNA
taccaaattccacgctggcgctaacgtaggttacggtcgtgaccacactcggtttgctaaagcagacggcaaagt

SEQ ID NO: 666148 - DNA, 75 bp, synthetic construct
  source 1..75: mol_type = other DNA
tagccaagtttaaagacctgactccaccaccattcagcaaggttgtctcgcataaatccgatattgcccaggaat

SEQ ID NO: 666149 - DNA, 75 bp, synthetic construct
  source 1..75: mol_type = other DNA
cgagaccgacagctacacgggtgagaaatcggtggtgtattcgcacgatggcaaggaaatggggaaactcttgct

SEQ ID NO: 666150 - DNA, 75 bp, synthetic construct
  source 1..75: mol_type = other DNA
cgacctctctggtggtcatcggcactctgctgctctccggctgcgacagcaaggaagatgcaggcgtgaagacga

SEQ ID NO: 666151 - DNA, 75 bp, synthetic construct
  source 1..75: mol_type = other DNA
gatgtcagcgaagaatggtcacaggttgactatttatccggtcccaccttgcaggttttacgtacccaccagtcg

SEQ ID NO: 666152 - DNA, 75 bp, synthetic construct
  source 1..75: mol_type = other DNA
tagccaggtttaaggacctgactccgccaccgttcagcaaggttgtgtcgcataaatccgatattgcccaggaat

SEQ ID NO: 666153 - DNA, 75 bp, synthetic construct
  source 1..75: mol_type = other DNA
atgaagaaattgtatccacctctgcttcccgttctgacagttatcggtgccatgggagtctctggctgcgacagt

SEQ ID NO: 666154 - DNA, 75 bp, synthetic construct
  source 1..75: mol_type = other DNA
gccggtaaggcgaagctgaaaagcgagcgcctgccggattaccagccatggattgatggcgtactggcagcggat

SEQ ID NO: 666155 - DNA, 75 bp, synthetic construct
  source 1..75: mol_type = other DNA
cggcactagcaataactacagcgacaatcatggtaaagaaggattaggcggcacgctggacctgattgagcggcg

SEQ ID NO: 666156 - DNA, 75 bp, synthetic construct
  source 1..75: mol_type = other DNA
aactcgcggctgaagtggcaaaagacgcactcagcagcgcacgtgaagtaaaggtgatacatgaccgcctggaag

SEQ ID NO: 666157 - DNA, 75 bp, synthetic construct
  source 1..75: mol_type = other DNA
aactcgccaaaaacgtcgctaaagacgcgctcgacagttcccgggaaatgaaggcgattcatgaccgcctagatg

SEQ ID NO: 666158 - DNA, 75 bp, synthetic construct
  source 1..75: mol_type = other DNA
tttgctaaagaaaactttgatcttatccgtggagagtttatcgtttttgtacgaagagaatcctctattaaagat

SEQ ID NO: 666159 - DNA, 75 bp, synthetic construct
  source 1..75: mol_type = other DNA
aattcgtggtgccgagacgtttgcggtacataccgacagttatatgaaacacgtcatcctggctgacagtacccg

SEQ ID NO: 666160 - DNA, 75 bp, synthetic construct
  source 1..75: mol_type = other DNA
ctggattaacggggagcatacggatctgattccgttctccccgtcgaagtttgagaggtggatggaagacagtaa

SEQ ID NO: 666161 - DNA, 75 bp, synthetic construct
  source 1..75: mol_type = other DNA
cgcgatcagcgccgggcgatgctccaagattgggccgacatgatcgacgagtggacaatcaggaagacccgcctc

SEQ ID NO: 666162 - DNA, 75 bp, synthetic construct
  source 1..75: mol_type = other DNA
tttaggctatatccagtatatatagtttgtcttattttatgcacatatctcctatcaaagccaatagatttaagc

SEQ ID NO: 666163 - DNA, 75 bp, synthetic construct
  source 1..75: mol_type = other DNA
gcggtcagatacgattaagggtttatcgctggctgaagacagtaacggtacgaaaggctatgtttttgttggtga

SEQ ID NO: 666164 - DNA, 75 bp, synthetic construct
  source 1..75: mol_type = other DNA
atggtggtgggtaaacagcggatgccagaaagtcgctgctatttttatcaggatctgatgttacctgtgttactc

SEQ ID NO: 666165 - DNA, 75 bp, synthetic construct
  source 1..75: mol_type = other DNA
cgatgtcaccgacgagcaggcgaaatggcgcgatgacgccattatgcgctcgcaatctacttcgcttattgaacg

SEQ ID NO: 666166 - DNA, 75 bp, synthetic construct
  source 1..75: mol_type = other DNA
catcccgcaaagctatgcaatggcgattgcccgtcaggagagcgcctggaatccgaaagtgaagtcaccggtagg

SEQ ID NO: 666167 - DNA, 75 bp, synthetic construct
  source 1..75: mol_type = other DNA
cgagccgactcactggatgagcagcgtagccgttacgcgcaaatcaagcaggcctgggataatcgacaaatggat

SEQ ID NO: 666168 - DNA, 75 bp, synthetic construct
  source 1..75: mol_type = other DNA
ccctacgcttcctccggctcgtacgctgcaatcacgtttcgtcaatgaactggcgagacgcgaagactggcgtgg

SEQ ID NO: 666169 - DNA, 75 bp, synthetic construct
  source 1..75: mol_type = other DNA
gcgttcaggcaacgatcgccgggaagctgtgggatcatctggaagagcgattcccgctggcctacaacgatcttt

SEQ ID NO: 666170 - DNA, 75 bp, synthetic construct
  source 1..75: mol_type = other DNA
tcagatggccgcggtggcgtttgccagtgtggcgcggcaggatgtagaaaacgcacgactgatgatcccttcact

SEQ ID NO: 666171 - DNA, 75 bp, synthetic construct
  source 1..75: mol_type = other DNA
tatggtaacttagttctggatactattgataaaaatatagatttagagtatttgctttcagcatttaaatatgag

SEQ ID NO: 666172 - DNA, 75 bp, synthetic construct
  source 1..75: mol_type = other DNA
gattttactacgataaaactttcgtagaaaaggatagcaattatgttgtttgcgaaattttcatccccgttcgcc

SEQ ID NO: 666173 - DNA, 75 bp, synthetic construct
  source 1..75: mol_type = other DNA
ccgttcatttaacgtcttctgcgatgatgtatatgagtacacaatcaaggatcgcggcggtcgctggactgttga

SEQ ID NO: 666174 - DNA, 75 bp, synthetic construct
  source 1..75: mol_type = other DNA
tgggagttagcatgtccaattgcgtgctggcgggtgatggatcgcctgaactgaaatcagaaagccaggctgtta

SEQ ID NO: 666175 - DNA, 75 bp, synthetic construct
  source 1..75: mol_type = other DNA
aacggcagcgatattgagcgcttttattacaatgaagatttcgtagaaaaggatggcaatgatgttgtttgcgaa

SEQ ID NO: 666176 - DNA, 75 bp, synthetic construct
  source 1..75: mol_type = other DNA
acggtatgtgaatatgctgacatgccaaaagagtggacaacgacccgaggactttatgatcctacccacgtaata

SEQ ID NO: 666177 - DNA, 75 bp, synthetic construct
  source 1..75: mol_type = other DNA
gttattaattttgctatgggagcaggactaagagagataataaaaaaggtatataacgatactcgatttacagat

SEQ ID NO: 666178 - DNA, 75 bp, synthetic construct
  source 1..75: mol_type = other DNA
gccgatttcgcgagggccttaaaacagtacgtccggattaattctgtacgacgggttgttcagttcgatgacggc

SEQ ID NO: 666179 - DNA, 75 bp, synthetic construct
  source 1..75: mol_type = other DNA
ggcaaatcgggccacattggtaagaaaatcgccgcaacacttgccagtaccggcacaccggcttttttgtccatc

SEQ ID NO: 666180 - DNA, 75 bp, synthetic construct
  source 1..75: mol_type = other DNA
ctgaaatcagaaagtcaggctgttattcgtaatgctggttatcaatgtgacaaagtgaatggtgtcttccctgct

SEQ ID NO: 666181 - DNA, 75 bp, synthetic construct
  source 1..75: mol_type = other DNA
atggtggcgtgtggcatgttgttctgccttgcttccggtgactttgacctttctgtcgcctccgtaattgcctga

SEQ ID NO: 666182 - DNA, 75 bp, synthetic construct
  source 1..75: mol_type = other DNA
actcagggcaaaaaaatgcagatagttgacctgaagacagaaggtgcaggattacatggcgtcgctcgtctgaca

SEQ ID NO: 666183 - DNA, 75 bp, synthetic construct
  source 1..75: mol_type = other DNA
ggcgggcagaagaggctgaagccagcggcaacctgcaggtgagcgtggaagaccttgtcagaaccggggcgtttc

SEQ ID NO: 666184 - DNA, 75 bp, synthetic construct
  source 1..75: mol_type = other DNA
atttctatgaagtcggtggttggagtaagatgcttttttcggaccgggacctttttcttaagtataatattgatc

SEQ ID NO: 666185 - DNA, 75 bp, synthetic construct
  source 1..75: mol_type = other DNA
tttactgatggagggtaaaaaagcaaaaatacgagtatctttattatcattagttggttttttatgtgccttggt

SEQ ID NO: 666186 - DNA, 75 bp, synthetic construct
  source 1..75: mol_type = other DNA
ggaccccaataccgccaattacaaaggacgctgtgtcagtctgcaaaaactggttaatcaccagtcattcacact

SEQ ID NO: 666187 - DNA, 75 bp, synthetic construct
  source 1..75: mol_type = other DNA
gggatctcgcaaatatcttcccttcttttttaatacgtcaacagcaaaagacggagtgtagattagtcaactttc

SEQ ID NO: 666188 - DNA, 75 bp, synthetic construct
  source 1..75: mol_type = other DNA
cttgatattgagtttaatggtcaaacagtcagtaaatggactttatcttcggagaataacaactcgaagacaggc

SEQ ID NO: 666189 - DNA, 75 bp, synthetic construct
  source 1..75: mol_type = other DNA
gctgccttttgtgaacatttcacgctgacaggccggatagatgagttacccaatctgttcgcaaaaaaacaggcg

SEQ ID NO: 666190 - DNA, 75 bp, synthetic construct
  source 1..75: mol_type = other DNA
acccgaatgcgtacccacattcctcggcacaacatcaatacctttcttgccatagcggaagtctctgaccacttg

SEQ ID NO: 666191 - DNA, 75 bp, synthetic construct
  source 1..75: mol_type = other DNA
caattactggaggaggatggcacctcgacgcggatgcgtacccacattccccggcacaacatcaatacctttctt

SEQ ID NO: 666192 - DNA, 75 bp, synthetic construct
  source 1..75: mol_type = other DNA
gcaaaccgggtgctggcattagataaactggactttcattttctaaatatatatatccataaaatccgccctcaa

SEQ ID NO: 666193 - DNA, 75 bp, synthetic construct
  source 1..75: mol_type = other DNA
aaatttttaggcaacgttgagcctgatggatcagtattagaccggccaactggcggccacggaacacatggcaat

SEQ ID NO: 666194 - DNA, 75 bp, synthetic construct
  source 1..75: mol_type = other DNA
tgctgccttttgtgaacatttcacgctgacaggccggatagatgagctacccaatctgattgccaaaaaacaggc

SEQ ID NO: 666195 - DNA, 75 bp, synthetic construct
  source 1..75: mol_type = other DNA
gattttattacaatgaaaacttcgtcgaaattgatagcaataacattgtttgcgaaatttttatccccgttcgtc

SEQ ID NO: 666196 - DNA, 75 bp, synthetic construct
  source 1..75: mol_type = other DNA
attaactttcgcggcgcacaattggcctcagatgacaatatgttacccgatagccaaagaggatttgccccggtg

SEQ ID NO: 666197 - DNA, 75 bp, synthetic construct
  source 1..75: mol_type = other DNA
cgctggggcagccgttaaacgatacggttgtgctgattaaagcgcctggagcaaaagatgtaaaagtcgaaaacc

SEQ ID NO: 666198 - DNA, 75 bp, synthetic construct
  source 1..75: mol_type = other DNA
cctgcgtaccattaacttcgatgatcaatgaagccactgcgcatttagatgttggcctgcagcggcttaacctca

SEQ ID NO: 666199 - DNA, 75 bp, synthetic construct
  source 1..75: mol_type = other DNA
ttgcaggtttatacggtacgttgcttgaagacaacaaccttagttatagcgtgcaaacaggttatgccggtggtg

SEQ ID NO: 666200 - DNA, 75 bp, synthetic construct
  source 1..75: mol_type = other DNA
tgacttacaggtaacgattaaagaggctgacggcagcacgcagatctttaccgtaccgtattcgtcagtaccgct

SEQ ID NO: 666201 - DNA, 75 bp, synthetic construct
  source 1..75: mol_type = other DNA
caaatcgctcaatgagtcaggcacgaatattcagttagtgggttaccgttattcgaccagcggatattttaattt

SEQ ID NO: 666202 - DNA, 75 bp, synthetic construct
  source 1..75: mol_type = other DNA
gtgctgaaccaacagccgtatggatttaacacgcgttttgaaggcgaaaaaggaaccaaccctgaagaactgatt

SEQ ID NO: 666203 - DNA, 75 bp, synthetic construct
  source 1..75: mol_type = other DNA
gaaaacgtggtgtaccggctgtccggaatgtatgagtttgttgtgaataataccccagaacatacagagcactcc

SEQ ID NO: 666204 - DNA, 75 bp, synthetic construct
  source 1..75: mol_type = other DNA
gacgccatcagaaccggcgcgtttctggtggcgatgtccctgtggcataaccatccgaagaagacaaagctgcct

SEQ ID NO: 666205 - DNA, 75 bp, synthetic construct
  source 1..75: mol_type = other DNA
aagagcgaagttgcggtgccgggtattgatgcctctacctttgacggcatcatccagaaagcaaaagcaggatgc

SEQ ID NO: 666206 - DNA, 75 bp, synthetic construct
  source 1..75: mol_type = other DNA
gttcgtcaataaagatcctaacttgatcaccgccattctcgacataacggacagcgaattaaaagaggatttatt

SEQ ID NO: 666207 - DNA, 75 bp, synthetic construct
  source 1..75: mol_type = other DNA
aaaaacccaaacttaatcaccgccatctacgacataaaggatagcccattaaaagaggagttattacaaaacctc

SEQ ID NO: 666208 - DNA, 75 bp, synthetic construct
  source 1..75: mol_type = other DNA
atcataccgctgcagactacttacgtcagtttgatttattcgtactgaactttatctctcgtggtaattttgtca

SEQ ID NO: 666209 - DNA, 75 bp, synthetic construct
  source 1..75: mol_type = other DNA
gctgaacgtcagcgtctgaaagagctggaacgtgaaaatcgtgaactgcgccgcagtaacgatatccttcgccag

SEQ ID NO: 666210 - DNA, 75 bp, synthetic construct
  source 1..75: mol_type = other DNA
gttcgccagcatgagcgggataccgggagcggtgatggtgggctcaccagcgctgaacgtcagcgtctgaaagag

SEQ ID NO: 666211 - DNA, 75 bp, synthetic construct
  source 1..75: mol_type = other DNA
ctgaagtccgtcaacgggcagtccgtatggttctggaaagtcagggcgaatatgactcacaatgggtgacaattt

SEQ ID NO: 666212 - DNA, 75 bp, synthetic construct
  source 1..75: mol_type = other DNA
gccgtcgtcagccgatgtggcaacgatgcgcgaaatggcagaacgggccggatttcaggttaccgtgggaggtta

SEQ ID NO: 666213 - DNA, 75 bp, synthetic construct
  source 1..75: mol_type = other DNA
ttatatcgatattgctgccgagcagtttggatacccttctttcattgtcaaaaatgccaatgacgtgtcggactt

SEQ ID NO: 666214 - DNA, 75 bp, synthetic construct
  source 1..75: mol_type = other DNA
ttcttacgccaatcctggagcttgcagaagaagcccataagtccttaaaagagaaccttaaggaaattggaacaa

SEQ ID NO: 666215 - DNA, 75 bp, synthetic construct
  source 1..75: mol_type = other DNA
attttttgcgctcccaacccaaagcctgtcactatggggcgcgtatttcagaccggcgtcgagcgtgtactcttt

SEQ ID NO: 666216 - DNA, 75 bp, synthetic construct
  source 1..75: mol_type = other DNA
tcaggcagatccatctgttaccgtttcatcagtacggcgaaccgaaataccgcctgctggggaaaacatggtcga

SEQ ID NO: 666217 - DNA, 75 bp, synthetic construct
  source 1..75: mol_type = other DNA
gcggattggtcgtgatatcagcctcgacgctctggaacgggaagtgatgaaggatgacattttctttcgcacgtc

SEQ ID NO: 666218 - DNA, 75 bp, synthetic construct
  source 1..75: mol_type = other DNA
actgattgaactgtggcgcgaagccctcaagcaacacagcgatccggtactggcgtgggcatcgattatgaacga

SEQ ID NO: 666219 - DNA, 75 bp, synthetic construct
  source 1..75: mol_type = other DNA
acagcgacatgccgatgctggtaatgctggaacctcgcgacgatggtagctacgttcccgggcgcatgatccgcg

SEQ ID NO: 666220 - DNA, 75 bp, synthetic construct
  source 1..75: mol_type = other DNA
cgatcacgtctcctataacgcgggatacaccaacgttcatgagttaattccgtggcgcacgctgtcgggacgcca

SEQ ID NO: 666221 - DNA, 75 bp, synthetic construct
  source 1..75: mol_type = other DNA
cgtttttctacaatcactccagccaatggcgctatgaaaaagtcaccgcccaggaactgctctcaccgctggccg

SEQ ID NO: 666222 - DNA, 75 bp, synthetic construct
  source 1..75: mol_type = other DNA
tccgctccaactggcaggaacttaaccaactgattgccgccgctaacgtctggaccatcaaaatctatggtccgg

SEQ ID NO: 666223 - DNA, 75 bp, synthetic construct
  source 1..75: mol_type = other DNA
tcagaaatggggcattcactccacttatagtgaaaacctgttgatgctgacgctctcacgcggtggaccgattgt

SEQ ID NO: 666224 - DNA, 75 bp, synthetic construct
  source 1..75: mol_type = other DNA
acctgacattagccgatggcaacacctgtccggtggtcagcgtttatgatttggtactggcgaattacggcctcg

SEQ ID NO: 666225 - DNA, 75 bp, synthetic construct
  source 1..75: mol_type = other DNA
gcgtatggcctgcgagcagccagataacggcagcaatcatccgcgtaacctgtttgtctggcgttctaacctgct

SEQ ID NO: 666226 - DNA, 75 bp, synthetic construct
  source 1..75: mol_type = other DNA
actactcggaagtagcaaaactgtgcgaccagtggctggcgccaaagcaaggcaccgatagcgcgctggcaatgg

SEQ ID NO: 666227 - DNA, 75 bp, synthetic construct
  source 1..75: mol_type = other DNA
cgggcaaagcggcggcggctgggcgcattacgttggtcaggaaaaactgcgcccgcaaaccggctggctgccgct

SEQ ID NO: 666228 - DNA, 75 bp, synthetic construct
  source 1..75: mol_type = other DNA
ctatgactggtattgcgacctgccacccgcctcaccgatgacctggggcgagcaaaccgacgtccctgaatctgc

SEQ ID NO: 666229 - DNA, 75 bp, synthetic construct
  source 1..75: mol_type = other DNA
aaattaccggtgtgccgcgccagtatattgaaaccatcgctcgtgaatttgccgatactgcccataaaacgcatg

SEQ ID NO: 666230 - DNA, 75 bp, synthetic construct
  source 1..75: mol_type = other DNA
ttatatcgatattgcggccgagcagttcggctacccttcgtttatcatcaaaaatgcaaatgacgtgtcagggtg

SEQ ID NO: 666231 - DNA, 75 bp, synthetic construct
  source 1..75: mol_type = other DNA
acgttgctgtttattgccattttttatggcggcgacgtctgccgtacgctggtggctaacggcgcgattcccctc

SEQ ID NO: 666232 - DNA, 75 bp, synthetic construct
  source 1..75: mol_type = other DNA
tatcgccttattgggagggattgtcggcctggggcagttatcgaaaaacagtgagcttaccgccattcgcagcac

SEQ ID NO: 666233 - DNA, 75 bp, synthetic construct
  source 1..75: mol_type = other DNA
caaatcatggtcaatctgggattgctatttgcgttgagcgcacctgttaccgcgctcggtttaccggtagcgttt

SEQ ID NO: 666234 - DNA, 75 bp, synthetic construct
  source 1..75: mol_type = other DNA
gaacgggaggctgaaagagaagctatgagggccgaaagcgaacggcgcaagcagctggcaaaggaacgtcctaaa

SEQ ID NO: 666235 - DNA, 75 bp, synthetic construct
  source 1..75: mol_type = other DNA
cagaacagaacaacaaggacgacaaaaccttcacgctgaccaccgagcagggcgaaaagctgttctccacggtga

SEQ ID NO: 666236 - DNA, 75 bp, synthetic construct
  source 1..75: mol_type = other DNA
atgaatattttcagtcgctatttgatacgtcacgtgtttctcggctttacggctgcggctggattactgcttccg

SEQ ID NO: 666237 - DNA, 75 bp, synthetic construct
  source 1..75: mol_type = other DNA
gctgattacgcaaaactgcgtccggcatttgaccgtaaacacggaacggtaactgcggcgaacagtacgcctctg

SEQ ID NO: 666238 - DNA, 75 bp, synthetic construct
  source 1..75: mol_type = other DNA
ctggaatgaacgtccataccgacgcatacagcgtcagccgagcttgcgctaccagtttccaggcggttgcgaacg

SEQ ID NO: 666239 - DNA, 75 bp, synthetic construct
  source 1..75: mol_type = other DNA
ctggaaaagacgttgtggctggcgggtgaaaccgagacgctggctgatttatacatcaaatgtggcggattacat

SEQ ID NO: 666240 - DNA, 75 bp, synthetic construct
  source 1..75: mol_type = other DNA
agagttatcgatgccggggaatactttttctgtccgtcagcttaatcattacatccattatttgcaggaaaccgg

SEQ ID NO: 666241 - DNA, 75 bp, synthetic construct
  source 1..75: mol_type = other DNA
gcacgaagcctttgccgcccagacgctggccaatattcagttgcttggcagcgaacgttttgctcgcgacgtact

SEQ ID NO: 666242 - DNA, 75 bp, synthetic construct
  source 1..75: mol_type = other DNA
ttacagcgtcagtcgtgcctgtgccaccagtttccaggctgttgcaaacgtcgccgaaagcctgatggcgggaac

SEQ ID NO: 666243 - DNA, 75 bp, synthetic construct
  source 1..75: mol_type = other DNA
gttatcgaatcaaccgtcgcggaactcaggtagtggattttgaccctacttgcgttcgtgctttttacaatattg

SEQ ID NO: 666244 - DNA, 75 bp, synthetic construct
  source 1..75: mol_type = other DNA
gaaaatagcggctcacagcaaggtagagaatcagtatcgccgggtagtacctgatgccggtaatctgctggcgca

SEQ ID NO: 666245 - DNA, 75 bp, synthetic construct
  source 1..75: mol_type = other DNA
gtattaacgggcaaatgtaagccgcatcaatgcccgctgtttggtaacacctgtaatcctcaaaccgcgtttggt

SEQ ID NO: 666246 - DNA, 75 bp, synthetic construct
  source 1..75: mol_type = other DNA
tatcgacgcgttcctcgcgccgggccacgtcagtatggttatcggcactgatgcctataattttatcgccagcga

SEQ ID NO: 666247 - DNA, 75 bp, synthetic construct
  source 1..75: mol_type = other DNA
cgatggaagcataataagctttttctgcttctgccggaggagtatggcccagcctttccagcaatcgtcgattgt

SEQ ID NO: 666248 - DNA, 75 bp, synthetic construct
  source 1..75: mol_type = other DNA
agattgccagccatcctgaagttatcttctgtacctttggcgacgccatgcgcgtaccgggaaaacagggttcgc

SEQ ID NO: 666249 - DNA, 75 bp, synthetic construct
  source 1..75: mol_type = other DNA
atggatgcgttgaaactggcgcaggagaatccaacccgtaaagtggtgttcttcggcttagggtttgaaaccacc

SEQ ID NO: 666250 - DNA, 75 bp, synthetic construct
  source 1..75: mol_type = other DNA
acgcgaacggcaacaaaaaatgggttgcagtagaatctgacgccaacggtgatttctcctacggctggctgacga

SEQ ID NO: 666251 - DNA, 75 bp, synthetic construct
  source 1..75: mol_type = other DNA
tatgaaaattattatttatattttaatatgttatctaagggaatagattaccggcaaattaatattgtggcacct

SEQ ID NO: 666252 - DNA, 75 bp, synthetic construct
  source 1..75: mol_type = other DNA
cacggtgattttatcatcgaaagtttcagtggtatgcgagcaagggttaaggtcgaagccggatgtatgatgggg

SEQ ID NO: 666253 - DNA, 75 bp, synthetic construct
  source 1..75: mol_type = other DNA
ctccagaaagagctgaaacgggttaccgacgaacgggacatattaaaaaaagccgctgtagattcaattggtcaa

SEQ ID NO: 666254 - DNA, 75 bp, synthetic construct
  source 1..75: mol_type = other DNA
gctggcctgcacgctttttgcatggaatcgcaactacttcattctcctctcaacgggcgtacttctgagtagttt

SEQ ID NO: 666255 - DNA, 75 bp, synthetic construct
  source 1..75: mol_type = other DNA
aacagacgccttatcttcgtgcggtcgatattttgcgggcgcgacaggctacaggtctgctgcgccgctgccata

SEQ ID NO: 666256 - DNA, 75 bp, synthetic construct
  source 1..75: mol_type = other DNA
cagagcgtctgccccggttaaaacagcgttatgaacgcacttgttgcctggccagtcgccccggtttgggccatt

SEQ ID NO: 666257 - DNA, 75 bp, synthetic construct
  source 1..75: mol_type = other DNA
attattgcccgtagcttaagcgaacttgttgccattcgcgaagagattgagccgttattgatcattaacaacagc

SEQ ID NO: 666258 - DNA, 75 bp, synthetic construct
  source 1..75: mol_type = other DNA
gcaagcacaggtaatttctgccgataatgtgcaggggttgctgcaaagggtgccgggcatcgcgtcattgaatat

SEQ ID NO: 666259 - DNA, 75 bp, synthetic construct
  source 1..75: mol_type = other DNA
gtctgggttcgccagcatgagcgggataccggggcggtgatggtgggctcaccaccgctgaacgtcagcgtctga

SEQ ID NO: 666260 - DNA, 75 bp, synthetic construct
  source 1..75: mol_type = other DNA
gcgttatgaacgcacttgttgcctggccagtcgccccggtttgggccatttcattgatgagacagaagagaaacg

SEQ ID NO: 666261 - DNA, 75 bp, synthetic construct
  source 1..75: mol_type = other DNA
ggtgataacgctgtaagaaccctgacgggtttgatagagaaacaacatcagcaagcgcaaataatttctgccgat

SEQ ID NO: 666262 - DNA, 75 bp, synthetic construct
  source 1..75: mol_type = other DNA
tcgcgaagagattgagccgttattgatcattaataacagccattatttactggatgatgcggtcaataattgcat

SEQ ID NO: 666263 - DNA, 75 bp, synthetic construct
  source 1..75: mol_type = other DNA
tggcgggcgtaacacgagacaaccttcagcatttatccacggcctgcgacaaccaacaccgctggccgctgatgc

SEQ ID NO: 666264 - DNA, 75 bp, synthetic construct
  source 1..75: mol_type = other DNA
gaggtgaataacgaagtcattaaccatgtcttgatcgcctgcgccgccgccgatgcgcgtcatgagctaaaaata

SEQ ID NO: 666265 - DNA, 75 bp, synthetic construct
  source 1..75: mol_type = other DNA
tcaacaattaaccaccgcctgcgaaaagcaacgtcgctggccgctgatgcaaggcgactatctctcaagcctgat

SEQ ID NO: 666266 - DNA, 75 bp, synthetic construct
  source 1..75: mol_type = other DNA
gtttgggccatttcattgatgagacagaagagaaacgcgttatcttgctggcgaacttgctgcgcaaagatccgt

SEQ ID NO: 666267 - DNA, 75 bp, synthetic construct
  source 1..75: mol_type = other DNA
cgttgaatatagcggcctgtttcttggtgataacgctgtaagaacgttgacggggttgatagaaaaacagcatca

SEQ ID NO: 666268 - DNA, 75 bp, synthetic construct
  source 1..75: mol_type = other DNA
ggcaatatattgattgcctctcctgcaatggtgttcagcttattcctgtactgcacggagccgaggctccagcat

SEQ ID NO: 666269 - DNA, 75 bp, synthetic construct
  source 1..75: mol_type = other DNA
ctacgcccggcattatcagagcggggcagcaatgcctgacgaactgcaacagaaaatgcgtaatgccagcttgtt

SEQ ID NO: 666270 - DNA, 75 bp, synthetic construct
  source 1..75: mol_type = other DNA
ctgcacggcctttttgcctgccagcgttatgccacgctttccggcaccaacacgccgcgtgattttgtcgaattt

SEQ ID NO: 666271 - DNA, 75 bp, synthetic construct
  source 1..75: mol_type = other DNA
tccccattttgatcaaattgccaatcatcactatcgcccggcattcgatgagggaatgcagcaaaagcgggcaga

SEQ ID NO: 666272 - DNA, 75 bp, synthetic construct
  source 1..75: mol_type = other DNA
accctgacaatgccctgcaactctggcaggcttttgttgatctggcaggtgacaatcaactggaaattgcgccag

SEQ ID NO: 666273 - DNA, 75 bp, synthetic construct
  source 1..75: mol_type = other DNA
gttgcatcccctagtgttggcctaccatttacaactggtacaaactatctgcgcagagcaggaacaatacgactc

SEQ ID NO: 666274 - DNA, 75 bp, synthetic construct
  source 1..75: mol_type = other DNA
tgcgctggcattgcctggaagaaaacgaagcaatgcaggatgtcgatgatttcgaattgcgggcgctggtggcgg

SEQ ID NO: 666275 - DNA, 75 bp, synthetic construct
  source 1..75: mol_type = other DNA
gaagcatcggcactaacccccagtaatgtccgcaatacaccattacagatcttgtttggtcatgatgctgtgcgt

SEQ ID NO: 666276 - DNA, 75 bp, synthetic construct
  source 1..75: mol_type = other DNA
taccggcggcaacccctgatattagcaatactccattacagatcctgtttggttatgatgctgcgcgtcagagcc

SEQ ID NO: 666277 - DNA, 75 bp, synthetic construct
  source 1..75: mol_type = other DNA
tgagctgaaacgttatttacagcaggacattctggaaccacaaacgctggcatcacaattgtaccgggcgctctt

SEQ ID NO: 666278 - DNA, 75 bp, synthetic construct
  source 1..75: mol_type = other DNA
atcagtgcgaatacatcgtctggggcagcaaaggccatttagataaatcgccttcggggccgttcgacggctgca

SEQ ID NO: 666279 - DNA, 75 bp, synthetic construct
  source 1..75: mol_type = other DNA
tcctggggtaaaggtggatttcagcaaggggcaatacatgatgggccaccaccttaacgtgttcatcggtgtcgc

SEQ ID NO: 666280 - DNA, 75 bp, synthetic construct
  source 1..75: mol_type = other DNA
atccacttcactgactggaggaaccgatgccggtcaatgtggggaagtctgtatcaaagaaaacgtggtctatgt

SEQ ID NO: 666281 - DNA, 75 bp, synthetic construct
  source 1..75: mol_type = other DNA
aaatatcattacggctgccggtatcgaacaaataaaacattttctggcgacggcatttattcgccaacagccgga

SEQ ID NO: 666282 - DNA, 75 bp, synthetic construct
  source 1..75: mol_type = other DNA
aagggcaaagtttgccggttggcgtgggccagccaacgctgaaagttgataacctgactgttggcggtaccgcgt

SEQ ID NO: 666283 - DNA, 75 bp, synthetic construct
  source 1..75: mol_type = other DNA
caacacctatatgctgccgggtaaatcgaccccgcaggaaattattgaatccgttgagtacggtatctatgcacc

SEQ ID NO: 666284 - DNA, 75 bp, synthetic construct
  source 1..75: mol_type = other DNA
acgttgattggttccggtatcgaaaccatgcagcagatttcgatggtgggtaacgacctgaaactggataacggc

SEQ ID NO: 666285 - DNA, 75 bp, synthetic construct
  source 1..75: mol_type = other DNA
ctggaacgtgaaaatcgtgaactgcgccgcagtaacgatatccttcgccaggctccgcttatttgcgaaggcgga

SEQ ID NO: 666286 - DNA, 75 bp, synthetic construct
  source 1..75: mol_type = other DNA
gccgcagtagcgatatccttcgccaggcttccgcttattttgcgaaggcggagttcgaccgcctctggaaaaaat

SEQ ID NO: 666287 - DNA, 75 bp, synthetic construct
  source 1..75: mol_type = other DNA
gttccattgccccaaagattggctgtacaccggagactctgcgtgtctgggtacgacagcatgagcgggataccg

SEQ ID NO: 666288 - DNA, 75 bp, synthetic construct
  source 1..75: mol_type = other DNA
cttcagaactgtgtaccgtggttgatgacggtacgatggtcgatcgccgtggttcggtggcgattgatgacgaag

SEQ ID NO: 666289 - DNA, 75 bp, synthetic construct
  source 1..75: mol_type = other DNA
aacgggatcctcaaaggctacatgcaggataaactcaacgcgcgcttaatggggatgacgcccactggtaatggt

SEQ ID NO: 666290 - DNA, 75 bp, synthetic construct
  source 1..75: mol_type = other DNA
ccgcgatgagttcatcatgatccgcaagatgaagaacgttaactggctggatgatgaagatcgcgatcaggtaca

SEQ ID NO: 666291 - DNA, 75 bp, synthetic construct
  source 1..75: mol_type = other DNA
gtgggtgtctgcggtaaagaagggcagagcctgccggttggcgtaggtcagccgacgctgaaagtcgataacctg

SEQ ID NO: 666292 - DNA, 75 bp, synthetic construct
  source 1..75: mol_type = other DNA
actgtgtaccgtggttgatgacggcacgatggtcgatcgccgtggttcggtggcgattgatgacgaaggtacgcc

SEQ ID NO: 666293 - DNA, 75 bp, synthetic construct
  source 1..75: mol_type = other DNA
tggtggtcaggtggatatcacctccggcaaattcgttttctccacttcagaagcgtatctgattgaaaacggtaa

SEQ ID NO: 666294 - DNA, 75 bp, synthetic construct
  source 1..75: mol_type = other DNA
tatggttctggaaagtcaggatgaatatgactcacagtgggcggcaatttgctccattgccccaaagattggctg

SEQ ID NO: 666295 - DNA, 75 bp, synthetic construct
  source 1..75: mol_type = other DNA
gttccattgctccaaagactggctgtacgcctgagactctgcgtgtctgggttcgccagcatgagcgggataccg

SEQ ID NO: 666296 - DNA, 75 bp, synthetic construct
  source 1..75: mol_type = other DNA
gttccattgctccaaagattggctgtacgccggagactctgcgtgtctgggttcgccagaatgagcgggataccg

SEQ ID NO: 666297 - DNA, 75 bp, synthetic construct
  source 1..75: mol_type = other DNA
gttccattgctccaaagattggctgtacgcctgagactctgcgtgtctgggttcgccagtatgagcgggataccg

SEQ ID NO: 666298 - DNA, 75 bp, synthetic construct
  source 1..75: mol_type = other DNA
gttccattgctccaaagagtggctgtacgccggagactctgcgtgtctgggttcgccagtatgagcgggataccg

SEQ ID NO: 666299 - DNA, 75 bp, synthetic construct
  source 1..75: mol_type = other DNA
gttccattgctccaaagagtggctgtacgcctgagactctgcgtgtctgggttcgccaggatgagcgggataccg

SEQ ID NO: 666300 - DNA, 75 bp, synthetic construct
  source 1..75: mol_type = other DNA
gttccattgctccaaagactggctgtacgcccgagactctgcgtgtctgggttcgccagtatgagcgggataccg

SEQ ID NO: 666301 - DNA, 75 bp, synthetic construct
  source 1..75: mol_type = other DNA
tgcgtgtctgggttcgccagtatgagcgggataccgggggcggagatggagggctcaccagtgctgaacgtcagc

SEQ ID NO: 666302 - DNA, 75 bp, synthetic construct
  source 1..75: mol_type = other DNA
cagggcgaatatgactcacaatgggcgacaatttgttccattgccccaaagattggctgtacgccggagactcgg

SEQ ID NO: 666303 - DNA, 75 bp, synthetic construct
  source 1..75: mol_type = other DNA
cactgaacgtcagcgtctgaaggaactggagcgtgaaaaccgcgaactgcgccgcagcaacgatatcctgcgcca

SEQ ID NO: 666304 - DNA, 75 bp, synthetic construct
  source 1..75: mol_type = other DNA
gttccattgctccaaagattggctgtacgccagagactctgcgtgtctgggttcgccaggatgagcgggataccg

SEQ ID NO: 666305 - DNA, 75 bp, synthetic construct
  source 1..75: mol_type = other DNA
gttccattgctccaaagaatggctgtacgcctgagactctgcgtgtctgggttcgccagaatgagcgggataccg

SEQ ID NO: 666306 - DNA, 75 bp, synthetic construct
  source 1..75: mol_type = other DNA
gttccattgctccaaagaatggctgtacgccagagactctgcgtgtctgggttcgccagtatgagcgggataccg

SEQ ID NO: 666307 - DNA, 75 bp, synthetic construct
  source 1..75: mol_type = other DNA
ttcacggtgtaatgccgtccatcggtgcggcggcaacctatacccgcatgaagcgtggtactgaaaatccggaat

SEQ ID NO: 666308 - DNA, 75 bp, synthetic construct
  source 1..75: mol_type = other DNA
gatcagtgccgatagaacggtgaaagatgagctttcgccggaagagcaggcatggaaattaaagggcgataacgg

SEQ ID NO: 666309 - DNA, 75 bp, synthetic construct
  source 1..75: mol_type = other DNA
atgacgatcgcctctatttaagtgagatcagtgccgatagaacggtgaaagatgagctttcgccggaagagcagg

SEQ ID NO: 666310 - DNA, 75 bp, synthetic construct
  source 1..75: mol_type = other DNA
aattcagctttttcaataaagtccgtgtgttattgaaaaatattctgaaaccagatgaaagcgttgaagacgttg

SEQ ID NO: 666311 - DNA, 75 bp, synthetic construct
  source 1..75: mol_type = other DNA
gtagtcatagctcccatcgaagccatagttctcatagatcttcgtctggtggtgggtactatggtggaagcactc

SEQ ID NO: 666312 - DNA, 75 bp, synthetic construct
  source 1..75: mol_type = other DNA
tgggatgccatttcggccagccatgaggtcattccgggcagcagccgcggggtgatttcaccggttccggaaaat

SEQ ID NO: 666313 - DNA, 75 bp, synthetic construct
  source 1..75: mol_type = other DNA
atctgctaattgctgccgaggccgttagacagtttatggaaatggcagagcaggccaaaatgctacgcgtcaaaa

SEQ ID NO: 666314 - DNA, 75 bp, synthetic construct
  source 1..75: mol_type = other DNA
cctatccagcaggcgcaaaatgaatgggccgtccgtaagcaaatgcttatcgacctgggcgctacagaagcacaa

SEQ ID NO: 666315 - DNA, 75 bp, synthetic construct
  source 1..75: mol_type = other DNA
taccggattcgataagccagttgataagccgaaaaaacagaaaaaagagaagaaatcggaagctgatcggcttgg

SEQ ID NO: 666316 - DNA, 75 bp, synthetic construct
  source 1..75: mol_type = other DNA
gcaacgctaccacaaatacaagcagaagtatctcgtcttgtatcctgggaagataacactaaaatcgtcattaat

SEQ ID NO: 666317 - DNA, 75 bp, synthetic construct
  source 1..75: mol_type = other DNA
ttaccattttccccggagtgcgccttaacatcggtaaacatggggtaagcgcaagttttggtgttcccggagcca

SEQ ID NO: 666318 - DNA, 75 bp, synthetic construct
  source 1..75: mol_type = other DNA
cagggtaaaatcacgctccttgagtaccgcgccgcgcaaaaagggatcggcaaggaactgaaagaagaattagcg

SEQ ID NO: 666319 - DNA, 75 bp, synthetic construct
  source 1..75: mol_type = other DNA
gagcagggggttctggggcattgccagtatacgctgggggaaggtcctgtcatcggtaatgttcgctgggtggtt

SEQ ID NO: 666320 - DNA, 75 bp, synthetic construct
  source 1..75: mol_type = other DNA
gcgagcaataggcttgccgcgcgacgtcgccatgatgatttttatggcttcagcgtcgcttttcatgatcatcca

SEQ ID NO: 666321 - DNA, 75 bp, synthetic construct
  source 1..75: mol_type = other DNA
aatgaagttagtattctttttaagaatcaacctgattatcttacttttttaagagcaatggatggattcgaatta

SEQ ID NO: 666322 - DNA, 75 bp, synthetic construct
  source 1..75: mol_type = other DNA
gtcgagcaggttgctaatgacctggatgcgattctcgaaaaagggatgcgcgaagctgtacgtccgttgtgctaa

SEQ ID NO: 666323 - DNA, 75 bp, synthetic construct
  source 1..75: mol_type = other DNA
ttgccctgaccacggtatatgccacgaaagcgcaggccatgcgcgccgctcaggcgaagtgggaaactgcaacgg

SEQ ID NO: 666324 - DNA, 75 bp, synthetic construct
  source 1..75: mol_type = other DNA
ttgccctgactacggtatatgccacgaaagcgcaggccatgcgcgccgctcaggcgaagtgggataaactgcaac

SEQ ID NO: 666325 - DNA, 75 bp, synthetic construct
  source 1..75: mol_type = other DNA
atataaacaataagcttggttttaatctttcactcgggtgtggaacagaaaataataaagaacggtgcttttgta

SEQ ID NO: 666326 - DNA, 75 bp, synthetic construct
  source 1..75: mol_type = other DNA
gagcagggggttctggggaattgcctctatactctgggggaaggtcctgtcataggcaatgttcgttgggtggtt

SEQ ID NO: 666327 - DNA, 75 bp, synthetic construct
  source 1..75: mol_type = other DNA
ggggctacagggattcttcctgccgcatatacagaatggctgattgaaaggaaattacgttataatgatgacgct

SEQ ID NO: 666328 - DNA, 75 bp, synthetic construct
  source 1..75: mol_type = other DNA
tagcggaactctcacgcgtgcggtcgccgtcgtcacagctcccccaaccgcaaacgattctcgcaaatacgcaag

SEQ ID NO: 666329 - DNA, 75 bp, synthetic construct
  source 1..75: mol_type = other DNA
atggcccttgaagaatatgttggcgcgatcgtcatggaagtcgacggccaggaaattgaagtgactgacctcaag

SEQ ID NO: 666330 - DNA, 75 bp, synthetic construct
  source 1..75: mol_type = other DNA
atttaaaatatatgtgaggatttatcccagtaacaatgataatcaactgaatataaataataagcttggttttaa

SEQ ID NO: 666331 - DNA, 75 bp, synthetic construct
  source 1..75: mol_type = other DNA
atacgccgaccatcgtacaaacaatggcccgccatatgggattatcaatgggccagttccgcgccgaaatgctgg

SEQ ID NO: 666332 - DNA, 75 bp, synthetic construct
  source 1..75: mol_type = other DNA
acaatattaaaaagcgaaaactatatattcgtaacctgaccacaaaaacatgcattactgactgcatgattaaag

SEQ ID NO: 666333 - DNA, 75 bp, synthetic construct
  source 1..75: mol_type = other DNA
tggtcagggggataccgcctttccggaagcattaccggtgccaccggacgtgatgcagaccttcttcccgaatat

SEQ ID NO: 666334 - DNA, 75 bp, synthetic construct
  source 1..75: mol_type = other DNA
tcaccctgttgctgagcgccgctgctgtgcaggcctccacccgggatgaaattgaacgactctggaatccgcagg

SEQ ID NO: 666335 - DNA, 75 bp, synthetic construct
  source 1..75: mol_type = other DNA
atgatcgaaacgctgcttgaagtgcgtaatttaagtaaaacgttccgctaccggaccggctggtttcgtcgtcag

SEQ ID NO: 666336 - DNA, 75 bp, synthetic construct
  source 1..75: mol_type = other DNA
atgattgctcatcacttcggaactgatgaaataccacgtcagtgtgtgacccctggcgattatgttcttcacgaa

SEQ ID NO: 666337 - DNA, 75 bp, synthetic construct
  source 1..75: mol_type = other DNA
tattcgtagcctgaccacaaaaacatgcatttctgactgcatgattaaagtcttcctcggtcgtgatggtttacc

SEQ ID NO: 666338 - DNA, 75 bp, synthetic construct
  source 1..75: mol_type = other DNA
gtggttttaccgtgtcgccacatcgttttcgccatacgctggcgacggaactgatgaaatcaccggaacgaaatc

SEQ ID NO: 666339 - DNA, 75 bp, synthetic construct
  source 1..75: mol_type = other DNA
aatcttagtgaagggtatctggaactctgcctggagggcagtaagacacaccgtgaatggcgggttcccattgtc

SEQ ID NO: 666340 - DNA, 75 bp, synthetic construct
  source 1..75: mol_type = other DNA
gtatgtggaaatcgatttgaaggggacggcaagagtgcttgaaaaagaactggcagaacttactgatgtatttta

SEQ ID NO: 666341 - DNA, 75 bp, synthetic construct
  source 1..75: mol_type = other DNA
attgaaaatatggtttggtgaaaattaccaaattaattcctttaatatattaaatgtgttattgatcggtttttt

SEQ ID NO: 666342 - DNA, 75 bp, synthetic construct
  source 1..75: mol_type = other DNA
aaaacgccgtgaggccagtaccgggaaaaaggaaaaacaggaaagttctggaggggaactttctgacaaggaata

SEQ ID NO: 666343 - DNA, 75 bp, synthetic construct
  source 1..75: mol_type = other DNA
cgaccgtttccacatggtgaacggtgcaaactggtttgaccgtaccgtgagtgccgatgccgcaggcatcattct

SEQ ID NO: 666344 - DNA, 75 bp, synthetic construct
  source 1..75: mol_type = other DNA
accgtagaagcggtaaaacccttgagctttacgctacgtgaaggccagacactggcgattattggcgagaatggt

SEQ ID NO: 666345 - DNA, 75 bp, synthetic construct
  source 1..75: mol_type = other DNA
caacagaaacaggaactgttagcctatgagcaacagatccgcgatctgaagtgggagcaatggcaggcgcaaagc

SEQ ID NO: 666346 - DNA, 75 bp, synthetic construct
  source 1..75: mol_type = other DNA
aactacgagaagaaatacggtaagaccgttggcaaggtcatgcaactacaggatgatctgaccgcagcaatccag

SEQ ID NO: 666347 - DNA, 75 bp, synthetic construct
  source 1..75: mol_type = other DNA
tctgtggcaaggcttagctatctcactgaagaacacgtccgccactgaagggcaattgcttaacctggtaggtac

SEQ ID NO: 666348 - DNA, 75 bp, synthetic construct
  source 1..75: mol_type = other DNA
caagcaaaaatgcttcgcgtaaaaatcaaaatgcttacgggcgatgcggagtccgccggacgggttttcgacggc

SEQ ID NO: 666349 - DNA, 75 bp, synthetic construct
  source 1..75: mol_type = other DNA
actctatgcgccagttccgccagtctatagacggcggcgtgctgcgtgctgaagaatttaacagcctacttgaaa

SEQ ID NO: 666350 - DNA, 75 bp, synthetic construct
  source 1..75: mol_type = other DNA
aggggaacacaacaggccggagctattccagacatctaacggaaatcaatatatgatccctggcgagaatggcag

SEQ ID NO: 666351 - DNA, 75 bp, synthetic construct
  source 1..75: mol_type = other DNA
gctacatgagcttaccaggcggctaatttccgggcattttggcgaagcgttgacggcagatgcctggcgcaagga

SEQ ID NO: 666352 - DNA, 75 bp, synthetic construct
  source 1..75: mol_type = other DNA
tgctggcgggaatgatagaacctaccagcggcgagttattgattgacgatcatccactgcattttggcgattatt

SEQ ID NO: 666353 - DNA, 75 bp, synthetic construct
  source 1..75: mol_type = other DNA
cagcggcgagttattgattgacgatcatccactgcattttggcgattattccttccgcagtcagcgtattcgcat

SEQ ID NO: 666354 - DNA, 75 bp, synthetic construct
  source 1..75: mol_type = other DNA
atggataccagtgtaggtacaatttattacgaagttgatgcgaaaactagtcaacttctcgttgcacaacgacag

SEQ ID NO: 666355 - DNA, 75 bp, synthetic construct
  source 1..75: mol_type = other DNA
gccggagaagatgaagaaaaactgacgtggtttgaacgcaaggtgctgaagcccgtcaatgatgctttgggttaa

SEQ ID NO: 666356 - DNA, 75 bp, synthetic construct
  source 1..75: mol_type = other DNA
ggtgacgttcacactggcggaacatatcagcgtgcaggaaaagcgagaggccagagcaacaggtaagacgaccgc

SEQ ID NO: 666357 - DNA, 75 bp, synthetic construct
  source 1..75: mol_type = other DNA
acgaaaccatcagtgaagatgaactgcgccagcggctatcgcggatggggaccattgatcttcgcgtcgattatc

SEQ ID NO: 666358 - DNA, 75 bp, synthetic construct
  source 1..75: mol_type = other DNA
accatagatcttcgcgtcgattatctgcgtccaggccggggtgagcgttttacagccaccagtagcctgttacgt

SEQ ID NO: 666359 - DNA, 75 bp, synthetic construct
  source 1..75: mol_type = other DNA
gcaggcaataaagtcgccgtcgcccgcgttgaattacacaatgaagaacagctttatattgccagtgctacagcc

SEQ ID NO: 666360 - DNA, 75 bp, synthetic construct
  source 1..75: mol_type = other DNA
cgccgcgatattaatcatgcttggctttttcacccgtccgctggcggtgctgtttattttctacacgctgggtac

SEQ ID NO: 666361 - DNA, 75 bp, synthetic construct
  source 1..75: mol_type = other DNA
caaatatgattaatttctggaagaatatcagcattgctggcgcattcctgctgctggcaattaccgggccggggg

SEQ ID NO: 666362 - DNA, 75 bp, synthetic construct
  source 1..75: mol_type = other DNA
agtactatttataccgattatgcgtaatgggtctgtccattatgcgtttccagatattgtctgcatggcactgct

SEQ ID NO: 666363 - DNA, 75 bp, synthetic construct
  source 1..75: mol_type = other DNA
attgccttgatcacgcgtctcgatgtgcctgcttatcgggctgagctgatagccgaaagtctgtgggagtttatt

SEQ ID NO: 666364 - DNA, 75 bp, synthetic construct
  source 1..75: mol_type = other DNA
gcacaggcctgctttaacctgaatgccctcgctcagccgacgacggcatcgcgtccgctcgcggtacaacagttg

SEQ ID NO: 666365 - DNA, 75 bp, synthetic construct
  source 1..75: mol_type = other DNA
acgatgaactcgttaattgtccgcatgggcccacaacacttttcggttctctggcatcagacaggagaaagtgag

SEQ ID NO: 666366 - DNA, 75 bp, synthetic construct
  source 1..75: mol_type = other DNA
atgaaaccatcaatgaagatgaactacgccagcggctgtcgcggatgggcacaattgatcttcgcgtggattacc

SEQ ID NO: 666367 - DNA, 75 bp, synthetic construct
  source 1..75: mol_type = other DNA
gcgtccgctcgcggtacaacaactgattgccctgatctcgcgcctggatgtgcctgcttatcgggccgaactgat

SEQ ID NO: 666368 - DNA, 75 bp, synthetic construct
  source 1..75: mol_type = other DNA
gaatggcactggttgtggtgctggtattgctggcagttatgatgctggtaaccatcacgctttccgggcggatgc

SEQ ID NO: 666369 - DNA, 75 bp, synthetic construct
  source 1..75: mol_type = other DNA
atgaacacactacgttattttgattttggcgccgcccgccccgttttgttattaattgcccgtatcgccgtcatc

SEQ ID NO: 666370 - DNA, 75 bp, synthetic construct
  source 1..75: mol_type = other DNA
ttccgttggcgaccttaaggacgattctctgctgtggaacaaagcggctggcgcattcagcgccgcgcacggtac

SEQ ID NO: 666371 - DNA, 75 bp, synthetic construct
  source 1..75: mol_type = other DNA
gcaaagcgtgcaggaaacgaagcaatacaccgatcagcgcatggttgagatggataacaaactgtccaaaaccga

SEQ ID NO: 666372 - DNA, 75 bp, synthetic construct
  source 1..75: mol_type = other DNA
cgcaactctatgacacgagcaagtacattgctgatgccctgggtggtgacgcagaagttaacgctgacggcacca

SEQ ID NO: 666373 - DNA, 75 bp, synthetic construct
  source 1..75: mol_type = other DNA
ctggcagtaggtgaagactcgctagcaatgggcgcgaaaactatcgttaatggtaatgtgggtattggtatcggt

SEQ ID NO: 666374 - DNA, 75 bp, synthetic construct
  source 1..75: mol_type = other DNA
taatgctcccagtgtaatcactgatgttgcaaacggtgcagtctcgtccaccagcagcgacgccattaacggttc

SEQ ID NO: 666375 - DNA, 75 bp, synthetic construct
  source 1..75: mol_type = other DNA
acagcactgatgccattaatggctcacaactttatggcgtagcggattcatttacgtcatatcttggtggtggtg

SEQ ID NO: 666376 - DNA, 75 bp, synthetic construct
  source 1..75: mol_type = other DNA
ccgcagcggctgtaaagccccgccgtcatccccgtttcagacgcgaagacatccccacgccggaaattgaccccg

SEQ ID NO: 666377 - DNA, 75 bp, synthetic construct
  source 1..75: mol_type = other DNA
cgcactattaacgaacatttaatcaatatattttccgaaggtgaacttgttcaaaactcaaccatccggaaattc

SEQ ID NO: 666378 - DNA, 75 bp, synthetic construct
  source 1..75: mol_type = other DNA
ttggcactgcccgccccgttttgttattaattgcccgtatcgccgtggtcttaattttcattatttttggttttc

SEQ ID NO: 666379 - DNA, 75 bp, synthetic construct
  source 1..75: mol_type = other DNA
gatgctctaattgtcgggtttatggtatcaaaatttaatcaggatatgataaacgaacttgatgcaacaaaactt

SEQ ID NO: 666380 - DNA, 75 bp, synthetic construct
  source 1..75: mol_type = other DNA
cagacgcgcagtttatcgttacagccatgcgtggcgagatcaaacgccgccagcgtcgtagaaagcaagaaatgc

SEQ ID NO: 666381 - DNA, 75 bp, synthetic construct
  source 1..75: mol_type = other DNA
gcggtaaaaatgcctggtgaaagtacagggcagtttgtaacagcagcattaaagcgagaagttgaataccgccag

SEQ ID NO: 666382 - DNA, 75 bp, synthetic construct
  source 1..75: mol_type = other DNA
tattcgctcactggaactggcgattaatacgacgcttctgccggagaaatattttagttggttaaaagaaaatga

SEQ ID NO: 666383 - DNA, 75 bp, synthetic construct
  source 1..75: mol_type = other DNA
gccattgcactaaatactgataatgttgtcttaacggcgattgccaacgatcgcttacatgatgaagtgtatgca

SEQ ID NO: 666384 - DNA, 75 bp, synthetic construct
  source 1..75: mol_type = other DNA
gtgcaagaaagaattaaagcttgcttcactgaaagcattcaaactcaaattgcggcggcagaggcgcttccggat

SEQ ID NO: 666385 - DNA, 75 bp, synthetic construct
  source 1..75: mol_type = other DNA
atgtccggttttgcaaatacaaaagccgatatcgcttttctgaaatcccggttgaacaaaaacctggcagcgggc

SEQ ID NO: 666386 - DNA, 75 bp, synthetic construct
  source 1..75: mol_type = other DNA
atggacgaaatgaatttaagtcctgaagcacaggaactgcatgacagcattgtggctgagcttcagtccggtggt

SEQ ID NO: 666387 - DNA, 75 bp, synthetic construct
  source 1..75: mol_type = other DNA
cattatttcaggggtactatttctcgccaccattgtcagttgagcaattaacttcttttgtaaagaataaaagaa

SEQ ID NO: 666388 - DNA, 75 bp, synthetic construct
  source 1..75: mol_type = other DNA
aatgagacagaactgacaatgaattctttgattgcccgccagggacctcaatatttctcggttcagcgacatcat

SEQ ID NO: 666389 - DNA, 75 bp, synthetic construct
  source 1..75: mol_type = other DNA
ttggatactgtaggcgaagcgatgaacgatgcagaaatctgtgcattcgttgaaaaagccatttatgaagagatt

SEQ ID NO: 666390 - DNA, 75 bp, synthetic construct
  source 1..75: mol_type = other DNA
tcctcaacggtgcacacacggcgctggtgccggtggcgttccaggcagggctggatactgtaggtgaagcgatga

SEQ ID NO: 666391 - DNA, 75 bp, synthetic construct
  source 1..75: mol_type = other DNA
gcgatgcgcgtttgattcgttctgtaaaccgtgaaattagcgtctacggtgactacgatgaattcctgaagctgg

SEQ ID NO: 666392 - DNA, 75 bp, synthetic construct
  source 1..75: mol_type = other DNA
tacacggcggggtcattgcgtcggcgctggatgtcgccgcaggtctggtgtgcgtgggaagtaccttaacccgcc

SEQ ID NO: 666393 - DNA, 75 bp, synthetic construct
  source 1..75: mol_type = other DNA
aacggcgacgcactgcgtgaactggtgttgcgttacgcgcaagagtgggcgttgccggaagcatttatacagtgg

SEQ ID NO: 666394 - DNA, 75 bp, synthetic construct
  source 1..75: mol_type = other DNA
cggttatccgcgtgatgaagtggctaaactggaagaagaactgggttatcacgatggtttcctcgacaccgctga

SEQ ID NO: 666395 - DNA, 75 bp, synthetic construct
  source 1..75: mol_type = other DNA
atatatataaaattaagaaaaaaaatggaatctctggtgtgaatattaaatataaatgtgtttataaaacttctg

SEQ ID NO: 666396 - DNA, 75 bp, synthetic construct
  source 1..75: mol_type = other DNA
aatggacgccgggctttatcaaaaactgaaaccgctggtctgtgcgctgccgatggcccgccagcaaatcaacat

SEQ ID NO: 666397 - DNA, 75 bp, synthetic construct
  source 1..75: mol_type = other DNA
taactgatatgcatgtttgtcctatgattactccaggggtcccccctataccacatattggtggtccaattttgg

SEQ ID NO: 666398 - DNA, 75 bp, synthetic construct
  source 1..75: mol_type = other DNA
ccgatatgcatgtatgccctatggtgacgcctggtttacctccagtcccccatgttggagggccactgttaccgc

SEQ ID NO: 666399 - DNA, 75 bp, synthetic construct
  source 1..75: mol_type = other DNA
gatactggttgtctggagattcagggggccagtctactgggcacaaatttaaacactaactggtatcagaaagcc

SEQ ID NO: 666400 - DNA, 75 bp, synthetic construct
  source 1..75: mol_type = other DNA
agccttagctgacgagaaaattggattgtttgttggcgtttcagaaaaagacgaatatggtgatattacatccaa

SEQ ID NO: 666401 - DNA, 75 bp, synthetic construct
  source 1..75: mol_type = other DNA
cagacccagctcccggatgatagaaatcgccgaaagcgctaaagataaactaggtacactagaaaaattaccagt

SEQ ID NO: 666402 - DNA, 75 bp, synthetic construct
  source 1..75: mol_type = other DNA
taaagtttttatatgcggcaaaccagcagcacggatgggtgataactgtgctcatgggggggcaattgtcagcgg

SEQ ID NO: 666403 - DNA, 75 bp, synthetic construct
  source 1..75: mol_type = other DNA
catgtagggggaccattgttaccaccaggcgctctgtctgtactcataggcggaataccggcagcgacatttggt

SEQ ID NO: 666404 - DNA, 75 bp, synthetic construct
  source 1..75: mol_type = other DNA
gataaaaaaaacagtatgttaatgaattatatttttaacggttatagattttacttattaccagtagaatcaata

SEQ ID NO: 666405 - DNA, 75 bp, synthetic construct
  source 1..75: mol_type = other DNA
ctgatatgcatgtatgtcctatggtgacgccaggtttgccacctgttcctcatgtagggggactattgttaccac

SEQ ID NO: 666406 - DNA, 75 bp, synthetic construct
  source 1..75: mol_type = other DNA
acccaggcagtatgtgcagggggggtagatatagttagtatgggaagttttaaagtttttatatgtggcaaacca

SEQ ID NO: 666407 - DNA, 75 bp, synthetic construct
  source 1..75: mol_type = other DNA
taaagtttttatatgcggcaaaccagctgcacgaatgggtgatatctgtgctcatggagggacaattgtcagcgg

SEQ ID NO: 666408 - DNA, 75 bp, synthetic construct
  source 1..75: mol_type = other DNA
caggaaaacagtgaaaaactggctgccgatatgatgatcagtcagaaacgcatggggggcctgcaggccgtgcgt

SEQ ID NO: 666409 - DNA, 75 bp, synthetic construct
  source 1..75: mol_type = other DNA
gactaccgctgcgccgcactggtggaaaacatccagattggcgacttcagcaccgccgcagaagccggagcataa

SEQ ID NO: 666410 - DNA, 75 bp, synthetic construct
  source 1..75: mol_type = other DNA
ttcctgacgctgattaacgtcacgcctgtgactgagcaatccggtcaactgctggggctgggtgttggcagcacc

SEQ ID NO: 666411 - DNA, 75 bp, synthetic construct
  source 1..75: mol_type = other DNA
gagggtaaaacgctgtccggcgtggcagaacgcctgatgagcctgtcactgaccgacaaccggggatttgaggcg

SEQ ID NO: 666412 - DNA, 75 bp, synthetic construct
  source 1..75: mol_type = other DNA
caggaaaacagtgaaaaactggcggccgatatgattatcagtcagaaacgcatggggggcctgcaggccgtgcgt

SEQ ID NO: 666413 - DNA, 75 bp, synthetic construct
  source 1..75: mol_type = other DNA
caggaaaacagtgaaaaactggccgccgatatgatcatcagtcagaaacgcatgggtggcctgcaggccgtgcgt

SEQ ID NO: 666414 - DNA, 75 bp, synthetic construct
  source 1..75: mol_type = other DNA
atggattcagaaacagttcacggaacggccaggtctggcgttaccagcgtgccggaagccgggccgttattctgg

SEQ ID NO: 666415 - DNA, 75 bp, synthetic construct
  source 1..75: mol_type = other DNA
aaatgcgagcagaccaactttgacacggttctgacctacgcgaagctggatctgtgggcgaagtttcaggatttc

SEQ ID NO: 666416 - DNA, 75 bp, synthetic construct
  source 1..75: mol_type = other DNA
gcaggagaaacacgaggacagaacgcatcagtcctgcgatgtaaatcgtggatggtttagcccactgacgacaga

SEQ ID NO: 666417 - DNA, 75 bp, synthetic construct
  source 1..75: mol_type = other DNA
catgatcggctttaacggcctgaagcgtgcgaaaacctccaaccgtagtgaaaacccgctgctgcaggatgtgaa

SEQ ID NO: 666418 - DNA, 75 bp, synthetic construct
  source 1..75: mol_type = other DNA
cctgtgggcgaaattccaggacttccaggtgcgcgtgcgtaacgccatcatcaagcgtcaggcgctggaccgcat

SEQ ID NO: 666419 - DNA, 75 bp, synthetic construct
  source 1..75: mol_type = other DNA
taccgctgtgccgcacttgtggaaaacatccagattggcgacttcagcgccgccgcagcagaaaccggagcgtaa

SEQ ID NO: 666420 - DNA, 75 bp, synthetic construct
  source 1..75: mol_type = other DNA
cagaacgcctgatgagcctgtcactgaccgacaaccggggatttgaggcggaccagctcaccatcacgctggatg

SEQ ID NO: 666421 - DNA, 75 bp, synthetic construct
  source 1..75: mol_type = other DNA
gaaggcgatatccagaccgcgcagaaactgcaaactgaatgcaataaagtcattgatttactgatcaaaacgggc

SEQ ID NO: 666422 - DNA, 75 bp, synthetic construct
  source 1..75: mol_type = other DNA
cgcggagccgcatcattttccatcacgctggcgcgtggacgtgcagaactctaccccgaaatgcatggcacggta

SEQ ID NO: 666423 - DNA, 75 bp, synthetic construct
  source 1..75: mol_type = other DNA
gaccgcgaggcgtatacgggggtacgcgcctactggcttgatcttaattacgggaaaaagaaaaaagtcagcgtg

SEQ ID NO: 666424 - DNA, 75 bp, synthetic construct
  source 1..75: mol_type = other DNA
gacgctgatggtcgatgtggaatataaatgcgagcagaccaactttgatacggtgctgacctacgcgaagctgga

SEQ ID NO: 666425 - DNA, 75 bp, synthetic construct
  source 1..75: mol_type = other DNA
gaaggcgatatccagaccgcgcagaagctgcaaaccgaatgtaataaagtcattgatttactgatcaaaacgggc

SEQ ID NO: 666426 - DNA, 75 bp, synthetic construct
  source 1..75: mol_type = other DNA
gtgaacaggtactggaaatcgtcgccgaagaggcgaaaggcaagattaaactcatcgctcacgtcggttgcgtca

SEQ ID NO: 666427 - DNA, 75 bp, synthetic construct
  source 1..75: mol_type = other DNA
attactccaggagtcagaaggctgaaaggagtttatgagatttgcttttttaatatccggtcgggcagtatgacc

SEQ ID NO: 666428 - DNA, 75 bp, synthetic construct
  source 1..75: mol_type = other DNA
gcccggcggtggcgtgaatgcacagggccagccgttgccctcgttcgccatcacacgcagcagcggcgatcgcca

SEQ ID NO: 666429 - DNA, 75 bp, synthetic construct
  source 1..75: mol_type = other DNA
aggcagcaagacgcgcagcggcggcaaagtggcagcaactacaacgcggagccgcatcattctccatcacgctgg

SEQ ID NO: 666430 - DNA, 75 bp, synthetic construct
  source 1..75: mol_type = other DNA
aatgcatggcacggtgacaggcttcaaaagtgacatcgataatcaggactggattattgcaaaagccgagcacac

SEQ ID NO: 666431 - DNA, 75 bp, synthetic construct
  source 1..75: mol_type = other DNA
ggacgtgcgcgatgtgcttcccctttcccggttagatgtgctggtcacgccgctggtagcctttgatgagtacgg

SEQ ID NO: 666432 - DNA, 75 bp, synthetic construct
  source 1..75: mol_type = other DNA
aaacccaaaaaggagaaaagcagcagccgtgaaggtgattatatggaaggcgcggaaggcaatgtgtttgtgtta

SEQ ID NO: 666433 - DNA, 75 bp, synthetic construct
  source 1..75: mol_type = other DNA
acaaataattttgcagtatcgcttccggacataagcgaatatttcattaatgacgtatttcagcccttgcgatac

SEQ ID NO: 666434 - DNA, 75 bp, synthetic construct
  source 1..75: mol_type = other DNA
tgatataaaattagaaattagtaaatctgtatcagaacagtatttcatgaagttgacagagcaaaaatcatcagt

SEQ ID NO: 666435 - DNA, 75 bp, synthetic construct
  source 1..75: mol_type = other DNA
aataaagacctcatcaaagatattaatttattattaacatcgtctaatattgatgttaaacttttaataaaactg

SEQ ID NO: 666436 - DNA, 75 bp, synthetic construct
  source 1..75: mol_type = other DNA
attacaacaaaagagtatcaaacatttaccaacaagtaataacatcgacggatacattaaaataagaaaaacaag

SEQ ID NO: 666437 - DNA, 75 bp, synthetic construct
  source 1..75: mol_type = other DNA
cagcgtcgtatatcatctcttttaataacaacagaatatcattcacttgcattacaacaaatatcttctttttgg

SEQ ID NO: 666438 - DNA, 75 bp, synthetic construct
  source 1..75: mol_type = other DNA
ttgtttttgaacatcacaccaatgacatgtttataagctttgataatcaaggaggatttgttatatcaatatcaa

SEQ ID NO: 666439 - DNA, 75 bp, synthetic construct
  source 1..75: mol_type = other DNA
acattcacattggaataatagaaaacaaggcaaacagggagtttatatatagtaagttttcatctttaaacctgg

SEQ ID NO: 666440 - DNA, 75 bp, synthetic construct
  source 1..75: mol_type = other DNA
gaaggtggtaaaaatgcgccgggagaagcagaagattgtcccgcgatgtccgtttgagaaacacgagtttgatta

SEQ ID NO: 666441 - DNA, 75 bp, synthetic construct
  source 1..75: mol_type = other DNA
agcttatgtgctgtcatagtaactgaaacgcgtgcagccatattagtgtttccattctttgcgttaatattaatc

SEQ ID NO: 666442 - DNA, 75 bp, synthetic construct
  source 1..75: mol_type = other DNA
gacaacaatctgttttattcaataggtatgatagtcgcaggctttggtacgaaatcatggcgaaccgcgcggact

SEQ ID NO: 666443 - DNA, 75 bp, synthetic construct
  source 1..75: mol_type = other DNA
tccatctgataaattatttgagttattaagaagacatacaaattccaattctgattggatagaaaaaataatccc

SEQ ID NO: 666444 - DNA, 75 bp, synthetic construct
  source 1..75: mol_type = other DNA
tctggtgctgtccaatatgacgatgggtgattttgataagatagctacgtcattagagactactgcaaaggctcg

SEQ ID NO: 666445 - DNA, 75 bp, synthetic construct
  source 1..75: mol_type = other DNA
atgagcagtttgtttcagaatgaaaaaaagataaatttaaaactggacttgcatatgtgcgggggccagaaaaaa

SEQ ID NO: 666446 - DNA, 75 bp, synthetic construct
  source 1..75: mol_type = other DNA
tgtttaatggtagtgtctattttccttcgcgtgatgatgaaaatagttcatcccccagtccaacgctacctacta

SEQ ID NO: 666447 - DNA, 75 bp, synthetic construct
  source 1..75: mol_type = other DNA
cgcccgcagcagtctgctccggcagcaccgtctaacgagccgccgatggactttgatgacgatattccgttctga

SEQ ID NO: 666448 - DNA, 75 bp, synthetic construct
  source 1..75: mol_type = other DNA
tgataaagcgaccggcgagatgaaagagcagactgaatggcaccgtgttgtgctgttcggcaaactggcggaagt

SEQ ID NO: 666449 - DNA, 75 bp, synthetic construct
  source 1..75: mol_type = other DNA
atggacagcgacgaagtgctgcgcctgaagcaaattaacggtctgcaagagctgtttgccgaccgtcaatattcc

SEQ ID NO: 666450 - DNA, 75 bp, synthetic construct
  source 1..75: mol_type = other DNA
ttcaaaattggccgaactcttgctgacgaacattatgaaaaatcacgcgtaacagtgttggatgtcggggatcct

SEQ ID NO: 666451 - DNA, 75 bp, synthetic construct
  source 1..75: mol_type = other DNA
gaagccagtaaaaagcacgactatgacaatcatgaaactgaaataataaaaaaagctcacgagaaagaagatggg

SEQ ID NO: 666452 - DNA, 75 bp, synthetic construct
  source 1..75: mol_type = other DNA
ttccagctccgtgtccgtaacgccattatcaaacgccagtcccttgatttaatcatggccggttttaacggcgtg

SEQ ID NO: 666453 - DNA, 75 bp, synthetic construct
  source 1..75: mol_type = other DNA
agatcaggtaagaatgaatatattgaaagagtatggagggatttataccgatactgatattcttcctgcatattc

SEQ ID NO: 666454 - DNA, 75 bp, synthetic construct
  source 1..75: mol_type = other DNA
tgcactctcgcctatctattgaatgccactttagtaataatgaaagagagtttataaagatgggctactataatg

SEQ ID NO: 666455 - DNA, 75 bp, synthetic construct
  source 1..75: mol_type = other DNA
cagaagaacttgtaaagtttataagaacctcaaaggaatatttaagcaatatggatgtggttaataatgttattg

SEQ ID NO: 666456 - DNA, 75 bp, synthetic construct
  source 1..75: mol_type = other DNA
ttagcacccgggcaaaaacagcgtctgggtctggcgcgcgcgctgatattgcgcccaaaagtcattattgccgat

SEQ ID NO: 666457 - DNA, 75 bp, synthetic construct
  source 1..75: mol_type = other DNA
atgagcgaaaagaaaacaacttattgccaagtggcattgtctgataaggccaatgaaaaacttggaaaattccaa

SEQ ID NO: 666458 - DNA, 75 bp, synthetic construct
  source 1..75: mol_type = other DNA
acgtaatcagttaaataccatattgagtgaaatagaaaagctgacgatagataattattttaaacctgttgagac

SEQ ID NO: 666459 - DNA, 75 bp, synthetic construct
  source 1..75: mol_type = other DNA
gatggcgcgccgttatccgcagcgtccgtcgctggcgcactgtatggtctttgcggggtacgttgcgacaccgct

SEQ ID NO: 666460 - DNA, 75 bp, synthetic construct
  source 1..75: mol_type = other DNA
attccgagcttcctgaatatcaacaaagaggaaggccttagcttctccagttcgacgctggcgataggcgtgctg

SEQ ID NO: 666461 - DNA, 75 bp, synthetic construct
  source 1..75: mol_type = other DNA
ccttttccggaagagggacgctcagttatggagtcatattgaatttcatcccgaatgtaacgaaatttatgccgc

SEQ ID NO: 666462 - DNA, 75 bp, synthetic construct
  source 1..75: mol_type = other DNA
ctgcgtgatgcccagctctggaatcacattacccttcacccggaatgcaacgccatttacgccgcgctggactga

SEQ ID NO: 666463 - DNA, 75 bp, synthetic construct
  source 1..75: mol_type = other DNA
acgttgcaactccgctgtttttaagcggtctggtggcgctttacccgctggtctggttgtgtgcgctggtcggca

SEQ ID NO: 666464 - DNA, 75 bp, synthetic construct
  source 1..75: mol_type = other DNA
tggtcggcacggtggcgctgttttacaccggctatctgctttatctcggtattccgagcttcctgaatatcaaca

SEQ ID NO: 666465 - DNA, 75 bp, synthetic construct
  source 1..75: mol_type = other DNA
gtggcggttacatgatgccggatggcgaccgttttcatctggtcaacggtgaaaactggtttgaccgtaccgtga

SEQ ID NO: 666466 - DNA, 75 bp, synthetic construct
  source 1..75: mol_type = other DNA
atgctgggcgcaatcaccacggtaaaaagcggtaatctgttattcattatgccaggcggtggcgtgaacgcacag

SEQ ID NO: 666467 - DNA, 75 bp, synthetic construct
  source 1..75: mol_type = other DNA
atgagtctgtcactgaccgacaaccgggatttgaagcggtaccagctcaccatcacgctggatgatgcggatggt

SEQ ID NO: 666468 - DNA, 75 bp, synthetic construct
  source 1..75: mol_type = other DNA
ggcggtttctggcacttcatccgtctgcctgatggcggcggatacatgatgccggactgcgggccagtgcatctg

SEQ ID NO: 666469 - DNA, 75 bp, synthetic construct
  source 1..75: mol_type = other DNA
cgcgtgtcattcacgttgaagaatccgaccgcctgtctttcctgccgtacctgtttggcgacgatttcatgattg

SEQ ID NO: 666470 - DNA, 75 bp, synthetic construct
  source 1..75: mol_type = other DNA
ttgtggctgtaccacgacagcggggatgcaggactgacacaactataccggatgcgagatgcgcagttgtggaga

SEQ ID NO: 666471 - DNA, 75 bp, synthetic construct
  source 1..75: mol_type = other DNA
tgaatgttgaagaatgcgaccgcctcttctttctgccttacctgtttggccaggattttctgtatgccgaagcgt

SEQ ID NO: 666472 - DNA, 75 bp, synthetic construct
  source 1..75: mol_type = other DNA
ttgggcgaccggagtgatggggagccgtctggtgctcgggatgcattggccgcgtgatttagtggtagctacgtt

SEQ ID NO: 666473 - DNA, 75 bp, synthetic construct
  source 1..75: mol_type = other DNA
ggctggcgttggcaacctggagaacaaagttggctactaaaagcggctttttgggttactgaaactgtcacccag

SEQ ID NO: 666474 - DNA, 75 bp, synthetic construct
  source 1..75: mol_type = other DNA
gtggcggttacatgatgccggatggcgaccgttttcatctggtcaacggtgaaaactggtttgaccgtacggtca

SEQ ID NO: 666475 - DNA, 75 bp, synthetic construct
  source 1..75: mol_type = other DNA
ttcggcatacgctggccagtacgctgatgagtgcaccggaacgtaatctttatatggtgaaaaccatgctcgggc

SEQ ID NO: 666476 - DNA, 75 bp, synthetic construct
  source 1..75: mol_type = other DNA
gagggaagtaagacacaccatgagtggcgtatccctatggtcagtcatcttgtcccgggaatgaggcacttgatt

SEQ ID NO: 666477 - DNA, 75 bp, synthetic construct
  source 1..75: mol_type = other DNA
ggcggttacatgatgccggacggtgaccgtttccacatggtgaacggtgcaaactggtttgaccgtaccgtgagt

SEQ ID NO: 666478 - DNA, 75 bp, synthetic construct
  source 1..75: mol_type = other DNA
atgctgccctgactcgcctgtttatgctgcgtgatacccagctctggaatcacatcgcctttcaccccgaatgca

SEQ ID NO: 666479 - DNA, 75 bp, synthetic construct
  source 1..75: mol_type = other DNA
cgcctgccggacggtggcggttacatgatgcctgatggcgaccgtttccacatggtgaacggtgcaaactggttt

SEQ ID NO: 666480 - DNA, 75 bp, synthetic construct
  source 1..75: mol_type = other DNA
tggcacttcatccgcctgccggacggtggcggttacatgatgccggatggcgaccgttttcacatggtgaacggt

SEQ ID NO: 666481 - DNA, 75 bp, synthetic construct
  source 1..75: mol_type = other DNA
gacttcccttgtgattaaccgccagttgtggcgtcacatcgaatttcaccctgaatgcaacgcgatttacgcggc

SEQ ID NO: 666482 - DNA, 75 bp, synthetic construct
  source 1..75: mol_type = other DNA
ccggacggtggcggttacatgatgccggatggcgaccgttttcatctggtcaacggtgaaaactggtttgaccgc

SEQ ID NO: 666483 - DNA, 75 bp, synthetic construct
  source 1..75: mol_type = other DNA
cggttacatgatgccggatggcgaccgtttccacatggtgaacggtgcaaactggtttgaccgtaccgtgagtgc

SEQ ID NO: 666484 - DNA, 75 bp, synthetic construct
  source 1..75: mol_type = other DNA
aacagaactggattattgcaaaagccgagcacaccattgatgacagtgggtttaccacgcggcttgagcttgaga

SEQ ID NO: 666485 - DNA, 75 bp, synthetic construct
  source 1..75: mol_type = other DNA
ccgttcttcccgccgaatgcgctgctgatcacccgtttggataacttgtccatctactggcaggaagacacccgc

SEQ ID NO: 666486 - DNA, 75 bp, synthetic construct
  source 1..75: mol_type = other DNA
ttaacgcttacctgcagcaactggcacgtctgaacggtgtggcagttgaagaactgtccagcaagttcactgtgg

SEQ ID NO: 666487 - DNA, 75 bp, synthetic construct
  source 1..75: mol_type = other DNA
gacgctgatgggcgatgtggaatataaatgcgagcagaccaactttgacacggtactgacctacgcgaagctgga

SEQ ID NO: 666488 - DNA, 75 bp, synthetic construct
  source 1..75: mol_type = other DNA
gaaggcaacgtgtttgtgttacgcaaaacttatcagaacgagcaggcagcaagacgtgcagcggcggcaaagtgg

SEQ ID NO: 666489 - DNA, 75 bp, synthetic construct
  source 1..75: mol_type = other DNA
aactgttgtttctcaaagcggggcagggggtgacggccagcggtaaaaaaatcccgcaggtcaccataacccgca

SEQ ID NO: 666490 - DNA, 75 bp, synthetic construct
  source 1..75: mol_type = other DNA
aggacggcgacagtcaccgctttaccctggcagatcgcggagcctatacgggcgtaattgccagttggttgcata

SEQ ID NO: 666491 - DNA, 75 bp, synthetic construct
  source 1..75: mol_type = other DNA
cgaaacgtgaccggattgaaaactttgaatccgttaacgaagcctatgtggttgaggactaccgctgcgcagcac

SEQ ID NO: 666492 - DNA, 75 bp, synthetic construct
  source 1..75: mol_type = other DNA
gttgaggactaccgctgcgctgcactggtggaaaacatccagattggcgattttagcgccgccgcagcagaagcc

SEQ ID NO: 666493 - DNA, 75 bp, synthetic construct
  source 1..75: mol_type = other DNA
gcgcctgaacggtgtggaggttgaagaactgtccagcaagtttaccgtggagccgtccgtgcagcagacgctgga

SEQ ID NO: 666494 - DNA, 75 bp, synthetic construct
  source 1..75: mol_type = other DNA
gcgccgttcttcccgccgaatgcactgctgattacccgtctggataacctgtccatttactggcaggaagacacc

SEQ ID NO: 666495 - DNA, 75 bp, synthetic construct
  source 1..75: mol_type = other DNA
gatgatgacgatctggtggttgtctgcgggcgtgaactgctgtccgacaaatatttcccgctggttaacaaagag

SEQ ID NO: 666496 - DNA, 75 bp, synthetic construct
  source 1..75: mol_type = other DNA
tgaaacgccaggcactggaccgcatcatgatcggctttaacggcgtgaagcgtgcgaaaacctccaaccgtagcg

SEQ ID NO: 666497 - DNA, 75 bp, synthetic construct
  source 1..75: mol_type = other DNA
ttgacggcaccgcgtgggtgattacgcggtgcgtgcatacgttggataacagcagtgggtatgggacggcggtgg

SEQ ID NO: 666498 - DNA, 75 bp, synthetic construct
  source 1..75: mol_type = other DNA
tgacattatcccgacaagacatccgcaaaatgattcggctgcgtcgtcgtgcgttaacgtcagaacaacaacaag

SEQ ID NO: 666499 - DNA, 75 bp, synthetic construct
  source 1..75: mol_type = other DNA
agcagctacaacgcggagccgcatcattctccatcacgctggcgcgtggtcgtgcagaactctatcccgaaatgc

SEQ ID NO: 666500 - DNA, 75 bp, synthetic construct
  source 1..75: mol_type = other DNA
ttagcattgccgatcgtgatgcttataccggcgttactgcctactggctggatctaaatttcgggaagaagcctg

SEQ ID NO: 666501 - DNA, 75 bp, synthetic construct
  source 1..75: mol_type = other DNA
gtcaccagtttgacccggtactgaagcagctggcacagcagtacggcttttctgtttttccctacaccctggatg

SEQ ID NO: 666502 - DNA, 75 bp, synthetic construct
  source 1..75: mol_type = other DNA
tcattttgttgatgatggtcacaggtgtgcaggcctccacccgggatgaaattgaacgactctggaatccgcagg

SEQ ID NO: 666503 - DNA, 75 bp, synthetic construct
  source 1..75: mol_type = other DNA
gcgcgacaggagaaagcagcaacccgctggttccgcctcagcaacggaactcaggtcaatcttgctgactggaaa

SEQ ID NO: 666504 - DNA, 75 bp, synthetic construct
  source 1..75: mol_type = other DNA
cattgataacagcggctttaccacgcagcttgagcttgaggcaaaaatcccggaatggatagcagaaacagagtg

SEQ ID NO: 666505 - DNA, 75 bp, synthetic construct
  source 1..75: mol_type = other DNA
tgatgagtttgacgctgacggataaccggggctttgaagcggaccagcttgatctggagctggacgacgctgacg

SEQ ID NO: 666506 - DNA, 75 bp, synthetic construct
  source 1..75: mol_type = other DNA
gagatagtccggtcaagcggtgataaacatcggtttaacgtagctgaccgcgacgcgtacacgggcgtaactgca

SEQ ID NO: 666507 - DNA, 75 bp, synthetic construct
  source 1..75: mol_type = other DNA
gggtgcggttgccaccgttaaaaatggcatgttgctgttcatcacgccggggcagggcttaacccaaagcggtaa

SEQ ID NO: 666508 - DNA, 75 bp, synthetic construct
  source 1..75: mol_type = other DNA
tgatttcgggcgcggctggcggtgtcgatgacatcctgacggaggcgttaaaaataccagcattcagcgtccggc

SEQ ID NO: 666509 - DNA, 75 bp, synthetic construct
  source 1..75: mol_type = other DNA
ccgaccagactgaagaaagcgacatgtccttccttacgcgcatggcggaaatgctgggcgcaatcaccacggtaa

SEQ ID NO: 666510 - DNA, 75 bp, synthetic construct
  source 1..75: mol_type = other DNA
ctgactgacgctgttgacagcctcggtgacgattccctgctgtggaacgctacggcgggggcattcagtgccgcg

SEQ ID NO: 666511 - DNA, 75 bp, synthetic construct
  source 1..75: mol_type = other DNA
ggatctctatcatcaatgccactgttcttgaagttacgaagggcagaagtgccagcgatatgatgacgggaatac

SEQ ID NO: 666512 - DNA, 75 bp, synthetic construct
  source 1..75: mol_type = other DNA
gtgaatagcgttaatggggcaattaactcttcactggcatcattgaacagcaccgttgataaagcgctgcgggtt

SEQ ID NO: 666513 - DNA, 75 bp, synthetic construct
  source 1..75: mol_type = other DNA
tgtctgcgggtaatgttaccctcacctttcttctgcggctggcgattctgttgcaggtgctgccgctgtttgcgc

SEQ ID NO: 666514 - DNA, 75 bp, synthetic construct
  source 1..75: mol_type = other DNA
tgctgtctgcaaagactatgaagaaaatgcaatggcagcagaaaagaaatggactggcaaaaggatctctatcag

SEQ ID NO: 666515 - DNA, 75 bp, synthetic construct
  source 1..75: mol_type = other DNA
gctctttaaaacagccgatacaagctactgcggtggcatggtatggctggattactactctggtattgatgatgc

SEQ ID NO: 666516 - DNA, 75 bp, synthetic construct
  source 1..75: mol_type = other DNA
tggtatggctggattactactctggtattgatgatgcagttcttacctataagaaaggccagaaagtcagcgtca

SEQ ID NO: 666517 - DNA, 75 bp, synthetic construct
  source 1..75: mol_type = other DNA
tacgtgcgattatcgcaatatggcgcaagctattattgatggatgtatcggacacgttgagtacacgggaggtaa

SEQ ID NO: 666518 - DNA, 75 bp, synthetic construct
  source 1..75: mol_type = other DNA
tgccgcccgcaaactggcggcacggtataagtttcccttgcttaacccgttgctggtagcaatggtggtgatcat

SEQ ID NO: 666519 - DNA, 75 bp, synthetic construct
  source 1..75: mol_type = other DNA
atggcgatgctttattgaaaacaaccgttcccggtattgtttattcagtagaattagtatgtacaagttgtggag

SEQ ID NO: 666520 - DNA, 75 bp, synthetic construct
  source 1..75: mol_type = other DNA
tgacgattctgttgcaggtgctaccgctgtttgtgctcaccattattattggccttgttgacgggctggtacgcc

SEQ ID NO: 666521 - DNA, 75 bp, synthetic construct
  source 1..75: mol_type = other DNA
gttccgccgcatgttctccggcgaatatgacagcgccgactgctaccttgatatccaggctggttccggcggtac

SEQ ID NO: 666522 - DNA, 75 bp, synthetic construct
  source 1..75: mol_type = other DNA
agctgacgacgaagaaacctttaacgaagccgttgctgaactcgacgccctggaagaaaaactggcgcagcttga

SEQ ID NO: 666523 - DNA, 75 bp, synthetic construct
  source 1..75: mol_type = other DNA
gtgaatacagttaatggggaaatcagttcttcgttgtcttcagtaggtaaagcgctggggggaaccgcctccact

SEQ ID NO: 666524 - DNA, 75 bp, synthetic construct
  source 1..75: mol_type = other DNA
agctggctggaaagcggcaggtgatgcgccgttaagtggaacggaaacaaccctgcctgcgccaccgcgtggtgt

SEQ ID NO: 666525 - DNA, 75 bp, synthetic construct
  source 1..75: mol_type = other DNA
acctccgacagcaaacgtcagttcgccagcatcggcgcagaattcaacgcatggaaatgggcacaattgcgtgcc

SEQ ID NO: 666526 - DNA, 75 bp, synthetic construct
  source 1..75: mol_type = other DNA
tctggagaaagtcgccaacggcacaatcacggatgtggacaaaaacgcgctcacctcccgcgcgtatggtcgtgc

SEQ ID NO: 666527 - DNA, 75 bp, synthetic construct
  source 1..75: mol_type = other DNA
atatctggagaaagtcgccaacggcacaatcacggatgtggacaaaaacgcgctcacctcccgcgcgtatggtcg

SEQ ID NO: 666528 - DNA, 75 bp, synthetic construct
  source 1..75: mol_type = other DNA
tgcagctgtaattaccgacgtcggaatttcatttgccaaagaactggaaacggccggacaaaaatggtctcttgg

SEQ ID NO: 666529 - DNA, 75 bp, synthetic construct
  source 1..75: mol_type = other DNA
tcttacggaactgtcagcgtaaacggaaaagtaaacgatgcagacctggattatctggacaaagttgccaatgga

SEQ ID NO: 666530 - DNA, 75 bp, synthetic construct
  source 1..75: mol_type = other DNA
aactatcatcgacaccggcattggcgacaccatcggcatgttgatgtcccacggccccatcccgccctacattat

SEQ ID NO: 666531 - DNA, 75 bp, synthetic construct
  source 1..75: mol_type = other DNA
atgaaattacggatagtgatgccactggtgctgtctgctgccgcactaacaggatgccagcagctcaacgatggc

SEQ ID NO: 666532 - DNA, 75 bp, synthetic construct
  source 1..75: mol_type = other DNA
atgaaaggacataacttcttaccactggcggtctctctggtgtttctttctggctgccagcagctcaacgatggc

SEQ ID NO: 666533 - DNA, 75 bp, synthetic construct
  source 1..75: mol_type = other DNA
gcaatgatgcgatgggtggaaccggggtggcttcctctcattacggtgtggcacctctggccaacccggcgctgc

SEQ ID NO: 666534 - DNA, 75 bp, synthetic construct
  source 1..75: mol_type = other DNA
accggacaggaggtggacaaaagccgcctgacatcacaggcctttgcccgcgcggcactgatcactgatgtgggt

SEQ ID NO: 666535 - DNA, 75 bp, synthetic construct
  source 1..75: mol_type = other DNA
gttcaccttgatgtggcaggcctgatcggcacggacaacacttacggtgcggtcgcacagttgcagttcaccttc

SEQ ID NO: 666536 - DNA, 75 bp, synthetic construct
  source 1..75: mol_type = other DNA
ataggtaatactgaccagccatggataaatttctacgttaaagatacctccgtacatttttatgtggacgaaccg

SEQ ID NO: 666537 - DNA, 75 bp, synthetic construct
  source 1..75: mol_type = other DNA
cggtatttgccctcaatcagaaataacacttatccagcagaaatctaatttatctaaaaagcttaatatttgcat

SEQ ID NO: 666538 - DNA, 75 bp, synthetic construct
  source 1..75: mol_type = other DNA
ttgtttccatttcgtcgtaacgttcttgcatttgccgctctgttggcgctctcctcccccgtaattgctggcaaa

SEQ ID NO: 666539 - DNA, 75 bp, synthetic construct
  source 1..75: mol_type = other DNA
gtgcggtcaataacgtgccctatgccgtggggatcaacaaccacatgggcagcaagatgacctctaacctgtttg

SEQ ID NO: 666540 - DNA, 75 bp, synthetic construct
  source 1..75: mol_type = other DNA
atgcactgcggtggcagcgacgcgttctccggcgttaccgctaaccccgctgtcggctacgcctctgacctgctg

SEQ ID NO: 666541 - DNA, 75 bp, synthetic construct
  source 1..75: mol_type = other DNA
agaaaaggctttgtggatagagtatatagaaagtataactttaagcgctatactgagattacaaaaatatggtta

SEQ ID NO: 666542 - DNA, 75 bp, synthetic construct
  source 1..75: mol_type = other DNA
gataagtacaggtatttattacagtaatgcgaagttagatgttgactccatatccctaaaaaaattagatgactt

SEQ ID NO: 666543 - DNA, 75 bp, synthetic construct
  source 1..75: mol_type = other DNA
attatttcatgaacgaacgaatacagccccacttagtagaaatgtttatccgtgggattattcgtacaaatccaa

SEQ ID NO: 666544 - DNA, 75 bp, synthetic construct
  source 1..75: mol_type = other DNA
tggattccgtattgaatttcacaaaattatttcatgaacgaacgaatacagccccacttagtagaaatgtttatc

SEQ ID NO: 666545 - DNA, 75 bp, synthetic construct
  source 1..75: mol_type = other DNA
ggcaacttacgaacgctttacctctatcggcccgctgatggagaaaatcggtaacggcggtaaagggattgcctg

SEQ ID NO: 666546 - DNA, 75 bp, synthetic construct
  source 1..75: mol_type = other DNA
cacacgccagagagatggcgaccaaagcgcataacagcggtcatgaagtactgattcatctaccaatggcgccgt

SEQ ID NO: 666547 - DNA, 75 bp, synthetic construct
  source 1..75: mol_type = other DNA
agcgcataacagcggtcacgaagtgttgattcatctgccgatggcaccgttgagtaaacagccgctggagaaaaa

SEQ ID NO: 666548 - DNA, 75 bp, synthetic construct
  source 1..75: mol_type = other DNA
atccgttccgtggagtgaagctgtgtaaaccgaagaaaccgctggaaccggtttatgctaatcgcttctttgaag

SEQ ID NO: 666549 - DNA, 75 bp, synthetic construct
  source 1..75: mol_type = other DNA
ccggtatggccggagcgacggggtacgaaggtattggtggattcccgatggcgtttacagatttcgctaacctgg

SEQ ID NO: 666550 - DNA, 75 bp, synthetic construct
  source 1..75: mol_type = other DNA
ctgggcgatctggcgcagcaaatgaacagtccatcattaattattattggccgggttgttggtttgcgcgataaa

SEQ ID NO: 666551 - DNA, 75 bp, synthetic construct
  source 1..75: mol_type = other DNA
gtgcaatgcaggcattccgttctcggtggttccgggtattaccgcagcttctggctgctctgcctattcgggtat

SEQ ID NO: 666552 - DNA, 75 bp, synthetic construct
  source 1..75: mol_type = other DNA
tgaatcaggccgcgactattcagcaaaagctgattgaacacggtatgcctggcgaaatgccggtggcaattgtcg

SEQ ID NO: 666553 - DNA, 75 bp, synthetic construct
  source 1..75: mol_type = other DNA
atggctttgccttattgaaaacaaccgttcctggtgttgtttattctgtggaacttgtttgtgtaagttgtggtg

SEQ ID NO: 666554 - DNA, 75 bp, synthetic construct
  source 1..75: mol_type = other DNA
ataggcaatgagaatcaaccatggataaattttttcgttgatacaagctccctgcatttttacgtggaggaaccc

SEQ ID NO: 666555 - DNA, 75 bp, synthetic construct
  source 1..75: mol_type = other DNA
aagatcagggcaacgtcagtggcaaccaggtaacgcttgggaacagctatgtatcggaagtgaaaaatgggctta

SEQ ID NO: 666556 - DNA, 75 bp, synthetic construct
  source 1..75: mol_type = other DNA
aaacgcagacaacagcaacgagattatatttaactacgctaactggtcaaacaaccttctttattttccgtttac

SEQ ID NO: 666557 - DNA, 75 bp, synthetic construct
  source 1..75: mol_type = other DNA
gtttcggaagtgaaaaatgggcttacacgggaaattcctttttctatccgcgctgaatactgttacgccagtaaa

SEQ ID NO: 666558 - DNA, 75 bp, synthetic construct
  source 1..75: mol_type = other DNA
cattattgctactgcactggccattggctgcgcaacactgattatgtcaacgttagggatgatgatcggtcgttt

SEQ ID NO: 666559 - DNA, 75 bp, synthetic construct
  source 1..75: mol_type = other DNA
aacgtggtcgatgcgccgaaagccgccagctttattatgccgtcgattattgaccgctcaccgctcatggtagcg

SEQ ID NO: 666560 - DNA, 75 bp, synthetic construct
  source 1..75: mol_type = other DNA
cgaccgctcaccgctcatggtcgcggtctcctctggcggtacctctccggtcctggcgcgactgttacgcgaaaa

SEQ ID NO: 666561 - DNA, 75 bp, synthetic construct
  source 1..75: mol_type = other DNA
ggtaaaagatggtggaaacggcactatcagtccgggagattttaccgggaatgcgacgttttctttttcctatga

SEQ ID NO: 666562 - DNA, 75 bp, synthetic construct
  source 1..75: mol_type = other DNA
atcgtgcgttatttcttcgcttccggtagtgctatatcgttgctatgttaccggtatttgccatgctggcgaacg

SEQ ID NO: 666563 - DNA, 75 bp, synthetic construct
  source 1..75: mol_type = other DNA
tgcgcagctctatggtcaacgtacagaaggcgaacaggagcaagcgcaatggcgtaaacagattgcggcattgac

SEQ ID NO: 666564 - DNA, 75 bp, synthetic construct
  source 1..75: mol_type = other DNA
ttctttgatcatcagggcgatgcattactaaaagtttatgccaccgacaataccgatatggcggcatggagtgag

SEQ ID NO: 666565 - DNA, 75 bp, synthetic construct
  source 1..75: mol_type = other DNA
agtaaaattctttgaatggttagccgaagtctttaaaaataatctggcatttgatggtcacggtaacgttgcctt

SEQ ID NO: 666566 - DNA, 75 bp, synthetic construct
  source 1..75: mol_type = other DNA
atattaaccttcctggtgcatatcaccctcggcgtatggtggtggaatatgctgatcggctggaacatgctgtaa

SEQ ID NO: 666567 - DNA, 75 bp, synthetic construct
  source 1..75: mol_type = other DNA
gtctccggcgcaccgttaatgttaactgcgctggcgctgcttttctccaactcctatggcggcatggttactcac

SEQ ID NO: 666568 - DNA, 75 bp, synthetic construct
  source 1..75: mol_type = other DNA
gggtttgtcgctgttgttgttattcgtcgcgcttgctcatgctattggctggcctgcggaccgcggtatgctcac

SEQ ID NO: 666569 - DNA, 75 bp, synthetic construct
  source 1..75: mol_type = other DNA
gggcttgtcgctgttgttgttatttgtcgcacttgcacatgccatcggctggcctgcggagcgaggcatgctcac

SEQ ID NO: 666570 - DNA, 75 bp, synthetic construct
  source 1..75: mol_type = other DNA
gatctcggtgcgacgccgctgaaagtgtttttcgtcattacgctaccgatgatcatgcccgcgatcatttctggc

SEQ ID NO: 666571 - DNA, 75 bp, synthetic construct
  source 1..75: mol_type = other DNA
cgcttgtcatgccggatgtgataactggtctgtcgttgttgttattgttcgttgcccttgctcatgccattggct

SEQ ID NO: 666572 - DNA, 75 bp, synthetic construct
  source 1..75: mol_type = other DNA
aagtctgactattgccgcctgtgcggcgaccgcggcggcgatcctcgggactattgcggcggtcgtgctggtacg

SEQ ID NO: 666573 - DNA, 75 bp, synthetic construct
  source 1..75: mol_type = other DNA
acgcgatgatgagcgcggttggtttaagcctgacaattgcagcctgtgcggcaacggcagcggcgatcctcggga

SEQ ID NO: 666574 - DNA, 75 bp, synthetic construct
  source 1..75: mol_type = other DNA
accggaaaaaagcccgcgtcgtgttggacattacctgatgatgtccatttacatggtcaccaaaaccaccagcta

SEQ ID NO: 666575 - DNA, 75 bp, synthetic construct
  source 1..75: mol_type = other DNA
atgacaaatcagcagcaaatagagttcatccttgagcagattcgaaaaatgcgagaaaagaaccagccagacatg

SEQ ID NO: 666576 - DNA, 75 bp, synthetic construct
  source 1..75: mol_type = other DNA
cgagggtgtggaaaggcactgttgcaaagttagcgatgaggcagccttttgtcttattcaaaggccttacatttc

SEQ ID NO: 666577 - DNA, 75 bp, synthetic construct
  source 1..75: mol_type = other DNA
ttcgtcggcttcgtcaaccaatggaggaacaccaccatgaacgccaatgaaccgagcaccagttgctgcgtgtgc

SEQ ID NO: 666578 - DNA, 75 bp, synthetic construct
  source 1..75: mol_type = other DNA
gcagcgcgccgtctggcatattttctggtgtcgtatattgcggggatcctttgttccgggctggtgggttcaaag

SEQ ID NO: 666579 - DNA, 75 bp, synthetic construct
  source 1..75: mol_type = other DNA
aaaatcctgacgttcctgaataatcaggatatcggctcgctgggggcgctcataacgcgccgggggggttcaggt

SEQ ID NO: 666580 - DNA, 75 bp, synthetic construct
  source 1..75: mol_type = other DNA
gactggcaggcgtttcagtcgccaccgtttcccgcgtcattaataattcacccaaagccagcgaagcttcccggc

SEQ ID NO: 666581 - DNA, 75 bp, synthetic construct
  source 1..75: mol_type = other DNA
aaggggaaaacccgtatgcgaacaagcgtaacaccctgacgccgacccagatgcgcaagcgtaagcgcctgatga

SEQ ID NO: 666582 - DNA, 75 bp, synthetic construct
  source 1..75: mol_type = other DNA
cgcaggtctgatgcctgcggatgaagccattgccaaacatctgcgttctcgcgaaaagcccaccttcctggtggc

SEQ ID NO: 666583 - DNA, 75 bp, synthetic construct
  source 1..75: mol_type = other DNA
acgctcggactgttgccgccgggccagttcctgcccgtgatcgaatcgtccggcctgatgccggaaatcggcgca

SEQ ID NO: 666584 - DNA, 75 bp, synthetic construct
  source 1..75: mol_type = other DNA
atgccaacgtggtgatgttggtgattgacgcccgcgaaggtatttccgatcaggatctctccctgctgggcttta

SEQ ID NO: 666585 - DNA, 75 bp, synthetic construct
  source 1..75: mol_type = other DNA
cggtcgtgcggaaattgaaggccgtgagtttatctgcattgataccggcgggattgatggcacagaagacggtgt

SEQ ID NO: 666586 - DNA, 75 bp, synthetic construct
  source 1..75: mol_type = other DNA
ttctcaatagtgggcgctcacttgtgattgtagtgaacaagtgggacggcctgagccaggaagtgaaagagcaag

SEQ ID NO: 666587 - DNA, 75 bp, synthetic construct
  source 1..75: mol_type = other DNA
atgaatactaatgtagtatcaaacagtaaaagacttattcgtttaccagaagtattaaatcgtactggtttatgt

SEQ ID NO: 666588 - DNA, 75 bp, synthetic construct
  source 1..75: mol_type = other DNA
ggtgttaactgtacaggctcctgcagctggaaaatctacgttaaaaagggtctggttacctgggaaatccaacag

SEQ ID NO: 666589 - DNA, 75 bp, synthetic construct
  source 1..75: mol_type = other DNA
ggtgttaactgtacaggctcctgcagctggaaaatctacgttaaaaacggtctggtcacctgggaaaaccaacag

SEQ ID NO: 666590 - DNA, 75 bp, synthetic construct
  source 1..75: mol_type = other DNA
ggtgttaactgtacaggctcctgcagctggaaaatctacgttaaaaacggtctggtaacctgggaaacccaacag

SEQ ID NO: 666591 - DNA, 75 bp, synthetic construct
  source 1..75: mol_type = other DNA
cagacgccgccgggcctgcatcatcaccgcgcgttgtatgactgttatatcaccgccgcgttgcttatcgatatt

SEQ ID NO: 666592 - DNA, 75 bp, synthetic construct
  source 1..75: mol_type = other DNA
acattgtttacttggtaatgctttcgatcccagggttatcgcacagttgcccgtaaaatcatgggatttagtaat

SEQ ID NO: 666593 - DNA, 75 bp, synthetic construct
  source 1..75: mol_type = other DNA
aatcaagatagagcatgccttatcgatgctaatttttcgacaatgtggttattagatgattcaaaatggtcagca

SEQ ID NO: 666594 - DNA, 75 bp, synthetic construct
  source 1..75: mol_type = other DNA
tttcaaaggaggagcaggataaagttgccgtcgataaggtggctgctgctgttgcctggcaggagcgcatgaaca

SEQ ID NO: 666595 - DNA, 75 bp, synthetic construct
  source 1..75: mol_type = other DNA
tctcaaaagaagatcaggacaaggtctcagtcgataaagccgccgctgccgttgcctggcaggaaaggatgaaca

SEQ ID NO: 666596 - DNA, 75 bp, synthetic construct
  source 1..75: mol_type = other DNA
caaagatgaagggccgattctgtttattcataccggcggcgcgcctgcgctgttcgcctatcatccccacgttta

SEQ ID NO: 666597 - DNA, 75 bp, synthetic construct
  source 1..75: mol_type = other DNA
ggtgttaactgtacaggctcctgcagctggaaaatctacgttaaaaatggtctggttacctgggaaagccaacag

SEQ ID NO: 666598 - DNA, 75 bp, synthetic construct
  source 1..75: mol_type = other DNA
ggtgttaactgtacaggctcctgcagctggaaaatctacgttaaaaaaggtctggtcacctgggaaacccaacag

SEQ ID NO: 666599 - DNA, 75 bp, synthetic construct
  source 1..75: mol_type = other DNA
actaaaaccatcgccattacccctgactactctgaagtggccaaattgtgcgaccagtggctggcaccaaagcaa

SEQ ID NO: 666600 - DNA, 75 bp, synthetic construct
  source 1..75: mol_type = other DNA
accgcgcgttgtatgactgttatatcaccgccgcgttgcttatcgatattatgaacacctccggctggacggcag

SEQ ID NO: 666601 - DNA, 75 bp, synthetic construct
  source 1..75: mol_type = other DNA
tatctgttgatgccaacgtatcgtattaacggtactgaaagtcctttgttgaccgatccttcaacgccgaacttc

SEQ ID NO: 666602 - DNA, 75 bp, synthetic construct
  source 1..75: mol_type = other DNA
gggttgcctgtcagccatacctccatcagccggatggagcatgccctgaaatacctgtatccctggatccccgac

SEQ ID NO: 666603 - DNA, 75 bp, synthetic construct
  source 1..75: mol_type = other DNA
ctgaccgtgctggccggtgatgcaccgctgacggtgtcccccgtcagtctgactgacctgctgacaggtggcagt

SEQ ID NO: 666604 - DNA, 75 bp, synthetic construct
  source 1..75: mol_type = other DNA
gaattgttgatgcttatgaaatctctctggagctgccatcacagacatggacggatagcgacggtaatcgccagc

SEQ ID NO: 666605 - DNA, 75 bp, synthetic construct
  source 1..75: mol_type = other DNA
ttatctcagatccctgccgctacccccaaagcaaggggcggcaatgatgagcgaaaactgattttcagcattgag

SEQ ID NO: 666606 - DNA, 75 bp, synthetic construct
  source 1..75: mol_type = other DNA
tcgtgccacttaaagaaggtaattcaccctacaccaccgtttgtgaagccattcaatattacgttctctctgaaa

SEQ ID NO: 666607 - DNA, 75 bp, synthetic construct
  source 1..75: mol_type = other DNA
acgatattaaaagttcaattttctcccgtggactggatacggtgcccaaagtcacccggatacctgagagtgagc

SEQ ID NO: 666608 - DNA, 75 bp, synthetic construct
  source 1..75: mol_type = other DNA
gcccggtgagtggatctgcacgatgaaattggcccgtcgtttgtggccggggatcaagtacagcaacatggcgct

SEQ ID NO: 666609 - DNA, 75 bp, synthetic construct
  source 1..75: mol_type = other DNA
cctgcggtttacagggaggggtcgtggagattgcctctgttgatgttgttgacgggaaaatcgttaaccctatga

SEQ ID NO: 666610 - DNA, 75 bp, synthetic construct
  source 1..75: mol_type = other DNA
ggtggtgagccggtcttcagtggtgatgctgtggaagatggtactgccgggtcagccgtgccatccgtcatgacc

SEQ ID NO: 666611 - DNA, 75 bp, synthetic construct
  source 1..75: mol_type = other DNA
tgttctcctgtagtggcgtttctggcggggcttgccggtgatgcaccgcggacagtcctccccgtgagtctgaaa

SEQ ID NO: 666612 - DNA, 75 bp, synthetic construct
  source 1..75: mol_type = other DNA
atggcacataaaccactggatctcggggcggctattatgcagcccggtcgtcagaccactggtgtcggcaatgtg

SEQ ID NO: 666613 - DNA, 75 bp, synthetic construct
  source 1..75: mol_type = other DNA
cttcccgcaggcgttacctgcaccaccggatgtactgaaaacattcttcccgaatatcccggtggccacaccgac

SEQ ID NO: 666614 - DNA, 75 bp, synthetic construct
  source 1..75: mol_type = other DNA
aagtgattttcgccgcctatcaaaccagcggtagcgccattatcaccaactacttctcttccggcgtcgcggtgt

SEQ ID NO: 666615 - DNA, 75 bp, synthetic construct
  source 1..75: mol_type = other DNA
gtggcgcgtttttgatttttccgttctgaacggatcgtttgggcaactgcctggtgcgaacggagccaccacctc

SEQ ID NO: 666616 - DNA, 75 bp, synthetic construct
  source 1..75: mol_type = other DNA
cactttacgcttgaggctaatccggatactggtgcgccaaccaaagtattagcgcccgatacggcgggtaaattt

SEQ ID NO: 666617 - DNA, 75 bp, synthetic construct
  source 1..75: mol_type = other DNA
ggcatgtatttctatatggctgatgcggcgacctttactgattgcgcgaccggaaaacgttttattgtggcgaat

SEQ ID NO: 666618 - DNA, 75 bp, synthetic construct
  source 1..75: mol_type = other DNA
acatgaacagcaggcaatggcctggtaaagcggctattggtcgtctgaaaagtgaggaactggcgcaatataatt

SEQ ID NO: 666619 - DNA, 75 bp, synthetic construct
  source 1..75: mol_type = other DNA
cgagcaccgagcgcgaagttgacctctatcgagtaggcagcctgacggctgcggcttgtcatggtctgcaattac

SEQ ID NO: 666620 - DNA, 75 bp, synthetic construct
  source 1..75: mol_type = other DNA
tgctgattgatcaggataaatgccgtggctggcgtttgtgcataagcggttgtccgtacaaaaaaatctacttca

SEQ ID NO: 666621 - DNA, 75 bp, synthetic construct
  source 1..75: mol_type = other DNA
aacgtcgaaaccctgtgtaacgttccggcgatcctcgctaacggcgtggagtggtatcagaacatctcgaaaagt

SEQ ID NO: 666622 - DNA, 75 bp, synthetic construct
  source 1..75: mol_type = other DNA
ggctggattatctggacgcactggaactggttgatatctccagtgctccagatattgaatggcctacgcctccgg

SEQ ID NO: 666623 - DNA, 75 bp, synthetic construct
  source 1..75: mol_type = other DNA
aaactgggaagaactgctgggcggcgagtttgaaaaacgtgcccgcgaccgcaacttcgaggccatgcaaaagga

SEQ ID NO: 666624 - DNA, 75 bp, synthetic construct
  source 1..75: mol_type = other DNA
cggctgccatacctgttcggtgacctgtaacaacgtctggaccggacgcgaaggcatggagtacgcatggtttaa

SEQ ID NO: 666625 - DNA, 75 bp, synthetic construct
  source 1..75: mol_type = other DNA
ctttcgcctcctacggtacatgggcgcgaaccgctgacaaactggtattaaccgacagtaaaggtgaaaagtcat

SEQ ID NO: 666626 - DNA, 75 bp, synthetic construct
  source 1..75: mol_type = other DNA
atgaccactcaactggaacaggcctgggagcttgcgaaacagcgtttcgcggcagtagggattgatgtcgaggag

SEQ ID NO: 666627 - DNA, 75 bp, synthetic construct
  source 1..75: mol_type = other DNA
gtcatatggtaaagaaaattttattgccatgagtcatacgaaaagcgagttaactggagggaaacgtcggtaccg

SEQ ID NO: 666628 - DNA, 75 bp, synthetic construct
  source 1..75: mol_type = other DNA
tgatgattaagcgtgaacacaatattcttattgttgggaattctgcctcccacattgataagttttttaaggagt

SEQ ID NO: 666629 - DNA, 75 bp, synthetic construct
  source 1..75: mol_type = other DNA
ggcgacccataaacacatcaaaaccttgttctcttcgcgttactggcggcgcacggcgtttaacagcgtcttctt

SEQ ID NO: 666630 - DNA, 75 bp, synthetic construct
  source 1..75: mol_type = other DNA
tccggcgcaccatatcgacgccgttgagagcaaattgtttggcattggcgcggagagctacacggttggctccaa

SEQ ID NO: 666631 - DNA, 75 bp, synthetic construct
  source 1..75: mol_type = other DNA
ctggaagagcagaaatcgttgccgtggcaggcggtctgggaaatgtattgccaacgtcacgataccccagcgggt

SEQ ID NO: 666632 - DNA, 75 bp, synthetic construct
  source 1..75: mol_type = other DNA
tgtgctgattgtgaagggatcgaaacctctttgtttctcgaaaaagatggaacctgggtaatgaatgagcgctat

SEQ ID NO: 666633 - DNA, 75 bp, synthetic construct
  source 1..75: mol_type = other DNA
cctcgccttgagcgagattatctggcgatacgcgatacgcgatacggcagagaaagccgtattgttggcaatgga

SEQ ID NO: 666634 - DNA, 75 bp, synthetic construct
  source 1..75: mol_type = other DNA
accgacagcaaaggtgaaaagtcatattatcgggcgaaaggagatgcgctggagatgctcgatcgtgaaggtaat

SEQ ID NO: 666635 - DNA, 75 bp, synthetic construct
  source 1..75: mol_type = other DNA
caattcgcaatacagatatgtttggatccaaatgatttgactttaggtgttcagcgaataagtgagcagtatttt

SEQ ID NO: 666636 - DNA, 75 bp, synthetic construct
  source 1..75: mol_type = other DNA
tatcgccccatcccctgaaaacagtgtcgccatcaccctacacgccggtgatttcgccgtctttatgcctgagga

SEQ ID NO: 666637 - DNA, 75 bp, synthetic construct
  source 1..75: mol_type = other DNA
tggggttacaggaggcgaaagttgtcccggccgttgtgttttctagttttactttagtgtaccaagtaaaaggag

SEQ ID NO: 666638 - DNA, 75 bp, synthetic construct
  source 1..75: mol_type = other DNA
cagtagttattccaagattgaagaaaattggatattcaaacttatggaaacaatgtaaaccaatcggtaaacctc

SEQ ID NO: 666639 - DNA, 75 bp, synthetic construct
  source 1..75: mol_type = other DNA
gtgatgacggtaaatatcgtcaaatcatcaacgtagccgatggttccgaagcccatgacgccgttacggttcgtc

SEQ ID NO: 666640 - DNA, 75 bp, synthetic construct
  source 1..75: mol_type = other DNA
aaactgaaagcaagttgagcggtggtatcgcttctgcaatggcaatgaccggtctgccgcaggcttacactccag

SEQ ID NO: 666641 - DNA, 75 bp, synthetic construct
  source 1..75: mol_type = other DNA
aatacgatctctgtaggctcatctactaatcaacgtcgtatcaccaacgtagccgcaggtaaaaacgacaccgat

SEQ ID NO: 666642 - DNA, 75 bp, synthetic construct
  source 1..75: mol_type = other DNA
gcatatctatgcggagctttttaactcaaaggataaaacgaccagcaatatgattataacgcatgtaatggatca

SEQ ID NO: 666643 - DNA, 75 bp, synthetic construct
  source 1..75: mol_type = other DNA
tgtctgaggtggattttaaaggggttaagcaggcattagccaaaatgcattacactgttctggcagaatcaatat

SEQ ID NO: 666644 - DNA, 75 bp, synthetic construct
  source 1..75: mol_type = other DNA
ctgaaatcttttatgttgtgtccttgcatatctatgcggagctttttaactcaaaggataaaacgaccagtaata

SEQ ID NO: 666645 - DNA, 75 bp, synthetic construct
  source 1..75: mol_type = other DNA
aaatggcactgcaattggtgctcaagccagtgctcaggggaaaaattcagttgctctgggtgctggttctgtagc

SEQ ID NO: 666646 - DNA, 75 bp, synthetic construct
  source 1..75: mol_type = other DNA
ctaccaaccagcgtcgtatcaccaacgttgctgcaggtgttaatgccaccgatgcggttaacgtttcgcagctga

SEQ ID NO: 666647 - DNA, 75 bp, synthetic construct
  source 1..75: mol_type = other DNA
aagatatcttctaacagcactgatgccattaatggctcacaactttatggcgtagcggattcatttacgtcatat

SEQ ID NO: 666648 - DNA, 75 bp, synthetic construct
  source 1..75: mol_type = other DNA
tggtacagatgccaccagcaccatcaccaacgttaaagccggcactatttctgctaccagtacggatgcggttaa

SEQ ID NO: 666649 - DNA, 75 bp, synthetic construct
  source 1..75: mol_type = other DNA
atgttcgaaaacgctttttttttgattatccaaaatttgtttataaatatataaagcaaaatttacgcaattctt

SEQ ID NO: 666650 - DNA, 75 bp, synthetic construct
  source 1..75: mol_type = other DNA
gttaacggttcccagttaaacgcaaccaatattctggttacgcaaaatagccaaatgattaaccagcttgctggt

SEQ ID NO: 666651 - DNA, 75 bp, synthetic construct
  source 1..75: mol_type = other DNA
ctttcagatttcggaccgaaacaggtaattagttttggtggtggtactggaaagggtaattattgggatccaaat

SEQ ID NO: 666652 - DNA, 75 bp, synthetic construct
  source 1..75: mol_type = other DNA
gcgggcgcagcaatcaccattaccgtgttgacgctggctgcggttaatacgctgggtattccggtggatctacca

SEQ ID NO: 666653 - DNA, 75 bp, synthetic construct
  source 1..75: mol_type = other DNA
tcggcttcgcactgcgtcacggtaacgagaccaccaaaaacctggttaacgatatgtcgaatgccgttaccttta

SEQ ID NO: 666654 - DNA, 75 bp, synthetic construct
  source 1..75: mol_type = other DNA
aaaccgcactgaactcttcaactgacgtgctattcactgcggctgtttgccaggcagaagacgagcgtctggcaa

SEQ ID NO: 666655 - DNA, 75 bp, synthetic construct
  source 1..75: mol_type = other DNA
gaagtggtgaaaaattcatctgtggtggatggtaaactcgttgaaacagaagagttagtcattcattttgaatat

SEQ ID NO: 666656 - DNA, 75 bp, synthetic construct
  source 1..75: mol_type = other DNA
atttatcgtattttaaatgcacgtgctgatgaaattaacgactatctggataataagctgaaggccaaaatccag

SEQ ID NO: 666657 - DNA, 75 bp, synthetic construct
  source 1..75: mol_type = other DNA
ggcgaggtggttttacgtttcttgcctacaaaagtccgtcgcctggttgggtgtataggggggcgctatggcgat

SEQ ID NO: 666658 - DNA, 75 bp, synthetic construct
  source 1..75: mol_type = other DNA
tcggcttcgcactgcgtcacggtaacgagaccaccaaaaacctggtcaacgatatgtcgaatgccgtcaccttta

SEQ ID NO: 666659 - DNA, 75 bp, synthetic construct
  source 1..75: mol_type = other DNA
atagttttctaaatggggaaagcaacacccctttcgctgtagacggacctttccttactgacgatgaaataaaaa

SEQ ID NO: 666660 - DNA, 75 bp, synthetic construct
  source 1..75: mol_type = other DNA
cgcggaaccggaatttttgcgcaaggcattcgaagaaccagataacgccgacgatatttataaaacgattgtaga

SEQ ID NO: 666661 - DNA, 75 bp, synthetic construct
  source 1..75: mol_type = other DNA
aaaccgcgctgaactcgtcaactgacgtgctgttcaccgcggcagcatgccaggcagaagatgagcgtctggcaa

SEQ ID NO: 666662 - DNA, 75 bp, synthetic construct
  source 1..75: mol_type = other DNA
gcaggtggttgccgtcggctttatcatcggcgtattgcaggactcttgcgaaaccgcgctgaactcttcaactga

SEQ ID NO: 666663 - DNA, 75 bp, synthetic construct
  source 1..75: mol_type = other DNA
ctgatcccgctggcctgtaatatgttcggtatttcgaacgatatcgccatgcaggtggttgccgtcggctttatc

SEQ ID NO: 666664 - DNA, 75 bp, synthetic construct
  source 1..75: mol_type = other DNA
tatcaataggtcaggcgattattggctagttactatttggaatgaagttccatcaaccaagcgggagttgcttct

SEQ ID NO: 666665 - DNA, 75 bp, synthetic construct
  source 1..75: mol_type = other DNA
gccgctattgccgggatcacctattccggccatgtgcatcaggataacggcaaaggcagtaagacaggagcgccg

SEQ ID NO: 666666 - DNA, 75 bp, synthetic construct
  source 1..75: mol_type = other DNA
gggatcacctattccggccatgtacatcatgacaacggtgaaggcagtaagacaggagcgccggagaatggctga

SEQ ID NO: 666667 - DNA, 75 bp, synthetic construct
  source 1..75: mol_type = other DNA
aggccacgttgcagtggggcggaccgtgggaaacgacatggtatggtggtggacaatatgctgaatattaccgtg

SEQ ID NO: 666668 - DNA, 75 bp, synthetic construct
  source 1..75: mol_type = other DNA
ggtggcgcgggggctaaagatggctttctctttgcgctggagctggcaccgtcagtcattctctctctggggatt

SEQ ID NO: 666669 - DNA, 75 bp, synthetic construct
  source 1..75: mol_type = other DNA
atgaccacacaactggaacaggcctgggaactggcgaaacagcgtttcgcggcggtagggattgatgtcgaggag

SEQ ID NO: 666670 - DNA, 75 bp, synthetic construct
  source 1..75: mol_type = other DNA
atggaatccctgacgttacaacctgtcgctcgtgtcgatggtacgattaatctgcctggttccaagagcgtatct

SEQ ID NO: 666671 - DNA, 75 bp, synthetic construct
  source 1..75: mol_type = other DNA
gtgacgattcttgatcccaaatgcacggccaaaacatttccggattatttcgagcagctggcgcggattagccag

SEQ ID NO: 666672 - DNA, 75 bp, synthetic construct
  source 1..75: mol_type = other DNA
cctggaacaagagaattacccaccgctgcgtttacaggggggttttgtggggggcaacgtagaagtcgatggctc

SEQ ID NO: 666673 - DNA, 75 bp, synthetic construct
  source 1..75: mol_type = other DNA
aaatgcagaatgtgcagctcaccggcatggacggcgaaacctttgatgatgtggagcgcccccagcagtacgggc

SEQ ID NO: 666674 - DNA, 75 bp, synthetic construct
  source 1..75: mol_type = other DNA
tcagggactgttcacgatgtctgatgccgttattgccgggatacggtattccggtcatgtgcatcatgataacgg

SEQ ID NO: 666675 - DNA, 75 bp, synthetic construct
  source 1..75: mol_type = other DNA
atgaaagtatgaccgttgatacacccagaaccacgtttaccggcgacgttgagatccagaaaggtctgggcgtta

SEQ ID NO: 666676 - DNA, 75 bp, synthetic construct
  source 1..75: mol_type = other DNA
ccggattgctcaattataatttcagcggaaatagtgtacagaatcggattgggggtaacagccattatgcatatt

SEQ ID NO: 666677 - DNA, 75 bp, synthetic construct
  source 1..75: mol_type = other DNA
ttaccaggaatataagcgactgggattaaaatctctttttgtatcaggggtaatgtttgaacagtttttaacagg

SEQ ID NO: 666678 - DNA, 75 bp, synthetic construct
  source 1..75: mol_type = other DNA
ctgctgatcaacaccggtttaagcaaagaacagcgtcgggaaaaagcgttgtcgatgatggcgaaagtcggcctg

SEQ ID NO: 666679 - DNA, 75 bp, synthetic construct
  source 1..75: mol_type = other DNA
aggcattgctctccgcgacaccacgcctgaacccggacgatcgtcgcgaacgcatcaaacttaccggtgaactgc

SEQ ID NO: 666680 - DNA, 75 bp, synthetic construct
  source 1..75: mol_type = other DNA
gtgaccgattttcgtatggcggtgaaagcggaagagaatgaagaggttgtctttagctggattgaatacctcttc

SEQ ID NO: 666681 - DNA, 75 bp, synthetic construct
  source 1..75: mol_type = other DNA
aaaagatgatgtcggacccacggatgaaagagttcggcgagtccatgccgtttgatggcaagcgaatgatctatg

SEQ ID NO: 666682 - DNA, 75 bp, synthetic construct
  source 1..75: mol_type = other DNA
tagcaattccgaatgatccgaccaatctggggcgtgcgctgttactgctgcaaaaagagaaactgatcaccctgc

SEQ ID NO: 666683 - DNA, 75 bp, synthetic construct
  source 1..75: mol_type = other DNA
ttcaggttaagccgaaattcaccgactattacaacctcgcttataacaaacgcgggaaattacagctcaccgtta

SEQ ID NO: 666684 - DNA, 75 bp, synthetic construct
  source 1..75: mol_type = other DNA
accaactggagttataacagtagcgacagatcatcaggtagcaaaaataaatggcagcatatcaatacctggctt

SEQ ID NO: 666685 - DNA, 75 bp, synthetic construct
  source 1..75: mol_type = other DNA
ctattacaatctcgcttataacaaacgcgggaaattacaactcaccgttactcagcaactcgggcgcacatcaac

SEQ ID NO: 666686 - DNA, 75 bp, synthetic construct
  source 1..75: mol_type = other DNA
tcttgaacaagataatcaggcgcatggttataaactggtagcggtgggaaatacgtttgtcttccccatggcggg

SEQ ID NO: 666687 - DNA, 75 bp, synthetic construct
  source 1..75: mol_type = other DNA
ttcctcgcagtgatatttttctttgggtttaaatataaccatgaccctgaaaagataacgcatcgttcagttaca

SEQ ID NO: 666688 - DNA, 75 bp, synthetic construct
  source 1..75: mol_type = other DNA
gtggcatggcagtagattacttttcggtggatggcgtaaaagactggcaaactatctggctggtgtttgcaggat

SEQ ID NO: 666689 - DNA, 75 bp, synthetic construct
  source 1..75: mol_type = other DNA
atcgacatcacactcaatctgatgaagacgtttggtgttgaaattgaaaatcagcactatcaacaatttgtcgta

SEQ ID NO: 666690 - DNA, 75 bp, synthetic construct
  source 1..75: mol_type = other DNA
gggagcctctttcctgatgccagccattacagcggtcgtcctgggcggtgccaatatctacggcggttccggatc

SEQ ID NO: 666691 - DNA, 75 bp, synthetic construct
  source 1..75: mol_type = other DNA
atctggatgtgctgggcttgcctgtccccctgctcttctttctcgtcagcgttatctttttttggttgctgatgc

SEQ ID NO: 666692 - DNA, 75 bp, synthetic construct
  source 1..75: mol_type = other DNA
acgagcgcctggcgatattcagggggaactgacggaatggtcggtgcgcccgcaagagttcggtgaatttctggt

SEQ ID NO: 666693 - DNA, 75 bp, synthetic construct
  source 1..75: mol_type = other DNA
aacaaccaggttgccgcattccgtgaaacgctgggcgatatcgatcctgaacgcgttcatttcatgatctgccaa

SEQ ID NO: 666694 - DNA, 75 bp, synthetic construct
  source 1..75: mol_type = other DNA
atgtttggcgcagagcagttgctgatggaccattgccgtgacgaagcaacgtttgaaaaactggtcaccatggtc

SEQ ID NO: 666695 - DNA, 75 bp, synthetic construct
  source 1..75: mol_type = other DNA
cgttgagtttgccaacggtaagcaaacttgcaacgagcgtaatgacttccgtgagctggcgatctttaaaagcgg

SEQ ID NO: 666696 - DNA, 75 bp, synthetic construct
  source 1..75: mol_type = other DNA
ctgaattatttgtgtgccgggtatcagcgttatttccgccatctaccgccatatcttaaagcaatggctgatttg

SEQ ID NO: 666697 - DNA, 75 bp, synthetic construct
  source 1..75: mol_type = other DNA
tcagggacgaaactggaaaatttattttttgcaatacgctgttttatgagtcatttcttacacaagatcaaagtg

SEQ ID NO: 666698 - DNA, 75 bp, synthetic construct
  source 1..75: mol_type = other DNA
ggaagttttttgctgctggcggcaacgctggtagtcatggcctgtttgccttccggcagttcattaacgctgctg

SEQ ID NO: 666699 - DNA, 75 bp, synthetic construct
  source 1..75: mol_type = other DNA
atatgcttcagcagacgattgcagaaatgattgattccccgcaacagcaggcatttggtgaagataaattcaagc

SEQ ID NO: 666700 - DNA, 75 bp, synthetic construct
  source 1..75: mol_type = other DNA
atggctgatttgctggcgcacggtcgcccggccagcgacattatgcaggcgcatttgatggtggtgaataagtaa

SEQ ID NO: 666701 - DNA, 75 bp, synthetic construct
  source 1..75: mol_type = other DNA
caacgtgttaaaagcgtgctggggaggttgcccgaaacaccgctttatgctcgatgccagcggcaaacccgggct

SEQ ID NO: 666702 - DNA, 75 bp, synthetic construct
  source 1..75: mol_type = other DNA
taacgtgatgcgcaacgacaagcgcgagccgggcaaacttagcgaactgaagtttggtctggagtgcggcggttc

SEQ ID NO: 666703 - DNA, 75 bp, synthetic construct
  source 1..75: mol_type = other DNA
tttatggctctggtcggggcattgttaggcagcattgcctggtccccccgccctcgtcccgcacgtagcagacgc

SEQ ID NO: 666704 - DNA, 75 bp, synthetic construct
  source 1..75: mol_type = other DNA
ggatggggtagaggaaaacatccgtttcgcccgtcagattgacgacgcgaagaaagcggcaagcgagccgtatct

SEQ ID NO: 666705 - DNA, 75 bp, synthetic construct
  source 1..75: mol_type = other DNA
ggttgaagcacacatcggcgctcacgcgccgtttaccgtgccggatgcgggtctggaaatgctgcgcgaggcagt

SEQ ID NO: 666706 - DNA, 75 bp, synthetic construct
  source 1..75: mol_type = other DNA
tgccgatcgtacgcgctgcgaaatcatcggtaacggcggtccattacatgcggaaaatgcgctggagttgttcct

SEQ ID NO: 666707 - DNA, 75 bp, synthetic construct
  source 1..75: mol_type = other DNA
gaactgcgtaaagtcggtgcggaagtcgaagaggggcacgattttattcgcattacgccaccggaaaaactgaaa

SEQ ID NO: 666708 - DNA, 75 bp, synthetic construct
  source 1..75: mol_type = other DNA
cgcgttacatttgggtgatgagcaggatcccggatgcccccgtgtcgggatttgaaagtgatttaggctctaccg

SEQ ID NO: 666709 - DNA, 75 bp, synthetic construct
  source 1..75: mol_type = other DNA
atgttgattctgaagaatgtcaccgcagtgcagttacacccggcgaaagtgcaggaaggcgttgatatcgctatc

SEQ ID NO: 666710 - DNA, 75 bp, synthetic construct
  source 1..75: mol_type = other DNA
attttatgatgctgctcatgttcgtcataaagacagttataatcaaaaaacgattgtcagtgatgatatcagaaa

SEQ ID NO: 666711 - DNA, 75 bp, synthetic construct
  source 1..75: mol_type = other DNA
gcaaaaatgttaaacatatctatctcaacatccaaaaaacacgcatctataatatgtgattacttctccgtttct

SEQ ID NO: 666712 - DNA, 75 bp, synthetic construct
  source 1..75: mol_type = other DNA
taaagccgatttaaccatttgcgattacaactcgccgacgccgctgctggcagacaatatcgccggacatatcgc

SEQ ID NO: 666713 - DNA, 75 bp, synthetic construct
  source 1..75: mol_type = other DNA
cggatgtacatcggttatcgatcaccatgcctctccagcgtatatcggcgggtcgctctccacattgcgcgacgc

SEQ ID NO: 666714 - DNA, 75 bp, synthetic construct
  source 1..75: mol_type = other DNA
atgttgattctgaagaatgtcactgcagtgcagttacacccggcgaaagtgcaggaaggcgttgatatcgccatc

SEQ ID NO: 666715 - DNA, 75 bp, synthetic construct
  source 1..75: mol_type = other DNA
atgtatagcgtgttattacccgaaggtgaagaaaaggccggttcgcggcgggtgggtgaactggatgaggagatg

SEQ ID NO: 666716 - DNA, 75 bp, synthetic construct
  source 1..75: mol_type = other DNA
cagtgatgacggcattgttgcgcgcattcctgacaccgatggtaaattgcccgatgccgcgatttttttgtttga

SEQ ID NO: 666717 - DNA, 75 bp, synthetic construct
  source 1..75: mol_type = other DNA
aactcgccgcagtcaccgggctcgtcgtgggcgtcctgtctatgcgcaacccgtctcgccgcgggtatcttacaa

SEQ ID NO: 666718 - DNA, 75 bp, synthetic construct
  source 1..75: mol_type = other DNA
gcctggaactttgagccagatggcggttactggctgaaccggtatatcgctcgttatggcatccgcaaattccct

SEQ ID NO: 666719 - DNA, 75 bp, synthetic construct
  source 1..75: mol_type = other DNA
ccggcactcagggttaaacagcataaagctgttcttcttgatgagctgaaaagtgcccgggagcaacaaaaaagg

SEQ ID NO: 666720 - DNA, 75 bp, synthetic construct
  source 1..75: mol_type = other DNA
ctggcgtggtgaaggtaacggacgtccggctgaattaggcgagatgatcggcgattttcttcatttactggcgga

SEQ ID NO: 666721 - DNA, 75 bp, synthetic construct
  source 1..75: mol_type = other DNA
gttcttttccgggactattcccccgtggctggcagaagaaaatacgatcgccaatattcaggggttgattgacga

SEQ ID NO: 666722 - DNA, 75 bp, synthetic construct
  source 1..75: mol_type = other DNA
tatcttacaacacaccaaatctggctggacgctggtcgttattgcaggtggagccactaaacgataccgaaagga

SEQ ID NO: 666723 - DNA, 75 bp, synthetic construct
  source 1..75: mol_type = other DNA
ttacccgcctcactctgggaaagccagatcctgcctgcccgcgtacgcgactattcgtcagaaatgctcgatgaa

SEQ ID NO: 666724 - DNA, 75 bp, synthetic construct
  source 1..75: mol_type = other DNA
gtgatgacggcattgttgctcgtattcctgacaccgatggcaaactacctgacgccgctattttcctgtttgaat

SEQ ID NO: 666725 - DNA, 75 bp, synthetic construct
  source 1..75: mol_type = other DNA
gatgaatctgcaacaagacgtctgggtgagcgacgaagttttccgtcgtctgcgcttacgctcgctgcaggctgc

SEQ ID NO: 666726 - DNA, 75 bp, synthetic construct
  source 1..75: mol_type = other DNA
tgtggagtgtatgtttgctggcaaactggagaatctgactccgccgcataatcctctcgacgtgttggcgcagca

SEQ ID NO: 666727 - DNA, 75 bp, synthetic construct
  source 1..75: mol_type = other DNA
atgaggcatgaaaagaatgagagggctttcttcgaaagactgggtacgatcagtgaccgatatgaggcgagtcct

SEQ ID NO: 666728 - DNA, 75 bp, synthetic construct
  source 1..75: mol_type = other DNA
atttttacacccgcccacaccgtcatatctttaccgaaatggcgcgtttgcaggaaagcggtagtcctatcgatc

SEQ ID NO: 666729 - DNA, 75 bp, synthetic construct
  source 1..75: mol_type = other DNA
aacgtgccggtggtggcgctgtcccagttgaaccgttctctggaacaacgtgccgacaaacgcccggtcaactcc

SEQ ID NO: 666730 - DNA, 75 bp, synthetic construct
  source 1..75: mol_type = other DNA
atttctacacccgtccgcaccgtcatatctttaccgaaatggcgcgtttgcaggaaagcggtagcccaattgacc

SEQ ID NO: 666731 - DNA, 75 bp, synthetic construct
  source 1..75: mol_type = other DNA
tggcgcacatctgatctcaccagaaaagtataaagataattttgggaaagtgcggattgataatgtatcgatcgg

SEQ ID NO: 666732 - DNA, 75 bp, synthetic construct
  source 1..75: mol_type = other DNA
ccggtaaagatattctgagtaacttcttttccgggattatgctctatttcgaccgtcctttcagtattggcgact

SEQ ID NO: 666733 - DNA, 75 bp, synthetic construct
  source 1..75: mol_type = other DNA
catgtcgcgcattatcaaaatcaccattattgtggtgcttgttctgctttatggcgaacatttcggcatgagcct

SEQ ID NO: 666734 - DNA, 75 bp, synthetic construct
  source 1..75: mol_type = other DNA
atgccattcatgaatatcaaaacgggtgatctggtcgtgctcccggaataccgtaaagaccctggtctggttgtg

SEQ ID NO: 666735 - DNA, 75 bp, synthetic construct
  source 1..75: mol_type = other DNA
ttcttcgataagattgaacttaaggcacgcaatgttcgcgttaagcctttcctggcttatgttgaagaccactgg

SEQ ID NO: 666736 - DNA, 75 bp, synthetic construct
  source 1..75: mol_type = other DNA
ctcaaccggccgtcagtaaaatcattaacgatattgaagattattttggtgtggaattagtggtgcggaaaatac

SEQ ID NO: 666737 - DNA, 75 bp, synthetic construct
  source 1..75: mol_type = other DNA
ggtggttttgcttatctggcagagctgtcaaaaaatacgccaagtgcggcgaacatcagtgcttatgctgacatc

SEQ ID NO: 666738 - DNA, 75 bp, synthetic construct
  source 1..75: mol_type = other DNA
tgtcttgtcagtgccgctgcaggggcgaatacctgctatacccgttctccattggtcttttcgccgcgctggccc

SEQ ID NO: 666739 - DNA, 75 bp, synthetic construct
  source 1..75: mol_type = other DNA
ctgaataagacatataacgatcttgagcgtccgatcctggttaaatatctggacggaacaattatagagccgcgc

SEQ ID NO: 666740 - DNA, 75 bp, synthetic construct
  source 1..75: mol_type = other DNA
ggcgtagatggcgtgatgcgggtgatcgaacagcttgccggagtcggtttacccgcctcactctgggaaagctag

SEQ ID NO: 666741 - DNA, 75 bp, synthetic construct
  source 1..75: mol_type = other DNA
caggtaactgaatcttctgacattatctttattatggtgccagatacgccgcaggttgaagaagtattgtttggt

SEQ ID NO: 666742 - DNA, 75 bp, synthetic construct
  source 1..75: mol_type = other DNA
taaaaatatcaccctcgtgggcggtaacggcgacggtcaaacctgcaaagtggcaaatcagattattgtggcgct

SEQ ID NO: 666743 - DNA, 75 bp, synthetic construct
  source 1..75: mol_type = other DNA
aaagcctggttagagcgtaaacagagagagaacgaagaaagaaaactccttagtgagttgaaatggcttagagag

SEQ ID NO: 666744 - DNA, 75 bp, synthetic construct
  source 1..75: mol_type = other DNA
cgtgcagcgttttcgtgaaggttttacccgcttgcctgcggcacaatcatttgctgcgctgttgggaatggaaga

SEQ ID NO: 666745 - DNA, 75 bp, synthetic construct
  source 1..75: mol_type = other DNA
tggcggtagatcaggaaggtggacgcgtgcagcgttttcgtgaaggttttacccgcttgccagcggcgcaatcat

SEQ ID NO: 666746 - DNA, 75 bp, synthetic construct
  source 1..75: mol_type = other DNA
gaagccggacagcgacatagacttgctcgtgaccgtcagcgccgcacctaacgattcgctccggcaggcgctaat

SEQ ID NO: 666747 - DNA, 75 bp, synthetic construct
  source 1..75: mol_type = other DNA
tgaataccgtcggcgctatgagatgctcgacgctattcagccacaaatggccacgatgtttcgcggttaatccgc

SEQ ID NO: 666748 - DNA, 75 bp, synthetic construct
  source 1..75: mol_type = other DNA
tgttaacgcgccagccgcgtctgcctgttcgtctgcaccgcccttaccttgctgcgaatcttaatcgcaagcaat

SEQ ID NO: 666749 - DNA, 75 bp, synthetic construct
  source 1..75: mol_type = other DNA
cgacaacacagcaaatcgaaagcttctcgattcaaagcgggtgtcgtcattagaagctgagaacattgaattgaa

SEQ ID NO: 666750 - DNA, 75 bp, synthetic construct
  source 1..75: mol_type = other DNA
gaaagcctgccacggtctgtttccaaaacgtctggtgatggaagcggtctgtctctttgcccaacgcttacaggt

SEQ ID NO: 666751 - DNA, 75 bp, synthetic construct
  source 1..75: mol_type = other DNA
cagttcacgcttgagctgaccatgatgatctcaatggataaagaaggtgacagcacaatcctgttccgcaacagc

SEQ ID NO: 666752 - DNA, 75 bp, synthetic construct
  source 1..75: mol_type = other DNA
acagatagcacgaaaagagattgccgaaatcgccagtaaaaaacgggctgaataccgtcggcgctatgagatgct

SEQ ID NO: 666753 - DNA, 75 bp, synthetic construct
  source 1..75: mol_type = other DNA
aaacgaccgggaaacacttcccaggacacggtgcagtaacggcagactcacacaaagagacgccgtgcgacccac

SEQ ID NO: 666754 - DNA, 75 bp, synthetic construct
  source 1..75: mol_type = other DNA
ctctgaaactgtccggaaaaatccacaaacagcgtgaaagtattgcccgaagtcgtggcgacccccctcccaaaa

SEQ ID NO: 666755 - DNA, 75 bp, synthetic construct
  source 1..75: mol_type = other DNA
cactgaaactgtccggaaaaatccacaaacagcatgaaagtattgcccgaagtcgtggcgaccccccccccaaaa

SEQ ID NO: 666756 - DNA, 75 bp, synthetic construct
  source 1..75: mol_type = other DNA
cttttcgtgggtggacagcagggacagtgaacagtgtgactggttatggaacgccatgcaggtccggtgtgtggg

SEQ ID NO: 666757 - DNA, 75 bp, synthetic construct
  source 1..75: mol_type = other DNA
ccgggctcatgctctggtcacggctgaacaactggctcatgagtttagtctcggtattgccattgtcgaagagca

SEQ ID NO: 666758 - DNA, 75 bp, synthetic construct
  source 1..75: mol_type = other DNA
cgctgaaactgtccggaaaaatccacaaacagcttgaaagtattgcccgaagtcgtggcgacccccctcccaaaa

SEQ ID NO: 666759 - DNA, 75 bp, synthetic construct
  source 1..75: mol_type = other DNA
ccctgaaactgtccggaaaaatccacaaacagcctgaaagtattgcccgaagtcgtggcgaccccccgcccaaaa

SEQ ID NO: 666760 - DNA, 75 bp, synthetic construct
  source 1..75: mol_type = other DNA
cggagcggcattgatgaccattgaatctgcgcccgaatcccggcgcggttttttaggttcgctcccacaaacggc

SEQ ID NO: 666761 - DNA, 75 bp, synthetic construct
  source 1..75: mol_type = other DNA
tgcctcggcgatcggtattttcagttgtccgttggtcgggtggttatcagaccgtataggtcaaaaatgtctgta

SEQ ID NO: 666762 - DNA, 75 bp, synthetic construct
  source 1..75: mol_type = other DNA
ttcgcgtttcctttcttcttattactggatagcaaaagtacgctcatcatctggtgcagtatgatcctcggctac

SEQ ID NO: 666763 - DNA, 75 bp, synthetic construct
  source 1..75: mol_type = other DNA
ccaaaaagcaacaactcccgttcactcccggtggcactcactgcccggaacctgatgtcacccttcgggacttaa

SEQ ID NO: 666764 - DNA, 75 bp, synthetic construct
  source 1..75: mol_type = other DNA
tgccggtgcttatcagtggaagcctaaaaaagcggcaaatatagttcaggacgcgcatgatccgtctgtcctgca

SEQ ID NO: 666765 - DNA, 75 bp, synthetic construct
  source 1..75: mol_type = other DNA
ataatactctcgtacattgtatcgattatctttcagcaaaagtttcaacgcagagaaaagaaacagcagtaatgt

SEQ ID NO: 666766 - DNA, 75 bp, synthetic construct
  source 1..75: mol_type = other DNA
aatctgctgcccgcgcacgaatttccgaccgataaagcggcaattgaactgttccgcagccagtggcgcgatacc

SEQ ID NO: 666767 - DNA, 75 bp, synthetic construct
  source 1..75: mol_type = other DNA
ggtggcattactggcgagtatctgatgctcacctatgccaacgacgccaaactgtatgttccggtgtcgtcactg

SEQ ID NO: 666768 - DNA, 75 bp, synthetic construct
  source 1..75: mol_type = other DNA
ctaacgagaatctgacaaccgttatgcctgaacaatatcgttatacgctgcccgtcaaagcgggtgagcagcgtc

SEQ ID NO: 666769 - DNA, 75 bp, synthetic construct
  source 1..75: mol_type = other DNA
agcaagcgcagaagctggggatcaggaagctggaagggaacgagaaaggcggtgtgatcgaatttgctgagaaga

SEQ ID NO: 666770 - DNA, 75 bp, synthetic construct
  source 1..75: mol_type = other DNA
aagcgccgctggatgcgctgcgtaagttcctcgagactttcgacggtccggtggtgttctcggtagaaagtgaag

SEQ ID NO: 666771 - DNA, 75 bp, synthetic construct
  source 1..75: mol_type = other DNA
acgggtgatgaatgatttccatcatcagcgttttaacgtgctggtttgtaccacaattatcgaaaccgggatcga

SEQ ID NO: 666772 - DNA, 75 bp, synthetic construct
  source 1..75: mol_type = other DNA
atgttgaaaccccgaaacaggccgctgtgctgggcgcaggcattatgggtggcggcatcgcttaccagtctgcgt

SEQ ID NO: 666773 - DNA, 75 bp, synthetic construct
  source 1..75: mol_type = other DNA
tttgatgccaaccgctttggtcagaagaacggcctcggtttctggcgttataaagaagacagcaaaggcaagccg

SEQ ID NO: 666774 - DNA, 75 bp, synthetic construct
  source 1..75: mol_type = other DNA
taaagaagacagcaaaggtaagccgaagaaagaagaagacgccgctgttgacgacctgctggcagaagtgagcca

SEQ ID NO: 666775 - DNA, 75 bp, synthetic construct
  source 1..75: mol_type = other DNA
atggcgcacagtaccgaaatggcgcgggcgcaggatcgtattaatgaaatcaaccagcgtgttatggctggtagt

SEQ ID NO: 666776 - DNA, 75 bp, synthetic construct
  source 1..75: mol_type = other DNA
cacgcccaggcagtgatggcagcaggtttcccgcagcggatgcagaaagattatcgcgatgccatcgacgcactg

SEQ ID NO: 666777 - DNA, 75 bp, synthetic construct
  source 1..75: mol_type = other DNA
gaaaagctccgacgaaaccatcgcgaaagtcgtcgcctgggcgagcaagatgggtaaaacgccgattgtggttaa

SEQ ID NO: 666778 - DNA, 75 bp, synthetic construct
  source 1..75: mol_type = other DNA
agccgctggcaatggatcgtctggtgtgcggcgatgttggctttggtaaaacagaagtggcgatgcgcgccgctt

SEQ ID NO: 666779 - DNA, 75 bp, synthetic construct
  source 1..75: mol_type = other DNA
atacactgatccgtaacctcgcggaactgcatattggccagccggtggtgcatctggagcacggtgtcgggcgct

SEQ ID NO: 666780 - DNA, 75 bp, synthetic construct
  source 1..75: mol_type = other DNA
aacgtttccaggctgacacgctggcgcgttttgagaatcgcggcgtcgatccgatgcgcccactgttgccaccac

SEQ ID NO: 666781 - DNA, 75 bp, synthetic construct
  source 1..75: mol_type = other DNA
agcaagcgcagaaactggggatcaggaagctggaaggtaatgagaaaggcggcgtgatcgaatttgccgagaaga

SEQ ID NO: 666782 - DNA, 75 bp, synthetic construct
  source 1..75: mol_type = other DNA
actgttctcagagctgaaaaactggccgcgtgtacagctaaaaaatgaacatttaccgacaaaagcagcgaatgc

SEQ ID NO: 666783 - DNA, 75 bp, synthetic construct
  source 1..75: mol_type = other DNA
atttaccgacaaaagcagcgaataccaatttaagttttcagaagctgccagatctggccgttcaggcacaacaaa

SEQ ID NO: 666784 - DNA, 75 bp, synthetic construct
  source 1..75: mol_type = other DNA
atgattggcgctgccgaacatggttttgtcgatacggtgcgtaatctggcgctgatttgcgaaagcgatctgctc

SEQ ID NO: 666785 - DNA, 75 bp, synthetic construct
  source 1..75: mol_type = other DNA
caatttaggtttccagaaactgccagacctggccgttcaggcacaacaaaaagcgccgctggatgcgctacgtaa

SEQ ID NO: 666786 - DNA, 75 bp, synthetic construct
  source 1..75: mol_type = other DNA
gctggatctcttcccgatggggagtgagctgccttatcgtcttgatttctttgatgatgaaatcgacagcctgcg

SEQ ID NO: 666787 - DNA, 75 bp, synthetic construct
  source 1..75: mol_type = other DNA
ccctgccaatacgctgttggtgaatactggcgatctggaaaacagtgccgaacgtttccaggctgacacgctggc

SEQ ID NO: 666788 - DNA, 75 bp, synthetic construct
  source 1..75: mol_type = other DNA
agcgtttccaggccgatacgctgacgcgttttgaaaatcgcggcgtcgatccaatgcggccgctattgccgccac

SEQ ID NO: 666789 - DNA, 75 bp, synthetic construct
  source 1..75: mol_type = other DNA
tttgatgacgaaattgacagcctgcgggtgtttgacgtcgacagccagcgtacgctggaagaagtcgaagccatc

SEQ ID NO: 666790 - DNA, 75 bp, synthetic construct
  source 1..75: mol_type = other DNA
agccagttcactgaccagatggtgatgaatctggcagattgggaaactctcccctacgacagtttttcgcctcat

SEQ ID NO: 666791 - DNA, 75 bp, synthetic construct
  source 1..75: mol_type = other DNA
aagattgaagccaccatgagcttcaccatcgctaaagggatggtcgcacaaacagcggggaaacattatccggcc

SEQ ID NO: 666792 - DNA, 75 bp, synthetic construct
  source 1..75: mol_type = other DNA
cgtgatgatgattttgagcgtaacgaagcagccgctaacggtgaagcagatccaacaacgactgggggaaacgca

SEQ ID NO: 666793 - DNA, 75 bp, synthetic construct
  source 1..75: mol_type = other DNA
cgtgatgatgatcctgagcgtagcgaaacaaccgctaacggtgaagcagatccaacaacgactgggagaaacgca

SEQ ID NO: 666794 - DNA, 75 bp, synthetic construct
  source 1..75: mol_type = other DNA
aacagcagcagccgcagcccgttcacgggctgaccagtagcgatgaacatccgcaggcgtgctgcgaactgtgcc

SEQ ID NO: 666795 - DNA, 75 bp, synthetic construct
  source 1..75: mol_type = other DNA
gttacaggcacttcttgatacagtctccgcaggcgacactaccaatctgtatattgaggtgaaggataattacgg

SEQ ID NO: 666796 - DNA, 75 bp, synthetic construct
  source 1..75: mol_type = other DNA
tattgcgcccgatgccagcaacgcgcaggtcacgctgaacatccctgctcaacaggtggtgacgaataacagcga

SEQ ID NO: 666797 - DNA, 75 bp, synthetic construct
  source 1..75: mol_type = other DNA
gccggtacccacaaacgtggataccggcaggtaaagggttacagtgccggaggtccggctgtgggagtttctgaa

SEQ ID NO: 666798 - DNA, 75 bp, synthetic construct
  source 1..75: mol_type = other DNA
cgtggtcaggccgtcccacaggagttactgaacaacgcaacagaagtcgctctctggctgaagctgaacgacaac

SEQ ID NO: 666799 - DNA, 75 bp, synthetic construct
  source 1..75: mol_type = other DNA
ttgagttaagtaagatggtcatttctgggatcatggcgcaaacatttgttcgttacattccaaacagtagggtag

SEQ ID NO: 666800 - DNA, 75 bp, synthetic construct
  source 1..75: mol_type = other DNA
gatcgtcttgtacaaacgaacgtagccagtaatgagaaaaaaaatgaaggtatcgctgcgagtcaatttgacaca

SEQ ID NO: 666801 - DNA, 75 bp, synthetic construct
  source 1..75: mol_type = other DNA
gttattcgcggactttgttcagacgagtcaaagattgcggcatggactcgtgtttggcgttgccagtggaaggtg

SEQ ID NO: 666802 - DNA, 75 bp, synthetic construct
  source 1..75: mol_type = other DNA
gttatctcatctgtcaaagacgtttgcatgagtaatatctctttcaggataatccccgaaattaatgaaaaaata

SEQ ID NO: 666803 - DNA, 75 bp, synthetic construct
  source 1..75: mol_type = other DNA
ctctcagtccgtcaacaacttactgaagatatacaatccgcactgaaacgttacacccagccaagtaacgccccg

SEQ ID NO: 666804 - DNA, 75 bp, synthetic construct
  source 1..75: mol_type = other DNA
tgatacagtctccgcaggcgagacaaccagtctgtatattgaggtgaaggataattacggcaacggtgtccccca

SEQ ID NO: 666805 - DNA, 75 bp, synthetic construct
  source 1..75: mol_type = other DNA
cgctgatttatctcgtggcgtcggtgttcttccggctgatacgtaaagcctgtcgtcagcgtcttgaggggcggg

SEQ ID NO: 666806 - DNA, 75 bp, synthetic construct
  source 1..75: mol_type = other DNA
ggcgtcactgtttttccggctgatacgcacggcctgccatcagcgttttgaggggcggcaaccatgtcaaggctg

SEQ ID NO: 666807 - DNA, 75 bp, synthetic construct
  source 1..75: mol_type = other DNA
ggccgtgaagattgtcacgtcgctgtttttgcagccggtgccgtggcgcagacgggcggcggctctggtggtgat

SEQ ID NO: 666808 - DNA, 75 bp, synthetic construct
  source 1..75: mol_type = other DNA
tcaacggctatgcgctgggcggtggctgcgaatgcgtgctggcgaccgattatcgtctggcgacgccggatctgc

SEQ ID NO: 666809 - DNA, 75 bp, synthetic construct
  source 1..75: mol_type = other DNA
catcggcgtgctggaacagcaatcagatctaaaagggctgctgctgcgttcgaacaaagcagcctttatcgtcgg

SEQ ID NO: 666810 - DNA, 75 bp, synthetic construct
  source 1..75: mol_type = other DNA
gtcacgtcgctgtttttgcagccggtgccgtggtgcagacgggcggtgggtctggtggtgatggtggtgacgttt

SEQ ID NO: 666811 - DNA, 75 bp, synthetic construct
  source 1..75: mol_type = other DNA
aggacgttgcggcaaactttacccttgaaaataacggtattgccatcactcaggccaatggggaagcgcatgtca

SEQ ID NO: 666812 - DNA, 75 bp, synthetic construct
  source 1..75: mol_type = other DNA
tattggtcatctagtcccgcaaactcaaacgaacaatacgtagtttccctggcaacaggtgatcaaagcgtattt

SEQ ID NO: 666813 - DNA, 75 bp, synthetic construct
  source 1..75: mol_type = other DNA
cgtcgatagcgcaacgctaactgcaacggttaaagatcagttcgacaatgaggtgaataatcttccggtaacatt

SEQ ID NO: 666814 - DNA, 75 bp, synthetic construct
  source 1..75: mol_type = other DNA
gggtggatttttaccgcgctgatttatctcgtggcggcgctgttattccggctgatacgtacggcctgtcgtcag

SEQ ID NO: 666815 - DNA, 75 bp, synthetic construct
  source 1..75: mol_type = other DNA
tggcgcgtggatgggcctcttctcaggcttcaggcgcaatgacagactggttaagccgcttcggtaccgcaagaa

SEQ ID NO: 666816 - DNA, 75 bp, synthetic construct
  source 1..75: mol_type = other DNA
tgctgaacgtgtcgctggcgctgatgccggcactgtccctgatttacccgcagagcgtggccgtcaattttgtcg

SEQ ID NO: 666817 - DNA, 75 bp, synthetic construct
  source 1..75: mol_type = other DNA
cctcccataatcgtatgcaaccatgagcatagatttttagtcgctgaacaattaaggatggaatctattaatgtt

SEQ ID NO: 666818 - DNA, 75 bp, synthetic construct
  source 1..75: mol_type = other DNA
agttatatacatgccagcgatcgactagttacatccgttggattaaatgatgttataattgttgaaacaaaagat

SEQ ID NO: 666819 - DNA, 75 bp, synthetic construct
  source 1..75: mol_type = other DNA
gtggaacaggcagtagactttggccattatcacgtagcctttaccccaagcaatttttgcccttggtaaatgaat

SEQ ID NO: 666820 - DNA, 75 bp, synthetic construct
  source 1..75: mol_type = other DNA
ggcgctgaaacagttaggaattccatttgcgcgcgcgaaagtgggtgaccgctacgtactggaaaaaatgcagga

SEQ ID NO: 666821 - DNA, 75 bp, synthetic construct
  source 1..75: mol_type = other DNA
gttaattcgcgtgatggtagaaggtgaagacgaagcgcaggtgactgaatttgcacaccgcatcgccgatgcagt

SEQ ID NO: 666822 - DNA, 75 bp, synthetic construct
  source 1..75: mol_type = other DNA
gatcatcgaccgccaactcggccgcgaggttatgggcatcgtgcagggcgggtcggtgtcgtggcagttagggcg

SEQ ID NO: 666823 - DNA, 75 bp, synthetic construct
  source 1..75: mol_type = other DNA
aattttgaaaccgcaaagcagtatttagacacaggaaaatattcttggaatagtgggatgtttttgtttaaggca

SEQ ID NO: 666824 - DNA, 75 bp, synthetic construct
  source 1..75: mol_type = other DNA
tttattaacgccaccggcaatctgtcagtcagagcctgcattgtttccaccaacggtgcattgcgacactgcttt

SEQ ID NO: 666825 - DNA, 75 bp, synthetic construct
  source 1..75: mol_type = other DNA
acctttctttcagcgactcagacaacgtctgtgttatccggtgagtcgtgttcatacacaacatccctggtcttc

SEQ ID NO: 666826 - DNA, 75 bp, synthetic construct
  source 1..75: mol_type = other DNA
ataccatagaaaactcagaaatgttgccattagaaataattgaaattcaaaccggtcaattattaactgaagatg

SEQ ID NO: 666827 - DNA, 75 bp, synthetic construct
  source 1..75: mol_type = other DNA
atttatatacctcccggtactatgcataccatagaaaactcagaaatgttgccattagaaataattgaaattcaa

SEQ ID NO: 666828 - DNA, 75 bp, synthetic construct
  source 1..75: mol_type = other DNA
tataataattttattaaagctgaagataaactagttgctttggttggcgttaatgatttagtcttggtacatacg

SEQ ID NO: 666829 - DNA, 75 bp, synthetic construct
  source 1..75: mol_type = other DNA
aactccggtcatgtgattctgctggataaaaccaccaccggtgacggcatcgttgccggtttgcaggtactggcg

SEQ ID NO: 666830 - DNA, 75 bp, synthetic construct
  source 1..75: mol_type = other DNA
acgggtaatcgccgcagcaaaatacacacaccggctcaggctcaagaagcaattgcccgctggactgccacttgt

SEQ ID NO: 666831 - DNA, 75 bp, synthetic construct
  source 1..75: mol_type = other DNA
acgggtaatcgccgcagtaaaatacacacaccgactcaggctcaagaagcaatttcccgctggactgccacttgt

SEQ ID NO: 666832 - DNA, 75 bp, synthetic construct
  source 1..75: mol_type = other DNA
acgggtaatcgccgcagaaaaatacacacaccgtctcaggctcaagaagcaatttcccgctggactgccacttgt

SEQ ID NO: 666833 - DNA, 75 bp, synthetic construct
  source 1..75: mol_type = other DNA
taacaggatgcacctatgtcacgccaagcggcattgggtttactcatgaatttgccgcgtatgacgaccgtttca

SEQ ID NO: 666834 - DNA, 75 bp, synthetic construct
  source 1..75: mol_type = other DNA
acgggtaatcgccgcaggaaaatacacacaccggctcaggctcaagaagcaattccccgctggactgccacttgt

SEQ ID NO: 666835 - DNA, 75 bp, synthetic construct
  source 1..75: mol_type = other DNA
acgggtaatcgccgcaggaaaatacacacaccgcctcaggctcaagaagcaattgcccgctggactgccacttgt

SEQ ID NO: 666836 - DNA, 75 bp, synthetic construct
  source 1..75: mol_type = other DNA
atgggacactgtcactttatggcatggcacacactccgggacgcactgaaaatgacgggcagatcgcgttcacag

SEQ ID NO: 666837 - DNA, 75 bp, synthetic construct
  source 1..75: mol_type = other DNA
ttgtcagttaccgtaccagccaggacggacgacgggagtttgaaaccagtgaactgatccgggcatacggcgaat

SEQ ID NO: 666838 - DNA, 75 bp, synthetic construct
  source 1..75: mol_type = other DNA
ggctgccggtctttccgcgctcttcactggcccgatgccaacaccggccgtggcttatctgacgcgtaccttccg

SEQ ID NO: 666839 - DNA, 75 bp, synthetic construct
  source 1..75: mol_type = other DNA
cgcaggaaaatacacacaccgtctcaggctcaagaagcaattacccgctggtctgccacttgttgcgatccgcca

SEQ ID NO: 666840 - DNA, 75 bp, synthetic construct
  source 1..75: mol_type = other DNA
cgcagcaaaatacacacaccgtctcaggctcaagaagcaattacccgctgggctgccacttgttgcgatccgtca

SEQ ID NO: 666841 - DNA, 75 bp, synthetic construct
  source 1..75: mol_type = other DNA
atgacaaataaacacccatcattgttttctccttttatgctgacagaaaaaataaagctacgtaatcgtatcgtt

SEQ ID NO: 666842 - DNA, 75 bp, synthetic construct
  source 1..75: mol_type = other DNA
caggggtagaacgtcaggtacgtaatctgctgtggaaagggaaatcgcaggcagagttttatcgcggcatggagt

SEQ ID NO: 666843 - DNA, 75 bp, synthetic construct
  source 1..75: mol_type = other DNA
gtgatgctgtttggtcactgggataacgaatgtgaaattcccgatccgtatcgtaaaagccgtgatgcgtttgac

SEQ ID NO: 666844 - DNA, 75 bp, synthetic construct
  source 1..75: mol_type = other DNA
acagaaataacgttaatgttacgggcgtgcttactcccatatttttcctggacaggtttacggcggagtcgggat

SEQ ID NO: 666845 - DNA, 75 bp, synthetic construct
  source 1..75: mol_type = other DNA
tgtgccgaataacctgatttcggcaattgtcgatgctaaccgcacgcgtaaagattttattgccgatgccatttt

SEQ ID NO: 666846 - DNA, 75 bp, synthetic construct
  source 1..75: mol_type = other DNA
caatacatccagtgtagaatcagtaattaaagacgtagttgagataaatccttatgcggttatggtcatcaaatc

SEQ ID NO: 666847 - DNA, 75 bp, synthetic construct
  source 1..75: mol_type = other DNA
gattattgtctgttttgttgttctcctgcttatgccttttccgggcgtccccctggcggggcgggctgtcgtgaa

SEQ ID NO: 666848 - DNA, 75 bp, synthetic construct
  source 1..75: mol_type = other DNA
tatccggcgtttctgttttttggtgtccggggaggagcaaagcgtcgtcgtagtcatcatcgtggtgcatccggt

SEQ ID NO: 666849 - DNA, 75 bp, synthetic construct
  source 1..75: mol_type = other DNA
tcaatttccgcgctacgacagataagtatgacgcgtataaaaatgccgattacgttattattgccacgcctaccg

SEQ ID NO: 666850 - DNA, 75 bp, synthetic construct
  source 1..75: mol_type = other DNA
agcagaagcgataaaacttttcgctaatacctatctggcgatgcgcgtagcgtactttaatgaactggatagcta

SEQ ID NO: 666851 - DNA, 75 bp, synthetic construct
  source 1..75: mol_type = other DNA
tcggcgtgaaagatcgtagtggcctgccgcaggcggcactgaactacatcaagcgtattgaagagctgaccggtg

SEQ ID NO: 666852 - DNA, 75 bp, synthetic construct
  source 1..75: mol_type = other DNA
ggctgttgccgacatcctgacttctatggtggttgacgtttctgacctgctcgaccaggcgcgtcagcgtggcga

SEQ ID NO: 666853 - DNA, 75 bp, synthetic construct
  source 1..75: mol_type = other DNA
cagccatcatcgtggtgcatccggtggcagcggctggcggctggctccacgtaataactttatggtggaaactct

SEQ ID NO: 666854 - DNA, 75 bp, synthetic construct
  source 1..75: mol_type = other DNA
tgctaattgatctgtttatgaacgcttcattgaccactcaaatactcgcgtcaatatttttgttactcttctacc

SEQ ID NO: 666855 - DNA, 75 bp, synthetic construct
  source 1..75: mol_type = other DNA
tgaagagatggtccgggcgctcccaaagcacgcccaaagcgcagtagcggcccaggtcaaagaggagcacaaaac

SEQ ID NO: 666856 - DNA, 75 bp, synthetic construct
  source 1..75: mol_type = other DNA
tcgggtaaatcaagcctgtgtaatgccattttcaaaggagaagaatgcccggtcagtgatgtgggagcctgtacc

SEQ ID NO: 666857 - DNA, 75 bp, synthetic construct
  source 1..75: mol_type = other DNA
gttgttgacttgctgatcgatcagattgaattctgtgatgtgctggtccttaataaagttgaccttatcagtgaa

SEQ ID NO: 666858 - DNA, 75 bp, synthetic construct
  source 1..75: mol_type = other DNA
tggaccggcgatattctgattggctgtgacggcgtgaagtcagtggtgcgccagagcttattgggcgatgcgccg

SEQ ID NO: 666859 - DNA, 75 bp, synthetic construct
  source 1..75: mol_type = other DNA
aagcagcgtatgtaatgcgctgtttaaaggggaggtttgtgcagttagcgacgttgaggcatgtactcgcgaagt

SEQ ID NO: 666860 - DNA, 75 bp, synthetic construct
  source 1..75: mol_type = other DNA
tgcacagcgcatcaacatcgaaaagaaagaagcctacattactgaacgatttggttttacgcactatccggtgtg

SEQ ID NO: 666861 - DNA, 75 bp, synthetic construct
  source 1..75: mol_type = other DNA
cagaaaaagcggctgctgaaaaggcagcagctgataagaaagcagcggcagaaaaagccgccgcagacaaaaaag

SEQ ID NO: 666862 - DNA, 75 bp, synthetic construct
  source 1..75: mol_type = other DNA
aacgcgggtgacattaggacgctgcccgcaaggtctctttactgattgccgcactggctgggaaatagaccccgt

SEQ ID NO: 666863 - DNA, 75 bp, synthetic construct
  source 1..75: mol_type = other DNA
aaaattacttcgtcacaagcggctcaacagtctctggaagccggactgtcactggttgccttaggccggacgatt

SEQ ID NO: 666864 - DNA, 75 bp, synthetic construct
  source 1..75: mol_type = other DNA
tatatggcgcagggtgcctgtatggcgctggaagatgcagtaacgctgggtaaggcgctggcgcagtgtgagggt

SEQ ID NO: 666865 - DNA, 75 bp, synthetic construct
  source 1..75: mol_type = other DNA
cgcgccagatgctggataaaccgacttcatggcgacgctggtcaactgccgaccgtgaaccagtcgcgaaatggg

SEQ ID NO: 666866 - DNA, 75 bp, synthetic construct
  source 1..75: mol_type = other DNA
ttggctgtgacggcgtgaagtcagtggtgcgccagagcttattgggcgatgcgccgcgtgtcaccggacatgttg

SEQ ID NO: 666867 - DNA, 75 bp, synthetic construct
  source 1..75: mol_type = other DNA
ccccgttcgtgagcgtctgctgctgtccgaagcatgtccgctgatccttgattatcatgttgcgctggataacgc

SEQ ID NO: 666868 - DNA, 75 bp, synthetic construct
  source 1..75: mol_type = other DNA
atgcatgaactaaccaaaattacaggacataaagatccaagaatgctgatgagatactatcaccccaaagctgag

SEQ ID NO: 666869 - DNA, 75 bp, synthetic construct
  source 1..75: mol_type = other DNA
tcaatgtttcgcggaaagaatggggcatggagagcctgctgaaccctgtagaagtcatccgtaaaccccagccga

SEQ ID NO: 666870 - DNA, 75 bp, synthetic construct
  source 1..75: mol_type = other DNA
cgttcgtcgtgcggtacagctgaactctctgtctggcttctgcctgactaaactggacgttctggatggcctgaa

SEQ ID NO: 666871 - DNA, 75 bp, synthetic construct
  source 1..75: mol_type = other DNA
accggttccggcttgggcccgcgttatgttgattacgttctgggtatcctcaaagcttactccactcgtgtaggt

SEQ ID NO: 666872 - DNA, 75 bp, synthetic construct
  source 1..75: mol_type = other DNA
accagaaagttctggatgatacgatggcagttgccgacatcctgacttctatggtggttgacgtttctgacctgc

SEQ ID NO: 666873 - DNA, 75 bp, synthetic construct
  source 1..75: mol_type = other DNA
ccgtttcacgcaagaaaaacatcagcaaacgcactccattgttgccaccaaaggcggcaggcattgcgatggcgc

SEQ ID NO: 666874 - DNA, 75 bp, synthetic construct
  source 1..75: mol_type = other DNA
ggctcccgtttcacgcaagaaaaacatcagcaaacccactccacttttcaaaacttgttgccaccaaaggcggca

SEQ ID NO: 666875 - DNA, 75 bp, synthetic construct
  source 1..75: mol_type = other DNA
cgcccctggtgggcagtcttggggaagacggtaatgccggcatcaccggccctcacctttggtgcgtgttgcgaa

SEQ ID NO: 666876 - DNA, 75 bp, synthetic construct
  source 1..75: mol_type = other DNA
tgcatgtggatttacaacctattgctgaagaattgcatggcgactatatcaatgacaaaagctttaaacgccatt

SEQ ID NO: 666877 - DNA, 75 bp, synthetic construct
  source 1..75: mol_type = other DNA
agctggcctgggtgccatttcttggcctggcgtgctgggcgctggatatgccgtttatgaagcgttattcccgcg

SEQ ID NO: 666878 - DNA, 75 bp, synthetic construct
  source 1..75: mol_type = other DNA
atggtagtgtccgctattgccagtacacctcacattttggtcactattttttgttccgtcccgatcatcattgcc

SEQ ID NO: 666879 - DNA, 75 bp, synthetic construct
  source 1..75: mol_type = other DNA
gctggctggataccgttgccgttcgtcgtgcggtacagttgaactccctgtctggcttctgcctgactaaactgg

SEQ ID NO: 666880 - DNA, 75 bp, synthetic construct
  source 1..75: mol_type = other DNA
attgaatatagtggcggaatttacgatattgataatttaaggagggcacacctcatttgcatgatgaaatttatt

SEQ ID NO: 666881 - DNA, 75 bp, synthetic construct
  source 1..75: mol_type = other DNA
ggcggcagcgtatacgatattgataatttacgaattgttacccccagactacacgatgagattcactacaggaga

SEQ ID NO: 666882 - DNA, 75 bp, synthetic construct
  source 1..75: mol_type = other DNA
tttcagtattactggctgcattcagttttgtaagtacaatggggcttgcgaacgcagcagcacccattaaaaatg

SEQ ID NO: 666883 - DNA, 75 bp, synthetic construct
  source 1..75: mol_type = other DNA
tggacagtgaaaaaatacattgatgatgtattcaccgaaggtcacgggactctgtatgccagcgatggtcgtacc

SEQ ID NO: 666884 - DNA, 75 bp, synthetic construct
  source 1..75: mol_type = other DNA
tgaatggggcgcttccgttaaagagtacggttgtcgaagcttatcttattaatggtgtcactggcgttgctgaaa

SEQ ID NO: 666885 - DNA, 75 bp, synthetic construct
  source 1..75: mol_type = other DNA
gatgataaggatatgggggcatatatccggtttaaattaaccattcgaaatgtcgcgacaggccaggatgattat

SEQ ID NO: 666886 - DNA, 75 bp, synthetic construct
  source 1..75: mol_type = other DNA
catcgctgtcagtcttctcgctggaagttctcagtacacgctcgtaagcggccctcacggcccgctaacgcggag

SEQ ID NO: 666887 - DNA, 75 bp, synthetic construct
  source 1..75: mol_type = other DNA
atgcacctcccaccgcaagcggcgggccccgaccggagccattttagttacaacactcaaatacaaccgccaaga

SEQ ID NO: 666888 - DNA, 75 bp, synthetic construct
  source 1..75: mol_type = other DNA
caagcagggtaacgaattcggcgcaactacaggtcgtcgtcgtcgtaccggctggctggacactgttgccgttcg

SEQ ID NO: 666889 - DNA, 75 bp, synthetic construct
  source 1..75: mol_type = other DNA
gctgatggaacgcccgattgtggtcgccaatggcaaagcgcggattggtcgtccaccggagcaggtgctggaaat

SEQ ID NO: 666890 - DNA, 75 bp, synthetic construct
  source 1..75: mol_type = other DNA
tcagaaaagaattatcacaacagcaggttacatattccagaaaagttatattttacaatatgccccatatgctct

SEQ ID NO: 666891 - DNA, 75 bp, synthetic construct
  source 1..75: mol_type = other DNA
ggttacatattccagaaaagttatattttacaatatgccccatatgctctcaggaaaaaatgtgttctggatgaa

SEQ ID NO: 666892 - DNA, 75 bp, synthetic construct
  source 1..75: mol_type = other DNA
agccgggaacggtggaatccgaaaacgcccctggtgggcagtcttggggaagacggtaatgccggcatcaccggc

SEQ ID NO: 666893 - DNA, 75 bp, synthetic construct
  source 1..75: mol_type = other DNA
acaagaggaaaacttctgattcaggagaaaggatgttaagaaatcttgttgacgctaccagacactacccggatg

SEQ ID NO: 666894 - DNA, 75 bp, synthetic construct
  source 1..75: mol_type = other DNA
gagctgcaggacttcactaacgactgctattcggtcgcgttgtatctgtggaagcaacaggatcagggccagaca

SEQ ID NO: 666895 - DNA, 75 bp, synthetic construct
  source 1..75: mol_type = other DNA
gcacttcaggattttaccgatgattgttattcacgcgcgctgtatgactggaaagcgaaagatcagggaaaaaca

SEQ ID NO: 666896 - DNA, 75 bp, synthetic construct
  source 1..75: mol_type = other DNA
cgtgatctcgccaccttcaaacaacaagccgacgtcattatctccaaccgtatggcagaagagcttaaggatgtg

SEQ ID NO: 666897 - DNA, 75 bp, synthetic construct
  source 1..75: mol_type = other DNA
tacgttattattgccacacctaccgattatgatccgaaaacaaattattttaatacctcaagcgtggaagcggtc

SEQ ID NO: 666898 - DNA, 75 bp, synthetic construct
  source 1..75: mol_type = other DNA
aacggttcccgttggttttaccgcagcgatgcataagaaatatcgcactgaaaatattatattctcacccgaatt

SEQ ID NO: 666899 - DNA, 75 bp, synthetic construct
  source 1..75: mol_type = other DNA
gtacatatcaggcagcgcagaaagcaggtaatttagcaggggcaggcggtaatagtttctctaagggactggata

SEQ ID NO: 666900 - DNA, 75 bp, synthetic construct
  source 1..75: mol_type = other DNA
atttgataaaacccgggcgaaaacgtgcggaacctggacgccaaaagcacctgatgaaagtggttacaacaacat

SEQ ID NO: 666901 - DNA, 75 bp, synthetic construct
  source 1..75: mol_type = other DNA
gttgattcgccaaatggatcacgaaccattgagttgattttaaatcatatcgcaggaagagtaccggtaatcgcc

SEQ ID NO: 666902 - DNA, 75 bp, synthetic construct
  source 1..75: mol_type = other DNA
ccggctaacctgacgatttctcaggggggagaagtgtatcggggatatggtggtaatgcagacatgaccacgatg

SEQ ID NO: 666903 - DNA, 75 bp, synthetic construct
  source 1..75: mol_type = other DNA
gataatgaatctggtgatggggacgatgtttctcgtcttgccggcagtgtggctgggagcgttgtcctgggctgg

SEQ ID NO: 666904 - DNA, 75 bp, synthetic construct
  source 1..75: mol_type = other DNA
atgatatcctgctgtgttcctctggtacaggtgacgctggatacgctgtcattcgataaatccagggcacagacc

SEQ ID NO: 666905 - DNA, 75 bp, synthetic construct
  source 1..75: mol_type = other DNA
cgtactttaacgagctggatagctatgcagaaagtttaggtctgaatacgcgtcaaattatcgacggcgtttgtc

SEQ ID NO: 666906 - DNA, 75 bp, synthetic construct
  source 1..75: mol_type = other DNA
caacgggcctatagggacagtacgtctcacatttaatggtcaatggtctcgatttgataattatggtggccctga

SEQ ID NO: 666907 - DNA, 75 bp, synthetic construct
  source 1..75: mol_type = other DNA
gaaaatagcgatatgaaaggtatagccgaaattatcataggtaaacagcgcaacgggcctatagggacagtacgt

SEQ ID NO: 666908 - DNA, 75 bp, synthetic construct
  source 1..75: mol_type = other DNA
gaaatcgttagtgagcaggattttagttctcgaccgcatcgctcaattttctctgcaatgagatcgctcgttgcg

SEQ ID NO: 666909 - DNA, 75 bp, synthetic construct
  source 1..75: mol_type = other DNA
cgagttctaccccagtcggctttcccgatgcggattcgctggctgccttgcgcggctggtacgcgggactcagct

SEQ ID NO: 666910 - DNA, 75 bp, synthetic construct
  source 1..75: mol_type = other DNA
ggggctgttgttgctttaaatgacctttctgtcggtcgatacgatgtgacggttgatgttggaccaagctacaca

SEQ ID NO: 666911 - DNA, 75 bp, synthetic construct
  source 1..75: mol_type = other DNA
ctgaagctggatatgcgcaggatggcaggggcagcaatgaattgctggatatggccgagcgccgcgtttttgaaa

SEQ ID NO: 666912 - DNA, 75 bp, synthetic construct
  source 1..75: mol_type = other DNA
tgtatattaaaaatttcattaattatcaatatgttaatgtgcgctggtcattattaatcaaaataaaaccattat

SEQ ID NO: 666913 - DNA, 75 bp, synthetic construct
  source 1..75: mol_type = other DNA
gttcagataacttccgcgcgtcttccattcaggggattatgaaacgtatcaaggcgaaaggtgttgaagtaatca

SEQ ID NO: 666914 - DNA, 75 bp, synthetic construct
  source 1..75: mol_type = other DNA
caatacatctagcgtagaatctgtcattaaagatgttacagaaatacacccttgtgcagtaatggttatcaagtc

SEQ ID NO: 666915 - DNA, 75 bp, synthetic construct
  source 1..75: mol_type = other DNA
ggatgtctttattcctgaataccccagaatcttccccaatactgacgaatcgggacagatgtatcatctggaggc

SEQ ID NO: 666916 - DNA, 75 bp, synthetic construct
  source 1..75: mol_type = other DNA
gactctggcgggaggagtaagacgaattcatcataactccctcaacttcactccagccccggcgatggaaatagc

SEQ ID NO: 666917 - DNA, 75 bp, synthetic construct
  source 1..75: mol_type = other DNA
attaggggattcatcagtacttatcatgaattccagactctggcaggaggagtaagacgaattcatcataactcc

SEQ ID NO: 666918 - DNA, 75 bp, synthetic construct
  source 1..75: mol_type = other DNA
gtggcggtgctggtgcctaccacccttctcgcgcagcagcattacgacaacttccgcgaccgtttcgccaactgg

SEQ ID NO: 666919 - DNA, 75 bp, synthetic construct
  source 1..75: mol_type = other DNA
ttgaatatcaggcttttaattgtccatattgtggagtttatgcgcgacaattctggcgcactctgtatggcaacg

SEQ ID NO: 666920 - DNA, 75 bp, synthetic construct
  source 1..75: mol_type = other DNA
agtttgaaaaacaagccttcaactgcccgtactgtaatgctttcgctcaacaacgatggcaacagctttattatt

SEQ ID NO: 666921 - DNA, 75 bp, synthetic construct
  source 1..75: mol_type = other DNA
tgcgccgtcgtacccgtgtgggaatgggcacctgccagggcgaactctgcgcctgccgcgccgccggactgctgc

SEQ ID NO: 666922 - DNA, 75 bp, synthetic construct
  source 1..75: mol_type = other DNA
gctctttcagattatcgtttttgccttttctttcgtggtcgccatttccttctcaagattgcgagcacatattca

SEQ ID NO: 666923 - DNA, 75 bp, synthetic construct
  source 1..75: mol_type = other DNA
atcattgttgatgaccgcatcaccagacctaaagaaatcgaagcgatgttccagagtatgcctgaaggtccacgg

SEQ ID NO: 666924 - DNA, 75 bp, synthetic construct
  source 1..75: mol_type = other DNA
aatcaatctgtctcctaaaggtgccgctgcgctactccgcttgtgcttacagaaactcatgcgccatctcggtga

SEQ ID NO: 666925 - DNA, 75 bp, synthetic construct
  source 1..75: mol_type = other DNA
caaaagtgggaacaattatacccttactatgaagaaatggctttcccggtgcatgtgtcacaatgtgagcgctgt

SEQ ID NO: 666926 - DNA, 75 bp, synthetic construct
  source 1..75: mol_type = other DNA
cctgtctcctaaaggggccgcagcactcctccgcctgtgtctccagaagttaatggttcacttgggtgagccggg

SEQ ID NO: 666927 - DNA, 75 bp, synthetic construct
  source 1..75: mol_type = other DNA
ccaaagtatgcctgaaggcccacgccaaggtattgagaatcaggacagacaggctagagagcagcaacaggccgc

SEQ ID NO: 666928 - DNA, 75 bp, synthetic construct
  source 1..75: mol_type = other DNA
gtctgatggcggaatgggcaactgatgctgtatgccgcaaactcggcaacgcacgtccctgcatcaccgcagata

SEQ ID NO: 666929 - DNA, 75 bp, synthetic construct
  source 1..75: mol_type = other DNA
gcgtgaaggggaaaaactggcccccgtgatggcgaaaacgcgcattttgcgggcctattctggcgtgcgcccact

SEQ ID NO: 666930 - DNA, 75 bp, synthetic construct
  source 1..75: mol_type = other DNA
tacgccgtcgtacccgtgtggggatgggtacctgccagggcgaactctgcgcctgccgcgctgccggactgctgc

SEQ ID NO: 666931 - DNA, 75 bp, synthetic construct
  source 1..75: mol_type = other DNA
taccgaaagagtttgctgtcgtatttaatgcttatactgaaataccctggctctttcagattatagtttttgcct

SEQ ID NO: 666932 - DNA, 75 bp, synthetic construct
  source 1..75: mol_type = other DNA
ctggctgttgcagtcggggcgaatgaggttgaaggcgttacaggtgtagtaacaaattgcggcggtattacatat

SEQ ID NO: 666933 - DNA, 75 bp, synthetic construct
  source 1..75: mol_type = other DNA
tgccagtacgctggcggcgttaaatccgaatcggttatgggtgcggaaattgttgaaaggtaaagcggttaaggc

SEQ ID NO: 666934 - DNA, 75 bp, synthetic construct
  source 1..75: mol_type = other DNA
actggcgcaacagcaaggtttacagattcattatcaatatcagttgcaggatttatcccgtaaggatgactgttg

SEQ ID NO: 666935 - DNA, 75 bp, synthetic construct
  source 1..75: mol_type = other DNA
acgctggcggcgttaaacccgaatcggttatgggtgcggaagttgttgaagggtaaagcggttaaggcggggtaa

SEQ ID NO: 666936 - DNA, 75 bp, synthetic construct
  source 1..75: mol_type = other DNA
acgcaacgctcgtggaatatgcctcgctggcagaacagaaagaagacgcagtcagcgcgccgatttatgccgatc

SEQ ID NO: 666937 - DNA, 75 bp, synthetic construct
  source 1..75: mol_type = other DNA
acgcaacgctcgcggaatatgcctcgctggcggaacagaaagatgaggcggtaagcgcgccggtttatgacgatc

SEQ ID NO: 666938 - DNA, 75 bp, synthetic construct
  source 1..75: mol_type = other DNA
ttgccagttgcattgcatttaattatcttaatagccatatcgatagttctttaacctatcataaacctgctgcgg

SEQ ID NO: 666939 - DNA, 75 bp, synthetic construct
  source 1..75: mol_type = other DNA
aatcatccctttgcagagaaaataaaggttaaaaactttcatgcttggtgtttccaacaaattaaagaaaacaag

SEQ ID NO: 666940 - DNA, 75 bp, synthetic construct
  source 1..75: mol_type = other DNA
gagtgatagcgcaaactgttcttattatctcgtcaccgaaaaatactcccattttatgaagttattctggaacag

SEQ ID NO: 666941 - DNA, 75 bp, synthetic construct
  source 1..75: mol_type = other DNA
taaatttgatcatgactggtgcggcgtcacgcagttaggctgggatgaaaaaagccagcataaaatcgcacagat

SEQ ID NO: 666942 - DNA, 75 bp, synthetic construct
  source 1..75: mol_type = other DNA
aactgaccagccaactggacgattcgctaaatcaaaaagtagatgcctggtttctggacggctttgcgccagcga

SEQ ID NO: 666943 - DNA, 75 bp, synthetic construct
  source 1..75: mol_type = other DNA
tgaaccagcaaacaggaaaacccgctgccgacgtgacagtcactcttgaaaagaaagcggacaacggctggttac

SEQ ID NO: 666944 - DNA, 75 bp, synthetic construct
  source 1..75: mol_type = other DNA
tggatcaacagtaccaattattcggtagaagagattgctaccaagatcctcgatattatggggttgaatcgaaga

SEQ ID NO: 666945 - DNA, 75 bp, synthetic construct
  source 1..75: mol_type = other DNA
tgccgctgatgcaggaaaacgaaaagttgtatcaattgccggggagtgaactgctgttagtgctgagcgggccgg

SEQ ID NO: 666946 - DNA, 75 bp, synthetic construct
  source 1..75: mol_type = other DNA
gatgcgatgattgtgcggtcaattaccgacctggcgaaagcgaagtcgttaagcgtggtagcggagtttgtcgaa

SEQ ID NO: 666947 - DNA, 75 bp, synthetic construct
  source 1..75: mol_type = other DNA
agtgccggagcaagaggcgggcaagagtttttgctgcctgcgcattgataatcttgagtttatgagtcgtcatta

SEQ ID NO: 666948 - DNA, 75 bp, synthetic construct
  source 1..75: mol_type = other DNA
tcgcgtgatggcgcaaggtgctccggaagcagtgatgaaaccagagcttctaaagacggtgttcagcgtagaagc

SEQ ID NO: 666949 - DNA, 75 bp, synthetic construct
  source 1..75: mol_type = other DNA
agtccgggtctgaagaatacgcaaaaagaactgtctgacctcagtgagtgtcggaccacacactacagcgattaa

SEQ ID NO: 666950 - DNA, 75 bp, synthetic construct
  source 1..75: mol_type = other DNA
gtttacgctcaccgtggtacttattcagctatcccgttttatttcgccacttgccgttatccattccagttatat

SEQ ID NO: 666951 - DNA, 75 bp, synthetic construct
  source 1..75: mol_type = other DNA
gtcgtatcaagctgactgcctttaccataagtgccgcgtttgccggttttgccggaacgctgtttgctgcgcgcc

SEQ ID NO: 666952 - DNA, 75 bp, synthetic construct
  source 1..75: mol_type = other DNA
agcgttgcgtgaagatgaaatcgcctgtcgttcgctgggcttaagtccgcgtcgtatcaagctgaccgcctttac

SEQ ID NO: 666953 - DNA, 75 bp, synthetic construct
  source 1..75: mol_type = other DNA
gaccatgatctacattatcctcggtctcgggctgaacgtggttgttggtctttctggtctgctggtgctggggta

SEQ ID NO: 666954 - DNA, 75 bp, synthetic construct
  source 1..75: mol_type = other DNA
cggcagccaggcgtttgcagtcctgtgtgcctgtgcaatattacgctggcaattggggacgcgttggcgttatgg

SEQ ID NO: 666955 - DNA, 75 bp, synthetic construct
  source 1..75: mol_type = other DNA
ataaaaaggagttattaccagaagctttacttgaggacttttcattggcaagcccttataatgtttttgaaacat

SEQ ID NO: 666956 - DNA, 75 bp, synthetic construct
  source 1..75: mol_type = other DNA
atgaagagaccactcatcataatgtggcgtcctcagttgtcactgcaacccatgataacttagatggaagagagt

SEQ ID NO: 666957 - DNA, 75 bp, synthetic construct
  source 1..75: mol_type = other DNA
ccgagaagtattgctcagtcgcgttgatgctggaaaaagcggtaaatattactcactcgtatgaagtggttgccg

SEQ ID NO: 666958 - DNA, 75 bp, synthetic construct
  source 1..75: mol_type = other DNA
ttaccggtgagatcacctatggtctggaacgtctggcgatgtacattcagggcgtagacagcgtttatgacctgg

SEQ ID NO: 666959 - DNA, 75 bp, synthetic construct
  source 1..75: mol_type = other DNA
accattgttcaaccattggacatggaagtcggtgcgggaacctctcacccaatgacctgtctgcgcgcgctgggg

SEQ ID NO: 666960 - DNA, 75 bp, synthetic construct
  source 1..75: mol_type = other DNA
tggcgctggaaaatccgctgccgctgccagcctacgagcgtattctgaaagccgcccacagcttcaacctgctgg

SEQ ID NO: 666961 - DNA, 75 bp, synthetic construct
  source 1..75: mol_type = other DNA
gtatcccccttctcaaactgcccgcctccgcgctggaagccctcagcaatgaaatccttggccccgtcgatgata

SEQ ID NO: 666962 - DNA, 75 bp, synthetic construct
  source 1..75: mol_type = other DNA
atcgccgttgatgcggcccatttcgagtcgacctccggcgcaacctctaaccttgtacaaagtagcgacgttttt

SEQ ID NO: 666963 - DNA, 75 bp, synthetic construct
  source 1..75: mol_type = other DNA
acatcaggttggcggtgtatctaaagggctgtttttccctcgtacccggcgtgacttagtcgattcccagtcatt

SEQ ID NO: 666964 - DNA, 75 bp, synthetic construct
  source 1..75: mol_type = other DNA
agattatttagcaattttgaaagattatatcgatcaaagatgcgagaacacctcacttccaccatacaatcacga

SEQ ID NO: 666965 - DNA, 75 bp, synthetic construct
  source 1..75: mol_type = other DNA
agaaatattgttcagtggcgttgatgctggaaaaagcggtgaatattactcactcgtatgaagtggttgccgcgt

SEQ ID NO: 666966 - DNA, 75 bp, synthetic construct
  source 1..75: mol_type = other DNA
gcgcgtgcggttgatctctctgccgagaaatattgttcagtggcgttgatgctggaaaaagcggtgaatattact

SEQ ID NO: 666967 - DNA, 75 bp, synthetic construct
  source 1..75: mol_type = other DNA
cgtttacagcactactatcagttccaggtggtgattaagccatcgccggataacattcaggaactgtatttgggt

SEQ ID NO: 666968 - DNA, 75 bp, synthetic construct
  source 1..75: mol_type = other DNA
gttggtggtctggagtgtaaaccggttaccggcgagatcacctacggtctggaacgtctggctatgtacattcag

SEQ ID NO: 666969 - DNA, 75 bp, synthetic construct
  source 1..75: mol_type = other DNA
aaggaagaaaaggggtatcccccatatatactgatattagccttcacgagttttatgactatttaggagaaattg

SEQ ID NO: 666970 - DNA, 75 bp, synthetic construct
  source 1..75: mol_type = other DNA
gggtttggtgaaatatttacaatactggctctggttgtattgtattttttcctccactatttttttgccagcggt

SEQ ID NO: 666971 - DNA, 75 bp, synthetic construct
  source 1..75: mol_type = other DNA
ggcgtttcactgggctgtatccgggttctccaacgatacggtatggcttatattcagtgcttttatgtttgcact

SEQ ID NO: 666972 - DNA, 75 bp, synthetic construct
  source 1..75: mol_type = other DNA
atcgcaagacggacactgcgccccgtttagcgctgaggcgaccggcacggtatacagcagcggtgcgggagttgt

SEQ ID NO: 666973 - DNA, 75 bp, synthetic construct
  source 1..75: mol_type = other DNA
gggatggcagcatcaagtttagcgttttactacatgccgcaatactttggtcacaactactggatggcaatgatt

SEQ ID NO: 666974 - DNA, 75 bp, synthetic construct
  source 1..75: mol_type = other DNA
tttcgcattttcattattagtatgcggaactcaggggatcatgggggttataactccctatgcgacaggcccttc

SEQ ID NO: 666975 - DNA, 75 bp, synthetic construct
  source 1..75: mol_type = other DNA
ctggtcaggttgatgggggcaagaacgctgacgttaggatatgcaatttcatttgcagatttactcttggcgcca

SEQ ID NO: 666976 - DNA, 75 bp, synthetic construct
  source 1..75: mol_type = other DNA
acgcccgcatccgtgcattgctgcgccgccataataatcaaggcgagagcgagctgaatgtaggcaacctgacgc

SEQ ID NO: 666977 - DNA, 75 bp, synthetic construct
  source 1..75: mol_type = other DNA
gaatatcaagttaagtttcgtgaaaaacgtgatgagcaactaattagcagtcagaaaaaagagaaggactatacg

SEQ ID NO: 666978 - DNA, 75 bp, synthetic construct
  source 1..75: mol_type = other DNA
gaatatcaagttaaatttcgtgaaaaacgtgatgagcagctaattagcagtcagaaaaaagagaaggactatacg

SEQ ID NO: 666979 - DNA, 75 bp, synthetic construct
  source 1..75: mol_type = other DNA
ggttttcccggcgctggagccaaaacacaaaggcgcggcgatttcggtttataacctttctgccggtctgtctaa

SEQ ID NO: 666980 - DNA, 75 bp, synthetic construct
  source 1..75: mol_type = other DNA
gcgtattccatgttctgtttctggtctttggattaggacaggcaaactatgggttaatcctgctgttttacggga

SEQ ID NO: 666981 - DNA, 75 bp, synthetic construct
  source 1..75: mol_type = other DNA
atgaaaattctgattgttgaagacgatacgctgttattgcagggattgattctggcggcacaaaccgaaggctac

SEQ ID NO: 666982 - DNA, 75 bp, synthetic construct
  source 1..75: mol_type = other DNA
gataacggaacgcggttattccgtcgctgaagtatctgaccgtctgggcgtctctgcacacagcctctacaagtg

SEQ ID NO: 666983 - DNA, 75 bp, synthetic construct
  source 1..75: mol_type = other DNA
ggcagccctggaactgtgggcggggcttctggtttcgcttgaacgaggggaaaactacaatgttatttcctttat

SEQ ID NO: 666984 - DNA, 75 bp, synthetic construct
  source 1..75: mol_type = other DNA
ggcgtttgaagtctctgatgctggtggcaaggagtcatcccgcgatcgctggctgacccgtgaagagttaatccg

SEQ ID NO: 666985 - DNA, 75 bp, synthetic construct
  source 1..75: mol_type = other DNA
gtacacacctctattcaatgtttagggatgccttaatgccaaaacttacagatattcagatccgtgcctggataa

SEQ ID NO: 666986 - DNA, 75 bp, synthetic construct
  source 1..75: mol_type = other DNA
agcgctggccatgctgggcaacctgatggaaacgttggaacgtggtgaagattacaacgttcaaccgctgcggaa

SEQ ID NO: 666987 - DNA, 75 bp, synthetic construct
  source 1..75: mol_type = other DNA
ggaaaacaacgcacgatgcacatcggctcatattccgacctgtcactaagtaaagcccgtgccaccgtcaaagaa

SEQ ID NO: 666988 - DNA, 75 bp, synthetic construct
  source 1..75: mol_type = other DNA
tgcgctggcacagtgggctgatctgctggtggcactggaaagcgggaaagactacaacgtaacgccattcgataa

SEQ ID NO: 666989 - DNA, 75 bp, synthetic construct
  source 1..75: mol_type = other DNA
accaacgatagcaacagatgtattacgctggacacgccgtatctttgactatgggataaaacgccacgctctgga

SEQ ID NO: 666990 - DNA, 75 bp, synthetic construct
  source 1..75: mol_type = other DNA
tccactaataaagaagagtcagatgctcaggccgagatccgccgtctccagaaagagctgaagcgggttaccgac

SEQ ID NO: 666991 - DNA, 75 bp, synthetic construct
  source 1..75: mol_type = other DNA
gataacagaacgcggttattccgttgccgaagtatccgaccgtctgggcgtttctgcgcacagcctctacaagtg

SEQ ID NO: 666992 - DNA, 75 bp, synthetic construct
  source 1..75: mol_type = other DNA
cgcccgcacctggaatataaagccgagtttacctaccagcgcgtgggcgatctcagcaccgaaatgatcgagcac

SEQ ID NO: 666993 - DNA, 75 bp, synthetic construct
  source 1..75: mol_type = other DNA
ataccggcctggcgctgggcgaagcgttaaaaattgcccttggcgacaaacgcggtatttgccgctttggttttg

SEQ ID NO: 666994 - DNA, 75 bp, synthetic construct
  source 1..75: mol_type = other DNA
atcgcgatggcaccctgatttccgagccaccgagcgactatcaggtagaccgtttcgataaactggccttcgagc

SEQ ID NO: 666995 - DNA, 75 bp, synthetic construct
  source 1..75: mol_type = other DNA
gatggtctggaagcggtgcttgaatcccgatttgggatgaagaacaccaaagccagctataagaccaaggtcaac

SEQ ID NO: 666996 - DNA, 75 bp, synthetic construct
  source 1..75: mol_type = other DNA
gtgttgagtcaaatattgcgcggatcgtcacgtttgatggcgatcgcgaagacgcctttgccggagaagcgatca

SEQ ID NO: 666997 - DNA, 75 bp, synthetic construct
  source 1..75: mol_type = other DNA
ccaaaatatgagcgcattattgccaatgctattggcgttgcgccggaggagatctggcccagccgttacgctcgt

SEQ ID NO: 666998 - DNA, 75 bp, synthetic construct
  source 1..75: mol_type = other DNA
tgaaagtatgccgtggtacagcggtccgacactgctcgaagtgctggaaaccgtggagatccagcgagtggtgga

SEQ ID NO: 666999 - DNA, 75 bp, synthetic construct
  source 1..75: mol_type = other DNA
aataaagtgaacgagcattatcatgtgcctttattacttagccaatatgggtattcaacctatcgtggcagttaa

SEQ ID NO: 667000 - DNA, 75 bp, synthetic construct
  source 1..75: mol_type = other DNA
ggttttaaaggtgatataagcttgctttcggcaccttttgctacaataactgatgtagtaagacgctacattact

SEQ ID NO: 667001 - DNA, 75 bp, synthetic construct
  source 1..75: mol_type = other DNA
aaagtataagtaaccttcagtttctcctcgatactttgaagatgccgttggctgttggtccaatcagtgatgaag

SEQ ID NO: 667002 - DNA, 75 bp, synthetic construct
  source 1..75: mol_type = other DNA
gcgcgtccgggcggtacgctggcgacatttacgtctgccggttttgtccgccgcggtttgcaggaagccggattc

SEQ ID NO: 667003 - DNA, 75 bp, synthetic construct
  source 1..75: mol_type = other DNA
tgagcgacgaaccgattccgatggatagcaatacgctggcggcgttaaatccaaatcggttatgggtgcggaagt

SEQ ID NO: 667004 - DNA, 75 bp, synthetic construct
  source 1..75: mol_type = other DNA
tacattcgatcataactggtgcggtgtaacgcagttgggatgggatgaaaaaagccagcataaaatcgcacagat

SEQ ID NO: 667005 - DNA, 75 bp, synthetic construct
  source 1..75: mol_type = other DNA
tgctgcgccatctcaattcagtgtattcgaactggaattgaatgctctggttcgccgccactttccgcactgggg

SEQ ID NO: 667006 - DNA, 75 bp, synthetic construct
  source 1..75: mol_type = other DNA
accgagcgcctgctcaagcgcgccggcatgcagatcggcgatatcgatctgttcgaggtcaacgaagccttcgct

SEQ ID NO: 667007 - DNA, 75 bp, synthetic construct
  source 1..75: mol_type = other DNA
aagggggcgctgtatgagcaatcttttacaaatgggaacggacttcgagaagaaactgaaagagcgagccgcttc

SEQ ID NO: 667008 - DNA, 75 bp, synthetic construct
  source 1..75: mol_type = other DNA
ccgtagtaacggctgcattttcattaccttctttggtttatgccgcacaacaaaacattcttagcgtgcacattt

SEQ ID NO: 667009 - DNA, 75 bp, synthetic construct
  source 1..75: mol_type = other DNA
ttaataaacgtaagttagcgcttgagttattacgcgattggataaaacaatttaatcctgcaagttataatgatt

SEQ ID NO: 667010 - DNA, 75 bp, synthetic construct
  source 1..75: mol_type = other DNA
atgaaactgagcttgttgattttggtaaagatatcagaatcattttggcttcatcggattttagcaaggaactga

SEQ ID NO: 667011 - DNA, 75 bp, synthetic construct
  source 1..75: mol_type = other DNA
gtaaacatttcgaatctacaccggatacgccggaaatcatcgccaccatccacggtgaaggttatcgcttctgtg

SEQ ID NO: 667012 - DNA, 75 bp, synthetic construct
  source 1..75: mol_type = other DNA
gcaagtatcgcgggaaaatgctgataaagccttcccgtaagaacctgcgaacgtttctggcgaaagtgagggaca

SEQ ID NO: 667013 - DNA, 75 bp, synthetic construct
  source 1..75: mol_type = other DNA
cattaaaagaaaagaaaaagaaaagccattttttaaagaaaacaactctgtttttatgaatgtcgatggttcatc

SEQ ID NO: 667014 - DNA, 75 bp, synthetic construct
  source 1..75: mol_type = other DNA
atgccagacctagaaataatgccattacagagtccagatttttataaaaaaaacaaaagaacaatatacgacggt

SEQ ID NO: 667015 - DNA, 75 bp, synthetic construct
  source 1..75: mol_type = other DNA
tctctccggctttctgttgctggcggttggcatggcggtcttaaccctggcgctggacggcagtaaaggtacagg

SEQ ID NO: 667016 - DNA, 75 bp, synthetic construct
  source 1..75: mol_type = other DNA
tcctgtttttacaaggaatggtcaactcgacgcgtttctcctccatgaacaccctgacgctgaaagatctcccgg

SEQ ID NO: 667017 - DNA, 75 bp, synthetic construct
  source 1..75: mol_type = other DNA
gcaaaaaattcctccagctatagcagccctgcggaaaagcaaatttaaggtactggtagacgaaattacgccaac

SEQ ID NO: 667018 - DNA, 75 bp, synthetic construct
  source 1..75: mol_type = other DNA
tgagctgaagccacatgaccgtaccgtagacgtgacaatccgtcgtattcgtaaacacttcgaatctacgccgga

SEQ ID NO: 667019 - DNA, 75 bp, synthetic construct
  source 1..75: mol_type = other DNA
ttgttcgtccccgaagtacggcaaacaggaacacatcccgattaaccagcctccccggttcttcgacgaatacct

SEQ ID NO: 667020 - DNA, 75 bp, synthetic construct
  source 1..75: mol_type = other DNA
atggtctggcacgaaaaatcatccaatgtctgcggtgaagggctgcaactggcgttaatggcaaatcgtgaattc

SEQ ID NO: 667021 - DNA, 75 bp, synthetic construct
  source 1..75: mol_type = other DNA
acaaggagttgcacgattacctgcacagtatgagcaaaaaagagcgccgggaactggctgcaaggttacgcctgg

SEQ ID NO: 667022 - DNA, 75 bp, synthetic construct
  source 1..75: mol_type = other DNA
aatctgagctgataaacccgcgcaaaggaaaaccgacaagctacatcgcgaaatacattagtaagaacattgacg

SEQ ID NO: 667023 - DNA, 75 bp, synthetic construct
  source 1..75: mol_type = other DNA
ttctggcagatgtcagcgcccagcctacccacatcagcaagccgctgatgcaacgtatcgaatacttcagcagcc

SEQ ID NO: 667024 - DNA, 75 bp, synthetic construct
  source 1..75: mol_type = other DNA
atgatacgcatcgccccactcgatacgcaggatatcgacctgcaaatcaacagcagcgttgagaaacagtttggc

SEQ ID NO: 667025 - DNA, 75 bp, synthetic construct
  source 1..75: mol_type = other DNA
ccgtctcagcgcgtcatgacgcccgtgaacacctcagcattgaggcttaccataagctcaaccgcgccagcgcag

SEQ ID NO: 667026 - DNA, 75 bp, synthetic construct
  source 1..75: mol_type = other DNA
atgaaaactcgcgactcgcaatcaagtgacgtgattatcattggcggtggcgcaacgggagccgggattgcccgc

SEQ ID NO: 667027 - DNA, 75 bp, synthetic construct
  source 1..75: mol_type = other DNA
gttcgtaaagccgttgacgttcaggaggcggcagccgaccagggcgcttgcgccccttggactcgtggcaataac

SEQ ID NO: 667028 - DNA, 75 bp, synthetic construct
  source 1..75: mol_type = other DNA
tggctggtcaggcggcaaggcaacagggcgacaaaaaagcaggtgcgccggtactggataacccgcgccttgatg

SEQ ID NO: 667029 - DNA, 75 bp, synthetic construct
  source 1..75: mol_type = other DNA
tccgttgatgatgtttacgacggatattgctcttaaagttgatcctgaatataagaaaataaccacccgtttcct

SEQ ID NO: 667030 - DNA, 75 bp, synthetic construct
  source 1..75: mol_type = other DNA
agaacggatatcacccgtatgaatgacaaggagttgcacgattacctgcacagtatgagcaaaaaagagcgccgg

SEQ ID NO: 667031 - DNA, 75 bp, synthetic construct
  source 1..75: mol_type = other DNA
tgcgtttgagcaactccgccggaaaagaaaccgccgcaaacccgtgccctatgaactcattccgggttcgctggc

SEQ ID NO: 667032 - DNA, 75 bp, synthetic construct
  source 1..75: mol_type = other DNA
tgctggctggtcaggcggcaaggcaacaggggggcaaaaaagcaagtgcgccggtactggataacccgcgccttg

SEQ ID NO: 667033 - DNA, 75 bp, synthetic construct
  source 1..75: mol_type = other DNA
aaaccatgcaggcaccacgccgatgggttatcgtcgtgatacagtttacgctttcagtcgcatttgccatcagtc

SEQ ID NO: 667034 - DNA, 75 bp, synthetic construct
  source 1..75: mol_type = other DNA
gcaagcgatggatcgcgccaacagttatgtgattggcgatcgcgcgaccgacattcaactagctgaaaacatggg

SEQ ID NO: 667035 - DNA, 75 bp, synthetic construct
  source 1..75: mol_type = other DNA
tgaaaaactacggcggctggggcaatcgcaaagtgattggcttcttcgagcgctacgcccgtacggtgttcgagc

SEQ ID NO: 667036 - DNA, 75 bp, synthetic construct
  source 1..75: mol_type = other DNA
aaagagacgcaaattgacgtccaggtgtggctggatcgcgaaggtggcagcaagattaacaccggcgttggcttc

SEQ ID NO: 667037 - DNA, 75 bp, synthetic construct
  source 1..75: mol_type = other DNA
aactttctctattcaaaaatagcttaaaaaatgaaatgactgaagaagattataaaaatatagataatcttcgcg

SEQ ID NO: 667038 - DNA, 75 bp, synthetic construct
  source 1..75: mol_type = other DNA
gcggtattggcgcaattgcccctggcgcagggagttgcagggtgaagatctccagcaaatcacccgccagcttgc

SEQ ID NO: 667039 - DNA, 75 bp, synthetic construct
  source 1..75: mol_type = other DNA
attacacccttgcccacgatgacggtatttcgttgcgcaatctggaccaggctcaggtgatcctgctcggtgttt

SEQ ID NO: 667040 - DNA, 75 bp, synthetic construct
  source 1..75: mol_type = other DNA
aatgcaattgtcgggcagcgtcgctatacggtgacgctgaacggcgaatcaaaccatgcaggcaccacgccgatg

SEQ ID NO: 667041 - DNA, 75 bp, synthetic construct
  source 1..75: mol_type = other DNA
cggaatggctggaaacccagcaacaattcaaaaaaagaatggccgtcagcgggctggaaacacatttcgacaaag

SEQ ID NO: 667042 - DNA, 75 bp, synthetic construct
  source 1..75: mol_type = other DNA
atttaaaaaaagaatggcagcaagcgggctggaaacacgtttcgatgaagtggggaatttatacggtcgcctgaa

SEQ ID NO: 667043 - DNA, 75 bp, synthetic construct
  source 1..75: mol_type = other DNA
ggcagcggggaaagcggttgattttgtcggtatcaacgtcctgctttccgattacgccgggtcagtgctgccgat

SEQ ID NO: 667044 - DNA, 75 bp, synthetic construct
  source 1..75: mol_type = other DNA
aagttccgccaggtactgattgccgcgatgatcggtggcggctgcgccgggatttatgctggtgttagcggtctg

SEQ ID NO: 667045 - DNA, 75 bp, synthetic construct
  source 1..75: mol_type = other DNA
ggcgctattgatcgccacgccagttggttaattccgatgctgatgggcgctctgcaacccttcctgattattacc

SEQ ID NO: 667046 - DNA, 75 bp, synthetic construct
  source 1..75: mol_type = other DNA
acatgggaaaaggtggcagcggaaaccctgcgtctggatgtaatccctcctgcgtttgagcaactccgttggaaa

SEQ ID NO: 667047 - DNA, 75 bp, synthetic construct
  source 1..75: mol_type = other DNA
gattatcgatattgtgcagtcacacggcgcggactttgccttccccagccagacgctgtatatggataacattac

SEQ ID NO: 667048 - DNA, 75 bp, synthetic construct
  source 1..75: mol_type = other DNA
gcgaaatgctgaaaaatcatcctgccattgaccagcgccaaaccttactggtttatttcaaccagtttgctgatt

SEQ ID NO: 667049 - DNA, 75 bp, synthetic construct
  source 1..75: mol_type = other DNA
ttgtcgaagccgtacgtgagatgctgaaaaatcacccggccatcgaccagcgacaaaccttactggtttatttca

SEQ ID NO: 667050 - DNA, 75 bp, synthetic construct
  source 1..75: mol_type = other DNA
gtctatttcaaccagtttgctgactcgtcattaaatatcatggtttattgctttaccaaaaccacggtatgggcc

SEQ ID NO: 667051 - DNA, 75 bp, synthetic construct
  source 1..75: mol_type = other DNA
gccgtgatatcaccagtgcgcggattatgtcacgtatcatcaaaatctgcataattgtggtgattgttctgcttt

SEQ ID NO: 667052 - DNA, 75 bp, synthetic construct
  source 1..75: mol_type = other DNA
ttatttgaagattatcgatattgtacagtcacacggcgcggactttgccttccccagccagacgctgtatatgga

SEQ ID NO: 667053 - DNA, 75 bp, synthetic construct
  source 1..75: mol_type = other DNA
gatgcaggtattgatgatggcaatggagagcgtgacctcaatgacttctactctgacatccaaaccgacgcttaa

SEQ ID NO: 667054 - DNA, 75 bp, synthetic construct
  source 1..75: mol_type = other DNA
gcgacggtaggcaaaatatttgctgatacggactatcgcaaggctgctactgacaaggtgtcgctggaggccgat

SEQ ID NO: 667055 - DNA, 75 bp, synthetic construct
  source 1..75: mol_type = other DNA
tgttattgcagaagcaataaaagccggaggttctcttgatgattttcttatatctcagggcacatcatcatcttg

SEQ ID NO: 667056 - DNA, 75 bp, synthetic construct
  source 1..75: mol_type = other DNA
gatcgcccctttagtattggcgactggatccgttcaccggacaggaatatcgaaggcacagtagcagaaattggc

SEQ ID NO: 667057 - DNA, 75 bp, synthetic construct
  source 1..75: mol_type = other DNA
gacgttctcgcccgctacaacgtgcgcggcgtacagctgaatgtcgatgacaaaggcgcactggactgcatttta

SEQ ID NO: 667058 - DNA, 75 bp, synthetic construct
  source 1..75: mol_type = other DNA
atgggcgatgtaggttcgctggcgttaggtggtgcgttaggcattatcgccgtactgctacgtcaggaattcctg

SEQ ID NO: 667059 - DNA, 75 bp, synthetic construct
  source 1..75: mol_type = other DNA
atctctcccgtctgaaactcattaaccgctggccgttaatgcgcaacgtacggacagaaaatgtgtccgaacaca

SEQ ID NO: 667060 - DNA, 75 bp, synthetic construct
  source 1..75: mol_type = other DNA
cggcagataacgccagcgtgaagcagagcgggcagctcatcgaacaactgtcgctgggtgtttacgatgcggtgc

SEQ ID NO: 667061 - DNA, 75 bp, synthetic construct
  source 1..75: mol_type = other DNA
cgtcaggcttaccgtgaacttcgcttgctggctggtcaggtggcaaggcaacagggtgacaaaaaagcaggtgcg

SEQ ID NO: 667062 - DNA, 75 bp, synthetic construct
  source 1..75: mol_type = other DNA
gataacgctgaatacgtgaatgcctgggcgtctttgcatcgtgttcagcagttccgcttctttggtattccgggg

SEQ ID NO: 667063 - DNA, 75 bp, synthetic construct
  source 1..75: mol_type = other DNA
atttcgtaaggcgatgcacaaagccgggttgcgttggtatggcgtgcgggtggctgagccgcaccatgacggtac

SEQ ID NO: 667064 - DNA, 75 bp, synthetic construct
  source 1..75: mol_type = other DNA
tcacgctgcaaggctggcagcaggatgagcggttaatgctggtgattgaagacgatggcagcggtttaccgccag

SEQ ID NO: 667065 - DNA, 75 bp, synthetic construct
  source 1..75: mol_type = other DNA
gttttctacactatcacctgtccgtcgcgtttccattccacgctcaataacggcagaccaaacccgacctggaca

SEQ ID NO: 667066 - DNA, 75 bp, synthetic construct
  source 1..75: mol_type = other DNA
atgagcttatcccaccttcgcttgcacgtatgctgtgcgcagactggtggtatcgcaagctgtggcagatgcgct

SEQ ID NO: 667067 - DNA, 75 bp, synthetic construct
  source 1..75: mol_type = other DNA
cgcaaagcgggtgcgccggtactggataatccgcgtctggatgcggtactggcggcggctgatgcgggctgcttt

SEQ ID NO: 667068 - DNA, 75 bp, synthetic construct
  source 1..75: mol_type = other DNA
aacgtatcgctttactggcgatgtaccacgatgcctcagaagtgctcaccggcgatctccctactccggtgaaat

SEQ ID NO: 667069 - DNA, 75 bp, synthetic construct
  source 1..75: mol_type = other DNA
tggagtatcagcctgcacctggttgagcgccctgatatggcggtgctgttatttccgtttggtctgcggctaggg

SEQ ID NO: 667070 - DNA, 75 bp, synthetic construct
  source 1..75: mol_type = other DNA
tctcaaccgatcaactggcgcgggcggcatctggtctggtacttgctgctgtttgttatcagtctctggctccag

SEQ ID NO: 667071 - DNA, 75 bp, synthetic construct
  source 1..75: mol_type = other DNA
acgcggcggcagccttccgtcagggggagggctgcgcatcttttaccagaacgggcggctgcgtgaggatgacaa

SEQ ID NO: 667072 - DNA, 75 bp, synthetic construct
  source 1..75: mol_type = other DNA
catggggtaaaccgacctgtgtcaacaacgtcgaaaccctgtgtaacgttccggcgatccttgctaacggcgtgg

SEQ ID NO: 667073 - DNA, 75 bp, synthetic construct
  source 1..75: mol_type = other DNA
taaagcgccgtttaacccctatgatgcacggtgtgcctgtaaacacattgaagtaaccgaagacttctttgccat

SEQ ID NO: 667074 - DNA, 75 bp, synthetic construct
  source 1..75: mol_type = other DNA
tgcacgatttgttagataacaaccagccgttaccgggcgcttttgctgttgcaccctattatgaaatggcgctgg

SEQ ID NO: 667075 - DNA, 75 bp, synthetic construct
  source 1..75: mol_type = other DNA
cgacggatcacccccaacgcgcgttaattctggcagaactggaaaagctggatgctctttttgcggatgatactc

SEQ ID NO: 667076 - DNA, 75 bp, synthetic construct
  source 1..75: mol_type = other DNA
cattgtactgaagcgtactggcggaaaaatcggctggcaggaaggccgcgacctgtggtggcacgacctggttga

SEQ ID NO: 667077 - DNA, 75 bp, synthetic construct
  source 1..75: mol_type = other DNA
ctgcctggcgctaccgaactgaaagccggttctgcaacgcgtccgttcttcggcgtgcaaccggcgctggtggat

SEQ ID NO: 667078 - DNA, 75 bp, synthetic construct
  source 1..75: mol_type = other DNA
cggcgattcgcgcactgatggcggaaggcgataaagcgattgaaggcaccgatcgttcgtcgctacgcattcttg

SEQ ID NO: 667079 - DNA, 75 bp, synthetic construct
  source 1..75: mol_type = other DNA
tgaccagcgggaagatatctgttctgggtattcccacacgacaggcgctacagaaaaacctggttgcctacgtcc

SEQ ID NO: 667080 - DNA, 75 bp, synthetic construct
  source 1..75: mol_type = other DNA
tgggcgagccaattaacccggaagcgtgggagtggtactggaaaaaaatcggcaacgagaaatgtccggtggtcg

SEQ ID NO: 667081 - DNA, 75 bp, synthetic construct
  source 1..75: mol_type = other DNA
gcccgctgcgcctgcaagcacatcgaggttacagaggatttctttgccattctcggcatcccgctaaaacaggtt

SEQ ID NO: 667082 - DNA, 75 bp, synthetic construct
  source 1..75: mol_type = other DNA
atggtgctgattaccagcagtacggacaatatcaccctgaaaatcgcccctgctgtcgtgctggcaacccgccat

SEQ ID NO: 667083 - DNA, 75 bp, synthetic construct
  source 1..75: mol_type = other DNA
cggggtgtttgtgaagatgaattttcatttggcagcaattatcaccgaataactggcggtgtgctgaagcagttt

SEQ ID NO: 667084 - DNA, 75 bp, synthetic construct
  source 1..75: mol_type = other DNA
tctttatgatgatgaaggcgtactcattgcggtggcgaactgcccggaaacgtacaaaccacagttacaggaagg

SEQ ID NO: 667085 - DNA, 75 bp, synthetic construct
  source 1..75: mol_type = other DNA
gtggcgtggccgtttatggtttcacgcgggacggtggatatcgccaccctgaccatgatctacattatcctcggc

SEQ ID NO: 667086 - DNA, 75 bp, synthetic construct
  source 1..75: mol_type = other DNA
atgaaaccgatgcatattgcaatggcgctgctctctgccgcgatgttctttgtcctggcaggcgtttttatgggc

SEQ ID NO: 667087 - DNA, 75 bp, synthetic construct
  source 1..75: mol_type = other DNA
tgacggatattggtgcggcgaaacttgccagcgccgccgcgctcggtgcgccgctaaaaattacccatatggcgg

SEQ ID NO: 667088 - DNA, 75 bp, synthetic construct
  source 1..75: mol_type = other DNA
tcctgctcacagatatgttgataagggtaaatctggttttcaccagcaacataaggctcaaggttctgacttcag

SEQ ID NO: 667089 - DNA, 75 bp, synthetic construct
  source 1..75: mol_type = other DNA
ctccgatcgtaaagcctacaggcgtcccaaagcagtcaccttgctataacgtttcttcgcgcaagcgccgccggt

SEQ ID NO: 667090 - DNA, 75 bp, synthetic construct
  source 1..75: mol_type = other DNA
ggcttgccaggatgaaagcaaagcgtgacgcagctcgccagcgcaaacaggaatactactccccaacctttgcct

SEQ ID NO: 667091 - DNA, 75 bp, synthetic construct
  source 1..75: mol_type = other DNA
gtgcaggttttcaggctgcgtataacaagaacagacgcgcgcagattttcatcaccggagcaggggaaatgtatc

SEQ ID NO: 667092 - DNA, 75 bp, synthetic construct
  source 1..75: mol_type = other DNA
caagcccccggatggttagagctatcagaagacggttcacactacatcgttgatgaagataaagcgtcactggtg

SEQ ID NO: 667093 - DNA, 75 bp, synthetic construct
  source 1..75: mol_type = other DNA
ttaaacaggaagaaaaagatgaactgatagttcagttatcacgagaaaaggcgagggtaaaatctgtatcaagct

SEQ ID NO: 667094 - DNA, 75 bp, synthetic construct
  source 1..75: mol_type = other DNA
attcggtgattttcggcggcttctcgccggaagccgttgccggacgtattatcgattccaactcacgattggtga

SEQ ID NO: 667095 - DNA, 75 bp, synthetic construct
  source 1..75: mol_type = other DNA
atgagtcatgacgatatgagcaactctagcggctttaacgaggccgccgcatcattttcatggaacggcccgaaa

SEQ ID NO: 667096 - DNA, 75 bp, synthetic construct
  source 1..75: mol_type = other DNA
ttctggcggacgtcagcgcccagcccacccacatcagcaagccgctgatgcaacgtatcgaatacttcagcagcc

SEQ ID NO: 667097 - DNA, 75 bp, synthetic construct
  source 1..75: mol_type = other DNA
aggaacgccgacaagctatatcgcgaaatacatcagtaagaacattgatgggcgtggtctggctggcgaaatcag

SEQ ID NO: 667098 - DNA, 75 bp, synthetic construct
  source 1..75: mol_type = other DNA
gctttcaaacctgatcactctgtatgctgccgataacgagcaggaacagctgcgccgtgaggcgctgagtgatca

SEQ ID NO: 667099 - DNA, 75 bp, synthetic construct
  source 1..75: mol_type = other DNA
aagcagggcggcgtactggttccccgtaaatatcacctcatcagaaccgcttatgaaattaacgaagagccgacc

SEQ ID NO: 667100 - DNA, 75 bp, synthetic construct
  source 1..75: mol_type = other DNA
cttgtctacccttgtcgctgcgcatatgagcatgtgccttgatgtagcttgtggcgatttgtatgtcaccgatga

SEQ ID NO: 667101 - DNA, 75 bp, synthetic construct
  source 1..75: mol_type = other DNA
tggctgagccgcatcatgacggcacagttcactggcacctgttgtgtttcatgcgtaaaaaagaccgccgcgcca

SEQ ID NO: 667102 - DNA, 75 bp, synthetic construct
  source 1..75: mol_type = other DNA
ctctttaatgatgatcctcttgttgaaagaacatacgatagcgttaactcaatagatgatggtgctccatatgga

SEQ ID NO: 667103 - DNA, 75 bp, synthetic construct
  source 1..75: mol_type = other DNA
tggttggtgttgagaaagccgcaagcgccgcaggtttgagcattcatgtaccgtttgcgccgggccgcgttgatg

SEQ ID NO: 667104 - DNA, 75 bp, synthetic construct
  source 1..75: mol_type = other DNA
ggcgtggtctggctggcgagatcagcaaggaaacgggtaaatccctgcgtgataacgctgaatacgttaatgcct

SEQ ID NO: 667105 - DNA, 75 bp, synthetic construct
  source 1..75: mol_type = other DNA
gtgaagtggaaaatggttcgtaaggccgttgacgttcaggaagcggcagccgaccagggcgcttgcgccccttgg

SEQ ID NO: 667106 - DNA, 75 bp, synthetic construct
  source 1..75: mol_type = other DNA
aggaacgccgacaagctacattgcgaaatatatcagtaagaatattgacgggtgtggtctggctggcgagatcag

SEQ ID NO: 667107 - DNA, 75 bp, synthetic construct
  source 1..75: mol_type = other DNA
ggttccccgtaaatatcacctcatcagaaccgcttatgaaatcaacgaagagccgaccgcctatggcgatcacgg

SEQ ID NO: 667108 - DNA, 75 bp, synthetic construct
  source 1..75: mol_type = other DNA
atgaacggcttacttcgtattcgtcagcgttaccagggacttgcccagagcgataaaaagctggcggactatctc

SEQ ID NO: 667109 - DNA, 75 bp, synthetic construct
  source 1..75: mol_type = other DNA
ttaacggatttgctgttcattgcgctgatccagcaggatctggaactggcacctgaacgtattcgtcatagtgag

SEQ ID NO: 667110 - DNA, 75 bp, synthetic construct
  source 1..75: mol_type = other DNA
agcgttatcaggggcttgcccagagtgataagaagctggcggattatctcctgctacagcctgataccgcccgcc

SEQ ID NO: 667111 - DNA, 75 bp, synthetic construct
  source 1..75: mol_type = other DNA
ctttgattatcatccgggcgatatctactggtgcaccgccgatgtgggctgggtgaccggacacagttatttgct

SEQ ID NO: 667112 - DNA, 75 bp, synthetic construct
  source 1..75: mol_type = other DNA
acgctgtttggcgatcacgaacgttttgagcagacctatttctccaccttcaaaaatatgtatttcagcggcgac

SEQ ID NO: 667113 - DNA, 75 bp, synthetic construct
  source 1..75: mol_type = other DNA
atgaagcaaagactccctgcttacctttaccagaataaattatcagatgaacaacgcaatctgaacaatactgct

SEQ ID NO: 667114 - DNA, 75 bp, synthetic construct
  source 1..75: mol_type = other DNA
agtctgagctgattaacccgcgcaaaggaacaccgacaagctacatagcgaaatacatcagtaagaacattgacg

SEQ ID NO: 667115 - DNA, 75 bp, synthetic construct
  source 1..75: mol_type = other DNA
gccatgtctggaacgactggagcatgtacgcgacagtcagctatctgcatcttttcgctttatggcaagccatga

SEQ ID NO: 667116 - DNA, 75 bp, synthetic construct
  source 1..75: mol_type = other DNA
cctgggcaggccaaaggcttattcccgctatttgcgtgagacgattaagccatgtctggaacgactggagcatgt

SEQ ID NO: 667117 - DNA, 75 bp, synthetic construct
  source 1..75: mol_type = other DNA
ctaacggatttgctgtttattgcactgatacaacaagatctcgagttagccccagaacgcattcgccacagcgag

SEQ ID NO: 667118 - DNA, 75 bp, synthetic construct
  source 1..75: mol_type = other DNA
gcttcatcgccggacgatttgttattagccatctcatacacgggcgtgcggcgcgagttaaacctggcagcagat

SEQ ID NO: 667119 - DNA, 75 bp, synthetic construct
  source 1..75: mol_type = other DNA
cacgtttccattccacgctcaataacggcagacccaacccgacatggacaaatgcgacggtaagacaaagcagcg

SEQ ID NO: 667120 - DNA, 75 bp, synthetic construct
  source 1..75: mol_type = other DNA
tcctggtgggcggcgatccacggctacaatcacccacagctcaatgccgcgatgaaatcgcaaattgatgccatg

SEQ ID NO: 667121 - DNA, 75 bp, synthetic construct
  source 1..75: mol_type = other DNA
cgcagcagcaaacgccagcctggcgattctcgaatctggcgactggcagaagcaggtggcagctattgaagtaca

SEQ ID NO: 667122 - DNA, 75 bp, synthetic construct
  source 1..75: mol_type = other DNA
tcagggctggcctgtattctcacaatggcttgatgccgtgatccagcgtgtcgaaatgtacaacgcatcgcttcc

SEQ ID NO: 667123 - DNA, 75 bp, synthetic construct
  source 1..75: mol_type = other DNA
cagcaacaaacctgcagtatcagttgacggcgcaacaggtaaaagcacgaatgccgcagcgccaaccctgacgcc

SEQ ID NO: 667124 - DNA, 75 bp, synthetic construct
  source 1..75: mol_type = other DNA
tgcgttgtgataatcccggctctgtacatccacaacgcagccaggatcgcatagccaccgtctggatcgccccct

SEQ ID NO: 667125 - DNA, 75 bp, synthetic construct
  source 1..75: mol_type = other DNA
gaatggttaaaacgaatccgcaaaatgtgcgatcgtgaaggtatcttgctgattgccgacgagatcgccaccgga

SEQ ID NO: 667126 - DNA, 75 bp, synthetic construct
  source 1..75: mol_type = other DNA
accgtagctattattggataagagaagacggcgattatcacaactggaccggttgtggcaacacgctcaatttga

SEQ ID NO: 667127 - DNA, 75 bp, synthetic construct
  source 1..75: mol_type = other DNA
attttccaccgctgtttgccgagtggaacgatcattttcgcgacgcctctcgccgtttttggctgcactataacc

SEQ ID NO: 667128 - DNA, 75 bp, synthetic construct
  source 1..75: mol_type = other DNA
ccgtacaccggagtttcgtcaggatgcgccgttgtttaccgctatccagaactgcccggtgttatcgcaggttaa

SEQ ID NO: 667129 - DNA, 75 bp, synthetic construct
  source 1..75: mol_type = other DNA
cgcatctgctctacgcgctctggcttccggtgagaaccgcgccggatgcatcggcttcggcgctcaaatacgctg

SEQ ID NO: 667130 - DNA, 75 bp, synthetic construct
  source 1..75: mol_type = other DNA
cgccgtgagaaccgcgcctgatgcttcggttaaggcgctgaaatacgccgccgcgattgaacgtgcgttgtgtga

SEQ ID NO: 667131 - DNA, 75 bp, synthetic construct
  source 1..75: mol_type = other DNA
gtggcgtgaggaagcctataccctcgatgaactggctgattatcttgatttgagcacttcagcgcgccgtagcat

SEQ ID NO: 667132 - DNA, 75 bp, synthetic construct
  source 1..75: mol_type = other DNA
aagcatgtcaggcagtaacactggcaaaaatgcaccgcatggtacagggtatgttcggtataaaaccggccggtg

SEQ ID NO: 667133 - DNA, 75 bp, synthetic construct
  source 1..75: mol_type = other DNA
gattaagcgccgggcattcactggtcattgaagatgatgttgctgaagcactttatcaggagctgaaacagaaaa

SEQ ID NO: 667134 - DNA, 75 bp, synthetic construct
  source 1..75: mol_type = other DNA
acaccacaacacgcaaaccctctgcgggggatgttggtgcatatacgcaggcagaatgtaactcaaggtttatta
